United States Patent Application Publication US 2007/0054278 A1 - sequence listing, part 141

SEQ ID NO: 466877 - DNA, 201 bp, Homo sapiens
agcaagaaggctgatagtcgggaggatcatttgagtccaggagtttgagaccagcctgggcaatgtagtaggactccatctctacaaaaaaaaaaaaatawatgtatatagacatagccgggcatggtggcacatgcctgtggtctcagttgctcgggaggctgaggtaggagaatcacttgagcccgggagggtgaggct

SEQ ID NO: 466878 - DNA, 201 bp, Homo sapiens
acaaagacataaaaagtaaatgcaacagtgtgttacaatggagaaagaatcccgtgtggggtattatgggggcacaaagcagggagggataggttcacctygaggagatagaaaaggcttctcagggaggcaacttgagctgagtctttaaatctgtgtagatatctaccgggttgatgggaatgaaggacagttggggag

SEQ ID NO: 466879 - DNA, 201 bp, Homo sapiens
agagcagggtcagtttctcactatgggtgtgtgtgtgtgtgtgtgttgatctggaaaatacagagaggatcaggcagttagcaataggaacaaagacggaragaagccagaggggccaagatggccatggggaacagaagttacaaagaagtagaacctcatggtagagaaaagacatgctgagcagagggagaagccgtg

SEQ ID NO: 466880 - DNA, 201 bp, Homo sapiens
agccagaggggccaagatggccatggggaacagaagttacaaagaagtagaacctcatggtagagaaaagacatgctgagcagagggagaagccgtggttrtttttttggctgagagcagatgaactcagatggtcagcccattaatcacatctgtgtatattaaaaatcttttagtcatgttaaaatatttgcttctaac

SEQ ID NO: 466881 - DNA, 201 bp, Homo sapiens
ggggccaagatggccatggggaacagaagttacaaagaagtagaacctcatggtagagaaaagacatgctgagcagagggagaagccgtggttattttttyggctgagagcagatgaactcagatggtcagcccattaatcacatctgtgtatattaaaaatcttttagtcatgttaaaatatttgcttctaaccatcaaa

SEQ ID NO: 466882 - DNA, 201 bp, Homo sapiens
cgattattatatgctttggggtggtcttatttggatctgaatctatttggtgatatttgaacttcctgtacctgtatatttatttctttctctaggtttaraaagttttctgctattatttcttggaataactttctacaccttgctatttctcaactccctctcaaattccaatgactcctacatttgctctttggaggc

SEQ ID NO: 466883 - DNA, 201 bp, Homo sapiens
agtatggaatcaggcaattctctggagcagtaaccaaagccagagatacaagcaacgaattgagccatacgggcatcagacttacccagaatgggatcaaytcctccagataccataaaagttgatgtgatattaaactgacaaatagaatcatcaaatataatcctttccgtatatttactgacatttggatgtccccat

SEQ ID NO: 466884 - DNA, 201 bp, Homo sapiens
gcaactgcactccagcctggcgacagagccagactctgtctcaaaaaaaaaaaaaagaaagaaacctgcatatgtatccccaaatctaaaataaaaattgaaaaaaaaaaaaagggctgggtgcagtgggtgcagtagttcactcctgtaatcccagtacttttggaggccaaggcttgtgcatcacctgaggtcaggagt

SEQ ID NO: 466885 - DNA, 201 bp, Homo sapiens
agttgtgtggtgagcagctctggataccctgaccacaaagctttggggacaatttgttcaccagaggatgtgaggaggacggaatactcaaaggcactcasggatggtggagctttggagctgaggcgggcaaggcctctcagatggtcacgctgttctctaccatgctgggtcaaaggtactcacagggcaggtccagga

SEQ ID NO: 466886 - DNA, 201 bp, Homo sapiens
caactgcactccagcctggcgacagagccagactctgtctcaaaaaaaaaaaaaagaaagaaacctgcatatgtatccccaaatctaaaataaaaattgaaaaaaaaaaaaagggctgggtgcagtgggtgcagtagttcactcctgtaatcccagtacttttggaggccaaggcttgtgcatcacctgaggtcaggagtt

SEQ ID NO: 466887 - DNA, 201 bp, Homo sapiens
tgttttgaatacctgggctcaagtgatcctcctgccttgacctcctaaagcactgggattacaggaatgagccaccatgtctgggcccctgtttatttttwtttatttatttatttatttagacagagtcttgctctgttgctcaggctggagtgcaatggtgtgatctcggctcactgcaacctcctcctcctggggtca

SEQ ID NO: 466888 - DNA, 201 bp, Homo sapiens
gtctgccaaggaactttgtgaaggtcttttgcatacgtgcctggtggagattgggcagtaagtccactatatccttctctgtcacatccttagagatgggygggggcttctgcatggtgcatgggccattagggatccaggagtaccagtccagctgcagggaggagagcccagagaaatgcaggctgatgacctgggcat

SEQ ID NO: 466889 - DNA, 201 bp, Homo sapiens
ggaaggtctccgcttttctgggctgggacccggggaaggcagtgggccggcttctggaaggtcggcctgggaggccgtgctggggtctggggatgtcccgyggctagacccggcgcggcccatgtgtcctccagtacctgagctctgccgcccttgaacgctgtgcttccgtcaacgaccaggggttccccagggtaccta

SEQ ID NO: 466890 - DNA, 201 bp, Homo sapiens
gaacaaggggggaaagactgcctcttctccaagatccttcccatgcaccaaagctgtctgactgttgcgatagagctgaaggctttccccgctgagcctakcacttcagctgcgcctctgctcaaggaagctttccaccagcggaaggatctgatgctcaaggcctgccatcccgattctttggtcccacagggtcttccc

SEQ ID NO: 466891 - DNA, 201 bp, Homo sapiens
agaattctcagcttccttgggcaggtggggtgtctcatgatgatgtgagaagaagcagattgtttgcagaggagtgggtgttgacagggttcagtggggarggatccatgtctcacccctggtcttgggccctctgcagtccagtctcagtcatctctctgcaccaggcctgcagctctagatcatccttcatggcttggt

SEQ ID NO: 466892 - DNA, 201 bp, Homo sapiens
tttcaaactctagtaccagatactgttctctggttggttcttatgggcatcacttgtttttctggctaaatactagatctaaggtaggaatatggcttttkttttactagcagtgttcaagccctactgtgagcgcactgctagactgtcagatctctgagaatttcagaggattcctatataatgttaagtgactaaact

SEQ ID NO: 466893 - DNA, 201 bp, Homo sapiens
ggcttgtgcatcacctgaggtcaggagttcaagaccagcctggccaacatggtgaaactctgtctctactaaaaatacaaaaatgagctgggtgtggtggmgggcgcctgtaatcccagctatctgggaggctgaggcaggagaatcacttgaccctgggaggcagaggttgtggtgagccgagattgtgccactgtactc

SEQ ID NO: 466894 - DNA, 201 bp, Homo sapiens
gagcctccttcttcctgggtgcaatgttattctaccaggagatgctgtaatggactgtgctggttggcctccagccaggaggtggtgcttgcaaatgaacmccggctgcggtaggtgggtgtgtggggggggggggggggaggggcgtggtggtgggggcgtggagggaggaatactctggtttcacaggcaatagtcagg

SEQ ID NO: 466895 - DNA, 201 bp, Homo sapiens
tgcagtccagtctcagtcatctctctgcaccaggcctgcagctctagatcatccttcatggcttggtcactattgtagaaaagcccaaccatcccctccaygtacctattccctgggaagaagacactcagtctcaggggccaatgcaggaccttctggacctacagtcccccgcccctccgttcattgcctctctgtgcc

SEQ ID NO: 466896 - DNA, 201 bp, Homo sapiens
tgccaggctagagtgcaggggcgcgatctcggctcactgcaacctccatctcctgagttcaagcagttctcctgcctcagctgggattacaggcatgtgcyaccacgcccagctaattttgtatttttagtagagacggggtttcaccatggtggccaggctggtctcgaactcctgacctcaaatgatccacccgcctca

SEQ ID NO: 466897 - DNA, 201 bp, Homo sapiens
ccttcattttcctgttataagatggtgatagtgataccaacctcacagagaagttgtgaggataaatttttttttttttgagaccgagtttcactctttgytgtataggctggagtgcaatggtgcaatctcggctcactgcaacctctgcctcctgggttcaagtgattctcctgcctcagcctcccaagtagctgggat

SEQ ID NO: 466898 - DNA, 201 bp, Homo sapiens
taggcctagtaagagattaagaacattaggaataaacaaatataaatgcaaattaaaaataaagaaaaaactataaaaataattagctgggcatggtggcrggcacctgtagtcccagctacctgggaggctgaggctggagaatcgcttgaaccctggaggtggaggttgcagtgagcgagatcatgccattgcactcca

SEQ ID NO: 466899 - DNA, 201 bp, Homo sapiens
tcagattgggcaatttctattctgtcttgcatttcgttaatttttcctctgtttcccccattcgctagtaagcccatatattgagctttttatcttggttwttctatttttcagttctaaaatttccatttggttctttttaaattttttatttctcagctgatatttttcattttctatttgtttcaagtgtgtttataa

SEQ ID NO: 466900 - DNA, 201 bp, Homo sapiens
ctctttattctcaatgtatatggaattctttgggcttaatggatctgagtgttttttttttctctttacagatttggaaagttttctgtcattatattttwtttatttatttatttatttatttattattattatactttaagttttagggtacatgtgcacaatgtgcgggttagttacatatgtatacatgtgccatgc

SEQ ID NO: 466901 - DNA, 201 bp, Homo sapiens
ctgtagtcccagctacctgggaggctgaggctggagaatcgcttgaaccctggaggtggaggttgcagtgagcgagatcatgccattgcactccagcctgrgtgacagagcgagactccatctcaaaaaaaaaaaaaaaaaaaaaaaaagaagcaaaaaagaaaactgaaaaaagaggggagcaacaacaactaatataaa

SEQ ID NO: 466902 - DNA, 201 bp, Homo sapiens
tggaattctttgggcttaatggatctgagtgttttttttttctctttacagatttggaaagttttctgtcattatattttatttatttatttatttatttwtttattattattatactttaagttttagggtacatgtgcacaatgtgcgggttagttacatatgtatacatgtgccatgctggtgcgctgcacccactaa

SEQ ID NO: 466903 - DNA, 201 bp, Homo sapiens
agtgagcgagatcatgccattgcactccagcctgggtgacagagcgagactccatctcaaaaaaaaaaaaaaaaaaaaaaaaagaagcaaaaaagaaaackgaaaaaagaggggagcaacaacaactaatataaaatagaataaaatagaatataatagaacaattgtgacaatctaactataataaaagttgggtgaatg

SEQ ID NO: 466904 - DNA, 201 bp, Homo sapiens
gggatatgtgatttaatagattaataagtaccttgaagatggggtgcagtcctgggaggcaccgcatggtggcgacagcgatgacctcagccaccaggtgmgtgttcagcaagtgatactggatctcgtgcagttggaaatctgaatttcggacccaggactttgccaggagccaggcaagtggggggtctgagggcagga

SEQ ID NO: 466905 - DNA, 201 bp, Homo sapiens
tctccgtggatgcatctggtggcctgggctaggccagtgtaagttaaatctgctttcttgagccagtcctcagaaatgacttggtggcctagttgttggtrgaggtaagtgagtgggagttttagccccgccttccagcctccagatcagactctatctcaaaaataaataaataaataaataaaaataaaaaaataaagt

SEQ ID NO: 466906 - DNA, 201 bp, Homo sapiens
tgagtgagaatatgcggtgtttggttttttgttcttgcgatagtttactgagaatgatgatttccaatttcatccatgtccctacaaaggacatgaactcrtcattttttatggctgcatagtattccgtggtgtatatgtgccattttcttaatccagtctatcattgttggacatttgggttggttccaagtctttgct

SEQ ID NO: 466907 - DNA, 201 bp, Homo sapiens
cttcatcaatactatactgttataggctgtcccttgtgatttcaaactctagtaccagatactgttctctggttggttcttatgggcatcacttgtttttytggctaaatactagatctaaggtaggaatatggcttttgttttactagcagtgttcaagccctactgtgagcgcactgctagactgtcagatctctgaga

SEQ ID NO: 466908 - DNA, 201 bp, Homo sapiens
tggcgtctgccaaggaactttgtgaaggtcttttgcatacgtgcctggtggagattgggcagtaagtccactatatccttctctgtcacatccttagagaygggcgggggcttctgcatggtgcatgggccattagggatccaggagtaccagtccagctgcagggaggagagcccagagaaatgcaggctgatgacctgg

SEQ ID NO: 466909 - DNA, 201 bp, Homo sapiens
gttagcatttctggacacactctggagaattctcagcttccttgggcaggtggggtgtctcatgatgatgtgagaagaagcagattgtttgcagaggagtrggtgttgacagggttcagtggggaaggatccatgtctcacccctggtcttgggccctctgcagtccagtctcagtcatctctctgcaccaggcctgcagc

SEQ ID NO: 466910 - DNA, 201 bp, Homo sapiens
attaacctgaagcttttcagaagattcatgaaagatgccaaatgtcacggaaaggccaaagtccacatgaggagaaaggatgcctaaggataaacagtccytaataataataattgcaagaactagctgggtgtggcggcatgtgcctgcaatccaggttacttgggaggctgaggcaggaggatcgcttgagcccaggaa

SEQ ID NO: 466911 - DNA, 201 bp, Homo sapiens
ctcctgtgttggggaaatggtaagtaagacagattttcaccaacagagagcgtttctatctcttctctactcctcccttttaaaattgagattctgacagygtaaaggagttaggacccccttttggggatcgggcatggttttgtggctttaaaatgctttaaaattgctgaagtttcttggtattggaactgtttctcc

SEQ ID NO: 466912 - DNA, 201 bp, Homo sapiens
gatacagtactagattttttcctatatcgtacatacatctctatgacaaggtttaatatatcaattaggcctagtaagagattaagaacattaggaataamcaaatataaatgcaaattaaaaataaagaaaaaactataaaaataattagctgggcatggtggcgggcacctgtagtcccagctacctgggaggctgagg

SEQ ID NO: 466913 - DNA, 201 bp, Homo sapiens
attttcaccaacagagagcgtttctatctcttctctactcctcccttttaaaattgagattctgacagtgtaaaggagttaggacccccttttggggatcsggcatggttttgtggctttaaaatgctttaaaattgctgaagtttcttggtattggaactgtttctcctaagtaacattttatcatcgcacgtgaaatac

SEQ ID NO: 466914 - DNA, 201 bp, Homo sapiens
gaataaggtaggatataagatttaaaaatataaataggtcatcccctccaaaaaagccgtttgtatgtttaactggtgagtgacagatctgtaataattayttagaaataggaatgtcgaggcgggcggatcacctgaggtcgggagttcgagaccagccaggtcaacatggcgaaaccctgtctctactaaaaattacaa

SEQ ID NO: 466915 - DNA, 201 bp, Homo sapiens
tggtggagattgggcagtaagtccactatatccttctctgtcacatccttagagatgggcgggggcttctgcatggtgcatgggccattagggatccaggrgtaccagtccagctgcagggaggagagcccagagaaatgcaggctgatgacctgggcatttgatcccccacttctccatcccaggagcccttgtgggatg

SEQ ID NO: 466916 - DNA, 201 bp, Homo sapiens
cggtggctcacgcctgtagtcccagcacttggggaggccaagatgggcggatcacgaggtcaggagatcgagaccatcctggctaacacggtgaaaccccstctctactaaaaatacgaaaagttagccaggtgtggtggcgggcacctgtagtcccaggtactcgggaggctgaggcaggagaatggcgtgaacccggga

SEQ ID NO: 466917 - DNA, 201 bp, Homo sapiens
agctgggattacaggtgcgtgccacgacgcctggctaatttttgtatttttagtagagacgggtttcactatgttggccaggctggtctcgaactcctgasctcgtgatccacccacctcagcctcccaaagtgctgggattacaagcgtgagccactgtgcccagctagtgttttgttgtagtagcccaaactgctagga

SEQ ID NO: 466918 - DNA, 201 bp, Homo sapiens
ctgggtgtggcggcatgtgcctgcaatccaggttacttgggaggctgaggcaggaggatcgcttgagcccaggaatttgagactagcttgggccacatagygaaaccctgtctctacaaaaaataaaaaaaattagccaggcatggtggtgcacacctgtagtcccagctactctgaaggctgaggttagaggatcgcttc

SEQ ID NO: 466919 - DNA, 201 bp, Homo sapiens
tactatgcagccataaaaaggaacaagatcatgtcctttgcagggacacagatgaagctggaaaccattatcctcagcaaactaactcaggaagagaaaaycaaacatcgcatgttgtcacttgtaagtggaagctcaatagtgagaacatgtggacacagggacgggaacaacacacattggggcctgtcaggagagggc

SEQ ID NO: 466920 - DNA, 201 bp, Homo sapiens
tggaacatgtgaggacatctggaaattattgaggccggggttcaggactaagaccccagcaatccaaagtcagagcctgcataggccactgttaagacatstgcaggcttgacccttgtgtgcatctgccagcaactcagctgtccgctggggcatggcattactgtggtgagtggagacacggagaggactgaactagga

SEQ ID NO: 466921 - DNA, 201 bp, Homo sapiens
cctgagtagctgggactacaggtgcctgccaccacgcctggctaattttttgtattttttagtagagacgaggtttcaccatgttagccaggatggtctcsatccctgacctcgtgatctgccctccttggccccacaaagtgctgggattacaggcgtgagccaccgcgcccggccgataggtatttgttttccctgaaa

SEQ ID NO: 466922 - DNA, 201 bp, Homo sapiens
tcctgcaggtactgtaggctacagttcccctttccatctaacctagtattgatgaagggcaggatcttggctttgctcgggaaagaattcaagagcaagcyagtgctggaagaaagcaactttactgaggaggcggctgtgtcacagctctgtgaccgctcccggggagcaggactacagcggaggcaatccgagaggaca

SEQ ID NO: 466923 - DNA, 201 bp, Homo sapiens
aggctacagttcccctttccatctaacctagtattgatgaagggcaggatcttggctttgctcgggaaagaattcaagagcaagccagtgctggaagaaarcaactttactgaggaggcggctgtgtcacagctctgtgaccgctcccggggagcaggactacagcggaggcaatccgagaggacagtgcagggtggtgtg

SEQ ID NO: 466924 - DNA, 201 bp, Homo sapiens
taggttacactccttttaatatttaaacaattctgtgcctccaccctgactactagaatatgttcttttccattctccaggatccttcttccgtgatgttygctaacagctctacagtacttactttgggccagacatttttctaagtgctttttacatataataactcataacaactccggactccttagagaggcttgt

SEQ ID NO: 466925 - DNA, 201 bp, Homo sapiens
ttgtgaggcaggtctttctttagaagtaaattttctcattaaaaaatgattgaaaccattttttttagagttctgctgagttcacatttcttggttgaccrataatttttttcaatacaccgaagacctgattctgttattttctggcttccgttgttgttgggagttttgttgttgtgctaattctggttcctttgtagg

SEQ ID NO: 466926 - DNA, 201 bp, Homo sapiens
atgttggaaggcaaagggagagcaggcatgtcatatggcaagagagcaagcaagagagagtgagcaagaaggtatcacaagctttgaaacaaccagatctygtatgaactcattaccactcattacttcaaggatggcaccaagccattcactagggatctgcgcctatgacccaaacacctcccagtaggcccacctcca

SEQ ID NO: 466927 - DNA, 201 bp, Homo sapiens
ttttcctcatctctccccaggattgagttctctgcttctcctttctggaccttcttgcttttgccccatgctggcctcaggccagagcccccccccccccsgccccaccatttctcagctcctccttactcacctggcaatgatctcccagagccgtaaagcatcatgggcatagagagcacctgggagtcccagcaggcc

SEQ ID NO: 466928 - DNA, 201 bp, Homo sapiens
gataatcttccaaatttctctatcattatgtagagatcaccctaccactggccagctagtttgtgttaatgtttttttttgaaatggagtctcgctctgtygctcaggctggagtacaatggcgtgatctcggctcactgcaacctccgccttccaggttcaagtgattctcctgcctcagcctcctgagtagccgggatt

SEQ ID NO: 466929 - DNA, 201 bp, Homo sapiens
ccattctattttccccttcctgctgggagctcctcatagtttcttcccctacatattttatttctgtatttttccagcacaggactgcaccaaggggcaaygcagtactgcagccttcctctgactcagtttggattctctctgtccgttctcaccacactactaaggagagaacagtgccaggcaggggaaggagaggta

SEQ ID NO: 466930 - DNA, 201 bp, Homo sapiens
gttatcatgggagtggcttagctgtcgtgggagttaggtctccattttctgtctctgttttgtgtgcttgcttgcccttctgccatgggttgatgcagcargaaggtccttgccagattctgacaccatgttcttaggctttctagcctccagaactgtgagtcaaataaattgctattctttttaaattaaattaaattt

SEQ ID NO: 466931 - DNA, 201 bp, Homo sapiens
gcttccaccctacgtataatccaatataatctggtacaaaatgtcttgaagagtcaaaagaaggtagtttcctaggtgtttaactgtttcaatggctcccrtcagtaagtcatagctagcaatggacttctgacttaaacctgctcatacctgctgctatggtttgaatgtctcctccaaaacccttattgaaatttaatt

SEQ ID NO: 466932 - DNA, 201 bp, Homo sapiens
cgcacctagagcccagcccctcactctgatgtttcctttccaactgtcatttccctctcccgagagtcccctctcaccatgtctggctggcggcgactcaratgccatgagatggccatttgaagacaggcctgccggacatcaggtagtgaccccatcactgtggccatcgtcacatcttccttggtggtgggtgggggc

SEQ ID NO: 466933 - DNA, 201 bp, Homo sapiens
atgggatttcaccgtgttggccaggatggtctcgatctcctgacctcgtgatccacctgccttggcttcccaaagtgctgggattacaggcgtgagccacygcacctggccttcaaatttttttattttaaaattatcatacagtaaaattagctttttggtatacagttctacacattttaacacctgtatagattcatg

SEQ ID NO: 466934 - DNA, 201 bp, Homo sapiens
ttttctaggaggagaacaagtttctgggtactcttaaatattacttgtgagctttaagttactcagtgatttgacttacggtggtggttatctttaaataygtcatgctttttttcttaaccatttttagtgtggactgtatagaatacacaaaaggccaccatatttatatacaatttaaaaaataatttaaagcaaatt

SEQ ID NO: 466935 - DNA, 201 bp, Homo sapiens
cttcctggacctcccgggaaggcgggatcgaggtgggcctgagcccccgggttggagcgaacatagatgagaacacttcccgaggtctccaggtcttctgkggagccaggaggaagtaggggatgagtccatcttccaaacggaggggaaggtctccgcttttctgggctgggacccggggaaggcagtgggccggcttct

SEQ ID NO: 466936 - DNA, 201 bp, Homo sapiens
tgcagtggcgcaatgcgcgatcttgactcactgcaatctccgcctcccgggttcaagtgattctcctgcctcagcctctgagtagctgggattacaggcgsgcaccaccacgcctggctacattttgtatttttagtagagacggggtttcagcatgttagtcaggttggtctcgagctcctgacctcgtgatcttcccgc

SEQ ID NO: 466937 - DNA, 201 bp, Homo sapiens
tagctgcaggatgataaaggggcccgagccagggtgaggccaacggggtgggtgcggcgggaccttcctggacctcccgggaaggcgggatcgaggtgggyctgagcccccgggttggagcgaacatagatgagaacacttcccgaggtctccaggtcttctggggagccaggaggaagtaggggatgagtccatcttcca

SEQ ID NO: 466938 - DNA, 201 bp, Homo sapiens
tttcagttctaaaatttccatttggttctttttaaattttttatttctcagctgatatttttcattttctatttgtttcaagtgtgtttataattgctcaytgaaacctttttttttttttttttttttttttgagacaaagtttcggcctgtcacccagactggagtgcaatagtgtaatctcagctcactgaaaccttc

SEQ ID NO: 466939 - DNA, 201 bp, Homo sapiens
cttttctctctcttgcacccaggcacgctgcagctaccatttcctcccttcactacgttttagattctttccttttcattcctgtcattaccatgctaacrtacatctctatccaccttactgttgggcaggtatgagcggcttgctggctgttcttccttgccttttggtctgtttctacttagctgactcctcaattgg

SEQ ID NO: 466940 - DNA, 201 bp, Homo sapiens
tcttgcccacctcgtcccagcttcgtggaagtcccagtccgcgaggtcgcgctgtcacctcgcccccagcctcccgccctcccgccgcgagcccagctcgrcccgggcctgggcccggggtccccgctgccctagctcccctcgctccccgcgctgacctcgccccgcgccggccgcagctgcagctccagctccgcctcc

SEQ ID NO: 466941 - DNA, 201 bp, Homo sapiens
caggcacgctgcagctaccatttcctcccttcactacgttttagattctttccttttcattcctgtcattaccatgctaacatacatctctatccaccttrctgttgggcaggtatgagcggcttgctggctgttcttccttgccttttggtctgtttctacttagctgactcctcaattgggtagaaacattcttcatca

SEQ ID NO: 466942 - DNA, 201 bp, Homo sapiens
gaaagcatgaaattcaagatagaaatgtcagtcctaaagctgatgtgaaatcttgcaggtagagtcactctagggctcagatggtgacactgttctctatrcagctgggcttcagatattcatagggccagtcaagttgctcattccgggctgtaatctccttttccagcttttccaaatctgttcggaattggtttagca

SEQ ID NO: 466943 - DNA, 201 bp, Homo sapiens
gtgactaaacttaataaacttaattaaaatcaacatctcaagatattgagacagtctcctcttcactcacaaattgctacaaagagtttttgctgctgcartatcttttgatatggggctgttcctctctctggggtctgagggatatgtgatttaatagattaataagtaccttgaagatggggtgcagtcctgggaggc

SEQ ID NO: 466944 - DNA, 201 bp, Homo sapiens
gtgcagttggaaatctgaatttcggacccaggactttgccaggagccaggcaagtggggggtctgagggcaggaacagtgttggggttggagagctggggytgggaggctgaatctgggagaaagagaaattattgaactcccattccgtatatgacattatagtcagcattcttggggaaacagagatgactaagtaaga

SEQ ID NO: 466945 - DNA, 201 bp, Homo sapiens
ggtggaatgtgaaggagaagtaggaggtgtaagattattgacagttcttgtcacctgactgttaagaatagtgagagaaggccaggtgcagtggctcacasctgtaatcccagcactttgggaggccgaggcaggcagattacttgagcccagaagttcaagaccagcctgggcaatatggcgaaaccccatctctacaaa

SEQ ID NO: 466946 - DNA, 201 bp, Homo sapiens
cctctcttagcctgtgtaaaactttgggaattcataactccttcccgttttctgtccagcaccctgggatccctacatttcacctgccctgggcccatacmtcctctaagtctgctccgaccgtccttaactctgccctcctagccccgcagcagttcccgggaccttgtgcctccttccccgacgccgcctgctcaccgg

SEQ ID NO: 466947 - DNA, 201 bp, Homo sapiens
tggaatgtgaaggagaagtaggaggtgtaagattattgacagttcttgtcacctgactgttaagaatagtgagagaaggccaggtgcagtggctcacagcygtaatcccagcactttgggaggccgaggcaggcagattacttgagcccagaagttcaagaccagcctgggcaatatggcgaaaccccatctctacaaaaa

SEQ ID NO: 466948 - DNA, 201 bp, Homo sapiens
aacccaggaggcgcaggttgcagtgagccaagatcacacaactgtattccagcctgagtgacacagtgagattctgtctcaaaaaaaaaaaagaaattgcragaaaagatattcaagagatggcgagggttcagagccagaggccactgagagatgagatagtgattctgaaagtgtagtcctgaactggtagtgtcagca

SEQ ID NO: 466949 - DNA, 201 bp, Homo sapiens
cacctcgacctcccaaagtgctgggattacaggcgtgagccaccacgcttggctctagtttgtgttaattttatagtaatatttattatcttttcagtggyttctggtatctggaggtgtttttgcaagcagcagcaatactttttttgggagtgcgtcttgggtggggtttttaaagtctccctttcataaatctacttt

SEQ ID NO: 466950 - DNA, 201 bp, Homo sapiens
atggctgcatactattccatggtgtatatgtgccacattttctttatccagtctatcattgatggacatttgggttggttccaagtcattactattgtgamtagtgctgcaatagacataggtgtgcatgtgtctttatagtagaatgatttataatcctttggggtatatacccagtaatgggattgctgagtcaaatgg

SEQ ID NO: 466951 - DNA, 201 bp, Homo sapiens
tgcacactgaagtgtgaggaccattggatacaggatgagaactccaagaggccattttgactcttgaaaaagtaattctagttggatgaggcaggggagaygagggtacaggcaaatagtgacatgaagacaagtctcactgagtgaggatggggtttgggagccaagagctgggggttgggtccctgggagcagaggttg

SEQ ID NO: 466952 - DNA, 201 bp, Homo sapiens
tttaaagtctccctttcataaatctactttacagcattaatctgtgaggacttgcagtctccacctaacctcaaaaagtaacatgtaaaatcggtgacatsaagattccactgatgtgtgattcagaaatgtcacaccacccgctcatgccatggtgttatcaacattaaaaaatattctgtgatttattttataaaacaa

SEQ ID NO: 466953 - DNA, 201 bp, Homo sapiens
gtatccatttttagagttcaaagtctacccccagggggccggggcaaagggcaagagatttagtctagcttcttgccattctcctgcatcagtaccggagycctgttgggagaactagagcccctggtccagttcctctcatcttaaagtgaagaaacagtctggtgagggtagatgtcttgtgtgtggatgtggtggcag

SEQ ID NO: 466954 - DNA, 201 bp, Homo sapiens
ttttgaaatttgtttaaaaatgtttaggtttggggttctctttggggttatttgtggtgaccctgtactcttgtataacggctaagtaaaatatttcaagyagtagctggatctcagtctcctgtaatctgagtacactatatcaagaaactcctctattgaagcagcatttccctcttattatatctatacaactgtggt

SEQ ID NO: 466955 - DNA, 201 bp, Homo sapiens
agtgtaatctcagctcactgaaaccttcgcctccctagttcaagcgattctgctgcctcagcctcctgtgtagctgggattacaagcgtgcaccatcatgstcggctaatttttttgtacttttagtagagatggggcttcaccatgttggccaggctggtcttgaactcctgacctcaagtgatctgcccccttcagcct

SEQ ID NO: 466956 - DNA, 201 bp, Homo sapiens
gcaggaggattgctggtagtcaggtgacagagcaagagcctgtctctatttaaaaattaaaaaataaataaataatttaggaatgcgtaatcctattcccrgacagaattacaagtgtctgcgttataatgtggggaataagtcatggatttccagtgtcacagctgagaggggctcccacaaaggttatctcagtccact

SEQ ID NO: 466957 - DNA, 201 bp, Homo sapiens
aatgttttgtaaagggattttaaatcaagtgtatttgaggtagagctcatgtacaatacaatgtattcatttcaaatgtgcgtttccaagtttcagcaaaygtacacacccatgtatccatcactagggaacattttcattaccttaaatgttcttttgtgctcataccagtcagtctccctggctccaggaaacagctgg

SEQ ID NO: 466958 - DNA, 201 bp, Homo sapiens
tatggcctggggggccccaggatatggcagttcaggggcatctgtgactggggtgtagtgggactaggggttgatggccagggtctctgaggaggacagtycttgggtctctagaattgtcctgagtcggaggaggtgggaatgggatacacatgctttcccgtgtggagggaggaagggaggcgtgatgagaggctgggg

SEQ ID NO: 466959 - DNA, 201 bp, Homo sapiens
tagagctcatgtacaatacaatgtattcatttcaaatgtgcgtttccaagtttcagcaaatgtacacacccatgtatccatcactagggaacattttcatyaccttaaatgttcttttgtgctcataccagtcagtctccctggctccaggaaacagctggtctgctttctgtcactacagatttgtcttttctaaagttg

SEQ ID NO: 466960 - DNA, 201 bp, Homo sapiens
aggagaaaggatgcctaaggataaacagtccttaataataataattgcaagaactagctgggtgtggcggcatgtgcctgcaatccaggttacttgggagrctgaggcaggaggatcgcttgagcccaggaatttgagactagcttgggccacatagtgaaaccctgtctctacaaaaaataaaaaaaattagccaggcat

SEQ ID NO: 466961 - DNA, 201 bp, Homo sapiens
atgttcttttgtgctcataccagtcagtctccctggctccaggaaacagctggtctgctttctgtcactacagatttgtcttttctaaagttgtatataartagaattatatataatatactcttctgtatctggctttatccactcagcatcatgtctttgtaatttattcacttttttgtggctatcagtaattcatta

SEQ ID NO: 466962 - DNA, 201 bp, Homo sapiens
aaaaaaaagacatgggtataaaagggacaggttcataggttaagagtgaggacattcacacatagttgatcttggatcctgaaagtggcagatcatggagrgatggatgaggcagtcccatgccccgtaccctcctcaccttatcaaaaattcctccatctgagatgagttgggtccgggcccgggtgttgatttccatgg

SEQ ID NO: 466963 - DNA, 201 bp, Homo sapiens
tgtgctcataccagtcagtctccctggctccaggaaacagctggtctgctttctgtcactacagatttgtcttttctaaagttgtatataagtagaattayatataatatactcttctgtatctggctttatccactcagcatcatgtctttgtaatttattcacttttttgtggctatcagtaattcattacctaaaaca

SEQ ID NO: 466964 - DNA, 201 bp, Homo sapiens
caggcttgacccttgtgtgcatctgccagcaactcagctgtccgctggggcatggcattactgtggtgagtggagacacggagaggactgaactaggaaamggaattgtaagtgtgaatagaggcttcacttgttcgtgtggagcagaggatggggaagcaggagacagcatgagatgaatgaaatccaagattccattca

SEQ ID NO: 466965 - DNA, 201 bp, Homo sapiens
ttatttctggtctaaattttattattccttttgctaactttgggctttgttcttatttttgtatttctttggggtgtaactttaggttgtttatgtgagawcttttcttttattaacgtaatcatttgttgctataaacttccctccaataactgcttttgctgcatcccatacatcccattttggtttttgtttgtttgt

SEQ ID NO: 466966 - DNA, 201 bp, Homo sapiens
tctctcttttactcattacccatggttaaaaattcactatttgggccgggcgtggtggctcaagcctgtaatcccagcactttgagaggccaaggagggcrgatcacgaggtcaggagatcgagaccatcctggctaatacggtgaaactccatctctactaaaaaaaatataaaaaattagccgggtgtggtggggggtg

SEQ ID NO: 466967 - DNA, 201 bp, Homo sapiens
tagttctagatccctgaggaatcgccacactgacttccacagtggttgaaatagtttacagtcccaccaacagtgtaaaagtgttcctatttctccacatyctctccagcacctgttgtttcctgactttttaatgattgccattctaactgatgtgagatggtatctcattgtggttttgatttgcatttctctgatggc

SEQ ID NO: 466968 - DNA, 201 bp, Homo sapiens
gccgggtgtggtggggggtgcctgtagtcccagctactcgggaggctgaggcaggagaatggcgtgaacccaggaggtggaggttgcagtgagccaagatsgcgccactgcactccagcctgggcaacaaagcaagactccatctcaaaaaaaaaaaaaaaaaaattcactatttgccatcctcattcctcctcgtctcct

SEQ ID NO: 466969 - DNA, 201 bp, Homo sapiens
gggtgtggtggggggtgcctgtagtcccagctactcgggaggctgaggcaggagaatggcgtgaacccaggaggtggaggttgcagtgagccaagatcgcrccactgcactccagcctgggcaacaaagcaagactccatctcaaaaaaaaaaaaaaaaaaattcactatttgccatcctcattcctcctcgtctcctgcg

SEQ ID NO: 466970 - DNA, 201 bp, Homo sapiens
ccagctactcgggaggctgaggcaggagaatggcgtgaacccaggaggtggaggttgcagtgagccaagatcgcgccactgcactccagcctgggcaacaragcaagactccatctcaaaaaaaaaaaaaaaaaaattcactatttgccatcctcattcctcctcgtctcctgcgggccagtgtgcttcttgtctttcacg

SEQ ID NO: 466971 - DNA, 201 bp, Homo sapiens
aggtcgagcgtctcaacagcatggggttggcaccattgaggaactggtagctgaacaactcatcatcctgccagcactggcgaaccttctctttggtgggyggtgaaaggaggatatatgtaccacagcctgcatatcccttctccaaaatctaccccaggggttcaggtatataaccctccctgaacccagcttctgcgt

SEQ ID NO: 466972 - DNA, 201 bp, Homo sapiens
gcgttttcattctcaaggcctctctgagttgaccagatatgataaggtctcttcttgcaaagagttacgggggactgtggagtgtgatgagtcatccagasgggccattaagggattatggagacctcggggaaccactgaccagccagggcactcttctggccccagaagatctgatcaaagtcttctaggcagttccag

SEQ ID NO: 466973 - DNA, 201 bp, Homo sapiens
cctgccctgggcccatacatcctctaagtctgctccgaccgtccttaactctgccctcctagccccgcagcagttcccgggaccttgtgcctccttccccracgccgcctgctcaccggtgccctcgggcaggctcaggatgtcctcgccctgcacccagcggtagcacgggaaggccacctccgcgcaggctccagggcc

SEQ ID NO: 466974 - DNA, 201 bp, Homo sapiens
acatgtgatgaacaatcttgaggccaggggcggtggctcacgcctgtaatcctagcactttgggaggcccaggcgggtggactgcctgagctcaggagttygagaccagcctgggcaacatagtgaaaccccctctctactaaaatacaaaaaattagccaggtgtggtggcgggtgcctgtaatcccagctactctgggg

SEQ ID NO: 466975 - DNA, 201 bp, Homo sapiens
agagattaagactggcgtgttcaggccgggtgcggtggctcacgcctgtaatcccagcactttggaaggccgagacgggcggatcacgaggttaggagatygagaccatcctggctaacacggtgaaaccctgtctctactaaaaatacaaaaaaaattagctgggcgtggtggcgggcacctgtggtcccagctactcgg

SEQ ID NO: 466976 - DNA, 201 bp, Homo sapiens
attactctcctatgttttttgtctaaaagttttatagctttgggaagccgaggtgggcagatcacgaggttgggagtttgagaccagcctggccaacatgrtgaaacccccgtctctactaaaaatacaaaaattagctgggcatgatggcgggtgcctgtaatcctagctactcgggaggctgaggcaggagaatcactt

SEQ ID NO: 466977 - DNA, 201 bp, Homo sapiens
gtcacagtttgtgagacaggcaataagaggagttcattcaactaattcattcaactaatatttgctaagtatctaccacaaactcccaaacttctagaaaytgaagacacagcagtaaacaaagagacaaaaatcccactcttattctgttacacaccatatatttactatatatatatatattctggagtatttaaaagc

SEQ ID NO: 466978 - DNA, 201 bp, Homo sapiens
actggcatctgcatcaggtgagggcctcaggctgcttctactaatggtggaaagtgaaggggagccagcgtgtgtggagatcacatggcgagagaggaagyaaggtgtggaggcggtgccaggctctttttaacaatcagttctcccggtaatgaacagaggaagaacttacccttgagcgaaggcactaatttattgatg

SEQ ID NO: 466979 - DNA, 201 bp, Homo sapiens
gcagggaaagctatgtggagatacagaaaagaacttttctgtggttctggcctgcacaccctaggactcccaccttgtgtgtgctcaaaggttaatgcacktgggatgaaccttgagctatggggagaggggagggaagagtgagggaaaatacctaagagaagttttgtatctagttccagaggaagctcttagtgcaga

SEQ ID NO: 466980 - DNA, 201 bp, Homo sapiens
tgacagttatgcactaggtgcagaaggaaacaagtccagcctgaagaagtgggacaccaggactccagggagagacacactgagggcttccatcaccaccrtccccactgccatcatgctaacttttaaatcaaggactcaatacccagagtctggcccagatttttcctttgtactttctttattttgaccacatgctga

SEQ ID NO: 466981 - DNA, 201 bp, Homo sapiens
tttatcttctcctcctgcgccttcctcaaacagtggtaacatcaccctttccttattcttctagattggtgcttgctgctcagtgtttcaaaactaagtcrtgttgtttagggatgtatatattggtggaaaactgtaaaggaaacaggagaatgattaacataagtcatcatcgtggttatcactgcggatggagaagag

SEQ ID NO: 466982 - DNA, 201 bp, Homo sapiens
atacaaaaaattagccaggcgtggtagaggatgcctgtaatcccacctacttgggaggctgaggcaggagaattgcttgaacccgggaggcggaggttgcsgtgagctgagattgtgccactgtactccagcctgggcaacaagagtgagactttgtctcaaaaaaaaaaaaaaaattttacaagttttctaaagcaaatt

SEQ ID NO: 466983 - DNA, 201 bp, Homo sapiens
tacaggcacgcaccaccatgcctggctaatttttgtatttttggtagagatggggttttaccatgttggccaggctggtctcgaactcctgacctcaggtrattcccgccccccttggcctcccaaagttctgagattacaggcgtgagccaccgcgcctggccagtgttttgttatagtagcccaaactgactagcagcc

SEQ ID NO: 466984 - DNA, 201 bp, Homo sapiens
actctagggctcagatggtgacactgttctctatgcagctgggcttcagatattcatagggccagtcaagttgctcattccgggctgtaatctccttttcyagcttttccaaatctgttcggaattggtttagcacagctttgggcttggggcctgagaaatatttttctttgtggtgccccagaggcacctgagacagaa

SEQ ID NO: 466985 - DNA, 201 bp, Homo sapiens
tacggaaaaattaagcagaaagtgagaatctattttttgagcagaaatttttgagagctcacaaaatttcagggtctgttgtaatagttgggtttctgttycaatgagcttgtggatacaccaatagcttatagccaagtgcatatcagtacccatcaaatccatgagtgagatatttttctttaaatcacatggctctaa

SEQ ID NO: 466986 - DNA, 201 bp, Homo sapiens
ctggatactgagggatacagtactagattttttcctatatcgtacatacatctctatgacaaggtttaatatatcaattaggcctagtaagagattaagamcattaggaataaacaaatataaatgcaaattaaaaataaagaaaaaactataaaaataattagctgggcatggtggcgggcacctgtagtcccagctacc

SEQ ID NO: 466987 - DNA, 201 bp, Homo sapiens
atcacggctcactgcagccttgatctcccaggttcaggtgattgattatactgcctcagcctccccagtagctgggactacaggcccgtgccaacatgccygactaatttttgtattttttgtagagatggggttttgccatgttgcccaagctggtctcaaactcttgggctcaagtgatccgctggccttggcctccct

SEQ ID NO: 466988 - DNA, 201 bp, Homo sapiens
gatcaggaaacatcagaagcttgggtcagcttactgcccatagctctcttaaaaatctgtaatacccctagagcaaaatttaatataagcctatacgaagsctattagtttgtttttatgtgtgtgtgtgtgtgtttttttttttttttttgagacggagtctctctctatcgcctaggctggagtgcagtggcacgatct

SEQ ID NO: 466989 - DNA, 201 bp, Homo sapiens
gtaaatcttctttcaaactcccgattccctgctgtctgtgccagtagccaagccaactcccacattcccattacctctctttgcagaacaatttaccttckgtgtgtgttttttttttttgagatagaatcatgatcttggctcactgcaatctctacctcccaggttcaagtgattctcctgcctcagcctcctgagtag

SEQ ID NO: 466990 - DNA, 201 bp, Homo sapiens
cctcacttttcctcatctctccccaggattgagttctctgcttctcctttctggaccttcttgcttttgccccatgctggcctcaggccagagcccccccscccccggccccaccatttctcagctcctccttactcacctggcaatgatctcccagagccgtaaagcatcatgggcatagagagcacctgggagtcccag

SEQ ID NO: 466991 - DNA, 201 bp, Homo sapiens
agtttggattctctctgtccgttctcaccacactactaaggagagaacagtgccaggcaggggaaggagaggtacctgaagttctttctccagttgagccygaagctcttccatccccgagggcagcactagcctggagggcagagaggtcgagcgtctcaacagcatggggttggcaccattgaggaactggtagctgaa

SEQ ID NO: 466992 - DNA, 201 bp, Homo sapiens
ggaggcggagctggcagtgagccgagatcgcgccactgcactctagcctgggcgacagagggagactctgtctcaaaaaaaaaaaaaaacaaaaaaaaacyggtgtgttcaatatttgaataattggtgctcaagagagaaaaagaatatgtaggagaggcagtcatcaataaaaccatacagaaaagtttactcaaaact

SEQ ID NO: 466993 - DNA, 201 bp, Homo sapiens
tttcctcatctctccccaggattgagttctctgcttctcctttctggaccttcttgcttttgccccatgctggcctcaggccagagcccccccccccccgrccccaccatttctcagctcctccttactcacctggcaatgatctcccagagccgtaaagcatcatgggcatagagagcacctgggagtcccagcaggccc

SEQ ID NO: 466994 - DNA, 201 bp, Homo sapiens
tccgttctcaccacactactaaggagagaacagtgccaggcaggggaaggagaggtacctgaagttctttctccagttgagcctgaagctcttccatcccygagggcagcactagcctggagggcagagaggtcgagcgtctcaacagcatggggttggcaccattgaggaactggtagctgaacaactcatcatcctgcc

SEQ ID NO: 466995 - DNA, 201 bp, Homo sapiens
tatcctgataaacccattgtaagttgaaaatatcgttaagtcaaaaatgcatgtaatacacctaacctagtctaaggtagcttagcctagcctaccttaartgtgctcagaacacttacattagcctcaagttggcaaaatgatctaacgcacagcccattttataataaagtgttgcctatctcatgtaatttattgaat

SEQ ID NO: 466996 - DNA, 201 bp, Homo sapiens
cagcaactcagctgtccgctggggcatggcattactgtggtgagtggagacacggagaggactgaactaggaaaaggaattgtaagtgtgaatagaggctkcacttgttcgtgtggagcagaggatggggaagcaggagacagcatgagatgaatgaaatccaagattccattcatcagactggtctccatcttgtctatg

SEQ ID NO: 466997 - DNA, 201 bp, Homo sapiens
tcttgtcctcatctccctgtggttagccgtattccatgttttcagccatgcactgttgcttttatctctggctttgcctcatttgattatccaccagacaygtttatcccatctttgccaactttgcactcctgctttctcttatttcagccctcatcctttgcctgtagataaaaacctcctgtttgccaccatttcttg

SEQ ID NO: 466998 - DNA, 201 bp, Homo sapiens
ccatgtgttctcattgttcagctccccgttatgagtgagaacatgcggtgtttggttttctgttcctgtgttactttgctgagaatgatggtttctagctycatccatgtccctgcaaaggacatgaaatcatccttttttatggctgcatactattccatggtgtatatgtgccacattttctttatccagtctatcatt

SEQ ID NO: 466999 - DNA, 201 bp, Homo sapiens
tctggtcatgggatccagaaatctgcatttcaacaggcattcaggtgattctgatgcacactgaagtgtgaggaccattggatacaggatgagaactccargaggccattttgactcttgaaaaagtaattctagttggatgaggcaggggagacgagggtacaggcaaatagtgacatgaagacaagtctcactgagtga

SEQ ID NO: 467000 - DNA, 201 bp, Homo sapiens
agtagcaaattctttttgtttaggtttaaattcctaagaacagttggtttaattcatctctttacctcgtgtcagtggtcggaggtcagaggccatcctattttttttttttcctgagtttttattttgaaaagccttagggtctgggcccagtggctcatgcctgtaatcccaacactttgggaggccaaggcgggtgga

SEQ ID NO: 467001 - DNA, 201 bp, Homo sapiens
atggccaggcccctttctgatcattcccgaatggtctgcgctctggttttggctcctatcagctcagcaaatgctctttcattccctattcaaatctcacrtcctctgccaaatattccagagagcttcccctactacccctgccaccgcatacagcacacacatgcatacgcacacattttgcctaggcttgtcctcagt

SEQ ID NO: 467002 - DNA, 201 bp, Homo sapiens
gcaggttagttacatatgtatacatgtgccatgctggtgcgctgcacccactaactcgtcatctagcattaggtatatctcccagtgctatccctcccccstccccccaccccacaacagtccccagagtgtgatgttccccttcctgtgtccatgtgatctcattgttcagttcccacctatgagcgagaatatgtggtg

SEQ ID NO: 467003 - DNA, 201 bp, Homo sapiens
ccccctccccccaccccacaacagtccccagagtgtgatgttccccttcctgtgtccatgtgatctcattgttcagttcccacctatgagcgagaatatgyggtgtttggttttttgttcttgtgatagtttactgagaatgatgatttccaatttcatccatgtccctacaaaggacatgaactcatcattttttatggc

SEQ ID NO: 467004 - DNA, 201 bp, Homo sapiens
tcctctgcaacgtcatgatcaaactcctcctcctgtgcaggccggacccaggccagacttagtaggagggacccgactgaggccgtttcgaggacagagcygcgctcctgtgcaacctcagtttctcagggcctccaaagacagcatcgcctcgttcccgcccccgcacaacctgctctttgggtctcagacgcccggagt

SEQ ID NO: 467005 - DNA, 201 bp, Homo sapiens
tgaaaattggtgatcatgaatttaccgcctgaacgcatgcacctgaacgtcttccattcacttattctggagctggctctactcgacatttcctttttttwatttttttttttttgagacagggtctcactgtgtcacccacactggagtgcagtggtgcgatctcggctcaccgcaacctccgcctcccaggctcaagcg

SEQ ID NO: 467006 - DNA, 201 bp, Homo sapiens
ccgccctcctcgcaagttttaggcgctcccaagtccccgccccagactagcccaaacctgcgagcagagcggtagagccggctgtggggactggctgtgcytcctggtcggagcgtagctgcaggatgataaaggggcccgagccagggtgaggccaacggggtgggtgcggcgggaccttcctggacctcccgggaaggc

SEQ ID NO: 467007 - DNA, 201 bp, Homo sapiens
tgtacagaagctctttaatttaattagatcccatttgtcaattttgtcttttgttgccattgcttttggtgttttagacatgaagtccttgcccatgcctrtgtcctgaatggtattgcctaggttttcttctagggtttttatggttttaagtctaacgtttaagtctttaatccatcttgaattgatttttgtatgagg

SEQ ID NO: 467008 - DNA, 201 bp, Homo sapiens
ctggtcggagcgtagctgcaggatgataaaggggcccgagccagggtgaggccaacggggtgggtgcggcgggaccttcctggacctcccgggaaggcggratcgaggtgggcctgagcccccgggttggagcgaacatagatgagaacacttcccgaggtctccaggtcttctggggagccaggaggaagtaggggatga

SEQ ID NO: 467009 - DNA, 201 bp, Homo sapiens
agagagagagagtgagagagagagagagagagagagagagagagagaaaatggctcaacagcaaatgcaggcatttatgtccaggataaacttatagaggkgggggaccagcttagtgtcagtgcccactgcttacaggctggggtatttataggtatgggcgggaggggcctgggcagtatggcttgctgcctgatagga

SEQ ID NO: 467010 - DNA, 201 bp, Homo sapiens
ttttgtcaatttttttctgcttctgatgagataatcatatgatttttgtcatttattctgttaatgtggcatatcatttattgacttgcatatgttgaacmctccttgcattccagagataaagacatttctcaaaagaatacatataaatggctaacagatataatgaaaaatactcgatattgctaatcattagggaaa

SEQ ID NO: 467011 - DNA, 201 bp, Homo sapiens
gcttgggtcagcttactgcccatagctctcttaaaaatctgtaatacccctagagcaaaatttaatataagcctatacgaaggctattagtttgtttttakgtgtgtgtgtgtgtgtttttttttttttttttgagacggagtctctctctatcgcctaggctggagtgcagtggcacgatcttggctcactgcaagctcc

SEQ ID NO: 467012 - DNA, 201 bp, Homo sapiens
attgtctcagcacagcttggggctcaggaccagagaaatatttctcctcatgctgagaggcagaagacaagttggctcagccccttgggactctcagcccrgaatacttcccctcctttgagctgcctccttcccaggacccaggcatttgcttctcaccatgacaggctggcgtctgccaaggaactttgtgaaggtctt

SEQ ID NO: 467013 - DNA, 201 bp, Homo sapiens
actgggccactcagtgagactctgtctcaggaaaaaaaaagacggggtttcaccatgttggccaagctggtctcgaactcctgacctcaggtgatccgccygcctcagcctcccaaagtgctaggattacaggcatgagccacagtgcctggcctcaatcatgaattttcttaatggcatctaaatggtgactcctttcta

SEQ ID NO: 467014 - DNA, 201 bp, Homo sapiens
tttttttgagatggactctctccgtcgctccgactggagtgtagtggtgcggtcttggcccactgcaacctccgcctcttggattcaagtgattctcctcsctcagcctcctgagtagctcggattacaggcatgaaccaccacgcctgtctcatttttgtatttttagtagacacagggtttcaccatattggccaggct

SEQ ID NO: 467015 - DNA, 201 bp, Homo sapiens
tgttgtttgtgtggttagaatttggtgtagaagggtagactgcagtatctattagttcatcatcttataaccagtattggatattttgttcttcttctccttttttttttttttttgagacagggtctcactctgtcacctaggctggagtgtggtgatgtgatcatagctcactgcagcctcaatctcctggcctcaagt

SEQ ID NO: 467016 - DNA, 201 bp, Homo sapiens
gttgtttgtgtggttagaatttggtgtagaagggtagactgcagtatctattagttcatcatcttataaccagtattggatattttgttcttcttctccttttttttttttttttgagacagggtctcactctgtcacctaggctggagtgtggtgatgtgatcatagctcactgcagcctcaatctcctggcctcaagtg

SEQ ID NO: 467017 - DNA, 201 bp, Homo sapiens
tgtatttttagttaaagatggggtttcaccatgttggtcaggttggtcctgaactcctgacctcatgatccacccaccttggcctcccaaagtgctgggaytacaggtgtgagccaccgcgcctggccatttctttgttcttgacccttgagagtgcgattattatatgctttggggtggtcttatttggatctgaatcta

SEQ ID NO: 467018 - DNA, 201 bp, Homo sapiens
accagtaccatgctgttttggttactgtaaactacttttccattcagatcattttagtttggttaattatgtaaaagcaaatatttgtttagagtaatgcygctgctccattaatgaattattgcctggttccctcgttattgtacatctcagtcactttcaattatgctcaaaaggcgcatctctcaaaggaatcttttt

SEQ ID NO: 467019 - DNA, 201 bp, Homo sapiens
gctgaggcaggagaatcacttgaacctgggaggcggaggttgtggtgagctgagattgctccattgcactccagcctgggcaacaagagcaaaactctatytcaaaaaaaaaaaaaaaaaaaaaaaaaaaaagaatcctgactgaagcctaggagcacagagattggaagagtcaggggagttttcaatgagaagttaata

SEQ ID NO: 467020 - DNA, 201 bp, Homo sapiens
actctcccatttcatcatcttttttggcattagaaatccctacaagcttcaggatttttctcttaaagcaaatactgaagataaaaaaattagcttcattsaggctatcttttatcaaatagcacataatttatacagacttggtgggaaattctgccagtgaacaactttgttgtttcaaatcatcaagccccatttgaa

SEQ ID NO: 467021 - DNA, 201 bp, Homo sapiens
attttcctgtcttacactcaggtgaaaaatcatttggatatatatctgatggctttacaaaaattatttacaaaaagtaattgcatataatacagtgtttwtgccaaagtatgtttatgtcttaaaaactttagtggaaatgtgtattcaggtcccttgctcattttctaattgggtttcttgttttcttaatattgagtt

SEQ ID NO: 467022 - DNA, 201 bp, Homo sapiens
ccagagccctaggacaggtattgaggcttaactcatcagctgatccctcagtccctcaccgtctatcatcattcttggccctcccagcccttatttcactycgaggtctagcctttttctcaccctgccttcagtgtccattcaaagtccagcctcttctcctcatggaatctcatatttggaggtagatcatccttacgg

SEQ ID NO: 467023 - DNA, 201 bp, Homo sapiens
gcctcacgaactgcaggagccccaagtcctctgcaacgtcatgatcaaactcctcctcctgtgcaggccggacccaggccagacttagtaggagggacccractgaggccgtttcgaggacagagccgcgctcctgtgcaacctcagtttctcagggcctccaaagacagcatcgcctcgttcccgcccccgcacaacctg

SEQ ID NO: 467024 - DNA, 201 bp, Homo sapiens
gacccatgaggagacgtctttggtgtgctggggagagataataaaggcctgcagcaagcaggggaagcaggaatggagacgggcagggtggaagacatgcraaggaagtggagcggtcaggactccattgtttaattggtgatgacaggaagagaaagagaaagagtagactgtgtgagagagagcagaagagaaggaaag

SEQ ID NO: 467025 - DNA, 201 bp, Homo sapiens
ctcctgcgggccagtgtgcttcttgtctttcacgggtgtcttccgtgttattccaaccaaaccagctctccagcatcctatgttttcttcccttagctgtstgctctcacgggtcacccaccccctcctgttccatgtggtcccctcacctgacttctgagtcacctttacatctccttcctactttcactttgcttctct

SEQ ID NO: 467026 - DNA, 201 bp, Homo sapiens
ccctgggatccctacatttcacctgccctgggcccatacatcctctaagtctgctccgaccgtccttaactctgccctcctagccccgcagcagttcccgrgaccttgtgcctccttccccgacgccgcctgctcaccggtgccctcgggcaggctcaggatgtcctcgccctgcacccagcggtagcacgggaaggccac

SEQ ID NO: 467027 - DNA, 201 bp, Homo sapiens
gacctcggggaaccactgaccagccagggcactcttctggccccagaagatctgatcaaagtcttctaggcagttccaggagctcaggagggtgtaaacaygtttgagggccatctccagagccctaggacaggtattgaggcttaactcatcagctgatccctcagtccctcaccgtctatcatcattcttggccctccc

SEQ ID NO: 467028 - DNA, 201 bp, Homo sapiens
tttatttatttattttcccccagtattttatttactggtttgatggttcaggtttcaggccagtagaagaggtgtccctgagtaggaatcggttgtgggtraagcaagtgggtaaatgaagacccaggcttgacagaggtggctggaggagccctcggtgagtcacagtgaggtcttatcagggagaagggttggagccac

SEQ ID NO: 467029 - DNA, 201 bp, Homo sapiens
aatgggatacacatgctttcccgtgtggagggaggaagggaggcgtgatgagaggctggggtcctgtccccagaagggcagggctgggaaggcgccctggsagagtctcccaggagcttcttctgtctctagaatggatcttacctcggtcctgggcctggcacagccccacctccgtgatctcccgacaccaggcctgca

SEQ ID NO: 467030 - DNA, 201 bp, Homo sapiens
ctgatgtgtctagttatagatttatgttcattttttctgcttgggatgtaccagtctgtggggtttgatgtgaagcctgcagaactgtgtaccagttaacyctcttttcttcataaattatccagcctcaagtatttctctatagcaatgcaaaaatggcctaatccaccttctttgtgtctttttacagtttttgacttg

SEQ ID NO: 467031 - DNA, 201 bp, Homo sapiens
gggtcactgggagaaggagctgggggctgccgggaccaggggcgggaaagggagatggggttgagcccagcccgggatcccagctgcggaccctgtccctratcttgcccacctcgtcccagcttcgtggaagtcccagtccgcgaggtcgcgctgtcacctcgcccccagcctcccgccctcccgccgcgagcccagctc

SEQ ID NO: 467032 - DNA, 201 bp, Homo sapiens
aaagggttccgtgtggaagcgcctgatcaccaccacccggtttgggtgagggacctgagtccttttcttttcagtcttgcagcagctgtttcctggcaggrcaaatggtcagaaataccatatgtacaggccttcacggccctacgccaaaacctaatcatctccgcaaagaaagtccaaagacaggactagatagtatag

SEQ ID NO: 467033 - DNA, 201 bp, Homo sapiens
ctgcaacctctgcttcctgggttcaagcgattttcctgcctcagcctcccgagcagctgggattataggcacacatcaccatgcccagctaattattattwttttttttttggtagggacggggttttaccatgttggccaggatgatctcgatctcctgacctcatgatctgcctgcctcggcctcccaaagtgctggga

SEQ ID NO: 467034 - DNA, 201 bp, Homo sapiens
ctcccgccctcccgccgcgagcccagctcggcccgggcctgggcccggggtccccgctgccctagctcccctcgctccccgcgctgacctcgccccgcgcsggccgcagctgcagctccagctccgcctccccgcgcgtcccgaccagccaaagctgcacgcggttgtacgacccggagaagagccaggccccggtggcca

SEQ ID NO: 467035 - DNA, 201 bp, Homo sapiens
ccctgagctgatccctatttggcagctatcattaacacagagctggtccatgtcacagacttttcctgaaggtttagaagggcagggaccagggtgaaacyagcgaggcactttccttgagtgccacatttaagggggcaccaaaaactcagtgctcaaaataaataacgatttaatgcaatatttaaaacaccaaaatga

SEQ ID NO: 467036 - DNA, 201 bp, Homo sapiens
gtgagccagccaggaggtaagcccaacgtttgggatttattttcctttttgtcctctttctctctcttttcctttccaactcgggactctcggtggacagygcctaggcatggaggcaaccgcaggtttgtggttggggccactctccagggaaactgaaagggttccgtgtggaagcgcctgatcaccaccacccggttt

SEQ ID NO: 467037 - DNA, 201 bp, Homo sapiens
tggggacacttgctgaggaaacacacgaggatggggagtagattggggaggaaaatgggagtgaggtgacacatctagaaaatgggagagccgctgggtgyggtggctcacacctgtatgtaatcccagcactgtgggaggccgaggcgggtgggtcacctgaggtcaggagtttgagaccagcctgaccaatatgatgaa

SEQ ID NO: 467038 - DNA, 201 bp, Homo sapiens
ccttcttccgtgatgttcgctaacagctctacagtacttactttgggccagacatttttctaagtgctttttacatataataactcataacaactccggaytccttagagaggcttgttaagttttatgggttagcacttcttattatctttggaagaacaaagcctgaaaacctgctcagtcagccagagattcctgttc

SEQ ID NO: 467039 - DNA, 201 bp, Homo sapiens
aggcagaggtacggtctctaggctggagcacctgggcagctgtagactgtggctaaaaaactactgacttcaaacaatgtaccagcctgtgagtggcgttyttcctggcagtccaggatttgtgcaagtgagtttgcatgtggagtgaatttcttgctatcctcatacctgggttttttttgtttttttttttttgagaca

SEQ ID NO: 467040 - DNA, 201 bp, Homo sapiens
atttatttatttagacagagtcttgctctgttgctcaggctggagtgcaatggtgtgatctcggctcactgcaacctcctcctcctggggtcaagtgattytcctgcctcagcctccccagtagctgggattacaggcacctgccatcacgcccagctaagttttgtatttttagtagagacggggtttcaccatgatggc

SEQ ID NO: 467041 - DNA, 201 bp, Homo sapiens
tgttttcttctaacatttttatgatttcaggtcttacatttaagtctttaatccattttgagttgacttttgtgtatgttataaataaggtctaatttcatttttttaatgtttatgttcagctcttttgtttttgctcacaatttctttagatattagaagtcttttgtagctcaatacaagttttaggatttctttttt

SEQ ID NO: 467042 - DNA, 201 bp, Homo sapiens
gtgcttgttagcatttctggacacactctggagaattctcagcttccttgggcaggtggggtgtctcatgatgatgtgagaagaagcagattgtttgcagrggagtgggtgttgacagggttcagtggggaaggatccatgtctcacccctggtcttgggccctctgcagtccagtctcagtcatctctctgcaccaggcc

SEQ ID NO: 467043 - DNA, 201 bp, Homo sapiens
ccatgtttttttttttttttttttttttgcagattaattaccttctttcaaacagttggaatcacttccttcatagtaattaagtagaatcttttaattcwtttctataacaaacattcctgacagcataggtgtccacctcctgaagttcccatgaaatcttttaaccattcatttcctcttgcctggagatgattgtgc

SEQ ID NO: 467044 - DNA, 201 bp, Homo sapiens
tgcccatagctctcttaaaaatctgtaatacccctagagcaaaatttaatataagcctatacgaaggctattagtttgtttttatgtgtgtgtgtgtgtgtttttttttttttttttgagacggagtctctctctatcgcctaggctggagtgcagtggcacgatcttggctcactgcaagctccgcctcccgggttcacg

SEQ ID NO: 467045 - DNA, 201 bp, Homo sapiens
acgaaggctattagtttgtttttatgtgtgtgtgtgtgtgtttttttttttttttttgagacggagtctctctctatcgcctaggctggagtgcagtggcrcgatcttggctcactgcaagctccgcctcccgggttcacgccattctcctgcctcagcctcccgagtagctgggactacaggcgcccgccagcacgccca

SEQ ID NO: 467046 - DNA, 201 bp, Homo sapiens
agcgccactacgcccagctaatttttgtatttttagtagataccatgtttcaccatattggccagggtggtctcgatctcttcacctcgtgatccgcccamcttggcctcccaaagtgctgggattacaggcatgagccactgcgcctggccagtgaaggcttttgtgatgagttaaaacatggtggaaaaggtcaaaggg

SEQ ID NO: 467047 - DNA, 201 bp, Homo sapiens
ccagcctgtgagtggcgttcttcctggcagtccaggatttgtgcaagtgagtttgcatgtggagtgaatttcttgctatcctcatacctgggttttttttktttttttttttttgagacagagttatgctcttgttgcccaggctagagtgcaatggtggcatctcagctcactgcaacttccacctcccaggttcaaatg

SEQ ID NO: 467048 - DNA, 201 bp, Homo sapiens
aggcctgagccactgtgcccggccttgtttttttggacatggaattttcgctcttgttgcccaggctggagtacaatgccttgatcttggctcactgcaayctctgccttccgggttcaagcgattctcctgcctcggcctcccgagtagctggaattacaggcatgaaccaccatgcccggctaattttgtatttttagt

SEQ ID NO: 467049 - DNA, 201 bp, Homo sapiens
gctagagtgcaatggtggcatctcagctcactgcaacttccacctcccaggttcaaatgattctcctgcctcagcctcccgagtagctgggattacaggcrtgcaccaccatgcctggctaattttttttttttgtatttttagtagagatggggtttctccatgttggtcaggctggtttgaactcccgacctcaggtga

SEQ ID NO: 467050 - DNA, 201 bp, Homo sapiens
ccgttgtttagtgttgccaccttcttcagtgatcttagctggatcttctggataacttgctgcagcttctccatcagcacttgctgcttcaccttgcactyttatgttatggagatggctactttccttaaacctcatgagccaactctgctagcttcctgcagcttccttatctctctcacccttaacagatttgaagaa

SEQ ID NO: 467051 - DNA, 201 bp, Homo sapiens
ccttccgggttcaagcgattctcctgcctcggcctcccgagtagctggaattacaggcatgaaccaccatgcccggctaattttgtatttttagtagagayggggtttctccacgttggtcaggctggtcttgaactcctaacctcaggtgatctgcccgccttggcctcccaaagtgctgggattacagaaggctattct

SEQ ID NO: 467052 - DNA, 201 bp, Homo sapiens
gcggtcaaagtactgggattagatagttggatacacctttcaaggatcaagtctgtgatacctgaagccccggacctggaacctgaagttcccatcagccmctgcacctgtgaacctgtggcagccctgaagtacctgtttagaagacagccaaaagagaaatgcctaccaacgttccttggtgtttttgttgcatagtta

SEQ ID NO: 467053 - DNA, 201 bp, Homo sapiens
gatacctgaagccccggacctggaacctgaagttcccatcagccactgcacctgtgaacctgtggcagccctgaagtacctgtttagaagacagccaaaaragaaatgcctaccaacgttccttggtgtttttgttgcatagttactgtaggctggataatagtagccatgtttttttttttttttttttttttgcagatt

SEQ ID NO: 467054 - DNA, 201 bp, Homo sapiens
ctagtgatggccttatagtttcatgttgactcactatttaatatttcttttaaaatttttcatgtagttggaagtagtcatcccctttttttctggagaattattattattattattattattattttattattattatcttggttcctgcctattaatcttaggagggatagaagacagttgtgttagcattagtctgct

SEQ ID NO: 467055 - DNA, 201 bp, Homo sapiens
tacctgaagccccggacctggaacctgaagttcccatcagccactgcacctgtgaacctgtggcagccctgaagtacctgtttagaagacagccaaaagaraaatgcctaccaacgttccttggtgtttttgttgcatagttactgtaggctggataatagtagccatgtttttttttttttttttttttttgcagattaa

SEQ ID NO: 467056 - DNA, 201 bp, Homo sapiens
agtgatggccttatagtttcatgttgactcactatttaatatttcttttaaaatttttcatgtagttggaagtagtcatcccctttttttctggagaattattattattattattattattattttattattattatcttggttcctgcctattaatcttaggagggatagaagacagttgtgttagcattagtctgcttt

SEQ ID NO: 467057 - DNA, 201 bp, Homo sapiens
actgcaaccctgagctccttggttcgagtgggcctcctggctcagccttgtgagtagctaggactgcaggtgcacaccactgcattggctaatttttaaattttttgtagagagatgaggttgcactatgttattatgttattcagcttgttttgaatacctgggctcaagtgatcctcctgccttgacctcctaaagcac

SEQ ID NO: 467058 - DNA, 201 bp, Homo sapiens
tgtgaacctgtggcagccctgaagtacctgtttagaagacagccaaaagagaaatgcctaccaacgttccttggtgtttttgttgcatagttactgtaggstggataatagtagccatgtttttttttttttttttttttttgcagattaattaccttctttcaaacagttggaatcacttccttcatagtaattaagtag

SEQ ID NO: 467059 - DNA, 201 bp, Homo sapiens
tgtctcatgatgatgtgagaagaagcagattgtttgcagaggagtgggtgttgacagggttcagtggggaaggatccatgtctcacccctggtcttgggcyctctgcagtccagtctcagtcatctctctgcaccaggcctgcagctctagatcatccttcatggcttggtcactattgtagaaaagcccaaccatcccct

SEQ ID NO: 467060 - DNA, 201 bp, Homo sapiens
tgaagtacctgtttagaagacagccaaaagagaaatgcctaccaacgttccttggtgtttttgttgcatagttactgtaggctggataatagtagccatgtttttttttttttttttttttttgcagattaattaccttctttcaaacagttggaatcacttccttcatagtaattaagtagaatcttttaattcatttct

SEQ ID NO: 467061 - DNA, 201 bp, Homo sapiens
agtacctgtttagaagacagccaaaagagaaatgcctaccaacgttccttggtgtttttgttgcatagttactgtaggctggataatagtagccatgtttktttttttttttttttttttgcagattaattaccttctttcaaacagttggaatcacttccttcatagtaattaagtagaatcttttaattcatttctata

SEQ ID NO: 467062 - DNA, 201 bp, Homo sapiens
gggatccaggagtaccagtccagctgcagggaggagagcccagagaaatgcaggctgatgacctgggcatttgatcccccacttctccatcccaggagccsttgtgggatgatcacataggttacctggcccaggtggttagaagcatgctgacctgtgcatgtgaagatgcacatggtgacaaagtggcagagctgagcc

SEQ ID NO: 467063 - DNA, 201 bp, Homo sapiens
tccttatttaagtgtattcctaagtattttattcttcctgatgttattgtagatggaattgttatcttaatttcttttttggatagttcgttgtcagggtrtagaaatgctactgatactgtaggttggtttttgtatcctgcaactttactgaattcatttattagttttagcagtttttttggtggaatctttagggtt

SEQ ID NO: 467064 - DNA, 201 bp, Homo sapiens
taaaaatgcctatttttaaaagccactttgaattcactttctgttacacgtagacaaaagagtcctgagtaaggccagaggtgaggcagaggtacggtctytaggctggagcacctgggcagctgtagactgtggctaaaaaactactgacttcaaacaatgtaccagcctgtgagtggcgttcttcctggcagtccagga

SEQ ID NO: 467065 - DNA, 201 bp, Homo sapiens
tgcctagtgatggccttatagtttcatgttgactcactatttaatatttcttttaaaatttttcatgtagttggaagtagtcatcccctttttttctggakaattattattattattattattattattttattattattatcttggttcctgcctattaatcttaggagggatagaagacagttgtgttagcattagtct

SEQ ID NO: 467066 - DNA, 201 bp, Homo sapiens
tccagctgcagggaggagagcccagagaaatgcaggctgatgacctgggcatttgatcccccacttctccatcccaggagcccttgtgggatgatcacatrggttacctggcccaggtggttagaagcatgctgacctgtgcatgtgaagatgcacatggtgacaaagtggcagagctgagcccgggactctaaggagatg

SEQ ID NO: 467067 - DNA, 201 bp, Homo sapiens
ctgagcccgggactctaaggagatgaggaacctggtgaaatgagaatcctggtgaaatgagaatcagagatctcgaaaccagaacacgaaataggtctcasgcagggaaagctatgtggagatacagaaaagaacttttctgtggttctggcctgcacaccctaggactcccaccttgtgtgtgctcaaaggttaatgcac

SEQ ID NO: 467068 - DNA, 201 bp, Homo sapiens
gaggagtgggtgttgacagggttcagtggggaaggatccatgtctcacccctggtcttgggccctctgcagtccagtctcagtcatctctctgcaccaggyctgcagctctagatcatccttcatggcttggtcactattgtagaaaagcccaaccatcccctccacgtacctattccctgggaagaagacactcagtctc

SEQ ID NO: 467069 - DNA, 201 bp, Homo sapiens
tatttcattgtatagaaatgtcacaatttgatcatccgtttcatcaacctgttgacaaacatttggattgtttccagcttttggctttaggaaacagtgckgctttgaacgtaatttaatgctgttatgaatatatgttgtcgggtctttgtgtggactgttttcacttctcttgggtaaacacctaggagtggaattgct

SEQ ID NO: 467070 - DNA, 201 bp, Homo sapiens
aatggatcttacctcggtcctgggcctggcacagccccacctccgtgatctcccgacaccaggcctgcagctcagggtcccccttcactatgtcatccctytggtagaagaggtggacgatcccctccacatacctgcccagggggaaaaggcacttgagggcagaaagcccccgcctctgacctctattcctctttctgt

SEQ ID NO: 467071 - DNA, 201 bp, Homo sapiens
caaacacctcatttttgctgactctggtttcttctaactttactgtttctgacaattactctggtttgtaagcttgtatcatttttgtgctccctctgccaagttccctgtatataaagtatcatcaagattttaagaacattttcttaagcaagcacaggtcttattttgccttctcccagcaatatatatggaactcac

SEQ ID NO: 467072 - DNA, 201 bp, Homo sapiens
cccaggggttcaggtatataaccctccctgaacccagcttctgcgttttcattctcaaggcctctctgagttgaccagatatgataaggtctcttcttgcraagagttacgggggactgtggagtgtgatgagtcatccagaggggccattaagggattatggagacctcggggaaccactgaccagccagggcactcttc

SEQ ID NO: 467073 - DNA, 201 bp, Homo sapiens
agccaccgcgcctggcctttatgtagactttcaatcaattctactgtgttcagcctcatgtgtacccctaccttcagtagttattggtacagtagcccccyttttctagtggggagaccttctaacttccaagatccccagtggatgcctgaagccatagacataccaaatctatagatacagtcagccctccttatccat

SEQ ID NO: 467074 - DNA, 201 bp, Homo sapiens
ggtgcactttcagagaactccttagctgagtcctccaattcacaagttggctcttcagctctgtccatcctgccattgagttttaatttcaacagttatcttttttttttttttttgagacggagtcttgttctgttgcccaggctggagtgcagtggtgtgatctcggctcactgcaagctctgccttccagttcacgcc

SEQ ID NO: 467075 - DNA, 201 bp, Homo sapiens
tgaaaccccatctctactaaaaatacaaaaaaaattagctgggcgtggtggcgggcgcctgtagtcccagctactcgggaggctgaggcaggagaatggcrtgaacctgagagtcagagtttgcagtgagccaagatcgcgccactgcactccagcctgggcgacacagcgagactctgtctcaaacaacaacaacaacaa

SEQ ID NO: 467076 - DNA, 201 bp, Homo sapiens
aattagctgggcgtggtggcgggcgcctgtagtcccagctactcgggaggctgaggcaggagaatggcgtgaacctgagagtcagagtttgcagtgagccragatcgcgccactgcactccagcctgggcgacacagcgagactctgtctcaaacaacaacaacaacaacaacaacaacaacaacaaacatgctggtgaga

SEQ ID NO: 467077 - DNA, 201 bp, Homo sapiens
gcgggcgcctgtagtcccagctactcgggaggctgaggcaggagaatggcgtgaacctgagagtcagagtttgcagtgagccaagatcgcgccactgcacyccagcctgggcgacacagcgagactctgtctcaaacaacaacaacaacaacaacaacaacaacaacaaacatgctggtgagattgcagagaaaagggaat

SEQ ID NO: 467078 - DNA, 201 bp, Homo sapiens
attagcttctcatgagagtcagcttgccctctgaagtttttttttgtgttgtttttgagacagagtctcgctttgtcacccaggctggagtgcagtggcaygattttggctgactgcaacctccgcctcccaggttcaagtgattctcctgcctcagccccccgagcagctgggactacaggcatgtgccaccatgcctgg

SEQ ID NO: 467079 - DNA, 201 bp, Homo sapiens
ggcagcaagcaagagagtgtgtataggggaactgccctttataaaaccatcatatcttgtgagacttattcactatcatgagaacagcttgggaagaaccygcccccatgattcaattacctttcactgggttcctcccatgatacatggggattatgagagctacaattcaagatgagatttgggtggagacacagccaa

SEQ ID NO: 467080 - DNA, 201 bp, Homo sapiens
tgatactgtaggttggtttttgtatcctgcaactttactgaattcatttattagttttagcagtttttttggtggaatctttagggttttctacatataasatcatgttagcaaatgagacaatttaacttcttccttttctatttggatgccatttcattctttttcttgcctaattgctctggctaggccttctagtac

SEQ ID NO: 467081 - DNA, 201 bp, Homo sapiens
tgggtggagacacagccaaaccataccaatacccaaaggaaaataaattgttctaccataaagacacacgcactcatatgttcattgcagcactactcacmatagcaaagacacggaatcaacctaaatgcccatcatcaatacaccagataaagaaaaggtggcacatatacatcgtggaatactgtgcatccataaaaa

SEQ ID NO: 467082 - DNA, 201 bp, Homo sapiens
tgctaactaagcagtcactctccatttctctctcttctcagcacttggcaaccactaatctgctttctgtctctatggatttgcctattctggacatttcwtataaatggaatcattcaatatgtggtcttcggtgtctggcttcctttatttagcataattttgtttgtttgtttgtttgtttgtttttgagacagatcc

SEQ ID NO: 467083 - DNA, 201 bp, Homo sapiens
caacctccgcctcctgggttcaagtgattctcctgcctcagcctcccaagtagctgggactacaggcgtgcgccaccatgcccaggtaatttttgtatttytagtagagatgaggttccaccatgttggtcaggctggtctcgaactcctgacctcatgatctgcccacctcatcctcccaaagtgctgggattacaggca

SEQ ID NO: 467084 - DNA, 201 bp, Homo sapiens
acttgatcatggtgtattattcttttaatggattgttgaattttgtttgctagtattttgttgaggattcttgcatttgtgtttatcagggatattgtctygtatttttcttttcttgtagtgttcttatctggctttgggatcagggtaatgctggtcttgtagaaacagtttagaagtgttccctcctctttaattttt

SEQ ID NO: 467085 - DNA, 201 bp, Homo sapiens
gtgcagcaaaccaccatgggacgtgtatacctatgttaacaaacctgcacgttctccacatatatcccagaacttaatgtataataaaaaattacttttawatttatttatttatttagagacagggtcttgctctgttgcccaggctggagtatagtggtgcaatcacagctcaccacagccttgaccacccaggctcaa

SEQ ID NO: 467086 - DNA, 201 bp, Homo sapiens
cagtatttgaagaggactggggagtcaccattcagtgtgttgcttttgttacattttcttttgttccacagggcacatttacctgatgtccgaagtccagygtccccctctgctctagcagacgataaacttctagtcttctgctggagaggagggagaattgcctgacttagtggatgataaaggaatatgggggccatt

SEQ ID NO: 467087 - DNA, 201 bp, Homo sapiens
aggtgatcctcccacctcggcctcccgaagtgctgagattccaggtgtaagccaccatgtccagccccatatgaagttttggattttttttttatttctaygaaaagtgatgttgggatattcatagggattgcattgaatttgtagatcactttgggtagtataacattttagtaatattagttcttctgaaccatgaac

SEQ ID NO: 467088 - DNA, 201 bp, Homo sapiens
tggggagtcaccattcagtgtgttgcttttgttacattttcttttgttccacagggcacatttacctgatgtccgaagtccagcgtccccctctgctctakcagacgataaacttctagtcttctgctggagaggagggagaattgcctgacttagtggatgataaaggaatatgggggccatttgctttttatatggact

SEQ ID NO: 467089 - DNA, 201 bp, Homo sapiens
aacctccaggtgggctctctattctttccccttccttctctctttttttttttttctgattgagacaaagtctcactctgtcaccagactggagtgcagtkgtgtgatctcggctcactgcaacctctgcctcccaggttcaagcgattcttgtgcttcagcctccgagtagctgggactacaggcgtgcaccaccacacc

SEQ ID NO: 467090 - DNA, 201 bp, Homo sapiens
cgagacaagctggctcaagcatttgaagatgcttttgaggtactgaggcaacattcaactggagatcttcaaaacttacctggttttcatcagtgattgtmcccatgtcagaggagattccaactgctatggaatgttgcttacagaggaatctatttataattggagaactttaataaataatgctgcagacttctattt

SEQ ID NO: 467091 - DNA, 201 bp, Homo sapiens
ttacaggataccaggcaacaccaacctcctaagcctcgaacctctctctgccactggctgcttcgtccctgtgctggttctcctcctaacctccaggtggkctctctattctttccccttccttctctctttttttttttttctgattgagacaaagtctcactctgtcaccagactggagtgcagtggtgtgatctcggc

SEQ ID NO: 467092 - DNA, 201 bp, Homo sapiens
aatggtacattgtcatggtgctgataggagtgtcttacggtgatgggcagtgagaggttctttcagcccctctactggtttcggtcagttttgttttgtcttttttttttttttttttgagatggactctctccgtcgctccgactggagtgtagtggtgcggtcttggcccactgcaacctccgcctcttggattcaagt

SEQ ID NO: 467093 - DNA, 201 bp, Homo sapiens
ttacaggcatgagccacggcgcctggcccccttcctcctcctgaaaaggcggatctcaaggctcagtcctgctcttccctccacatcctttgctcttgcargtctcctcttccacgcaggtggctccctcatctcctcttcaatatctgacttctctcaaaagttccaagtctggatttgccattacttgctggacatctc

SEQ ID NO: 467094 - DNA, 201 bp, Homo sapiens
ccttgaattccttgggtcaagggatcctccagccccagtctcccaggtagctaggactacaggtgcaggccaccacacctggctaccattttttttttttwacttttcatagagatgggggtctggctatgttgcccaagctggtcttgaacttctggccccaagcattcctcctgctttgtcctcccaaagtgctaggat

SEQ ID NO: 467095 - DNA, 201 bp, Homo sapiens
caagatcgcgccactgcactccagcctgggcaacaaagcaagactccatctcaaaaaaaaaaaaaaaaaaattcactatttgccatcctcattcctcctcrtctcctgcgggccagtgtgcttcttgtctttcacgggtgtcttccgtgttattccaaccaaaccagctctccagcatcctatgttttcttcccttagctg

SEQ ID NO: 467096 - DNA, 201 bp, Homo sapiens
taaggacatatgcaagactgggtaatttataaagaaaaagaggtttaatggactcacagttccacatggccagggaggcctcacaatcatggcggaaggtrgagaggagcaaaggcacatcttacatggcagcaagcaagagagtgtgtataggggaactgccctttataaaaccatcatatcttgtgagacttattcact

SEQ ID NO: 467097 - DNA, 201 bp, Homo sapiens
tgcctcccgggttcaagcaattctcctgcctcagcctcctgagtaggtgggattacaggcacccgccaccacgcccagctaatttttttgtattttcagtrgagatggggtttcaccatgttggtcaggctggtctcaaacccctaacctcatgatccacctgccttggcctcccaaagtgctgggattataggcgtgagc

SEQ ID NO: 467098 - DNA, 201 bp, Homo sapiens
cctcccaaagtgctgggattataggcgtgagccaccgtgcccagccaatttttgtatttttagtagagatggagtttcaccatgttggccaggctggtctygaactcctgacctcaggtgatccatccgcctcggcctcccaaagtgctgggattacaggcatgagccacggcgcctggcccccttcctcctcctgaaaag

SEQ ID NO: 467099 - DNA, 201 bp, Homo sapiens
tctactaaaaactacaaaaattagccaggcgcggtggtgggcccccgtaatcccagctacttgggaggctgaggcaggagaatcgcttgaacccgggaggyggaggttgcagtgagctgagatggtgccactgcactcctgcctgggctacagaaagagactccattaaaaaaaaaaagacttcctatattgtcattgtct

SEQ ID NO: 467100 - DNA, 201 bp, Homo sapiens
ccatccccttataaggaaatctgccccatccacagtcagaggtgtacttggatgggaccactccccagacaaaagagcagggtcagtttctcactatgggkgtgtgtgtgtgtgtgtgttgatctggaaaatacagagaggatcaggcagttagcaataggaacaaagacggagagaagccagaggggccaagatggccat

SEQ ID NO: 467101 - DNA, 201 bp, Homo sapiens
tagaataactttgtagttcttgtccatttattttgtgcatgttgttcttaaaaggcttgtgaaagataacttggaatgtgggaaacacatagatcccagartattaaaggggctggaaaagtagccttaagacatgaattatgtgcctttcatctgggactgtttggagaaagaagccattttggggcagtggtttgtatt

SEQ ID NO: 467102 - DNA, 201 bp, Homo sapiens
ccactgcactcctgcctgggctacagaaagagactccattaaaaaaaaaaagacttcctatattgtcattgtctctaataatctccacctctctctctctytctcttttttttttttaccactttcttggaaatttccacctcttctattgaattaaaacttttttttgctattgaacattttctgtcttgttctgtgatt

SEQ ID NO: 467103 - DNA, 201 bp, Homo sapiens
actgcactcctgcctgggctacagaaagagactccattaaaaaaaaaaagacttcctatattgtcattgtctctaataatctccacctctctctctctctctcttttttttttttaccactttcttggaaatttccacctcttctattgaattaaaacttttttttgctattgaacattttctgtcttgttctgtgattgt

SEQ ID NO: 467104 - DNA, 201 bp, Homo sapiens
tcaggccgggtgcggtggctcacgcctgtaatcccagcactttggaaggccgagacgggcggatcacgaggttaggagatcgagaccatcctggctaacayggtgaaaccctgtctctactaaaaatacaaaaaaaattagctgggcgtggtggcgggcacctgtggtcccagctactcgggaggctgaggcaggagaatg

SEQ ID NO: 467105 - DNA, 201 bp, Homo sapiens
aaaaaaaaaaaaaaagaagcaaaaaagaaaactgaaaaaagaggggagcaacaacaactaatataaaatagaataaaatagaatataatagaacaattgtracaatctaactataataaaagttgggtgaatgtggcctttctcaaaatatctgattgtgctgtgctcacctatttttgggctgtggctgactgcaggaaa

SEQ ID NO: 467106 - DNA, 201 bp, Homo sapiens
ctgcactcctgcctgggctacagaaagagactccattaaaaaaaaaaagacttcctatattgtcattgtctctaataatctccacctctctctctctctctcttttttttttttaccactttcttggaaatttccacctcttctattgaattaaaacttttttttgctattgaacattttctgtcttgttctgtgattgtt

SEQ ID NO: 467107 - DNA, 201 bp, Homo sapiens
agcagaatcgattgaacccgggaggcagaggttgcattgagctgaggctgagatcgggcaactgcactccagcctggcgacagagccagactctgtctcaaaaaaaaaaaaaagaaagaaacctgcatatgtatccccaaatctaaaataaaaattgaaaaaaaaaaaaagggctgggtgcagtgggtgcagtagttcact

SEQ ID NO: 467108 - DNA, 201 bp, Homo sapiens
tgcaagcatttgacttttaactttccctggtctgctgaattgattaccccttgtttatctgctttcagcttccaaaatatagatgccatttctttctttctttctttttttttttttttcttgagacggagtttcgctcttgttgcccaggctgggatgcaatggtgtgatctcggctcattgtaacctccgcctcctggg

SEQ ID NO: 467109 - DNA, 201 bp, Homo sapiens
tgcactcctgcctgggctacagaaagagactccattaaaaaaaaaaagacttcctatattgtcattgtctctaataatctccacctctctctctctctctyttttttttttttaccactttcttggaaatttccacctcttctattgaattaaaacttttttttgctattgaacattttctgtcttgttctgtgattgttg

SEQ ID NO: 467110 - DNA, 201 bp, Homo sapiens
aagcatttgacttttaactttccctggtctgctgaattgattaccccttgtttatctgctttcagcttccaaaatatagatgccatttctttctttctttytttttttttttttttcttgagacggagtttcgctcttgttgcccaggctgggatgcaatggtgtgatctcggctcattgtaacctccgcctcctgggttc

SEQ ID NO: 467111 - DNA, 201 bp, Homo sapiens
tgtatatgcatatcacagtttctttatccacttgttgattgatgggcattttggttggttccacagtttcgcaattgcgaattgtgctgctataaacatgygtgtgcaagtaccttttttgtataatgacttcttttcctctgggtagatgcccagtagtgggattgctggatcgaatggtagttctacttttagttctct

SEQ ID NO: 467112 - DNA, 201 bp, Homo sapiens
ggaaatttccacctcttctattgaattaaaacttttttttgctattgaacattttctgtcttgttctgtgattgttgctttcagaaaacatcctgcttttrtttcaaagatgctaatcttctctagtatttctgaacatagtaaatatagtttaaaaaatctgtttcttcattattcctattttctctgagtccctctttt

SEQ ID NO: 467113 - DNA, 201 bp, Homo sapiens
ctgaggcagagaattgcttgaacctgggaggtggaggttgcagtgagctgagatcaggccactgcactccagcctgggtgagacagcgagactccatctcaaaaaaaaaaaaaaaaaaaattccgtttatccactgtatgcctcttaatgagagaatttagtctatatacatttaaagtaataattgataggtaaggactt

SEQ ID NO: 467114 - DNA, 201 bp, Homo sapiens
tgaggcagagaattgcttgaacctgggaggtggaggttgcagtgagctgagatcaggccactgcactccagcctgggtgagacagcgagactccatctcaaaaaaaaaaaaaaaaaaaattccgtttatccactgtatgcctcttaatgagagaatttagtctatatacatttaaagtaataattgataggtaaggactta

SEQ ID NO: 467115 - DNA, 201 bp, Homo sapiens
aacatagcatgtattacaagaaaaatattttcatattagattacaaagaaaaacccaactgtctactatacacaaaaggtacatttaaaataaactaattctggaagttgaaaataaaaggatgggcaaatgtataacagacaaaaaaagtatcactcataatcttaaaattagatattataggccaggcaccgtggctga

SEQ ID NO: 467116 - DNA, 201 bp, Homo sapiens
cccattctgtaatatccaaataaaatggctcaaattcccatcctgcctaatagtaggatctggcctttccacacacattttcgtgggttacttttgcctagaaaagagtttgtctcatacctacttccaaaagcactgtttctttgctgttttgtgacttattttctgcccactctagtgtactctacggccacgtgcaga

SEQ ID NO: 467117 - DNA, 201 bp, Homo sapiens
aggcatttgcttctcaccatgacaggctggcgtctgccaaggaactttgtgaaggtcttttgcatacgtgcctggtggagattgggcagtaagtccactakatccttctctgtcacatccttagagatgggcgggggcttctgcatggtgcatgggccattagggatccaggagtaccagtccagctgcagggaggagagc

SEQ ID NO: 467118 - DNA, 201 bp, Homo sapiens
tgcattgcccagtccctggttagtggtcagcagtggggccccgccaggctctgagggctgaggtctggtgggaagcctcaagtgagtttgctgcaactgaycttttgctgcttgaccgttcctctctgtctcagccatgtttgaccgtgagaacaaggccggcgtgaacttcagcgagttcacgggtgtgtggaagtacat

SEQ ID NO: 467119 - DNA, 201 bp, Homo sapiens
aaaacttcctaaatgttgaccacagtggatgcaaatggctctgtgcatcacctgttaaatatggtcagatgaccatccaggttcaagtggtttgtcaccarggtgatacaagccacacggagtgccctcctcagaggccatgtttcagagacatttattttgagtggttttccaatgagtgatgcaagatttatgatccat

SEQ ID NO: 467120 - DNA, 201 bp, Homo sapiens
cttaaaacttcctaaatgttgaccacagtggatgcaaatggctctgtgcatcacctgttaaatatggtcagatgaccatccaggttcaagtggtttgtcascagggtgatacaagccacacggagtgccctcctcagaggccatgtttcagagacatttattttgagtggttttccaatgagtgatgcaagatttatgatc

SEQ ID NO: 467121 - DNA, 201 bp, Homo sapiens
cttggataaacacatatcctcttccttcttctctctgaatttctttattttaagaaaaaaattagagatggagtctcactgtcttgctcaggctggtctcmaactcctaggctcaagtgatcctcctgcctcagcctatactaatatgaattcctatactaatatgattgaaattagtttgatttctataataattgtgct

SEQ ID NO: 467122 - DNA, 201 bp, Homo sapiens
agacctgaagtgaaaaggtgaggaaggcgtgctcacattccagcactcaccacccggcaccgggccagctgactcagcacgtgccgtttaggttgctgtamacagccggtgagattctcccctctggtgggcagtgcgtgtctgacaaaggcagtcgggcggagaacagttcctccgctgtggtcctttgccactgtacca

SEQ ID NO: 467123 - DNA, 201 bp, Homo sapiens
atctgctctgtctatttctgtcctccattctctccctgagacccacccacactgacatggttcattttcattgctgcgtgatctcccgtctccattctctscctgagacccacccacactgacatggttcattttcattgctgcgtgatctcccatctccattctctccctgagacccacccacactgacatggctcattt

SEQ ID NO: 467124 - DNA, 201 bp, Homo sapiens
cttgctcaggctggtctcaaactcctaggctcaagtgatcctcctgcctcagcctatactaatatgaattcctatactaatatgattgaaattagtttgayttctataataattgtgctcccagattgggcttctgttttgatagtagaactaaattattaggctatttcaagaaattaatatattactggtagaaaaact

SEQ ID NO: 467125 - DNA, 201 bp, Homo sapiens
gtgaactcaatcactaccaatagaaaaagtatccactgtattcatctcttatggaaacagaaaaatataacatttccccccttaaaataatatatatattwtatatatatatatatatacacatatgtatatataacttaaagttccattgtacgtagccggacaataaaatctggaaaccagcatgaaaccctgttattc

SEQ ID NO: 467126 - DNA, 201 bp, Homo sapiens
ttttcagggaattcagaaatgctgttatctctacactagtgattgtgctttcttggtttttctcttttcattattcttaaatcctcgttttttttttttttatttgcatctcagttcgtttttactcgggaagtgcaagacgtggctactagaaagagatgtcaagagaacccggaatccagtaggctacaatttggcaaa

SEQ ID NO: 467127 - DNA, 201 bp, Homo sapiens
aatagaaaaagtatccactgtattcatctcttatggaaacagaaaaatataacatttccccccttaaaataatatatatattatatatatatatatatatmcacatatgtatatataacttaaagttccattgtacgtagccggacaataaaatctggaaaccagcatgaaaccctgttattcacatgttaaaatgttgaa

SEQ ID NO: 467128 - DNA, 201 bp, Homo sapiens
tatattatatatatatatatatatacacatatgtatatataacttaaagttccattgtacgtagccggacaataaaatctggaaaccagcatgaaaccctrttattcacatgttaaaatgttgaaactatgaccaaaatgtgaaaactgctagagctatcagaaagagacaagacaaaaaccttctttcatatgtataaac

SEQ ID NO: 467129 - DNA, 201 bp, Homo sapiens
ctccgcctccctccgcaggtctcttggggaccggaatgcctccccccaccccccgacgtcctcccactccctcgcacacactcccgcatgcaggccaagtkgggtggggggaacgaagggagccaggggaagcatgtgagagagtgagaccaacagagcgagcatctccccaagccactaccaccaaccctccaacatggc

SEQ ID NO: 467130 - DNA, 201 bp, Homo sapiens
cctcccctgcgctatcattggacacattttacttcattgaaacctgactgccactttttctgtaatccctcaggggcagtcatcttttctgattctgtgtrtagtttgcttttccagatccgtgccatttaagctagaaaaggggtcagttttgagatgttgtgaaaatgttgaaaggcttcttgttattagtgggaagta

SEQ ID NO: 467131 - DNA, 201 bp, Homo sapiens
gaacgaagggagccaggggaagcatgtgagagagtgagaccaacagagcgagcatctccccaagccactaccaccaaccctccaacatggcgcctggcacrtcaccctaaaaagttatttcttggagaagcaatggatgacagagattaatctgagagttactattagtggagaaacttagaacttaccatttttcctgtg

SEQ ID NO: 467132 - DNA, 201 bp, Homo sapiens
ccccctcccctgcgctatcattggacacattttacttcattgaaacctgactgccactttttctgtaatccctcaggggcagtcatcttttctgattctgwgtatagtttgcttttccagatccgtgccatttaagctagaaaaggggtcagttttgagatgttgtgaaaatgttgaaaggcttcttgttattagtgggaa

SEQ ID NO: 467133 - DNA, 201 bp, Homo sapiens
acccacgatactgtcagagatggagaaaggtatgacaggaagagcagatcaagaagacgggaacagcacgaggcactgggagctgcaaacgcctgcgatamtgtcagagatggagaaaggtatgacaggaagagcagatcaagaagacgggaacagcacgaggcactgggagctgcaaacgcccgcgatactgtcagagat

SEQ ID NO: 467134 - DNA, 201 bp, Homo sapiens
atgtcagagatggagaaaggtatgacaggaagagcagatcaagaagacgggaacagcacgaggcactgggagctgcaaacgcccgcgatactgtcagagayggagaaaggtatgacaggaagagcagatcaagaagacgggaacagcacgaggcactgggagctgcaaacgcccgcgatactgtcagagacggagaaaggt

SEQ ID NO: 467135 - DNA, 201 bp, Homo sapiens
aaagatggacttcagaaactacagctcaaagagctgtggaagattctagaaaggattcttcaacaagtgatatgaatactttgtcaatgaaaaggctgaamctctgtgaaatacttgaagagatttattctgagccaaatagagtggccacgcccatgacacagacctcaggaggtggctggggtgcaacttggttttatg

SEQ ID NO: 467136 - DNA, 201 bp, Homo sapiens
ctgtcagagatggagaaaggtatgacaggaagagcagatcaagaagacgggaacagcacgaggcactgggagctgcaaacgcccgcgatactgtcagagayggagaaaggtatgacaggaagagcagatcaagaagacgggaacagcacgaggcactgggagctgcaaacgcccgcgatactgtcagagacggagaaaggt

SEQ ID NO: 467137 - DNA, 201 bp, Homo sapiens
ctggaaagtggtccgggagtttcttacgaagttaagcacatccttaccctgtcatccagcaaccccgctcctgaaacgtcccccaagagaaaacttaaacrtgcatgcacaaacctgcacacaagtgtttaggcctcattcctcattgccaataactggaagaaaacaaaatgtccatcggcaggaggaggcgggaaccaa

SEQ ID NO: 467138 - DNA, 201 bp, Homo sapiens
atcggcaggaggaggcgggaaccaacgcggatgcttccacacagggggcaccaaccagcagtggaaggatgcacccaaatgccccaggtctcccaggccayatgcccagtgaaggaagctagtttcggtgcgcacaggccgagggatgccgccacgtgacatcttggagaagacagtgctaccgtgttggggagcagggca

SEQ ID NO: 467139 - DNA, 201 bp, Homo sapiens
ttaatagtaatggcaaaaactgcgatgacttgtgcgccaacctaacccagtaatcacgggtgtgcaaaatgtggcgatgggcaagttccgagtgctaggaragcatctagcttcccggagtcaggagacgggggttggcaacctaaccaaggttaagtccaagggaggggggtgggcagggagcgatatttcagtggagac

SEQ ID NO: 467140 - DNA, 201 bp, Homo sapiens
aaggcagatgatggatgaataaatataaatgattctaataggttggtgcagcagtcattaaaagtaatggcaaaaaaaaaaaaaaaaaaaaaaacgaggasccggtgctgcagttcattaatagtaatggcaaaaactgcgatgacttgtgcgccaacctaacccagtaatcacgggtgtgcaaaatgtggcgatgggcaa

SEQ ID NO: 467141 - DNA, 201 bp, Homo sapiens
agaggggaaggcagatgatggatgaataaatataaatgattctaataggttggtgcagcagtcattaaaagtaatggcaaaaaaaaaaaaaaaaaaaaaamcgaggagccggtgctgcagttcattaatagtaatggcaaaaactgcgatgacttgtgcgccaacctaacccagtaatcacgggtgtgcaaaatgtggcga

SEQ ID NO: 467142 - DNA, 201 bp, Homo sapiens
tagaggggaaggcagatgatggatgaataaatataaatgattctaataggttggtgcagcagtcattaaaagtaatggcaaaaaaaaaaaaaaaaaaaaaaacgaggagccggtgctgcagttcattaatagtaatggcaaaaactgcgatgacttgtgcgccaacctaacccagtaatcacgggtgtgcaaaatgtggcg

SEQ ID NO: 467143 - DNA, 201 bp, Homo sapiens
atttgagtagatttggcctctattctcatggagcttcctttctagaggggaaggcagatgatggatgaataaatataaatgattctaataggttggtgcascagtcattaaaagtaatggcaaaaaaaaaaaaaaaaaaaaaaacgaggagccggtgctgcagttcattaatagtaatggcaaaaactgcgatgacttgtg

SEQ ID NO: 467144 - DNA, 201 bp, Homo sapiens; identical to SEQ ID NO: 111460

SEQ ID NO: 467145 - DNA, 201 bp, Homo sapiens
gtgggaaggtggagttatttgagtagatttggcctctattctcatggagcttcctttctagaggggaaggcagatgatggatgaataaatataaatgattytaataggttggtgcagcagtcattaaaagtaatggcaaaaaaaaaaaaaaaaaaaaaaacgaggagccggtgctgcagttcattaatagtaatggcaaaa

SEQ ID NO: 467146 - DNA, 201 bp, Homo sapiens; identical to SEQ ID NO: 111461

SEQ ID NO: 467147 - DNA, 201 bp, Homo sapiens
ttagtttccaagaaataactgacaggcagtgttgtgtgtgtgtctactgcttaggaacccaaaacaaaccttcagaccattttcatgagtactgagaccargaaaaccactgggcagtgggtggtctggaaatgtaaatgtttatagtactccatggagtactatatgagtcatggaacgatgtttcatattgaaaatgtt

SEQ ID NO: 467148 - DNA, 201 bp, Homo sapiens
agggacgggggcagatcgccttcgacgacttcatccagggctgcatcgtcctgcaggtgacggaatggcttcacgtgggtttgtggtggtggtgggagggrcttgcttgccagcgtgatgcacctgaccttcaatctaaggagctgggcatgtgtagaattagtttttggagcttataaaagtgagtctcatctttggaga

SEQ ID NO: 467149 - DNA, 201 bp, Homo sapiens
tggatttggtgactgtctcattgtgccatgaggtaaatgtaatgtttcaggcattctgcttgcaaaaaaatctatcatgtgcttttctagatgtctctggytctatagtgcaaatgcttttattagccaataggaattttaaaataacatggaacttacacaaaaggcttttcatgtgccttacttttttaaaaaggagtt

SEQ ID NO: 467150 - DNA, 201 bp, Homo sapiens
catgtcccacccgcccccacttcatgtcgtggcctgaacggttttcaggttaatttggagtgccctggcccagagaaggggtccattcagatggggtgggrccttagaattttacttttggtttacaactttatgaagagaccattagaaaccacttgaattcacatcatgaaaaaaaatccacactgtaaaaaaggtttg

SEQ ID NO: 467151 - DNA, 201 bp, Homo sapiens
gcatttctctatcagtcagttggtaaatgattattgacagtgtgtgggaaggtggagttatttgagtagatttggcctctattctcatggagcttcctttytagaggggaaggcagatgatggatgaataaatataaatgattctaataggttggtgcagcagtcattaaaagtaatggcaaaaaaaaaaaaaaaaaaaaa

SEQ ID NO: 467152 - DNA, 201 bp, Homo sapiens
tggagtgccctggcccagagaaggggtccattcagatggggtggggccttagaattttacttttggtttacaactttatgaagagaccattagaaaccacytgaattcacatcatgaaaaaaaatccacactgtaaaaaaggtttgtagattaacacattaggtgaatgccaaagccacagaatatctaaatttctctgag

SEQ ID NO: 467153 - DNA, 201 bp, Homo sapiens
acgaaggcagtgctgtcttgcgggaggcagggctgcaccaccaccggggtgtgaaggggcccagcaggcaggggtgtgaaggggcccagcagtgtttccasctgcacggggtcaggggccgcgctgatgcagagcacgggggcgcaggttaaacctaaaggagggaagcttttgggggcggaacagacaaccgagaatgct

SEQ ID NO: 467154 - DNA, 201 bp, Homo sapiens
ggaggaggcgggaaccaacgcggatgcttccacacagggggcaccaaccagcagtggaaggatgcacccaaatgccccaggtctcccaggccacatgcccrgtgaaggaagctagtttcggtgcgcacaggccgagggatgccgccacgtgacatcttggagaagacagtgctaccgtgttggggagcagggcagtggttt

SEQ ID NO: 467155 - DNA, 201 bp, Homo sapiens
gctgatgttgtttgcattgagtctttcagttggagactcagggaggagctgatgttctagatttagggtcatggaactggagacctggagagaagctgatkttctagtttgagggtcttgctgctgcagacccggagaggagctgatgttctagtttgaggatcttgcagctgcagacgtggagaagagctgatcttctag

SEQ ID NO: 467156 - DNA, 201 bp, Homo sapiens
accagcagtggaaggatgcacccaaatgccccaggtctcccaggccacatgcccagtgaaggaagctagtttcggtgcgcacaggccgagggatgccgccrcgtgacatcttggagaagacagtgctaccgtgttggggagcagggcagtggtttcgaggggctacgggtggaggggcgaatggaggagctctctggggcg

SEQ ID NO: 467157 - DNA, 201 bp, Homo sapiens
cagcagtggaaggatgcacccaaatgccccaggtctcccaggccacatgcccagtgaaggaagctagtttcggtgcgcacaggccgagggatgccgccacrtgacatcttggagaagacagtgctaccgtgttggggagcagggcagtggtttcgaggggctacgggtggaggggcgaatggaggagctctctggggcggt

SEQ ID NO: 467158 - DNA, 201 bp, Homo sapiens
tctctccctgagacccacccacactgacatggttcattttcattgctgcgtgatctcccgtctccattctctgcctgagacccacccacactgacatggtycattttcattgctgcgtgatctcccatctccattctctccctgagacccacccacactgacatggctcattttcattgctgcgtgatctcccgtctccat

SEQ ID NO: 467159 - DNA, 201 bp, Homo sapiens
gggtgactgcatcttggtgacttctctgaatagaccttcgagggcactggggggtgattgttggagggcttggggagctcaggcagcccttgtatgggaaygtggctgttacaggaactgcagaaactgggactgggttcctggggaaaggattgggggtgttggaggcgctggccaggggattatggggaggtgttctta

SEQ ID NO: 467160 - DNA, 201 bp, Homo sapiens
tactgggcgttcaggcagcgggaaatccgggtccttgcgtgttgtgagctccctggaattacgttcttgccagtttcagctcagttgatccccctcccctscgctatcattggacacattttacttcattgaaacctgactgccactttttctgtaatccctcaggggcagtcatcttttctgattctgtgtatagtttgc

SEQ ID NO: 467161 - DNA, 201 bp, Homo sapiens
ctgtcccaggctctgttctcagcaggctgggctcagccctggtgcagggagtgaggaggtgggagtagtagggaccagaaaaagtggcagctgttgacaamtctgccatctctttctgaatgtaatgggaggtcctgtcttttcagcttgcaaggaaggagggtccgaggcaactccgctgttgcacatttagggacccct

SEQ ID NO: 467162 - DNA, 201 bp, Homo sapiens
agaatgtggagaggacttgtgaagacaatgttgtcccaagcagcacagcccaggtactgacaggattcagagctagaggtttcttagaggtcagggttgtrgaagcagcagggactgcagctgcatagtttgtgtatgtaacaggctagtatctcttgttctagactcatccatttgtacattcatatgagtatgcacgca

SEQ ID NO: 467163 - DNA, 201 bp, Homo sapiens
agatacaatgtacacttgcatatgcttgttcacacaaaggacaggatggttatctgttcatttaacaaatacttgttgagggcctatatgtgccaaagacrtcagatgcataagagggtgcactatggaaagcctcaggaacacaagtgcccagaaacatttagaaaaattctaatgaaaacagaaaaggcattttcaaat

SEQ ID NO: 467164 - DNA, 201 bp, Homo sapiens
ctggggggaccctaccccagatcttccgattcagtcctgggggaaccccaccccagaccttccgattcagtcctggagggaccctaccccagatcttccgrttcagtcctggttcggcctgagaatttgcatttctaacatgtccagggaccacagtttgaaaacctccacagctgacatgtaatgggatgacttggtcca

SEQ ID NO: 467165 - DNA, 201 bp, Homo sapiens
tcagcgtgtgtgtgcttgacgcgtgtgcacacacacatgtgacggtgtgccgtgggtctaggagtgttcacagtgcctgtccagagtgcgtccatagggcytgtccacggggcttcccgtgctgctctcagggctgagaggaagcaggggttttatttacagaggaacaacgggcatgtttggggccagcctgaggctgtt

SEQ ID NO: 467166 - DNA, 201 bp, Homo sapiens
ttaaaataacatggaacttacacaaaaggcttttcatgtgccttacttttttaaaaaggagtttattgtattcattggaatatgtgacgtaagcaataaarggaatgttagacgtgtggtctgccttcagcttttcaaatcaaataggtccaagaaccaggccccgtgccctggtcctccagacagtcagtgtcagatgtt

SEQ ID NO: 467167 - DNA, 201 bp, Homo sapiens
atttcctgggtgactgcatcttggtgacttctctgaatagaccttcgagggcactggggggtgattgttggagggcttggggagctcaggcagcccttgtrtgggaatgtggctgttacaggaactgcagaaactgggactgggttcctggggaaaggattgggggtgttggaggcgctggccaggggattatggggaggt

SEQ ID NO: 467168 - DNA, 201 bp, Homo sapiens
agtagaaaagttaactcatgaacataaaagagacatcgatttgaaaacaaaacatttattcatttacttctgctgcagttttcttgactgctgaatttcgyaagaagggattggtcagggagggtcttggggctgaagacctggagaggagctggtgctatcgctgttcaaatctgaaggtggtggagatggagccttggg

SEQ ID NO: 467169 - DNA, 201 bp, Homo sapiens
gtagaaaagttaactcatgaacataaaagagacatcgatttgaaaacaaaacatttattcatttacttctgctgcagttttcttgactgctgaatttcgtragaagggattggtcagggagggtcttggggctgaagacctggagaggagctggtgctatcgctgttcaaatctgaaggtggtggagatggagccttgggg

SEQ ID NO: 467170 - DNA, 201 bp, Homo sapiens
cactcactcctccttccggggtcatggtctcaaggggtcactccatgcactggggatgtcagctcattacagaatgatatattcgggaagtgtctcagttytgagtgcctttgagggaatttgcacttccgttcccacacagccttgcattgtgtgtgttagaggctgtgggccttgggcaggaggggtgagtgttggcac

SEQ ID NO: 467171 - DNA, 201 bp, Homo sapiens
cgccgtccccgtgcaccccagtgatggccgccgtccccgtgcaccccagtgatggccgccgtccccgtgcaccccagtgatggccgccgtccccgtgcacmccagtgatggccgccgtccccgtgcacaccagtgatggccgccgtgcccgtgcaccccagtgatggccgccgtccccgtgcacaccagtgatggcctctg

SEQ ID NO: 467172 - DNA, 201 bp, Homo sapiens
ccccaaagtgctgggatcacaggcgagagtcaccatgctggcctgaatcttcagggtattttacggttgaagtgtcacttacttaaccatccctgtttcargagtgtaggtggtcaccctgtctctgccgctgacctggcctggaccctcggctgtgagagggaggggtgggctgggctggaggaacctgaagccctcgtg

SEQ ID NO: 467173 - DNA, 201 bp, Homo sapiens
cctggcctggaccctcggctgtgagagggaggggtgggctgggctggaggaacctgaagccctcgtgatgtcacaagcccatctggctgggcatcccctgmgctgcacatgccccaggtggcccccacagcagaggcgagccactggagggtggagggcttccacgggacggtcttcagggggagaaggaagggcccaggc

SEQ ID NO: 467174 - DNA, 201 bp, Homo sapiens
ccccaggagactcaggagaccagagcctggggtcaggggctcagccaggggctcagccagggctggatgtccggagccagccccgcagccctgtgttcttygttcttcgcactcccaccgtccgtgtgaacagctccagccccacctgcgcctccctgtgctgggctccatcagggagcccagaagacgtgtgtgcttctg

SEQ ID NO: 467175 - DNA, 201 bp, Homo sapiens
aagaagccgtgagcctgccctgttcacagtggataactttctgaagttgtttttccaaggacaaaggaatcattaggacaaattgttattactgcttcgtrgtggagatgcttctggtttattttgtggctaccgctgttactgcttggagtgcctcaccgagccagctaacaactgcgtgcgtgagcacagggaaaggct

SEQ ID NO: 467176 - DNA, 201 bp, Homo sapiens
ccaagaagccgtgagcctgccctgttcacagtggataactttctgaagttgtttttccaaggacaaaggaatcattaggacaaattgttattactgcttcrtagtggagatgcttctggtttattttgtggctaccgctgttactgcttggagtgcctcaccgagccagctaacaactgcgtgcgtgagcacagggaaagg

SEQ ID NO: 467177 - DNA, 201 bp, Homo sapiens
ataaagacaggagtggagtgatatcagacaccgagcttcagcaagctctctccaacggtgagtgggccagtgggaactgggtctccggaccaagaagccgygagcctgccctgttcacagtggataactttctgaagttgtttttccaaggacaaaggaatcattaggacaaattgttattactgcttcgtagtggagatg

SEQ ID NO: 467178 - DNA, 201 bp, Homo sapiens
aggaaggaagggaaggattgaggtgaagatgattgtcctcttaggggaagaccacactggacgtcggctcctggggcacttccttgattccgctgtactcstcagcgggacgggagaggcggaggttccaggagggagccttccagagtcggtgcagggttgacagaagacgtttgttttgcttttcctgaactttcgatc

SEQ ID NO: 467179 - DNA, 201 bp, Homo sapiens
tttatggcggcgccttctgtccctggtcgcttttccaccgaatgtccgaaactgtagtgactgatggccagggaatggcttagttatctgagggaatcttktcttgtctgtgaaaaagggaaactggtgcaaatgggaattcagacaggccaggagaggaaggaagggaaggattgaggtgaagatgattgtcctcttagg

SEQ ID NO: 467180 - DNA, 201 bp, Homo sapiens
tggagcagatttgatctgcctatgtgggaaggggttaactcagcgggtgtggattgctcaaaccctgcacgttcccaggaggggcccttggctggctcctrggagctgagctcctgcagtgttctgactgatgagagagacttgagccatgttgcactactttgcctgggtagttgaccaacaaggtgatggatggcaaac

SEQ ID NO: 467181 - DNA, 201 bp, Homo sapiens
agcacagcttccctgcataactgctggagggcgggtcatcgagtgctgctctgtgtgtatgccatgggttcaggtgcacctgcctttgtgggaagagcacrgcttccccgcataactgctggagggtgggtcatcgagtgctgctgtgtgtgtgggccacgggttcaggtgcacctgcctttgtggggagagcacagcttc

SEQ ID NO: 467182 - DNA, 201 bp, Homo sapiens
ttaccctggggtgcagctcacccagcatccttccctgctggtgtgtggtgcgcagtgggtcctgcacgcaacagcatcgtccacacacactgcacacatcrtggaatggtcgtatgaaaaacagcccctggtccacacaccacacacgtcgtggaacggtgcacgtcgtggaacggttgtgtgaaaaacagccactggttg

SEQ ID NO: 467183 - DNA, 201 bp, Homo sapiens
aatcattaggacaaattgttattactgcttcgtagtggagatgcttctggtttattttgtggctaccgctgttactgcttggagtgcctcaccgagccagstaacaactgcgtgcgtgagcacagggaaaggcttcttgagaaatgaaaactagattgtaggtttaggaggggaataggaagcttagctctgtacagccga

SEQ ID NO: 467184 - DNA, 201 bp, Homo sapiens
atggagcagatttgatctgcctatgtgggaaggggttaactcagcgggtgtggattgctcaaaccctgcacgttcccaggaggggcccttggctggctccygggagctgagctcctgcagtgttctgactgatgagagagacttgagccatgttgcactactttgcctgggtagttgaccaacaaggtgatggatggcaaa

SEQ ID NO: 467185 - DNA, 201 bp, Homo sapiens
agggagcccagaagacgtgtgtgcttctgaaattgggtccctacatgcctttgtcccagtgcaccttgctccttccatttactatcgagatttaaatgccygttttctccccagaggttgacggatatattcagacgttacgacacggatcaggacggctggattcaggtgtcgtacgaacagtacctgtccatggtcttc

SEQ ID NO: 467186 - DNA, 201 bp, Homo sapiens
cttctctgactctgactttccctcttgaaggctaccggctctctgaccagttccacgacatcctcattcgaaagtttgacaggcagggacgggggcagatygccttcgacgacttcatccagggctgcatcgtcctgcaggtgacggaatggcttcacgtgggtttgtggtggtggtgggaggggcttgcttgccagcgtg

SEQ ID NO: 467187 - DNA, 201 bp, Homo sapiens
gagggaatttgcacttccgttcccacacagccttgcattgtgtgtgttagaggctgtgggccttgggcaggaggggtgagtgttggcacatacctcccgtctctcccagccttctctgactctgactttccctcttgaaggctaccggctctctgaccagttccacgacatcctcattcgaaagtttgacaggcagggacg

SEQ ID NO: 467188 - DNA, 201 bp, Homo sapiens
ttgcttgaacccgggaggcggaggttgcagtgagccaagagtgcgccattgcactccagcctgggcaacaagagcgagattctgtctcaaaaaaaaaaaaagagttgtcaaattgccaccccaatgctgtggttctctaacctgtgtaacaggatcacctggagggaccctacccgagaccttccgattcagtcctggggg

SEQ ID NO: 467189 - DNA, 201 bp, Homo sapiens
aagttccgagtgctaggagagcatctagcttcccggagtcaggagacgggggttggcaacctaaccaaggttaagtccaagggaggggggtgggcagggascgatatttcagtggagactccaaggacgaatggtatttagagagtaaaccccgatagagagggtttgtgtctggcacagagaagagcctgtgcaaaagcc

SEQ ID NO: 467190 - DNA, 201 bp, Homo sapiens
atggcaaaaactgcgatgacttgtgcgccaacctaacccagtaatcacgggtgtgcaaaatgtggcgatgggcaagttccgagtgctaggagagcatctascttcccggagtcaggagacgggggttggcaacctaaccaaggttaagtccaagggaggggggtgggcagggagcgatatttcagtggagactccaaggac

SEQ ID NO: 467191 - DNA, 201 bp, Homo sapiens
cagagaagcttctgcttatgatcaggacacgtcacagtgcagccttcacttgaggacttaggtctcatccagctccacacagtcaatccagggccacggaygcagaagacagaggagaagaagctcatggcatgaagacagaggattgattgcccaggaggcttccaggggctttggctcctggggcttctgtcagcgctg

SEQ ID NO: 467192 - DNA, 201 bp, Homo sapiens
gtgaggggtttggcgtcttactgtccagatggcgtgatctggtgagtctctcttccttcacactacctgggaggcctgatggtcagtttcctaagaaaggwactcaaataagacaaatgtcactttctcaagttttaagaccaaaaggatccatttctatgttattcagagaaaccatgaacatcaattctctgggacaat

SEQ ID NO: 467193 - DNA, 201 bp, Homo sapiens
cccaggaaatggccaccccatttctcctggagctgcgcgtgttctcagaaactgtggtggccgttctgttttgtttgcatcttataaacgtttacctgatkacattttcctcttcaatttagctgctagaaaatttaaagtcaggttggtggctcaccagtaatgagagtttagagtagaagtaaactttatgacatagtc

SEQ ID NO: 467194 - DNA, 201 bp, Homo sapiens
ctctcccccaccccagcctggccccacacccacacctccccacttcaccctgggcctctgctctctcgccacagaggggtcagggagctgttcacgccccrcgtgcacctgggcacgtggcatatttcagatgcacctggtgtcactgtttgcacagacctaagtgggaagagatccaaatgctcgttcactgcaggtgga

SEQ ID NO: 467195 - DNA, 201 bp, Homo sapiens
tctcccccaccccagcctggccccacacccacacctccccacttcaccctgggcctctgctctctcgccacagaggggtcagggagctgttcacgccccaygtgcacctgggcacgtggcatatttcagatgcacctggtgtcactgtttgcacagacctaagtgggaagagatccaaatgctcgttcactgcaggtggat

SEQ ID NO: 467196 - DNA, 201 bp, Homo sapiens
gcctcaggttcaggtgcacctgcctttgtgggaagggcacagcttccctgcataactgctggagggtgggtcgtggagtgctgctctgtgtgtatgcctcrggttcaggtgcacctgcctttgtggggagagcacagcttccctgcataactgctggagggcgggtcatggagtgctgctgctgtgtgtgtgtgtgtgtgt

SEQ ID NO: 467197 - DNA, 201 bp, Homo sapiens
gcccgtcgaggcccctctttgcttctgagagtctgttttcatcgacagtcttctactaaatgtacatagcagcttttcagggcaagggtcaccgggattcrtctttatgcctccccagcccgggagccaccacctccaccagacccatccacacagttgaatctcatctcaagttctctggtgcccgaccccccacgcaca

SEQ ID NO: 467198 - DNA, 201 bp, Homo sapiens
cacctcagcctcccaaagtactgggattatagacatgagccactgcgtctagcactgagctgtttcttgctgaggtttccctgtaagaacttccaaattgkgtcacaaaatcatagttgttagtattttcagagttctggagaacaaaacaggagccagtgatgggagggagaataaagatggacttcagaaactacagct

SEQ ID NO: 467199 - DNA, 201 bp, Homo sapiens
catagcagcttttcagggcaagggtcaccgggattcgtctttatgcctccccagcccgggagccaccacctccaccagacccatccacacagttgaatctyatctcaagttctctggtgcccgaccccccacgcacaccgtgctggtctgggcatctcacctgcatccgcacaagtgcctcaggagggtggagtgtctggt

SEQ ID NO: 467200 - DNA, 201 bp, Homo sapiens
cccagctccgttccaagctctgtggggctccggcaggccccatgtcatgtgcagatgagggattagggttcctcccggcctcgctgctctcaggccctcawgggctcctctcaccacccccgtgcagccagcggaccctgcccccacccagctgctccccccagctgctcccactcagctgctcccactcagctgctccca

SEQ ID NO: 467201 - DNA, 201 bp, Homo sapiens
cagagagaaataagatcgcatctacagctgtgtggtgattttctttaaaaatactactaagtttttaaacgtgatttcaaatggtgtgtttctgtttcacmttggacataagtagattgcaaggctaatggaaagtagaaaagttaactcatgaacataaaagagacatcgatttgaaaacaaaacatttattcatttact

SEQ ID NO: 467202 - DNA, 201 bp, Homo sapiens
cgccgtccccgtgcaccccagtgatggccgccgtccccgtgcaccccagtgatggccgccgtccccgtgcaccccagtgatggccgccgtccccgtgcacmccagtgatggccgccgtccccgtgcaccccagtgatggccgccgtccccgtgcaccccagtgatggccgccgtccccgtgcacaccagtgatggccgccg

SEQ ID NO: 467203 - DNA, 201 bp, Homo sapiens
cttccagtacaatggtgtttcataccattgacacttgcatactctagaataatttggaaagacgtgtaatattcgcaatgttcagaaaagcaagcaaaagktcaaggaacctgcttggttctgagatggcctcatatcagcttcataaacattcattctacaaaatagtaagctaacatttgaacacaatttccaaaaata

SEQ ID NO: 467204 - DNA, 201 bp, Homo sapiens
agctgggactacaggcacacgccgccatgcctggctaattttttgtatttttagtagagatggggtttcaccatattagccaggatggtctcgatctcctsacctggtgatccgcccgccttggcctcccaaagtgctgggattacaggcgccagccaccgcgcccagctggtatttttttttttatttttttatcaaata

SEQ ID NO: 467205 - DNA, 201 bp, Homo sapiens
cattgtgtgtgttagaggctgtgggccttgggcaggaggggtgagtgttggcacatacctcccgtctctcccagccttctctgactctgactttccctctygaaggctaccggctctctgaccagttccacgacatcctcattcgaaagtttgacaggcagggacgggggcagatcgccttcgacgacttcatccagggct

SEQ ID NO: 467206 - DNA, 201 bp, Homo sapiens
ttcaccatattagccaggatggtctcgatctcctcacctggtgatccgcccgccttggcctcccaaagtgctgggattacaggcgccagccaccgcgcccrgctggtatttttttttttatttttttatcaaatacagttgaggctctcttggagatcacatattaaagagaactgagaaaaatcagacctcagaagcagt

SEQ ID NO: 467207 - DNA, 201 bp, Homo sapiens
gctgtggttggcaaggaaggcgagtggagacatcaggagtgtccatccctcagcggccctttctagtggggtggctgcctctctcatccttgattaatccygggacaacctctgctctcctgggcaatccttagaatactccagaagaccccagtatggccgtccggttcctcctgggccccagctctcaggaatgcacca

SEQ ID NO: 467208 - DNA, 201 bp, Homo sapiens
gaggtttcagtgagccgagatcacaccactgcactccagcctgggtgacagagccagaccctgtcttaaaaaagaaagaaaagaaaaagggaaaagatgcmgtgtaaaatctcgttctgtgtctgaattgccgtagggctcagatcttcatttgaggttctgtgtctgaattgccgtagggctcagatcttcatttgaggt

SEQ ID NO: 467209 - DNA, 201 bp, Homo sapiens
tttaaaacttgtttgaccgtgttatttgctgagatggcccagagaagcttctgcttatgatcaggacacgtcacagtgcagccttcacttgaggacttagrtctcatccagctccacacagtcaatccagggccacggatgcagaagacagaggagaagaagctcatggcatgaagacagaggattgattgcccaggaggc

SEQ ID NO: 467210 - DNA, 201 bp, Homo sapiens
gctagatctgtaaaagtgagtttcctctgatttggcatggatgcatcagtccctgttcttcagggatttgttggagaaccaggtctgtgaacatggaagcytcaaaactctacggttggggaccctttcctgcccctgcctctcggggttcctgccaggttggatgacatttttacaatgttctctgaacactttcaaaaa

SEQ ID NO: 467211 - DNA, 201 bp, Homo sapiens
cctttgtgggaagagcacagcttccctgcataactgctggagggcggatcattgagtgctgctctgtgtgtgtgtgtgtgtgtgtgtgtgtgtgtgtgtgygccttgggttcaggtgcacctgcctttgtgggaatagcacagcttccctgcataactgctggagggcgggtcgtggagtgctgctgtgtgtgtgtgtgtg

SEQ ID NO: 467212 - DNA, 201 bp, Homo sapiens
gggctgggagggaaggatgccaccctccacagagagtggtcctgggggccagggaggccagtgctgccgattgcggccagggccacgtggacttcaggacyggcctgaagttatttttagataagcgacctctggcgccacggacatcttttcctaaccttgtcaggccctggagctccctttgtccatgccagtgaccat

SEQ ID NO: 467213 - DNA, 201 bp, Homo sapiens
tttgagggttgtgcagctgaagcctcagggaggagctgatgttctagtttgagggccctacagctggagaactggagaggagctgatgttctagtttgagkgtcttgcagctgcagacccatagaaaagctaatgttcagtttgaaggtcttgcagctgcagacccggagaggagctgatgttctagattttgagggtcct

SEQ ID NO: 467214 - DNA, 201 bp, Homo sapiens
cctcaggttcaggtgcacctgcctttgtgggaagagcacagcttccctgcataactgctggagggcgggatcttcccaaggggaagttgggaggtgctcavgcggagcaaatggatttaacttctgggctgggagaatgtggtacccccgtggaagtctccctgaggaaggaaaggaaggagctggagggagggtgtgtgt

SEQ ID NO: 467215 - DNA, 201 bp, Homo sapiens
gctcctggggcacttccttgattccgctgtactcctcagcgggacgggagaggcggaggttccaggagggagccttccagagtcggtgcagggttgacagragacgtttgttttgcttttcctgaactttcgatcgccagcttatttggtcttcttgatgttatagggtcgataaagacaggagtggagtgatatcagaca

SEQ ID NO: 467216 - DNA, 201 bp, Homo sapiens
ggtctccggaccaagaagccgtgagcctgccctgttcacagtggataactttctgaagttgtttttccaaggacaaaggaatcattaggacaaattgttawtactgcttcgtagtggagatgcttctggtttattttgtggctaccgctgttactgcttggagtgcctcaccgagccagctaacaactgcgtgcgtgagca

SEQ ID NO: 467217 - DNA, 201 bp, Homo sapiens
agagcgggcatggcactaggaggagccccatgagcccagagtggtggcacgtagaggcctaagggaccatgccagcagaccccaccgcccgtgctccaccrggagcctgacattgttctctgagatcagggggctgtctctgtgtactgcccaggactgtggcatttttgtgcataaaaaaaaaaaaaaactgtgtgtcta

SEQ ID NO: 467218 - DNA, 201 bp, Homo sapiens
cagaccccaccgcccgtgctccaccgggagcctgacattgttctctgagatcagggggctgtctctgtgtactgcccaggactgtggcatttttgtgcataaaaaaaaaaaaaaactgtgtgtctaacacagacggggtatgaggagagccactggtctctcctgaccttaaaaatatttttttagttcatttttagtgag

SEQ ID NO: 467219 - DNA, 201 bp, Homo sapiens
cctctgtcagcatctcctctgtccttccccagccttggcaggagaccagtaatgacctctgtccccgtgcaccccagtgatggccgccgtccccgtgcacmccagtgatggccgccgtccccgtgcaccccagtgagggccgccgtccccgtgcacaccagtgagggccgccgtccccgtgcaccccagtgagggccgccg

SEQ ID NO: 467220 - DNA, 201 bp, Homo sapiens
gggatgtcagctcattacagaatgatatattcgggaagtgtctcagttctgagtgcctttgagggaatttgcacttccgttcccacacagccttgcattgygtgtgttagaggctgtgggccttgggcaggaggggtgagtgttggcacatacctcccgtctctcccagccttctctgactctgactttccctcttgaagg

SEQ ID NO: 467221 - DNA, 201 bp, Homo sapiens
ccagccttggcaggagaccagtaatgacctctgtccccgtgcaccccagtgatggccgccgtccccgtgcaccccagtgatggccgccgtccccgtgcacmccagtgagggccgccgtccccgtgcacaccagtgagggccgccgtccccgtgcaccccagtgagggccgccgtccccgtgcaccccagtgatggccgccg

SEQ ID NO: 467222 - DNA, 201 bp, Homo sapiens
gctcaggctggtctcaaactcctaggctcaagtgatcctcctgcctcagcctatactaatatgaattcctatactaatatgattgaaattagtttgatttstataataattgtgctcccagattgggcttctgttttgatagtagaactaaattattaggctatttcaagaaattaatatattactggtagaaaaactgaa

SEQ ID NO: 467223 - DNA, 201 bp, Homo sapiens
ggatcatcgcagcatttttcttttctctgatatgcacctttttcctcatcgtgggggctcacgttttcatagttccctctcactactaggttgtgagctgygtgaaggaaggttcatagttgtgttgtatgtacaggcacacaaaatttgtccttggataaacacatatcctcttccttcttctctctgaatttctttatt

SEQ ID NO: 467224 - DNA, 201 bp, Homo sapiens
tggacataagtagattgcaaggctaatggaaagtagaaaagttaactcatgaacataaaagagacatcgatttgaaaacaaaacatttattcatttacttytgctgcagttttcttgactgctgaatttcgtaagaagggattggtcagggagggtcttggggctgaagacctggagaggagctggtgctatcgctgttca

SEQ ID NO: 467225 - DNA, 201 bp, Homo sapiens
ttgtttgcattgaaagtctttcagctggatgttcagggaggagctgatgttctagattgagggtcttggagctggagacctagagaggagctgatgttctratttgagtatcttgcagctgcaggcctggagaggagctgatgtagtttgaaggtcttgcagctgcagaccgggagaggagctgatgttctggattgagga

SEQ ID NO: 467226 - DNA, 201 bp, Homo sapiens
gatgttctagcttgagggtcgttcagctgaagactcggggaggagctgttctggtttgagggtcgcgtagctgaatactccaggaggagctgatgttccartttgagggtcatgcagctggagatccggcaggagctgatgttccagtttgagggccgggtagctgatgtaacagtttgaaggtcatgcaactggagacct

SEQ ID NO: 467227 - DNA, 201 bp, Homo sapiens
tggcacggagcaagtgctcagtaattgtcagctgtgagtattagtagtagctaatacactggtactattcttggctaacaagccagctcaaagctttgatrgttttccattacctgatgatggtgatgatggtttccacttactcaacactcacacgctgggctaggcacttaacccaaatccaaggtcagcattattgtt

SEQ ID NO: 467228 - DNA, 201 bp, Homo sapiens
gatacatggggagctacctccccaccggagaggaatggcctgggagccactcctctgcggagcccttaccctggggtgcagctcacccagcatccttcccygctggtgtgtggtgcgcagtgggtcctgcacgcaacagcatcgtccacacacactgcacacatcgtggaatggtcgtatgaaaaacagcccctggtccac

SEQ ID NO: 467229 - DNA, 201 bp, Homo sapiens
agctggtatttttttttttatttttttatcaaatacagttgaggctctcttggagatcacatattaaagagaactgagaaaaatcagacctcagaagcagkacagtgccctgtaaagtacatgtccagtcccatcactgtccttctctcacatgggcccagggatgtgggtgatggtatttattgcccctggtgatggagc

SEQ ID NO: 467230 - DNA, 201 bp, Homo sapiens
cagaggccatgtttcagagacatttattttgagtggttttccaatgagtgatgcaagatttatgatccattttaacagcctgctttttatgcatttgctcwaatttttagattttaggtttagttttaggttttctgttaaacttgctcaaataggagtggtggtcaaatactggaccgcattagtatggtagcctgccca

SEQ ID NO: 467231 - DNA, 201 bp, Homo sapiens
ttttttatttttttatcaaatacagttgaggctctcttggagatcacatattaaagagaactgagaaaaatcagacctcagaagcagtacagtgccctgtraagtacatgtccagtcccatcactgtccttctctcacatgggcccagggatgtgggtgatggtatttattgcccctggtgatggagcagatttgatctgc

SEQ ID NO: 467232 - DNA, 201 bp, Homo sapiens
tccaggttcaagtggtttgtcaccagggtgatacaagccacacggagtgccctcctcagaggccatgtttcagagacatttattttgagtggttttccaaygagtgatgcaagatttatgatccattttaacagcctgctttttatgcatttgctctaatttttagattttaggtttagttttaggttttctgttaaactt

SEQ ID NO: 467233 - DNA, 201 bp, Homo sapiens
atccaggttcaagtggtttgtcaccagggtgatacaagccacacggagtgccctcctcagaggccatgtttcagagacatttattttgagtggttttccartgagtgatgcaagatttatgatccattttaacagcctgctttttatgcatttgctctaatttttagattttaggtttagttttaggttttctgttaaact

SEQ ID NO: 467234 - DNA, 201 bp, Homo sapiens
gacgctggtggcctcatgtggactgactttcatgaacagaaactcagaaacagttgcttctggattttggcttctcagataaacattctttttgtagttcrtttgttcatccctcattttgctgtctgactttgcctttcttttcccttcactattactgatgaccaaggaaactggaagttaattccagaggcagtgggg

SEQ ID NO: 467235 - DNA, 201 bp, Homo sapiens
ggcaggagaccagtaatgacctctgtccccgtgcaccccagtgatggccgccgtccccgtgcaccccagtgatggccgccgtccccgtgcaccccagtgakggccgccgtccccgtgcacaccagtgagggccgccgtccccgtgcaccccagtgagggccgccgtccccgtgcaccccagtgatggccgccgtccccgtg

SEQ ID NO: 467236 - DNA, 201 bp, Homo sapiens
tctcaaataaaacaaaaggaaagaaagaaaatgaaaaaaagaaagagatggggcaagcaggggagagggctggggacacaggggagggtgctggggatgcrggggagggtgctggggacacaggagggtgctggggatgcgggggagggtgctggggacacgggaggggctggggacatgggaggggctagggatgcaagc

SEQ ID NO: 467237 - DNA, 201 bp, Homo sapiens
tgttaaatatggtcagatgaccatccaggttcaagtggtttgtcaccagggtgatacaagccacacggagtgccctcctcagaggccatgtttcagagacrtttattttgagtggttttccaatgagtgatgcaagatttatgatccattttaacagcctgctttttatgcatttgctctaatttttagattttaggttta

SEQ ID NO: 467238 - DNA, 201 bp, Homo sapiens
tcaactgtgtgccatgctcagagacctgaagtgaaaaggtgaggaaggcgtgctcacattccagcactcaccacccggcaccgggccagctgactcagcaygtgccgtttaggttgctgtaaacagccggtgagattctcccctctggtgggcagtgcgtgtctgacaaaggcagtcgggcggagaacagttcctccgctg

SEQ ID NO: 467239 - DNA, 201 bp, Homo sapiens
ctctgtccccgtgcaccccagtgatggccgccgtccccgtgcaccccagtgatggccgccgtccccgtgcaccccagtgagggccgccgtccccgtgcacmccagtgagggccgccgtccccgtgcaccccagtgagggccgccgtccccgtgcaccccagtgatggccgccgtccccgtgcaccccagtgatggccgccg

SEQ ID NO: 467240 - DNA, 201 bp, Homo sapiens
cctttattgttaacatcaactgtgtgccatgctcagagacctgaagtgaaaaggtgaggaaggcgtgctcacattccagcactcaccacccggcaccgggmcagctgactcagcacgtgccgtttaggttgctgtaaacagccggtgagattctcccctctggtgggcagtgcgtgtctgacaaaggcagtcgggcggaga

SEQ ID NO: 467241 - DNA, 201 bp, Homo sapiens
ccgtgcaccccagtgatggccgccgtccccgtgcaccccagtgatggccgccgtccccgtgcaccccagtgagggccgccgtccccgtgcacaccagtgakggccgccgtccccgtgcaccccagtgagggccgccgtccccgtgcaccccagtgatggccgccgtccccgtgcaccccagtgatggccgccgtccccgtg

SEQ ID NO: 467242 - DNA, 201 bp, Homo sapiens
tgcatcacctgttaaatatggtcagatgaccatccaggttcaagtggtttgtcaccagggtgatacaagccacacggagtgccctcctcagaggccatgtytcagagacatttattttgagtggttttccaatgagtgatgcaagatttatgatccattttaacagcctgctttttatgcatttgctctaatttttagatt

SEQ ID NO: 467243 - DNA, 201 bp, Homo sapiens
cgccgtccccgtgcaccccagtgatggccgccgtccccgtgcaccccagtgagggccgccgtccccgtgcacaccagtgagggccgccgtccccgtgcacmccagtgagggccgccgtccccgtgcaccccagtgatggccgccgtccccgtgcaccccagtgatggccgccgtccccgtgcaccccagtgatggccgccg

SEQ ID NO: 467244 - DNA, 201 bp, Homo sapiens
accacagtggatgcaaatggctctgtgcatcacctgttaaatatggtcagatgaccatccaggttcaagtggtttgtcaccagggtgatacaagccacacrgagtgccctcctcagaggccatgtttcagagacatttattttgagtggttttccaatgagtgatgcaagatttatgatccattttaacagcctgcttttt

SEQ ID NO: 467245 - DNA, 201 bp, Homo sapiens
ccgtgcaccccagtgagggccgccgtccccgtgcacaccagtgagggccgccgtccccgtgcaccccagtgagggccgccgtccccgtgcaccccagtgakggccgccgtccccgtgcaccccagtgatggccgccgtccccgtgcaccccagtgatggccgccgtccccgtgcaccccagtgatggccgccgtccccgtg

SEQ ID NO: 467246 - DNA, 201 bp, Homo sapiens
cgccgtccccgtgcacaccagtgagggccgccgtccccgtgcaccccagtgagggccgccgtccccgtgcaccccagtgatggccgccgtccccgtgcacmccagtgatggccgccgtccccgtgcaccccagtgatggccgccgtccccgtgcaccccagtgatggccgccgtccccgtgcaccccagtgatggccgccg

SEQ ID NO: 467247 - DNA, 201 bp, Homo sapiens
taaatgttgaccacagtggatgcaaatggctctgtgcatcacctgttaaatatggtcagatgaccatccaggttcaagtggtttgtcaccagggtgatacragccacacggagtgccctcctcagaggccatgtttcagagacatttattttgagtggttttccaatgagtgatgcaagatttatgatccattttaacagc

SEQ ID NO: 467248 - DNA, 201 bp, Homo sapiens
cgccgtccccgtgcaccccagtgatggccgccgtccccgtgcaccccagtgatggccgccgtccccgtgcaccccagtgatggccgccgtccccgtgcacmccagtgatggccgccgtgcccgtgcaccccagtgatggccgccgtccccgtgcacaccagtgatggcctctgtcccccatgcactcccagacaggcaatg

SEQ ID NO: 467249 - DNA, 201 bp, Homo sapiens
acttggtgaggagcttatgttgttcactttgagggtctttcagctggagactcaggcaggagctgatgttctagattgaggatcatggaggtgaaaacccrgagaggagctgatgttctagtttgaatgtcttgcagctgcagacccagagaggagctgatgttctagtttgaggatcttgtagctgcagacccagagagg

SEQ ID NO: 467250 - DNA, 201 bp, Homo sapiens
accctgccactgcgtgcccttcagtccctcctggcaggtgggggcacatcccccagccactcccatttcctgacattgtcactttgtataactggaagccktctgtgaaattttagttttcaaagcattatctggtgatgggcaacccagggcagcgaatcattcagaattttcttatctaggctaataaacataataaaa

SEQ ID NO: 467251 - DNA, 201 bp, Homo sapiens
gaccctgaggctcaagcgatccttctgccttggcctcctgagtagctgggatcccaggcgagagtcaccacaccctgtccatgttcctgcaggtcttgatrtgcgaggacgctgtgtcttccctgccacattttcttcttctttcttgagacagacccttgctccatcacccaggccagagtgtggtggtgcgaacacggc

SEQ ID NO: 467252 - DNA, 201 bp, Homo sapiens
cttgtgtgcgaaggtcatcagtgaatcttcattctcagagttgataaatggttgtgagcgctcaagggtatcagattcaacgatgagtctgaggatagtasagctttcctattcagtttcaaggaaaatcatataaagcccagaccgtaatttgtcaggaatgtttgaagtgtggtgtgatggatgtcttcaccgtgcttt

SEQ ID NO: 467253 - DNA, 201 bp, Homo sapiens
gacttgtgcgccaacctaacccagtaatcacgggtgtgcaaaatgtggcgatgggcaagttccgagtgctaggagagcatctagcttcccggagtcaggaracgggggttggcaacctaaccaaggttaagtccaagggaggggggtgggcagggagcgatatttcagtggagactccaaggacgaatggtatttagagag

SEQ ID NO: 467254 - DNA, 201 bp, Homo sapiens
ttatgacatagtcttagactcttcactttcttctcaaccaatatgattcacatttactttattttgctgtaccgtgagtgtctctgtgtttcctgaattcyttctggaataaggcaggttgttagtaagcacaggtttctggtccatctcacagcctcaggcagtgggcattgctgtcggtgctccctttccgggttacct

SEQ ID NO: 467255 - DNA, 201 bp, Homo sapiens
gaagtaaactttatgacatagtcttagactcttcactttcttctcaaccaatatgattcacatttactttattttgctgtaccgtgagtgtctctgtgttycctgaattccttctggaataaggcaggttgttagtaagcacaggtttctggtccatctcacagcctcaggcagtgggcattgctgtcggtgctccctttc

SEQ ID NO: 467256 - DNA, 201 bp, Homo sapiens; identical to SEQ ID NO: 378554

SEQ ID NO: 467257 - DNA, 201 bp, Homo sapiens; identical to SEQ ID NO: 378392

SEQ ID NO: 467258 - DNA, 201 bp, Homo sapiens; identical to SEQ ID NO: 378524

SEQ ID NO: 467259 - DNA, 201 bp, Homo sapiens; identical to SEQ ID NO: 378508

SEQ ID NO: 467260 - DNA, 201 bp, Homo sapiens; identical to SEQ ID NO: 378553

SEQ ID NO: 467261 - DNA, 201 bp, Homo sapiens; identical to SEQ ID NO: 103009

SEQ ID NO: 467262 - DNA, 201 bp, Homo sapiens; identical to SEQ ID NO: 466816

SEQ ID NO: 467263 - DNA, 201 bp, Homo sapiens; identical to SEQ ID NO: 102958

SEQ ID NO: 467264 - DNA, 201 bp, Homo sapiens; identical to SEQ ID NO: 466818

SEQ ID NO: 467265 - DNA, 201 bp, Homo sapiens; identical to SEQ ID NO: 466819

SEQ ID NO: 467266 - DNA, 201 bp, Homo sapiens; identical to SEQ ID NO: 102982

SEQ ID NO: 467267 - DNA, 201 bp, Homo sapiens; identical to SEQ ID NO: 466821

SEQ ID NO: 467268 - DNA, 201 bp, Homo sapiens; identical to SEQ ID NO: 466822

SEQ ID NO: 467269 - DNA, 201 bp, Homo sapiens; identical to SEQ ID NO: 102965

SEQ ID NO: 467270 - DNA, 201 bp, Homo sapiens; identical to SEQ ID NO: 466824

SEQ ID NO: 467271 - DNA, 201 bp, Homo sapiens; identical to SEQ ID NO: 466825

SEQ ID NO: 467272 - DNA, 201 bp, Homo sapiens; identical to SEQ ID NO: 102972

SEQ ID NO: 467273 - DNA, 201 bp, Homo sapiens; identical to SEQ ID NO: 466828

SEQ ID NO: 467274 - DNA, 201 bp, Homo sapiens; identical to SEQ ID NO: 466829

SEQ ID NO: 467275 - DNA, 201 bp, Homo sapiens; identical to SEQ ID NO: 102973

SEQ ID NO: 467276 - DNA, 201 bp, Homo sapiens; identical to SEQ ID NO: 466832

SEQ ID NO: 467277 - DNA, 201 bp, Homo sapiens; identical to SEQ ID NO: 466834

SEQ ID NO: 467278 - DNA, 201 bp, Homo sapiens; identical to SEQ ID NO: 466835

SEQ ID NO: 467279 - DNA, 201 bp, Homo sapiens; identical to SEQ ID NO: 466836

SEQ ID NO: 467280 - DNA, 201 bp, Homo sapiens
cctggaggccctgccagatgctgccttccggactggctgcccgctgcagtgttttcacgggagccaagccagccccgggcctgtagcctcccatgtgacaragtttcagacaccacagtcctcagctggaccacagtaaacacttgccttccccaacccatgattcttgcttggaaacatgaacctgatgttccacgtgcg

SEQ ID NO: 467281 - DNA, 201 bp, Homo sapiens
gaagggagggaaactgaaaaagaatcaggagtccagccatcccctccccacctcctgcccccacttccaccctggctgctggccctttgcccttgaatatrggtgatataggtgtggctattcagttccagtcacagtgctgcctctatgtcttttgcaagctggggtcttccttactcagaaggcctggaggccctgcca

SEQ ID NO: 467282 - DNA, 201 bp, Homo sapiens
ttccttactcagaaggcctggaggccctgccagatgctgccttccggactggctgcccgctgcagtgttttcacgggagccaagccagccccgggcctgtrgcctcccatgtgacagagtttcagacaccacagtcctcagctggaccacagtaaacacttgccttccccaacccatgattcttgcttggaaacatgaacc

SEQ ID NO: 467283 - DNA, 201 bp, Homo sapiens
acaggagattgcatcctacctgatcacctttgagaagcatgatgagtggctgtcttgtgccccaaagacaaggtgagaaagtttgagaacatgggggagtrgcaggggtcctgggttctgttcacagaactccagggcaacccttcccttcccaggcctcagaatggctccatcatcctctacaatcgcaagaaggtgaaa

SEQ ID NO: 467284 - DNA, 201 bp, Homo sapiens
ccgccttccttcgcccggttctcgggaccatacttctccctctttggacgatgccgcctcctcaaccttgaaagacccctcacaggccccttccgagaccytcagagtccctaaaagggctgctgacacgcccgctgttcttagcggacagtgattggctacctgaaagatagcgccagcctcctgcctcttctcccgacc

SEQ ID NO: 467285 - DNA, 201 bp, Homo sapiens
tgtgcgccttgcccgctgccttgaggaactacagagacaggagccttcggtggagcccccatttgccctatcgccaccctcctccagcccagacactggtyagggtggccctaatcttttggagagagggatgtaggtaggaggataggccaggacaaagccaaagggtgtgggaaacgagtaagagaggagacaaaccac

SEQ ID NO: 467286 - DNA, 201 bp, Homo sapiens
cctgcgaattcccattggttgcagggtcctctgtgtgttcttgcccctcctgcttaatttaacccagtcccttctgcctccctccgacaacctttttcccrtccgtagccttaaattcccgagctgcccgggcggatcgtagtgttgattggagggatgagaatacccgccgggtccgattggccactgtctccgcctgcg

SEQ ID NO: 467287 - DNA, 201 bp, Homo sapiens
ggccacagaggaacttcaactgatgggatcctagagtgggacatgtggggagggggcaaaattagaagctgggaggacagatgtgaggtggccaaggccayctcaagccaggggagtagatacctgggtctctgcctaagagtgtgtatatcgcaggatgaaggccaggggcctgggttcgaagcacgggtagtggtcttg

SEQ ID NO: 467288 - DNA, 201 bp, Homo sapiens
acagccctagtttaaggactgagtcctggtgggctttatttaggtgaaggggtaaaggagctgttgttttggggaagataaaagaatatggttctgtgtcytcatccccagatcttgggacaggtctacttttggtgttcagggcatcacctagactgcccactcagcctcccatacccgttccccctcagacaaccagtt

SEQ ID NO: 467289 - DNA, 201 bp, Homo sapiens
gttgttgcctcttggcttctctcagttctgctgccatctgtgttatcttagtctccctctgtccttacttctctctctccggagctctggtccttagtttygcctcactcttggagctggaccccacacaaagcctgagtgtgttgggttgcttgtctctgacttgagtctgcctaccttgggatctggccaggcctctca

SEQ ID NO: 467290 - DNA, 201 bp, Homo sapiens
ggcactgctatcctcctcctgacaggactggagcagcgggctggaggcttgacgcccaccaggcacttggctccacaggctgatcctaggccttccatgaktttggcagtggttgtaggcactgagccttctgccccaccagctcctcccagtcctgcctttgaccctgatcgttttctcaacagcccccagaggggccag

SEQ ID NO: 467291 - DNA, 201 bp, Homo sapiens
tggagccccacctctgaaccacctcctaccagctgtccctcaggctgggggaaaacaggtgtttgatttgtcaccgttggagcttggatatgtgcgtggcatgtgtgtgtgtgtgtgagagtgtgaatgcacaggtgggtatttaatctgtattattccccgttcttggaattttcttccccatggggctggggtacttta

SEQ ID NO: 467292 - DNA, 201 bp, Homo sapiens
atgtgtgtaaggaaaggggatgagaccagagaatctggggactgggagaaaaagtctcagcacctggtcttaggatcagggcctgctggttccatgcttayggccactggacactgttcatgagcggctagctcccctttcctccatctcagtaacagggtcataacttccagactctgatccggggatcaagaggatttt

SEQ ID NO: 467293 - DNA, 201 bp, Homo sapiens
gtgtggagactggaagcttggacttagagcaggaggttgacccgctcaacgtggatcatttctcttgcacccctctggtgaggatgacggattcctgagcrcatatggggcagggagcaatgggaacagcccttgaaaaggaagatcctgaggaatgcagggagtggggtgggctggggcctgaagacctgactacctgga

SEQ ID NO: 467294 - DNA, 201 bp, Homo sapiens
attactcctgtgtctttgatcacatcgcagtgccagcctcacttgtccagcctggtgtcttacgctgctactgtcccggtatgaggattgggaaccgtagsgggagggactgacatgtgggcagttaggacagatcaggacctccaggcttccagaaagcactgggaacaaatgggttgttttgagagcacaaggacttca

SEQ ID NO: 467295 - DNA, 201 bp, Homo sapiens
atgggaacagcccttgaaaaggaagatcctgaggaatgcagggagtggggtgggctggggcctgaagacctgactacctggaggaagagcccctggcctcrcctccacctccgtctccgcctgtcccgcccccttcctcagatgtgggcttgtgccctgggacacctggaagctgctgtgctccttttccgttggaaccga

SEQ ID NO: 467296 - DNA, 201 bp, Homo sapiens
ccacatgaagctgaaggtccagggcatggaggtaagagagtcagacattcagctcatcttcccgagcctgccctcctccacccttagctgggctctagccygacctgggcttggtggcattgtccacctcagtcccctcccagttactcttcccttctcactcactttgggtcggctgacattgctttggccactctccac

SEQ ID NO: 467297 - DNA, 201 bp, Homo sapiens
ggaaggatggttacctctggaagaagcggaaggatgggaagaccacccgagaggaccacatgaagctgaaggtccagggcatggaggtaagagagtcagayattcagctcatcttcccgagcctgccctcctccacccttagctgggctctagcctgacctgggcttggtggcattgtccacctcagtcccctcccagtta

SEQ ID NO: 467298 - DNA, 201 bp, Homo sapiens
ccttgaaaaggaagatcctgaggaatgcagggagtggggtgggctggggcctgaagacctgactacctggaggaagagcccctggcctcacctccacctcygtctccgcctgtcccgcccccttcctcagatgtgggcttgtgccctgggacacctggaagctgctgtgctccttttccgttggaaccgacaggcactgag

SEQ ID NO: 467299 - DNA, 201 bp, Homo sapiens
aacccccaggacctgacccaaccatagccccagtctgtgcaaaagctcaaggtttagggcctctgaggcccaagccctgccagtcttctccccgctccccmaccccaacccatttcttcctgctcactcttcctgtccagtctgctcactcatattggctccgggcactgtgtgttgttctctcttctactgtcacatcac

SEQ ID NO: 467300 - DNA, 201 bp, Homo sapiens
gccagcctctgagatgactatggaggacatggccccaggccagctttcctctggtgtcccagaagcccccctactcctcatggactatgaggctaccaacyccaaggggcccctctcctcccttcctgccctcccaccagcttcagatgatggggctgctccagaggacgctgacagcccacaggctgtggatgtgatccc

SEQ ID NO: 467301 - DNA, 201 bp, Homo sapiens
tcattctctcctctcccctttgtagccttatcccccctccccgaccaaggaatgaaatgaaacatttgtatggactctgaccccatcattctgctcttctycaggagtttgcaccctcagatgaagagctagactcttaccgtcgtggagaggaatgggacccccagaaggctgaggagaagcggaagctgaaggtgagct

SEQ ID NO: 467302 - DNA, 201 bp, Homo sapiens
ctactcctcatggactatgaggctaccaactccaaggggcccctctcctcccttcctgccctcccaccagcttcagatgatggggctgctccagaggacgmtgacagcccacaggctgtggatgtgatcccggtactgcttatattgatggagttatgggggctagaagtggagtaggaagggtgaggccgacttccatga

SEQ ID NO: 467303 - DNA, 201 bp, Homo sapiens
atctgtgttatcttagtctccctctgtccttacttctctctctccggagctctggtccttagtttcgcctcactcttggagctggaccccacacaaagccygagtgtgttgggttgcttgtctctgacttgagtctgcctaccttgggatctggccaggcctctcagtcctgttctgtctctgtcctgccctgtgactgtt

SEQ ID NO: 467304 - DNA, 201 bp, Homo sapiens
agtgccaaggccactgaagccaggggcctcttggcccacagcagggcagtaggggaaataactatggaataattgtctgtggctgacacaggtagccagaraaggagccagggaaagagagcccttctcgctgatcctaccctctccagcccatgaggtagggctggtgtctttgcaggtggcagggcgggaggggcccct

SEQ ID NO: 467305 - DNA, 201 bp, Homo sapiens
agcgggaactgtatgaggctgcccgagtcatccagacggccttccgaaagtacaaggtcaggggcaggggtctcaggatgaattacacaatctccagtcargggagactgggctcccagggcttttggaggatgagtagtcgtgcagacaggccttggatggggtaaagggtcaggggaaccccaggaaagttgaagggac

SEQ ID NO: 467306 - DNA, 201 bp, Homo sapiens
aggttctgggagccttacccacaaatgcagcagcacgaaacaccgcatcatctctcccaaagtggagccccgagctttaaccctgacctctatcccccacsctcaccccccagagcctcctccactgatagccccacttcccccagagctccccaaggcacacacctccccatcttcttcctcttcttcctcctcatcagg

SEQ ID NO: 467307 - DNA, 201 bp, Homo sapiens
gaggccccgccccgtgcgcagtgacgttagacgccgctgtcagccggcgctggggggggtcggtgtggggtagaatggccgctgccgccgtcacccgcggraccccgggaggtaagagccagggcctctcgcccgcctctccgcccccgcgccagagggcgcagctcctccaggtcccgacgcggagcgccgcgccaggga

SEQ ID NO: 467308 - DNA, 201 bp, Homo sapiens
actccgcatgtttgcgtctgtttcctccctctctggccctgtcttaccccatcacccgactctggccactgacctcagggccgaaggggaggtggtgtacrtaggaacgcgttgcggagtccgccccgtcccccgaggggaggggtcttgtacatactgtaacatacagagtatagtgaagaatctatttaaggcgccgcg

SEQ ID NO: 467309 - DNA, 201 bp, Homo sapiens
gcagccaaagacgcagcccacatgctacaggccaataagacctacggctgtggtgaggccacagtgcggctgggggtggctgggagaggagcataggatgyggcaggagggcagtggaggctgaggtacggatttctaggcccgccctaccctcctctctgcccctagtgcccgtggccaataagagggacacacgctcca

SEQ ID NO: 467310 - DNA, 201 bp, Homo sapiens
ggctgtggtgaggccacagtgcggctgggggtggctgggagaggagcataggatgcggcaggagggcagtggaggctgaggtacggatttctaggcccgcyctaccctcctctctgcccctagtgcccgtggccaataagagggacacacgctccattgaagaggctatgaatgagatcagagccaagaagcgtctgcggc

SEQ ID NO: 467311 - DNA, 201 bp, Homo sapiens
cacggtggctcacgcctgtaatcccagcactttgggaggccaaggcgggtggatcacctgaggtcaggagttcgagaccagccttaccaacatggtgaaaycctgtctctactaaaaaaaatacaaaattacccgggcatggtggcgcatgcctgtaatcccagctacccgggaggctgaggcaggagaattgcttgaacc

SEQ ID NO: 467312 - DNA, 201 bp, Homo sapiens
agccttagaaacctttcccacccatgcttccagccctggcttcatgttgccatttctcacccccagaacaggccgcccgcctgaagaaactacaagagcargagaaacaacagaaagtggagtttcgtaaaagggtgagaacaactggagtgatcaaaggcagactcaggaaggacttccaataagttaaaattggaaggt

SEQ ID NO: 467313 - DNA, 201 bp, Homo sapiens
tgcaaaagctcaaggtttagggcctctgaggcccaagccctgccagtcttctccccgctcccccaccccaacccatttcttcctgctcactcttcctgtcyagtctgctcactcatattggctccgggcactgtgtgttgttctctcttctactgtcacatcacagtcagcccctccctccctttcctcatccttcccaga

SEQ ID NO: 467314 - DNA, 201 bp, Homo sapiens
ctttgagtatcgagcccgccgattcctgtctctgcctagtactcaacttgactggctgtcactggacggtgagtacccagccctctgaacccaagtatccrgcccacagcctttaagcatgacatgctcctagaccactcagggttcaggtggccatcactgagcccccactttaccatttttttttttcaattcctattt

SEQ ID NO: 467315 - DNA, 201 bp, Homo sapiens
cggctgtggtgaggccacagtgcggctgggggtggctgggagaggagcataggatgcggcaggagggcagtggaggctgaggtacggatttctaggcccgycctaccctcctctctgcccctagtgcccgtggccaataagagggacacacgctccattgaagaggctatgaatgagatcagagccaagaagcgtctgcgg

SEQ ID NO: 467316 - DNA, 201 bp, Homo sapiens
tttatttaatgcccacaatgtacaaagaactaactatagtccaggcatggtggttcacacctataatcccagcactttggaaggtcaaggtgggaggattrcttgaggccaactggagaccaggatgggcaacaaactgagaccccatcttaacagaaaacttaaaaaaaaaaaaattagccaaggctgggtgcagaggct

SEQ ID NO: 467317 - DNA, 201 bp, Homo sapiens
aacccgcgccccacatacctgcatcttccgctgtgacctccggagccctgcctgcccctgctccccagctcctcctgcctgcacccgactcggccccctcmtgacttgccttatttatttgttcgacgcgtctctgaatgtatccgcctcggttcccaccactgccttcgctgcgcacgcccctcgtgtttcagggctgac

SEQ ID NO: 467318 - DNA, 201 bp, Homo sapiens
ctggagcaaaggccagactggagccattcatccgggtagtagttggcaagtgttgggatggttcttggagagttgaaagggagctgggggtgggcacagcyaagcctatggggagcatgtgctggtcagctggcatggggcaggcccaggtaggacagtggatggttggcctgaaagggtgtcaagtcctccatttgttca

SEQ ID NO: 467319 - DNA, 201 bp, Homo sapiens
gttgagtgtgtccagcaggaagtgctggagtataggcttcagggctggagcaaaggccagactggagccattcatccgggtagtagttggcaagtgttggratggttcttggagagttgaaagggagctgggggtgggcacagctaagcctatggggagcatgtgctggtcagctggcatggggcaggcccaggtaggaca

SEQ ID NO: 467320 - DNA, 201 bp, Homo sapiens
ctgctccgaccccccagctgtctcctgctcttagcaccatcacagacttctccccagagtggtcctacccagaggtgagactcaggcttacctcctccctyctccctcctatttgtcttctgactccccaaaacaaattgtattaactcttaccccgtggtctgtgacctagtttccctcagttttcatggcttcttaggc

SEQ ID NO: 467321 - DNA, 201 bp, Homo sapiens
aagcccccctactcctcatggactatgaggctaccaactccaaggggcccctctcctcccttcctgccctcccaccagcttcagatgatggggctgctccrgaggacgctgacagcccacaggctgtggatgtgatcccggtactgcttatattgatggagttatgggggctagaagtggagtaggaagggtgaggccgac

SEQ ID NO: 467322 - DNA, 201 bp, Homo sapiens
ggagccccacctctgaaccacctcctaccagctgtccctcaggctgggggaaaacaggtgtttgatttgtcaccgttggagcttggatatgtgcgtggcakgtgtgtgtgtgtgtgagagtgtgaatgcacaggtgggtatttaatctgtattattccccgttcttggaattttcttccccatggggctggggtactttac

SEQ ID NO: 467323 - DNA, 201 bp, Homo sapiens
ccaggagtttgcaccctcagatgaagagctagactcttaccgtcgtggagaggaatgggacccccagaaggctgaggagaagcggaagctgaaggtgagcwatgctttgcagcccttggggtccagaagcccaccacctgggaggggtgggggtttgggctggggccctgagcaccagtgcccccactttcacccctagga

SEQ ID NO: 467324 - DNA, 201 bp, Homo sapiens
gcacccgactcggccccctcctgacttgccttatttatttgttcgacgcgtctctgaatgtatccgcctcggttcccaccactgccttcgctgcgcacgcycctcgtgtttcagggctgaccgtgtccccacccgactccgcatgtttgcgtctgtttcctccctctctggccctgtcttaccccatcacccgactctggc

SEQ ID NO: 467325 - DNA, 201 bp, Homo sapiens
tgtggttctctagcgcggcgggggcctcctgccggctccacgggcactttctacttgtgcatgggcttggtttatacgaattgccattaaacatcgctgcmccagccagcctccggcctctgtctgcgggggcggggcggggcctaggccagctggaggccgccatgcaccgcgggcctgggatctgcgcccaggccaggc

SEQ ID NO: 467326 - DNA, 201 bp, Homo sapiens
gaccagagaatctggggactgggagaaaaagtctcagcacctggtcttaggatcagggcctgctggttccatgcttatggccactggacactgttcatgarcggctagctcccctttcctccatctcagtaacagggtcataacttccagactctgatccggggatcaagaggattttccaacatcaaattgttcataact

SEQ ID NO: 467327 - DNA, 201 bp, Homo sapiens
ccgtatctcaaatctggtcctcactataaggccccagccccactgctcatctatgactcagggtggctgggattcaaaaggggtggggaataggtgggggygagggtgggggaagggttgaagaggaactggtggaaagattgggattcctgcaaagggactgaacagaggaagagttggggagcagactagccctccccc

SEQ ID NO: 467328 - DNA, 201 bp, Homo sapiens
ggggtcggtgtggggtagaatggccgctgccgccgtcacccgcgggaccccgggaggtaagagccagggcctctcgcccgcctctccgcccccgcgccagrgggcgcagctcctccaggtcccgacgcggagcgccgcgccagggaccaccgtccctcttcccggttcgccctcacctcccgcttccgtcctcctcccccg

SEQ ID NO: 467329 - DNA, 201 bp, Homo sapiens
agtttgcactctataagaagatgacccaggcggccatcctgatccagagcaagttccgaagctactatgaacagaagcgatttcagcagagccgccgagcrgctgtgctcatccagcagcactaccgctcctaccgccgcaggcccggccctccccaccggacttcggccaccctgcctgcccgcaacaagtagggcccag

SEQ ID NO: 467330 - DNA, 201 bp, Homo sapiens
ccttggcctcctctcctgtaaggttaggcattgaccaaagggatttctaatgtctgtccaggctttctggcttagagccagagtctccaactccaatccarggggaatgagaaagaagaaatgtgggtttcctctaaccagtcttgggactgaaggacattggcttttagaactgtgctgtccagtatggtagccattagc

SEQ ID NO: 467331 - DNA, 201 bp, Homo sapiens
ggctgtgctcatccagcagcactaccgctcctaccgccgcaggcccggccctccccaccggacttcggccaccctgcctgcccgcaacaagtagggcccarccccagccctctgtgcccacccactgcatccacgccattcccccttactcatcctcttgatcatcatgcctcactgccattccctgcctagggttcctgg

SEQ ID NO: 467332 - DNA, 201 bp, Homo sapiens
agagaccaggcaaccacttggcaggaatgttggggagagatagactcactgacctcaccccactgggtcctgtctatccctggacccccagactctagcayaggacctgccatatagtagataccctgtaagggtctgaataaatgaatgagtgaggggatgaacgcccaactccagtcacatggtctctgacttctgtct

SEQ ID NO: 467333 - DNA, 201 bp, Homo sapiens; identical to SEQ ID NO: 214352

SEQ ID NO: 467334 - DNA, 201 bp, Homo sapiens; identical to SEQ ID NO: 214210

SEQ ID NO: 467335 - DNA, 201 bp, Homo sapiens; identical to SEQ ID NO: 214085

SEQ ID NO: 467336 - DNA, 201 bp, Homo sapiens; identical to SEQ ID NO: 214157

SEQ ID NO: 467337 - DNA, 201 bp, Homo sapiens; identical to SEQ ID NO: 214145

SEQ ID NO: 467338 - DNA, 201 bp, Homo sapiens; identical to SEQ ID NO: 214105

SEQ ID NO: 467339 - DNA, 201 bp, Homo sapiens
ctgaatttccaaggatggtacacaataaatcatgttttgtacttttttcctcttactgcattttgggggatttatcattctatgtctaccttttcttgagyacagctttgatatgcacctgttgttacgtggtgatgggaagtcacaggcgtgctctttctagttaatttgatgccacatcttccttgtcttttcagcttg

SEQ ID NO: 467340 - DNA, 201 bp, Homo sapiens
tcaggctttggtctgcaagatcagaattaatcccactcgggaccccatagtccaaacttggggccacttgatgaacgatggtagaattgtcattggcagarccctgtgcttctttccttttcttcataaaatccactcgctggtcagttatcttcactttgaagcccagttcttagtttcttcctatggcttcattggtca

SEQ ID NO: 467341 - DNA, 201 bp, Homo sapiens
attatttagtgtcagaaaatttaggattcactagaatggtcctagctaatggaaaagtggtttgggaagagaaaggatgaaagggtgggagatacagaacytttgattcctgggtggtcatgtagtcacccatgatatggaccagcatgacagctgtgctgttatcagtgactaaatttagttacaaatggaatttggagg

SEQ ID NO: 467342 - DNA, 201 bp, Homo sapiens
tgtcaatcccttgaggtgcgggggttggggggatggagggtacagggcattctaggatgtgtgccagggagcacagattcaagggatgggattgagtcagwcctgtgttcttactcagtgtcagaaataactctgtggagctcctagagtaagacatttccggaagcaccacataattactgttgggctcttagggtagcc

SEQ ID NO: 467343 - DNA, 201 bp, Homo sapiens
tatagcctctttacacagactggccattctagtgaaacaggtggtaaacctttgggctgcccagaaacattttatctgttttcacttacctaggaaggggwaagattagcgggtcatccaaaatctgtatgtaagctatcttcattttcttccccaaccttctcctcctgggaaacacaaatgctatctcatctgacaaaa

SEQ ID NO: 467344 - DNA, 201 bp, Homo sapiens
ttacaaatggaatttggaggtggatctaactgctgaggaattggttcattggatgcgtaaggaaatgtaaatgaataggaaaagtgcagaacatataactycttggtttttgttatatctgtaatagctaaagtgaaattaaaagagtgctggatggactttgatgctaaaccaaactcagattttggtcagtctgaactt

SEQ ID NO: 467345 - DNA, 201 bp, Homo sapiens
taatagttttattcacttaaagatgaaaacaatctgcttttgtacagcaagggtcatgaaaaataaagttaatggacaactagagtaaaaatatttttaayatatgacaaggagctaataccccaatatatacagagctcagaagttattatgaaagacattaacatatagcaaaacaagcaatggccatgtggtatcaca

SEQ ID NO: 467346 - DNA, 201 bp, Homo sapiens
tcagtctcaaaaaaaaaaaaaaaaattctagctagatgaaagatttaaataaaaattaatattactttttacaataaaccagtaatagttttattcacttwaagatgaaaacaatctgcttttgtacagcaagggtcatgaaaaataaagttaatggacaactagagtaaaaatatttttaacatatgacaaggagctaat

SEQ ID NO: 467347 - DNA, 201 bp, Homo sapiens
ctgtgcctcctgggcgcgggtgatcccacctcggcctcccgagtagctgggactacaggcatgcaccaccacgcccggctaatttttgtatttattatagmgatggggttttgccatgttgcacaggctcatcctgaactcctgggctcaagtgatcagcccaccttggactcccaaagtgctgggattacacacatgagc

SEQ ID NO: 467348 - DNA, 201 bp, Homo sapiens
agagaaaacagtaacctggtagacgtatttgtctccaaatatactgttagcagagctggggaagaaaatttttaaaaagagagaaacagaataattccccacaaaactaaagataagtataagaaacagcaacgcacacacacaaatatgcaataagatgacaataccagaaccaaatatggctattttatgtgattttac

SEQ ID NO: 467349 - DNA, 201 bp, Homo sapiens
ttaatgaacataaaataagggaggaggtgttgtgggaagcccttgactttgtagccaagtcagacagaagtatggttaacctgggaacctgaataacttgkgactggcatctgaagtgagggcagtcttgtgggactgagcccttaaaccagtgtagtctgacactaactctgggtaattagtgtcagagttgaattgaat

SEQ ID NO: 467350 - DNA, 201 bp, Homo sapiens
ttaaaaattcattagccttctcctttctgacataaagctactcttcatcagagatgagttcctatgtatgtcctttgttccttcaatagctaattaatgtrcttgaggatacttcagtggaaaaaaaggtttaaatatgcaaattactaataaatgtgtaaccttatgtaacttgtgttacatcaagtaacaagctaatct

SEQ ID NO: 467351 - DNA, 201 bp, Homo sapiens
aactcagataggtaagtatttttattcagtagactacctttcttatcttttcagcttaatatagctgcatcttctttctcaaagccaaactaagatattcyctattaaaatgtccatgagcctagcattgagtgtctggcatccatcaatttcatagactggaaaatgattgttgtttggtacagtaaagaagaggatgtg

SEQ ID NO: 467352 - DNA, 201 bp, Homo sapiens; identical to SEQ ID NO: 214354

SEQ ID NO: 467353 - DNA, 201 bp, Homo sapiens
gaagttgcagaggtagatagtgcactgcagcttctcttaagccggattggccatcaggcatatcactctggagtttttagctgctgtcctttcccgatgarcagtctgtattagctgacctcagcctacttgttacgtgacgtatgggtcccaaaagtgtcctttgtcaaaaagcagaatgtgccttctagtctccctttc

SEQ ID NO: 467354 - DNA, 201 bp, Homo sapiens
ggctggccttttcatccagctgattatttttccagcttaatatagattgacccatatgaaatttccaataatggaccatattttctgcaaatagacagtaytcgcatggatcacctatatcttccccctgatacactgtgggtcccaacaccagatgtcatttctccagagcagtgctaatgaacacaaaaggtataccct

SEQ ID NO: 467355 - DNA, 201 bp, Homo sapiens
cgtggtgatgggaagtcacaggcgtgctctttctagttaatttgatgccacatcttccttgtcttttcagcttgggaaaaaggcggcagtggaggaaggcrtggaatgcccacagtggtcagttcaaagaacaaacgtgcaattaaaaaactgtagtcagccaggcacggtggttcacacctgtaatcccagcactttgaa

SEQ ID NO: 467356 - DNA, 201 bp, Homo sapiens
gacatggaagttgcagaggtagatagtgcactgcagcttctcttaagccggattggccatcaggcatatcactctggagtttttagctgctgtcctttccygatgagcagtctgtattagctgacctcagcctacttgttacgtgacgtatgggtcccaaaagtgtcctttgtcaaaaagcagaatgtgccttctagtctc

SEQ ID NO: 467357 - DNA, 201 bp, Homo sapiens
cttgttgatgttctcactgcccttgtgcttgctataaaatgtttcatatgtgcctttacaaatgtgagatctttattctaacctttttttgtaaaagatayctattgatttccatatgcaataaacctttttttcagagaaaagttacatcttctcttttctgtactgtatatgtttgcattagttgaaagtgcctgggaa

SEQ ID NO: 467358 - DNA, 201 bp, Homo sapiens
tgttggccagactggtctcaaacctctgacctcgtgatgacccccctcggcctcccaaagtgctgggattacacccagcctctgctgccttttcatatttmcccatctgctttatggatcaactctcaacagtacactttttcttttctttacctaccctatgagtgcaacccagatgtaagagttaatcctcgtcagaga

SEQ ID NO: 467359 - DNA, 201 bp, Homo sapiens
ttccccagataggaagtaaaggaggatttagttgcatgaaaaaaggatgttaaacattgattacataggagtaaagatgaatgagctgcaatattcagtcrgagctaaacaataagatcagggaaggtaaaaatacctatgtggaatattttgaatcgtaagcttttgaggagcttaaattgagagaattttacttttaat

SEQ ID NO: 467360 - DNA, 201 bp, Homo sapiens
gaggaactggggcctgcaggtggctgacagctaagaaagctcatgagggcagtgagacgctctcctcaacccatgctgcatggcccctgtgttccgggacyttctcagctctctaacgccttcaccctcacctccctaaagtggggctggccagagtcaaacacctcccaagctccgcacatccagctccacaggtgctgc

SEQ ID NO: 467361 - DNA, 201 bp, Homo sapiens
ccggagctctctgaggcctcatgaacgccaaggccgcaggcccaactgcccttctcttcttcgtccggcgagcgcggccagcacaagaaacctgctgcgaratcacctgcactctccggaacccactgcgacagcaaaagcccccgctctgaacaaggcttaacgcgaggctacgggacgccgcaggggtcagccaagcgc

SEQ ID NO: 467362 - DNA, 201 bp, Homo sapiens
tgtgcacaagtacagtgaagtgaagggagacaaggtctcattctccctgggagaggctgtagttgggaagacctgggggattcgtggagttgcctcagagytggccctcagaagcagcgtgggctctagggactgaggagggtgtggcagaccacggcaaaagcaaggtcacagagatgggacagctgagacaggccatgc

SEQ ID NO: 467363 - DNA, 201 bp, Homo sapiens
gctttcagtggggccttagaattacaaacctctttgttcaggccaggtgcaatggctcacacctgtaatcccagcactttgggaggccgaggcaggcgcawcgtgaggtcaggagatcgagaccatcctggctaacacggtgaaaccctgtctctactaaaaatacaaaaaattagccgggtgtggtggcaggtgcctgta

SEQ ID NO: 467364 - DNA, 201 bp, Homo sapiens
caccctcctgaagcagcttccccagagcagcagggactgccctgtagggcccagacatttagggtttacgtcagacaggtatggtgtaagaaggactgacrgtgacttgggaccaaggtactctcacagtactttttccttcctgggttttatcttcttgtatatttaacaatcatttacagagcatctataacatcccaa

SEQ ID NO: 467365 - DNA, 201 bp, Homo sapiens
atcgtgaggtcaggagatcgagaccatcctggctaacacggtgaaaccctgtctctactaaaaatacaaaaaattagccgggtgtggtggcaggtgcctgyagtcccagctacttgggcggctgaggcaggagaatgctgtgaacccaggaggcagagcttgcagtgagccaaaatcgtgccactgcactctagcctgggc

SEQ ID NO: 467366 - DNA, 201 bp, Homo sapiens
gccgcaggaggacacctctccaccaatgaggacacagaggactgggtaaagcggcagcttgtgcaaggtcacctagctagcaagtggtcaagccaggactyaacccagggcctctgacacacgctaggctagcactttctccaggcagaactgtgctctgcttttcggtctgggcttgtgactgctgcttagtaagcaata

SEQ ID NO: 467367 - DNA, 201 bp, Homo sapiens; identical to SEQ ID NO: 213502

SEQ ID NO: 467368 - DNA, 201 bp, Homo sapiens
tgccactgcactctagcctgggcaacagagcgagactctgtcttaaaaaacaaaacaaacaaaaaaacctcttctttctgcctgaaataacctctctctcttgtacttagcttaatttaaagcatattcagccttccctgatcctctcctgctttcctgctgtgaccttggccaaattcattaacctctctgagcctcacc

SEQ ID NO: 467369 - DNA, 201 bp, Homo sapiens
atctctcctgctcgtgatttttaaagctgggcctcaggtaggccccagtctgcctgcctgtgtcggtgccggttccaccctctgagtgcttctcagggccmagcactgcactgtgctgtgtttttttggacatgcactaaacgtggacccttccgatggctctcaggtgggccccgggagcccttcagaggtgttcaacac

SEQ ID NO: 467370 - DNA, 201 bp, Homo sapiens
gccactgcactctagcctgggcaacagagcgagactctgtcttaaaaaacaaaacaaacaaaaaaacctcttctttctgcctgaaataacctctctctcttgtacttagcttaatttaaagcatattcagccttccctgatcctctcctgctttcctgctgtgaccttggccaaattcattaacctctctgagcctcacct

SEQ ID NO: 467371 - DNA, 201 bp, Homo sapiens
cagcactgcactgtgctgtgtttttttggacatgcactaaacgtggacccttccgatggctctcaggtgggccccgggagcccttcagaggtgttcaacaygattgggtgactgaatgagatggttggtccgaatccagacagcgagtggtggcacaccaggacttgacccagaccacccactgctcccgctaactgccac

SEQ ID NO: 467372 - DNA, 201 bp, Homo sapiens
aggcgttctggccagccctctttttatgcctatcggaagacaggccagcaggataagcagaggggatcctgtctgagctggtggacgctacactgctcacrtagctggtggtgtctgagtagttgtccaggctggtcttactgatgtcccggctagccagcaggtggctcgggtccagctcataagcgggaaacccttcac

SEQ ID NO: 467373 - DNA, 201 bp, Homo sapiens
tgggtgggagctggagtgtggcctctgccatgttcacacgggtctgcagaccttccccacgaggaaggtcagtgctcatgcgctctggccggcaggagccrgtgggccacccaggagagctgctggctgctcctcccttgcatggtggtgatggcctcatggcgcctcagccctgctctgcctgctgtgctctccagcccc

SEQ ID NO: 467374 - DNA, 201 bp, Homo sapiens
gtccaggctggtcttactgatgtcccggctagccagcaggtggctcgggtccagctcataagcgggaaacccttcacaactgttgtctcgggaagaagggytggcattttccactgaaaagtctacacggaacccctggtccttctgcctgtggcgctgtggggggctgctcaccaccccatcctcgtcagagtgtgtgtg

SEQ ID NO: 467375 - DNA, 201 bp, Homo sapiens; identical to SEQ ID NO: 213469

SEQ ID NO: 467376 - DNA, 201 bp, Homo sapiens
cttcccaatacagcaggaggagtctatttgtgatggggtgttttctatgctgccttcctctgtctcacccagttctggaggactgatgcttgcctggaagyggatggctccttcattgccatctggatatgattcttcttcattaatggcacttgggtagctggccttaaagtcatcagggatgagggcctcagaggggca

SEQ ID NO: 467377 - DNA, 201 bp, Homo sapiens
cctgatcctggatgtgctccatctcaccaggacacaaatcatgccccttcaacttccgatgagggtatgagcggatctgcttcagcaggtcttgatgttcratgatggacttctccacactggccagttcattggctttctcaattgcctgagatgagtaaaagcctttgtcgttggctttcttctggatctccgtttctg

SEQ ID NO: 467378 - DNA, 201 bp, Homo sapiens
gcaagctttcagtggggccttagaattacaaacctctttgttcaggccaggtgcaatggctcacacctgtaatcccagcactttgggaggccgaggcaggygcatcgtgaggtcaggagatcgagaccatcctggctaacacggtgaaaccctgtctctactaaaaatacaaaaaattagccgggtgtggtggcaggtgcc

SEQ ID NO: 467379 - DNA, 201 bp, Homo sapiens
gctgagctcaagtgatcctcctgccttggcctcccaaagatttgggattacaggcatgagccactgtacaggccagttactactattacatccctcatggkgtcgctgtggagacaaaatgagttgtgcttaggacaatgctggccctcggtaggcgctgctgtcatcaccatcactacttttagcctagcactgaccagt

SEQ ID NO: 467380 - DNA, 201 bp, Homo sapiens
gaagtggatggctccttcattgccatctggatatgattcttcttcattaatggcacttgggtagctggccttaaagtcatcagggatgagggcctcagagrggcaggtactgaggacttcaatactgtcctcgctgatggtcctgtggctgactgctttgctccggaccacctgggggctcaatggtactgtgaggcttgc

SEQ ID NO: 467381 - DNA, 201 bp, Homo sapiens
gatgttcaatgatggacttctccacactggccagttcattggctttctcaattgcctgagatgagtaaaagcctttgtcgttggctttcttctggatctcygtttctgtgtgtagcactgtcctggtgtaatccaagtctttcagctttttttcaagttccccagcaaatgccttcctgttgccagtcttcaagcactcag

SEQ ID NO: 467382 - DNA, 201 bp, Homo sapiens
caggccagttactactattacatccctcatggggtcgctgtggagacaaaatgagttgtgcttaggacaatgctggccctcggtaggcgctgctgtcatcrccatcactacttttagcctagcactgaccagtggggtgactgctgtttgttcattggcttctccccactggacaagcagctccaagattctagggtccca

SEQ ID NO: 467383 - DNA, 201 bp, Homo sapiens
acaacagtttcatcttatcataccctcaggtggcgtctactgctcacctcccccaggaattctttgggtgagctgtagcccatcccattcccgtttggccycgcaggggaccctccagggtgcagggctccccacacctgcccgctgcacctcatgcctgtgtaggatgctggaggcagatgctcccagcacccaacatct

SEQ ID NO: 467384 - DNA, 201 bp, Homo sapiens
ggccttctttgcgactccccgaacccggggtcctaggctgcttctcacacacccgaggagaagaactctagcagccccctcacagttgtagctcctccggwgctctctgaggcctcatgaacgccaaggccgcaggcccaactgcccttctcttcttcgtccggcgagcgcggccagcacaagaaacctgctgcgagatca

SEQ ID NO: 467385 - DNA, 201 bp, Homo sapiens
ggtgctcagagtgcagagcctctgcagcgcaacacctccgaggataggaaggtcacaaccaccgaagacatctctcctgctcgtgatttttaaagctgggcctcaggtaggccccagtctgcctgcctgtgtcggtgccggttccaccctctgagtgcttctcagggcccagcactgcactgtgctgtgtttttttggaca

SEQ ID NO: 467386 - DNA, 201 bp, Homo sapiens
gcgattttacgcgctagataggtcttaagttcatctctacgcctgccctggttaaggttctcatcatttctcctctggattcatctgcaacacaggctgcygggttggttcccacctcctagagctggaagagtgggctctctgattctttacacccccgcctcaatcctcctgctgcctgaataaccatctccccgtgac

SEQ ID NO: 467387 - DNA, 201 bp, Homo sapiens
aatgtaattttcaaagatgccttttgcctcatcccttgcttttaagtattattatagacttttggagactcacgaaacaagcaatccctaaattctcgccyaggaaagtatcttggattaaatggtttttgagaaccttgagagtgtatattctatgaaatggaagaaacaagaactagacagagtcacaaatgctgttga

SEQ ID NO: 467388 - DNA, 201 bp, Homo sapiens
ctcatgtcttggaagccctagactgctgctgtaccctgaaggaggtacctgctcacattggcccctctgtctggaataaccccaccccggttccacccaaktcaggaaagcttcccaacccctccctcccaccaccccaaagctaagtgaagtgacccctcttcttgcctctgtaacaccgccatgcacatttcatacagc

SEQ ID NO: 467389 - DNA, 201 bp, Homo sapiens
gacagagtcacaaatgctgttgatcacagacaatctctgccatccataaggtaaatgtaatacatctggcgacctgctgagtgtgaacttgcagcaggtgrggaaggaactctgaactctcacaatcttgtttcttcatttcccagagagaaactcggcaaagagaaaaaggacatttccctccaggttatctgaaagaat

SEQ ID NO: 467390 - DNA, 201 bp, Homo sapiens
ctaattccatttacactgcattcttcaaatgtaattttcaaagatgccttttgcctcatcccttgcttttaagtattattatagacttttggagactcacraaacaagcaatccctaaattctcgcccaggaaagtatcttggattaaatggtttttgagaaccttgagagtgtatattctatgaaatggaagaaacaaga

SEQ ID NO: 467391 - DNA, 201 bp, Homo sapiens
tgagcccctcaagagcagcgtcaggggattgtggggactgttggcacacagctggctttgctaggttgaagacaatgggaggtgtggaagacttgttgackcatttaaagaagattggagggaaaggtaggattgagagtgtttcagacagaaaaaggattatatgctgagggtaaagcacaagtacagagggttgcagat

SEQ ID NO: 467392 - DNA, 201 bp, Homo sapiens
gccatcatggccgagttctggtgagggccctcttctgggatgcagcggccagcttctcatgttctcacagtgggtggagggtaagcttgctctctggcctyctcttaaaaaggcactaatcccattcatgagggctccaccttcatgacctaattacctcccaaagatgccatctccaaacaccatcattctggggattcc

SEQ ID NO: 467393 - DNA, 201 bp, Homo sapiens
ttaaaaaggcactaatcccattcatgagggctccaccttcatgacctaattacctcccaaagatgccatctccaaacaccatcattctggggattccattwcaacatgatttgggggatacatcagaccataacacttttctttttctcaaccttcacatccagttggttctcaagccctggcgattttacgcgctagata

SEQ ID NO: 467394 - DNA, 201 bp, Homo sapiens
tgggattaggggatcagaggtgagggaactcatggtttggctatttctcgttctttctgcactgtttcaaatttttacaagtgtatgttattgtacttttraaaagattagcttggcaacaagtctagcctgaaatgggtgctattttgactagtctgagtgaaaagtgaggatttaaatgaagtaacccctaaactcagc

SEQ ID NO: 467395 - DNA, 201 bp, Homo sapiens
gattattatgccaaacaaatattctaaaaagttggtctctaaaacgtcctccgtcccgtcccttttcgtgcctctgcccccacagctgctgcagtctgaayggtgacggtggcccctgcagaagcatgtggctaaatctccaccagggggcgatagagctcctccaaatcaagctgctgcccctggagaaaaattggcgga

SEQ ID NO: 467396 - DNA, 201 bp, Homo sapiens
cagacagggccaacaaggagcacatcctgcacgcaggaggtgtcccactcatcatcaactgcctatccagccccaatgaggagacggtgctgtctgccatyaccacgctcatgcacctgagcccgccgggccgcagctttctcccagagctgaccgccacgcccgtggtgcagtgcatgcttcgcttctccctctcggcca

SEQ ID NO: 467397 - DNA, 201 bp, Homo sapiens
aaggacggctgtgggctttgggtgagctccctggacttactgccccacagaggaccagagtggggcctgctaaagccaagccagggcaggagccccagttkcccaggtccccgagtgatgccagctcctctagaagattattatgccaaacaaatattctaaaaagttggtctctaaaacgtcctccgtcccgtccctttt

SEQ ID NO: 467398 - DNA, 201 bp, Homo sapiens
tttagtagagacggggtttcaccgtgttggccaggctggtctcaaactcctgacctcaggtgatccgcccgcctcagcctcccaaagtgctggggttacastcgtgagccaccacacctggcccaactaacacatttttaaaaatactttttatttatttatttttttttttgagatggagtcttgctctgtcgcccaggc

SEQ ID NO: 467399 - DNA, 201 bp, Homo sapiens
atgggcacctgtccctctggctggggaagatgtcttagttgggtttcaggttcaggtaagtcttctctttgttagtttccagaaaaacaggggaagtgggyagagctgtggccttcactgattggtcactcaggacactgggcatgttttgcaaatgagctgagaggtggcttcctccactgagcaggaaccaaagggagg

SEQ ID NO: 467400 - DNA, 201 bp, Homo sapiens
tgtccagccccctgaccatctgcggttctttgaaccctttcccccccgggtcagtgcttaaaggatcaggtgatgaagggctgccctgacatggtagagcrcctagtcgggtatcccaggaagacgccacttgcaaggagagcagtggagggcttgttaccagcaagagggtgtcagtgtgtgacaactgggggctgaaag

SEQ ID NO: 467401 - DNA, 201 bp, Homo sapiens
cttagcgggcctatcttattgtatgtacaatctggtgtccttcttccctccttcatcttaaattacaggcattttctaacatgaattattctttggacactttttttttttttttttaatttttgaggtgaagtctcactctgtcgcccaagctggattgcagtggcacgatctcagctcactgcaacctccacctcctga

SEQ ID NO: 467402 - DNA, 201 bp, Homo sapiens
tggtggatgccaacctggataacctgtggcccagcattgactgtccacccagccttgctgttaggcaccatgactccaagatgaagatgtggtccctgccyttgagtgacagcccagggacttaatgtggccatcgggcatcaagcacaaggccatgcaggtgatgatacgtcggaatagaggcaccagccctggtaactg

SEQ ID NO: 467403 - DNA, 201 bp, Homo sapiens
aatcccatcaccccacccgcagtccagtgtgcacaggaaggccgctcccgtcagctcgggagacatgccgcgggtgtgtctgagcagaagagtccgaccayagcacttccactgcccctgctccagactgagcctggcatctgcccaaggctggattcgttgtccttactgcttccagagggccccgccatttcccatggg

SEQ ID NO: 467404 - DNA, 201 bp, Homo sapiens
gcaggcgcactctgccctgggtatcccactgccgaggagcgtggccccacggcagcgctgatccatggagactgcgagaccgtggcacccctactgctggrgaccacagtcctgatgtggacgcagggaacggggagcacatactgccccattggtgccttttcagccatctgaaaggcgggttctttcagcaggacaggc

SEQ ID NO: 467405 - DNA, 201 bp, Homo sapiens
agaagctgagtcccgtcccttctccgagcgtggtttcctctcccgccttgcctgcgtcgcaagcagttgtgggagcagaagtgtgtctgtgcatctgtgtytctgtgcaggtattttagaattgttaggatcattatcaccagctttacttttcccaaccatttttttcctcctttttttctcttccttcttctgccacag

SEQ ID NO: 467406 - DNA, 201 bp, Homo sapiens
cacgctcatgcacctgagcccgccgggccgcagctttctcccagagctgaccgccacgcccgtggtgcagtgcatgcttcgcttctccctctcggccagcrccaggctccggaacctggcacagatcttcctggaggacttctgctccccccgccaggtggccgaggcccgcagccggcaggcgcactctgccctgggtat

SEQ ID NO: 467407 - DNA, 201 bp, Homo sapiens
tggagcaggcaggcaggcctttctggaaacttgagaaggcaggagccggaatgggctttggatgccttgtgctggggccagcttctcaacagcctgggccyctacctggggctcacgggcaggggaggtgggaggaggcccggggctacagcatccagactcttccttgctctcccacaggaggcctgtgcaacctgtgcc

SEQ ID NO: 467408 - DNA, 201 bp, Homo sapiens
catgagaaaggcattttagccgggacacagcatgggcaaaggccttaaaacaggaaggagccagacggaaggctgatgtgggaggatcgttgcagtgaagkggagaatggcacaaaaagagtttagagagttcagtggcaccagagcttgcaggagtttagatctaggccgtgggaaatagtttgaagcaaacaaaatttt

SEQ ID NO: 467409 - DNA, 201 bp, Homo sapiens
atagctcaccataaacttgaactcctgggctcaagcagtcttcctgccttagcctcccgagtagctgtgactacaggtgtgcaccaccatgcccagctaattttttttttttttaattttttgttgtgacaggatctcactgtgttgcccagactggtctcgaactcctggccccaagaaataaatcccttgtaaccctaa

SEQ ID NO: 467410 - DNA, 201 bp, Homo sapiens
ctgtaaaattactctttctttcccctctttacgtatgatacccattggaaggaagtcactacataaattatcttaaatctctctttttattctctttttcyttttttttttttttttttttgagatagggtctcactctgtcacttaggctggagtgcagtggtgtgatcatagctcaccataaacttgaactcctgggct

SEQ ID NO: 467411 - DNA, 201 bp, Homo sapiens
cctttatttccatgcttgggggcctgcaggcccctagagaagcccctgctctctctccatgtcagccagggcttcagtctggcctcaagtgttcccatcarcggtggcagtggaactacagtggcagcaaccacttgccaacaggggcctggcctcactcaccgtcgtctctgtgtggcggtctctttctcctgtggcttc

SEQ ID NO: 467412 - DNA, 201 bp, Homo sapiens
cagacagttctcctgcttcagcctcccgggtatgggattataggcgcccgccaccacgcccggctaatttttgtgtttttagtagagacggggtttcaccrtgttggccaggctggtctcaaactcctgacctcaggtgatccgcccgcctcagcctcccaaagtgctggggttacagtcgtgagccaccacacctggccc

SEQ ID NO: 467413 - DNA, 201 bp, Homo sapiens
cttccttgccaacacttagtattggcctttttttgtttgtttttgagatggagtctcgctctgtcgcctacgctggagcacagttggcacaatctcgtctygctgcaacctccgcctcctgggttcaagcaattctcccacctcagcctccggagtagctgaggttgcatgtgtaggccaccatgcctagctaatttttgt

SEQ ID NO: 467414 - DNA, 201 bp, Homo sapiens
ttatcaccagctttacttttcccaaccatttttttcctcctttttttctcttccttcttctgccacagcaagacccccccgccccaagcacagtagctttytcagcgtcgaatccctccgtgggaccatgttgcaatgaaatttcaacatgcaaatgaaatttctcgaaatttctcttgtgtttattatgcatgactgaga

SEQ ID NO: 467415 - DNA, 201 bp, Homo sapiens
gcggcgtgggcctgggctgggttcttgccatcctgggcagcttcccggcgtgggtgactgagcccgggtcctggagtccgcggtcccagcgtctccacttytcagctgattcctagaagctgagtcccgtcccttctccgagcgtggtttcctctcccgccttgcctgcgtcgcaagcagttgtgggagcagaagtgtgtc

SEQ ID NO: 467416 - DNA, 201 bp, Homo sapiens
ccacagaggaccagagtggggcctgctaaagccaagccagggcaggagccccagttgcccaggtccccgagtgatgccagctcctctagaagattattatrccaaacaaatattctaaaaagttggtctctaaaacgtcctccgtcccgtcccttttcgtgcctctgcccccacagctgctgcagtctgaacggtgacggt

SEQ ID NO: 467417 - DNA, 201 bp, Homo sapiens
acctcaggtgatccgcccgcctcagcctcccaaagtgctggggttacagtcgtgagccaccacacctggcccaactaacacatttttaaaaatactttttwtttatttatttttttttttgagatggagtcttgctctgtcgcccaggctggagtgcagtggcgcgatctcggctcactgcaagctccgcctcccgggttc

SEQ ID NO: 467418 - DNA, 201 bp, Homo sapiens
tcaccatgttggccaggctggtctcggactcgtgacctcaggtgatccactcacttcagccttccaaagtgctgggattacaggcgtgaaccaccgtgccygggccggccttgttttaggtttttacatttaagaaaggggaaaaaaaaagcgtatcagccattgaacttgctgaactgagagggaaagggatttgtgccc

SEQ ID NO: 467419 - DNA, 201 bp, Homo sapiens
ccgtgggaccatgttgcaatgaaatttcaacatgcaaatgaaatttctcgaaatttctcttgtgtttattatgcatgactgagaaggagagcccccgcgtrttttcttactgccgtcgtttccctttctcttagtgtctctgcttggggatccccgacaggcacttattctgctgtttctggagaaggctctgtgctgcgc

SEQ ID NO: 467420 - DNA, 201 bp, Homo sapiens
agagctgagtcagattgcccatggctgtggctcgcagaaccaaaaccaagctgggtatggtggctcacacctgtaatcccatttgggaggccgaggggggwggatcacttgaggtcaggagttcgagaccagcctggccaacatggcaaaaccccgtctctactaaaaatacaaaaattagttgggtgtggtggcgcacac

SEQ ID NO: 467421 - DNA, 201 bp, Homo sapiens
gatcctccgaccccagcctcccaaagtgctaggattacaggcatgagccactgcacccagccccagtggcagttcctctatgacactggtacactggactgtacactggtacactggtacactggactggtacactggactattcacaggggattatttgttcttgggttttccttcagtgtcttgaaaatggctccttca

SEQ ID NO: 467422 - DNA, 201 bp, Homo sapiens
gtgcgtgctcagtgaagtgtccacggttctaggaacttgagccctgccttatagctcctggtggaagggacagagcaaggacaaaaggcagcctacagaaygccacagccacgctaggggccaccctgtgctttagcaagtgctgaagtgggactggcaagggaggctccaagggccccatggggagaggcgctcagtcag

SEQ ID NO: 467423 - DNA, 201 bp, Homo sapiens
gaggggcagaaggctcccatctctttagcgttttgggcagctcactcagtctctcatagccttgacttctcccatggaaatgggggtgatgttagcacttrtttctagggttcagtcatgtgtccagtgcgtgctcagtgaagtgtccacggttctaggaacttgagccctgccttatagctcctggtggaagggacagag

SEQ ID NO: 467424 - DNA, 201 bp, Homo sapiens
gcacctttcccaccctcccgcccgtccctgggggtcctccgtcaccgcggccatggcccagaagccgaaggtggacccccacgtcgggcggctgggatacytgcaggcgctggtcacggaattccaggagacccaaagccaaggtgagagccacggtgggatcaggtggcagggtccgctgtgaccgccgcccggacctgg

SEQ ID NO: 467425 - DNA, 201 bp, Homo sapiens
atcaacagaataaaatgcacatatcttaagtgtcagtttggtgaattttgaaattcattgagctatgtgtacatccatgtaagcagctcctaaaccaagaygtagaaactcccttcacacccacgctgggtcagtatctcccactccaaggcaaccactattctaacctctatcctgtggatttgctttgcctgttcttga

SEQ ID NO: 467426 - DNA, 201 bp, Homo sapiens
ccaagatcacgccattgcactccagcctgggcaacaagagtgaaactccgtctcaaaataaataaagagtaccagacctgagacttaaacccagagcagtyagagtctacaagctagtcccttggcccttttcctgcccttagaggagttccaattcctaggattgtggagcgaaagcgagaaaggagtttactccaaatt

SEQ ID NO: 467427 - DNA, 201 bp, Homo sapiens
tagctcaccataaacttgaactcctgggctcaagcagtcttcctgccttagcctcccgagtagctgtgactacaggtgtgcaccaccatgcccagctaattttttttttttttaattttttgttgtgacaggatctcactgtgttgcccagactggtctcgaactcctggccccaagaaataaatcccttgtaaccctaaa

SEQ ID NO: 467428 - DNA, 201 bp, Homo sapiens
agaggatttttatatattttttccattttgttgggttgtgtccttatttatataaatactttatccgtaagaggcaaggaggaaaccttctttgcttttamatattgtggttgtcatcgtccctattttatttctggtgtgatttctctgtcttaccttctaaatgagaaaatgttttcttgtatttgtacattgtcagat

SEQ ID NO: 467429 - DNA, 201 bp, Homo sapiens
gtgtaaggctgtgtttgtggtgggggtgtgtgtgtgtgtatctgtgcacacatacacacgtctgtgcctgtgtgtgtgtgtttgtgtgtgtgtgtgtgtgkggaattacattgatgcatttattgagaaaggtgcaagaatttcacctacacagagggacacatctgctttgttatttataatagaaagctaaattttaat

SEQ ID NO: 467430 - DNA, 201 bp, Homo sapiens
gccctcaaggcaagataagaagttgggtgtaaggattttgtggggggcctggccatgatctttgatatgatccccgaatagccaaatagttttttttgttyaattttttgtttctgtattttgtatttttaaaatcttgtcaaatgtttttgtgttaggaataaaaagtcataaactattcccaactttgtttcttgaggg

SEQ ID NO: 467431 - DNA, 201 bp, Homo sapiens
gaggatttttatatattttttccattttgttgggttgtgtccttatttatataaatactttatccgtaagaggcaaggaggaaaccttctttgcttttacwtattgtggttgtcatcgtccctattttatttctggtgtgatttctctgtcttaccttctaaatgagaaaatgttttcttgtatttgtacattgtcagatt

SEQ ID NO: 467432 - DNA, 201 bp, Homo sapiens
agtgactgagccttcgtgattcctggggacagcttttcagatactctgtttcatcagtatgctttgcacatccggaaggagtacaaaaatccaactgcccraatttggggcttggaaaataggttttataggtggtcggtccctgggctgtgcaacaactcctcaaagaggggtttatataactagaacccccctgggctg

SEQ ID NO: 467433 - DNA, 201 bp, Homo sapiens
ctgctctggaattcacacccaccccctcgcctccttgtgccatgttgttagcattggcttggagcatctgcttcttccagaggcagctgctaatgttgaarccaacacgagccctctccccaaccccaggtttctaaagaaggtgtctgtagccagccttaatcaactgggcaaggtggtccctatggtcctttccagcat

SEQ ID NO: 467434 - DNA, 201 bp, Homo sapiens
gatcagacatatgtccagggagccaggaactgggtgagcggctttgggttcaaattcctttcccacctcgtggaggttaaatttctggtctccaaaacacrgtgctttccggtcttcctacttggtggggaggggcagagaaaacagcctagaattaaacctccaagatgagtgtgagatgaagcctttccacctatccca

SEQ ID NO: 467435 - DNA, 201 bp, Homo sapiens
atgtagttggacacctcaatcagatttctgtcggggtctcggaagtagatggacatgataggcccttttgcccctgttctggggactggcccctcctcaayagggacatcacaagcctgaagtgggaagaaaagacaaaagtcgttcgtcaaaatgtgtgtgtgagaccaaaatttaatgccttttttttttttttgtgac

SEQ ID NO: 467436 - DNA, 201 bp, Homo sapiens
tacaaggacacacggaaaggttgaagaagcagattcctctcctgccttctcacacagtgttctgtttttttggttgtgtttttttttttttttttttttttgagatggagtctggctctgtcatccaggctggagtgcagtggcaggatctcagctcacttcaacctctgcctcccgggttcaagcacttctcctggctca

SEQ ID NO: 467437 - DNA, 201 bp, Homo sapiens
ttacaaggacacacggaaaggttgaagaagcagattcctctcctgccttctcacacagtgttctgtttttttggttgtgtttttttttttttttttttttttgagatggagtctggctctgtcatccaggctggagtgcagtggcaggatctcagctcacttcaacctctgcctcccgggttcaagcacttctcctggctc

SEQ ID NO: 467438 - DNA, 201 bp, Homo sapiens
gatgttagctgctatgaactatgactgttttgcgtgttccaaaattaaaataggaagtaaatttttgaatttttttcttttctagggagaaggtgatattyatggtaagtacttctgaagaccaaatttctggctctgtccatggttttaggacagatctgaatcttgatttaaatcatgtcttggggaaagagactgggg

SEQ ID NO: 467439 - DNA, 201 bp, Homo sapiens
cttacaaggacacacggaaaggttgaagaagcagattcctctcctgccttctcacacagtgttctgtttttttggttgtgtttttttttttttttttttttttgagatggagtctggctctgtcatccaggctggagtgcagtggcaggatctcagctcacttcaacctctgcctcccgggttcaagcacttctcctggct

SEQ ID NO: 467440 - DNA, 201 bp, Homo sapiens
agacagaagcagcagcttcctcttaaggccttttcctacccttatgttttgtggtgtgcttacaaggacacacggaaaggttgaagaagcagattcctctcctgccttctcacacagtgttctgtttttttggttgtgtttttttttttttttttttttttgagatggagtctggctctgtcatccaggctggagtgcagt

SEQ ID NO: 467441 - DNA, 201 bp, Homo sapiens
tgggcaccagcatgtgcccccgtgtctaaaaaacaaaacaaaacaaaaattagctggtggtagtggcagtgtgcatttagtccctgatactccggaggccraggtgggaggattgctgagcctgggaggtggaggctgcagtgagctgtgattgagccactgccctccagcctaggtgacagagtgaaaccctgtgtcaaa

SEQ ID NO: 467442 - DNA, 201 bp, Homo sapiens
tagacagaagcagcagcttcctcttaaggccttttcctacccttatgttttgtggtgtgcttacaaggacacacggaaaggttgaagaagcagattcctctcctgccttctcacacagtgttctgtttttttggttgtgtttttttttttttttttttttttgagatggagtctggctctgtcatccaggctggagtgcag

SEQ ID NO: 467443 - DNA, 201 bp, Homo sapiens
ttaggtcctcagaggaaatgttggggtttgttgtagacgtggtactagcactagagcaatttatcatgcagaatttttgcatagcattgtcctgagttggrtagaggtagcagactgaccctgtgcttgattgcaacacaatgaaatgtcacattcggtttcaagtagatgttagctgctatgaactatgactgttttgcg

SEQ ID NO: 467444 - DNA, 201 bp, Homo sapiens
tccattctaataaaagatctctgaagtgctaattggtgttaggtcctcagaggaaatgttggggtttgttgtagacgtggtactagcactagagcaatttrtcatgcagaatttttgcatagcattgtcctgagttggatagaggtagcagactgaccctgtgcttgattgcaacacaatgaaatgtcacattcggtttca

SEQ ID NO: 467445 - DNA, 201 bp, Homo sapiens
tccggagacttcttagatctgaaggtcagtgtgacagcatgaggccagaaaggctttcaggtcaatatgattctgaaatttgtactaagagtttcagttcwcccactggaattttacattgaggtagttaggaaagggactgggccatattgataatggaagattgatagtaaaatcatagaagtgtgttaacatggtctc

SEQ ID NO: 467446 - DNA, 201 bp, Homo sapiens
gctatgaactatgactgttttgcgtgttccaaaattaaaataggaagtaaatttttgaatttttttcttttctagggagaaggtgatattcatggtaagtrcttctgaagaccaaatttctggctctgtccatggttttaggacagatctgaatcttgatttaaatcatgtcttggggaaagagactggggagtgaaacct

SEQ ID NO: 467447 - DNA, 201 bp, Homo sapiens
gcttgagcctgggaggcggaggttgtggtgggccaggatcacgctactttactccagtctgggcgatggaatgagacacagtctcaaaaaaaaaaaaaaaatccattaatataggagcattattaactgcccttactgccttttcaggcaaaagggattctatgaaatatttttacgaatatcttagaatatgcaactgaa

SEQ ID NO: 467448 - DNA, 201 bp, Homo sapiens
atggctttttagtgaggttgagatagaagagactattatcagctcttcttgggcttctaaattggtcaagctgacttaagtgtgtgtgtgtgtgtgtgtgkaagtgtgtaagtgattagagatggggatctcactatgttgcctaggctggccttgaactcctgggctcaagcaatcctcctgcctcagcttccagaatgg

SEQ ID NO: 467449 - DNA, 201 bp, Homo sapiens
tgaaaggagagatttaccagttttccattctaataaaagatctctgaagtgctaattggtgttaggtcctcagaggaaatgttggggtttgttgtagacgwggtactagcactagagcaatttatcatgcagaatttttgcatagcattgtcctgagttggatagaggtagcagactgaccctgtgcttgattgcaacaca

SEQ ID NO: 467450 - DNA, 201 bp, Homo sapiens
tttgccctcatgggtagttacttatgtttattgtgagaatagtgaggtacaagtatgtaaatggctttttagtgaggttgagatagaagagactattatcagctcttcttgggcttctaaattggtcaagctgacttaagtgtgtgtgtgtgtgtgtgtgtaagtgtgtaagtgattagagatggggatctcactatgttg

SEQ ID NO: 467451 - DNA, 201 bp, Homo sapiens
attggatccggagaccggatcgatcaggtccggcgggctccttaccctcgccgtgcccccactccttattcggacctacctgacaggtgcatgtgtggtcragcggggctggtcatcgcgacccttcaccccccattgaggacccaatcgttcttcccctcttcgaagtgcctcccctcttccaagtgtctccccttccta

SEQ ID NO: 467452 - DNA, 201 bp, Homo sapiens
ctttgccctcatgggtagttacttatgtttattgtgagaatagtgaggtacaagtatgtaaatggctttttagtgaggttgagatagaagagactattatcagctcttcttgggcttctaaattggtcaagctgacttaagtgtgtgtgtgtgtgtgtgtgtaagtgtgtaagtgattagagatggggatctcactatgtt

SEQ ID NO: 467453 - DNA, 201 bp, Homo sapiens
actttgccctcatgggtagttacttatgtttattgtgagaatagtgaggtacaagtatgtaaatggctttttagtgaggttgagatagaagagactattatcagctcttcttgggcttctaaattggtcaagctgacttaagtgtgtgtgtgtgtgtgtgtgtaagtgtgtaagtgattagagatggggatctcactatgt

SEQ ID NO: 467454 - DNA, 201 bp, Homo sapiens
tgaaatgaatgtttaattcacctttcgtcatcaatttccctccaatattatgctctagggactgtagtagcattgtcattttattgtctctctaccttccytttttctatattctcacctaattctcataaacttaattttgtccagtaatgttctcctggccccataaactcgttataaatttagtctggtagggaatga

SEQ ID NO: 467455 - DNA, 201 bp, Homo sapiens
tgaatgtagacactgatggagttgattcttttttcctgttagcagctatctgttgtaggggtgagggagatgaatgggtgaggaaagtgaaatgaaagttstctgaaaagatttatgccaagaaatgtttcagtatgatctgaagttgatgttttgccattatttgcagagttttgcggcctccaggtggtggatccaatt

SEQ ID NO: 467456 - DNA, 201 bp, Homo sapiens
ataaactaaaccaaaatatatctaaacacacacacatacatattaatcaggtcagtatttgttacacttaatgagagcttttttttttgagaccaggtgtmtctctgttgccaaggctggagtgcagtaggcaatcacagcttactgtggcctcgacctccttgggcttaggtgatcctcccacctcagcctccctagtaa

SEQ ID NO: 467457 - DNA, 201 bp, Homo sapiens
attacgaattataggtggaaatgagctgtaatcattgacttaattatcttaaatcttggaggtatttattggcatttctgtaacaagtgctaaagacttgscgatgagtgcaaggtttgtaagtgtcaggcagtagcagtcagtgaagtgcagcagtcacaaggccctctggtctagacagaagcagcagcttcctcttaa

SEQ ID NO: 467458 - DNA, 201 bp, Homo sapiens
ggccgggctgatactgaactcctgacctccagtaatccacctgctttggctttccaaagtgctgggattacaggcatgagccgctacacctggcccctttwggttttttatggaggcttcattacataagcatgattgacaactgtacagaaatacgattagacaaaaaaggtttgatttcataccaatggactgaacaag

SEQ ID NO: 467459 - DNA, 201 bp, Homo sapiens
tcaaagggatgggcccagcatcaacagccacagatgcagcttgggcaccagcatgtgcccccgtgtctaaaaaacaaaacaaaacaaaaattagctggtgktagtggcagtgtgcatttagtccctgatactccggaggccgaggtgggaggattgctgagcctgggaggtggaggctgcagtgagctgtgattgagccac

SEQ ID NO: 467460 - DNA, 201 bp, Homo sapiens
cacttagggagggtgagatgggaggatcacttgagtccaggaatttgagaccagcctgggtaacataaggagaccccatcttttaaaaataaaaaaaaaamaaaaacaaaaatagccagttgtggtggtgcgcgcctgtagtcccagctatttgggagactgatataggaggattgcttgagcccaggagtttgaggctac

SEQ ID NO: 467461 - DNA, 201 bp, Homo sapiens
ttgggcagctgaggtgggtggatcacttgcggtcaggaggttgagacaagcctggccaacatggtgaaacctggtctctacaaaaatacaaaaaattagcygggcatggtggcgggcgcctataaccccagctattgggaggctgaggcaggagaatcgcttgagcctgggaggcggaggttgtggtgggccaggatcacg

SEQ ID NO: 467462 - DNA, 201 bp, Homo sapiens
aaaccactatggcaggactgcaagataattttttgttcttcagaatgttcattaactgctggattcagagagagaatgaagacttcagtagatcctgtatrtatagcaggaggccatgtcccaccagcagaaatgaaactgcttgaactaacaagttgtctcagtccgaattctctttatcttgaatattttaaatgtgga

SEQ ID NO: 467463 - DNA, 201 bp, Homo sapiens
ctgaatttgattggttaacactgaaataaacttgctattaaaaagaaaactaaggcccagtatggaggctcacgcctgtaatcccagcaccttgggaggcyaaggcaggttggatcacctgaggtcaggagtttaagaccagccaggccaacatggtgaaaccctgtctctactaaaaatacaaaaaattagtcgggcgtt

SEQ ID NO: 467464 - DNA, 201 bp, Homo sapiens
gttcaagccatcctctcacctcagcttcctgagtagttgggactacagttgcatgccaccatgcctggctaatttttgtggttttgtttttgttttgtttytgagatggagtcttgctctgttgcccaggctagaaatgcagtggcatgatcttggctcactgcagcctccacctctttgattcaagcaattctcctgcct

SEQ ID NO: 467465 - DNA, 201 bp, Homo sapiens
gagaagagtgaaacagaacgcatctgctggaagagcagtattggctggctacaaggaatctggagaagatggtttcttccttccttcagggttttttctcrcttccagtttactgacttgtataaatttacaatattcctcagtcttttactgctcgatcagtactttttagaatcaggagctggcgttgaaaggcctgag

SEQ ID NO: 467466 - DNA, 201 bp, Homo sapiens
agccaattcctagagatagcaaattactcactggggcacactttcatatgcaaaccaaccagagcccacactgccaatccaggctctctcacttagaaccrctgttctctaccctaatcactccagggccacacaccagaaaactcgggacagcccctacaccccagagctcagggaaattattcaaatagcctgcttacc

SEQ ID NO: 467467 - DNA, 201 bp, Homo sapiens
tttcagtactttgaaaatccttctccattgtctcctggtttgcatgatttatgataagaagtctcctgtcatatttttgtttgctcctctacacataatgwctttgatgctttttaaaatttctctgtttctagattttatcaattttattgtgatatacctgggtgtagttttctttatttttcttcttcttgggttctt

SEQ ID NO: 467468 - DNA, 201 bp, Homo sapiens
aggtcttggatgttattcctaaaggaaacagatgagttatgagcctcagatattggacaattatgtatcagttccctttgtttcaatctaatacacacacatacacacacacacacacacacacacacacacacacaaactaaaacccaaaataactctaagcagaaattttcaaaaaattctttgaatgtcctatctcta

SEQ ID NO: 467469 - DNA, 201 bp, Homo sapiens
aaggtcttggatgttattcctaaaggaaacagatgagttatgagcctcagatattggacaattatgtatcagttccctttgtttcaatctaatacacacacatacacacacacacacacacacacacacacacacacaaactaaaacccaaaataactctaagcagaaattttcaaaaaattctttgaatgtcctatctct

SEQ ID NO: 467470 - DNA, 201 bp, Homo sapiens
ggaagggcaccagaatgaggctgacattttaattgccgtcaagtcattattccagtctcgcctgaaaccctttgggaagagactgaggatttccatagccrcggtgggttccctagacttctcccaacatttccatcctgagcggtgcttgggatttctctgagttgagtgtgtggtgctaggcagagacggaactcctgc

SEQ ID NO: 467471 - DNA, 201 bp, Homo sapiens
tgactcctgcttttctcactggctgtggcagaacctgtgagcaagttctttaaatcctcgaagcttgcgattcctcacatgtaagtggcgtgttaataatsagtaactgatatggtatgaagaagctgtgagctagtgcgtataaaaggaccaacaaatggaagttgttgcattgcttctattacactaaagatcacagaa

SEQ ID NO: 467472 - DNA, 201 bp, Homo sapiens
tctctgagcagcagctgcagaggcaagagggatggattaacaccaaaacagacttggctgagcagagtctcatttcatctgagaaatggcttcaactgcaygggcttaagagcaacaaattgaccttgaaacagattttgtcacagatcggattcccacattgtgaaggtacagtactcacaaacaaccagcatgctgcca

SEQ ID NO: 467473 - DNA, 201 bp, Homo sapiens
tgaggcaggagaatggcttgaacccgggaggcagagatcgcagtgagccgagatcgtgccactgcactccagcctagcaatggagagagactctgtctcaraaacaacaacaacaacaacaataacaataacaaaacagattcttgacaaactcttgtatactaaggaaaaccagacctctgtataaaactgggctcaatt

SEQ ID NO: 467474 - DNA, 201 bp, Homo sapiens
aaccttaatcttaccatgatgttctccaagtcagcagtgacttccaggaggccacacccctctctgcccaccagttagtcatggtcttagctgtcccctcyggaagaactggctccagtgcattggttgtgtaggtgacactgcctgaggtcctggcagacccaagtgaggccccctaagtggcagatttgaatttctggt

SEQ ID NO: 467475 - DNA, 201 bp, Homo sapiens
tttcaagaatgcaatccatcatcattaactatgatcaccatactgtacaatagatctcttgactagatgtcctaattgtagtggtatatcctttgactaayatcttcccgattcccaccgccacaaccaccccagcctctgataagcatcactctactcgctacttctatgagataaactttttaaaattccacatgagtg

SEQ ID NO: 467476 - DNA, 201 bp, Homo sapiens
aggtaatttttgtatttttagtagagacggggttttgccatgttgactagtctggtcttgaactcctgacctcaggtgattcacccacctcggcctcccaagtgctgggattacaggcatgagccaccgcgttatccccagagttttcgaatgtccttttctgcagtctttacacactgaaaggacagcctggctgctaca

SEQ ID NO: 467477 - DNA, 201 bp, Homo sapiens
ctttttatggctgaatagtatttaattgtgtatatatactatgttttctttatccagtcatctattgatggacacttaagttgatttcgttatcttggctrttgtgaatagtgctgcaccaaacaagagagtgcagatatctctttcacttactgattttatttcctttggatatacatatccagtagtgggattgctgga

SEQ ID NO: 467478 - DNA, 201 bp, Homo sapiens
tggctgaagttcctcttctagtcattccttcgagaagggcttccttccattcaaggaataatggtgcccatagggttttctttctttctttttttttttttaattgaaatggagtcttgctctgtggcccaggctgtagtgcagtggtgtgatctcgactcactgcgacctcctgctcccaggctcaagctattctcctgc

SEQ ID NO: 467479 - DNA, 201 bp, Homo sapiens
gcagatttgaatttctggtcaccaaaacaaggccgattacttactttgatttctagaattcagtttaattttttattccagtctcctctcctctggttggrtgggaaataaagctcagtccttgtccccatcccgagctttacccacagtttggagaccctaggcagtgtttatgcatcaggaggtggggtctagtcgttg

SEQ ID NO: 467480 - DNA, 201 bp, Homo sapiens
gaacccaggaggctggagattgcagtgagctgagacgacgccactgcactccagcctaggtgatacagcaagactccatctcaaaaaaaaaaaaaaaaaaagactgactttcttcatgtattctgcacataaactttatcagacttacaatttgcaagtattttctcccaatctatggcttttcattcccttaatagggtt

SEQ ID NO: 467481 - DNA, 201 bp, Homo sapiens
tgaacccaggaggctggagattgcagtgagctgagacgacgccactgcactccagcctaggtgatacagcaagactccatctcaaaaaaaaaaaaaaaaaaagactgactttcttcatgtattctgcacataaactttatcagacttacaatttgcaagtattttctcccaatctatggcttttcattcccttaatagggt

SEQ ID NO: 467482 - DNA, 201 bp, Homo sapiens
gcctgatcctgccccacgaaggatcattccaacggcagaccttgctccactgtgtccaacccaggcctctccaaaccccctttaacgtgagcctccatcgytgccctcacccgagagtggaggccgccttacgaggctcctcagcagcctctgtgggctcctcagtatttctgaatctttacctgagaggaaagaagaacc

SEQ ID NO: 467483 - DNA, 201 bp, Homo sapiens
agacacatcagagtgcgttggaagaacaggcaggagaggcccagctagaactagtggccccttgcagaagattctttgtccctgtgggccaagggctctcmtaccctacccagtgacacaggaacacctggaggacagcaggggaggtaccaagagacacctggaagcctgacggagggaaacgcctcctgtctcttcagg

SEQ ID NO: 467484 - DNA, 201 bp, Homo sapiens
gccacacaccagaaaactcgggacagcccctacaccccagagctcagggaaattattcaaatagcctgcttacccttcctctcctgttccttcccttggartccacactaaaggtcctcacctacctttcccctcactccctctgcctcccggctgagccggtgcttccctgtgtggcctgcgtggcacgctgtgcccctc

SEQ ID NO: 467485 - DNA, 201 bp, Homo sapiens
aattttatcatcctaatgtccctttttgtccttagtaaattttctttgtgttaaagtctactttatataatattaatatacttatttttgctttttaaaawtaaatatttgcgtaatacgttttttccatccttttacctttaacctatctacgttgttatgcctgaagtgagtttcctgtagacagcataaatcgggtca

SEQ ID NO: 467486 - DNA, 201 bp, Homo sapiens
cgcctgcttatcagccatagaaagtttggcttctgttctttatgtatcaaaacagcaaagccaaatagtttagacttatttaggcttgcaaagaggaaagragataaaaatagctaaaatgagctagtataagaattactgcactgaggcaaatatttgggtttgttttgctttgctttgtttttcagagtcactgctagg

SEQ ID NO: 467487 - DNA, 201 bp, Homo sapiens
cttccatccttcctctgctcctcagggagacaggtgcaccctggccagcctatcccatcacatgtcatcctctaaccgtctgccacgtgtttgtttatttygcagcacacttcactacctgacattatgtacacttttgtttacagtctgtcttccccactgaaataagggtgggacttggtttgtggtgctgtaggtgct

SEQ ID NO: 467488 - DNA, 201 bp, Homo sapiens
tggggaagtgtgtgtttgctgagttaaagttgactgatgcccatcagcagcaggcaaattaggcaaatgctgtctgtgtcatgagctgtcctcactgaacytacagagctgatgggtgctactggggcccctcattagacccctggcttggctaagctgtgttgacatgacggaaccctgggaacaagagaaagaatataa

SEQ ID NO: 467489 - DNA, 201 bp, Homo sapiens
ggttttcagatggagataaaagtgaagatgagtcatgagcctgttcctgacacacactttgtagattcagattcttggtgtccaagcagaggaggggagaygttcccatagagttcactggaggcactacttcacgtaatggaaacctttgttccaatcatgaaggggacatctccagagaattcgagaaaatgccaacat

SEQ ID NO: 467490 - DNA, 201 bp, Homo sapiens
ttgccttggggtctcagtttcccctgtccacagtcttgtggcatgtgccccaggccccctcaccaatggccagttaagaggtgagcctgatgggcaggtarcagggtcacattgccttggcacctggctctcagggaatctgttggacagtcctcctacccaacttccggaagccttttaaacatggcagccgcccattga

SEQ ID NO: 467491 - DNA, 201 bp, Homo sapiens
atccccccaccttggcctcttgaagtgctgggatggcaggctgctttctcctttatgaatggggtaataatgttaataatgtttaccttataggttgttasgaatatatctctatataagaatatatattaatacatgtatgtatgcatatatatgtatggatggatggatatatatgtatgtatgcatggttatatgtgt

SEQ ID NO: 467492 - DNA, 201 bp, Homo sapiens
cgctatgttttccaggctggtctcaaactcctggcctcaagtgatcttcctgccttggcctctcaaactgctgggattacaggtatgagccactgcacctrgccctttcctaatttttttttatatttcatcttttcttgttgcctttccgtgtcatttttgagttcttgaatttctgctttgtgttctttcctcagggag

SEQ ID NO: 467493 - DNA, 201 bp, Homo sapiens
atagaacctgggctgagtgctgtggaggatacaaagaaagaaaagacactgtccctatgcttaagacatttaccatccagttggcaaagtcagccggtgcrcacacacacagcaagtgcccgagcactgcaggagagccgcagaccccagcccacaacagctggcaggctggggacatgttgctgagtgctgagctgtgtt

SEQ ID NO: 467494 - DNA, 201 bp, Homo sapiens
ccctccctgtctggaggaagaaaacggagtgtagagggcttagcaggggccactcaggaagcagaatccaattcattcagcacaagtgaagaaacgttaaygaaggaactctttgcagaagtgaaggtcagtctaaggcagtccgtgggatattgcaggaccccaggacaagcaatagcaggaagctgttatcatccccag

SEQ ID NO: 467495 - DNA, 201 bp, Homo sapiens
gattgtaaatacaccaatcggcactctgtgtctagctcaaggtttgtaaacacaccaatcagaaccctgtgtctagctcagggtttgtgaatgcaccaatygacactctgtatctagctactctggtggggccttggagaacctttgtgtggacactctgtatctagttaatctagtggggacgtggagaacctttgtgtc

SEQ ID NO: 467496 - DNA, 201 bp, Homo sapiens
aacttcttttgtaaactgcctgtttgtctattacccttttacttgcgggggtcttgtgtttcttatcacattgtgtgaacagtctttggtgtattacatayggataatttatgttggtcattgtgttccttttcattttggctgttttttataggcaaccataaaatttgcacagtaactgtaatctataaatcctgcagt

SEQ ID NO: 467497 - DNA, 201 bp, Homo sapiens
tcttcagtgaagggtgggacggggtgggtgcagcggagggctcagtcctctgatacagaggacagggctgagaggacagtgctctgaccgggttcatggtrcagagtgttagaggagtgtcatgggagctttgaaccctgacctcaatgccagcccagggagctgggccctggtcactgcatccccagcaccaataggacc

SEQ ID NO: 467498 - DNA, 201 bp, Homo sapiens
ccggccggccctgccggccccaggcaatgaggggcttagcacccaggccagcagctgcggagggtgtactgggtcccccagcagtgccggcccaccggagytgctctcgatttctcgccaggccttagctgccttcccgcggggcaggcctcgggactgcagcccgccatacctgagccttcccccgcctccgtgggctcc

SEQ ID NO: 467499 - DNA, 201 bp, Homo sapiens
taatgagtttgataaataaattgtaagggtgtctgcaaataaattagttatatatgaattattatcaacttttaggcctcatattttaggatagttccttrtatcaatgcttcttctgaggaaaacaaaaagtagttgtaggctgagagcaattttatctcctttgttgcttcattgtaaaggcaaaaatagatgtatcat

SEQ ID NO: 467500 - DNA, 201 bp, Homo sapiens
tcctcacagcctcgctcactctcagtgcctcctctgcctgggctcccactttggcggcacttgaggagtccttcagtccgccgctgcactgtgggagcccmtttctgggctgaccaaggccggagtcggctccctcagcttgcagggaggtgtggagggagaggcacgagcgggagccggggctgcgcgtggagcttgcag

SEQ ID NO: 467501 - DNA, 201 bp, Homo sapiens
cttgaacctgatacatcagatggtaaatctcgatctttcccattcaaagctgctcttccacaaccttcctcctatcaattgattgcaactccaccctttcmcgtcccggcctgaaaacctcagggtcattcctgactcctctcttttctcacatacacacatctgatctctcggtgaacgctgtcggttctgttttcagaa

SEQ ID NO: 467502 - DNA, 201 bp, Homo sapiens
tggcctgcgctgggctcccaggcccttggtgcagctacttggctgggtggtcagaatcccagggccccaaaagctgagtgcctgaacctgggtacgtggckgttgtctcagcttttacttccagggatgactgtgagaggtgacagcgtgctggcagtcctcacagcctcgctcactctcagtgcctcctctgcctgggct

SEQ ID NO: 467503 - DNA, 201 bp, Homo sapiens
tgattcaacatactactggaagttctaaccatgggaacaaggcaagaaaagaaataaaaggcatacagattgagaaggaagaaataaaactttttatgtgyaggtaatgtattatctacatagaaaaccccaggagatctacaaaaaaaaaaaaaactggaacttttacgagatttcagcaaagtcacaaaattaatacac

SEQ ID NO: 467504 - DNA, 201 bp, Homo sapiens
gcgtgaatccaggaggcagagcttccagtgagccgagatggcgccactgcactccatcctgggcgacagcgcgagactccgtctcaaaaaaaaaaaaaaaattgagtttctggatataagaactttgtcagttcttataagttcgtccaacttatttcatgaatcaagagtttattcccttttattgataagtagtgtttt

SEQ ID NO: 467505 - DNA, 201 bp, Homo sapiens
atatgtctagtaatgttattcaaacaaaatgacttcctcaaagaattattcagtgtttctttgggaagtaccatctgacacccccagacatttctctgtckatttaccttcctcgcctgcatgccctgtgggcacctaagactcaagaggaccaagagtgaattacctgcctctccttgaaaagatgatcttcttctcatt

SEQ ID NO: 467506 - DNA, 201 bp, Homo sapiens
atggaacatatcttaaaataataagagccatttatgacaaacccatagccaatatcatactgaatgggcaaaagccagaagcattccctttgaaaaccagyacaagataaggatgccctctctcaccactcctattcaacatagtattggatttctggccagggcaatcgggcaagagaaagaaataaagggtgttcaaat

SEQ ID NO: 467507 - DNA, 201 bp, Homo sapiens
ttgcagatgacatcattgtatatttagaaaaccccatcgtctcagcccaaaaactccttcagctgataagcaactttagcaaagtctcagaatataaattsaatgtgcaaaaatcacaagcattcctgtactccaacaacagacaagcagagagccaaatcatgaatgaactcccattcacaattgctataaagagaataa

SEQ ID NO: 467508 - DNA, 201 bp, Homo sapiens
ggcatgccctagggtgtggggagagatgaggcagttggcccaggacccctgaggggaagccgcagaccccagaaaaggaccttgaacttacctacaggacrtggggccctggaggctagagtggcatggccgggggcggggggtggaggtgggtgtggcagggtggagggggaaggatactggagacagttctgataggga

SEQ ID NO: 467509 - DNA, 201 bp, Homo sapiens
ttccctgagtgctctccctgggtgggccaccctccaggagcctccatgtgttcagctgtcagtaagctctccaaaccctgtccttttgggttcttatggasgcctcattacttagggatgatcgattaaagcatcggctctagtgatcaacttaccttcagcccctctcccctcctggaggttgggggttggcgctgaaag

SEQ ID NO: 467510 - DNA, 201 bp, Homo sapiens
cttaccacaaaatgggaataaaaataattcccgtaatttcttcatccaaaaatcatggataggattctgcacatgggacaggtgccctcaggtgttgagtrgcctctctcattcttttctgtctccctgggatctcccagggggataccttatattggacacaaaatggggatttgttagctgtgttgaatgcatgggccc

SEQ ID NO: 467511 - DNA, 201 bp, Homo sapiens
gatgactgtcacaggactttcaaattgtttagcagtcagcatagtcaggatccaagcccgcaatcttgttttaaattaattatcacatctaaattagagawtttgtcacccaatattaggactgaaattcagactcggtaacttgtctgagatctgcaagactgaacatcccctactgtatagtttcctgacattttcatt

SEQ ID NO: 467512 - DNA, 201 bp, Homo sapiens
gtctatttaaatatcttccatttctctcctcattctgtttatactttacctttttgaccatatgggttatatttgcaatagctgtgtaacatccttttccrctaattctatcatctgtgtcattttgggatctgtttctgttgatcagtttttcttctggtttggatcgtattttcctgcttctttgtatgcctggtaatt

SEQ ID NO: 467513 - DNA, 201 bp, Homo sapiens; identical to SEQ ID NO: 367597

SEQ ID NO: 467514 - DNA, 201 bp, Homo sapiens
attgcccttgccaaaatagtaacatttaattaacacaaagcagaaagtgctccaaagtgagtgtatagtacagggatattctgtaattcttctataatgtrattctcaatagaaaatttcaggtatattagtctgcttctacattgctataaagaactacctgagactgggtaatttatgaagaaaataggtttaattgac

SEQ ID NO: 467515 - DNA, 201 bp, Homo sapiens
gggggcggggggtggaggtgggtgtggcagggtggagggggaaggatactggagacagttctgatagggacttggggagacccaaagagggtgaaggtggrgcagtcagcaaaagtggtggccaaaggctgaaataaagatagaaaggaaggtggttatgtgaaggtgtgtgtgtgtgtgtgtgtgtgtgtgtgtgtgtgt

SEQ ID NO: 467516 - DNA, 201 bp, Homo sapiens
ctgggatcctgtgcctgcctacatggtgtctggtttccccacattagtctggaagaaaattctattctagactgtctattctaaaattcgattcatctccrcaccatcctctgacagtctgtaggtgtgattttaacagatgccactgactctctggagggtgaggaaggactgacatatatcctccctggttcctccctt

SEQ ID NO: 467517 - DNA, 201 bp, Homo sapiens
cgtattgtggtgaatgcatgagcttgagctgaggcccgctatgtgccacatttaaggcccccactcatgtcatatccagttggccagagccagtcacatgwtcatgtcctacagcaatgggtggggaggtctactccactcacacggaggtggggaggaaagtgaacgtttgatgaacagttgtgattccttttttggctt

SEQ ID NO: 467518 - DNA, 201 bp, Homo sapiens
gatttattcagctaaactttgttgatgagcatctttgcatctgttccttagatattatttctctgtctccttccctgggtctttatggtctactagccccrtagcatcctggagtctgcggtcatttttctcaccaagtttgggggagcacctaccctttaccatggggagaatggtgatggttcatttttgggttttcta

SEQ ID NO: 467519 - DNA, 201 bp, Homo sapiens
tgtgggatattgggcatcagttaattatcatgcagacttgggaagtgggaggaaggggcttttcggtgtatttggtgacagaacatgtctcagccaagggrcagggactgccagttgccacccagatacactcccttgctccttaggctgtagccccaattttacttagggttgcagtatacccagcctaaaagcatttct

SEQ ID NO: 467520 - DNA, 201 bp, Homo sapiens
tgcctgtgagaaggttatctgagtctggggaaagggccattggaaagaattagaagaaacggggcttggaattcacacaggaccaagaacagtgcctgttytcatcagcctgaaagctttagaatccatgggtccctgggtagactacttggaaaggtcttgcctcagtcatggggaataattagctttaaattgagcact

SEQ ID NO: 467521 - DNA, 201 bp, Homo sapiens
tattactattcttgagttttatttgggacgaaatatatttagtgaactctacttagaaatagaattttcttgggcttattatgcctccttctaaatgtccyaacaacttgaggtagagtgaaaagtaaatttcttgaaaaaaatatggtaggatagggaagcagaagcataaaatccaaggaagaaacaataaaggaaaga

SEQ ID NO: 467522 - DNA, 201 bp, Homo sapiens
ttctattcctttagtgattgttttaaaagttttaatgtaatgacaattttttttttgagacagagcctcgcactgtcgcccaggctgcagtgtagtggtgygatctcggctcactgaaacctccacctcctgggtttaagtgattctcctgcctcagcctcccgagtagcttggattacaggcacccgccacctcccccag

SEQ ID NO: 467523 - DNA, 201 bp, Homo sapiens
tgtgattgcttttaaacacagctagaatgttgtcaggtggaattcgacctgttctactttaacaatcaatagctgtgggcacagttctgtattctgtgttyttaatttagcatatgttatgaacatttttccttacaatagccattttgggatgaattttagtgattacactaacattcagtaatataaattactacagtt

SEQ ID NO: 467524 - DNA, 201 bp, Homo sapiens
agatttgtagaagtataatttgtaccctcatgaaggttacctatttcaactcaatgacttctaataaaattgacaagagttttcaacttactactacaatscagttttagaacgttatcttcctcctaacaagatccctcatgcccatttgcagtcactctctgttcacactctcagctctggataaccactaatcaattt

SEQ ID NO: 467525 - DNA, 201 bp, Homo sapiens
tcagttctcaaagcctttgctgtgctgctttgagtgttttctgcacatgtgtaccttaggggtagtccaggactttaattcattcatatagaaaataaagrcattctcttctccctctctttcctctgtgagatttccagattaattattaatttttatcaaagtacatgtttcatatagttcgctattttatgatttgct

SEQ ID NO: 467526 - DNA, 201 bp, Homo sapiens
gaaatttgtaattgattgtttcaacattagaaaatctattagtataatccagcatatcaacaggctaaagaagaaaaatcatatggttttatcaattgatrcagaaaaagccttgaccaaattccacaccattcataataaaaactctcagcaaaatagaaatagaagagaacttcctcaacttaataagaacatcaatac

SEQ ID NO: 467527 - DNA, 201 bp, Homo sapiens
gcttaccagcttccgcccagaggaggggaggcagtggaagctctgggcccgccagcctctgcccagagaaagaggggaggcagtggaggttcttcagcttgccacccttcagaaccgaggtcctcaaacgggtcccagagatttcagagctgggagacacagcctcacctctcaaggctgaggacagagagaaactatagg

SEQ ID NO: 467528 - DNA, 201 bp, Homo sapiens
gtcttttttattaagtcataagttgatataacaacttatgacttaaaatctatttttttattttttatttttattattatactttaagttttagggtacaygtgcacattgtacaggttagttacatatgtatacatgtgccatgctggtgcgctgcacccactaactcatcatctagcattaggtgtatctcccaatgct

SEQ ID NO: 467529 - DNA, 201 bp, Homo sapiens
aagtcataagttgatataacaacttatgacttaaaatctatttttttattttttatttttattattatactttaagttttagggtacacgtgcacattgtrcaggttagttacatatgtatacatgtgccatgctggtgcgctgcacccactaactcatcatctagcattaggtgtatctcccaatgctatccctcccgcc

SEQ ID NO: 467530 - DNA, 201 bp, Homo sapiens
tttattattatactttaagttttagggtacacgtgcacattgtacaggttagttacatatgtatacatgtgccatgctggtgcgctgcacccactaactcrtcatctagcattaggtgtatctcccaatgctatccctcccgcctccccccaccccacaacagtccccagagtgcgatgttccccttcctgtgtccatgtg

SEQ ID NO: 467531 - DNA, 201 bp, Homo sapiens
tgagataatcatgtggttttttgtctttggctctgtttatatgctggattacatttattgatttgcatatattgaaccagccttgcatctcactcaaaacygctcaactacatggaaactgaacaacctgctcccgaatgactactgggtacataacaaaatgaaggcagaaataaagatgttctttgaaaccaacgagaa

SEQ ID NO: 467532 - DNA, 201 bp, Homo sapiens
attgtgcacagaggaacagtagtaaagatgacagcagatgtctcatcagaaataatgcaagtgaggagacagtggagaaacatgtttaaaatactgagagrctgtccacatagagcctatgcggactgaaaatatctttcaaagcaggatataaaatagactttttaagatatataaaaacggtcaggtgcagtggctcac

SEQ ID NO: 467533 - DNA, 201 bp, Homo sapiens
tttatatgctggattacatttattgatttgcatatattgaaccagccttgcatctcactcaaaaccgctcaactacatggaaactgaacaacctgctcccraatgactactgggtacataacaaaatgaaggcagaaataaagatgttctttgaaaccaacgagaacaaagacacaacataccagaatctctgggacgcat

SEQ ID NO: 467534 - DNA, 201 bp, Homo sapiens; identical to SEQ ID NO: 367599

SEQ ID NO: 467535 - DNA, 201 bp, Homo sapiens
atgcctatagttgcaaggttcttccccattattaatggatatttacattgtgttcttccttcccctcttacaaacattcctgtaacaggtatctttgcacrtagatttttgggcacatgtataagtctggctttggaagaaattccctcaagtcagatggctggacccaaagggtatgtgcattttaaattttgataattc

SEQ ID NO: 467536 - DNA, 201 bp, Homo sapiens
ctgcttgatgctgtccataagtttcattgaagcttcaggaatgtgctggcttcactagcttgacggcagtcagccagattagaagaacaaatagtctgaartcatagctgaggtcctcaaaatatcagatgactagaagtaatttatttttgactttggcacctttcatgtgcgtccgtgtgaagagaccaccaaacaggc

SEQ ID NO: 467537 - DNA, 201 bp, Homo sapiens
ataagtctggctttggaagaaattccctcaagtcagatggctggacccaaagggtatgtgcattttaaattttgataattcaaatcatcccccaaattcaytgtacattttcactagcatgtatccccacagacagagtaaagtagtactctcttcctaagaagaactctgtgtaatacttgataatcattggtccttggt

SEQ ID NO: 467538 - DNA, 201 bp, Homo sapiens
aaccggagaatgagtccgtgcagaccagtgcggtaggtgaagtgcactcctgggaggggctggggcctcccctcaagtcctgggtgggtgaggcctccatygggtcagaaggcaggggaaggggcagcagggagagaaaccagcttgggtttctgtgaagaacagggttcctctgtttccctcctcacccttctccaaagg

SEQ ID NO: 467539 - DNA, 201 bp, Homo sapiens
aaacatctcctgtgtgctttagaaacttactagggttgaggaggaggagattcaaaaggaataaaagacaaggttcccagtcggcggggagccccagattytcagaatgtcatttttgcttctgccttatgacttaggggttgttccttccctccattactgcaggatcccaattagcttaagaactgtccacctgcacct

SEQ ID NO: 467540 - DNA, 201 bp, Homo sapiens
catgctgctgcccctccatggtttgattttgaaactgtcatatttcatagttgattttttttcttccctttcttcaatggatgatgctatcagatgagccmctctctggtccaaattgtcagccttttggggactgcatatgaggaaaatgtgatttttccactcaatttttattactattgataaaattattaatcttaa

SEQ ID NO: 467541 - DNA, 201 bp, Homo sapiens
tcatgtgctgagtttctattttgtttccattggtgatgtagaggagtggtgaaatgccatgactgatcctacagagtccggggaggggctaaatgtttgaytccactgctagataaatgtttcattccgtatttgtggcctttgggaatggtatagtttttatgtttggagacttggggagctaaatttcattttcatttg

SEQ ID NO: 467542 - DNA, 201 bp, Homo sapiens
tgccatattagaagggtggtgtcaccacagagaggaactctcggaggagccgcccaccctacccatctgcatctcagaaacatgcctcagttgtgccaagraaaggctggcgctgccatggcctgctgctgggtccttgatgaaagctgggaaggacctagccttgggtgggagcagcaggaatgggaggaggggactgcc

SEQ ID NO: 467543 - DNA, 201 bp, Homo sapiens
ggttgaagcagttctgcctcagcctcccaagtagttgggattacagacacctgccaccacacctggctaatttttgtatttttggtagagatgcggtttcrccatgttggccaggctggtgttaaactcctgacctcaggtgatccacctgccttggcctcccaaagtgttgggattattggcgtgagccaccatgcctgg

SEQ ID NO: 467544 - DNA, 201 bp, Homo sapiens
ctatgtttaagagaccagcgtccttccaggctgttcagacctcagcgttgacactgaaactggcccctccgcggaggtaaggccgccctccgcgccgcctrtgcctgccctgtctgtagcaaagactcctctcccctccatccctgctgcctcccctacccgtttgacgacttggttctggctttttctgactgttcttta

SEQ ID NO: 467545 - DNA, 201 bp, Homo sapiens
aagctgttttctgaaatgaaacatgggctttgtgtctaataaagaacacgttccaagttggtcaatattaagttgggggtgtaatatgaatggctcatgcwgtatgaatggctgacaagctgtgattctacagagtcagaaacaacctctgttgagattgcatcgaatccagaagacacctgggactctaagacatggctg

SEQ ID NO: 467546 - DNA, 201 bp, Homo sapiens
tagttaactagctcacacccaaacacgcctccttctgaatgctgctcattcaacaaatatcccttttcatttataaatacacatttatataaggatatatktaaaaccccaaatattaatttgaaaatttgaacttacaactaaacaggacctaacaggttttttggttttctacagaaagctgaagaaccactaaacaat

SEQ ID NO: 467547 - DNA, 201 bp, Homo sapiens
cgtcccggcctgaaaacctcagggtcattcctgactcctctcttttctcacatacacacatctgatctctcggtgaacgctgtcggttctgttttcagaaygtgcctgtcattcaggatctggccacttcttaccatggtcttggctgcccggggccatgcaactccatgaccttctggctctttgcttctgcccttggtc

SEQ ID NO: 467548 - DNA, 201 bp, Homo sapiens
gccatgagagtacaccgaacaaaggagacagggtcatttataacctgacgtgtccaccctgctgctatgcccggtttccattggctggaacgggacctcamattctgtatttgttctgactgactagcaacttagaacttttttaaagaggcaaaggcagaggagagcaaaggaaggaggaagtaacttggggaatgctga

SEQ ID NO: 467549 - DNA, 201 bp, Homo sapiens
catgagaatctcagtcctgcctcctccagaatggtctcgctggccgtctagtccactgtcgctctctcttctttaccaggactttccaggtccttactgtctcaacccagtgccagggactgagtatctaattctccacattgctatgtctctctctctctccctctccctctccgtctctgtgtctgtgtgtgtgtgtgt

SEQ ID NO: 467550 - DNA, 201 bp, Homo sapiens
aagaggcaaaggcagaggagagcaaaggaaggaggaagtaacttggggaatgctgagaaaggtaaaatcaccttcaaataaggaagaggaacaggctatgrcctaacgcttgcttggaccagtataagcttgccagggcaaatatttaaactaaattgtgagagctaagaacataaagtacattgatttctttattacggt

SEQ ID NO: 467551 - DNA, 201 bp, Homo sapiens
ggtataattataaaactaagacattcacatggctactatgagctaaattgcagactttattcagccttcatcagttttccactaatgttccttttatgttycaagatccagccaaggatctcacatgacatttagttgcaatgcctccttagtctcttccaatctgtgacagttcttcaatctcgccttgtcttttgtgac

SEQ ID NO: 467552 - DNA, 201 bp, Homo sapiens
atccttacaacaattattactgagctgaggtgattttatatttcctctattccttttacatttctatattggaattattctataaggaaaagatttccctytcccccttttacttattcatttatatatttatttcaatgtggactcatggaaatttattttattcttggagttataatctaatactatcattatttattt

SEQ ID NO: 467553 - DNA, 201 bp, Homo sapiens
caaaggcagaggagagcaaaggaaggaggaagtaacttggggaatgctgagaaaggtaaaatcaccttcaaataaggaagaggaacaggctatgacctaaygcttgcttggaccagtataagcttgccagggcaaatatttaaactaaattgtgagagctaagaacataaagtacattgatttctttattacggttagcag

SEQ ID NO: 467554 - DNA, 201 bp, Homo sapiens
aggcaggcagatcatgaggtcaggagttcaagaccagcctggccaacatggtgaaaccccgtctctactaaaactacaaaaaataagccaggcgtggtggyaggtgcctatagtcccagctactcaggaggctgaggcaagagaatggcatgaacccaggaggctggagattgcagtgagctgagacgacgccactgcact

SEQ ID NO: 467555 - DNA, 201 bp, Homo sapiens
ctttttcttgcctaatttctctaagacttccagtactatgttgaataaagggagaagagtggacattgttgccttattcctaatcttagagggaaagcttycaatctttcattattaagtacaatagtagctgtaggcttccttatgttgatatagtttcttagtattcctagtttgctgagtgtttttatcatgaaagga

SEQ ID NO: 467556 - DNA, 201 bp, Homo sapiens; identical to SEQ ID NO: 367598

SEQ ID NO: 467557 - DNA, 201 bp, Homo sapiens
tgattagtagccaaaagagcagctatagctaccctgtaggaaccactagcttcaacctccttctttgctcttgggtcaacagcttccctctgaaaacgcgmtcagtctcagcaccgccagccagcagctgtgggtgagcaaggtgcttcatccagctgcccctcctagcagcctcgtttggaaaacaaggcagccagcctg

SEQ ID NO: 467558 - DNA, 201 bp, Homo sapiens
tccagtacggacttctgaggctctggaatctcccaataatatgtataaaaatacactcaaaatttttgttttcttgagagaagatcgatatattttaccakattctgaaggtctactcaaagatggagaatcaaggatatggataatagctggagttaggccaggcgcggtggctcatgcctgtaatcccagcactttggg

SEQ ID NO: 467559 - DNA, 201 bp, Homo sapiens
actttttccttctacctaactgtatgtttgtgtccaatagtcaaacctctcttcatctcccccacctccacacacactcttccctgcctctggtaactatrattctattttctgcctccataagatcaacttttttttgtttttagctcctacagatgggtgagaactatttgtctttctgtgccgggcttatctcactta

SEQ ID NO: 467560 - DNA, 201 bp, Homo sapiens
tcctcagcaaggaatagtccaaaagatttaaggaaatctctgttcaattattagctgaccactgagttaactgagcagagactccagtggctacaaatgayaaagaatgcagattttacagaattcaggagtgataaacaaacaaccaccaaatcacaacaaactctgggcaggtgggagaatctgatttccagagttgct

SEQ ID NO: 467561 - DNA, 201 bp, Homo sapiens
cccctggtgtctctctgaagtactgcagtatctccaatgctgtaacaagctgtgacactcatttctgttctcagaggtcccaacctgacctgcaaaatatrccactgttctcatcagcattctgaatcaggcaagacggaaacctatttcttcagaagtcccccaaaacacaagaattttgaatgtgcattccactctctt

SEQ ID NO: 467562 - DNA, 201 bp, Homo sapiens
ggttccccatctcctacttacctaggaaccacctccagagttggcagaagttgggagacataagggcggacaggcacaaagtggagtagagtgaaaagaayacaggctttacagttaaaagccctgtgtttaggccaggtgcggtggctcacgcctgtaatcccagcaatttgggaggctgaggtggacagatcacaaggt

SEQ ID NO: 467563 - DNA, 201 bp, Homo sapiens
cctgtcatatttttgtttgctcctctacacataatgtctttgatgctttttaaaatttctctgtttctagattttatcaattttattgtgatatacctgggtgtagttttctttatttttcttcttcttgggttctttgagcttcttggatctgtaggtgcactgtttcaatcaaaattaaaacattgtggtcatattttc

SEQ ID NO: 467564 - DNA, 201 bp, Homo sapiens
tttaactttactggtaaccaaatatatgccttaaaaaatgcaaattgataatcaattagacaccacctcccccatcaaattggtaaggttaaaaatcaccrataaacagtaatggcaatgacagggtgggatggacacttatatcctgctagtgagagtataaattggtgcatccttagtgtaaaatgttcagaagcctta

SEQ ID NO: 467565 - DNA, 201 bp, Homo sapiens
ataactatagaaaaaaagagttatctgattattttaggcaactcacctcccagatttatacctttaaacccattctgaaaatgtagaaagcaatctcctcrgttagcttctggctaagaaattgagagaatcaatatttggaatctagagacgaaagagggctagttaaataaattacgtgactctactcattcagaattt

SEQ ID NO: 467566 - DNA, 201 bp, Homo sapiens
tgtggaatcaaccagaaatgaattcttgccaatagtaataacagttggaaacaaagcagagtaaacatgaattactttttttttttttttttttttttgaracaaagtctcactctatcacccaggctggagtgcagtggtatgatctcggctcactgcaacttccgccttccaggtttaagtaattcttgtgcctcgcct

SEQ ID NO: 467567 - DNA, 201 bp, Homo sapiens
tagataagtgaaaaagaaagaagcaatagttatcatccacctcatcatctcatggttatctggccagatcttcttactttctgtatatagatatccagacsctttgttctttgtttttgtttttatcataattaaatgaaactgaacatcctgttttgtacctgcatttttcaaccacctatccatgaacattgttacatg

SEQ ID NO: 467568 - DNA, 201 bp, Homo sapiens
cttggtgccttctgtggcgttgtgagttctcaagacagcctgcacgtaggtaggcactgcacagcacacttgccctcccttattcatagtaagaatcactstgatgacaggcatatactgcagtgatctccagtctcacatccaaagcacttttgtatctttgattccctaatattttctctgactggaagacaccctcag

SEQ ID NO: 467569 - DNA, 201 bp, Homo sapiens
ttggagaggcgggcagttaggaggcagttggggagatgggggcagtcaggaggcagggctgggtggctggaaccagtaggctgtgtggctgaaacactgcrgatgtacccaaagctctttataaagtcaagtcaacgatgtggggctgagagagagaaaaatgccaagagtgattctccagactccagcctggaatatcaa

SEQ ID NO: 467570 - DNA, 201 bp, Homo sapiens
tcctttgtatgcatccacatttccatttggtatcattttttttccacctgaagaagtttcattcatatttctggtagtgcaggtctattggtgatgaatgrgctgtttcagtctgaaaaactctttaatttacctttattttcgaatgatgtgttggctaagcatagaattctggttttacagttctgtctttcagtactt

SEQ ID NO: 467571 - DNA, 201 bp, Homo sapiens
tgcagctaggaagatgtcaaggactctttggcggggcagaatgcatgttactgtgtgaagctgcagaatgaatggcccagatagaataaggaatttcaagkgaaaacataaaggctcctccctacttgatgtcatatgaagtggcaagagctttttactcactctaaaggagctgaatggaactcatgtattttatcaaat

SEQ ID NO: 467572 - DNA, 201 bp, Homo sapiens
ggtaacatcttgcaaaataatagtccaatattaaaaccaggatattgatattgatgcaatccacaggtcttattcaaatcgtccagttttacttgtacccrtgtgagtgtgtgtgtgtatgtgtgtgtgtgtgtctgacagtgtgtgtttaggtctacacggtttgatcacgtgtataggtttgtgtttccaccactacag

SEQ ID NO: 467573 - DNA, 201 bp, Homo sapiens
aaagacaatgagatgtgtctgcaacatgatgaattgcaggtgcctgcaagatgcccagatgaagatatcagagaagcaattggagatgtgggtctagagtmtggagacagagatttgggagacataaccacagaagtcatcactgaaatcatgggaagggtctgtagggaaaagggaactgggagaaaaccctgaggaagc

SEQ ID NO: 467574 - DNA, 201 bp, Homo sapiens
tcctttttataaaacctccctgacttggtccaactgatttttgtgtttgactgaatttccatgtcatgacagtgaaacttttaggaaatacagttaaagtkttagaaatagggaaagaacctattttcattgttaaaaagttttacaattcagggtatcagtttacatgcattgtgaattctggatacagaagtaagcaga

SEQ ID NO: 467575 - DNA, 201 bp, Homo sapiens
ttcaattcagctgttgatactccctattgcatttttctttgtgttcagttatttttcagctccctggttactgttttgttattatcatgccaatctctctkacattttttattctggtaacttatggttttccttattttgttgaattgtttctctgtattttcttgaagttcactgagcttccttaaaacagctactttg

SEQ ID NO: 467576 - DNA, 201 bp, Homo sapiens
taggccatgtggggcaaagttgaaggtgctcacaaaacttctgccttggacaactgtaggagcagaagcactgctaccccttccatccttcctctgctccwcagggagacaggtgcaccctggccagcctatcccatcacatgtcatcctctaaccgtctgccacgtgtttgtttattttgcagcacacttcactacctga

SEQ ID NO: 467577 - DNA, 201 bp, Homo sapiens
ttttggcggcattctggagggggagcttgatctgtgccgagaggctctaacaatggttctccaggagcaggtggctcacataaccgagttcaatatcatayggtgagttcccataggaagggagtattttagtgaaagttcatagtaatttgtacatatttggaattaagtagcacagctgacacagttagctctctggtg

SEQ ID NO: 467578 - DNA, 201 bp, Homo sapiens
aattgctaaatccagggatccattctcagtctctttcttacttgacctttagtaagttgatctagttggtcacttccttgaatttttttttttttttttttgcagaatatacactgctggttatcctcccacctcgctggctgttcctctctcagtcttctttgtgacttctccttgtccttaacctgtcaatgccgaagc

SEQ ID NO: 467579 - DNA, 201 bp, Homo sapiens; identical to SEQ ID NO: 79792

SEQ ID NO: 467580 - DNA, 201 bp, Homo sapiens
gagccgcgctgtgattggccgtgtccaggcaaccgcggagacgccgtcgtcaacagaccgcgctcggaaccagaggcgcgggtcacagagacctagaacakctggaatccttcgcccccggcgcgcagccttcgcccgccggaatcgctgccttatccaccagcgggatgcttacctcgcccgccctctcgggtcaggcgg

SEQ ID NO: 467581 - DNA, 201 bp, Homo sapiens
cgggatctcggctcactgcaagctccgcctcccgggttcacgccattctcctgcctcagcctcccgagtagctgggactacaggcgcccgccactacgccyggctaattttttgtatttttagtagagacggggtttcaccgttttagccgggatggtctcgatctcctgacctcgtgatccgcccgcctcggcctcccaa

SEQ ID NO: 467582 - DNA, 201 bp, Homo sapiens
gtggcgggatctcggctcactgcaagctccgcctcccgggttcacgccattctcctgcctcagcctcccgagtagctgggactacaggcgcccgccactaygcccggctaattttttgtatttttagtagagacggggtttcaccgttttagccgggatggtctcgatctcctgacctcgtgatccgcccgcctcggcctc

SEQ ID NO: 467583 - DNA, 201 bp, Homo sapiens
ctctctccccgccttgtaggcagctgccttctcactctgttctcacacggtggagagagagagtgagagagagagaggagagagagagagagagagtgtgwgtgtgtgtgtgtgtgtgtgtgtgtgtgtgtgtggagagagagggaggagagagaggagagagaggagagagagaggagagagacattgtgtgtgtgtgga

SEQ ID NO: 467584 - DNA, 201 bp, Homo sapiens
atgacagtgatgtgaagattggggacggtcattgtctggcaggtgttcagcacattgtgggaagggcattgtttccaaccaccccctggatatttccaccygagtgtacagaatctcaaaaattcagcacatctaaaactgaaatcagagctccccacaaacctgctcccatctcgggcttccccatctcagttcaccctt

SEQ ID NO: 467585 - DNA, 201 bp, Homo sapiens
gtctctctccccgccttgtaggcagctgccttctcactctgttctcacacggtggagagagagagtgagagagagagaggagagagagagagagagagtgwgtgtgtgtgtgtgtgtgtgtgtgtgtgtgtgtgtggagagagagggaggagagagaggagagagaggagagagagaggagagagacattgtgtgtgtgtg

SEQ ID NO: 467586 - DNA, 201 bp, Homo sapiens
gcttgtgtgtcacagtcagactccgagagtgggcctggaggcaggtttttctgaaagcccccagctggttgcaaggtgcagccatgatgggtaactatagrgggaagagcattggaaccaagattgggtttatatcccagccctgccctcattagttttgtggttgctcatcgaccctgagctcatctgcaggatgacagt

SEQ ID NO: 467587 - DNA, 201 bp, Homo sapiens
aggtctctctccccgccttgtaggcagctgccttctcactctgttctcacacggtggagagagagagtgagagagagagaggagagagagagagagagagwgtgtgtgtgtgtgtgtgtgtgtgtgtgtgtgtgtgtggagagagagggaggagagagaggagagagaggagagagagaggagagagacattgtgtgtgtg

SEQ ID NO: 467588 - DNA, 201 bp, Homo sapiens
aaccttgctgacatttggatagaaattgcattaaacctatagatctaattaggaagaattggcatctttattgtgttaattcatctattccatgaatacartatgtctctctgagtatttaggtctttgatttatttcatcagaattttataatttcagcatgcagctcttgtacctgtttaagtatatactaagtattgt

SEQ ID NO: 467589 - DNA, 201 bp, Homo sapiens
ggctaccctctttgggtcccctccctttgtatgggagctctgttttcactctattaaatcttgcaactgctaaaataaaataaaataaaataaaataaaawgtgctttgtcacagaatagggcacaattttttcttgttccttgtctatgtcttctattgcctctctacctcttgaaaggccttgcacagtgtgtctgatc

SEQ ID NO: 467590 - DNA, 201 bp, Homo sapiens
agaagttctagttaaatgtgacgagtgggaagtgctgagtgaagatgcaggagatgtccctcacctggcttcagtggccacagaaggcttgccttagctastggcatcggagttcagacccaggggaagagaaggagttatgaaggtggagagatgggaagagagccccaggcagtgggggagcttggggaatcctaagga

SEQ ID NO: 467591 - DNA, 201 bp, Homo sapiens
ttgaagatcatatgactgtagttgtgtggctttatttttggttctgtattctgttccattgttctatatgtctgtttggggtgtgtgtgtgtgtgtgtgtgggtgtgtgtgtgtgtgtgtgtgttttaccagtaccatgctgtgttggttactgtatccttgtagaatagtttgaagtcattaccttcattcttgaagaac

SEQ ID NO: 467592 - DNA, 201 bp, Homo sapiens
ccccagacagcccacctccacttccccgcggccgggcgtctaggactcagcagccacgccatcattgccacacctccacctcgagcagccctgccctgtaytctccaagccacccacagcagcaaagggctgaggagcgtccctgagacactttaaggccgtctggtggcagctatgtttaagagaccagcgtccttccag

SEQ ID NO: 467593 - DNA, 201 bp, Homo sapiens
tttgaagatcatatgactgtagttgtgtggctttatttttggttctgtattctgttccattgttctatatgtctgtttggggtgtgtgtgtgtgtgtgtgtgggtgtgtgtgtgtgtgtgtgtgttttaccagtaccatgctgtgttggttactgtatccttgtagaatagtttgaagtcattaccttcattcttgaagaa

SEQ ID NO: 467594 - DNA, 201 bp, Homo sapiens
ttgaacttcatcctgaggggaatggaggggttgttagcagaggagaaattaatttggggtttgagctggcacacagagaatagttggagaggcgggcagtyaggaggcagttggggagatgggggcagtcaggaggcagggctgggtggctggaaccagtaggctgtgtggctgaaacactgcggatgtacccaaagctct

SEQ ID NO: 467595 - DNA, 201 bp, Homo sapiens
tccctagacttctcccaacatttccatcctgagcggtgcttgggatttctctgagttgagtgtgtggtgctaggcagagacggaactcctgcgtggctggwggagcattacttgtgacttcctctgtccacctgaaagaaatgtcctgctatttatggactttttggattccagttaagtggctttgagggtgtgacttag

SEQ ID NO: 467596 - DNA, 201 bp, Homo sapiens
ggctgtgattcagaaaaacagtggaaggttactcagaaagccaggagatgggagtttcttttaagctgatgaaattgcaaagtgctgaagactgaataaaycccactgagaaaaggagggaaggaagcccctgttcgattgttggatgaaggtacctggtgggttgttagaagtctaagaaagctcacccccactctccct

SEQ ID NO: 467597 - DNA, 201 bp, Homo sapiens
tggatacagaagtaagcagaactttctacacttcctccaggtcaccaggccctgcccatttgtggtgagcgggttaagattgcattatagtttggccccawcctttcctcttgcatacactagctatatttaggcaggtctagctaagtttaatatgttgcatatggccttgggtccagttgatcccagaacagatggcta

SEQ ID NO: 467598 - DNA, 201 bp, Homo sapiens
ttgctatcagagatcatactgcacttatcttttttggggtgtattttttttctttttttaattattattatactttaagttctagggtacatgtgcacaaygtgcaggtttgttacatatgtatacatgtgccatgttggtgtgctgcacccattaactcgtcatttacattaggtatatctcctaatgctatcactcccc

SEQ ID NO: 467599 - DNA, 201 bp, Homo sapiens
gtgattgtgctaggtgttacattatgaatacatacattatcaaaatctactgatgtcaacattttaccagtttgagtgatgagcagaaaccttcttttccmtttatagccctttgcccttcccatttataataaaatgtattattttatcttcttacattgagaattacattagactatgctagaattttggttcaaccat

SEQ ID NO: 467600 - DNA, 201 bp, Homo sapiens
tctgattataaaagtaaattccagctgggcgcagtggctcacgcctgtaatcccaacactttgggaggccaaggcgggcggatcacgaggtcagcagttcragaccagcctgaccaacatggtgaaaccccatttccactaacaatacaaaaattagctgggcatggtggcacgcgcctgtaatcccagctactcaggagg

SEQ ID NO: 467601 - DNA, 201 bp, Homo sapiens
attttacgtttttcttatattgtccttcaggagttcgtggtcattcttctttgactataaagaatatgaaggcagaggacaggaagcagactcaggttcayagcacctgctgagtcaggagccctctgagcacttgtgcagaggtggctctgatgtgatggtggtgcctgcccactagggatcaagtgaaattgcctcgaa

SEQ ID NO: 467602 - DNA, 201 bp, Homo sapiens
aatgaaagcacttcttggtgtttgatgggttccagccccacaactgcaccatacaaacaacctcactgcatttttactagtgaaagacattgagactacasaaaatattttctccctttttttcttataaaccaaagcatttttcataacaatggacatgagtttgggggtgagaaagacctggttataaatcccagctcc

SEQ ID NO: 467603 - DNA, 201 bp, Homo sapiens
ttcattttgagttgatttttgtatatggtggcaataagggcctaattttgttattctgcctgtggctatacagttttctcaataccttttattgaagagaytgtcctttccccattgtgtgttcttggcacccttgtcaaaaatcaattggctgtacatacatatgtggatttattttttggctctctattctattccatt

SEQ ID NO: 467604 - DNA, 201 bp, Homo sapiens
ttcagtaacttgcccaaggctacacagctaatgagatgatgaagcctagattcaaaacctagtccaccagtaaaaatactgatatctgcttcccacccacyggacatgtaatcaggatgtctgattaaatcatcctgatttaatccctatgggatgacattgggacttttgaaagctccccgggtgatcctagtgtgcagc

SEQ ID NO: 467605 - DNA, 201 bp, Homo sapiens
gtttgttggccatttgtatatcttcttttgggaatgtctattcatgtcatttgcccatgaaatattttaatttaccttttaatttatttatagacccattrgttattcaggtgcatgttgtttaatttcaatgtattcgttaattttccaaagttcctcctagtgctgatttccagttttataccattgtggtctgaaaag

SEQ ID NO: 467606 - DNA, 201 bp, Homo sapiens
aagtctttatctctccttcatttgggaaggacagctttggtgagtacagaattcttgattggcagggctttttgttttcctccttgagctctttgaatatrtgattctattctcttctgtcctgtgaaatttctgctgagaagctggacatattggaacttccttatatgttactagcttcttttctcttcctgctttcag

SEQ ID NO: 467607 - DNA, 201 bp, Homo sapiens
gcccatggtcactgtagtcagccagtggtgataagggctagagcttgcattcatctcacagcagctatgggttcctgtttggcaccaggatagatctagargcttagtccacgagtaccggcctgcagtcaagggccatgtggatctgcctgctgctggattttcctgtgtcaggccctgtattagggtccaaggtaaagt

SEQ ID NO: 467608 - DNA, 201 bp, Homo sapiens
catttctttgggaccaatttctaaagatttattttgctcatttgattgggccatttcctcatatctttgtgtgcttttccctacattttttatgccttatsatatttagttgataatatgacatttgaaaaaacagctatctcatccgattttcacaaactggcctcttacaggtgaagggcttcaccaattatcccagct

SEQ ID NO: 467609 - DNA, 201 bp, Homo sapiens
acagcttcctctcccaactccagataaatgtcttaggtaaacagagaatgctgctagtgatatttagtcacttcatcaatgtcagctaagaaggtgaaatmttggaaacacaaattttagagctggagtggtctattgagtgagattattgctgatggaattcaagtatccattctttactctttactattgtgaaagttg

SEQ ID NO: 467610 - DNA, 201 bp, Homo sapiens
ggaagtaagtgctaacatgtcaataatactttttaaattaatggtctaatcacaccaatcaaaagacagatactggcagtgtgaattaaaaaaaaaaaaaagaacacaaccaaactatgtgctgcttttgagaatctcactttaattctacataggtaggttcaactaaaaggattttttgaaatacatcatgcaaaaatc

SEQ ID NO: 467611 - DNA, 201 bp, Homo sapiens
ctatgatcacactacttcactccagcctaggtgatagagtgagactctatctcttaaaaaacacacacacacacaaaagcaaatggttcatttttttttttactatgggtgttcagttgctccagtgcattttacttaagtgactacccttcctactttgaattgcttttggatttttgttaaaagttggttgtgcctata

SEQ ID NO: 467612 - DNA, 201 bp, Homo sapiens
agtggagatgacaggataatgtcagtgaacttaaggtcagaacaacaaaattcagtcactctaaacaacagagagaaaatagaccaaaaaaaaaaaaaaaaggtagagccacgaggacctgtgagacaatgacaaaatatccagcattagtatcatcggagtccaccaaagagacaagaaggaaaaatgggactgaaaaaa

SEQ ID NO: 467613 - DNA, 201 bp, Homo sapiens
cagtggggccaaaatctcagggtcctttctgccttccttccagtggtgtgcaaatgtttaacaacccactcccgggaatgaaaaaagccccgatgtgtagyatgtgctgatttccagattccataaatactcccaccatggtctctttcatcctaccaagcggccatcgcccagcatggagttgggagatgtgcacagcca

SEQ ID NO: 467614 - DNA, 201 bp, Homo sapiens
acatgtgatctcctgtatctttctggcctatgttcatgacatctagtgcagggctccataggaagcgggcagcggaacatatttggttgaactaacaaagraatgattgacggtagagtggagtgctaggagccacttgaatacgacagagcttaaggtgccatctggaggctcttctctttggacagtttctgagtggct

SEQ ID NO: 467615 - DNA, 201 bp, Homo sapiens
tccccccaccttttggattctccagtgtctatttttctctgcatgtctgtgtgttcacatgccacttaaaagtgagaagatgtagtttttcactttgtttctgagttatttcattaagaataatggcctccagttccatatatgttgctgtaaaagacatgatttcatcttttgaaatggatgagtagtattccatagtct

SEQ ID NO: 467616 - DNA, 201 bp, Homo sapiens
cccacaatggatttatttttctgtcatactgattttcttagttttgttttacttggcttgatggtgggtagtgcatcctacagcccaaatgtaggattttytacagaaaaacctcaaagcgaatgatctactcacagaagattgggtataaacaacatagcgcagctctgtcctctgcagatgcatcgttaagttcttggg

SEQ ID NO: 467617 - DNA, 201 bp, Homo sapiens
tttctcttgacagattttctaggttactaacactttattctggtacctccaatctgctgtgaagcccatacagatattgtactttttgttctaaaatttcytttcttttcaatttctctgctaagttccccatttgttcacttattatgatcacagttttctttccctccaacattatatatatatataatgtttatggta

SEQ ID NO: 467618 - DNA, 201 bp, Homo sapiens
gcggggccggcagggcccagtgagcgacgagagctcctaccaaccctccaggcagtggcgctaccgggaggcctctaggaaggcggaggccatagggaagstgaaagtgcagggcgaggtctctctggaaaaggaaggctcctcccagggctgagggccagctgcagggctgcagcgctgtgggggtaaggtctgccgcgc

SEQ ID NO: 467619 - DNA, 201 bp, Homo sapiens
gtgtgctggccatggtggtggccgtctacaccatctgcttcttgcccagcatcatctttggcatggcttccatggtggctttctggctgtccgcctgccgmtccctggacctctgcacacagctcttccatggctccctggccttcacctacctcaacagtgtcctggaccccgtgctctactgcttctctagccccaact

SEQ ID NO: 467620 - DNA, 201 bp, Homo sapiens
ccggcccctcctgcctcagctacagggtgggcacgaagccctcggcctcgctccgctggcaccaggcactgtacctgctggagttcttcctgccactggcrctcatcctctttgctattgtgagcattgggctcaccatccggaaccgtggtctgggcgggcaggcaggcccgcagagggccatgcgtgtgctggccatgg

SEQ ID NO: 467621 - DNA, 201 bp, Homo sapiens
gccagctgatagtgccaatcatcccactttgccctgagcactcctgcaggggtagaagactccagaaccttctctcaggcccatggcccaagcagcccatsgaacttcataacctgagctctccatctccctctctctcctcctctgttctccctccctccttctctccctcaccctcctctgctccctctgcctttacca

SEQ ID NO: 467622 - DNA, 201 bp, Homo sapiens; identical to SEQ ID NO: 129446

SEQ ID NO: 467623 - DNA, 201 bp, Homo sapiens
cccaccccagcggtctttcggggcgtcccctgcccttcacgcgccgcgccggctcggcccgaagcgccctgcggacccgcagcctgggccgccccgaacckgacggccccgcgggggtcggacgcgggaggaacggcctcgctttcagagacgcagcgggagggcggtccccgctgtccctctggccgggtcctcagcacg

SEQ ID NO: 467624 - DNA, 201 bp, Homo sapiens
gggctggaagagaccacggagcctgctttcctccttcggcgtttggatctcacatatcccttcttctctggcgatcaaaaatccctatcttctgtagagawcccttttacagatcagtggcctccaggcggtatctctagcaacaagtgctaccccaagcggccggccacacatattccctggcttcatgacatagggagg

SEQ ID NO: 467625 - DNA, 201 bp, Homo sapiens
ctggctgccaagaagcctgtgcatgatccaggaccacaaaacacttgcaaactcactgcccagaggccctgtgcctgtctggagtgtgcccagtgtgtctkcgccccacagcttgtcctggcccgccagcagagccgcagcactgcagggcccttctgttgtgagtgccagggcccttgctggctgcctgagcaaggcaaa

SEQ ID NO: 467626 - DNA, 201 bp, Homo sapiens
aggcccacagtgaggaggccccaccgaagcatccccagcaacagggactgaggcatctgaggcagccagcccactcggaaaggcctgctgactgcactccrgatgtcaagagcacccttgggaaaaagaaaggcaggagtgcagcactttctagagcctcagctcacttctctccttctagctccagccggagtgatggaa

SEQ ID NO: 467627 - DNA, 201 bp, Homo sapiens
aatgtcttttttaaaaatcacatacactcgagtaagactgagtctcctcaccgaagagatctggctgtatcccgagtctctgaaacctttgctccagtccygtgggagcgtgccgtcccgaggatgtggagccgcaagggctcgccagagggatctcaggagctaggcctcaaggagcgctgttgagtgacaggtctgatg

SEQ ID NO: 467628 - DNA, 201 bp, Homo sapiens
cttctgtttcctgcctttatgataggagtttgggtaacctgtgagaaacacagccacagtgtaaacctcttgagacaagctacactgatgggacaatcagrgtgagggcaatccggcgccgtggctatgtcagctcatgtgtgctctttcaggaggacatgtctcacagacacagatcttcagctctgacatgctcgatct

SEQ ID NO: 467629 - DNA, 201 bp, Homo sapiens
caggtaagccttgatggaacatctcttgcacaaagatcaccatgttcattgagcctttagtgcctcctgggctctgatcaacccacgaatcagtatctccrcagcacttcctgtggtttggattcaggttttttacttctgtttcctgcctttatgataggagtttgggtaacctgtgagaaacacagccacagtgtaaac

SEQ ID NO: 467630 - DNA, 201 bp, Homo sapiens
ccacgagtgtcgctggcacagggaagggacacgaggatcacactgacccaagagaaggcccacagtgaggaggccccaccgaagcatccccagcaacaggsactgaggcatctgaggcagccagcccactcggaaaggcctgctgactgcactccagatgtcaagagcacccttgggaaaaagaaaggcaggagtgcagca

SEQ ID NO: 467631 - DNA, 201 bp, Homo sapiens
tgtctctgtctttgcaaataaggcctgtgacatttaatgatgtaaccacctaccttccacccattgttctggtggccatgagtagaaggaattataccagsatgtgataagaaggaattaggagctgggagtcttgctgggtgaggaccttggccccttgcttgcttgccatctaataggggcactcctggcctgtggggt

SEQ ID NO: 467632 - DNA, 201 bp, Homo sapiens
agactgagtctcctcaccgaagagatctggctgtatcccgagtctctgaaacctttgctccagtcccgtgggagcgtgccgtcccgaggatgtggagccgmaagggctcgccagagggatctcaggagctaggcctcaaggagcgctgttgagtgacaggtctgatgcagtagcttttactattggtggaaatcgatgttt

SEQ ID NO: 467633 - DNA, 201 bp, Homo sapiens
ctgggagtcttgctgggtgaggaccttggccccttgcttgcttgccatctaataggggcactcctggcctgtggggtcagggagaactagacccagagcakggttgtctctgtgactagttgagcctgtttctccttcaagggccctggcagtgggaaaacatattatgacaattgcactgttttatcagcccttggcact

SEQ ID NO: 467634 - DNA, 201 bp, Homo sapiens
ggaaaccctgttcacccccaccacggggtcaggtcttcaccaaagggaggccgcacggattcccagtcgcaaacccaaagccttgctgcctttgcctctgyttccatagttgtttcaatgtcttttttaaaaatcacatacactcgagtaagactgagtctcctcaccgaagagatctggctgtatcccgagtctctgaaa

SEQ ID NO: 467635 - DNA, 201 bp, Homo sapiens
gaccttgattccaccggtcccactaccctttcattttcacatcctgactcctcacaacctccagtaatcacatcactaccctttccccatgcaagattccycacccaggtaagagctatttctgctttctctcccatgtgtgtccatgctccccacatagttaagctctgagtactatattcctgagtctctgttctccat

SEQ ID NO: 467636 - DNA, 201 bp, Homo sapiens
ttgagcacacacacgcacgtagtagacatcactcgcaccagccctggtatgtacctgccaacccccaagatgaataaaactgccccctccacttggcccarggatttagcccctgctcaggtggttcccccaccacagaagctcttcccagcagtgttctttggcttcactgttcagtttgtttgattcacccactctctc

SEQ ID NO: 467637 - DNA, 201 bp, Homo sapiens
aggggcctcagggcttgtggggggtaggctgagaccccaccaccaaaggttaagtgaggtccccttgattgaggacttcaccccttgattaaagcaacttytgcttcagtgcttcctgtgtggtgttgagagtgggacttgggccattaagctcacagcaggagtggaggagaagcgatgctgaggaagctttggctgtat

SEQ ID NO: 467638 - DNA, 201 bp, Homo sapiens
acacacgcacgtagtagacatcactcgcaccagccctggtatgtacctgccaacccccaagatgaataaaactgccccctccacttggcccagggatttakcccctgctcaggtggttcccccaccacagaagctcttcccagcagtgttctttggcttcactgttcagtttgtttgattcacccactctctctcaagtac

SEQ ID NO: 467639 - DNA, 201 bp, Homo sapiens
ctaggggttaaccttggggatgatgggcaggatagcattctaggtggagagatagcaggagtggcagctttaagtcaggaaagaccttgattccaccggtyccactaccctttcattttcacatcctgactcctcacaacctccagtaatcacatcactaccctttccccatgcaagattccccacccaggtaagagctat

SEQ ID NO: 467640 - DNA, 201 bp, Homo sapiens
ctgttcagtttgtttgattcacccactctctctcaagtacttgttctgttagagagtcttatacctgcacccctaacccttaatccagtagaactgcctgmctgcgccttggtgggcctcaccagctttctctccccacagctgccaagagcccgtcggcccaacttatggagcaagtggctcagcttaagtccctgagtg

SEQ ID NO: 467641 - DNA, 201 bp, Homo sapiens
tggccagcatgatctcgatctcgacctcatgatccgcctgctttgacctcccaaagtgctgggattacaggtgtgaaccaccgccgctggccgaccctgcytttctttagcccaaactatggtgtggtgtcctaggaagcgatgaatgagatgaacgatgagctgcaggagaatgcacgtgagacagaactggagctgcgg

SEQ ID NO: 467642 - DNA, 201 bp, Homo sapiens
tggagctggagcctggaacatactgtgagaaaggcctggggcatctctgtgctggtaccccctcccacctccacttcttcctcaggaagccaaggaggcgmtggaggcaaaggaacgctatatggaggagatggctgatactgctgatgccattgagatggccactttggacaaggagatggctgaagagcgggctgagtc

SEQ ID NO: 467643 - DNA, 201 bp, Homo sapiens
gtacagactaggaggacgtgtcaagactgcttccagccctaggacagtgtattcaagagttgagtgctgagggtctgtggcgtatgcccagcccttagttyctggcccacgtgaagcaggggggcactaggacccagaggctagcacggttcctgacaagtctagagcagcactagcgcagagtgagactcatcagctggc

SEQ ID NO: 467644 - DNA, 201 bp, Homo sapiens
ccatgactgcgttctggtgctgttgctcatgcctcgtctcatttgcaaggtatggccaatcaatcacatgttccacagaaatctagtgaacttgccatgarccaggcattgaagatgctgagtgaagacaacagagtctctgcccacaaagagtttatggtatagtggaggaacacagcaaagtcaccgattaatatatat

SEQ ID NO: 467645 - DNA, 201 bp, Homo sapiens
caggatctggttctggggaagggggttgggggagggaggacagcagcattgttctaccctagggacctgatctcccatttctgggcttagattacgctcgkcacatggggtttctagggagttctgtgtagagtctagcacttgaaggaagaggctgacctgggaaagtccttgggagtggtggctgggcggggcctctgg

SEQ ID NO: 467646 - DNA, 201 bp, Homo sapiens
gagtctaggggtacaactttcaccttggcccttttacctgcagggtcctctgaaatagactgagagagggagattcagcttgactcccaaagagggcttarcaggggtagagagcctggcacccccacttttggcccaaccttctgtggaaattagattgtactttttccgtctaggggtggagggcatagacctggagca

SEQ ID NO: 467647 - DNA, 201 bp, Homo sapiens
gaacttgccatgaaccaggcattgaagatgctgagtgaagacaacagagtctctgcccacaaagagtttatggtatagtggaggaacacagcaaagtcacygattaatatatattacaaatggtgtgttttcaaggagagataggttctgtgagagagcacaattagagatttgatttagaggtgagcagggtgtgactga

SEQ ID NO: 467648 - DNA, 201 bp, Homo sapiens
gcacaaggatcagctggatgagactgtcaatgtggagcctctcaccaaggccatcaagtactatcaggtgtggggcaagaatttgggcttggggcaggagrcagggaagctttcacttgatgggggctcttactaatatattcaaggttgtatgtcccatgcttgctgcttgaggcctggtttgctcttagatgaactctc

SEQ ID NO: 467649 - DNA, 201 bp, Homo sapiens
tgagtcttgtcagctgacctcacctacatagagtctttgacaaagtctctgttactgacaccccttgatcttgggaggtgaccaagtaccttcttgacttkaggctcttgtggtacagacagctctgtgttctttggagagagtttccaggattactactttgtgttgtttttagcactcttgaaacaaacattagcactc

SEQ ID NO: 467650 - DNA, 201 bp, Homo sapiens
gtgagctgagcagcagtgagcccagcaccccggctcagactccgctggcagcacccatcatccccacgccggtcctcacctctcctggagcagtcccccckcttccttccccatccaaggtaaggcctggggtaggggtaaaggagaatcaagacacccagaggcttgtggctacccgctgtgtcttgaaaatttcctggg

SEQ ID NO: 467651 - DNA, 201 bp, Homo sapiens
gaattaaacccttagggcctccagactttcccagctgctcctgagtcttgtcagctgacctcacctacatagagtctttgacaaagtctctgttactgacwccccttgatcttgggaggtgaccaagtaccttcttgactttaggctcttgtggtacagacagctctgtgttctttggagagagtttccaggattactact

SEQ ID NO: 467652 - DNA, 201 bp, Homo sapiens
ttgctggaggggcactctagatgtgtgtgccagatgagagactgtaagggtgttgccaggttgtataagagacagaagtggagttaatggggctgtgggtrggtgggtggcgggggcagaatgtgagtatgatgagagagactgctggagcagagaggccatgtgtccctccccagtgatgccctggccccatagaatgcc

SEQ ID NO: 467653 - DNA, 201 bp, Homo sapiens
tcacgcccttcttttgtgtctgtgcatgtgtgcacatgtctgtcgcatgtgcagctgatgtgttggtacttcgttttcctgagcatgggcataagcctctrgttgggagagtggaaggtagtgggggagggaagattgaagatgcatccttagggaagctgccctgtactcttggtttgcttggagcctggggaggggccc

SEQ ID NO: 467654 - DNA, 201 bp, Homo sapiens
ggccagtagctccctgggcccctctggctcagcgtcagcaggtgagctgagcagcagtgagcccagcaccccggctcagactccgctggcagcacccatcrtccccacgccggtcctcacctctcctggagcagtccccccgcttccttccccatccaaggtaaggcctggggtaggggtaaaggagaatcaagacaccca

SEQ ID NO: 467655 - DNA, 201 bp, Homo sapiens
agctcactactgacttagagatcctcaaggctgagattgaagagaagggtaaggggcccacagctgctgggggccaaacggtcaggtgagaaccatgcctsaaagtgttaatgatcttctccaggctcagatggcgctgcatccagttatcagctcaagcagcttgaggagcagaatgcccgcctgaaggatgccctggtg

SEQ ID NO: 467656 - DNA, 201 bp, Homo sapiens
gctggtgtggggatggggttggagatgagagcaaaagtatgttgatatagaggactaagtccctgcccccctggtattagtgtctctgtgaaaccacgtgktcttgtgctagcctgtgggggtcccataaatgaacccttgtcttcctctccccttccctaggatgaggtcctcaaggagacagtatctcagcgccctgga

SEQ ID NO: 467657 - DNA, 201 bp, Homo sapiens
gctcactactgacttagagatcctcaaggctgagattgaagagaagggtaaggggcccacagctgctgggggccaaacggtcaggtgagaaccatgcctgraagtgttaatgatcttctccaggctcagatggcgctgcatccagttatcagctcaagcagcttgaggagcagaatgcccgcctgaaggatgccctggtga

SEQ ID NO: 467658 - DNA, 201 bp, Homo sapiens
taggaaaagggttttcctgcaggttgtgtccaggattcctctggtgtgtccccgtaacccccaaatcacctaactcctctctcctcttttcctgctccccsatgggctatcccgagcacagaagaacagcagcgaggtagagacccactctggccgggggttaccaggctggtgggagttggagctaagggagcagggtgg

SEQ ID NO: 467659 - DNA, 201 bp, Homo sapiens
gctgcttgaggcctggtttgctcttagatgaactctccatatgatgcagctgcttgagggctttggattctcttgtacctccagagacccatgatgaccarggctcaaactacagtttgggaagaactccccacccgctccagggcctaaaagttgtctgtctgttatctctcctcagcatctgtacagcatccaccttgc

SEQ ID NO: 467660 - DNA, 201 bp, Homo sapiens
cttctccaggctcagatggcgctgcatccagttatcagctcaagcagcttgaggagcagaatgcccgcctgaaggatgccctggtgaggtagggtcttcastgcttgcctctgatgcttactcttgtgtctccaaatgtgttagagcacccatcgccagagactctgacacgtgctttcctccttctgccttcctcacatc

SEQ ID NO: 467661 - DNA, 201 bp, Homo sapiens
tgatatagaggactaagtccctgcccccctggtattagtgtctctgtgaaaccacgtggtcttgtgctagcctgtgggggtcccataaatgaacccttgtsttcctctccccttccctaggatgaggtcctcaaggagacagtatctcagcgccctggagccacagtacccactgactttgccaccttcccttcatcagcc

SEQ ID NO: 467662 - DNA, 201 bp, Homo sapiens
aggatgaggacttgcaaagtaaggaggagtgctggtgtggggatggggttggagatgagagcaaaagtatgttgatatagaggactaagtccctgcccccytggtattagtgtctctgtgaaaccacgtggtcttgtgctagcctgtgggggtcccataaatgaacccttgtcttcctctccccttccctaggatgaggtc

SEQ ID NO: 467663 - DNA, 201 bp, Homo sapiens
tgcccactgtttgctctctgcccaccatcaccccagggcttccttatgacccagctgtgcttcactgtctctcctcctaggatgtgaatcgggaactgacraaccagcaggaagcatctgtggagaggcaacagcagccacctccagagacctttgacttcaaaatcaagtttgctgagactaaggcccatgccaaggtca

SEQ ID NO: 467664 - DNA, 201 bp, Homo sapiens
ccctacccgcgtctaacctgtgtaagcccgagttggtcttaacacctatgcccaggacatctgttctctaactctgccctttcctactcctcatgcagcgsggactgaagcctaagaaggtggtgtgtttactatttgtgcctgggtggatgggggccatgagccccttccccagctgtcctgcatgtccctgggctgctg

SEQ ID NO: 467665 - DNA, 201 bp, Homo sapiens
ccatgaacaagctggccacagccatgcaggagggggagtatgatgcagagcggccccccagcaaggtaggtggagatttccttggagaagttgcagaggcytgtaggagtaagacttgcagagctactgctagttgtgggaggacggggagacaggaggaaggcatctggagagcaccatcctgcctagaaggcagggttt

SEQ ID NO: 467666 - DNA, 201 bp, Homo sapiens
gtgtcctaggaagcgatgaatgagatgaacgatgagctgcaggagaatgcacgtgagacagaactggagctgcgggagcagctggacatggcaggcgcgcrggttcgtgaggcccagaagcgtgtggaggcagcccaggagacggttgcagactaccagcagaccatcaagaagtaccgccagctgaccgcccatctacag

SEQ ID NO: 467667 - DNA, 201 bp, Homo sapiens
ctacaccgctatgagcagtaagtgactcctgactccctcaccccagggtgggggtccaggattggccagaactgagattgcctggcagactctagcctcayagtgcccttctctggtctctagtgccctctctcagtgcagtgtggatgtgtataagaaagtgggcagcctgtaccctgagatgagtgcccatgagcgctc

SEQ ID NO: 467668 - DNA, 201 bp, Homo sapiens
ctcttatcttttcctccctctctcctctgcctccatcctccccctgtcctttgtcactatctctctctgcctctctgtatcattttccttgtccccttcattcttcttttctcactgtgctttgatactctctttctgctttttcccttttctgtctccttcccttgccatattctcatattctgtttctgttcctcttac

SEQ ID NO: 467669 - DNA, 201 bp, Homo sapiens
tcttatcttttcctccctctctcctctgcctccatcctccccctgtcctttgtcactatctctctctgcctctctgtatcattttccttgtccccttcattcttcttttctcactgtgctttgatactctctttctgctttttcccttttctgtctccttcccttgccatattctcatattctgtttctgttcctcttact

SEQ ID NO: 467670 - DNA, 201 bp, Homo sapiens
cttatcttttcctccctctctcctctgcctccatcctccccctgtcctttgtcactatctctctctgcctctctgtatcattttccttgtccccttcattcttcttttctcactgtgctttgatactctctttctgctttttcccttttctgtctccttcccttgccatattctcatattctgtttctgttcctcttacta

SEQ ID NO: 467671 - DNA, 201 bp, Homo sapiens
gtggctggggcagcctgagacctaaggaagcatgctggaaactagactggagctggagcctggaacatactgtgagaaaggcctggggcatctctgtgctkgtaccccctcccacctccacttcttcctcaggaagccaaggaggcgctggaggcaaaggaacgctatatggaggagatggctgatactgctgatgccatt

SEQ ID NO: 467672 - DNA, 201 bp, Homo sapiens
aagatgctgagtgaagacaacagagtctctgcccacaaagagtttatggtatagtggaggaacacagcaaagtcaccgattaatatatattacaaatggtrtgttttcaaggagagataggttctgtgagagagcacaattagagatttgatttagaggtgagcagggtgtgactgagggaataacattgtctgagggcca

SEQ ID NO: 467673 - DNA, 201 bp, Homo sapiens
actgtttgctctctgcccaccatcaccccagggcttccttatgacccagctgtgcttcactgtctctcctcctaggatgtgaatcgggaactgacaaaccmgcaggaagcatctgtggagaggcaacagcagccacctccagagacctttgacttcaaaatcaagtttgctgagactaaggcccatgccaaggtcaggaaa

SEQ ID NO: 467674 - DNA, 201 bp, Homo sapiens
agtgctggtgtggggatggggttggagatgagagcaaaagtatgttgatatagaggactaagtccctgcccccctggtattagtgtctctgtgaaaccacrtggtcttgtgctagcctgtgggggtcccataaatgaacccttgtcttcctctccccttccctaggatgaggtcctcaaggagacagtatctcagcgccct

SEQ ID NO: 467675 - DNA, 201 bp, Homo sapiens
atgaactctccatatgatgcagctgcttgagggctttggattctcttgtacctccagagacccatgatgaccagggctcaaactacagtttgggaagaacyccccacccgctccagggcctaaaagttgtctgtctgttatctctcctcagcatctgtacagcatccaccttgccgaacagcctgaggactgtactatgca

SEQ ID NO: 467676 - DNA, 201 bp, Homo sapiens
gaagtgtcacataagactagggcagagttaccaaagccatatcagggaaactagaggacctacttatgtatgggggtcagcagaggatggggacttcttaragatgttgataaggcagaagggctcctgctgggggctgatgattgcatgcttctatcctcacagttcacgcagagtgctctggactgcatgagtgtggag

SEQ ID NO: 467677 - DNA, 201 bp, Homo sapiens
gctcgaagatcgagagacagttattaaggagttgaagaagtcactcaagattaaggtgagggtagtgtaggctcaggatctgggggccaggaaattggtakgactcaggaaagcagtgagtgttggggatcgggaccaagacggcttgggagttaaggggagaagtggggcctgcaatcaatgggagctgtggtgagccct

SEQ ID NO: 467678 - DNA, 201 bp, Homo sapiens
cccggctcagactccgctggcagcacccatcatccccacgccggtcctcacctctcctggagcagtccccccgcttccttccccatccaaggtaaggcctrgggtaggggtaaaggagaatcaagacacccagaggcttgtggctacccgctgtgtcttgaaaatttcctggggttggcaaagacctagaacttggatcag

SEQ ID NO: 467679 - DNA, 201 bp, Homo sapiens
ctcttaagggtagtgccagagctaggaggaatgtggagtcagtgccaagcgaggagccttataatcttatgtctttctcttatcttttcctccctctctcmtctgcctccatcctccccctgtcctttgtcactatctctctctgcctctctgtatcattttccttgtccccttcattcttcttttctcactgtgctttga

SEQ ID NO: 467680 - DNA, 201 bp, Homo sapiens
tgactctggttgtttttcagtccagcatcttggctgaggcatttcttatacataagaatgccacctttgatctgaggcctctaactgtctgtgtttacctktgtctttcagacgcccagcggcagcaggatgagtgcggaggcaagcgcccggcctctgcgggtgggctcccgtgtagaggtgattggaaaaggccaccga

SEQ ID NO: 467681 - DNA, 201 bp, Homo sapiens
agggaagattgaagatgcatccttagggaagctgccctgtactcttggtttgcttggagcctggggaggggcccatattacagccgtccttgatctggctrtattgaaactattgatctggctatattgaatctggcctcagatccaggtatttgaagatggagcagatactacttccccagagacacctgattcttctgc

SEQ ID NO: 467682 - DNA, 201 bp, Homo sapiens
attctaggtggagagatagcaggagtggcagctttaagtcaggaaagaccttgattccaccggtcccactaccctttcattttcacatcctgactcctcasaacctccagtaatcacatcactaccctttccccatgcaagattccccacccaggtaagagctatttctgctttctctcccatgtgtgtccatgctcccca

SEQ ID NO: 467683 - DNA, 201 bp, Homo sapiens
gccaaggtcaggaaagtgtgtgggtctgagggagccctgcctgggatgaactggtatggggtctgggcttcagattcctgggggaaggggtgctttgtgtsgtggtttggaagactctggcctgggcttgccctagaagcaagggatctactggagcaaggcatgggaattttggggctctttcagctctggctaagagtc

SEQ ID NO: 467684 - DNA, 201 bp, Homo sapiens
tgctctctgcccaccatcaccccagggcttccttatgacccagctgtgcttcactgtctctcctcctaggatgtgaatcgggaactgacaaaccagcaggmagcatctgtggagaggcaacagcagccacctccagagacctttgacttcaaaatcaagtttgctgagactaaggcccatgccaaggtcaggaaagtgtgt

SEQ ID NO: 467685 - DNA, 201 bp, Homo sapiens
tttgacttcaaaatcaagtttgctgagactaaggcccatgccaaggtcaggaaagtgtgtgggtctgagggagccctgcctgggatgaactggtatggggtctgggcttcagattcctgggggaaggggtgctttgtgtggtggtttggaagactctggcctgggcttgccctagaagcaagggatctactggagcaaggc

SEQ ID NO: 467686 - DNA, 201 bp, Homo sapiens
tctgcctccatcctccccctgtcctttgtcactatctctctctgcctctctgtatcattttccttgtccccttcattcttcttttctcactgtgctttgayactctctttctgctttttcccttttctgtctccttcccttgccatattctcatattctgtttctgttcctcttactacccctatcctctgctttctttct

SEQ ID NO: 467687 - DNA, 201 bp, Homo sapiens
agcccctcacccagaatcccccacctgactctcctatcagttgatgcctcctctttctaggtaccttccagcagcccttctccctatcctccccgtaacayaggtggatgctgctctgggtgctgaggagatggtggagatgctgacagatcggaacctgaatctggaagagaaagtgcgcgagttgagggagactgtggg

SEQ ID NO: 467688 - DNA, 201 bp, Homo sapiens
actctcctggggcatccagccctgcccgatacctgctcttgattgcttctctgcttggacactgtgttttctcactgagttcatgtggcttcattttatgrtgtggtcatatcttccactgctgaattatcccagtttcacttggggcttgtgttttgacctttgtctagtcactcagtatagtcagggctcctcacctag

SEQ ID NO: 467689 - DNA, 201 bp, Homo sapiens
caaagggcaaaaatgatggaactgttcaaggcaggaagtacttcacttgtgatgaagggcatggcatctttgtgcgccagtcccaggtattcacgcccttmttttgtgtctgtgcatgtgtgcacatgtctgtcgcatgtgcagctgatgtgttggtacttcgttttcctgagcatgggcataagcctctggttgggagag

SEQ ID NO: 467690 - DNA, 201 bp, Homo sapiens
ctggagcgctgtatcgtaagaccagccagctgctggagacattgaatcaattgagcacacacacgcacgtagtagacatcactcgcaccagccctggtatrtacctgccaacccccaagatgaataaaactgccccctccacttggcccagggatttagcccctgctcaggtggttcccccaccacagaagctcttcccag

SEQ ID NO: 467691 - DNA, 201 bp, Homo sapiens
agctcgaagatcgagagacagttattaaggagttgaagaagtcactcaagattaaggtgagggtagtgtaggctcaggatctgggggccaggaaattggtwggactcaggaaagcagtgagtgttggggatcgggaccaagacggcttgggagttaaggggagaagtggggcctgcaatcaatgggagctgtggtgagccc

SEQ ID NO: 467692 - DNA, 201 bp, Homo sapiens
cctgaccctgccttttttttttttttttttttctgagatggaatctcgctctgttgccaggctggagcgcagtggcgcaataatctcggctcactgcaacytccgcctcccaggttcaagcgattctcctgcctcagcctcccgagtagctggtactacaggcatgcgccaccatacccagctaatttttgtatttttagt

SEQ ID NO: 467693 - DNA, 201 bp, Homo sapiens
gatcgagagacagttattaaggagttgaagaagtcactcaagattaaggtgagggtagtgtaggctcaggatctgggggccaggaaattggtaggactcasgaaagcagtgagtgttggggatcgggaccaagacggcttgggagttaaggggagaagtggggcctgcaatcaatgggagctgtggtgagccctcagggaa

SEQ ID NO: 467694 - DNA, 201 bp, Homo sapiens
taaggggagaagtggggcctgcaatcaatgggagctgtggtgagccctcagggaacctactatctcatggtctagcccccagtttccagggactgtggggrggatgtcagggatctagaagttctgtccttgtccagggagaggagctaagtgaggccaatgtgcggctgagcctcctggagaagaagttggacagtgctg

SEQ ID NO: 467695 - DNA, 201 bp, Homo sapiens
ctcgatctcgacctcatgatccgcctgctttgacctcccaaagtgctgggattacaggtgtgaaccaccgccgctggccgaccctgcctttctttagcccmaactatggtgtggtgtcctaggaagcgatgaatgagatgaacgatgagctgcaggagaatgcacgtgagacagaactggagctgcgggagcagctggaca

SEQ ID NO: 467696 - DNA, 201 bp, Homo sapiens
tcctgcatgtccctgggctgctgcatgcatgtgtgtgtgaccttgggctgggatggccagaggaaatggtggccttggctttcagagttcctttgaagggkgcaagaacatcaggctcagtgtccatacccaggtagcactcattagggatgattctctctgccccaggactccaagtcaaagattccccaatcaaaaact

SEQ ID NO: 467697 - DNA, 201 bp, Homo sapiens
ccccctccacttggcccagggatttagcccctgctcaggtggttcccccaccacagaagctcttcccagcagtgttctttggcttcactgttcagtttgtytgattcacccactctctctcaagtacttgttctgttagagagtcttatacctgcacccctaacccttaatccagtagaactgcctgcctgcgccttggtg

SEQ ID NO: 467698 - DNA, 201 bp, Homo sapiens
gagcagaatgcccgcctgaaggatgccctggtgaggtagggtcttcagtgcttgcctctgatgcttactcttgtgtctccaaatgtgttagagcacccatygccagagactctgacacgtgctttcctccttctgccttcctcacatccctgcaggatgcgggatctttcttcctcagagaagcaggagcatgtgaagctc

SEQ ID NO: 467699 - DNA, 201 bp, Homo sapiens
ctcctccagaattggaggaggcctttggagtctcaggtctaacaactgcataccttgggttatctggccaaattttacttacaagtaactcagaagtgctyacagtgctttgaaattccaatattttagcacctaaacaccttccgtgacttttgacaccaggagggcctcaaaactcccttgtcagattatgtatcccca

SEQ ID NO: 467700 - DNA, 201 bp, Homo sapiens
tgaaaaatgtggtcacaatagcccaggatctcagaagccctagtcacccaggagctgccttggtctcagtgctcagggaccccttcagtggcccacagctsaagtgagcccctgacctggagtctttttctcctcatcaaccaccaggccaaggaggagcagcaggatgacacagtctacatgggcaaagtgaccttctca

SEQ ID NO: 467701 - DNA, 201 bp, Homo sapiens
cggctggttttggacagcgacaccggctggtgctgacccaggagcagctgcaccagcttcacagtcgcctcatctcctaagcactcctttcccctgctgtycccttcgaccctcagccctctggtgccgctctgcccgatgcacagccacctcagccagcccccaggtagaaacgtgggttaagctcttcctgccccgttc

SEQ ID NO: 467702 - DNA, 201 bp, Homo sapiens
aggggctcctgagggggtccagactatcctggggactcagaatggggatgatggctcagagaggtcttacagtgaagcctttcttaagagctgctttgttrtttgttacttgctttctttctcttctgagatagaatctgtagctactgttgtggccccctggttctgagaggcttattggggttggaaagtgggggagtc

SEQ ID NO: 467703 - DNA, 201 bp, Homo sapiens
agcccttgccctcatcatacctgctgggtgccccagttcagactgtcataccagaacacatcttcagcagtggctgccatggccatatggatcataacagmtcccacattgaccaccatatgccaagcactctaaatgtgtcacagttcacttacacctttgagggagatactaccatcatctccattttacagagaagga

SEQ ID NO: 467704 - DNA, 201 bp, Homo sapiens
ctttcatcgctgctcagtaacatgaacccccaaaaagccagccagcaaagcagagcaggcctgcctagcatagaaaatgccagaatttggagaacaaaagygcttttttggataggactgttttttgttgttgctcatacaacacagctctttgtgattaatctacatttaacatagctccaatcaaagtgataaagaaat

SEQ ID NO: 467705 - DNA, 201 bp, Homo sapiens
gatgagggatggtaaatagagcctcacaaagctgtaagcaaagcctgccattcatttttctgccttcttccttctctttctgcctaggacccccaatttcyagcagtgccactctccagccccagagagtttattagtgtttcttcctcaatgaatctaatgtgtcctttgcacaccttagtctctggggcctaaggtatg

SEQ ID NO: 467706 - DNA, 201 bp, Homo sapiens
agtgaggaaggtggagagggagctgccctcacaatggaagccaggccttggctctaaggaactggaaggagatgggaaggggttgggaatgcagctcccakccccacagctgctgaccctgccccgtgtcatgtgctcatccacagtgaatacaaccgtgttcaatgcttcagccccattggcaccagacaccaacgcttc

SEQ ID NO: 467707 - DNA, 201 bp, Homo sapiens
aacaagcccttcaggtgacttggagtatgctcaagtttgagaaccactgcttagaaattacccactagttagaactggtgacatatgcttgtagctaaacycagccctactccctcataagagcaccaaccggccaggtgcggtggctcacgcctataatcccagaactttgggaggccgaggtgggcggatcatgaggtg

SEQ ID NO: 467708 - DNA, 201 bp, Homo sapiens
gttatttgcagcaggtgactgtgctctctctcctggctgccctctgaccttcacctccatgtttcctgacaaaccccagggctgttgcagcaaattacctycttagttttacagacactgtctgcatgcatgctccttcccatgtctgaatttagtctaaagttgcagctacctaaggtgtttaagggaaaagattgcact

SEQ ID NO: 467709 - DNA, 201 bp, Homo sapiens
attatccttagctgctccatctctgaaatattaaattcaaacattctactctgatctcgccactgtcctattaactaccaagcacctgaccctctcttgaygccccacctgccctttaccttaccttcctttcccatccagctgaggttctctgccctccagaggctccatgtcaggcgccactgggctccagccacacct

SEQ ID NO: 467710 - DNA, 201 bp, Homo sapiens
gaaagtcgttgccagttccttcccatctacaaggcttaatggtgcctggggttaacctacattcagtctccccatctgcagaatcggaggagtacttattwattctttcagtctcttggcaacattgggagaatttttttcaagttaggcctcaaagcagtctgaaggggagtgagggagtgagagcaggtgggagtctcc

SEQ ID NO: 467711 - DNA, 201 bp, Homo sapiens
ggaactgactggcccagggagtggggcaagcagccaggacagcagcatggatcttatcagcaggactcgtgagttccttgaggggtacattctggggagcyatcctgctggtgtgtccagatgggacccagcagggcaggggggattttctggagaatgtgggtaacgctccacatggctcagcctaacctctctggcccc

SEQ ID NO: 467712 - DNA, 201 bp, Homo sapiens
tgtcttggctccagattccttatttcagtttttaaaaccagctgttcgtggtcaggcaggtgctgtcctggcccagctggtctgtcagagctgtggcccakgctctgtcccaccagcccttccctaactggggcaaagtgaggaaggtggagagggagctgccctcacaatggaagccaggccttggctctaaggaactgg

SEQ ID NO: 467713 - DNA, 201 bp, Homo sapiens
tatcctccagtttgtcttagcactttgtcttggctccagattccttatttcagtttttaaaaccagctgttcgtggtcaggcaggtgctgtcctggcccakctggtctgtcagagctgtggcccaggctctgtcccaccagcccttccctaactggggcaaagtgaggaaggtggagagggagctgccctcacaatggaag

SEQ ID NO: 467714 - DNA, 201 bp, Homo sapiens
tgaacctgggaggtagagattgcagtgagctaagatcacgccactgcactccagcctgggcaaaaaaagaggctggaagggaagggacgtatctgtggagrtgaacagggcagggaagttcatggtgtagagctgggaagtttataggctctgggccagcctttctgggatgggatcatggctccgagtatgaactgtgtg

SEQ ID NO: 467715 - DNA, 201 bp, Homo sapiens
gaattcctgcaagtttatcccagacctggcgctcatgtccttcatccttttctttgggacatactccatgaccctgaccctgaagaagttcaaattcagcygctattttcctaccaaggtaagctcaccctgcagttaggaggggacctgcagtcagacagctgctgagtcccccagagagggttctggtccaccgacagg

SEQ ID NO: 467716 - DNA, 201 bp, Homo sapiens
catttaggagactgggatgaggggggagaactgtggagggtttctttcccggtccatgggccacctacttagtaatgggcccatattcctagttttactgygaagcccagtcttactatagtatactctcactctttgtcactcttcatcataaaagcttgtttgggggcactctctttcaatttgcttttgcttccattg

SEQ ID NO: 467717 - DNA, 201 bp, Homo sapiens
tttagtacagacagggtttcaccattttggccaggatggtttcgatctcttgacctcgtgatctgcctgccctggcctcccaaagtgctgggaactcaggrgtgagccaccgtgcctggccactttggccattctgagaatcatctatacacaggaaaaaacaaacccggggtgctctaggaacaagggccataggatcat

SEQ ID NO: 467718 - DNA, 201 bp, Homo sapiens
tggtggtctcctgggactcctgtggggtttccaaatctataccccgattgagttgaaggaaataagtggatagtgggttcagccccttaatacattactaygggtaaaaaaaatcataagtcaatcgaaaatatttgctgcacaattattgtatgccctactttaggccttgtggaagataaagatgtcctgccttcagag

SEQ ID NO: 467719 - DNA, 201 bp, Homo sapiens
aaatcttccaaatgagtataggatatttggttttcctttaaaaattatactgtttttatcaccctggccttgaggtttttgggtgcaaaaccactccaaaktaacagaaatgacaggaaacttgttctgtctgacaccatggtaagttagttctatcttgttctcatctaatagaactgaatctttctcttctagtacgta

SEQ ID NO: 467720 - DNA, 201 bp, Homo sapiens
ttccctccagcaactgttgatttggttcattaatggaacttggtcaaacccaagcctcagggcaatgaccccatcctggcactccatgtcttccattttgsttctgcagcccaatctctttgtaactgatgaatattatgaaaaaatgccaattttcagtaaccctgcctcccctgtcttttgtgccgtgtccacagaatg

SEQ ID NO: 467721 - DNA, 201 bp, Homo sapiens
ctaggttggaaataattttgtctcacttttggaagcatgacttcattgtcttgtagcttccactgtagtgattgagaaatctgatatcaattcttgtttcrgattcttggtagatgacttatttttttctggaagcttttaagatttctttatccatgaagtcctaatgcttcataatgatgtgacttggagtggattttt

SEQ ID NO: 467722 - DNA, 201 bp, Homo sapiens
ctcttgggttggggcctttctgatatacctgcttcttttcatttccattcctggcctcaagggtggagaataggaacttgctgttggaagacccaaatatrctaagcccttagagtggaactacttacctctaagtgctagtgtctactgcttatctcaaattgcagcttgcttaaacaatgcagtatagggaagggaagt

SEQ ID NO: 467723 - DNA, 201 bp, Homo sapiens
tggacttcctagaccagccattcatcgcgttcgtgcgcctcatccagtcggccatgctgggaggagtgaccgaggtgcctgtccccaccaggtgagagccrttgaaacctgtccccacgccactctcaggtagccagtcagcagtgcagtcagcaagcagtgctgttgactgttagtgttctcaaaggcacctctaaacgt

SEQ ID NO: 467724 - DNA, 201 bp, Homo sapiens
ctgctttaactctagttgaggcccaagtaactgctggtcctcattcccacagcaggtcaggggcaggaaagaggccagcccaggcatccttgtccttcttstactggctccatgcgctacatggaaagcagccccttgctgcaaagttgctctctggatcatgtcagagctccttggagaaaatatcttgcacctggagat

SEQ ID NO: 467725 - DNA, 201 bp, Homo sapiens
tctttttctctccttctcctctcctttctctcttctgcctactctttctccttctttacaatgctttaaatatataaaaaccatgcttagctagctggccrtacaaaaacaggctgtggggtgcttggagcccatgagacatgatatttcaaccccaatctggtataaagcaggcatgtgctcatacacacagctaactaa

SEQ ID NO: 467726 - DNA, 201 bp, Homo sapiens
cttccacagagacccacgagggtggctttaatatatgctgcaaggttcctaacctccaggacagttttgaaatacacaatccagctgcctgacgtgttagrtgtgaatggggcttgggtgtctgtacttttctattaagttccagtgtacctggttaaaaaatacactatcctaaagaaatttgatgcttccttgaaccac

SEQ ID NO: 467727 - DNA, 201 bp, Homo sapiens
ctcagtgacctacaaagggtcctgcccttcatgtcatctatccttgtcccatctggtcctgggtcgttggtgcctgcaggttattgtggaggtcaaagtcyctctccacctcttcaagcagcctcactcagggagcttgcctggggtcctcttggcctagatacacccagcagctgttctgttccctgctctcagatccac

SEQ ID NO: 467728 - DNA, 201 bp, Homo sapiens
atcctggcactccatgtcttccattttgcttctgcagcccaatctctttgtaactgatgaatattatgaaaaaatgccaattttcagtaaccctgcctccsctgtcttttgtgccgtgtccacagaatgccctcctatccacattgggcttccagtacccacttaccctcaaagaaaaactgaccagaagggacatctttc

SEQ ID NO: 467729 - DNA, 201 bp, Homo sapiens
gttttacatggcagcacgcaagagagaatgtgcaggggaactgctctttataaaaccatcaggtctcatgaaatttatttatttattgagatggagtttcrctcttattgcccaggatggagtgcaatggcgcaatctcagctcaccgcaacctctgcctcccgggttcaagcaattctcctgtctcagcctcccgagtat

SEQ ID NO: 467730 - DNA, 201 bp, Homo sapiens
gcaggggaactgctctttataaaaccatcaggtctcatgaaatttatttatttattgagatggagtttcgctcttattgcccaggatggagtgcaatggcrcaatctcagctcaccgcaacctctgcctcccgggttcaagcaattctcctgtctcagcctcccgagtatctgggattacatgcatgcaccaccacaccca

SEQ ID NO: 467731 - DNA, 201 bp, Homo sapiens
ggagtttcgctcttattgcccaggatggagtgcaatggcgcaatctcagctcaccgcaacctctgcctcccgggttcaagcaattctcctgtctcagcctsccgagtatctgggattacatgcatgcaccaccacacccagctaatttttgtgtttttagtagagatggggtttctccatgttggtcaggctggtcttgaa

SEQ ID NO: 467732 - DNA, 201 bp, Homo sapiens
ccaaagtgctgggattacaggcatgagccactgcgcctggcgagatttattcactatcatgagaacatgggaaaaacccaccctcatgattaaattacctrccaccaggtccctcccatgacacatggggattataggagctacaattcaagatgagatttgggtggtgacacagccaaaccatatcatatgtcttcttta

SEQ ID NO: 467733 - DNA, 201 bp, Homo sapiens
tggctccttaccacagatcataggtgaggcaggggccactgtgtgcatctctcctgtggtccctgcaaaccagggcagctcccctgacctcatgcctgccytcaagtctgtgtgacggcccgtctctgacacctgattctgcagagaccagctttgactctgttgctcccagggcaggatcatagtcactccaagtttcag

SEQ ID NO: 467734 - DNA, 201 bp, Homo sapiens
gggctggcagtggcggggccggcggaacaagcagcggggatgatggagagatgccagccatgcatgaaatcggggaggaacttatctggacaggaaggtgyccaccccaggcctcccagtgaccctgctgtcctttagacttctcccttctcagctgccctctagggacttttcccaaccatggtctgtagtgcccactcg

SEQ ID NO: 467735 - DNA, 201 bp, Homo sapiens
ccttttggttttccagaaacgtctgattctccttcccttgtgcgccaatgagatggatgtcgttgttctctttttgctgttgggtcttataatgctcgggrcctttctgatttcacactgaggttgttgcccttcccaggcctggtaggtccagagtggcgtaggggactcagatgggaaagacggagggatctcttacct

SEQ ID NO: 467736 - DNA, 201 bp, Homo sapiens
gtaccctgaagaccacccaggtatgctctccccacctcctttattttggatggaccagtctaaggagagtcatcttttcccacaccattggtggcactcaktgagtggcttgttgcttgactgaatgcctgcccacaccctctccagtcaagtttatcttgagtaactaaacacttagcaatggagacactcatacatctc

SEQ ID NO: 467737 - DNA, 201 bp, Homo sapiens
tgacccattctctcctgtgcttggtctccaagtacaacctccttaacctcacagcgttggactggtccctgctgagcaagaaggagtgtctgagctacggygggcgcctgcttgggaattcctgcaagtttatcccagacctggcgctcatgtccttcatccttttctttgggacatactccatgaccctgaccctgaaga

SEQ ID NO: 467738 - DNA, 201 bp, Homo sapiens
tctctttttgctgttgggtcttataatgctcggggcctttctgatttcacactgaggttgttgcccttcccaggcctggtaggtccagagtggcgtagggractcagatgggaaagacggagggatctcttacctgaatttctcagctagccttgactgagtctcccctgacccccaacatacttaggccttctccagcct

SEQ ID NO: 467739 - DNA, 201 bp, Homo sapiens
ggtctcaggatgtaaagtcttaggatacaaaagacagttgcttttctatataccagccattggaatttgaaatttaagacatgatacactagcaccaaaarttttagacataaatctaacaaaatgtatacaggatctacatgagaaaaactataaaagtaatgaaagaaatcaaagatctaagtaaatgaaaaaatattt

SEQ ID NO: 467740 - DNA, 201 bp, Homo sapiens
ctcagagggcacacttggagtttgtatacagccttctagaaaaagaatgttattgcccatgaaactaggactcagggcctccaagacctacttcacacagytggcaagaatggttttggctcctttgggttccctctcccagtccccaatagtcagtggcctggagtcacccgaatccccccatccctgccccctctgctt

SEQ ID NO: 467741 - DNA, 201 bp, Homo sapiens
gggcatttggtaatgggggcactgtgaaagcagagcataggggcatctaatccaggcaggaggggtcaaggaaggcttctaggaggaagagatgttcacawtgagacctgaaggatgggtcagagttagccaggagagggtagggaagggggaagaggcctctggaatagggcaaacagacacatagaggaaaaggcacag

SEQ ID NO: 467742 - DNA, 201 bp, Homo sapiens
ctgcggatgcggcagagtgcaaattacggacgtctgtgtgagtgtgtgctctgccgctctgtggcagctttattcaggctgtggcagctgtgacatggccrcattgccataggtgggggagacaaagcccaggatctgccaagaattctcagggcatgcatcaggaggagcctaactttcactctaaacccaggctgctct

SEQ ID NO: 467743 - DNA, 201 bp, Homo sapiens
tggtttgcatcctgctctctgcctgtctcctctctccaggacctgtccatttatttgccttcttgtctggccttgaaggggaaaggggattccagacttakggaatggcaggcacaggggcccaaggagtagcatgccctcctcttcagggatgtggtctgctgtggctggggtcggggtggctgggtgagggacatgcta

SEQ ID NO: 467744 - DNA, 201 bp, Homo sapiens
ccgtccctcttggtcactggtaggcatggtcactcacctgaggggccagacaagaggaactacggtggagggaaagtgaataatggcttatgggagcttcragacggctccaaagacaccacaaaaagtccctgaactcagccgactgagggagaaaaaaatctatgcctgagtttgggcattgagaccacagttttctcc

SEQ ID NO: 467745 - DNA, 201 bp, Homo sapiens
acccagactttggtatttttatgaggtccacaggtgagcatagacctgcagccagggttgagaacccccactgcagggaaagggagatagatcctcccccyagtgccctcaggggcctcagagctggcgaagggaaaggcagtagtagtcatgattagcatttactgagtactgttccactgagtccacaccagcccccaa

SEQ ID NO: 467746 - DNA, 201 bp, Homo sapiens
ggagaggtgagccagagactacacagagcctgtaagcagagctgagtcacactctgtccccagagtgatggggagcctagaggactttaactctttttccrtttgtgccaagaatactcactggcggtgcttgcggctgcaggctttaccctgagataacttttccccacgaaatgtctcacttttattattatttttgca

SEQ ID NO: 467747 - DNA, 201 bp, Homo sapiens
agctcagtaccccaaggagaagacccatttgtcaagctgccttttgggcatgtccacatggctgcccctcaggattccccatggctgcccctcaggatccmccagttcacacagctgacattgcgtcccttatcttccctcctgacgtgctgctccctgcccttccccagcacagcaggtgataccgtggttcacccagct

SEQ ID NO: 467748 - DNA, 201 bp, Homo sapiens
caagcaatcctcccacctcagcctcccagagcgctgggattacaagtgtgagccaccatgcccggcttctgagtatttttaaatatacttaaacaaaatgrgttttaagctttttttccccagtcatttcctcatagcgagatctcacccaaagtgatcagtgaggtcttgctaccctcaagcagaagggagcaagcattt

SEQ ID NO: 467749 - DNA, 201 bp, Homo sapiens
ccatgtttcaggtcttcacctcccagtccttctctaattagatctccccattctgtgtccatctgattccccaggatcccaccaggtgcctggttaacttrtctcaaataaatgtatggaatgaaggtgttaaacatagataatgcaaaatatacagttacgtgaagaggaaatctgatgaaggaaaagatgttcaatctc

SEQ ID NO: 467750 - DNA, 201 bp, Homo sapiens
tcaggtgcccacagaggggcaggagggccagagtagttgccaggcatttcctggtacaccctgaccatgtgttcttctctgccagggaacagagagtaacyggcatcatcgtcttcatcctgacgggaatctctgtcttcctggctcccatcctaaaggtgaggtcctgcactgtcacctagggcctcgttgcctgagaaa

SEQ ID NO: 467751 - DNA, 201 bp, Homo sapiens
gaaagaaagaaaaaaaaaagagcaccaacgatctcaccagagtagggagtccagattctagaacttaccctccctgtctttaaggttttttttgttgttgtttgtttgtttgttttttgagacaaagtctttttatatattctcctcattctgaacatgcaggactgaactgatgttcagcattttacagacaattctata

SEQ ID NO: 467752 - DNA, 201 bp, Homo sapiens
tgagcagttttaggggaccctcagctgaggctggaggtaggaagaagctgggcaggaatgaggagggggcagtctgtggagtcttctcactttccagaagrcatttctttagccagaccacatggcctccgcacggtgcagtgaggggccaggccaggagagcagctgcatgctgggccagctaccccagccagagaaggg

SEQ ID NO: 467753 - DNA, 201 bp, Homo sapiens
agcatttacttcagtgccacagctgagtggctggcttggcatgtccttggctgtaacatggaaggaggccagaggacagggagcagagagaaaaggggtarccatatcttctctcaacattttttggcttacaaaactaaaccacagggaagggcagggatgaggttggccatacacatcacaggactaggtctttctctc

SEQ ID NO: 467754 - DNA, 201 bp, Homo sapiens
ggggcaatgcagcccctgcctgtggccttgggcacagcaggcatttgctgcagtcttctctctctgtcctgatgacccaagtcctcttagtctccccagcyttgttatgccacatagggatgcccagtggcagtgttcagtgggtacagagtggcttcgggaagaccttccactcagttatcattgtatatgaggtcacct

SEQ ID NO: 467755 - DNA, 201 bp, Homo sapiens
agggcagggatgaggttggccatacacatcacaggactaggtctttctctccctcctcatctctctctctctttcatgcacatacatgcgcacacacacgcacacacacacacacacacacaaatggacacccctctgccattctgtgtattggcttttctctctcccactgaagacaggctttttccagagacaaaagag

SEQ ID NO: 467756 - DNA, 201 bp, Homo sapiens
ttcagatctacttccctatcttaagaggtgggctatgtgcttcttctgctaatttattatctcagaagtacataatttgagcaattttatatagttttgargacaggagccctgtaagagtctcttactcagaaatggattcagcttggtttgaggtttaataggtcattgcaatgctcccttctggtatcacaggacata

SEQ ID NO: 467757 - DNA, 201 bp, Homo sapiens
ggaggagggttcctactggtatctaatgtgtagaggctgtggatgctactaaacacactacaatacacaggacagaccctccacagcaaagaatcatctakcccaaaatgtccattgtgccgaggttgagaaaccctgctatatgggaattgcctggttacttacctgtgtctcccactggaatgaagatatgttatcttg

SEQ ID NO: 467758 - DNA, 201 bp, Homo sapiens
gggcagggatgaggttggccatacacatcacaggactaggtctttctctccctcctcatctctctctctctttcatgcacatacatgcgcacacacacgcacacacacacacacacacacaaatggacacccctctgccattctgtgtattggcttttctctctcccactgaagacaggctttttccagagacaaaagagt

SEQ ID NO: 467759 - DNA, 201 bp, Homo sapiens
gggatccccttggccaagagggagtctgttcagttggtggggaggcttaggattttatttttagtttacaactcttttttttttttttttttttttttttwacaactcttttgtagcataacctagcttcaataattatcaatacatgactgattgtggtgtctttcctacaatcattttaattgttattggttaatttag

SEQ ID NO: 467760 - DNA, 201 bp, Homo sapiens
atctacattttattttattttatattttattttctttttcatgccatcctccaaggtacatcaaatctacattttaaaagagtagttactgatttctgatsccagggagaattggtatggcccctcagaatcaagcagtcacagttttctcaattttaagaaaaaataaggttattttctcaattgttggttttttgtcta

SEQ ID NO: 467761 - DNA, 201 bp, Homo sapiens
gaaataggaaacaatagagaaaatcaatgaaactgaagctatctcttaaaaagattaataaaattgatgaatctttagccaggctaaccaaggaaaaaagrgagaagacatacattaatatcagaaatgaaaggtgatcattattgattccatggacattaaaaggataataaaggaatattatgagcaactctgtgccta

SEQ ID NO: 467762 - DNA, 201 bp, Homo sapiens
taataaaaacagaggagagcagggctgggttgatgggagaagggatgcagagctgttttgaatatgttgaggttgacttgagaaggctgccgagcttccaraaggagcagtccaattgtcagttggaatgttcaatacacatgggtgtattgcctggacacaagggtgacctcatttataaaatgacaccacaaataacgt

SEQ ID NO: 467763 - DNA, 201 bp, Homo sapiens
tttatcttagcaatactttcaaaaaatttcatactctgcgaggcctgaattaaacacacctttgaactgtcagtttgaaacctctgcctttgtcaatgtcyttagcgtggtgggggctgagccagtggcagcaggccgggaactgattgggcaaggaggagatggagaccatgagcacagaccactactttaggaagtatg

SEQ ID NO: 467764 - DNA, 201 bp, Homo sapiens
aattatacaccatgacccaaaaggatttatcccaggtatttaaggctggtttagtattcaaaagtcaattaagataattcatcatatcaataggccaaagragaaaaatcacacaataatgtcaatagatgcagaaaaagcatttgacaaaatccaacacctattcataataaaaacttgcagtaaactaggaatagaggg

SEQ ID NO: 467765 - DNA, 201 bp, Homo sapiens
cttgagggacacagtgagggcgctgacaaggatgcatggaaggatgccgcacttgagacttgctgaggggaaacccttacagtggggctcatgggcctggrtgtgggtgttggtggtgaggggctaagcagctgttaccttccaagccctgtgtcaggcatttcattctcttacctgttgtattcctcccagcagtcctgc

SEQ ID NO: 467766 - DNA, 201 bp, Homo sapiens
gtcagccaggtgaggcggggccccacgagggaggtgggcacttcagtctcacacagcctgggcttgcctgaccctcctggtgggaagtggcaccttgtacyttgagagcttcctggtccacaaagaccctcccagctgccttccttggtgtccagaactaaggagcaaacagaaccttatgaattcctcttcatcctcaaa

SEQ ID NO: 467767 - DNA, 201 bp, Homo sapiens
tattgattctaaagtgtatatggtaaggcaaaagacccagaatagacaacataacactgaaaaagtacaaagttgaagaactgacactactcaacttcaaracttactgtaaagctactacaatcaagtgtgatattgtcaaaagaacagacaaattgatcagtggaacagaataaatagcccagaaatggacccacacaa

SEQ ID NO: 467768 - DNA, 201 bp, Homo sapiens
ggtgaggcggggccccacgagggaggtgggcacttcagtctcacacagcctgggcttgcctgaccctcctggtgggaagtggcaccttgtaccttgagagyttcctggtccacaaagaccctcccagctgccttccttggtgtccagaactaaggagcaaacagaaccttatgaattcctcttcatcctcaaataaattaa

SEQ ID NO: 467769 - DNA, 201 bp, Homo sapiens
ttcaagtgggaagatagaacagtcatccatgaaactctgagagtaatacaagggcatataccattgtccctccatatccatagggcactggttccaggacygcctgctgatggcaaaatccgcatatattcaagtctcccagttggccctgtggaactacctatatgaaacaatggcccatatatgcaggttttgcatccc

SEQ ID NO: 467770 - DNA, 201 bp, Homo sapiens
agactctgtctcaaaaaaaaaaaaaaaaaggaataagatttgtcaggtcgagtgtagctctagagtaccacaaaccattgtaatatctaaaatattttcaytcctcgaagaaacagtttttgcccccttgggggcaattatgcccaagttgagagtgcatagactcaaccgtgcccaggtctgtctctgcatgggggccac

SEQ ID NO: 467771 - DNA, 201 bp, Homo sapiens
ctgttttgacttccagggaagaacataggtctggaagcaattctgttggggtcagagatacatggggagagctgcagagcccaggatgcctatccaagatygacagggaagggggacatttcaaatgaccaggacccaccctgggttattatgtcttaacacctctgaggggccagggcctgaagccactgcccgccctga

SEQ ID NO: 467772 - DNA, 201 bp, Homo sapiens
cccaagaggcttcgctacaccagcaaggctgtcgaagccaagtcccttctgattctcctcccagatcgcagtcctgcccggagccctggtgctggcccgartctacaccactccacggaagacctgcggatgcggcagagtgcaaattacggacgtctgtgtgagtgtgtgctctgccgctctgtggcagctttattcagg

SEQ ID NO: 467773 - DNA, 201 bp, Homo sapiens
gaaatgtggtaaaaggggagagggcctcttgcatagtcagagatacctcttgccatgacaacctgtttcttttcagggtaaaatgggtcatcattcatctktaggaaattagctgtcatttagtggtgtgtcgaagggaggagttggcttgccttaacacccctaaaaatttttgtgagttttgttctagcacattggatt

SEQ ID NO: 467774 - DNA, 201 bp, Homo sapiens
taaaaaaaaaaaaaaaaagaccaaaaagggggaagattaaaaaaaaaaaaaggacaagtgccacaaacacaaaattgttgtaaacatggtagatattaatycactgatctcaataatcactttatttatttatttagagatgaagtgttgctctgtcactcaggctggagtgcagtggtgcatcttagctcactgcaacct

SEQ ID NO: 467775 - DNA, 201 bp, Homo sapiens
agcggaaaaacaaattcatgaagaagatccccaaggactcagaagcgtccaacgtgctcgtgggcgaggtggacttcctagaccagccattcatcgcgttygtgcgcctcatccagtcggccatgctgggaggagtgaccgaggtgcctgtccccaccaggtgagagccattgaaacctgtccccacgccactctcaggta

SEQ ID NO: 467776 - DNA, 201 bp, Homo sapiens
gtctttgtaggacacaaatgcgttcaagtgcacagcctctgtaaactgaccagaaccagtccatggttcatgatcttcttatcaggagggagttactaaastcagtcttttgtccaatcaaagctatagttatggcttatggagcagggggttggttagtcagcatctgctggtagatgtgctgcaaattgttctaatatt

SEQ ID NO: 467777 - DNA, 201 bp, Homo sapiens
attttggtttttaatgtatctctgggatccccttggccaagagggagtctgttcagttggtggggaggcttaggattttatttttagtttacaactctttytttttttttttttttttttttttacaactcttttgtagcataacctagcttcaataattatcaatacatgactgattgtggtgtctttcctacaatcatt

SEQ ID NO: 467778 - DNA, 201 bp, Homo sapiens
actacacttcagcctgggtgacagagtgagactctgtctcaaaaaaaaaaaaaaaaatttcatgttcatgcgtaggaaaattcaacattgttgtcagttctccccaacttgatctatagatgcaatataatcccaataaaaatcttagcaagttatttttttggatgctgacatattgattctaaagtgtatatggtaagg

SEQ ID NO: 467779 - DNA, 201 bp, Homo sapiens
aataacttaaaattctctaattgtaagtgtactggtaaatgatttttagaaaatgtatggaattgtgcaactgtcaccataatccaattttagaacatttmcatcactcccagaagatccctcatgcccctgtatacttctctggatgccactttccttcacatgacagtatcaggaggagtgggggacaaatgaggggat

SEQ ID NO: 467780 - DNA, 201 bp, Homo sapiens
gtctaacacctctttcaggaaagcagccattgaacagaaggaaagtgagaggatgctagtttaaggggactgcaggattaagggggagggagtttgctttkgttatgaacatgggagaggtacatgagtagggcccataggaaagggacctgcaagagcctggcttcccctgatggatcttcttttccttttctcctaggt

SEQ ID NO: 467781 - DNA, 201 bp, Homo sapiens
ggaggaagatgaggctcccaaccccaccctctttacagagatggatactctgcagcatgacggagaccagatggagtggaaggagtcagccaggtgaggcrgggccccacgagggaggtgggcacttcagtctcacacagcctgggcttgcctgaccctcctggtgggaagtggcaccttgtaccttgagagcttcctggt

SEQ ID NO: 467782 - DNA, 201 bp, Homo sapiens
gaggcaggagaattgcttgaacctgggaaggggaggttgcagtgagccaagattgtgccactgcattccagcctgggcgacagggcaagactccgtctcaaaaaaaaaaaaaaaaaaaaaggaaagaaaagggagttggagggaggaaggggtgggatgaagaggtgaaatacaggatatttagagtagtgaagctattct

SEQ ID NO: 467783 - DNA, 201 bp, Homo sapiens
tattgagatggagtttcgctcttattgcccaggatggagtgcaatggcgcaatctcagctcaccgcaacctctgcctcccgggttcaagcaattctcctgyctcagcctcccgagtatctgggattacatgcatgcaccaccacacccagctaatttttgtgtttttagtagagatggggtttctccatgttggtcaggct

SEQ ID NO: 467784 - DNA, 201 bp, Homo sapiens
ttaggatagaaaataagtttatctctaaaacatctcctgcactaaggagtccctgaggcaggccacgtttcaaacatgggagcaaagacaactggctttcttttttttttttttttttttgagacagagtcttgctccgtcacccaagctggagggcagtggcacgatctcggctcactacaacctccgctccaggttcaa

SEQ ID NO: 467785 - DNA, 201 bp, Homo sapiens
ctcacagtcccaaagcaaaacgaagagccgggctcaagtgggtgagcgcagtgccttctcagccccctctctgggtgtacacagccctttcccacagcttygcctctaggctgcttcctctctttgcagcccagccctttctgcctcttccatttaccagctctgtctcccagaaaccatcaggaaaggcccagctaactc

SEQ ID NO: 467786 - DNA, 201 bp, Homo sapiens
atgctgagctcccagtgcagaaatcaacaaacttggttcattcatcaactaatatttattatctgcaagccctgagcctgctagagatataaaaatggaayatggcagatgctgcccctgctctcttgggctctcagtctaattggacactgaggcaaataagggggcatttggtaatgggggcactgtgaaagcagagca

SEQ ID NO: 467787 - DNA, 201 bp, Homo sapiens
gaggtcaggagttcaagaccagcctggccaatatagtgaaaccccatctctactaaaaatacaaaaaaattaaccaggcatggtggtgggtgcctgtaatmccagctactcaggaggctgaggcaggagaattgcttgaacctgggaggcggaggttgcagggagccgagatcgtgccattgcactccagcctgggcaaca

SEQ ID NO: 467788 - DNA, 201 bp, Homo sapiens
agaagcataaatttgtgaggcatcagcatctaggtggaaatcaagcccacagaaaaggataaggttgcccctgaggtctgtgaagtgagaagagagcccaraacagagcccctaggaacttcagtatttgcaggatgggcagaggaagaggaacccacgaaagagactgagaaggggcaaccaggaggttaggaggggaat

SEQ ID NO: 467789 - DNA, 201 bp, Homo sapiens
aattaaccaggcatggtggtgggtgcctgtaataccagctactcaggaggctgaggcaggagaattgcttgaacctgggaggcggaggttgcagggagccragatcgtgccattgcactccagcctgggcaacaagagtgaaactctgtctcaaaaaaaaaaaaaaaatcctgtataatgccctcttaacatcatttccca

SEQ ID NO: 467790 - DNA, 201 bp, Homo sapiens
tgctcatacacacagctaactaaaacccagggtggtatgtgcaaagtggtgagaacaggctctagaatctaaagacatgccttcaaaccctgtctcttatragctgcatgaccttgggcaggctcctcatcctctaagggtctcagtctcctcacctgtacaatgaaatagtcacagacctacctcatgagacagatttaa

SEQ ID NO: 467791 - DNA, 201 bp, Homo sapiens
tattaaacactggaatcacttaactaatgattaactcattctgattctatattcagcaactttttggtgataatttggcttaccctgtatatctgcccatraggagagaatgcaaaggctagaggatgaacataacaaacccctataacgattgtaaatctcactgtaaattaaataaattggccttcaggtttatgcatc

SEQ ID NO: 467792 - DNA, 201 bp, Homo sapiens
cctcagtcttttatactttataatctttcaaatttactgccaagtttggtttattaacatatacatggtatgcaaagtcataatccgttgtagaaacaacttgttgtactatctcacatacatattttcatgcatgtgattttatgtagcatgaattagccaaataaattgtaagaatgggccagaatttgcttaggtgtt

SEQ ID NO: 467793 - DNA, 201 bp, Homo sapiens
tgaggctccaggtggaatccttcctggcctcctcctggcttctggtggtggccagcagtccttggtgttcctggctggcagccgcatcacccccggctctrcctctccaccacatggcctcctgtgtgtctgtcttcacagagcactttcctctttgtgtatggaccccagtcatgttggaatagggcccaccataatgac

SEQ ID NO: 467794 - DNA, 201 bp, Homo sapiens
tactgccaagtttggtttattaacatatacatggtatgcaaagtcataatccgttgtagaaacaacttgttgtactatctcacatacatattttcatgcaygtgattttatgtagcatgaattagccaaataaattgtaagaatgggccagaatttgcttaggtgtttctcccgtttttttgagacagagtcttgctctgt

SEQ ID NO: 467795 - DNA, 201 bp, Homo sapiens
cccagacaccacatcattccatctgtaaatatttcattatgtctctaaaagataaggcctctttctttctttttagagatagggtctttctctgtcacttmagcttcattgcagtggtgcgatcacagctcactgcagcctcaaactcctggacttaatcctcctacctcagcctcctgagtagctgggactacaggcata

SEQ ID NO: 467796 - DNA, 201 bp, Homo sapiens
taacacagtacaaatagttgaagtcctgagaggtggagaggactgcatgtctttgctatctgctatctggagttagtagaggatgtttcaaagaggaagcwttgctcttatcactccttcaggtggagttgcatttgtatgggcagaagactgaagaatgggatgtcaggggagagagctgcctgagactgtctggcctag

SEQ ID NO: 467797 - DNA, 201 bp, Homo sapiens
actcctttttgccctcagctgtccagggatcttctgtcctggctttagtctcctacagggcccctccatattctgagtagaaagggcattataggagactrgagcctagaggagagacctgaggatttaacctcagaactccttatgaagattttccaccatctcccctgtgttcagcccgctctgcatcatggtcttgag

SEQ ID NO: 467798 - DNA, 201 bp, Homo sapiens
ccaatgttagttctttttagaaataattctaagaataatttttatattgcattttcacattgaaaatcagtcagatttgcttcggcctcaaagagtgtgtytatgtaaaattaaatgagtgctggcagtgagctgcactttttttttttgcctaaatgggaaagggttaaatgtgagcatagtcccatcgaatctgtaagt

SEQ ID NO: 467799 - DNA, 201 bp, Homo sapiens
gtgtgcaccaccacacccagctaatttttgtatttttagtacagacagggtttcaccattttggccaggatggtttcgatctcttgacctcgtgatctgcytgccctggcctcccaaagtgctgggaactcaggggtgagccaccgtgcctggccactttggccattctgagaatcatctatacacaggaaaaaacaaacc

SEQ ID NO: 467800 - DNA, 201 bp, Homo sapiens
gagaattggttgagcccgggaggtggaggctgcagtgagccgagattgcaccactgcactccagcctgggcaagacagagtgagactccgtgccccccccmaaaaaaaaaaacaccttcgaatcggccaggcatggtggcccatgtctgtaatcctaacactttgggaggccgaggtgggaggatcacttgagaacaatag

SEQ ID NO: 467801 - DNA, 201 bp, Homo sapiens
ctcagtcttttatactttataatctttcaaatttactgccaagtttggtttattaacatatacatggtatgcaaagtcataatccgttgtagaaacaacttgttgtactatctcacatacatattttcatgcatgtgattttatgtagcatgaattagccaaataaattgtaagaatgggccagaatttgcttaggtgttt

SEQ ID NO: 467802 - DNA, 201 bp, Homo sapiens
ggataaacactgtggcctgggcccgtggagagatcgctggggctgcagcctgtgtggagagaccgcttctccttcctatgctgaaccacacattccttgtrcccccagggagtgatggagagcttcctgggcactgccatggctggctccttgttctgcctcttctcgggacagcctctcatcattctcagcagcacgggg

SEQ ID NO: 467803 - DNA, 201 bp, Homo sapiens
gggttggctaaacatgcatattcagtaggttacaggaggatctatgaatattcatgaaggtggtcctgatgcatgtgtattgaacaaacatgcatattacrcatgcccatgttcaccttgggatggagccataacatttaaatgtattacattaggcattatacgttagaaggtctttgtaggacacaaatgcgttcaagt

SEQ ID NO: 467804 - DNA, 201 bp, Homo sapiens
agggaaagttgaggaggtgggacagcaggccaggcgacaagtgccctgggacaagggagagaggaaagggcccctctctgtttgctcccactcagccaacrcggcctgaccgaggctggttcgtggccccctttgggaagaacccgtggtgggtatacccagcaagcatcctgcccgccctgctggtgaccatcctgatct

SEQ ID NO: 467805 - DNA, 201 bp, Homo sapiens
aaaatattcaagccttcatctatttgccaggtattgagcagcgctgggatcaccaaaagatcaaaattaccctaagatgagaagtaaaggagagaaaggctttctattaagacactggaacctcacaaggttccaaagccttaggaccaaagacatgtttcatgttgtctttcttttctgataagaaaggagccaagggtt

SEQ ID NO: 467806 - DNA, 201 bp, Homo sapiens
tcagtcttttatactttataatctttcaaatttactgccaagtttggtttattaacatatacatggtatgcaaagtcataatccgttgtagaaacaacttgttgtactatctcacatacatattttcatgcatgtgattttatgtagcatgaattagccaaataaattgtaagaatgggccagaatttgcttaggtgtttc

SEQ ID NO: 467807 - DNA, 201 bp, Homo sapiens
aggaggctgaggcacaagaattgcttgaacactggaggcggaggttgtagttagctgagattgcgtcagtacactgggcgacagagcaagactgtgtctcaaaaaaaaaaaaaaaatccaaaaaactgagaggcctttaaattttcttctctcctttctccgtccccactggcctctgtcagatgaaagaagcgggatcaa

SEQ ID NO: 467808 - DNA, 201 bp, Homo sapiens
gagcagggatcccctatgggcagagttccactcctacaaaggagtgggagttccaggaagatccccagtggggactctgggctgcctgggggactttgccwaggccagtagtcggggaatgacggagtcccaggtgctggctctgtgtcaggccctgggggtgtgggacagagaacatgattaaatgaggcgccagctgtc

SEQ ID NO: 467809 - DNA, 201 bp, Homo sapiens
cagctgtccttgagcttgggatttgttggagagagaagaccagcacacatggcttcatctatcctgtgatccacaagcacctttaaagatgggatagggaytggggctggcagagagacagaaaagaatctccctgtggcgagaacagtggtagttaattagactgtccaatagtgcatcttcttcctgtggtctcccatg

SEQ ID NO: 467810 - DNA, 201 bp, Homo sapiens
gcatgctgggccagctaccccagccagagaaggggcagtacagccccagtgaccctcatcttcacccctgcccacatcccagttctgctgactctctgttyccccaaatatccagtttcctagctgcctctgtggtcaggagccactgtcatccagaacagggtggccaagggccgccccaggcagaggccgatccaaagc

SEQ ID NO: 467811 - DNA, 201 bp, Homo sapiens
ggagttcgagaccagcctggccaacaaggtgaaaccccgtctctactaaaaatacaaaaaaattagccaggtgtggtggtacgcgcctgtaatcccagctmctcgggaggctgaggcaggagaatcacttgaacccgggaggcagaggttgcagtgagccgagatcatgctattgcaccccagcctgggcaacagagcaag

SEQ ID NO: 467812 - DNA, 201 bp, Homo sapiens
atgcaaaatatacagttacgtgaagaggaaatctgatgaaggaaaagatgttcaatctcactagtaatcagaagagtgcaaatgtgagataatttttcaaytaccaaatgaacaaaggtgaaaaagaatgaaaataccaaagtctgggagactttagggaaatgtaagatctcattggtggcagtgggcactgacataagc

SEQ ID NO: 467813 - DNA, 201 bp, Homo sapiens
attgactgctctgcctacacacatcctagttggcaatttaacttaatatttttcaaagattagggttttttttttttttgagatggggtcttgctctgttrcccaggctggaatgtagtggtgtgatcgtatcatcactgcagcctcaaattcctgagctcaagtgatcttcctgcctcagcctctcgagtagctgggact

SEQ ID NO: 467814 - DNA, 201 bp, Homo sapiens
cttccagccacccctaagtttggtggaaggcaaaaacaaagtcagcccctcatgtcagtgtcccgggcacaaataaattaataacaacagtaacaaaatcmatcaatatttaagctccacaccacatgcactacactgtgccaggcattttctgtgaatcacaaaggcactattttcattcccattttactcatgagagaa

SEQ ID NO: 467815 - DNA, 201 bp, Homo sapiens
ccagctactcgggaggctgaggcaggagaatggcgtgaatccgggaggcagagcttgcagtgagcggagatcacgccactgcactgcagcctgggtaacakaacaagactctgtctcaaaaacaaaaaaaaaaagaaagaaagaaagaaaaaaaaaagagcaccaacgatctcaccagagtagggagtccagattctagaa

SEQ ID NO: 467816 - DNA, 201 bp, Homo sapiens
aacactgaggcttacagcagttaaataacacaccaaagtctatacagctgaaagacagaactttgatttgacctaggcagtctaactccagagcccttaayttggaagtaatttaggaactagtcagtattctggaacattatttggagaggaaaaccacttttactcatgcatacagacagtgcaactgtgataagaaag

SEQ ID NO: 467817 - DNA, 201 bp, Homo sapiens
aaaaaaaaaaagaaagaaagaaagaaaaaaaaaagagcaccaacgatctcaccagagtagggagtccagattctagaacttaccctccctgtctttaaggttttttttgttgttgtttgtttgtttgttttttgagacaaagtctttttatatattctcctcattctgaacatgcaggactgaactgatgttcagcatttt

SEQ ID NO: 467818 - DNA, 201 bp, Homo sapiens
tttctcttatcttctgtattacaagtgggttggttggatggccaggtgtggtggcacacacctgtaattccagcagtttgggaggctgaggctgatggatygaggccaggagtttgagaccagcctggccaacatggagaaaccctatctcgatcaaaaatacaaaaattagccgggcgtggtggcacatgcctgtagtcc

SEQ ID NO: 467819 - DNA, 201 bp, Homo sapiens
aaaaaaaaaagaaagaaagaaagaaaaaaaaaagagcaccaacgatctcaccagagtagggagtccagattctagaacttaccctccctgtctttaaggttttttttgttgttgtttgtttgtttgttttttgagacaaagtctttttatatattctcctcattctgaacatgcaggactgaactgatgttcagcatttta

SEQ ID NO: 467820 - DNA, 201 bp, Homo sapiens
acatttgggtggagggcttgtctccagtacctctcacatcagaccccactggctctgcctgtgtgaccttcctcccatgaagtgacactagccagagagaytggagagaggccaccttgatagtctctgctggaaaattccagaagtgatgaatttccttgggaggtcccctgggggtaatgtgggggcatggaagtctcc

SEQ ID NO: 467821 - DNA, 201 bp, Homo sapiens
gaggcttcgctacaccagcaaggctgtcgaagccaagtcccttctgattctcctcccagatcgcagtcctgcccggagccctggtgctggcccgagtctayaccactccacggaagacctgcggatgcggcagagtgcaaattacggacgtctgtgtgagtgtgtgctctgccgctctgtggcagctttattcaggctgtg

SEQ ID NO: 467822 - DNA, 201 bp, Homo sapiens
aaaactgagagtgagttggcagtgggagatgtggttcaaagggattcctttaaaaactagatgtgatatgctcccaggcatttcagaaacagacccgatcwttcttttctccctcctctctcctcgccagctcttcagtgacgtggcctacaaagcccgcaatcgggaagatctgatcgcaggaattgatgaatttctgga

SEQ ID NO: 467823 - DNA, 201 bp, Homo sapiens
tacaccctgaccatgtgttcttctctgccagggaacagagagtaaccggcatcatcgtcttcatcctgacgggaatctctgtcttcctggctcccatcctraaggtgaggtcctgcactgtcacctagggcctcgttgcctgagaaagcagagcggatgccttaggcagggagggggtccccacatggctagggatcactg

SEQ ID NO: 467824 - DNA, 201 bp, Homo sapiens
aaagaaagaaagaaagaaaaaaaaaagagcaccaacgatctcaccagagtagggagtccagattctagaacttaccctccctgtctttaaggttttttttgttgttgtttgtttgtttgttttttgagacaaagtctttttatatattctcctcattctgaacatgcaggactgaactgatgttcagcattttacagacaa

SEQ ID NO: 467825 - DNA, 201 bp, Homo sapiens
caggaccaaactaggctgggccactgggcacaggctctctgtctttcccaaagtgacctcgagttcttatgagaatcagcagatcctgacaggggctcagcctagaacactgaggcagaggaacttccttagccttcctggtctctgcaactccccacccagcctgtgagcctgagaagactcgggtcaccccctccccca

SEQ ID NO: 467826 - DNA, 201 bp, Homo sapiens
cgttgcctgagaaagcagagcggatgccttaggcagggagggggtccccacatggctagggatcactggcctatcagccccctaagaaaggcacagtcttrgccgggcatggtggctcacacctataatcccagcactttgggaggccgaggcaggcggatcacctgaggtcaggagttcaagaccagcctgaccaacatg

SEQ ID NO: 467827 - DNA, 201 bp, Homo sapiens
atcacttgagtccaggaggtcgaggctgcagtgagccatgatcatgccactgcactccagcctgggcaacagagtgagacctcttctcaaaaaaaaaaaamaaaaacctcattcagaggtgaccttgtaagaaacaaacgctaaagaatgatgattctggctgatgtatttacaatggaaaatatttctggcttgagaatt

SEQ ID NO: 467828 - DNA, 201 bp, Homo sapiens
catccaggaggaactggctccccagaaacttctccctcccccaaccccgctcctgcagaaggctgccggctaccatctggacctgttctgggtgggcatcstcatggctttgtgctcctttatggggctcccctggtacgtggctgccacggtcatctccatcgcccacatcgacagcctcaagatggagacagagaccag

SEQ ID NO: 467829 - DNA, 201 bp, Homo sapiens
taacagaggaaggaactattgggcagttcaaataattggctatcactgttctcatgggaagcccaccttccttccctctgccagcctaaatccccagcccrtgtttgaagactctcaccggtcatggaggacagaggtgaaactgctccccctccagcaaattccaagctaagtgacacatggaacctcacctaataatgc

SEQ ID NO: 467830 - DNA, 201 bp, Homo sapiens
cgtattcctcttgcatagtgttggctctagggttagagaaggaaaagaaaggaaatggtgggggaagcccggagaaatatggtgctcaaacctgctccacrtctgacatttttcattttcctgccaggaaaaagatcttccagttggagttactcactctgattcttccttcagtgacacagaacttgaccgaaggtaaac

SEQ ID NO: 467831 - DNA, 201 bp, Homo sapiens
acacatctctgaggccccgtattcctcttgcatagtgttggctctagggttagagaaggaaaagaaaggaaatggtgggggaagcccggagaaatatggtkctcaaacctgctccacatctgacatttttcattttcctgccaggaaaaagatcttccagttggagttactcactctgattcttccttcagtgacacagaa

SEQ ID NO: 467832 - DNA, 201 bp, Homo sapiens
catctcctggccctcttctatgttgtttcagaccacatcagtccaaacatggcccaccaggcctcccatgttttccagtggctgttgaaatggttgagggytcagaaccaagcttttccctttagagaaataggtagcatagcacttgggttataagtcaggcataattggaggtcctcgtggtggttgtgctgtgcctct

SEQ ID NO: 467833 - DNA, 201 bp, Homo sapiens
tcctctccccgctcctcttctctttttctctccttctcctctcctttctctcttctgcctactctttctccttctttacaatgctttaaatatataaaaamcatgcttagctagctggccatacaaaaacaggctgtggggtgcttggagcccatgagacatgatatttcaaccccaatctggtataaagcaggcatgtgc

SEQ ID NO: 467834 - DNA, 201 bp, Homo sapiens
ctctgtctcaaaaaaaaaaaaaaagaaagccaaattgttgtgttggtgtttatcctcttttcccactgtttttctccagccccagttccctcctccctcgrttataaagattcccatggaaagtgtccaatcagatccccaaaacggtatccactgcattgccagtaagtaaaacacatgatgtctctcccttcttactac

SEQ ID NO: 467835 - DNA, 201 bp, Homo sapiens
tgcctcggcccagtccaggatgggctggggcatctgcttgtcttggtctggggtgttgagggctcttctgtttatgtgaatatcctcagggtgggccagartgaatgagactccctgtccagggaaaaggtgactggccatgcccactctttccatcactgtgggctttacggccgtgatcacagcaagcgggttcctgtg

SEQ ID NO: 467836 - DNA, 201 bp, Homo sapiens
gggaatggctggtagggggcggggtgtgggtttgaggtgagaggtgacagacaggttttacatgcacctcgtcagggatacacagacaggcgagctggggraaagaaaggagcgaacttagaaagtgaagtgaaaaagaaaaagcagtgaaggactattttccttcaggtacttttactaaaatgccaagatgttaacaag

SEQ ID NO: 467837 - DNA, 201 bp, Homo sapiens
ttaaagaataactgtagttctccagcccatggcctttctgaggctccccacttcggctgtcacaggctccgtccctcttggtcactggtaggcatggtcaytcacctgaggggccagacaagaggaactacggtggagggaaagtgaataatggcttatgggagcttcgagacggctccaaagacaccacaaaaagtccct

SEQ ID NO: 467838 - DNA, 201 bp, Homo sapiens
actttttttttttgcctaaatgggaaagggttaaatgtgagcatagtcccatcgaatctgtaagtcagaaagcacactctggagacagtgtgaagaacacrgcctgagcctccaagggcgaagggctggaagtaaaaaatggttgtgaaatatctgagctccttggactgggctctacaaaggttttctaatatgtatgat

SEQ ID NO: 467839 - DNA, 201 bp, Homo sapiens
ccaaggttgcttcttaagttattcctgcctaggcaattgactgctctgcctacacacatcctagttggcaatttaacttaatatttttcaaagattagggttttttttttttttgagatggggtcttgctctgttgcccaggctggaatgtagtggtgtgatcgtatcatcactgcagcctcaaattcctgagctcaagtg

SEQ ID NO: 467840 - DNA, 201 bp, Homo sapiens
gagccgctgagagcagcacctttgggttcccgattctgcttcaggacctggactttggtttaactttcctcaacttgcatttggcagattagaaaagataycaaagcaacaagttatttcaggcctagctgacctttaataaaaagcacatatgggctgggtgcagtgactcatgcctgtaatcccagcactttgggaggc

SEQ ID NO: 467841 - DNA, 201 bp, Homo sapiens
aagaggctccttacctcttctttctgttttcacacaccttccctgcagcaatgagcatagaatggcctggctatttgaggcagggaagggagagaggtaargggagtatcaggctggagaaggcattggctaatatttcagaacataatcttgcaaggcatataaaaatatcttatacaagatgtgcttcctgttttaact

SEQ ID NO: 467842 - DNA, 201 bp, Homo sapiens
gccacagaggagaatgtagacttgggggagggcaagccactccccacagttcaccagctaaatcaccatgctcttttgattatgatagaagccaagaaaaratgggacaatttagattcagaacagaaagtaaaatagttttttgacagccatctcctctgatttctataataaatatactcttcctgtgtatagtccctt

SEQ ID NO: 467843 - DNA, 201 bp, Homo sapiens
atagggaaggggtgggcacctaaacaccagatgattctatcacaagggctctgatgactaaaacgtgtcatacatctttaaagctagctgtgtcaccaccwccttgctgctttgggcatgcagtctgcttgggcaaggacccctgtgtgtctgtttgctaggatagcactctgatccttggtcttacaggcttaaggtgtt

SEQ ID NO: 467844 - DNA, 201 bp, Homo sapiens
atggtaaagtgggcacgggcttccccctcctgcctggcaggttggcctgggcaacccagaggtgcagcgcaacctcccctcctgccaccttctgccttccygtcagctgtggcctggctccctcgggtcacggaggctggcacagaatgacctgatttgagttgtgagtccaggccagatggtgtggggtggggcagagag

SEQ ID NO: 467845 - DNA, 201 bp, Homo sapiens
ttcccatcagcactgtccatcataggtacctcaagatcttgagtttctcagactcctcccccactcctatttctctcttccctggccctcccatgcctcayaccccctagccctggctgagcaccttctgggtgaaggagtaactaagcccgaagccacacatctctgaggccccgtattcctcttgcatagtgttggctc

SEQ ID NO: 467846 - DNA, 201 bp, Homo sapiens
attaataatgacctcagccaggcgtggtggcttactcctgtaatcccagcactttgggaggctgaggtgggaggattgcttgagcccaggagttcaagacmagcctgggcaacatattgagacctcatctctacaaaaaattaaaaagtagcctggtatggtgtggcacctgcctatagtcccagatatttgggaggctga

SEQ ID NO: 467847 - DNA, 201 bp, Homo sapiens
ggaagggggtaaaggggcagttttgccagtcctctcacaggtcctcagctgccaccacccctgctgctgtggagacccggcttcctgcttgaggttctgcwgcagccactgagcctttctctctctagtgcacctgagatttctctctcaccctctcacttctctctctctcttgctcacttctctctctctctctctctc

SEQ ID NO: 467848 - DNA, 201 bp, Homo sapiens
cccagggccactctcacctttctggaggatactcttccctctgaaagttctgccaagttgtagccctgcttagatcaggaacttcctgaatggggtgtgtktccacattgccagggtttggggctcatgaagtttaaaacttgcagcaggaggccaaacatggtggtacatccctgtagtccggctactcaggaggctgag

SEQ ID NO: 467849 - DNA, 201 bp, Homo sapiens
cctccagcccccctcccgtgcatccttaaggcctgagcagggggcttcccctctctgagaccccacccaggcaccccttcccctagtcccaggacccagcrggccctcggggtctggctgcctggctgagcccccgctgtccccctagttctgggaacgctgcaagctcttcctgatgccagccaagcaccagccggacca

SEQ ID NO: 467850 - DNA, 201 bp, Homo sapiens
ccctgtgggaaaaggtcccaatttgcctggcaggccctggggtggggcccaaatgccaggcctgaggaagccccgtttccctggctcccttttcctcagartggatcagtgactacgcagactctgtgcccgaccctgaggccctgagggtggaagtggacacgttcatggaggcatatgaccagaagatcgctgaggtag

SEQ ID NO: 467851 - DNA, 201 bp, Homo sapiens
ggcgctggacccctggcagcgccacccatggtgcagggaggctttgggatggccctgcggatgctcacacttggcttccctctccctgcggcaggagagcmtgtcccgcctcctgtccacctgtggcctcgtccagtctgtagagttgcaggagaagccggacctggctgagagcccaaaggagtcaaggtcgaagttttt

SEQ ID NO: 467852 - DNA, 201 bp, Homo sapiens
gagttccagaccagcctagccaacatggtgaaatcccgtctctactaaaaaataaaaaatgagccaggcatgatggcatgtgtgggtagtcctggctactmgggaagctgaggcatgagaatcccttgaacccgggaggtgtaggttgcagtgagccaagatcgcgccactgcactccagcctgggcaacagagtgagact

SEQ ID NO: 467853 - DNA, 201 bp, Homo sapiens
aaggaggcagtgccggcaggtccgtgccctccccgccatccttagccccaacactgtgctgggaggaggggagcagccctcccctgcgggggctcagggcrgttctgactttgggaggagggtgtggagggcgcgctgctggaggctgcaggaggtcccaccggaggatgggatcaccttccttgcaggaagaagctaagg

SEQ ID NO: 467854 - DNA, 201 bp, Homo sapiens
gccggacctggctgagagcccaaaggagtcaaggtcgaagttttttcatcccaagccagttccggtgagccgccaagcccggggttccactagagtgaggsgggtggggcactgtccccagtgtgttgggggagctggcagtgggacatcagagcattctctggtcctgagcccatcctcaccgtgtgtggtgtaagagac

SEQ ID NO: 467855 - DNA, 201 bp, Homo sapiens
gtgcagggaggctttgggatggccctgcggatgctcacacttggcttccctctccctgcggcaggagagcctgtcccgcctcctgtccacctgtggcctcrtccagtctgtagagttgcaggagaagccggacctggctgagagcccaaaggagtcaaggtcgaagttttttcatcccaagccagttccggtgagccgcca

SEQ ID NO: 467856 - DNA, 201 bp, Homo sapiens
gcaccaagtccacctggcctcagaagaggactctttttgtcctcaatgtgcccccatactgcacagaggtgagctagtgtctgtctgggaggagacctgtkggctcaaggtgggggctcccatggcctccaccaagtccttggtggtgagacggacacagctaatgggagccccagaggagagtgtcaggagggctaccgt

SEQ ID NO: 467857 - DNA, 201 bp, Homo sapiens
ttcatcccaagccagttccggtgagccgccaagcccggggttccactagagtgaggggggtggggcactgtccccagtgtgttgggggagctggcagtggracatcagagcattctctggtcctgagcccatcctcaccgtgtgtggtgtaagagactgtctgggtgacaaagcctgcgattctttgccagatttgccaca

SEQ ID NO: 467858 - DNA, 201 bp, Homo sapiens
ctgaccttttttgaagtgcagcatgtgtgccgggaagggccccagtggcagatgtccagctcgctgcatcccagagacagaacatagctgtgtagtcagcrcccaggtggagacacagcagcacatcccagaacccccgctgcctccaccacagacaaccaccatcccaactgtcatagcatagggtcactactgctgatt

SEQ ID NO: 467859 - DNA, 201 bp, Homo sapiens
gcctggccatccctcccctcccatttcctttccagctattccaatcaagttctctgaaaagcaacaggcttctcactacctctatgtgagagcacacggcrttcgacaaggcaccaagtccacctggcctcagaagaggactctttttgtcctcaatgtgcccccatactgcacagaggtgagctagtgtctgtctgggag

SEQ ID NO: 467860 - DNA, 201 bp, Homo sapiens
tcgacaaggcaccaagtccacctggcctcagaagaggactctttttgtcctcaatgtgcccccatactgcacagaggtgagctagtgtctgtctgggaggrgacctgtgggctcaaggtgggggctcccatggcctccaccaagtccttggtggtgagacggacacagctaatgggagccccagaggagagtgtcaggagg

SEQ ID NO: 467861 - DNA, 201 bp, Homo sapiens
ggctgtgggaaggtggcgccccagagggagggcggtggtggcctgtccttggccactctgtagaggccaggctccctgtttccctgctggatcctgggctkcctggctgggtgacacatgtagtctccacatgtcctacagtggagaaggaggcagtgccggcaggtccgtgccctccccgccatccttagccccaacact

SEQ ID NO: 467862 - DNA, 201 bp, Homo sapiens
ctctgaaaagcaacaggcttctcactacctctatgtgagagcacacggcgttcgacaaggcaccaagtccacctggcctcagaagaggactctttttgtcytcaatgtgcccccatactgcacagaggtgagctagtgtctgtctgggaggagacctgtgggctcaaggtgggggctcccatggcctccaccaagtccttg

SEQ ID NO: 467863 - DNA, 201 bp, Homo sapiens
accagaagatcgctgaggtagaggccccgcggggtcggccgagccccgcatcgcccgtgtggctgtgggaaggtggcgccccagagggagggcggtggtgkcctgtccttggccactctgtagaggccaggctccctgtttccctgctggatcctgggctgcctggctgggtgacacatgtagtctccacatgtcctacag

SEQ ID NO: 467864 - DNA, 201 bp, Homo sapiens
gcctggcaggccctggggtggggcccaaatgccaggcctgaggaagccccgtttccctggctcccttttcctcagagtggatcagtgactacgcagactcygtgcccgaccctgaggccctgagggtggaagtggacacgttcatggaggcatatgaccagaagatcgctgaggtagaggccccgcggggtcggccgagcc

SEQ ID NO: 467865 - DNA, 201 bp, Homo sapiens
gtggtggcctgtccttggccactctgtagaggccaggctccctgtttccctgctggatcctgggctgcctggctgggtgacacatgtagtctccacatgtyctacagtggagaaggaggcagtgccggcaggtccgtgccctccccgccatccttagccccaacactgtgctgggaggaggggagcagccctcccctgcgg

SEQ ID NO: 467866 - DNA, 201 bp, Homo sapiens
ctgctggatcctgggctgcctggctgggtgacacatgtagtctccacatgtcctacagtggagaaggaggcagtgccggcaggtccgtgccctccccgccmtccttagccccaacactgtgctgggaggaggggagcagccctcccctgcgggggctcagggcagttctgactttgggaggagggtgtggagggcgcgctg

SEQ ID NO: 467867 - DNA, 201 bp, Homo sapiens
tcccaatttgcctggcaggccctggggtggggcccaaatgccaggcctgaggaagccccgtttccctggctcccttttcctcagagtggatcagtgactaygcagactctgtgcccgaccctgaggccctgagggtggaagtggacacgttcatggaggcatatgaccagaagatcgctgaggtagaggccccgcggggtc

SEQ ID NO: 467868 - DNA, 201 bp, Homo sapiens
tgaggaagccccgtttccctggctcccttttcctcagagtggatcagtgactacgcagactctgtgcccgaccctgaggccctgagggtggaagtggacaygttcatggaggcatatgaccagaagatcgctgaggtagaggccccgcggggtcggccgagccccgcatcgcccgtgtggctgtgggaaggtggcgcccca

SEQ ID NO: 467869 - DNA, 201 bp, Homo sapiens
ggctttgggatggccctgcggatgctcacacttggcttccctctccctgcggcaggagagcctgtcccgcctcctgtccacctgtggcctcgtccagtctrtagagttgcaggagaagccggacctggctgagagcccaaaggagtcaaggtcgaagttttttcatcccaagccagttccggtgagccgccaagcccgggg

SEQ ID NO: 467870 - DNA, 201 bp, Homo sapiens
ccgaccctgaggccctgagggtggaagtggacacgttcatggaggcatatgaccagaagatcgctgaggtagaggccccgcggggtcggccgagccccgcrtcgcccgtgtggctgtgggaaggtggcgccccagagggagggcggtggtggcctgtccttggccactctgtagaggccaggctccctgtttccctgctgg

SEQ ID NO: 467871 - DNA, 201 bp, Homo sapiens
cacgcctgtaatcccagcattttgggaggccgaggcgggcggatcacctgaggtcaggagttcaagaccagcctggccaacgtggcagaaccctgtctctwctcaaaatacaaaaattagccacgtgtggtggtggtgggcgcttgtaatcccagctgctcgggagactgaggcatgagaatcacttgcaacccgaaggtg

SEQ ID NO: 467872 - DNA, 201 bp, Homo sapiens
gtgactacgcagactctgtgcccgaccctgaggccctgagggtggaagtggacacgttcatggaggcatatgaccagaagatcgctgaggtagaggccccrcggggtcggccgagccccgcatcgcccgtgtggctgtgggaaggtggcgccccagagggagggcggtggtggcctgtccttggccactctgtagaggcca

SEQ ID NO: 467873 - DNA, 201 bp, Homo sapiens
acagaacatagctgtgtagtcagcgcccaggtggagacacagcagcacatcccagaacccccgctgcctccaccacagacaaccaccatcccaactgtcayagcatagggtcactactgctgattcaggtagtaaaacttgtcataggaaatcagaataacagcaagaatgtccccacctgtctccagtgagagagcagga

SEQ ID NO: 467874 - DNA, 201 bp, Homo sapiens
ggggctcagggcagttctgactttgggaggagggtgtggagggcgcgctgctggaggctgcaggaggtcccaccggaggatgggatcaccttccttgcagsaagaagctaaggccaaggaggaggagggggtccctgacgaggagggctgggtgaaggtgacccgccggggccggcggcctgtgctcccccggactgaggc

SEQ ID NO: 467875 - DNA, 201 bp, Homo sapiens
ggccatccctcccctcccatttcctttccagctattccaatcaagttctctgaaaagcaacaggcttctcactacctctatgtgagagcacacggcgttcracaaggcaccaagtccacctggcctcagaagaggactctttttgtcctcaatgtgcccccatactgcacagaggtgagctagtgtctgtctgggaggaga

SEQ ID NO: 467876 - DNA, 201 bp, Homo sapiens
cgtgccctccccgccatccttagccccaacactgtgctgggaggaggggagcagccctcccctgcgggggctcagggcagttctgactttgggaggagggygtggagggcgcgctgctggaggctgcaggaggtcccaccggaggatgggatcaccttccttgcaggaagaagctaaggccaaggaggaggagggggtccc

SEQ ID NO: 467877 - DNA, 201 bp, Homo sapiens
gcatatgaccagaagatcgctgaggtagaggccccgcggggtcggccgagccccgcatcgcccgtgtggctgtgggaaggtggcgccccagagggagggcrgtggtggcctgtccttggccactctgtagaggccaggctccctgtttccctgctggatcctgggctgcctggctgggtgacacatgtagtctccacatgt

SEQ ID NO: 467878 - DNA, 201 bp, Homo sapiens
tgaattacgtgttttcttccagattgtacatgtccataatttaaaagtaggaaagtataagaaaataaaaagtgcctctaattctatccaaacacaactgktaattttttttttttttttttttttttacaaaaactaagctaagggaattgctggatttatttatttatttatttatttatttaatttatttatttattt

SEQ ID NO: 467879 - DNA, 201 bp, Homo sapiens
gcctcctgtccacctgtggcctcgtccagtctgtagagttgcaggagaagccggacctggctgagagcccaaaggagtcaaggtcgaagttttttcatccmaagccagttccggtgagccgccaagcccggggttccactagagtgaggggggtggggcactgtccccagtgtgttgggggagctggcagtgggacatcag

SEQ ID NO: 467880 - DNA, 201 bp, Homo sapiens
tcctcatcaagaaggatgtggatgaagcttacatgaacaaggtagagctggagtctcgcctggaagggctgactgacgagatcaacttcctcaggcagctrtacgaaaaggagatccgggagctgcagtcccagatctcggacacatctgtggtgctgtccatggacaacagccgctccctggacatggacagcatcattg

SEQ ID NO: 467881 - DNA, 201 bp, Homo sapiens
gctggaggctgccctgcagcgggccaagcaggacatggcacggcagctgcgtgagtaccaggagctgatgaacgtcaagctggccctggacatcgagatcrccacctacaggaagctgctggagggcaaagagagccggctgaagtctgggatgcagaacatgagtattcatacgaagaccaccagcggctatgcaggtgg

SEQ ID NO: 467882 - DNA, 201 bp, Homo sapiens
gtgatgggaagctggtgtccgagtcctctgacatcctgcccaagtgaacagctgtggcagcccctcccagcctacccctcctgcgctgccccagagcctgrgaaggaggccactattcagggtagcactgggaacaggagacccacctgaggctcagccctagccctcagcccacctggggagtttactacctggggaccc

SEQ ID NO: 467883 - DNA, 201 bp, Homo sapiens
gcagctgcgtgagtaccaggagctgatgaacgtcaagctggccctggacatcgagatcgccacctacaggaagctgctggagggcaaagagagccggctgragtctgggatgcagaacatgagtattcatacgaagaccaccagcggctatgcaggtggtctgagctcggcctatgggggcctcacaagccccggcctcag

SEQ ID NO: 467884 - DNA, 201 bp, Homo sapiens
cacctacaggaagctgctggagggcaaagagagccggctgaagtctgggatgcagaacatgagtattcatacgaagaccaccagcggctatgcaggtggtytgagctcggcctatgggggcctcacaagccccggcctcagctacggcctgggctccagctttggctctggcgcaggctccagctccctcagccgcaccag

SEQ ID NO: 467885 - DNA, 201 bp, Homo sapiens
tgtttttcaatgggtgatggctgcctccatcctgcgtctccatcacgcccggactctgcagaggaagagaaggccggaccgttccttagcccacagaaggmgtgactggcatatcttcactcccatcatgagacgggatgcagaaacgcatatcttttttccttagaagtgtgccagcagttagagccttgaattcggaaa

SEQ ID NO: 467886 - DNA, 201 bp, Homo sapiens
tgtacaccacttatgtgtgcgtcactgttactgttgttttttttttttttttttttttgagacggagtctcgctctgttgtccaggctggagtgcagtggygcaatcttggctcactgcaacctccgcctccctggttcaagcaattctcctgcctcagcctcccaagtagctgagattacaggtgcccactaccacgcct

SEQ ID NO: 467887 - DNA, 201 bp, Homo sapiens
caagggttttgagtttctgggttcttggctacattgatccagttgtacaccacttatgtgtgcgtcactgttactgttgttttttttttttttttttttttgagacggagtctcgctctgttgtccaggctggagtgcagtggcgcaatcttggctcactgcaacctccgcctccctggttcaagcaattctcctgcctca

SEQ ID NO: 467888 - DNA, 201 bp, Homo sapiens
tcggtgggaccgggccgaccgcccagctcgcgctaaagcccacgtaacagaaacccgctcccatgacacgggtcgccagggttcccgctccccagagaacrggacttccggcggaaatttcttccgggagcggaggcgcgggactgacctggccccgccccctcctcgtttatctccaattgaccaatcacagctcagctt

SEQ ID NO: 467889 - DNA, 201 bp, Homo sapiens
gtgggtatgggcggaggctgaggttacagcctgggcaaagcaggccagctcccgtcctcaccggctgtctcctcgagcagacaagcggacccagtgagacycgctacgtggtggcacaatgcgagtccccatgactgctcaccctaacgaaggcgcaggatgcggtaggggctttgcggacctcactgcagccaatcctga

SEQ ID NO: 467890 - DNA, 201 bp, Homo sapiens
atcaaagatcaaaccttattgaatagattttaggggctcatctagataataaatgagggaaatttcagtttctgtaaaaattaaatctgcacatggaggtragacgtttcctggaacaaggaaaaccctctggattgaagatgatctttaaggagaaaaaagagagaatcacgtgacaaaacttcatgatggactcatcta

SEQ ID NO: 467891 - DNA, 201 bp, Homo sapiens
tgctgaaacctgggaggtggaggttgcactgagtcgagatcgcaccattgcactccagtctaggcgacagagcaagactccgtctcgaaaaaaaaaaaaaagtaataggtgagtgagggaggtgagtggatcaagggcaatatggatggcttaagtctgagtgatctccagtacattccagtagaggggtcaaggctggtg

SEQ ID NO: 467892 - DNA, 201 bp, Homo sapiens
gctgagatcgcatcactacactccagcctgggcaacacagcgagactctgtcacaaacaaacaaacaaaacaccaaaaaccattaaaaaaatggaattatstttattttttttttcctaatgtcttcttatgataggattaggtgatgcattccagattagaatactacagcagttgcccttttcaacggaggttgtcctt

SEQ ID NO: 467893 - DNA, 201 bp, Homo sapiens
caatcctgaccacaggccccagtgggcacgcttagccttttacagatgcagagtctgcttctcagagcagggggctgacttcccccggctacacggccctrtgcagttcggtgggaccgggccgaccgcccagctcgcgctaaagcccacgtaacagaaacccgctcccatgacacgggtcgccagggttcccgctcccca

SEQ ID NO: 467894 - DNA, 201 bp, Homo sapiens
gtggagggtgcagtgagctgagatcgcatcactacactccagcctgggcaacacagcgagactctgtcacaaacaaacaaacaaaacaccaaaaaccattwaaaaaatggaattatctttattttttttttcctaatgtcttcttatgataggattaggtgatgcattccagattagaatactacagcagttgcccttttc

SEQ ID NO: 467895 - DNA, 201 bp, Homo sapiens
cggccctatgcagttcggtgggaccgggccgaccgcccagctcgcgctaaagcccacgtaacagaaacccgctcccatgacacgggtcgccagggttcccrctccccagagaacgggacttccggcggaaatttcttccgggagcggaggcgcgggactgacctggccccgccccctcctcgtttatctccaattgaccaa

SEQ ID NO: 467896 - DNA, 201 bp, Homo sapiens
tcctgaccacaggccccagtgggcacgcttagccttttacagatgcagagtctgcttctcagagcagggggctgacttcccccggctacacggccctatgsagttcggtgggaccgggccgaccgcccagctcgcgctaaagcccacgtaacagaaacccgctcccatgacacgggtcgccagggttcccgctccccagag

SEQ ID NO: 467897 - DNA, 201 bp, Homo sapiens
gtgcgtcactgttactgttgttttttttttttttttttttttgagacggagtctcgctctgttgtccaggctggagtgcagtggcgcaatcttggctcacygcaacctccgcctccctggttcaagcaattctcctgcctcagcctcccaagtagctgagattacaggtgcccactaccacgcctgactaatcattgtagt

SEQ ID NO: 467898 - DNA, 201 bp, Homo sapiens
ccagtagctattaaaggaaattaagagcttaatagtatatcagtctcttaaaggggaaagagaacatgcctaggtgctttgctgagcctgtggagagccgytctccatggaggatcctcagatagatcctcaaatggccccctgtttacaagtaatcatcaattatttgtagtgacaacgtttaacatgtgcaatttagtt

SEQ ID NO: 467899 - DNA, 201 bp, Homo sapiens
gcggaaatttcttccgggagcggaggcgcgggactgacctggccccgccccctcctcgtttatctccaattgaccaatcacagctcagcttcttgccaggygcgtaggctcattctccagtcagcgactgccgtcgtctctcgggcaacagcgtcctagagacgccgaatgggcagcccctctgagaccccgcggcttggg

SEQ ID NO: 467900 - DNA, 201 bp, Homo sapiens
ctaactgctatggaccgtttggccccttggaaagccttccccgttatctgtaggtgctgccaatccatgtccaccacatgccttgggctggtttaaaaacscaatctcctgggggctgccatgaatgaatcccagctcactgccatcctggacacaactaggcctcagtttttaccaaggaccttaggggggggtcaccag

SEQ ID NO: 467901 - DNA, 201 bp, Homo sapiens
tggctatgcacttggaaggccctctctggcccagccacactgctcactctgagaccttgacctgcacttctaacgttcgcttccctaactgctatggaccrtttggccccttggaaagccttccccgttatctgtaggtgctgccaatccatgtccaccacatgccttgggctggtttaaaaacgcaatctcctgggggct

SEQ ID NO: 467902 - DNA, 201 bp, Homo sapiens
gcaccagctgggaatgcaagtctgaagactgtgtgagcaaggccccctctgcagaagcagagaccgcattggagccagccagagactcttccccagtccasgcatccccagacactgaagtgaatggttgagggccttttccctgtttctgtctctcaggttgaccctttacaatccatagtacatgcagttcccagatgg

SEQ ID NO: 467903 - DNA, 201 bp, Homo sapiens
ggccagggccatgtctctctcactttccttggcatcaggaacttagcacagaagcagtgctccgtgaagcctgatggctgggagcattcccagagtctgasggatccagccttgccttgtcatgtcagctgtgtccagctgcctccactggctatgcacttggaaggccctctctggcccagccacactgctcactctgag

SEQ ID NO: 467904 - DNA, 201 bp, Homo sapiens
atccctgctaaggccatgcccgaggtcgcatcgtgtaggcattcctctcctttccaggccacttgtcttatcctactgatgccattactgggtcagaggcrtcagctacgcttcagtcaagtgctgacaatctccacaggtaaccagccgaggaccttgactgtgcggggaaaagcccatcagaaaagaactgtcactttt

SEQ ID NO: 467905 - DNA, 201 bp, Homo sapiens
gagccaccatacccagcaaaagtattttcttaacatctactgagaaatcacataccaccattagttaatactggtatgactagtttacagacgccagactwcttctgctgctctttagtttcccttaaaagtattcttttttttttttttttgagatggagtctcgctctgtcgcccaggctggagtgcagtggcacgatc

SEQ ID NO: 467906 - DNA, 201 bp, Homo sapiens
agatgctggatttgcctcccggtgggttcaggaccttgttgtgagagcgaggccgcggccccagccggggctcatggctgtcgactgtgggcatgggctcytgctccttggcggggcctgcttttctggcgctgcctttctcacctggctctgctccagccgggatgctccttgcagctgtgggacacaaagttagaacaa

SEQ ID NO: 467907 - DNA, 201 bp, Homo sapiens
ttttggtacagctctaaaaaatgttggcaccgaatgcacttaagaaaagtgttaaggcttaatacaaatacagagacgagtcatttctcaatgcagcttaragggtgagaacaggatgctaggtttttaaatcttccaaatacaggcagtccccaacgtacagacatacaggacacctcccaaatgtaaacgacagccaca

SEQ ID NO: 467908 - DNA, 201 bp, Homo sapiens
aagtggtgcccagggcccctgtccactcaggaggctgggggaggtggatgccaaacttcctgtcagcagttgccatttcctggaggatttgaggagggagaaaaaaaaagacaggtgcacttaagaaaaattattttttaaaaataaccaataaccaagcttaaatgagaaagggctgtccgggagcagtacctggcacct

SEQ ID NO: 467909 - DNA, 201 bp, Homo sapiens
gcacccgccaccccacacccggctaattttttcgtatttttagtagagacggggtttcaccgtgttggccaggatggtctcgatctcctgatctcgtggtccacctgcctcggcctccccaagtgccgggattacagccgttgagtcactgcaccctgccacgggtaattatttggttacaagtattactgaatactgacc

SEQ ID NO: 467910 - DNA, 201 bp, Homo sapiens
tgccgggattacagccgttgagtcactgcaccctgccacgggtaattatttggttacaagtattactgaatactgacctaactccctcaaatctaaagggttttttttttttttgagacggagtcttgctctgtcgtacaggctggagtgcagtggcattatcttggctcgctgccacctctgcctctgggttcaagtgat

SEQ ID NO: 467911 - DNA, 201 bp, Homo sapiens
tttgtatagacagggtcgtagtatgttgtctaggctggtctcaaactcctgagctcaagtgatcctcccaccctggcctcccaaagacccaaagactacaracctgagccaccatgcccacctgttttcttgacaggacttgcatatgacaagctctctgcttctcctcacctatgcattgcaagccaggtcagaggcagg

SEQ ID NO: 467912 - DNA, 201 bp, Homo sapiens
gatcctcccaccctggcctcccaaagacccaaagactacagacctgagccaccatgcccacctgttttcttgacaggacttgcatatgacaagctctctgyttctcctcacctatgcattgcaagccaggtcagaggcaggttaaacaccttaaggacatgttaggacaagtggcatacaagggaaaaaaacccgttcatt

SEQ ID NO: 467913 - DNA, 201 bp, Homo sapiens
actatgtgcatagtattaggtattatatgtaaccttgtaacctagagatgatttaaaagcatatggaggatgtgcataggttatatgcaaacattacaccmctttatatcaaggacttacacatccttggattttggcatcctgggggtcctggaaccaactcccgcaggataccaaggatgaccatacttgaaattacag

SEQ ID NO: 467914 - DNA, 201 bp, Homo sapiens
cactgcaccatcttccaatcccactagcaatgcacgagggctccagtttctctgcatcctcaccaactcgtattttccatttttacatcacaccatccgarcaggcatgcactggcatctcacgggtttctgatgtgcatgtccccagttattaataacactgaccatcttttcgggtggtttttggctgcttgtatctct

SEQ ID NO: 467915 - DNA, 201 bp, Homo sapiens
caccacgcccggccaatctaaagggtttttatttttagcaagttggagcaattcttttacttagtatttattcaatatagtatttgtcttcacttgatcayagccaaaaggctgagaagcaatatagtattggtcttaacagtcatggcacacatattctcttctacttctctggcgaggctgtgccacagaggggctcat

SEQ ID NO: 467916 - DNA, 201 bp, Homo sapiens
tcatatggtaatcctgtttaactctgaggaactggcagtatccacagccactgcaccatcttccaatcccactagcaatgcacgagggctccagtttctcygcatcctcaccaactcgtattttccatttttacatcacaccatccgaacaggcatgcactggcatctcacgggtttctgatgtgcatgtccccagttatt

SEQ ID NO: 467917 - DNA, 201 bp, Homo sapiens
caaagaaaaaaaagtggtaccaaagaaggttttagcagaaattatggcgcacacaggcccagccccaggcaaggggcagcggctatctcggtcacaaaggmaacaggtcccactgcaggtttcacacagaccgcagggctgggctgcctcaaaggggtctcggatgaatggaactgagcgttcaatagacctttcaacaaa

SEQ ID NO: 467918 - DNA, 201 bp, Homo sapiens
aggcatgcaccaccacatccggctaatttagagaagtttttttttgtatagacagggtcgtagtatgttgtctaggctggtctcaaactcctgagctcaastgatcctcccaccctggcctcccaaagacccaaagactacagacctgagccaccatgcccacctgttttcttgacaggacttgcatatgacaagctctct

SEQ ID NO: 467919 - DNA, 201 bp, Homo sapiens
gttactttggggtgatggaaacacaatatttaatattgttctatgtgcttttctgaattttatttgaaaacaagcaaagaaaaaaaagtggtaccaaagamggttttagcagaaattatggcgcacacaggcccagccccaggcaaggggcagcggctatctcggtcacaaaggaaacaggtcccactgcaggtttcacac

SEQ ID NO: 467920 - DNA, 201 bp, Homo sapiens
tgttagccaggatggtcttgatctgacctcgtgatccgcctgcctcagcctcccaaattgctgggattacaggtgtgagccactgtgcccaggcttttttktttgttttttgtttttttgagacagagtctcattctgtcactcaggttggagtgcaatggcgcagtctcaactcattgcaacctcagcctcccaggttca

SEQ ID NO: 467921 - DNA, 201 bp, Homo sapiens
ctgggggatttgtcctcttgggtatgttctgaggttcttctgttggtccaaaaatattagatgccatcctattaggcctgctggaaggagtagcttcttcyggacttccaaaaagattgctcgattctcctcctgggggcttcatggccctacaagcacagagtacatgccaattactgatggcagacctgaaagcttgtc

SEQ ID NO: 467922 - DNA, 201 bp, Homo sapiens
actactcaagtcaccttcaagagagaaagtacaaatcagaacgttttcattttggaagaactctgataacaagtgattacctgaaccagacaatatgggaraggatcagtataaagaaacagaaaatattttcaaaagagaatcgtggaggccaaaggattaaggatttccaaaggcccatacctgggggatttgtcctct

SEQ ID NO: 467923 - DNA, 201 bp, Homo sapiens
aaagctcagggaattggacaggtgtgactttgctactgaactccttcatctcctggcctaaggtctctagtctcttctggaagcttgtttgtgagttagawccagaagttctataaagctttgtagagggtggcctccacagctcttcttcctctttggtgtacctgaacaattgacttttttctggaaaggtgtcagaaa

SEQ ID NO: 467924 - DNA, 201 bp, Homo sapiens
gctaaatacaaaacaacaaaacaaaacaaggcaaactctttcagcaagagctgtgggggaagggactataagggacacacacaactgacaggcaaaagctytgagcacgtgattgctaagtttaattcaactgttacaccccattctgccttgtaaaaataacaaaacgctcctatcaaaatgacattgtgatgtgagtac

SEQ ID NO: 467925 - DNA, 201 bp, Homo sapiens
acaaacatttttaccacgtatacgtgcaataggtactaaacaatgtacctctgcttttaaccttcataactaggtagtcataccacatatgtctattaccrttttacttgaaaaataaattcagctttgaagcaagaaaacatgcttaaattcactaataattgaagataaactcgagagatgttttttcctcctgctaga

SEQ ID NO: 467926 - DNA, 201 bp, Homo sapiens
cagccgtgatctccagaatggaagcggttctgctaagaggtcaatatactgttagtgtttctgcttacgcctcctccatcccacagcagcagtggacaggytgttttggtttctttcagtcattcctagacatccaatcagctggcgggctgttgatccaaggaccatgccctgccccacctccccaccctcacccccctt

SEQ ID NO: 467927 - DNA, 201 bp, Homo sapiens
ttgctctgtggtccaggctgaagtgcagtggcatgatcatcactcactacagccacaacctcctggtctcaagtgatcctcctgcctcactcagcctcccragtagctgggactacaggcatgcaccaccacatccggctaatttagagaagtttttttttgtatagacagggtcgtagtatgttgtctaggctggtctca

SEQ ID NO: 467928 - DNA, 201 bp, Homo sapiens
ttaaaaataaccaataaccaagcttaaatgagaaagggctgtccgggagcagtacctggcacctgtaatcccagcaccttgggaggccgaggtgggaggaytgtttgagcccaggagttcgagacacgcctgggcatatggggagaccctgtctctacaaaaaatacaaaaataaggccaggcgtggtggctcacgcctgt

SEQ ID NO: 467929 - DNA, 201 bp, Homo sapiens
tcctacagtcctctacctgatctacgttcactggaaagtgtgagtctcagcaggaagcaccttgctctcgtgtccggctaattcgagtgctttacgtagtrgaggaattgctgacttttgggacatttctggtcttgccaaagttcaccttgtagtaaagcccccaaagatacttcccaaatagatgctctcttgaaaata

SEQ ID NO: 467930 - DNA, 201 bp, Homo sapiens
tagatgtgtgctagatcaattcttccttgttaagagtttcaatcccactgacgatctgaataaaaacactctccctccctaggaaaaatgtttaaatgcamaataatttgcacgcaatttcaggaatctcatgggggtccgtggaacaattgggagcagctccctggcaggaaccagaagcccccgtccacttttgtgtcc

SEQ ID NO: 467931 - DNA, 201 bp, Homo sapiens
gtcccccagggtagtgtgagtatgactttagtgcggccctgtgcagctaacttctggagcgtgaaagtcaatataaaaacatcggcgtcgctcagggtgayaataaacaccatcatttaccgggcagccagtgccaggcagcacaaacaaaaaggaaacgtactaaatgcacacaactgggacagggctggggatgcagtc

SEQ ID NO: 467932 - DNA, 201 bp, Homo sapiens
ccggaaacaacgagaatgttagtcacttaataagaaacactcatttctctaacaaccaaaaaagcaaccaaacagaccaaaaaaaggcaagcagcaaaccwagcttcggccgggcacaagggtgcatgtctgtaatctcagcaatttgagaggccgaggtgggcagatggcttgagcccaggagttcgagaccagcctagg

SEQ ID NO: 467933 - DNA, 201 bp, Homo sapiens
cattttacttgaaaaataaattcagctttgaagcaagaaaacatgcttaaattcactaataattgaagataaactcgagagatgttttttcctcctgctaratttttgatttccaagggctctgtgttattttgtttttaaaaatatcatttatttatttgggagattgggcctcgctatgttgcccaagccagtttcaaa

SEQ ID NO: 467934 - DNA, 201 bp, Homo sapiens
accattttacttgaaaaataaattcagctttgaagcaagaaaacatgcttaaattcactaataattgaagataaactcgagagatgttttttcctcctgcyagatttttgatttccaagggctctgtgttattttgtttttaaaaatatcatttatttatttgggagattgggcctcgctatgttgcccaagccagtttca

SEQ ID NO: 467935 - DNA, 201 bp, Homo sapiens
gctgagtaagccctcagcaatgctgcagggctgtgtcaacaagcacgtcaggaccacggggcggataaaactgtgtgtgcaacccccagcccccactgcawtgttcctggctgtgctataacggctgactttttttttttttaatgtgactccagctttttaaaatagaagataaaagtaactcaatttgaagtttttggc

SEQ ID NO: 467936 - DNA, 201 bp, Homo sapiens
aactaggaccacaggtgcacgcaaccatacgcaactgattttttttttttttttgggacggagtttcgctcttgttgcccaggctggagtgcaatagcacratctcagctcactgcaacctccacctcctgggttcaagcgattctcctgcctcagcctcccgagtagctgagattacaagcatgtgccaccaggcccggc

SEQ ID NO: 467937 - DNA, 201 bp, Homo sapiens
gatcatagccaaaaggctgagaagcaatatagtattggtcttaacagtcatggcacacatattctcttctacttctctggcgaggctgtgccacagagggrctcatcatacagaaaacctcaggcatctgaagacccaaacttcacaatgcaagtttactgctcaagtggcacgaaagaccttgtaagctctgtccctcta

SEQ ID NO: 467938 - DNA, 201 bp, Homo sapiens
ctcaccccccttccagttcctctcaaacctggactacacatgagtgatggccaggggtgccccatttcatccccacagaggcatctcccagccatctggamggcacgggtctccaagcagctgtcatgacggccaggagacgctgagcagccaggctcacataagactaaccctcttcccaccccgctcatttgggcaaaa

SEQ ID NO: 467939 - DNA, 201 bp, Homo sapiens
gcagtgggcgtccgccaccagcacagaagagcttcccccacggcttcagtcagcacaaggctggactgtttcctgggtgactcaggggaacttccaaactygatgactaatgcttgcatccaggataatctacggcacccaccatgattctccctaaaaacatgtcgcatctgccttggagcctttttggaaagagcacct

SEQ ID NO: 467940 - DNA, 201 bp, Homo sapiens
ttgttttttttgagacggagttttactcttgttgcccaggctggaggaatgcaatggcgcaatctcagctcaccacaacctccgcctcctgggttcaagcrattcttctgcctcagcctcccacgtagctaggattacaggtatgcgccaccacacccagctaattttgtatttttagtagagacggggtttcgccatgtt

SEQ ID NO: 467941 - DNA, 201 bp, Homo sapiens
caggtacgtggcaataaggctgcgtgttccctattttttttaaattgttcttagtttttatttttttttaattttcagtaggattttggggaacaggtagstggtatttggttacataaataaggtttttttttggttgtttttttggggtttttttgcgatggagtctcacactgttgcccaggctggtgtgcaatggca

SEQ ID NO: 467942 - DNA, 201 bp, Homo sapiens
cccaggaacagtggaaaaccatgaaatgggtctacacagaacacagcatggtcaggtctataatctcatcttctactgtgtccagagggttttggactagrgaagaataaggctgggaattgaggtgttaccagttagtgggatgttgcaatccagaaaggaagagatgatgaaatcttccacctggctcctgacattata

SEQ ID NO: 467943 - DNA, 201 bp, Homo sapiens
cactggacaacttggcatatatagaaactcatgctgcacttcttttcccccagtaatgtatctcctggaattgcgaaaaggtctcttttctttggcctctstggcccctacgatagtagcacagttctttgaggggggcgctaattgggtgagttaccacagagaaatcagcaccagtattgaccaaaaaatccattcatt

SEQ ID NO: 467944 - DNA, 201 bp, Homo sapiens
caagtacagatgattcagacttcgtggtctgagatgaggagcttcttctttatcccaggaacagtggaaaaccatgaaatgggtctacacagaacacagcrtggtcaggtctataatctcatcttctactgtgtccagagggttttggactagggaagaataaggctgggaattgaggtgttaccagttagtgggatgttg

SEQ ID NO: 467945 - DNA, 201 bp, Homo sapiens
cctctaaaactgcaataaataaatattcttgatgatacccactttatggtattttcattctagcagcctagacatattaagtaaggcaaagcctgattttkcaatgaccttgcagttcagagctggggagaacactgcctgtgcagcacagattccaaagcctgaatttgccctaattacctggggcactggggactgaaa

SEQ ID NO: 467946 - DNA, 201 bp, Homo sapiens
aattatccatggactggcgggtgcctgtagtcccagctattcaggaggctgaggcaggagtattgttgagcctgggaagttgaggctgcagtgagctatgrtcaccatcattgcactccagcctgggtaacagagagagagagagactcggtctcaaaaaaaaaaaaaaaaagaaaaaaaaaaagaaatctggtttctaga

SEQ ID NO: 467947 - DNA, 201 bp, Homo sapiens
aacctgcctctactaaataatacaaaaattagtcgagcatggagcaagtagcctattgtctcagctccttgggaggctgagacaggagaatcacttgaacytgaggcagaggttgcagtgagctgagattgcaccattgcactccagcctggacaacagagcaagattccgtctcaaaaaaaaaaccaaacaaacaaaaaa

SEQ ID NO: 467948 - DNA, 201 bp, Homo sapiens
tgttcagaggtggaaagaatgttctctagggtttgacacaatggggtgaatggtaattgttcttcttgccagctaaatatctttggacatattccctaatstatctgtacttcaattgttccctctgtgaaatgcaactgaaaagtatattaccagacttacaaagattcatggagataatatctgtaaaagactttgcac

SEQ ID NO: 467949 - DNA, 201 bp, Homo sapiens
ctggacaacttggcatatatagaaactcatgctgcacttcttttcccccagtaatgtatctcctggaattgcgaaaaggtctcttttctttggcctctgtrgcccctacgatagtagcacagttctttgaggggggcgctaattgggtgagttaccacagagaaatcagcaccagtattgaccaaaaaatccattcattaa

SEQ ID NO: 467950 - DNA, 201 bp, Homo sapiens
cctgtgcctcatagcttttcccggtttggtgttctttgcaatgaatgacagccacattctctggagccaatatgtcttctaataattgccaaatttcttcyttattttttatatcttttccttcagtagtcaatagtcctctgtctttttatattgccccatgggcatgcagggttgcaaaagcatatcttgagtcagtat

SEQ ID NO: 467951 - DNA, 201 bp, Homo sapiens
tggagtaagtctctccctaacaagggcactggacaacttggcatatatagaaactcatgctgcacttcttttcccccagtaatgtatctcctggaattgcraaaaggtctcttttctttggcctctgtggcccctacgatagtagcacagttctttgaggggggcgctaattgggtgagttaccacagagaaatcagcacc

SEQ ID NO: 467952 - DNA, 201 bp, Homo sapiens
ttctaacacacatgcccctgtccatttagccagcagttgccgatatgcccatgctccacagacccaatataggccagagggtgctttccaagcatttggartctttagctgatgccaagagtggcttagggtagagaatcaagagaaagcatttggatctggtaactaggagtcgttctgggagtttctccgtagagtttt

SEQ ID NO: 467953 - DNA, 201 bp, Homo sapiens
ttgcaatccagaaaggaagagatgatgaaatcttccacctggctcctgacattataagagctggcaggatgtgggctggtccaggagctatttagggtcargccacaagacaagaagattaaatgattcatgattaagtgatttccatagcctccaataaatcgacttcatccttgttttcttgttctattattcatcctt

SEQ ID NO: 467954 - DNA, 201 bp, Homo sapiens
tggactagggaagaataaggctgggaattgaggtgttaccagttagtgggatgttgcaatccagaaaggaagagatgatgaaatcttccacctggctcctracattataagagctggcaggatgtgggctggtccaggagctatttagggtcaggccacaagacaagaagattaaatgattcatgattaagtgatttccat

SEQ ID NO: 467955 - DNA, 201 bp, Homo sapiens
attggcattattgcattaaatagacatgactgattagatagcaggaaccaaagtttagaatttagctaagtgtggctatgctactgtttcttttttctttwcttttttttcttttttttttttttttaggagatagggtcttgctgtgttgcccagggtggggtacagtggctattcagacatgtgattccaccactgatc

SEQ ID NO: 467956 - DNA, 201 bp, Homo sapiens
tgccattgcacaccagcctgggcaacagtgtgagactccatcgcaaaaaaaccccaaaaaaacaaccaaaaaaaaaccttatttatgtaaccaaataccasctacctgttccccaaaatcctactgaaaattaaaaaaaaataaaaactaagaacaatttaaaaaaaatagggaacacgcagccttattgccacgtacctg

SEQ ID NO: 467957 - DNA, 201 bp, Homo sapiens
acagcatggtcaggtctataatctcatcttctactgtgtccagagggttttggactagggaagaataaggctgggaattgaggtgttaccagttagtgggrtgttgcaatccagaaaggaagagatgatgaaatcttccacctggctcctgacattataagagctggcaggatgtgggctggtccaggagctatttagggt

SEQ ID NO: 467958 - DNA, 201 bp, Homo sapiens
cgtggcacaccttagatgctgggtcttccaggccctggggctctagtcccacaggaaaaggagacagtaaatctttcatctccaacccccatctgggccaycagaaatgcagtgggataattaaggaatcggagagactgaggggttgaggaggagttatttaattatttaggtgcaccgacccagtgagattaacatcca

SEQ ID NO: 467959 - DNA, 201 bp, Homo sapiens
tcctctttgtccctatgggataggatgggctttcccgccttgagctcttactccttaccgcggttcctgaagtgctggtattgtcctgcagctccatcccyggtcctgttgcactgctgggcagggcgctagaatgccaggaaaggtggtttccatctgggtgaagctcccccgtggcacaccttagatgctgggtcttcc

SEQ ID NO: 467960 - DNA, 201 bp, Homo sapiens
ctacacagaacacagcatggtcaggtctataatctcatcttctactgtgtccagagggttttggactagggaagaataaggctgggaattgaggtgttacmagttagtgggatgttgcaatccagaaaggaagagatgatgaaatcttccacctggctcctgacattataagagctggcaggatgtgggctggtccaggag

SEQ ID NO: 467961 - DNA, 201 bp, Homo sapiens
gccgcaccacgacttgatcaccagttgtttcttcagggcaaggtgatgtggaagctaagcacctatcaatcaatgtttcatgatctgttctatttcaatcygctggtctgtctttgcactttagatgggttttacagtgtcctggatgggaagtggctaaccttcaggaggtgcacatttttgttccaaagcagaagtctg

SEQ ID NO: 467962 - DNA, 201 bp, Homo sapiens
gggtctacacagaacacagcatggtcaggtctataatctcatcttctactgtgtccagagggttttggactagggaagaataaggctgggaattgaggtgktaccagttagtgggatgttgcaatccagaaaggaagagatgatgaaatcttccacctggctcctgacattataagagctggcaggatgtgggctggtcca

SEQ ID NO: 467963 - DNA, 201 bp, Homo sapiens
cttggcatatatagaaactcatgctgcacttcttttcccccagtaatgtatctcctggaattgcgaaaaggtctcttttctttggcctctgtggcccctaygatagtagcacagttctttgaggggggcgctaattgggtgagttaccacagagaaatcagcaccagtattgaccaaaaaatccattcattaatcggcccc

SEQ ID NO: 467964 - DNA, 201 bp, Homo sapiens
atgggtctacacagaacacagcatggtcaggtctataatctcatcttctactgtgtccagagggttttggactagggaagaataaggctgggaattgaggygttaccagttagtgggatgttgcaatccagaaaggaagagatgatgaaatcttccacctggctcctgacattataagagctggcaggatgtgggctggtc

SEQ ID NO: 467965 - DNA, 201 bp, Homo sapiens
aagggaccgggctacggggccaggaattgaagtgatgggttcaaagaggtagagttagccgggggtggagttaatgaggtctcttccctctttggggctcracggagggaggaagctctgcttgaagcacatggggctggcccaccctgtagtcagaggtagcaagtaatgaggagtcctcctggagtgcctcagctttag

SEQ ID NO: 467966 - DNA, 201 bp, Homo sapiens
tcctatatacttccgtttgcctcgcggtttctttctttccgcgccgatagcgctcacgcaagcatggtaggacttgctggtgggggccgagtaacatccarcttaatctttcccccccttcgtcgcccgtgctatgccgggatgggtccaggctcctgtgtggactcgatatatcagagcaacccaatcttgccgggatca

SEQ ID NO: 467967 - DNA, 201 bp, Homo sapiens
gtatggacttgagttaataaggcatcagtgttggtttgttaatgagtcatactaatgtaagatgagaaactggtaaggtttataagaactctgtagcatgyttgcaattttttggtaaatagaaaacttgtaaacaatagttctgttgtttaggtaaaaggagcaatcaaggccgtgcgtggtggctcgcgcctgtaatcc

SEQ ID NO: 467968 - DNA, 201 bp, Homo sapiens
atgccatctttgctattaccacattttctctttatatatatatatttatatattatatattatatatatttttatgttttttatatatatttatatatatwatatatatatatatattttttttttttttttgagatggagtctctgtttccctggctggagtgcagtggtgcgatctctgctcactgcaacttccgccca

SEQ ID NO: 467969 - DNA, 201 bp, Homo sapiens
agtttatgttcacttcatttgtttgctgttcatcttttgggagggaataagctagagccatcaatacaattccgcttgtggggaaatttatgcctcttacyggtactacttgttttgcattgaagctgactggttgagttcacatcatatgttgcaattttctaatttggcacttcaatcactaggggccttatgaggcag

SEQ ID NO: 467970 - DNA, 201 bp, Homo sapiens
catttggatgcagtaagtggtttgatctcagggtggcaaaaagaatgctttttttataccttttcacattcggataacttgtttagaagacagaggttctmactaggttttggcctattaagaactgcaaactagcagcagcagaactctggctaaaggggcaagcttattaggaaattgagtatttaaaagttgagctac

SEQ ID NO: 467971 - DNA, 201 bp, Homo sapiens
cgagggcgctgcgctgagccttacactctatgattgctcctaccgactcccatgaggaagtgcgatcgggaacctcctatatacttccgtttgcctcgcgrtttctttctttccgcgccgatagcgctcacgcaagcatggtaggacttgctggtgggggccgagtaacatccagcttaatctttcccccccttcgtcgcc

SEQ ID NO: 467972 - DNA, 201 bp, Homo sapiens
agataaaacctgtaagacttacttgctgatcttcagtattttataacaaataccaattcgttttcccaggaaagcggcgttatgacaggaagcagagtggytatggtgggcaaactaagccgattttccggaaaaaggtgagtggtagttactatttgacgtttcccagttaattgccgtaaggatatgcacttgtctcta

SEQ ID NO: 467973 - DNA, 201 bp, Homo sapiens
gcaagcaccaaccccataaagtgacacagtacaagaagggcaaggattctctgtacgcccagggtaagatggattccgcataatttggtgttaatgtgacrtttgtgttgtagaataacatacgagtccgggtctctctccctccacgcctggcttgagcgttaatatttctgctgcgaaattaagataaaacctgtaaga

SEQ ID NO: 467974 - DNA, 201 bp, Homo sapiens
caagtcctgtggggctcactttgcaaacacggccaggaaggtgagtgctgacttcttggcctgctctgccactgcagcctatggaccatgggcaagcgccrctgacccctctgaatgcctgcaacctttcctttccctgtgtgatgctggtgacccagagctgtccctttcacaaaaatgttcaagaagaactaactgagt

SEQ ID NO: 467975 - DNA, 201 bp, Homo sapiens
tagacgtccctcttccccttacatctagttggccaaaatggggttatgtgtgtatcttggactaagacctgggcccaccatccctgaagtcagatttctgyccagtcgctgaacacattcagagtcatgttaatgggaaggatttagaatggcatttgggttggcactttgctactcatgttgggtgcttagacaggattt

SEQ ID NO: 467976 - DNA, 201 bp, Homo sapiens
ctgggaggctgaggcaggtggatcacttgagatcaggagttcaagaccagcataggcaacatggtgaaacaccatctccaccaaaaacaaaaaattagccrggagtggtggcatgtgcctgtagtccccaggtactcaggaggccgaggcaggagaatcgcttgaacccatgagaaagaggttgcagtgagccaagatcat

SEQ ID NO: 467977 - DNA, 201 bp, Homo sapiens
cagctgaaaaatctgagactagaaccaatcatgactctggatggcagagggaaacctctaaagggacttattacattggtacagacatatttatgctttcytccatcaccaaccactaaacccctttggaggaatgaaataactgcataaactagtcaactgaacactgggccacttacctcaatgttatacaaagtcctg

SEQ ID NO: 467978 - DNA, 201 bp, Homo sapiens
cctctaaagggacttattacattggtacagacatatttatgctttcttccatcaccaaccactaaacccctttggaggaatgaaataactgcataaactaktcaactgaacactgggccacttacctcaatgttatacaaagtcctggatgatttgattctgaaccacagcctttgcaggagttgggggaatcagatttgc

SEQ ID NO: 467979 - DNA, 201 bp, Homo sapiens
ggtgatccacctgcctcggcctcccaaagtgctgggattacaggcgtgagccaccacgcccgaccacttttttttttttatactttatttttaggtaattrtagattcacaggaagttgcaaaaacactacacagttcccatgtacccgtcacccgtttttctcccattggttatgtctcatttaaccatagtacaatatc

SEQ ID NO: 467980 - DNA, 201 bp, Homo sapiens
caattctagcctgtcagggcaaattcagtaattaatagctgttgatgagccagtcattctagattgattttttaaataagcaggctaataaatgagaattracataaatttagggatgtctcttttcagagcaagtgttaaggtgattttcatagtcttctgtattccctatgcatccagtaggtgtgatggtaaatgatt

SEQ ID NO: 467981 - DNA, 201 bp, Homo sapiens
catggctccagcgacctcagccacaggaactagagacagcttgctttctgtcgtggcaatgttttgaaactggcaaaatcaggtaacctcaaactgttttyttaagtttcattagctagatgaagctgcattagaaactgggaaaatcctgtcttcagaagtgagtcaggttttttttttttttttttttttttttttttg

SEQ ID NO: 467982 - DNA, 201 bp, Homo sapiens
tcaggaagctgaggcaggagaatcacttaaacctgggaggcggcggtttcagtgagccgagatcatgctactccactccagcctgggtgacagagtgagayccctgtctcaaaaaaaaaaaaaaaaaaaactacaaaatatttcagagggctattcctcctctgttgtccccatttctcttggcagcaaagaactcattta

SEQ ID NO: 467983 - DNA, 201 bp, Homo sapiens
ttttcctcccctgagttctggcctgtgaaatattccttgtttatgtccagcccatgcaccacttcagcagggctctttatcctaattcaggccttggattytaaagttctaccatatacatgtcttctctatgacttaggtattctgaattcttttttcttttctttttttttttttttttttttgagatggagtctcatt

SEQ ID NO: 467984 - DNA, 201 bp, Homo sapiens
atgttgaagaggaactgtgacaagacctactaccaggaggaatgtattgtgaagaatcaaagctgactcaccaggtttctagcctttctttctttctttcttttttttttttgtcggagtttggaatgtattgtgaagaatcaaagctgactcaccaggtttctagcctttctttctttctttctttctttctttctttct

SEQ ID NO: 467985 - DNA, 201 bp, Homo sapiens
ataatcccagctactcgggaggctgaggcaggagaattgtttgaacccgagaggcggaggttgcagtgagccgagagcacaccactgcactccagcctggygacagagcgagactccgtctcaaaaagaaaaaaaaaatggatgggatgcttactaaagtgctgttcggcatatacagagaggtcatgggaggtcatcaag

SEQ ID NO: 467986 - DNA, 201 bp, Homo sapiens
cgtgagccaccacacccagcaggagaaaccattttctaggctctttaggaaggaccatgcaatgagtaggtgatgtatttgagccctcacagtctttacayccctagaggagctggaggacttaagagtttgctgcagaagcgtggccaagcacaaaacacatgatcaggaaagcagagtgttttcccattaccaatggat

SEQ ID NO: 467987 - DNA, 201 bp, Homo sapiens
tgttcggcatatacagagaggtcatgggaggtcatcaagaaccatctcaaggactggaacctaggaaggtgattgtagggctaggaaaggtacgcatgtgrtcaggcattggtacaggccgtggcatagaagaaacttcagcctagagatagggcagggcatggagggtaggtggtgacctgtttcatgtggttgagggag

SEQ ID NO: 467988 - DNA, 201 bp, Homo sapiens
tgttacttcaagtggcttttattaagattttctcagacttacttggaggttaaagcaaacccaaatgtgtattattttgttacagagctctgctttataaytttgtaataaagtttcaatacagacacctgtcctgtctggtgcgaggatgttagaggttgataggactgacaaaagagcctgacagtggttcatgctata

SEQ ID NO: 467989 - DNA, 201 bp, Homo sapiens
actgcagccttgaactcctggactcaggcagtctccctgcctcagcctcccaagtagctgggactacaggtgctcaccaccatgcctggctaattaaaaawaattttttttttttgtagagacaggggtcttgctgtgttgccaaggctggtctcaaattcctgggctcaagcaatcctacctctgtctcccaaagtgttg

SEQ ID NO: 467990 - DNA, 201 bp, Homo sapiens
aatgcagagcaccatgccaggtactcatcctgtctctgttcctacccttcatgaggtcagtcaccaaaattatgatgtggtgactgctttggggtccttgragaaagagcttggggaggtaagagctgagcacactgatctcatctttgtcattgcagtctattgactcagaggacagctttgtcccaggccgaagggcct

SEQ ID NO: 467991 - DNA, 201 bp, Homo sapiens
gcctccgtctcccaagtagctgggattacaggcacgcgccactgcgcccggctaatttttgtgtttttagcagaggcagggtttcaccctgttggccaggmtggtctcaaactcctgacctcaggtgatccacctgcctcgacctcccaaagtgctgggattacaggcttgagccattgagccaccgtgcctggcttccca

SEQ ID NO: 467992 - DNA, 201 bp, Homo sapiens
gcacgcgccactgcgcccggctaatttttgtgtttttagcagaggcagggtttcaccctgttggccaggatggtctcaaactcctgacctcaggtgatccrcctgcctcgacctcccaaagtgctgggattacaggcttgagccattgagccaccgtgcctggcttcccaagtgctttggatgtgcagtcaagtttgggaa

SEQ ID NO: 467993 - DNA, 201 bp, Homo sapiens
cacctggatttgaactacttggcagccagtatgatctgctgaaacattttaactgtcttggtcctttttaaagaaatgctgcctactcatcttgaaacttrcaggaagttaggccaagtggaggctctgctggcttctgagtggttaaatgcaacttattagtgatcaacaccattgtttatttgcaactgctggtggatt

SEQ ID NO: 467994 - DNA, 201 bp, Homo sapiens
gcttgtcaaagggcattccaccttcctgttgtacccttggccatatggttgaatccagcacttcagatgattctgaatcatccccaccactcccattgatstagttcagtgtttcccaactctgaaatgttgacacagttagagaccagaagcttgaggaatagtgactgtgagcccaccaattaatgggggacattaaaa

SEQ ID NO: 467995 - DNA, 201 bp, Homo sapiens
tgcagaccagaagctaggttggctgactactgtggatttgtgctctttccattagattatagtctggggtgtgccatcttttggcctccctgggccacatyggaagaagaagaattgtcttgggccacacataaaatacactaacactaatgatagctgatgaaagtttatgaatttgtgttgggcccggaggccatgggt

SEQ ID NO: 467996 - DNA, 201 bp, Homo sapiens
gtggcaatgttttgaaactggcaaaatcaggtaacctcaaactgttttcttaagtttcattagctagatgaagctgcattagaaactgggaaaatcctgtyttcagaagtgagtcaggttttttttttttttttttttttttttttttgagacggagtttcactcttgttgcccaagctggagtgcaatggtgtgatctcg

SEQ ID NO: 467997 - DNA, 201 bp, Homo sapiens
ggggtttatttgttgggctgcagaatgaggagatgagagggaactgcaaatccgtcctcctgaggagtttggagctagggtttttaaggattttggagtgrgctggaatgtggagattgttgggtggtcagagagagaaaggtgaagtaatgggacccggagatgaaaaaactgtattatgctgattttatttctctctga

SEQ ID NO: 467998 - DNA, 201 bp, Homo sapiens
cttaacattgtaagaatttgggttgaatagtcattccttgccttcaaacttgctgttctattaatacatctcgtattccttaagccacccctgttgatgcmatcatcccatttgggatgctactcacactgattcttccaggaaaccctcccaactctttgcatgccctaaaccagggctggcaaacaccaagctttgtgt

SEQ ID NO: 467999 - DNA, 201 bp, Homo sapiens
atttattgtgttactaattgttgaaattcttaagatgaactggatgctgcagcagctgccctcttgggtttaggtggtgttctttcacagaatccatgccygaatttgctgtatacaatttttaagtgcctcatttgaccagttccagtggtagtttgtcttttagccttggcactccagttatacttcctcttgcgcttg

SEQ ID NO: 468000 - DNA, 201 bp, Homo sapiens
cagtggtagtttgtcttttagccttggcactccagttatacttcctcttgcgcttggcagcatagccacatttgccacaggtcgacttctgaaggtggtaygtcctgtcacgtcttattgtgatgctttccaaacgatgatgttcccttcatcatctggcttctgttactattattattattattattattattattatta

SEQ ID NO: 468001 - DNA, 201 bp, Homo sapiens
aattttgtatttttagtagatggggtttctccatgttggtcaggctggtcttgaactcccgacctcaggtgatctgcccaccttggcttcccaaagtgctrcaattataggcatgaatcaccacgcccggcgtttttactattatttttaaaattactgctccttgcagagcagggctaccctataggcaatgtgcccaca

SEQ ID NO: 468002 - DNA, 201 bp, Homo sapiens
ctacacagttcccatgtacccgtcacccgtttttctcccattggttatgtctcatttaaccatagtacaatatcaacaccaggaaactgacatggtgctckgtgtgtgtgtgcatgtgtgtgtgtgtgtgtgtagttttctgctgttttatcacatgtatggatttgtgtaactgttctaccaccacaaagatcccccttg

SEQ ID NO: 468003 - DNA, 201 bp, Homo sapiens
ccgcctcagcctcccaaaatgctggtattacaggtgtgagccactacacccagcctcgaatgtattttttgtagagataggtctcactgtgtttcccaggytggtcttgaacccggcatttttcacttagtgtcacaccatccatccaagttattgtgtggcagcaatagtttgttccttttatctctgagtagtattcca

SEQ ID NO: 468004 - DNA, 201 bp, Homo sapiens
atgtcagagatactatctttagaaacaatagggttgcaaatggtcagtatctagcgctgtgtgactttcagttacaaggaaatgtgtcaaaatccagcctrattaatgttttttttttgtttgtttgtttgtttttttttttttgagatggagttttgctcttgtggcccaggctggagtgcaatggcatgatctcggctc

SEQ ID NO: 468005 - DNA, 201 bp, Homo sapiens
cccaggttcaagtgattctcttgtctcagcttccccagtagcttggattacaggcgcgtgctaccatacccgggtaattttgtatttttagtagagatggrgtttcaccatgctggccaggctggtctcgaactcctgacctcaggtgatctgcccacctcggcctcccaaagtgctgggattacagccatgagccaccat

SEQ ID NO: 468006 - DNA, 201 bp, Homo sapiens
ggtgacactggatcttctttagcaactgcctcctctcttcctttcattttacagtcaagtttcttgaaataataatttatccttggaattgtgtgaattcrtacttctcattcactttccaagctatgattatcagcttctttcttcctaaactgcttaggcaaagagcacacatggacactttcctaaaccttagtccat

SEQ ID NO: 468007 - DNA, 201 bp, Homo sapiens
ctttgggaggttgaggcaggcggattgcttgagcctaggtgtttgagatcagtctgggaaccatattgagaccccatctctacaaataataaaagaattakccaggcatggtggcatgcaccagtgatctcagctactcgtgaggctgaggtgggagattgcttgagccagggtggtcaaggctgcagtgagctgtgatca

SEQ ID NO: 468008 - DNA, 201 bp, Homo sapiens
gtggatttggaagactacagaatcctgagaaatggatattttaatttctcttttgaaacctgcttattgtttataatgtcaagatctattgcagaaaagamagtaaatctgggatgtcaatgacatcacatatgtctgttcaaatgaaacaatgggcacatacacatatgcacactcattaaatatctgttgagaccaccc

SEQ ID NO: 468009 - DNA, 201 bp, Homo sapiens
agttataacctacacaggtttttatctctgttaaagctactaacccccactttttttttaggttgaaaagtgaccttggtctggtaatttcttcattgtcytctcctctaaaaagatacagcaaaaccttcttgctctctcagcagcgtttttcaactgctactaccgccatgtgctgaatttgaatttgagcacacttca

SEQ ID NO: 468010 - DNA, 201 bp, Homo sapiens
atttggggcagttggttaaaactgtatcagagtcccaaagaggggaatgataagctgcagcagctctgttcacttgctcaatggtgtttctcttagtcaasttaggagttccatgcctttggccttcaggctgctctttatatagttcgtatctgtctcctgggcatagtactgtctggattttctctttctttttttttt

SEQ ID NO: 468011 - DNA, 201 bp, Homo sapiens
tatagttcgtatctgtctcctgggcatagtactgtctggattttctctttctttttttttttttttttttgagacgaagttttgctctgttgttgcccagrctggagtgcaatggcacaatcttggctgactgcaacctctgcctcccgggttcaagcgattctcctgcctcagcctcccgagtagctgggattacaggca

SEQ ID NO: 468012 - DNA, 201 bp, Homo sapiens
gcatgtgccaccacacctggctaattttgtatttttagtagagatgggggtttctccatgttggttaggctagtcttgaactcccgacctcaggtgatccrcccacctcggccttccaaagtgctgcaattataggcgtgaaccgctgtgcccggccctcttatttaaagttcgcaaatacagaacaggtcaggagctttt

SEQ ID NO: 468013 - DNA, 201 bp, Homo sapiens
tactagaatttgtaacttatcatcaactacagaaattttttttaaagtgtggttgaagagataatggttgtcagctgctataaagatgtgtttatcattcrgaaaggactaattaacatgtactatagggaaacttctttaaacaaagccattttctgaaaggaaaacactgaaggggaggaaataaaacagggaacattt

SEQ ID NO: 468014 - DNA, 201 bp, Homo sapiens
gtgatggtaaatgatttggctttagcatagagaatgtggcagctgattaaaaaaaaaaaattccagtgcatctatcttaatgagagaacttgagttgtctraagaaatagagaggtcagaggaggcctagtgggaaaaaagaacaatgagcctggttagaactgacaaaaattcaccctaatgatttgactggctaatgat

SEQ ID NO: 468015 - DNA, 201 bp, Homo sapiens
gtttctattctagttagggaaagcagttaataaataagcaaataatatcagctaataccaaatgttatggtgaaattagaaaatgacattaaaaggctggkcgtggtagctcacacctgtaatcccagagctttgggagcctgacgcaggaggatccttagagcccaggagttcgagattacagtgagctatgatcaagcc

SEQ ID NO: 468016 - DNA, 201 bp, Homo sapiens
gacatatttatgctttcttccatcaccaaccactaaacccctttggaggaatgaaataactgcataaactagtcaactgaacactgggccacttacctcartgttatacaaagtcctggatgatttgattctgaaccacagcctttgcaggagttgggggaatcagatttgctcatgaagacatccctttccacttttgtc

SEQ ID NO: 468017 - DNA, 201 bp, Homo sapiens
agtgttaaggtgattttcatagtcttctgtattccctatgcatccagtaggtgtgatggtaaatgatttggctttagcatagagaatgtggcagctgattaaaaaaaaaaaattccagtgcatctatcttaatgagagaacttgagttgtctgaagaaatagagaggtcagaggaggcctagtgggaaaaaagaacaatga

SEQ ID NO: 468018 - DNA, 201 bp, Homo sapiens
gcagggttatagacagtggggtagaggtgtgcagggtggaagggtggcagaggccaagcagggccctggcagtgctggcctggggtatgtgagtccagtcyagaacagtgggagacatgttgaagaggaactgtgacaagacctactaccaggaggaatgtattgtgaagaatcaaagctgactcaccaggtttctagcct

SEQ ID NO: 468019 - DNA, 201 bp, Homo sapiens
accctcccaactctttgcatgccctaaaccagggctggcaaacaccaagctttgtgtttccagtccatttctcacctgtgagagacatcactaatcagtcrtatccctctttcctgctgagttctgagtactttacagctcagcacccaggcagccaccactgtgacaactgaccattagacaaagctcatttgccaccct

SEQ ID NO: 468020 - DNA, 201 bp, Homo sapiens
ctctttcacctcagaccttagcatatgtaagcgttcttttacacaccttccccaagcttaatctggccaactggtttcagcctagaagtcacctcttccaygaagcctcttcttacttaccagggttgagtactcaggagaacctggtatttactccaatcatagtatgtattgagaatcagggtctgctttgctagaatt

SEQ ID NO: 468021 - DNA, 201 bp, Homo sapiens
caactttcaatttcccctgcgggggtggtttgagacctgagggcactctctagttcttaggaaaaaaatatacatatacatatacatatatatatatatayacacacacacacacacacatatacacacatatatatacatatatatacacacatatatatatatacacacatatatatacacacatatatatacacatat

SEQ ID NO: 468022 - DNA, 201 bp, Homo sapiens
gggggtggtttgagacctgagggcactctctagttcttaggaaaaaaatatacatatacatatacatatatatatatatatacacacacacacacacacayatacacacatatatatacatatatatacacacatatatatatatacacacatatatatacacacatatatatacacatatgagccaggcgcagtggctca

SEQ ID NO: 468023 - DNA, 201 bp, Homo sapiens
tcttaggaaaaaaatatacatatacatatacatatatatatatatatacacacacacacacacacatatacacacatatatatacatatatatacacacayatatatatatacacacatatatatacacacatatatatacacatatgagccaggcgcagtggctcacgcctgtaatcccagcactttgggaggccaaagt

SEQ ID NO: 468024 - DNA, 201 bp, Homo sapiens
agcaggcttttgtaatgatgctgtaagaggctccggatttctgggcatgatgggagtacattctggacattgtgtgagttgaaaagaggcccatgctatgyagatctctgggacatctctagatgtgatgttacttttctcttcccacaggccaatggccatgtgtctcaggatcaagaggaacccgtctacctggagagc

SEQ ID NO: 468025 - DNA, 201 bp, Homo sapiens
gttggccaggctggtctcgaactcctgacgtcaggtgatccacccacctcagcctcccaaagtgctgggattacaggcatgagccaccacgcctggctcaygatcttattttccttacgatattccttgtttgaaaatacaaattgttcagaaaaactaggagttctcaatagaacctaaagcctaagaaaattgtgtcac

SEQ ID NO: 468026 - DNA, 201 bp, Homo sapiens
ctcttctctatggtggctcgggcgcggcgggagcggaggcgcgatcccgagagggggcggggccgagtcaggggcggggccgcgcggagggcgggagcggycgggccgggccggctggggatgggtgggagggggggccgacttcctggggccgcccgtgaggatgtcgcgaccgcccccgggtgcccctcagccccagag

SEQ ID NO: 468027 - DNA, 201 bp, Homo sapiens
acgggaagggggacggtcgggtgccgtcaggctgtggtctgggggcccttcctctgtgtggggcgcggcctgggactctccctgccctacaggggtggggrgaagcccttggctggctggaagtccccgccttcagggcagcccacacctgtcctttgaaaagtcccctcaaagaaagcgtttcacctgtgggggcagtaa

SEQ ID NO: 468028 - DNA, 201 bp, Homo sapiens
tgttaacattctgcagtgaagccaagcagttggttaaaagagtcctgcatgtttttaaacagtttcctttttaaagcataaaatctgcatcttggctgggygcagtggctcactcctgtaatcccagcactttgggaggcagaggcgggtgattacctgagatcaggagttagagaccagcctgaccaatatggtgaaacc

SEQ ID NO: 468029 - DNA, 201 bp, Homo sapiens
cggccggcgcatggcgtgtctggccaaatcttcccgacaggtgagccagccccaggaagatgccagtaatcttgggccctggagggtggtttccatacccrcagatgtcttcgagaagaactctttagaggctgaaaccttgcaactaaagaagctacccacttgggttgcttaactccactgactccttacttcttcttc

SEQ ID NO: 468030 - DNA, 201 bp, Homo sapiens
gctcaggaagggtgggcgtggggagccaagctctaaaacagggtagagattcctactgtgtgcagggcaccgcgccggctcctgcagctttgttatttcayactggcctcctgagacggcctgccggggggtagaattgacaccccatttgacagatgaggaaaaaccaagtgtgggaggccccagtcctctctgccaatc

SEQ ID NO: 468031 - DNA, 201 bp, Homo sapiens
ctaaaacccaggatgaggaggaacaggtaagggcaggatgctgggttccattgagattctgacacaggaaaaccccattatcccttaacattgtaagaatktgggttgaatagtcattccttgccttcaaacttgctgttctattaatacatctcgtattccttaagccacccctgttgatgccatcatcccatttgggat

SEQ ID NO: 468032 - DNA, 201 bp, Homo sapiens
ttttaccagaatttgggatctgaaaaatatctcaagcaattcttaaaaaaaaagccttatgcttctaatgtcagagatactatctttagaaacaatagggwtgcaaatggtcagtatctagcgctgtgtgactttcagttacaaggaaatgtgtcaaaatccagcctaattaatgttttttttttgtttgtttgtttgttt

SEQ ID NO: 468033 - DNA, 201 bp, Homo sapiens
cctcggcctcccaaagtgctgggatcactggcgtgagccaccgcgcccagcctgtttgtattttttttatagagacagggtttcattatgttgcccaggcyggcctcaaactcctgggctcaagcaatgctcccgcctcagcctcccaaaatgctgggattacacacaattgatttttgacaagggtacagaaacaatgtg

SEQ ID NO: 468034 - DNA, 201 bp, Homo sapiens
aacttcactgttgtttggtgacagatgttataaaactgtctttacaaacaatcccctttcctattgaaattgtatgttggccacaggagctagggaagcaytgggcatgttcagcaggatttatttcactcattccactgtgtcagatgatactttttctgaatgaaattgtatgcattcttcagtgggagttaggggaag

SEQ ID NO: 468035 - DNA, 201 bp, Homo sapiens
ccctgagtgaagatccaataattttctttcaagatcagaaggaggtttgtagataagagagaaaagtttttcatttatcaccttagggagaattctttctrcacctcacaattagttccactttcagtcctttaatagcattatcaaatgccatgtatgtatatctatttagggatgaggaatgaaaaaaatattcccaag

SEQ ID NO: 468036 - DNA, 201 bp, Homo sapiens
tgctgcaactggttctgcctggatggacagcctgaggaggtcccaccaccccagggagccaggatgcaggcctattccaaccctgggtacagctccttccyttccccaacaggcttggaaccaagctgcaagtcctgtggggctcactttgcaaacacggccaggaaggtgagtgctgacttcttggcctgctctgccact

SEQ ID NO: 468037 - DNA, 201 bp, Homo sapiens
acatctcaagagggtacgcttcagggtctaagtgaccaaggttcaaagcttggctttgctatcctctagctgtgacctttaacaagttacttaacttctcygaacctttttttctcacctgaaaatgggaagaactaatctaccttgccagaattgtgaggatcacatgagataacactaggtaaaagtacctatctcagt

SEQ ID NO: 468038 - DNA, 201 bp, Homo sapiens
gggagaccctgtctgaaaactaagtaaaataaaaaagttaagaaccttaatgggcctttctgtgttaaaacaacaacaacaacaacaaaaacaaccttaamaaagtactttctttaaattatttacagccaatttctgttgaacatccattatttgctgggctctgggttaaatgctttgacatgcgttattttaatcctt

SEQ ID NO: 468039 - DNA, 201 bp, Homo sapiens
acacaacactcatataaacttttaattcaaatgtaactagagaagtatataaattataagtgtacagttcgatgaatttttacaaagtcaacatatctacrtaatcagcattcagagtaagaaacaatgttaccagaagccccttgggctgccttccatctgtaatcctacctcacaggatgaccactatcctgattttga

SEQ ID NO: 468040 - DNA, 201 bp, Homo sapiens
ttctttaaattatttacagccaatttctgttgaacatccattatttgctgggctctgggttaaatgctttgacatgcgttattttaatcctttcaattatsttttcaatgtagcaggttttaattaaaggagttaaataacaccagaattcattctataccatggtacatttggctgcagtaattttcgtgcagtccactt

SEQ ID NO: 468041 - DNA, 201 bp, Homo sapiens
gaagatactctgtctctttggaggaactttacatatctgtgcacattgattttgtgttgattttattatcttaattttatgggttaagtttttgagtttcytccagctcctagtccatcaactccttcctgtccccttcctcttccactagacttaaattcagatactaatgccaatttctgaatactcagtctggctcca

SEQ ID NO: 468042 - DNA, 201 bp, Homo sapiens
tagcaggttggatttgaggcagtgttcacgaaagggctgtttaactgtctcagtcactcccttctgggaatctgttccttctgcatttgaaaaggggccarcgtttaattattaaaacattttcaatttttcttgctctttttcccagccctcatattcgaagttttgtttcaggctttatttccttatctcagcactatt

SEQ ID NO: 468043 - DNA, 201 bp, Homo sapiens
tccagatttctttgttaaccagtcttagatgtggtcacattctttgtttaaatacccgtgtattaatatagtcatccaagcctttttgtcctcttcttgcwtttggtttggaagatactctgtctctttggaggaactttacatatctgtgcacattgattttgtgttgattttattatcttaattttatgggttaagttt

SEQ ID NO: 468044 - DNA, 201 bp, Homo sapiens
tggctcattgcctgtaatcccagcactttgggaggcccaggtaggattgcttgaggctaggagttcaaagaccagtctgggtaacatagaccctgtctctmcaaaaaaaataaaaataaaaaattagctgggcaaggtggtgggtatttgcagttctagctactcaggatgctgaggtgggacgatcgctcaaggctacag

SEQ ID NO: 468045 - DNA, 201 bp, Homo sapiens
tatgtagttgtttctgtttgggaatgggcttaggcccttttgtccttcccctccttcaaccccaatccctttagtaatctaagaattctgagcatttgagsccccagagagagggtgtgtgggaaactcactgagacccagggggcctctcaccatctttagaaattctctctgctcgctgtgcaggaagcagagtggagc

SEQ ID NO: 468046 - DNA, 201 bp, Homo sapiens
tggccagactggtctcaaactcctgacctcaggtgattcacctgcctctgcctcccaaagtgcctggattacaggcgtgagacaccacacccgaccccaawtttaatttaacaaaggactaactcagaactaacttccaaccaaagctgactcacctcaaatctcattggtgcagaattgcttcatacacccatgtgtaat

SEQ ID NO: 468047 - DNA, 201 bp, Homo sapiens
tggtgggacaccattgaaggcttaaaacagaaagtgacaagcaaagattctttttctaaataaaaggttaccctggctactctgtagagaatagagagtcmcaaagaagggaccagtaaggaagtgtttgtctcccttcttgagaaggatcatcgcagatagggcaggatatggcagtggacatagaacgggatagttgca

SEQ ID NO: 468048 - DNA, 201 bp, Homo sapiens
atgacccactgtgactagccctcaggccaaatttagcttttgtttgtttgtttgagacggagtctctgtcacctaggctggagtgcagtggcatgatcttkgctcactgcaacctctgcttcctgggttcaagcaattctgccgcagcctcccgagtagctgggattacaagcatgcgcccccatccccggctctttttgt

SEQ ID NO: 468049 - DNA, 201 bp, Homo sapiens
gtcattccttgccttcaaacttgctgttctattaatacatctcgtattccttaagccacccctgttgatgccatcatcccatttgggatgctactcacacygattcttccaggaaaccctcccaactctttgcatgccctaaaccagggctggcaaacaccaagctttgtgtttccagtccatttctcacctgtgagagac

SEQ ID NO: 468050 - DNA, 201 bp, Homo sapiens
cttcctggagattttgactgagtgggtaagtgatgaccagagaattaccttttattttttcaattttataatttattattactactatgaggccataccaygtagacgctaccttttatttttattaattatttttattttatttcattttattttgagatggagtcttgctctgtcacccaggctggagtgcagtggcgg

SEQ ID NO: 468051 - DNA, 201 bp, Homo sapiens
tgatgtgcctgcctcagccacccaagtagctgggaccacagatgtgtgtcaccacacccggctaatttttgtatttttagtagagacagggttttactatrttgaccaggctggtctcaaactcctgacctcaggtgatctgcccgccttggcctcccaatgttgggattacaggtgtgagccactgcgtccagcaggaag

SEQ ID NO: 468052 - DNA, 201 bp, Homo sapiens
ctgtaattctggcactttgggaggccaaggcaggcagatcactggagcccaggagatcaagaccagcctgggcaacatagcaaaaccttgtctccaaaaartacaaaaaattagctagatgtggtgttgtgcacctgcagtctcagctactcaggagtctgagttgggaggattgcttgagtccaggagtttgaggttata

SEQ ID NO: 468053 - DNA, 201 bp, Homo sapiens
ttcctacctggggagagaagtttcatgacttggtggtttcctaggtcagaaccaaagttgataatacttagggactagttaaggaactatatagttaattwatttaattattataaataatttatatatatttaatatatatataatttattttaatatattttatttttatttttaaaaaccagaacatttattgtgtta

SEQ ID NO: 468054 - DNA, 201 bp, Homo sapiens
gtagagactgcaaaatagtatgaaacatgctatactttataaacattttgccttttttagctccccgtagtggctggacagttgactgaataatttcatgtttttttttttttttgagacggagtttcactcttgttgcccaagctggagtgaaatggcacaatctcagctcactgcaacctctgcctcctgggttcaagt

SEQ ID NO: 468055 - DNA, 201 bp, Homo sapiens
tgacctttgtctttctcctagtatctagttcagttccctgcacatagtgggcattcaatatctattggatgaatgaatgaataactgaacagaatttcagrtttttaagtttctactcattgtttattatagattccctcccttttttgcttttcttcttcctttcacatttccttttctttcttttctattaacctgtgt

SEQ ID NO: 468056 - DNA, 201 bp, Homo sapiens
tagagactgcaaaatagtatgaaacatgctatactttataaacattttgccttttttagctccccgtagtggctggacagttgactgaataatttcatgtttttttttttttttgagacggagtttcactcttgttgcccaagctggagtgaaatggcacaatctcagctcactgcaacctctgcctcctgggttcaagtg

SEQ ID NO: 468057 - DNA, 201 bp, Homo sapiens
agagactgcaaaatagtatgaaacatgctatactttataaacattttgccttttttagctccccgtagtggctggacagttgactgaataatttcatgtttttttttttttttgagacggagtttcactcttgttgcccaagctggagtgaaatggcacaatctcagctcactgcaacctctgcctcctgggttcaagtga

SEQ ID NO: 468058 - DNA, 201 bp, Homo sapiens
tttctttgggttaagcatccaggaatgaaattgctggttcttaaggtaagtaagtgtatgttcagttttccaaagaaattgctaaactttttttttttttkgacagtgtctcactcactctatcacccaggctggagtgcaatggtgcgatctcagctcactgcaacctctgcctcctgggttcaagcaagtctcctgcct

SEQ ID NO: 468059 - DNA, 201 bp, Homo sapiens
gctgaagcaggagaatcacttgaacccaggaggtggaggttgcagtgagcgaggatcacaccactgcactccagcctgagcaacagtgagactccatatcaaaaaaaaaaaagagtttgagaccatcctggccaacatggtgaaaccctgtctgtatttaaaaaaaaaaaaaaaggcacgccacgcatggtggccagtgcc

SEQ ID NO: 468060 - DNA, 201 bp, Homo sapiens
ttgggggtctgagtctgtgatccatcaagcactggctaagggcctgctgggtgcttggtatgtgcagatgatacatacacgaatgaggcaaggcccctgcmcttaaggcctctagttgggtgtaggggaaaatcaagtgaatacaagagagctgtaagcaccgagggaggcaacggtaaggagggagtggtgaacaggaag

SEQ ID NO: 468061 - DNA, 201 bp, Homo sapiens
accactgcactccagcctgagcaacagtgagactccatatcaaaaaaaaaaaagagtttgagaccatcctggccaacatggtgaaaccctgtctgtatttaaaaaaaaaaaaaaaggcacgccacgcatggtggccagtgcctgtggtaccagctacccagcaggctgagaaaagagaattgcttgcacccaggaggtgga

SEQ ID NO: 468062 - DNA, 201 bp, Homo sapiens
gagtactttacagctcagcacccaggcagccaccactgtgacaactgaccattagacaaagctcatttgccaccctggacctgagtccttgcatccaggtkcctcttccttctcagccttaccttgacccccctactccctcttatccaaagtccttgcttttcttttccaccgcttcaggcagaagctctccggaggatc

SEQ ID NO: 468063 - DNA, 201 bp, Homo sapiens
aattaaagttctgtagtcccaggaatggtttttctatgtattatactttttacaaggtgcttaaggtactttttattgaatcctacaaaaatcagaccatyttaattctgatttttgtaggattattgtgttaaataagacaacagatgcaaacataacaactaacttggcacattttaggtgttttgtaatgtttttact

SEQ ID NO: 468064 - DNA, 201 bp, Homo sapiens
agtccatttctcacctgtgagagacatcactaatcagtcatatccctctttcctgctgagttctgagtactttacagctcagcacccaggcagccaccacygtgacaactgaccattagacaaagctcatttgccaccctggacctgagtccttgcatccaggtgcctcttccttctcagccttaccttgacccccctact

SEQ ID NO: 468065 - DNA, 201 bp, Homo sapiens
atcatatataattaaatatatattcccccctgctgttcacagtgctttttttcaaatgggtaatgtattatggagcattttttaatgtgaattttttaaarcatttaggacctgggatggagctttgggttcctttctccaacccttgtctgttctgttataaaagggatgagagaggtacctttgaaagacctaaagaaa

SEQ ID NO: 468066 - DNA, 201 bp, Homo sapiens
tctaaaataaatatctcagaaatagtatcacagagaacatgcttcattgtcccacccccagcatatgagaccagttagtagtatggtttactcagcaggcygcttacttacaaatgcaacagttgtcctattttatgctcattgtgttgtcaccagcattttaaatctttacaagtcagggtgggtacctcaggcaggttt

SEQ ID NO: 468067 - DNA, 201 bp, Homo sapiens
catctcaagagggtacgcttcagggtctaagtgaccaaggttcaaagcttggctttgctatcctctagctgtgacctttaacaagttacttaacttctctraacctttttttctcacctgaaaatgggaagaactaatctaccttgccagaattgtgaggatcacatgagataacactaggtaaaagtacctatctcagtg

SEQ ID NO: 468068 - DNA, 201 bp, Homo sapiens
ttcaaggaagtagatgatggcaaaggtttccgaacttttattgtatatttcctaattctgaattttagagtacaattcagaagttacagtttatttagagktattcttaagtttgaaaatatttgggtatattttcataacaattgcagattgatgtggcagggctaatatcttgattgtgattgaagaaaatgttcatgt

SEQ ID NO: 468069 - DNA, 201 bp, Homo sapiens
ttcgagattacagtgagctatgatcaagccactgcactccagcttggagagagaccctatctctctctccctcacacacacacacacacacacacacaccmaaaaaaaaaaaaaaaaaaaaaagacattaaagctgatgtttggatgacaagaaggagctaagcataggaagttctagggagaccaatccaggcagaagga

SEQ ID NO: 468070 - DNA, 201 bp, Homo sapiens
tgctttggggtccttggagaaagagcttggggaggtaagagctgagcacactgatctcatctttgtcattgcagtctattgactcagaggacagctttgtyccaggccgaagggcctctctgtctgacctgactgacctggaggacattgaaggcctgacagtgcggcagctgaaagagatcttggctcgcaactttgtca

SEQ ID NO: 468071 - DNA, 201 bp, Homo sapiens
cacagttcactgcagccttgatctcccaggctcaagtgatcctcccacctcagccacccagtagctggcattacaggtgtgagccactacaacaggcccattttttttttttttttgagatggagtcttactctgtcacctaggctggagtgcaatggcgtgatctcagctctctgcaacctctgcctccatggctcaagc

SEQ ID NO: 468072 - DNA, 201 bp, Homo sapiens
aatctatctcccctttccttttttatttttttaatttttgagacaggaacttgctctgtggtgcctagactagagtgtgctgtggcatgatcatagctcaytacatcctcctggactcaagtgatcctctgtcctcagcctctcacatagctgggactacaggtgcgtgccaccatgcccagctaattattatcattatta

SEQ ID NO: 468073 - DNA, 201 bp, Homo sapiens
tccctcaggacacttagttcatatatgcatcttctctgacttctctgtcttttctgacagacagcactgtctgtctcttccactagactgttgagttctttgactgaacttggtgtccctggactagagcttggcaccatcagagagagtggctgacgtggatctccgggctcaaaccgttattctttgcaatattagaag

SEQ ID NO: 468074 - DNA, 201 bp, Homo sapiens
gaggtatgagaatcgcttgagcctgggaggcagaggctgcagtgagccaagatcacgccactgcattccagcctgggtgacagagggagactctgtatttaaaaaaaaaaaaaaaaagctgggcatggtggcttgcgcttgtagtcccagctaatcagaaggctgaggttggaggatcacttgagcccaggaggcagaagt

SEQ ID NO: 468075 - DNA, 201 bp, Homo sapiens
ccagatgcagtgctcatacctgtaatcccagcactttgggaggctgaggcggcagatcactggaggccgggagtttgagacctgcctggcctgcttgcccrcccaaaatgatgaaaccccgtctctactaaacatacaaaaattagtcgggcgtggtggcgggcgcctgtagtcccagctacttgggaggctgcagcagga

SEQ ID NO: 468076 - DNA, 201 bp, Homo sapiens
ccctcaggacacttagttcatatatgcatcttctctgacttctctgtcttttctgacagacagcactgtctgtctcttccactagactgttgagttctttgactgaacttggtgtccctggactagagcttggcaccatcagagagagtggctgacgtggatctccgggctcaaaccgttattctttgcaatattagaagc

SEQ ID NO: 468077 - DNA, 201 bp, Homo sapiens
gttgtgatgagctgagatcacgccactgcattccagcctgggcaacaagagcaaaactccatctcaaaaagaagaaaaacaaaatctgtttgaaaacacaycctcccctccaccttggtggcatgcgtgcattgagtgtcactgctcacctgtgctctcggacatcaaaaggacagtagaggtgtgtcttaactctgacct

SEQ ID NO: 468078 - DNA, 201 bp, Homo sapiens
cctcaggacacttagttcatatatgcatcttctctgacttctctgtcttttctgacagacagcactgtctgtctcttccactagactgttgagttctttgactgaacttggtgtccctggactagagcttggcaccatcagagagagtggctgacgtggatctccgggctcaaaccgttattctttgcaatattagaagct

SEQ ID NO: 468079 - DNA, 201 bp, Homo sapiens
ctcaggacacttagttcatatatgcatcttctctgacttctctgtcttttctgacagacagcactgtctgtctcttccactagactgttgagttctttgactgaacttggtgtccctggactagagcttggcaccatcagagagagtggctgacgtggatctccgggctcaaaccgttattctttgcaatattagaagctt

SEQ ID NO: 468080 - DNA, 201 bp, Homo sapiens
tgcaaatggtcagtatctagcgctgtgtgactttcagttacaaggaaatgtgtcaaaatccagcctaattaatgttttttttttgtttgtttgtttgtttktttttttttgagatggagttttgctcttgtggcccaggctggagtgcaatggcatgatctcggctcactgcaacctctgcctcctgggttcaagtgattc

SEQ ID NO: 468081 - DNA, 201 bp, Homo sapiens
gagtcatgaaggttgaggacataggaaagaatcacacatttatccatcagaagatcattggtgaccattggccgggcgctgtggctcacgcctgtaatccyagcactttgggaggccgaggcaagtggatcacgaggtcaggagatcgagaccatcttggctaacacggtgaaaccccgtgtctactaaaaatacaaaaaa

SEQ ID NO: 468082 - DNA, 201 bp, Homo sapiens
cagcagggctctttatcctaattcaggccttggattctaaagttctaccatatacatgtcttctctatgacttaggtattctgaattcttttttcttttctttttttttttttttttttttgagatggagtctcattctgtcgccaggctggagtgcagtgatgtgatctcagctcactgcaacctctgcctcctgggttc

SEQ ID NO: 468083 - DNA, 201 bp, Homo sapiens
gagttcgagattacagtgagctatgatcaagccactgcactccagcttggagagagaccctatctctctctccctcacacacacacacacacacacacacmccaaaaaaaaaaaaaaaaaaaaaaagacattaaagctgatgtttggatgacaagaaggagctaagcataggaagttctagggagaccaatccaggcagaa

SEQ ID NO: 468084 - DNA, 201 bp, Homo sapiens
ggaggccaaagtggccagatcacttgaggccggatttcgagaccagcctggccaacacggtaaaaccccgtctctgctaaaaatacaaaaattagcacccrtagtgtgcacccaatgtgtgcacccatagtcacagctacttaggaagctgaggcatgagaatcgtttgaaccgaggaggcagaggttgcagttagctgag

SEQ ID NO: 468085 - DNA, 201 bp, Homo sapiens
tcgagattacagtgagctatgatcaagccactgcactccagcttggagagagaccctatctctctctccctcacacacacacacacacacacacacaccaaaaaaaaaaaaaaaaaaaaaaagacattaaagctgatgtttggatgacaagaaggagctaagcataggaagttctagggagaccaatccaggcagaaggaa

SEQ ID NO: 468086 - DNA, 201 bp, Homo sapiens
gcgtgtatatgcacgcgcgcgcacacacacacaaaatttccaaattggagtaatttacacttccaccagcaatattagagttccagttgctcttttttcctttttttttttttttttttgagacagttttgctctgtcatccaggcaggaatgcaatggtgcgatctgggttcactgcaacctctgcctcccaggttcaag

SEQ ID NO: 468087 - DNA, 201 bp, Homo sapiens
gcagccttgaactcctggactcaggcagtctccctgcctcagcctcccaagtagctgggactacaggtgctcaccaccatgcctggctaattaaaaaaaawtttttttttttgtagagacaggggtcttgctgtgttgccaaggctggtctcaaattcctgggctcaagcaatcctacctctgtctcccaaagtgttgaga

SEQ ID NO: 468088 - DNA, 201 bp, Homo sapiens
cgaagtgggccgatcacaaggtcaggagttcgagactagcctggccaatgtggtgaaatcccatctctactaaaaatacaaaaaagccgggcgtgatggcrggcacctgtaatcccagctacttgggaggctgaggctggagaatcgcttgaacccaggaggcggaggttgtgatgagctgagatcacgccactgcattcc

SEQ ID NO: 468089 - DNA, 201 bp, Homo sapiens
gcgagtagagggcagatgtccatctaggctcttggcaagcctggttcccagcagggagtggtaagagttcagaaatgatgtcagggcagtaagagactgtrtttgtaccatcatgccttacctattcagacatccttctctttccttttcagtcagtggtgccgaagaccaaaacggtatgtagttgtttctgtttgggaa

SEQ ID NO: 468090 - DNA, 201 bp, Homo sapiens
tgtttatatagtgctttatagcatacagactgtccagaggagaaaaatgaagtacagaaagtctattacttgttagagggaggtaacacagcccttaagtaagtagagcaggacttaggactgaggccttcttattccagattctatattctttttattattacatactgtctcagatttgtctgtcaacgtgtgatttaa

SEQ ID NO: 468091 - DNA, 201 bp, Homo sapiens
tgaggtgggaggatcacttgagcctgggagatcgaggctgcagtgagctgtgatcgcaccactgtactccagcctgggtgacagagtgagaccctgtctcaaaaaaaaaaaaaatgttatgagagcacagacaggatcaggaaaggtttccctgaggaaataaatgatatgtaagggaggtgaggtggcaacagtgctcca

SEQ ID NO: 468092 - DNA, 201 bp, Homo sapiens
ctccaccttggtggcatgcgtgcattgagtgtcactgctcacctgtgctctcggacatcaaaaggacagtagaggtgtgtcttaactctgaccttttcccytttcctcccttgcaccagattttatcatgtgggcaacctgctgcaactggttctgcctggatggacagcctgaggaggtcccaccaccccagggagccag

SEQ ID NO: 468093 - DNA, 201 bp, Homo sapiens
taaaatactagatgttccataaaactgattttttgaggggtgattttactgtcatttgaatggacttaggccccagggtacatttttttaagatgtcttaytcaactttcctgtaatagtctctctctctttatataattaatgtattagacacataattggctgtttaagcattcagaagagacaatgtttggcctttta

SEQ ID NO: 468094 - DNA, 201 bp, Homo sapiens
acggccaggaaggtgagtgctgacttcttggcctgctctgccactgcagcctatggaccatgggcaagcgccgctgacccctctgaatgcctgcaaccttkcctttccctgtgtgatgctggtgacccagagctgtccctttcacaaaaatgttcaagaagaactaactgagtaaaagcaaaagcaaagcatgtcagcata

SEQ ID NO: 468095 - DNA, 201 bp, Homo sapiens
aatgatgtcagggcagtaagagactgtgtttgtaccatcatgccttacctattcagacatccttctctttccttttcagtcagtggtgccgaagaccaaarcggtatgtagttgtttctgtttgggaatgggcttaggcccttttgtccttcccctccttcaaccccaatccctttagtaatctaagaattctgagcattt

SEQ ID NO: 468096 - DNA, 201 bp, Homo sapiens
agcacaatgcttagaatgtcgtaggcacttgatgttatttccatcattagccaccatcacaaaggcctgattgcagattaacttgttctttttatcaaaarcaacgttaaggatgcctcaggtacatgaagaccataacaaagactggagcttatttactgtagcagatttcatttgaaatgcttgggagccatgcttccc

SEQ ID NO: 468097 - DNA, 201 bp, Homo sapiens
ctcccaagctcaggtgatccaccctcctcagcctcccaaagtgctggaattataggcatgagccacggcccccggccagaagttttctttcatttgagttstggatgtggagttaggtccaattaaatcactgattatataaatcttagaaaagtaaaacgttaggtttacagctttatccgtcatttgctcttgtatttt

SEQ ID NO: 468098 - DNA, 201 bp, Homo sapiens
tgaatgagctggaaaaaaaattactggctagataatggtgtctaggtgtgcaccctccctcttccagaggcagtgagttatctgtgatcaagcatgactaggcagaaggtaaaccctcacctggataaagaactcctgcattctgcatttttctgcagaatgagaggtttgcagctcagaataagtgataggatatgatgt

SEQ ID NO: 468099 - DNA, 201 bp, Homo sapiens
gagcttctggaggggaagaaaaattccagtttggatggtaaaagatggttattggtacaatattttcttgctacaatattttcttgctacaaaagtatgarttaattttgtgcaatttacagtgaattttgtgaatattaagggtgttttcatctatgagaatttttcatttgtaatttcatgcttaagtggatcagcatt

SEQ ID NO: 468100 - DNA, 201 bp, Homo sapiens
cagaatataagtaagatgtggcccttgcattccctgagttttcagtcctaaagagaaatggcaggctgtacttttgccacaagccaaataccccatctctrttggtaatacctccctgtggtttagcagcgaccctgacggttttggagggagtctggcacccagcctctttagttggaccagttggaggatgaggttatg

SEQ ID NO: 468101 - DNA, 201 bp, Homo sapiens
cacctggcctaccaccaattttagatacaatttaccacactgaccttagagatttttcatgaaagaataatcaatatatgtttattaaatgggtagtttgkgcatatgatttacaaatttggctgcatatagagtcatctgggagctttttacaagcataagctcctaggtaccagaccagtgactcagtgtctcctgggg

SEQ ID NO: 468102 - DNA, 201 bp, Homo sapiens
tgagatcctgtctcagaaaacaaaaacaaaaaaccaagcaaacttttcaggtagatttttcaatgaaagatgataagcttcctgtcattaaccagaaattyccagattgcacctaaaggtcaccctacatacaagatctaagtgggtacttttcctctgagattttcaagagaccttagtgtctgcttacatcccctgttc

SEQ ID NO: 468103 - DNA, 201 bp, Homo sapiens
tacaaggatcagaaaggactccagcacctgggtgaggggctatctgcatggtagctttacagagctcaggagtgtttgctgtcactccaaagcatgatggyattgacctgactcaatttccacacttaagccatggaaggagacaccttacatatttgcaccgtctaataatagctgtcatttgtggttgagtgtcaaaac

SEQ ID NO: 468104 - DNA, 201 bp, Homo sapiens
ttccttgcttggtaagagtggttgaagtcaggtttcaggctctcttctaccagtagctcaaattcatcagtgttaggggtcatctgactgactcttcaccygattacagactgaggcctactgacatggagtctgttttccctttgggattgtttcaagagtcttctctccagtcgtcaggacctggggaacagaacagat

SEQ ID NO: 468105 - DNA, 201 bp, Homo sapiens
tttaaccatgtaagaagtgattatttttattctaaaatgcaataggagtccattaaagaacttttttttgaagagtttttaaacatttttatgtacaaagmgttaacatgatttctttcattgggtggatgccttggataatccatccaaggaagatcacttctaggaacaagcaacattaaagagctttaagtgtgtgtg

SEQ ID NO: 468106 - DNA, 201 bp, Homo sapiens
atctttcctgtaataacccccttccccacatatgtatattcctagcataagacttcattctccacctaaacttggagactgtggggtggcagaatggcaattttttttttttttttgagatggagtctcgctctgttgcccaggctggagtgcagtggtgcaatttcagctcactgcaacctccacctcttgggttcaagt

SEQ ID NO: 468107 - DNA, 201 bp, Homo sapiens
tctttcctgtaataacccccttccccacatatgtatattcctagcataagacttcattctccacctaaacttggagactgtggggtggcagaatggcaattttttttttttttttgagatggagtctcgctctgttgcccaggctggagtgcagtggtgcaatttcagctcactgcaacctccacctcttgggttcaagtg

SEQ ID NO: 468108 - DNA, 201 bp, Homo sapiens
tccaggtgcctcttccttctcagccttaccttgacccccctactccctcttatccaaagtccttgcttttcttttccaccgcttcaggcagaagctctccrgaggatccaggtggtgcatgcatttgacatcttccagatgctggatgtgctgcaggagctccgaggcactgtggcccagcaggtgagcctgctgttctgc

SEQ ID NO: 468109 - DNA, 201 bp, Homo sapiens
tggaaatcatcattctcagtaaactattgcaaggacaaaaaaccaaacaccgcatgttctcgctcataggtgggaattgaacaatgagaacacatggacayaggaaggggaacatcatactctggggactgtcgtggcgttgggggaggggggagggatagcattaggagatatacctaatgctaaataacgagttaatgg

SEQ ID NO: 468110 - DNA, 201 bp, Homo sapiens
attcagtcagctcttttagaaaatgtatgaaagagtgaggactaaagttaagaaccagagaatatgggtaagaagaatgagtcacaggacaattagcaacrctttaaacaattttttagaatgagtggagtgttggcatgtacccagagttactatctgcaggaataaatgaataacattacccaaattctgccatctgta

SEQ ID NO: 468111 - DNA, 201 bp, Homo sapiens
attatcagcttctttcttcctaaactgcttaggcaaagagcacacatggacactttcctaaaccttagtccattgggcattttgcattcttcattgtattstgttctctgagacatttgacagcgttgataatttcttcttgaaactaaaaacactcttccagttccccctgctctgagcattcttttttcctcttttctg

SEQ ID NO: 468112 - DNA, 201 bp, Homo sapiens
tgaggcaggagaatggtgtgaacccgggaggcggagcttgcagtgagctgagatcatgccactgcactccagcctgggcgacagggcaagactccgtctcaaaaaaaaaaaaaaaaagaaagcaaaaattagctgggcatgatgacagctgcctgtaatcccagctactcaggaagctgaggcaggagaatcacttaaacc

SEQ ID NO: 468113 - DNA, 201 bp, Homo sapiens
ccccaggtactcaggaggccgaggcaggagaatcgcttgaacccatgagaaagaggttgcagtgagccaagatcatgccactgcactccagcctgggcaasagagtgaggctccatctcaaaaaaataaaaaataaaagtagaccagatgcacgagtaggagctttgtgtgagttctgagcatgtagagcgagtagagggc

SEQ ID NO: 468114 - DNA, 201 bp, Homo sapiens
ttcaagtctttatttcccaggttggtggggagtgaggagaccctactttcattccctttcctagcccactgatttttgggggcaggtcagggagaaagcatttttttttttttttttgagtctcactctgttgcccaggctggagtgcagtggtacagtcttggcttactgcaacctccacctcccaggttcaagctattc

SEQ ID NO: 468115 - DNA, 201 bp, Homo sapiens
tgacgtcaggtgatccacccacctcagcctcccaaagtgctgggattacaggcatgagccaccacgcctggctcatgatcttattttccttacgatattcyttgtttgaaaatacaaattgttcagaaaaactaggagttctcaatagaacctaaagcctaagaaaattgtgtcactagacaccatttaaaagaaggatta

SEQ ID NO: 468116 - DNA, 201 bp, Homo sapiens
tgttaggggtcatctgactgactcttcacccgattacagactgaggcctactgacatggagtctgttttccctttgggattgtttcaagagtcttctctcsagtcgtcaggacctggggaacagaacagatgactccacgtgggaactttatccagattctctgactgactgaaacagctagatagttcattctttcttga

SEQ ID NO: 468117 - DNA, 201 bp, Homo sapiens
aattcctctatgggttggccaacccccagatggtagaggtgacttctgtgagatcagttcctttttatgggtacctacttcaggctacaatttaagacatrttggagatggctgggcttttgaacattattttttctgtttgggtcagctctactaggatactggtcatgcccactatattctgctagtgacacaagccag

SEQ ID NO: 468118 - DNA, 201 bp, Homo sapiens
tggaggggatgaagtgtggattaaacaagtaaccagagttggttattgaggaaatgtttcctcggaggagctctatttgagggaagcatgtgcactgagastttgtttacaatgtacctgttatctcccacctccctcccccagtcacccctatacacttaagacattctcctcactcctctgcccctttttttctgccct

SEQ ID NO: 468119 - DNA, 201 bp, Homo sapiens
gggggaatcagatttgctcatgaagacatccctttccacttttgtcatgggcagtaaatactatagtttacaatgcctaccaattagcaaaggatcattcmttcagctactcagttcctctgtaaaacaggtctatgtatgtgcaattcagctaagatctagcagtaacttaagggcagaagctggctctctacttacaac

SEQ ID NO: 468120 - DNA, 201 bp, Homo sapiens
agaattaaaactgaggttgtttactcattttgcctttaaatcttttatccccttttggtgaaggtttccctttaggaaaaaaggtgtcaaacaaccctgattttttttttttttgcatcatttttattacaccaaattaaagttgggagttccaagatcccattccagttaatatttaaccaaggtctaaaatttgatttt

SEQ ID NO: 468121 - DNA, 201 bp, Homo sapiens
aaacacaatgccatttatagttgtttcagagaaatgaaatacttgggtataagtctaacaaagcatgtgtagaatctgtatgctgaaaatttttaaattgytgatgaaagagatcaaagatgactcggataaatggatgacatgtactttgttcatggattgggagactgaacataatgaagatttcaattgtccccaagt

SEQ ID NO: 468122 - DNA, 201 bp, Homo sapiens
agcccactaatagacgtccctcttccccttacatctagttggccaaaatggggttatgtgtgtatcttggactaagacctgggcccaccatccctgaagtmagatttctgcccagtcgctgaacacattcagagtcatgttaatgggaaggatttagaatggcatttgggttggcactttgctactcatgttgggtgctta

SEQ ID NO: 468123 - DNA, 201 bp, Homo sapiens
agcggcaaaactcaggtacatgtgaggccagcagtcaggaggatttaggggtgagggtggtagatgcatagcccagggtccctgggggagcttcagcgtaytaatgggttcagagcccaacagagagaagatgggtaataaggaatggggtcgggactcagcccatttgtgttgctggaatctgggcaaggtttggtgggg

SEQ ID NO: 468124 - DNA, 201 bp, Homo sapiens
atctgtttgaaaacacatcctcccctccaccttggtggcatgcgtgcattgagtgtcactgctcacctgtgctctcggacatcaaaaggacagtagaggtrtgtcttaactctgaccttttcccctttcctcccttgcaccagattttatcatgtgggcaacctgctgcaactggttctgcctggatggacagcctgagga

SEQ ID NO: 468125 - DNA, 201 bp, Homo sapiens
aaaccaagttcaccctggctgggagcatctctgatgaggcatgctggcgactggatggataatcctgtgcatcaccattgtgtcctgtgctccctcctagygcagtggccaagccgggaaagcctctaacttgcctttgctgctgctgccttttttttcttttgtctctgcctttccatttgttagatgggggcccactct

SEQ ID NO: 468126 - DNA, 201 bp, Homo sapiens
ctgttccggccacaccacactgtgcagtcccctggtaggacttgggctaggctggctctcctgtccaagtgccttttgctccctttgcttatgtgtctgtytctgcccagctcccactgtgtctggtgcacacccaccctgacatccttttttatgcctcagctgtgatctagatagatgcttacagtaacttccctgtat

SEQ ID NO: 468127 - DNA, 201 bp, Homo sapiens
caccaccacacccagctaatttttgcatttttttttttagtagagacgggttttcactacattggccaggctgatcttgaactcctgacctcatgtgatcygcccgcctcagcctcccaaagtgctgggattataggtgtgagccaccacacccagcctatttatttatttttgagacagtctcagctctgtcatccaggc

SEQ ID NO: 468128 - DNA, 201 bp, Homo sapiens
agcctccatgacatctctaccgaaatgtgccgggagaaagaagagctggtgctcttggtccttggccagcagcctgtaatctcccaggaggacaggactcrtgcctccaccttgtccccagactttcctgagcagcaggccttcctgacccagcctcactccagcatggttccacctacctcacccaacctcccctcttca

SEQ ID NO: 468129 - DNA, 201 bp, Homo sapiens
acaacagagtgagaccctgtctccagaaaaaaaataataaaaatcaaataacttctttattggagattacatacaaatcgtgacctttttttttattcctraagtctttagtaaggttatatgtttactgcaatagatcttaaattttactatgatcaaaaatctcctaggtgcttgtaaaaaataaagattcctggttcc

SEQ ID NO: 468130 - DNA, 201 bp, Homo sapiens
ttgaatcctggctgtcaccgttaggtaatatttcctagctataataaaacagcttacacttgttgaggactcattttgtgttagatatgctaaatgggttmtctcttaatcttcacaacaaccccatgaggtagatactgttatcacccccattttacagatgtggaaactgagcaccagagaggctaaattacacaccca

SEQ ID NO: 468131 - DNA, 201 bp, Homo sapiens
ccctttggcaggccctggttgccctgaggcgggtgctgctggctcagttctcggctttccccgtgaatggcgctgatctctacgaggaactgaagacctcyactgccatcctgtccactggcattggcaggtttgtgtgtgtacttggggaagaaggagagaggcaggaggatggggcctcctctcagctctgcttttgat

SEQ ID NO: 468132 - DNA, 201 bp, Homo sapiens
tgaggcaggagaatcatttgaacccaggaggcggaggttgtggtgagccgagatcatgccactgcattccagcctgggcaacagagcaaaactttgtctcaaaaaaaaaaaaaaaaaaaagtagaagtaaaattcactagagaaggaaaggaagaaggaagagtatggagtacagaaccctagggcctatgtagggggcaa

SEQ ID NO: 468133 - DNA, 201 bp, Homo sapiens
agccacaagccacctcacccagccaacatgttacatcttaattcttggattttcttcactgcagggctttgggtggagaaataaaactcttcaaatgcatratcttggagatccctgtgaatcaataattctttagacaactgcggctcaaaatccctcctttcccttttccgagttattccatccatcttattagaaagg

SEQ ID NO: 468134 - DNA, 201 bp, Homo sapiens
ggctggtcttgaactcctgggctcaagcaatctgcccacttaggcctcccaacattttgagagtacaggtgggagccaccatgcctggccaaaaaaaaaaattttttttagagatggggtctcactgtcactcaggctggagtgcagtggcaagatctcagcccactgcagcttgaacctcctgggctcaagcaatcttcc

SEQ ID NO: 468135 - DNA, 201 bp, Homo sapiens
cctaacagaagcaaggggccaggaccctgagttttattgggccttgactaatgtgcctcctcatctgtgtcctcaccctcattgtggacttaggtttcagktatctcagaggcagacccacaggctctgctccaggccatgaaggtaaggaaacagcttgcacgattcttagaactgggggtgggtggggtggggtcatga

SEQ ID NO: 468136 - DNA, 201 bp, Homo sapiens
cttaagccatcctcctgcctcagcttcctgagtagctgggactacaggcgcaaaccaccacacccagctaattgtgtattttttactgagatgtgggtctygccatgttgcccaggctggtcttgaactcctgggctcaagcaatctgcccacttaggcctcccaacattttgagagtacaggtgggagccaccatgcctg

SEQ ID NO: 468137 - DNA, 201 bp, Homo sapiens
ggcggtgcagcaacagcaggagcggctgcggaagcaggagcagcacatgcaccaggcaaggctccctgagtgtatggcgcccctgcccccggcacccccarcctcccacctcacagctgagtccttctttctgggggaacggggacaggagcatctgagtctggcccagcagaggctgcaactggaccgcgcacgacagga

SEQ ID NO: 468138 - DNA, 201 bp, Homo sapiens
ctccacccttgccatcctcccaccacacctctgcctctgtttcccatgtgtggcagtcacctgtgacacctgggcctgggaggtgtgccccccccccccccaggagtgtgtccctgggagatggtgggtaggggacagctcgtgggaaccagattagtgtcaacatgtgggcttcaggcctgacaggaaaagccagcatca

SEQ ID NO: 468139 - DNA, 201 bp, Homo sapiens
tttctaggacctggacggcatggatgctgatatcttaggtctgaagaaatctaattcagcccctagcaaaaaagctgcaaaggaccctgggaaaggagagstgcccaaccaccccaagcctgcaggtgggtcagtagccagtgagaaaggtgcatgggagacggctcctcgcatctgctagggagactttgaggacgtgga

SEQ ID NO: 468140 - DNA, 201 bp, Homo sapiens
atcttgaaatctttctcctcaaaggccaggcacctgtaatcccagaactttgggaggccgaggcagtaggctcgcttgagcctaggagttggaggctgcartgagctatgatcacaccactgcactacagcctgggtggtgacagagtgagactctgtcttcaaaaaaaaaaaaaaagtctggcatggtggcttactcctg

SEQ ID NO: 468141 - DNA, 201 bp, Homo sapiens
tcctgacagtacagggagggcaccagctagatcctcccttgtggtgtgagatgttcctggaactcagccaggccctcctcctcctgggcttgcccagagcmcccaccctattcccagcattgcccgaaggaccaaccagtttgggtgaacagtggcctcctcagcttcctccccatctgggtgccccaccggcggcggagg

SEQ ID NO: 468142 - DNA, 201 bp, Homo sapiens
tcagcttctttaatctcatcttgaaatctttctcctcaaaggccaggcacctgtaatcccagaactttgggaggccgaggcagtaggctcgcttgagcctrggagttggaggctgcaatgagctatgatcacaccactgcactacagcctgggtggtgacagagtgagactctgtcttcaaaaaaaaaaaaaaagtctggc

SEQ ID NO: 468143 - DNA, 201 bp, Homo sapiens
tttgttttttgggtttttttttagagacaccatcgcattctatcacccaggctggagtgcagtggtgtgatctcattgcaaccttaaactcctggccttargcgattctcttaccttggcctcccaaaatactgtaattacaggcatgaggcaccacacccggtccagattcagcttctttaatctcatcttgaaatcttt

SEQ ID NO: 468144 - DNA, 201 bp, Homo sapiens
taggacaaagccgcgtttttggttacagccctgtggggctcttgtttttgttgtgtatttttgttttttgggtttttttttagagacaccatcgcattctrtcacccaggctggagtgcagtggtgtgatctcattgcaaccttaaactcctggccttaagcgattctcttaccttggcctcccaaaatactgtaattaca

SEQ ID NO: 468145 - DNA, 201 bp, Homo sapiens
gtcaagctccgcgccgaggaggtggagagcatgagcaaggtgctgctcgggcacatgggcgtgggcgcatctgagcccaggcagccctgacccaggcggcytccctgcaggtggcctccgagaagtacgaggagggggagcgggcattgcgcgaggcccagcaggtgcaggcagagcagcaggcccggttgcaggcggtgc

SEQ ID NO: 468146 - DNA, 201 bp, Homo sapiens
atggtaggcagagttcagagtaagatgcatggaaagcgaacatgcctcccatcctgcatccccaaagatcttgactgcatgcaacactctgggggctgggyggcaaggaccaggatggagaccctggagaagagtgacaggaggtggcattgataccaaactttcgacgaccaaggtttcttctgagactctgagtgtcca

SEQ ID NO: 468147 - DNA, 201 bp, Homo sapiens
tcatggcccctgctgactcccagagccaggcagagtcagggacgatgtggggaggggcctcagtgacggctggctcagctagcatccagggctccacctcyctctcagctcagggaaggtgaccgcccatccaaacctgccttgcaggaccgtgacttcttggagaatgaacagttcttcctggagaccctgaagaaaggg

SEQ ID NO: 468148 - DNA, 201 bp, Homo sapiens
catagtctgagaagcccgtacaggatcgataggagatgccagaagttccttgatgtgttatgggacacatttggacttgtaggtcgtgaagtcgccattgsagagaaaaagaaacaaggccgggcacggtggctcacgcctgtaatcccgacactttgggaggccaaggcgggaggatcacttgaggccaggcgtctggga

SEQ ID NO: 468149 - DNA, 201 bp, Homo sapiens
cctggctccaccacctcctcccaggggcagggtgggcagaggggaccctagagtcctgcacagagtgcagcgcaattcctgggaggagaatgcagcagggyctccgctgtctccaggagcaggctgagctgaagatcagggccagcgagctccgggccgaggagaagcagctggcagcggagagagcagccctggagcagg

SEQ ID NO: 468150 - DNA, 201 bp, Homo sapiens
ccacgctctcagtcctgccctgggccctacaggaacgctggcgggtgactgccgagcagtccaaggcggagtccatgcagcgcgccctagaggagcaaagraaggtcacggcccagcagatggccatggaaagggcggagctggaacgggccaaggtgagtcaagccaccgcactcagcccctgcccctgccattatgccc

SEQ ID NO: 468151 - DNA, 201 bp, Homo sapiens
aatcagcctcacatcctgatacacacatgtgattatacacgtctatagctgagacaaaataatacttaccgtgaaataatacttaccgtgaccactgttcrtgctcagttgtctatgattgagatgctgtttgatttggaaacacactggctgtgacacattaagctggtttctcagccctctcatgggtagcagctcgca

SEQ ID NO: 468152 - DNA, 201 bp, Homo sapiens
gaggccaaggcaggaggattgcttgaggctaggagttcaagaccagcctgggcaacatagtgagacctcatctctaggaaaaaaaaaaaaaaaaagaaagmctgcttggggccgggcgtggtggctcacacctgtaatcccagtgctttgggaggccaaggtgggtagattgcctgagctcagaagttcgagaccagcctg

SEQ ID NO: 468153 - DNA, 201 bp, Homo sapiens
ctgactggttgggcctcaaggacgaggacttggacctgttccctgcctcacccaccagagaggcccatcgggaaagttcagtgcctgtcacgccctcagtrcctcctcctgcgagccagcactccacgccagctgggctgcccccctccagggcaaagccaccaactgaaggtgcagggtcccctgccaaagccagccagg

SEQ ID NO: 468154 - DNA, 201 bp, Homo sapiens
ggaagacaggcccctgcagctgtcccctgtcccacccgagagtctcatgtgggaggccacagggtacaaggccctcagctctgcaggtgctgaaggaagcrggagatggcctggtcccgccagcccagacagagtggaggagatggccccagtgggaacccccatcccagacgctgctcaggttcgccagtgccccaccca

SEQ ID NO: 468155 - DNA, 201 bp, Homo sapiens
cctgtagtaagatgagtggaaaggagagctccctgaaactgctagagtcttagatgttgctcctttccccttataaactccatagctgtccattggcatgrgtgggaagtagcagaatttcagtcctggatggaagagttctctatggttggaaggagtaggaatggcagtgctctctgagtctctaaaaccaggcaggtt

SEQ ID NO: 468156 - DNA, 201 bp, Homo sapiens
acaggaggtcatcgggaagatggaggcacggctgaatgagcagagccggctgctggagcaggtgaggcccgtcctcctggccctcctgcccctcctgccayggggcctcttctccagggcacccgcaagtgtagcggcactcccctgacctcacttcctcaggaggtcaaggccccacctgccgcttcctgcctctacatc

SEQ ID NO: 468157 - DNA, 201 bp, Homo sapiens
aggacgggagggaggcctctagatcaggctttcatcacaacctataatgagaaatcagcctcacatcctgatacacacatgtgattatacacgtctatagmtgagacaaaataatacttaccgtgaaataatacttaccgtgaccactgttcgtgctcagttgtctatgattgagatgctgtttgatttggaaacacactg

SEQ ID NO: 468158 - DNA, 201 bp, Homo sapiens
caaaatactgtaattacaggcatgaggcaccacacccggtccagattcagcttctttaatctcatcttgaaatctttctcctcaaaggccaggcacctgtratcccagaactttgggaggccgaggcagtaggctcgcttgagcctaggagttggaggctgcaatgagctatgatcacaccactgcactacagcctgggtg

SEQ ID NO: 468159 - DNA, 201 bp, Homo sapiens; identical to SEQ ID NO: 146581

SEQ ID NO: 468160 - DNA, 201 bp, Homo sapiens
tgctgtggctagtagggggaggactggctggggacttgaggagcccctttgccccttcacctgttgcagcctcagtcagcagttggggaacaaggcagggygccgtggccacagaggccgcttcttggctttgctactctgccttttaggcactgcagagagagcctctggctcccaggcttgccccagggacatacccaa

SEQ ID NO: 468161 - DNA, 201 bp, Homo sapiens
ccaggcacccctcattttgtgcctctttgggaaggacgtgtcagtggcatagtgtgggagacactggtgggttcatgcagcttctcagggagtggccaggygtgatcctcagggcgggaaccacgctctcagtcctgccctgggccctacaggaacgctggcgggtgactgccgagcagtccaaggcggagtccatgcagc

SEQ ID NO: 468162 - DNA, 201 bp, Homo sapiens
ccctacatggccccagagaacccacaaagctcctgtcacccaggctggagtgcagtggcgcaatttcagctcactgcaatctccgtctcccggttcaagcrattctcctgcctcagcctactgagtagctgggatggattacaggcacccaccaccacgcctggctaatgtattccagcccatgtattccagcctacagtt

SEQ ID NO: 468163 - DNA, 201 bp, Homo sapiens
aatggtctttccaggtaggagcaggtatgcatttgccagaggcttctgagagttagtgccattgcaccctgagtatatggccagggtccacccactggcgsggggagcagctctgcaggaacaagctgtgaccgcccggtatttccaccaacactttggtccctgacttcctccttggccttttcagccctcatgcctcct

SEQ ID NO: 468164 - DNA, 201 bp, Homo sapiens
tgggagtttaaccctgggtgaggaagaggtgctttgagcttcctttggggtccctgggacatgagttacaccagcccctcctggacactcgcaggcccagwgccctgggcctcctgttcatttctctgttgttgatgtttcagagcctgccacgtgtttcccgagcacccagaaacccacagagccttccgtgcccgtcca

SEQ ID NO: 468165 - DNA, 201 bp, Homo sapiens
tcctctcctccagcccctgctcccagagtccctggcccggagcctgctgccgagcacagaataccagaagcagctcctggcagcacaggtgcaacttcagwgcagccccgctgagctccaggccgagctgctgcatagccaggcccggctggcagagctggaggcccaggtgaggggcagcggggccgttggtgctggtgg

SEQ ID NO: 468166 - DNA, 201 bp, Homo sapiens
agcctgcaggtgggtcagtagccagtgagaaaggtgcatgggagacggctcctcgcatctgctagggagactttgaggacgtggaagatgctagtaggaarcgttcatgtccttgggttttctctgcacaggatggagaggccaaggagcatttgtgcgtgtgtgtgtttgagtgtgtgtggtggggtaaggggacagctt

SEQ ID NO: 468167 - DNA, 201 bp, Homo sapiens
cagtgcctgaggtgctcccttcacagcagcttccctctgcttgtcttacacaacaagctaccaaattcagcttttgttagaattttgcagccgcaaatgarcttggttcccctactccagatcacggtcacaggctccttaattcacagacagtgaagatatgtggggtgacgaggacttcacctttggagcctatcagcc

SEQ ID NO: 468168 - DNA, 201 bp, Homo sapiens
gcccaggaagggaggagctgactggttgggcctcaaggacgaggacttggacctgttccctgcctcacccaccagagaggcccatcgggaaagttcagtgyctgtcacgccctcagtgcctcctcctgcgagccagcactccacgccagctgggctgcccccctccagggcaaagccaccaactgaaggtgcagggtcccc

SEQ ID NO: 468169 - DNA, 201 bp, Homo sapiens
cctccgagaagtacgaggagggggagcgggcattgcgcgaggcccagcaggtgcaggcagagcagcaggcccggttgcaggcggtgcagcaacagcaggarcggctgcggaagcaggagcagcacatgcaccaggcaaggctccctgagtgtatggcgcccctgcccccggcacccccagcctcccacctcacagctgagt

SEQ ID NO: 468170 - DNA, 201 bp, Homo sapiens
acttggacctgttccctgcctcacccaccagagaggcccatcgggaaagttcagtgcctgtcacgccctcagtgcctcctcctgcgagccagcactccacrccagctgggctgcccccctccagggcaaagccaccaactgaaggtgcagggtcccctgccaaagccagccaggcttccaagctgcgagcctccaaggagg

SEQ ID NO: 468171 - DNA, 201 bp, Homo sapiens
cctgggccttctgtcaccttcaccttgaacgctgcctttcctcagccaacctctcaccagcacacaagggcttgagcacgcagctgctggagggagttctrgaacaactgcacgagaaagaccgtgtgtcaggcctggtgtctcggggtaggcctgggctgcgggctgagtgggaatgagagcatggtgggcagcacaggc

SEQ ID NO: 468172 - DNA, 201 bp, Homo sapiens
gtgtccattcactgcaccactgtggacattgaggcaggaagggggtactggaagggaagagatgcccagaaatcccaggagctcagacgtgggaggagaaygccccaagacgggatggtggaagcaggaggaaggggggccacgagcttcacgtgtgaagcccgtcctgggccctgtcttcatccagcctgacctgggcct

SEQ ID NO: 468173 - DNA, 201 bp, Homo sapiens
aaaccaggcaggtttggcttcaaacaactgccaagcccaagcaaggggaacaaagccaccctcctgtgtaagctccattggccaagctctgctcctgccgygccgtctgccctaacagaagcaaggggccaggaccctgagttttattgggccttgactaatgtgcctcctcatctgtgtcctcaccctcattgtggactt

SEQ ID NO: 468174 - DNA, 201 bp, Homo sapiens
ctcgagcgctgctccccagttcaggcttgcttttcctcaactaagtgctgcagtctgacctgtgctttcccttctgctgtgagacttggaagacccattgrgaggacttctctcctatgatgaaggaggaatcaccaagcagccgcctgtgacacagagtaaaacagcttctgacaagagccccagcacagtgagagatca

SEQ ID NO: 468175 - DNA, 201 bp, Homo sapiens
ggagtcttgctctgttgcccggggtagagtgcaatggcgtgatctcaggtcactgcaacctctgcctcccagtttcaagcaattcttctgcctcagcctcyccagtaattgggattacaggcatgtgtcaccatgcccggctaatttttgttttggttttgtttgtttgtttgtttttgagacggcgtcttgctctgtcac

SEQ ID NO: 468176 - DNA, 201 bp, Homo sapiens
gcagagcagcaggcccggttgcaggcggtgcagcaacagcaggagcggctgcggaagcaggagcagcacatgcaccaggcaaggctccctgagtgtatggygcccctgcccccggcacccccagcctcccacctcacagctgagtccttctttctgggggaacggggacaggagcatctgagtctggcccagcagaggctg

SEQ ID NO: 468177 - DNA, 201 bp, Homo sapiens
ggaacaaagccaccctcctgtgtaagctccattggccaagctctgctcctgccgcgccgtctgccctaacagaagcaaggggccaggaccctgagttttaytgggccttgactaatgtgcctcctcatctgtgtcctcaccctcattgtggacttaggtttcaggtatctcagaggcagacccacaggctctgctccaggc

SEQ ID NO: 468178 - DNA, 201 bp, Homo sapiens
aaggagtaggaatggcagtgctctctgagtctctaaaaccaggcaggtttggcttcaaacaactgccaagcccaagcaaggggaacaaagccaccctcctktgtaagctccattggccaagctctgctcctgccgcgccgtctgccctaacagaagcaaggggccaggaccctgagttttattgggccttgactaatgtgc

SEQ ID NO: 468179 - DNA, 201 bp, Homo sapiens
gagagctgcccaaccaccccaagcctgcaggtgggtcagtagccagtgagaaaggtgcatgggagacggctcctcgcatctgctagggagactttgaggaygtggaagatgctagtaggaagcgttcatgtccttgggttttctctgcacaggatggagaggccaaggagcatttgtgcgtgtgtgtgtttgagtgtgtgt

SEQ ID NO: 468180 - DNA, 201 bp, Homo sapiens
gactggctgagccatgccctgtctcggaagaagtcccaaggcctggccagagagcagcatgctgggacctctgagggcctgcatttggcggggacagcggkccatcccccttctggcaggtactgacttaggctgctgtggctagtagggggaggactggctggggacttgaggagcccctttgccccttcacctgttgca

SEQ ID NO: 468181 - DNA, 201 bp, Homo sapiens
ttatttgatcctcatgttcccatgactttggtcatttagaaatgaggaaaccgaacttcagagttgagcctgccacagtcacgtggcttgtgagggcagcactccggcttggccccaggcttctctggctctccctggaagcccctggctccaccacctcctcccaggggcagggtgggcagaggggaccctagagtcctg

SEQ ID NO: 468182 - DNA, 201 bp, Homo sapiens
gccgcatcaaggtgctagaaacatcgtaccagcaacgggaggagcggctccggagagagaacgaagagctgtcagctcggtatctgtcgcagtgccaggargccgaacaggcccgtgctgagcttacggcccagcaccagcggcgcttggcggccatagcgcaggagaaggaccaggaaatggagcggctccgggagctgc

SEQ ID NO: 468183 - DNA, 201 bp, Homo sapiens
cggcagcgtgacgagcagctgcggggtacgccctcccctctcagccaccccggctcctggtgggaaggggagcagctgctgagcaccctgtgggttgcccscagcactgcaggagcggctgggccagcagcagcgggacatggaggaggagcggagccggcaacaggaggtcatcgggaagatggaggcacggctgaatga

SEQ ID NO: 468184 - DNA, 201 bp, Homo sapiens
tggaagcgggaggccagtcctggccgggctgggcgacccgaatggagccagggccggcgctggtcccagcggccgcacctccgggggcacggcgcgtaacrggaggcttccggggctgagagcgttacaggctgcgctccggggccagataggccgggcgctcagaagggtgacgcattgaggggcgcggagtctcgggac

SEQ ID NO: 468185 - DNA, 201 bp, Homo sapiens
ggctgtcttccagtgaaggggacatcccataagtagttttgagagggtggatgggttacttgcccaccagaaacagccctagtcccaactccttgcgttcytttggcccctccctgcctacctagaatctgcctgaaagggctggagaggggcagtattgggggactgtgctagctttacccccgcaggacatacacagga

SEQ ID NO: 468186 - DNA, 201 bp, Homo sapiens
tctgggtgagcggcggaggcgctgctgtggattggtcacagggagaaacctctgatctgttcctattggcccgtccgtcaagggacgatgatgattggtarggcagagcaatctgagtcctagttggtggagttctgcccggatggaagctccggccgcggagtgatggtggcctcagcgaagatgggccgggcagggacc

SEQ ID NO: 468187 - DNA, 201 bp, Homo sapiens
cttccagtgaacaaacctgctgttcctcctcatccagctgccctgcccactttgaaggaacaaatgtggaaggtgtttcctcccaccagagtgcccccccycatcaggagggtgagcccggggcaggggtgacccctgcctccacacccccctcctgccgctatcgccgtttaactggcgactccggtattgagctctgcc

SEQ ID NO: 468188 - DNA, 201 bp, Homo sapiens
gcccccacggcagtgtctcagcggccatccccctcaggcccgccgccgcgctgctctgtccccggctgtccccatccgcgccgctacgcttgctcccgcamaggccaggcactctgtagtcttcagtgctaccgcatcaacctgcagatgcggctgggggggcccgagggtcctggatccccccttttggctacgtaaggc

SEQ ID NO: 468189 - DNA, 201 bp, Homo sapiens
gggagaaacctctgatctgttcctattggcccgtccgtcaagggacgatgatgattggtagggcagagcaatctgagtcctagttggtggagttctgcccrgatggaagctccggccgcggagtgatggtggcctcagcgaagatgggccgggcagggaccatggcggtggcagcagaggtggcaggggcggggcggctgg

SEQ ID NO: 468190 - DNA, 201 bp, Homo sapiens
gcaggggcggggcggctggcggtagaggaggctgtggtcctcagggggctgtaggtggaggtatggctcgggccagcagcgggaacggcagcgaggaggcmtggggggcacttcgggcgccgcaacagcaggtatcccaatagctccaaaacctatcacgacagccatttgtctctttcccctttccttgtcccttccttt

SEQ ID NO: 468191 - DNA, 201 bp, Homo sapiens
ggtgtaagtctccaagagggctatttccaggtccctgtgtccaccctcccttggacctcagaatttcggccttcagggccccttctctgcatgaaagatgmctgagttgctccctccttgcctcttgcagggttctggctgctctggactgtcctcatcctctttagctgctgttgcgccttccgccaccgacgagctaaa

SEQ ID NO: 468192 - DNA, 201 bp, Homo sapiens
tccaacttccttcccagatgaagacagtaatctctctccctctccacttcgggacctatcaggagggttagggggtcaggaggaagaggaggaacagaggkggctggatgccctggagaagggggagctggatgacaatggagacctcaagaaggagatcaatgagcggctgcttactgctcgacaggtatgttggttcat

SEQ ID NO: 468193 - DNA, 201 bp, Homo sapiens
atccagctgccctgcccactttgaaggaacaaatgtggaaggtgtttcctcccaccagagtgccccccctcatcaggagggtgagcccggggcaggggtgwcccctgcctccacacccccctcctgccgctatcgccgtttaactggcgactccggtattgagctctgcccttgtcctgcctccggtgagggtgagccagt

SEQ ID NO: 468194 - DNA, 201 bp, Homo sapiens
tggcggtggcagcagaggtggcaggggcggggcggctggcggtagaggaggctgtggtcctcagggggctgtaggtggaggtatggctcgggccagcagcrggaacggcagcgaggaggcctggggggcacttcgggcgccgcaacagcaggtatcccaatagctccaaaacctatcacgacagccatttgtctctttccc

SEQ ID NO: 468195 - DNA, 201 bp, Homo sapiens
gcgcacggggcgagcggcggggagggcgggctgcggctccggcccccatggtgcgctactgcagcggagcacagggttccaccctttccttcccacctggsgtccccgcccccacggcagtgtctcagcggccatccccctcaggcccgccgccgcgctgctctgtccccggctgtccccatccgcgccgctacgcttgct

SEQ ID NO: 468196 - DNA, 201 bp, Homo sapiens
gcggccatccccctcaggcccgccgccgcgctgctctgtccccggctgtccccatccgcgccgctacgcttgctcccgcacaggccaggcactctgtagtyttcagtgctaccgcatcaacctgcagatgcggctgggggggcccgagggtcctggatccccccttttggctacgtaaggcccttaacccggactctgcgc

SEQ ID NO: 468197 - DNA, 201 bp, Homo sapiens
gggtggatgggttacttgcccaccagaaacagccctagtcccaactccttgcgttcctttggcccctccctgcctacctagaatctgcctgaaagggctgkagaggggcagtattgggggactgtgctagctttacccccgcaggacatacacaggagcctttgatctcattaaagagatgtgaaccagctacttgtggat

SEQ ID NO: 468198 - DNA, 201 bp, Homo sapiens
ttccagtgaacaaacctgctgttcctcctcatccagctgccctgcccactttgaaggaacaaatgtggaaggtgtttcctcccaccagagtgccccccctmatcaggagggtgagcccggggcaggggtgacccctgcctccacacccccctcctgccgctatcgccgtttaactggcgactccggtattgagctctgccc

SEQ ID NO: 468199 - DNA, 201 bp, Homo sapiens
gggagcactgctctgggtctcacactgcccctcctctatcctagggagcctgaggcccaggggtggaaagatccagttgcgggtggggggtagtgaaccgygcaggataatgaaagcaacttgctttggaaatgacctaccgctacccgttgtctgagactgagattatctcagactgtcttctggcttctgccaaaacac

SEQ ID NO: 468200 - DNA, 201 bp, Homo sapiens
atatgccagagcctgttctgttgtctgtattggctattgccgctgtcagtcagggccgtgggtcgaaccttcacctactctttgtctgtacaagctcttgktgtctgggtgagcggcggaggcgctgctgtggattggtcacagggagaaacctctgatctgttcctattggcccgtccgtcaagggacgatgatgattgg

SEQ ID NO: 468201 - DNA, 201 bp, Homo sapiens
gtattgagaactctccacgacccacgcactttgcgtggcattggggatatcgatagtagagaaaagacaaagtttctgttctcctggagctagtattctastgtgtgtgttggggggctgggaagtaaataagtaaataatttcaaaaagctatatggtttatgacaaaaagaaaagggtgatgaaatagaaagtggcgta

SEQ ID NO: 468202 - DNA, 201 bp, Homo sapiens
gctgttgttatggtaacagcgagtactgcgggaagggtgggatccagtaggggcttaggttattcagggcttcccctgccaccctccggccaaacactgtygacaggctttccttccacaggagaagccctggagttgagcctggcgggtgcccatggccatggagtgcacaagaaaaaacacaagaagcacaagaagaaa

SEQ ID NO: 468203 - DNA, 201 bp, Homo sapiens
cagtgaaggggacatcccataagtagttttgagagggtggatgggttacttgcccaccagaaacagccctagtcccaactccttgcgttcctttggccccyccctgcctacctagaatctgcctgaaagggctggagaggggcagtattgggggactgtgctagctttacccccgcaggacatacacaggagcctttgatc

SEQ ID NO: 468204 - DNA, 201 bp, Homo sapiens
gtagtcttcagtgctaccgcatcaacctgcagatgcggctgggggggcccgagggtcctggatccccccttttggctacgtaaggcccttaacccggactytgcgccccgtcccatgcccgctcttgagtatcttccccaccctattaaattacatccggtgcttcggcttgtacagaactgggggagtgggatgttgtgg

SEQ ID NO: 468205 - DNA, 201 bp, Homo sapiens
ctcctgccgctatcgccgtttaactggcgactccggtattgagctctgcccttgtcctgcctccggtgagggtgagccagtcaaggaggtgagggttagtkccaccctgccagatctggaggactactccccgtgtgcactacccccagagtctgtaccgcagatctttcccatggggctgtcttccagtgaaggggacat

SEQ ID NO: 468206 - DNA, 201 bp, Homo sapiens
tcaaggaggtgagggttagtgccaccctgccagatctggaggactactccccgtgtgcactacccccagagtctgtaccgcagatctttcccatggggctrtcttccagtgaaggggacatcccataagtagttttgagagggtggatgggttacttgcccaccagaaacagccctagtcccaactccttgcgttcctttg

SEQ ID NO: 468207 - DNA, 201 bp, Homo sapiens
aaagaaaacactgaaaaacatcagctaagagattattttgaacagcatggaaaaatggaagtgattgaaatcatgactgaggcagtggcaagaaaaggggmtttgcctttgtaacctttgacgaccatgactccatggataagattgtcattccgaaataccatactgtgaatggccacaactgtgaagttaggaaagccc

SEQ ID NO: 468208 - DNA, 201 bp, Homo sapiens
taaaattaaaatatataatttacaacctcatgaaaacatataaagttcttagaagtggatataacaggctgggcacggtggctcatgcctgtaatcccagyactttgggaggccgaggcaggcggatcacgaggtgaggaggtcgagaccatcctggctagcacagtgaaaccccgtctctactaaaaaatagaaaaaatt

SEQ ID NO: 468209 - DNA, 201 bp, Homo sapiens
tgggcgcctgtagtcccagctactcgggaggctgaggcaggagaatcgcttgaacccgggaggcagacgttgcagtaagccattgcactccagcctgggcracaagagggaaactccgtctcaaaaaaaaaaaaaagaattagaaaaaagaaataaaactgtgtttagagcgaaaaatgtgactgtgtttatagacaatgt

SEQ ID NO: 468210 - DNA, 201 bp, Homo sapiens; identical to SEQ ID NO: 140928

SEQ ID NO: 468211 - DNA, 201 bp, Homo sapiens; identical to SEQ ID NO: 140961

SEQ ID NO: 468212 - DNA, 201 bp, Homo sapiens; identical to SEQ ID NO: 140963

SEQ ID NO: 468213 - DNA, 201 bp, Homo sapiens; identical to SEQ ID NO: 140964

SEQ ID NO: 468214 - DNA, 201 bp, Homo sapiens; identical to SEQ ID NO: 140965

SEQ ID NO: 468215 - DNA, 201 bp, Homo sapiens; identical to SEQ ID NO: 140966

SEQ ID NO: 468216 - DNA, 201 bp, Homo sapiens; identical to SEQ ID NO: 140968

SEQ ID NO: 468217 - DNA, 201 bp, Homo sapiens; identical to SEQ ID NO: 140967

SEQ ID NO: 468218 - DNA, 201 bp, Homo sapiens; identical to SEQ ID NO: 140970

SEQ ID NO: 468219 - DNA, 201 bp, Homo sapiens; identical to SEQ ID NO: 140938

SEQ ID NO: 468220 - DNA, 201 bp, Homo sapiens; identical to SEQ ID NO: 140972

SEQ ID NO: 468221 - DNA, 201 bp, Homo sapiens; identical to SEQ ID NO: 140939

SEQ ID NO: 468222 - DNA, 201 bp, Homo sapiens; identical to SEQ ID NO: 140974

SEQ ID NO: 468223 - DNA, 201 bp, Homo sapiens; identical to SEQ ID NO: 140940

SEQ ID NO: 468224 - DNA, 201 bp, Homo sapiens; identical to SEQ ID NO: 140976

SEQ ID NO: 468225 - DNA, 201 bp, Homo sapiens; identical to SEQ ID NO: 140941

SEQ ID NO: 468226 - DNA, 201 bp, Homo sapiens
aagaaaaagaaataaaagttataagaattagaaaaaagaaggctgggcacggtggctcacgcctgtaatcccagcattttgggaggccgaggcaggcgtaycacctgaggtcaggtgtttcagacctacctggccaacatggtaaaacccagtctctactaaaaatagaaaaattagccgagcatggtggtgggcgcctgt

SEQ ID NO: 468227 - DNA, 201 bp, Homo sapiens; identical to SEQ ID NO: 140978

SEQ ID NO: 468228 - DNA, 201 bp, Homo sapiens
tacctcaataaatctgttaattgtgctgtgctttcttttctgttttaaataaatatttgcttttgtgcctaaagtaaagtaaaataaaaatatgtagcagkatatctacaaaacctatacaaaacattctacttaagggtgaaatggaagaatcccctttgagattgggaattaggcaaggggatcactacttctaccttt

SEQ ID NO: 468229 - DNA, 201 bp, Homo sapiens
gccaccatgcccaacctaaagtgtgttactttagagcctctattccttggttgactccttgggtcacatacaaaacaatctaaatcttcttaaaaaaaatrtagataaactcatgtccccgataaacctctttccaggccaaattccctacactctttaaatcctcctaatataggatgctttcaactcattacatcatct

SEQ ID NO: 468230 - DNA, 201 bp, Homo sapiens
gcgtatcacctgaggtcaggtgtttcagacctacctggccaacatggtaaaacccagtctctactaaaaatagaaaaattagccgagcatggtggtgggcrcctgtagtcccagctactcgggaggctgaggcaggagaatcgcttgaacccgggaggcagacgttgcagtaagccattgcactccagcctgggcaacaag

SEQ ID NO: 468231 - DNA, 201 bp, Homo sapiens
gagccaccatgcccaacctaaagtgtgttactttagagcctctattccttggttgactccttgggtcacatacaaaacaatctaaatcttcttaaaaaaaatgtagataaactcatgtccccgataaacctctttccaggccaaattccctacactctttaaatcctcctaatataggatgctttcaactcattacatcat

SEQ ID NO: 468232 - DNA, 201 bp, Homo sapiens
gggttggttccaagtctttgctattgtaaatagtgctgcagtaaacacacacgtgcatgtgtctttatagtagaatgatttctaatcctttgggtatatamccagtaatgggattgctgggtcaaatggtatttctggttctagatccttgaggaatcaccgcactgtctttcacaatggttgaactaatttacactccca

SEQ ID NO: 468233 - DNA, 201 bp, Homo sapiens
catccatgtccctgcaaaggacatgaactcattcttttttatgactgcatactattccatggtatatatgtgccacattttctttatccagtctattattkatgggcatttgggttggttccaagtctttgctattgtaaatagtgctgcagtaaacacacacgtgcatgtgtctttatagtagaatgatttctaatcctt

SEQ ID NO: 468234 - DNA, 201 bp, Homo sapiens
aactcccacttatgagtgagaacatgcagtgtttggttttctgttcctgtgttagtttgctgaggatgatggtttccagcttcatccatgtccctgcaaakgacatgaactcattcttttttatgactgcatactattccatggtatatatgtgccacattttctttatccagtctattattaatgggcatttgggttggt

SEQ ID NO: 468235 - DNA, 201 bp, Homo sapiens
aattctgggagaatttacaaaaaagggaggttgatggtgagaagttttgtttatttattttaacttatttttattttactttaagttctgggatacatgtrctgaacgtgcaggtttgttacataggtatacatgtgccatggtggtttgctgcacctatcaacccataatctagtttttaagccctgcatgcattaggta

SEQ ID NO: 468236 - DNA, 201 bp, Homo sapiens
gggcgcggtggcgggcgcctgtagtcccagctactggggaggctgaggcagcagaatggcgtgaacccgggaagcggagcttgcagtgagccgagatcgcrccactgcactccagcctgggcaacagagcaagactccgtcttaaaaaaaataaaattaaaataagtaaataaataaataaataaacgaatgtcctcccaa

SEQ ID NO: 468237 - DNA, 201 bp, Homo sapiens
ccagcactttgggaggccgaggcgggtggatcacgaggtcaggagatcgacaccacagtgaaaccccgtctccactaaaaatgcaaaaaaaattagccggkcgcggtggcgggcgcctgtagtcccagctactggggaggctgaggcagcagaatggcgtgaacccgggaagcggagcttgcagtgagccgagatcgcgcc

SEQ ID NO: 468238 - DNA, 201 bp, Homo sapiens
gacgctgtaatcaagaccaaattaatacctttaaaggctctaagatttaaaagaaacaaatgggccaggcgcggtggcttacgcctgtaatcccagcactktgggaggccgaggcgggtggatcacgaggtcaggagatcgacaccacagtgaaaccccgtctccactaaaaatgcaaaaaaaattagccgggcgcggtgg

SEQ ID NO: 468239 - DNA, 201 bp, Homo sapiens
tttggacgctgtaatcaagaccaaattaatacctttaaaggctctaagatttaaaagaaacaaatgggccaggcgcggtggcttacgcctgtaatcccagmactttgggaggccgaggcgggtggatcacgaggtcaggagatcgacaccacagtgaaaccccgtctccactaaaaatgcaaaaaaaattagccgggcgcg

SEQ ID NO: 468240 - DNA, 201 bp, Homo sapiens; identical to SEQ ID NO: 140947

SEQ ID NO: 468241 - DNA, 201 bp, Homo sapiens; identical to SEQ ID NO: 140950

SEQ ID NO: 468242 - DNA, 201 bp, Homo sapiens; identical to SEQ ID NO: 140953

SEQ ID NO: 468243 - DNA, 201 bp, Homo sapiens; identical to SEQ ID NO: 140954

SEQ ID NO: 468244 - DNA, 201 bp, Homo sapiens; identical to SEQ ID NO: 140955

SEQ ID NO: 468245 - DNA, 201 bp, Homo sapiens; identical to SEQ ID NO: 140956

SEQ ID NO: 468246 - DNA, 201 bp, Homo sapiens; identical to SEQ ID NO: 140957

SEQ ID NO: 468247 - DNA, 201 bp, Homo sapiens; identical to SEQ ID NO: 140991

SEQ ID NO: 468248 - DNA, 201 bp, Homo sapiens; identical to SEQ ID NO: 140992

SEQ ID NO: 468249 - DNA, 201 bp, Homo sapiens
caaaagactgcagtctatggtaaaactgtgaataagttactgatgacatttaagtactccctagagatctccaggaagcaacctcaaatttagtcaatgcygcataatccataaacctgggaaatgcaaacattaagacaggtgaagcaatacagggtggaggggactattataatgtctagagccaacagaaggaaagca

SEQ ID NO: 468250 - DNA, 201 bp, Homo sapiens
ggtagcaaaaatcagagtgaagagaggttagttccaagacagaaacacattgtcaatctttactcaaagattgtccatcacctgctctctctccagcctarctagctcttttcaggcccgataggcacacattaatgggcctggctggaccacctatgagacagaaaagggtgatcccttccattagattaacaggctcag

SEQ ID NO: 468251 - DNA, 201 bp, Homo sapiens; identical to SEQ ID NO: 140993

SEQ ID NO: 468252 - DNA, 201 bp, Homo sapiens; identical to SEQ ID NO: 140994

SEQ ID NO: 468253 - DNA, 201 bp, Homo sapiens; identical to SEQ ID NO: 140995

SEQ ID NO: 468254 - DNA, 201 bp, Homo sapiens; identical to SEQ ID NO: 140996

SEQ ID NO: 468255 - DNA, 201 bp, Homo sapiens
tctatttggcccttcttttcacttgtccttccagccagtcaagttctccccaaagccatcatcatatatgtcaaccacagatcatcctccaggggaactgktatgctaaagtttctgagctagccaggctgaaatccaaatggcagccggcagatgtggcaacagtttgaaaagtgcactttgaaacagcttccttaccac

SEQ ID NO: 468256 - DNA, 201 bp, Homo sapiens; identical to SEQ ID NO: 140997

SEQ ID NO: 468257 - DNA, 201 bp, Homo sapiens
atctcagctcactgcaacctccgcctccagggctcaagcaattctcctgcctcagtctcccaggtagttagctgggattacaggtgcccgccaccatgccyggctaattttttgtgtttttagtagagatggggtttcaccacgttggccaggctggtctcaaactcctgagctcaagtgactcgcccgcctcggcctccc

SEQ ID NO: 468258 - DNA, 201 bp, Homo sapiens
tttttttttttttttgagacggagtcttgttctgtcacgcaggctggagtgcaatggcataatctcggcttactgcaacctccaccccctgggttcaagcrattctcctgcctcagcctcctgagtagctgagatcacaggcgtgccaccaccatgcccagctaatttttatatttttagtagaggcggggtttcaccatg

SEQ ID NO: 468259 - DNA, 201 bp, Homo sapiens; identical to SEQ ID NO: 140999

SEQ ID NO: 468260 - DNA, 201 bp, Homo sapiens
gtaattgaattgatagttactgttgtgacctgaagttcaccattaaaagggactacccaagcaaaatcatggaattattggttataaaaatgattgttggyacatcctatgcaatatatctaaattgaataatggtaccagataaaattatagatgggaatgaagcttgtgtatcatccattatcatgtgtaatcaataaa

SEQ ID NO: 468261 - DNA, 201 bp, Homo sapiens
aaatagaaaaaattagccaggcgtggtggcgggcgcctgtggtcccagctactcgggaggctgaggcaggagaatggcgtgaacccgggaggtggagcttscagtgagccgagattgcaccactgcactccagcctgggcgacagagcgagactccgtctcaaagaaaaaaaaaaaagaagaagaagtgaatataacaaag

SEQ ID NO: 468262 - DNA, 201 bp, Homo sapiens
acaggctgggcacggtggctcatgcctgtaatcccagcactttgggaggccgaggcaggcggatcacgaggtgaggaggtcgagaccatcctggctagcayagtgaaaccccgtctctactaaaaaatagaaaaaattagccaggcgtggtggcgggcgcctgtggtcccagctactcgggaggctgaggcaggagaatgg

SEQ ID NO: 468263 - DNA, 201 bp, Homo sapiens
tggaggaaacgtcagtggtcgtggtggctttggtggcagccatggtggtggtggatatggtggcagtggggatggctataatggatttggtaatgatggargcaatttggaggtggtggaagctacaatgattttggcaattacaacagtcagtcttcaaattttggacccgtgaagggaggaaactttggggcagaagct

SEQ ID NO: 468264 - DNA, 201 bp, Homo sapiens
ttggggggtgatgttttccccactgctgaaagcagtgaggcctggaggcacccgaacagcaggtttctcctggggggagcacaacagaattggaggaggcrtctgtactgtgagacttggtgtgtggtggttgtgacccctcatcttgccctcaggtctcggtccagctcgacttccagctcaggctccagcaccagcact

SEQ ID NO: 468265 - DNA, 201 bp, Homo sapiens
gctgagatcgtgccactgcactctggcctggagacagagtgatattccatctcaaaaagtaaaactatggggaattgcccagaaagaagctagcttgcccytacagcctgagctactctgatgtggtttctcctcttcccgcaggtcccgctccccgaggcgcaggtcccccgtgcgccggagatcacggtccccgggccg

SEQ ID NO: 468266 - DNA, 201 bp, Homo sapiens
atcctctcacccatggtagttgctgctcgtggttctgtctgtccgtgcaccgatgcacacaccgcaccccaccactgtactctgaaattggcgagtgagtkgagagccagctctgcggagtcatcacgcagccatggttgtgcctgccgttcatggtggtctttcaggttatcttggcaacatgtacattgcttttatttt

SEQ ID NO: 468267 - DNA, 201 bp, Homo sapiens
ccaccaccgcctatgtggcgcaggtctcccccacggatgaggagaaggtaaacaatttgtagtttcagtggactgatcaggccacaaacctcatgtgaccrcagtgactttcagaccctttattcagccctgcctgccttccactgctgtgcgggctggcagagagcaggagcccttcagagctcatggagagagcaggag

SEQ ID NO: 468268 - DNA, 201 bp, Homo sapiens
ttacttcccagctgtcccctgaatccttccgtttccctgccaaatcatttgatgttgattcaggcccctctcagtgctgcagagccctcctaagagaactkctcccacttctcttagccccagacccagcttcccttggttggaggagaaggaagcgcaaacgcggatactgcctgcatggtcctgcgaggaagccccacc

SEQ ID NO: 468269 - DNA, 201 bp, Homo sapiens
ccacatgccggagttagtccccatgtgccttaaaggtagttgagaaaacaaaagagccctttaccccttagggcacagaaggggctgcgcttgggctcccrgtatccccagctaccagacaattcttgaggtcggggtgcatgctcccctggggttcctgggtttgcacctctatttcctttcctctctccctggagccca

SEQ ID NO: 468270 - DNA, 201 bp, Homo sapiens
ctgctatttctcatggcccaataacaagatgcacattaactgagtaggtggagtttttatttctgcaaccagttgcagggaaaaggcctggaaattattgycagaccaacttaaaattacaaagtttttcagagcttatatattttttaagctatatgtctatacatatgtgtacatttatgtaaagacataagttactga

SEQ ID NO: 468271 - DNA, 201 bp, Homo sapiens
tggtactcatcagatggaatgttttaccctgccgaggttttagtcatgatgtgctgagctctctgcgtctgacgtgactgactggtagctgggcgttggcrtgacccttctttccctctaggatcacatcatggagatattttccacctatgggaaaattaaaatgattgacatgcccgtggaaaggatgcatccccatct

SEQ ID NO: 468272 - DNA, 201 bp, Homo sapiens
gttgagaatgttctgcattctacagtgagtgttctgagccacagaccactttgctctgtggtcacctcgggtctctgtggccctgctgatgctgatccccygttttgggttgtgctgtttgggtttggtcagaggagcacgcaatctcacactcttcctcaccatccagggctccttcacctaccaaacgcaaagaccgct

SEQ ID NO: 468273 - DNA, 201 bp, Homo sapiens; identical to SEQ ID NO: 402757

SEQ ID NO: 468274 - DNA, 201 bp, Homo sapiens
gaggccgtggcccggaagtggtcggggccgctgcggacggaagggcgcctgtgcttcgtccgctcggcggtggcccagccaggcccgcgggactcagaccmgcggggagcgcggcctccgcccttggggccctcccgccgggccggagacccaagcccccaacgccaggccctgccctggaagcgctcgcggcccggcgcc

SEQ ID NO: 468275 - DNA, 201 bp, Homo sapiens
gtgcgcccgcgcaaggaaaggggcggggcacgggcgcgttaacaccctccgcgccggaggacgagcctcggtcatcgcgctgccctcccaggttcaacagsctacccatgtgcccgctccagtaagcgtgcaaccagcccggtcagtcccagggactttaccggctaggagacaccttgaacgtccccagcgcgactccca

SEQ ID NO: 468276 - DNA, 201 bp, Homo sapiens
aggccgtggcccggaagtggtcggggccgctgcggacggaagggcgcctgtgcttcgtccgctcggcggtggcccagccaggcccgcgggactcagaccascggggagcgcggcctccgcccttggggccctcccgccgggccggagacccaagcccccaacgccaggccctgccctggaagcgctcgcggcccggcgcct

SEQ ID NO: 468277 - DNA, 201 bp, Homo sapiens
ttgtggctcctcacacggtttctattggacagtgctgctgcaggtgattcgaaggcgggtgggtgcaggaacccagctgagagttcagaaattagtgtaamtttggagacaagtgtctgtgggggaaggagcctccggacgtggagatacaactcttgctcctaacatttatcgagtctttaattaatgccctgggtaact

SEQ ID NO: 468278 - DNA, 201 bp, Homo sapiens
cgggcccagtgcgcccgcgcaaggaaaggggcggggcacgggcgcgttaacaccctccgcgccggaggacgagcctcggtcatcgcgctgccctcccaggytcaacaggctacccatgtgcccgctccagtaagcgtgcaaccagcccggtcagtcccagggactttaccggctaggagacaccttgaacgtccccagcgc

SEQ ID NO: 468279 - DNA, 201 bp, Homo sapiens
gtctaaaatcacacagtaaaacctcaaatcaaacccaggccctctggctccagactctaaattatactctgaatgatactcactgattgtccgaggacacraagagtgtcgaggcactatctgctgggtgtctgcagaaccttactgttctaaagcaaaacattttacccctggacaagagcagcaaaggtggcgttcggc

SEQ ID NO: 468280 - DNA, 201 bp, Homo sapiens
tggggcaccaaacacagcgctggagtggaagaggtggatttgttcccggtagcactttctgttctgggggcttcgaggcagcacctgctgaaacgtaatakgatgcaacagccacacatagaagtaggttgctgctgttttcttcccaagtttagtcttcagtttacagggcttgaggaaagcatagcttagatttcagtg

SEQ ID NO: 468281 - DNA, 201 bp, Homo sapiens
catgatggcacacacctgtggtcccagctacttgggaggctgaggcaggagaattgcttgaacctaggaggcagggattgcagcgagccaagattacgccwctgcactccagcctgggcaacaaagtgagactaggtctcaaaaaaaaaaaaaaaaaaaaaaaaaagaatacacacacacacacaaatagtttccaaattc

SEQ ID NO: 468282 - DNA, 201 bp, Homo sapiens
caactgggctgcacttctttttgtttgtttgagacagagtttcacacttgttgcccaggctggggtgcagttcctggaccaaactgaggtttgggctgctmtttctcatggcccaataacaagatgcacattaactgagtaggtggagtttttatttctgcaaccagttgcagggaaaaggcctggaaattattgccagac

SEQ ID NO: 468283 - DNA, 201 bp, Homo sapiens
tgttacccaggctggagtgtagtggcacgatctctgcttactgcagcctctgcctcccgggttcacgccattctcctgcctcagcctcccgagtagctggkactataggcgcccgccacctcgcacagctgatttattgtctttttagtagagacattttcaccatgttagccaggatggtctcgatctcctgacctcgtg

SEQ ID NO: 468284 - DNA, 201 bp, Homo sapiens
cccgctccaagtgagtgccctgcgcctgggagctaaagtttacaagctcggggctacagatttaccatcgaggttataaaagggacccaaaaggagtcttyctgtgttaataggatttctgagacaggaataatgtatgtgaactagcaggaaagtcttccttatgaaaactgtcacacaagcagataagagcttactcga

SEQ ID NO: 468285 - DNA, 201 bp, Homo sapiens
cttgtctctactaaaaatacaaaaaaattagccgggcgtggtggtgggtgcctgtagtcccagctactcgggaggctgaggcaggagaatggcgtgaaccsgggaggtggagcttgcagtgagccaagatcatgccactgcactccagcctgggcaacagagtgagactccatctcaaaaaaaaaaaaaaaaaaaggtaaa

SEQ ID NO: 468286 - DNA, 201 bp, Homo sapiens
tgaggcaggagaatggcgtgaacccgggaggtggagcttgcagtgagccaagatcatgccactgcactccagcctgggcaacagagtgagactccatctcaaaaaaaaaaaaaaaaaaaggtaaaactttgccacgtgtggtagcaatcgcctgtaatcccagcactttgggaggctgaggtgggtggatcacaaggtcag

SEQ ID NO: 468287 - DNA, 201 bp, Homo sapiens
cctgtagtcccagttactcgggaggctgaggcaggagaatggcatgaacctgggaggccgagattgcgcctctgcactcagcctgggcaacagagtgagaycccatctcaaaataaatatatacacacacaaaaattagctgggcgtggtggcgcgcgcctgtagtcccagttgcatgggaggctgaggcaggagaatcgc

SEQ ID NO: 468288 - DNA, 201 bp, Homo sapiens
gaaagggagctgccccaggctttagtgcagctgccaaccctgttaggcctggcctctcgaggcctcttctgacctcaagggtcacaccccctcaaagatcstctcacccatggtagttgctgctcgtggttctgtctgtccgtgcaccgatgcacacaccgcaccccaccactgtactctgaaattggcgagtgagtggag

SEQ ID NO: 468289 - DNA, 201 bp, Homo sapiens
ccaggctttagtgcagctgccaaccctgttaggcctggcctctcgaggcctcttctgacctcaagggtcacaccccctcaaagatcctctcacccatggtrgttgctgctcgtggttctgtctgtccgtgcaccgatgcacacaccgcaccccaccactgtactctgaaattggcgagtgagtggagagccagctctgcgg

SEQ ID NO: 468290 - DNA, 201 bp, Homo sapiens
tacagggcttgaggaaagcatagcttagatttcagtgatttccaattaggaaaaaggaaacaaaaaaggaaaaaattgagaacagtatttgggtgtactayagtttttgaaacaatttttttttttttttgagacggagtctggctctgtcgcccaggctggagtgcagtagcaccacctcggcccactgcaagctctgcc

SEQ ID NO: 468291 - DNA, 201 bp, Homo sapiens
gtgcagttcctggaccaaactgaggtttgggctgctatttctcatggcccaataacaagatgcacattaactgagtaggtggagtttttatttctgcaacmagttgcagggaaaaggcctggaaattattgccagaccaacttaaaattacaaagtttttcagagcttatatattttttaagctatatgtctatacatatg

SEQ ID NO: 468292 - DNA, 201 bp, Homo sapiens
tgcagttcctggaccaaactgaggtttgggctgctatttctcatggcccaataacaagatgcacattaactgagtaggtggagtttttatttctgcaaccmgttgcagggaaaaggcctggaaattattgccagaccaacttaaaattacaaagtttttcagagcttatatattttttaagctatatgtctatacatatgt

SEQ ID NO: 468293 - DNA, 201 bp, Homo sapiens
cttgctgttgctgggcagtgtccttttggaaagggagctgccccaggctttagtgcagctgccaaccctgttaggcctggcctctcgaggcctcttctgayctcaagggtcacaccccctcaaagatcctctcacccatggtagttgctgctcgtggttctgtctgtccgtgcaccgatgcacacaccgcaccccaccact

SEQ ID NO: 468294 - DNA, 201 bp, Homo sapiens; identical to SEQ ID NO: 402784

SEQ ID NO: 468295 - DNA, 201 bp, Homo sapiens
caccaagtacattcgggcagatcttagttcttgggggggtggggctggaatctgcgggtgtgacctccactctaggtctgtgctgtccagccaagtagccrttggccacatgtggctgctaagcatgtgaaatacagctaatcaagactgaaatattaaaacacacaccagttttagaagactaggaaaaaagcaaacttt

SEQ ID NO: 468296 - DNA, 201 bp, Homo sapiens
tgcagctgccaaccctgttaggcctggcctctcgaggcctcttctgacctcaagggtcacaccccctcaaagatcctctcacccatggtagttgctgctcrtggttctgtctgtccgtgcaccgatgcacacaccgcaccccaccactgtactctgaaattggcgagtgagtggagagccagctctgcggagtcatcacgc

SEQ ID NO: 468297 - DNA, 201 bp, Homo sapiens
taccaggttcatgccattctcctccctcagcctcccgagtagctgggactacaggcgcccaccaccatgcctggctaattttttgtatttttagtagagayggggtttcaccgtgttagccaggatggtctggatctcctgaccttgtgatccgcctgcctcggcctcccaaagtgctgggattacaggcatgagccacca

SEQ ID NO: 468298 - DNA, 201 bp, Homo sapiens
ctcccgagtagctgggactacaggcgcccaccaccatgcctggctaattttttgtatttttagtagagacggggtttcaccgtgttagccaggatggtctkgatctcctgaccttgtgatccgcctgcctcggcctcccaaagtgctgggattacaggcatgagccaccatgcccagccaacaattttttttgggggcttc

SEQ ID NO: 468299 - DNA, 201 bp, Homo sapiens
gggactacaggcgcccaccaccatgcctggctaattttttgtatttttagtagagacggggtttcaccgtgttagccaggatggtctggatctcctgaccytgtgatccgcctgcctcggcctcccaaagtgctgggattacaggcatgagccaccatgcccagccaacaattttttttgggggcttcccatttttattaa

SEQ ID NO: 468300 - DNA, 201 bp, Homo sapiens
ggcgcccaccaccatgcctggctaattttttgtatttttagtagagacggggtttcaccgtgttagccaggatggtctggatctcctgaccttgtgatccrcctgcctcggcctcccaaagtgctgggattacaggcatgagccaccatgcccagccaacaattttttttgggggcttcccatttttattaaaagacaaat

SEQ ID NO: 468301 - DNA, 201 bp, Homo sapiens
gacagagtttcacacttgttgcccaggctggggtgcagttcctggaccaaactgaggtttgggctgctatttctcatggcccaataacaagatgcacattmactgagtaggtggagtttttatttctgcaaccagttgcagggaaaaggcctggaaattattgccagaccaacttaaaattacaaagtttttcagagctta

SEQ ID NO: 468302 - DNA, 201 bp, Homo sapiens
ttcacacttgttgcccaggctggggtgcagttcctggaccaaactgaggtttgggctgctatttctcatggcccaataacaagatgcacattaactgagtmggtggagtttttatttctgcaaccagttgcagggaaaaggcctggaaattattgccagaccaacttaaaattacaaagtttttcagagcttatatatttt

SEQ ID NO: 468303 - DNA, 201 bp, Homo sapiens
tggggtgcagttcctggaccaaactgaggtttgggctgctatttctcatggcccaataacaagatgcacattaactgagtaggtggagtttttatttctgmaaccagttgcagggaaaaggcctggaaattattgccagaccaacttaaaattacaaagtttttcagagcttatatattttttaagctatatgtctataca

SEQ ID NO: 468304 - DNA, 201 bp, Homo sapiens
tctaaaatcacacagtaaaacctcaaatcaaacccaggccctctggctccagactctaaattatactctgaatgatactcactgattgtccgaggacacaragagtgtcgaggcactatctgctgggtgtctgcagaaccttactgttctaaagcaaaacattttacccctggacaagagcagcaaaggtggcgttcggcc

SEQ ID NO: 468305 - DNA, 201 bp, Homo sapiens
aagaaaaagatacgctggggcgacagttgtacctgtgcctcctctgcggggtagagacgcctccaggagcacatggggactgtccctatgtgttcctgactgtgtggacacttattgcttaccgtgctcccttgctgcctttttgtgtgctcagcttttgactgcaaagtagacttgttgccttgccaattcgttcactct

SEQ ID NO: 468306 - DNA, 201 bp, Homo sapiens
agaaaaagatacgctggggcgacagttgtacctgtgcctcctctgcggggtagagacgcctccaggagcacatggggactgtccctatgtgttcctgactgtgtggacacttattgcttaccgtgctcccttgctgcctttttgtgtgctcagcttttgactgcaaagtagacttgttgccttgccaattcgttcactctt

SEQ ID NO: 468307 - DNA, 201 bp, Homo sapiens
aatgttgccaccaccgcctatgtggcgcaggtctcccccacggatgaggagaaggtaaacaatttgtagtttcagtggactgatcaggccacaaacctcaygtgaccgcagtgactttcagaccctttattcagccctgcctgccttccactgctgtgcgggctggcagagagcaggagcccttcagagctcatggagaga

SEQ ID NO: 468308 - DNA, 201 bp, Homo sapiens
ccttccctccgcggccgccccttgacggccagtgcgacgcggaatccgcccctgcgttctgcaggctcccagggcactgctgggctctcagggaccgctgycttctcactgcgcgggaagctgcagccggaatggagggtccggcccatccagccccagctcagggcagccgagagactcaccttggatgtgggtgcagag

SEQ ID NO: 468309 - DNA, 201 bp, Homo sapiens; identical to SEQ ID NO: 402799

SEQ ID NO: 468310 - DNA, 201 bp, Homo sapiens
gggatgcctcatgccatgggcacgcctaccgtctgcaaagcgccatcaagcaggagctgcacagccgggccttcctggccatcacgcggtacgggcatccrgtgcactggtctgtcttctgggctttagttttgcctttagtccagccagaccctaggggacatgtggacatgtgtagatacctttgtggctgctagaact

SEQ ID NO: 468311 - DNA, 201 bp, Homo sapiens
aggcacaggccgtgtacgaagtgagccgcagctcctacgtgtacttggagggccgctgcctcaattgcagcagcggctccaagcgaggggtgagtgttgarcggggtgtgggcgggctggggatgggtcccatggccgaggggacggggcctgcaggcagaagtggggctgacagggcagagggttgcgccccctcaccac

SEQ ID NO: 468312 - DNA, 201 bp, Homo sapiens
acgaagtgagccgcagctcctacgtgtacttggagggccgctgcctcaattgcagcagcggctccaagcgaggggtgagtgttgagcggggtgtgggcggrctggggatgggtcccatggccgaggggacggggcctgcaggcagaagtggggctgacagggcagagggttgcgccccctcaccaccccttctgcctgcag

SEQ ID NO: 468313 - DNA, 201 bp, Homo sapiens
ctcaattgcagcagcggctccaagcgaggggtgagtgttgagcggggtgtgggcgggctggggatgggtcccatggccgaggggacggggcctgcaggcaraagtggggctgacagggcagagggttgcgccccctcaccaccccttctgcctgcagcggtgggctgcacgtacgttcagcaacaagacgctggtgctgga

SEQ ID NO: 468314 - DNA, 201 bp, Homo sapiens
ttctgctctgcttcatgctgcccgaggacgctgccatggctgtgggtgagtggagggagggacgccaatcagggccaggcctctcacctgccacctgggcycactgacgcctgtccctgcagctgacggcctccaaccacgtgagcaacgtcaccgtgaactacaacgtaaccgtggagcggatgaacaggatgcagggtc

SEQ ID NO: 468315 - DNA, 201 bp, Homo sapiens
tgggcgggctggggatgggtcccatggccgaggggacggggcctgcaggcagaagtggggctgacagggcagagggttgcgccccctcaccaccccttctrcctgcagcggtgggctgcacgtacgttcagcaacaagacgctggtgctggatgagaccaccacatccacgggcagtgcaggcatgcgactggtgctgcgg

SEQ ID NO: 468316 - DNA, 201 bp, Homo sapiens
ctgcttcatgctgcccgaggacgctgccatggctgtgggtgagtggagggagggacgccaatcagggccaggcctctcacctgccacctgggctcactgaygcctgtccctgcagctgacggcctccaaccacgtgagcaacgtcaccgtgaactacaacgtaaccgtggagcggatgaacaggatgcagggtctgcaggt

SEQ ID NO: 468317 - DNA, 201 bp, Homo sapiens
atcagggccaggcctctcacctgccacctgggctcactgacgcctgtccctgcagctgacggcctccaaccacgtgagcaacgtcaccgtgaactacaacrtaaccgtggagcggatgaacaggatgcagggtctgcaggtctccacagtgccggccgtgctgtcccccaatgccacgctagcactgacggcgggcgtgct

SEQ ID NO: 468318 - DNA, 201 bp, Homo sapiens
cgggctggggatgggtcccatggccgaggggacggggcctgcaggcagaagtggggctgacagggcagagggttgcgccccctcaccaccccttctgcctrcagcggtgggctgcacgtacgttcagcaacaagacgctggtgctggatgagaccaccacatccacgggcagtgcaggcatgcgactggtgctgcggcggg

SEQ ID NO: 468319 - DNA, 201 bp, Homo sapiens
cagggccaggcctctcacctgccacctgggctcactgacgcctgtccctgcagctgacggcctccaaccacgtgagcaacgtcaccgtgaactacaacgtmaccgtggagcggatgaacaggatgcagggtctgcaggtctccacagtgccggccgtgctgtcccccaatgccacgctagcactgacggcgggcgtgctgg

SEQ ID NO: 468320 - DNA, 201 bp, Homo sapiens
tggtgctggatgagaccaccacatccacgggcagtgcaggcatgcgactggtgctgcggcggggcgtgctgcgggacggcgagggatacaccttcacgctsacggtgctgggccgctctggcgaggaggagggctgcgcctccatccgcctgtcccccaaccgcccgccgctggggggctcttgccgcctcttcccactgg

SEQ ID NO: 468321 - DNA, 201 bp, Homo sapiens
ctcactgacgcctgtccctgcagctgacggcctccaaccacgtgagcaacgtcaccgtgaactacaacgtaaccgtggagcggatgaacaggatgcagggyctgcaggtctccacagtgccggccgtgctgtcccccaatgccacgctagcactgacggcgggcgtgctggtggactcggccgtggaggtggccttcctgt

SEQ ID NO: 468322 - DNA, 201 bp, Homo sapiens
tcagctcccacggtgctgtgttaccggcgtgtgccccagtgcctggccgtcttggaggtcttgtttctctgggtttatgcctcaaggtggcgcctgctccsctgtgctccctggtagcctggtagtgagcctgcttctcacacagtcatacctggttgtggtcccacagtgggaccaccctgttgggttcagaacaggaga

SEQ ID NO: 468323 - DNA, 201 bp, Homo sapiens
cagctctgcagatgcagaggtggacatgagctgggggcagcctccggacactcctgggcacgccatacgggaggtggcctgcacggggatccctgccggtrcccacaggccccgtgggtgggtgctgctgtgagcctgggctggtgggccctggtctccgggctctgagcctcagtttccccatctggaaagggggacagt

SEQ ID NO: 468324 - DNA, 201 bp, Homo sapiens
ctggtgctgcggcggggcgtgctgcgggacggcgagggatacaccttcacgctcacggtgctgggccgctctggcgaggaggagggctgcgcctccatccscctgtcccccaaccgcccgccgctggggggctcttgccgcctcttcccactgggcgctgtgcacgccctcaccaccaaggtgcacttcgaatgcacgggt

SEQ ID NO: 468325 - DNA, 201 bp, Homo sapiens
tgacgcctgtccctgcagctgacggcctccaaccacgtgagcaacgtcaccgtgaactacaacgtaaccgtggagcggatgaacaggatgcagggtctgcrggtctccacagtgccggccgtgctgtcccccaatgccacgctagcactgacggcgggcgtgctggtggactcggccgtggaggtggccttcctgtgagtg

SEQ ID NO: 468326 - DNA, 201 bp, Homo sapiens
ctgcgggacggcgagggatacaccttcacgctcacggtgctgggccgctctggcgaggaggagggctgcgcctccatccgcctgtcccccaaccgcccgcygctggggggctcttgccgcctcttcccactgggcgctgtgcacgccctcaccaccaaggtgcacttcgaatgcacgggtgagtgcaggcctgcgtggggg

SEQ ID NO: 468327 - DNA, 201 bp, Homo sapiens
tgtccctgcagctgacggcctccaaccacgtgagcaacgtcaccgtgaactacaacgtaaccgtggagcggatgaacaggatgcagggtctgcaggtctcyacagtgccggccgtgctgtcccccaatgccacgctagcactgacggcgggcgtgctggtggactcggccgtggaggtggccttcctgtgagtgactcggg

SEQ ID NO: 468328 - DNA, 201 bp, Homo sapiens
gcccgccgctggggggctcttgccgcctcttcccactgggcgctgtgcacgccctcaccaccaaggtgcacttcgaatgcacgggtgagtgcaggcctgcktggggggagcagcgggatcccccgactctgtgacgtcacggagccctcccgtgatgccgtggggaccgtccctcaggctggcatgacgcggaggatgctg

SEQ ID NO: 468329 - DNA, 201 bp, Homo sapiens
agctgacggcctccaaccacgtgagcaacgtcaccgtgaactacaacgtaaccgtggagcggatgaacaggatgcagggtctgcaggtctccacagtgccrgccgtgctgtcccccaatgccacgctagcactgacggcgggcgtgctggtggactcggccgtggaggtggccttcctgtgagtgactcgggggccggttt

SEQ ID NO: 468330 - DNA, 201 bp, Homo sapiens
acgtcaccgtgaactacaacgtaaccgtggagcggatgaacaggatgcagggtctgcaggtctccacagtgccggccgtgctgtcccccaatgccacgctrgcactgacggcgggcgtgctggtggactcggccgtggaggtggccttcctgtgagtgactcgggggccggtttggggtgggcaccaggctcttgtcccag

SEQ ID NO: 468331 - DNA, 201 bp, Homo sapiens
caagggtgggaggccatagcttggggatgctggcaatgtgtgggatgggcccagggatggcctctggcctactaagggctctggccctgacccacggccaytcactcctcagagacgtctcccacaacctgctccgggcgctggacgttgggctcctggcgaacctctcggcgctggcagagctgtgagtgtcccccagtc

SEQ ID NO: 468332 - DNA, 201 bp, Homo sapiens
cccagtcgtgccagcatgcggggctcactccgggtgggctggcggcaccgcctcttgctgctcagctgtgggggcttccgtcagctttgccgaatcccccstctcttccagggatataagcaacaacaagatttctacgttagaagaaggaatatttgctaatttatttaatttaagtgaaatgtaagttgtggttctttg

SEQ ID NO: 468333 - DNA, 201 bp, Homo sapiens
tccacagtgccggccgtgctgtcccccaatgccacgctagcactgacggcgggcgtgctggtggactcggccgtggaggtggccttcctgtgagtgactcrggggccggtttggggtgggcaccaggctcttgtcccagccccagcctcagccgagggacccccacatcacggggttgcttttctgagcctcggtttccct

SEQ ID NO: 468334 - DNA, 201 bp, Homo sapiens
taatttatttaatttaagtgaaatgtaagttgtggttctttgggtggggtcctggctggaccccaggcccccagtatcccttctgccctcccagttggtcygtgtccccttccaggcttgagaccagatcctgggggcagttcactacctgcttggagccccccagtgccggcttggttggggcaggggaggcggtgctgt

SEQ ID NO: 468335 - DNA, 201 bp, Homo sapiens
gttggtccgtgtccccttccaggcttgagaccagatcctgggggcagttcactacctgcttggagccccccagtgccggcttggttggggcaggggaggcrgtgctgtcagggtggctccagggcctggttgccagtggggggctggcatagacccttcccaccagacctggtccccaacacctgcccctgccccgcagaa

SEQ ID NO: 468336 - DNA, 201 bp, Homo sapiens
acccttcccaccagacctggtccccaacacctgcccctgccccgcagaaacctgagtgggaacccgtttgagtgtgactgtggcctggcgtggctgccgcratgggcggaggagcagcaggtgcgggtggtgcagcccgaggcagccacgtgtgctgggcctggctccctggctggccagcctctgcttggcatccccttg

SEQ ID NO: 468337 - DNA, 201 bp, Homo sapiens
gtgggaggtgggctcgcgggtgggctggggtcatgaagggcctcaggcgctctgctattgggttccaaggctatcctgagaacaggggtgaggggggattkccgtggggggttaaagccttgtcatgttcgctttcgggagataaaaacaacaggtggcctttatggagacgctgcccagagccaggtctgtgccaggctc

SEQ ID NO: 468338 - DNA, 201 bp, Homo sapiens
ttccatcagaaaggcccctcctgacctctgggagtggggagctcaagggtgggaggccatagcttggggatgctggcaatgtgtgggatgggcccagggawggcctctggcctactaagggctctggccctgacccacggccactcactcctcagagacgtctcccacaacctgctccgggcgctggacgttgggctcctg

SEQ ID NO: 468339 - DNA, 201 bp, Homo sapiens
tggctgtggttaggggcctgccgagcgcccgcggtggagcctgggctgaggaggaggggctggtgggggggttttcgggcggctcggtccccagtctgttygtcctggtgtcctgggccctggcccggcgcctcactgtgcactcgccaccccaggcccagtgcaggatgccgagaacctcctcgtgggagcgcccagtgg

SEQ ID NO: 468340 - DNA, 201 bp, Homo sapiens
gccctcaccaccaaggtgcacttcgaatgcacgggtgagtgcaggcctgcgtggggggagcagcgggatcccccgactctgtgacgtcacggagccctccygtgatgccgtggggaccgtccctcaggctggcatgacgcggaggatgctggcgccccgctggtgtacgccctgctgctgcggcgctgtcgccagggccac

SEQ ID NO: 468341 - DNA, 201 bp, Homo sapiens
gccgagcactgcgtccggctcgggcccaccgggtggtgtaacaccgacctgtgctcagcgccgcacagctacgtctgcgagctgcagcccggaggtgtgcsgggggccaggcaggggcctgagacgctggctgtggttaggggcctgccgagcgcccgcggtggagcctgggctgaggaggaggggctggtgggggggttt

SEQ ID NO: 468342 - DNA, 201 bp, Homo sapiens
tgccagaactggctgcccggggagccacacccagccacagccgagcactgcgtccggctcgggcccaccgggtggtgtaacaccgacctgtgctcagcgcygcacagctacgtctgcgagctgcagcccggaggtgtgcggggggccaggcaggggcctgagacgctggctgtggttaggggcctgccgagcgcccgcggt

SEQ ID NO: 468343 - DNA, 201 bp, Homo sapiens
atcccccgactctgtgacgtcacggagccctcccgtgatgccgtggggaccgtccctcaggctggcatgacgcggaggatgctggcgccccgctggtgtaygccctgctgctgcggcgctgtcgccagggccactgcgaggagttctgtgtctacaagggcagcctctccagctacggagccgtgctgcccccgggtttca

SEQ ID NO: 468344 - DNA, 201 bp, Homo sapiens
cctgccatcccacacccgcccccaggagcctagacgtgtggatcggcttctcgactgtgcagggggtggaggtgggcccagcgccgcagggcgaggccttyagcctggagagctgccagaactggctgcccggggagccacacccagccacagccgagcactgcgtccggctcgggcccaccgggtggtgtaacaccgacc

SEQ ID NO: 468345 - DNA, 201 bp, Homo sapiens
cactgacggcgggcgtgctggtggactcggccgtggaggtggccttcctgtgagtgactcgggggccggtttggggtgggcaccaggctcttgtcccagcyccagcctcagccgagggacccccacatcacggggttgcttttctgagcctcggtttccctgtctgttgggaggtaactgggtgcacaggagccctgaggc

SEQ ID NO: 468346 - DNA, 201 bp, Homo sapiens
cggagccctcccgtgatgccgtggggaccgtccctcaggctggcatgacgcggaggatgctggcgccccgctggtgtacgccctgctgctgcggcgctgtygccagggccactgcgaggagttctgtgtctacaagggcagcctctccagctacggagccgtgctgcccccgggtttcaggccacacttcgaggtgggcct

SEQ ID NO: 468347 - DNA, 201 bp, Homo sapiens
ccgtggaggtggccttcctgtgagtgactcgggggccggtttggggtgggcaccaggctcttgtcccagccccagcctcagccgagggacccccacatcasggggttgcttttctgagcctcggtttccctgtctgttgggaggtaactgggtgcacaggagccctgaggctgcacgggagccgggagaggcctcagcaca

SEQ ID NO: 468348 - DNA, 201 bp, Homo sapiens
ggagcccgtgcccctcggggccacattgctcctgcgctccctgactgcggacgcgtgtgtctcgcggctgtctctgtggagatggcctcctcctgcctggmaacagcacccacagaattgcatcagacctaccccacccgttgtttgtgatgctgtagctgagggctcctctgtctgccaggccggtcactggggactctg

SEQ ID NO: 468349 - DNA, 201 bp, Homo sapiens
gccctcccgtgatgccgtggggaccgtccctcaggctggcatgacgcggaggatgctggcgccccgctggtgtacgccctgctgctgcggcgctgtcgccwgggccactgcgaggagttctgtgtctacaagggcagcctctccagctacggagccgtgctgcccccgggtttcaggccacacttcgaggtgggcctggcc

SEQ ID NO: 468350 - DNA, 201 bp, Homo sapiens
tagggtatggggtggttctgccactgccctcgctcccccaccttggggtgcctctccccctgctcgtgggggagaccctgcctgggatctgctttccagcraggaatatactttggagggagacacacatgttcttttctggagctctgcagtggccacggcagcccagcccgccaagcaccctggaatgaaaacatcccg

SEQ ID NO: 468351 - DNA, 201 bp, Homo sapiens
ggggccggtttggggtgggcaccaggctcttgtcccagccccagcctcagccgagggacccccacatcacggggttgcttttctgagcctcggtttccctrtctgttgggaggtaactgggtgcacaggagccctgaggctgcacgggagccgggagaggcctcagcacagccgggtgggccctgaatggaggcccggggc

SEQ ID NO: 468352 - DNA, 201 bp, Homo sapiens
tgggaaactagggccctaggaaggatgtgaaggccctggctggccccccaggccaccctctgtgctgtggggcagcccagccattttgctgtctaccctgsaaactcctcctcggggagacggctgggttttccccagggaagaggggtcaagctgggagaggtgaaggacacagatcacagctgctggcaggtgttcaag

SEQ ID NO: 468353 - DNA, 201 bp, Homo sapiens
gaatggaggcccggggcgtgactgcagagtggagcctcggctgggtcccaagcaccccctgccccgccaccgcccacccctgtcccggttcactcactgcstcccaccgccccggcaggtggacctttggggatggggagcaggccctccaccagttccagcctccgtacaacgagtccttcccggttccagacccctcgg

SEQ ID NO: 468354 - DNA, 201 bp, Homo sapiens
atgcagaggtggacatgagctgggggcagcctccggacactcctgggcacgccatacgggaggtggcctgcacggggatccctgccggtacccacaggccycgtgggtgggtgctgctgtgagcctgggctggtgggccctggtctccgggctctgagcctcagtttccccatctggaaagggggacagtgatggggctcc

SEQ ID NO: 468355 - DNA, 201 bp, Homo sapiens
cgcggaggatgctggcgccccgctggtgtacgccctgctgctgcggcgctgtcgccagggccactgcgaggagttctgtgtctacaagggcagcctctccrgctacggagccgtgctgcccccgggtttcaggccacacttcgaggtgggcctggccgtggtggtgcaggaccagctgggagccgctgtggtcgccctcaa

SEQ ID NO: 468356 - DNA, 201 bp, Homo sapiens
tggcagcagtgtccttttcagctgcccacgaaggcctgcttcagccagaggcctgcagcgccttctgcttctccaccggccagggcctcgcagccctctcsgagcagggctggtgcctgtgtggggcggcccagccctccagtgcctcctttgcctgcctgtccctctgctccggccccccgccacctcctgcccccacct

SEQ ID NO: 468357 - DNA, 201 bp, Homo sapiens
tgtcagctctgcagatgcagaggtggacatgagctgggggcagcctccggacactcctgggcacgccatacgggaggtggcctgcacggggatccctgccrgtacccacaggccccgtgggtgggtgctgctgtgagcctgggctggtgggccctggtctccgggctctgagcctcagtttccccatctggaaagggggac

SEQ ID NO: 468358 - DNA, 201 bp, Homo sapiens
aacctcgagccctggtgcaggtcactgtgtctggggtgccgggggtgtgcgggctgcgtgtccttgctgggtgtctgtggctccatgtggtcacaccaccygggagcaggtttgctcggaagcccagggtgtccgtgcgtgactggacgggggtgggctgtgtgtgtgacacatcccctggtaccttgctgacccgcgcca

SEQ ID NO: 468359 - DNA, 201 bp, Homo sapiens
atgccgtggggaccgtccctcaggctggcatgacgcggaggatgctggcgccccgctggtgtacgccctgctgctgcggcgctgtcgccagggccactgcraggagttctgtgtctacaagggcagcctctccagctacggagccgtgctgcccccgggtttcaggccacacttcgaggtgggcctggccgtggtggtgca

SEQ ID NO: 468360 - DNA, 201 bp, Homo sapiens
ccacgaaggcctgcttcagccagaggcctgcagcgccttctgcttctccaccggccagggcctcgcagccctctcggagcagggctggtgcctgtgtgggkcggcccagccctccagtgcctcctttgcctgcctgtccctctgctccggccccccgccacctcctgcccccacctgtaggggccccaccctcctccagca

SEQ ID NO: 468361 - DNA, 201 bp, Homo sapiens
gcctttgttggacagatgaagagtgacttgtttctggatgattctaagaggtgggttccctagagaaacctcgagccctggtgcaggtcactgtgtctggrgtgccgggggtgtgcgggctgcgtgtccttgctgggtgtctgtggctccatgtggtcacaccacccgggagcaggtttgctcggaagcccagggtgtccg

SEQ ID NO: 468362 - DNA, 201 bp, Homo sapiens
tgacgtcacggagccctcccgtgatgccgtggggaccgtccctcaggctggcatgacgcggaggatgctggcgccccgctggtgtacgccctgctgctgcrgcgctgtcgccagggccactgcgaggagttctgtgtctacaagggcagcctctccagctacggagccgtgctgcccccgggtttcaggccacacttcgag

SEQ ID NO: 468363 - DNA, 201 bp, Homo sapiens
gcagagtggagcctcggctgggtcccaagcaccccctgccccgccaccgcccacccctgtcccggttcactcactgcgtcccaccgccccggcaggtggamctttggggatggggagcaggccctccaccagttccagcctccgtacaacgagtccttcccggttccagacccctcggtggcccaggtgctggtggagcac

SEQ ID NO: 468364 - DNA, 201 bp, Homo sapiens
gccgtggggaccgtccctcaggctggcatgacgcggaggatgctggcgccccgctggtgtacgccctgctgctgcggcgctgtcgccagggccactgcgargagttctgtgtctacaagggcagcctctccagctacggagccgtgctgcccccgggtttcaggccacacttcgaggtgggcctggccgtggtggtgcagg

SEQ ID NO: 468365 - DNA, 201 bp, Homo sapiens
gaggtgaggactctactgggggtcctgggctgggctgggggtcctgccgccttggcgcagcttggactcaagacactgtgcacctctcagcaggcctttgytggacagatgaagagtgacttgtttctggatgattctaagaggtgggttccctagagaaacctcgagccctggtgcaggtcactgtgtctggggtgccgg

SEQ ID NO: 468366 - DNA, 201 bp, Homo sapiens
gctgggagccgctgtggtcgccctcaacaggtgagccaggccgtgggagggcgcccccgagactgccacctgctcaccacccccctctgctcgtaggtctytggccatcaccctcccagagcccaacggcagcgcaacggggctcacagtctggctgcacgggctcaccgctagtgtgctcccagggctgctgcggcaggc

SEQ ID NO: 468367 - DNA, 201 bp, Homo sapiens
acgaaggcctgcttcagccagaggcctgcagcgccttctgcttctccaccggccagggcctcgcagccctctcggagcagggctggtgcctgtgtggggcrgcccagccctccagtgcctcctttgcctgcctgtccctctgctccggccccccgccacctcctgcccccacctgtaggggccccaccctcctccagcacg

SEQ ID NO: 468368 - DNA, 201 bp, Homo sapiens
ccaccgcccacccctgtcccggttcactcactgcgtcccaccgccccggcaggtggacctttggggatggggagcaggccctccaccagttccagcctccrtacaacgagtccttcccggttccagacccctcggtggcccaggtgctggtggagcacaatgtcatgcacacctacgctgccccaggtgagggatgagggg

SEQ ID NO: 468369 - DNA, 201 bp, Homo sapiens
aggccgtgggagggcgcccccgagactgccacctgctcaccacccccctctgctcgtaggtctttggccatcaccctcccagagcccaacggcagcgcaayggggctcacagtctggctgcacgggctcaccgctagtgtgctcccagggctgctgcggcaggccgatccccagcacgtcatcgagtactcgttggccctg

SEQ ID NO: 468370 - DNA, 201 bp, Homo sapiens
ttcagccagaggcctgcagcgccttctgcttctccaccggccagggcctcgcagccctctcggagcagggctggtgcctgtgtggggcggcccagccctcyagtgcctcctttgcctgcctgtccctctgctccggccccccgccacctcctgcccccacctgtaggggccccaccctcctccagcacgtcttccctgcct

SEQ ID NO: 468371 - DNA, 201 bp, Homo sapiens
ccggttcactcactgcgtcccaccgccccggcaggtggacctttggggatggggagcaggccctccaccagttccagcctccgtacaacgagtccttcccrgttccagacccctcggtggcccaggtgctggtggagcacaatgtcatgcacacctacgctgccccaggtgagggatgagggggtgagggggccactgcct

SEQ ID NO: 468372 - DNA, 201 bp, Homo sapiens
tagtgtgctcccagggctgctgcggcaggccgatccccagcacgtcatcgagtactcgttggccctggtcaccgtgctgaacgaggtgagtgcagcctggsaggggacgtcacatctgctgcatgcgtgcttgggaccaagacctgtacccctgcctggagctttgcagagggctcatcccgggccccagagataaatccc

SEQ ID NO: 468373 - DNA, 201 bp, Homo sapiens
ggtggagcacaatgtcatgcacacctacgctgccccaggtgagggatgagggggtgagggggccactgcctttcaggctctgagcacggggtccccccagytccccagtcaagctgccccccttcctccccaacagccctcactgtgacctcacctgggctgatggcttaggcccctactggggtgagggaggggccaggc

SEQ ID NO: 468374 - DNA, 201 bp, Homo sapiens
ccggccagggcctcgcagccctctcggagcagggctggtgcctgtgtggggcggcccagccctccagtgcctcctttgcctgcctgtccctctgctccggscccccgccacctcctgcccccacctgtaggggccccaccctcctccagcacgtcttccctgcctccccaggggccaccctggtggggccccacggacctc

SEQ ID NO: 468375 - DNA, 201 bp, Homo sapiens
gtggagcacaatgtcatgcacacctacgctgccccaggtgagggatgagggggtgagggggccactgcctttcaggctctgagcacggggtccccccagcyccccagtcaagctgccccccttcctccccaacagccctcactgtgacctcacctgggctgatggcttaggcccctactggggtgagggaggggccaggcg

SEQ ID NO: 468376 - DNA, 201 bp, Homo sapiens
gggcctcgcagccctctcggagcagggctggtgcctgtgtggggcggcccagccctccagtgcctcctttgcctgcctgtccctctgctccggccccccgscacctcctgcccccacctgtaggggccccaccctcctccagcacgtcttccctgcctccccaggggccaccctggtggggccccacggacctctggcctc

SEQ ID NO: 468377 - DNA, 201 bp, Homo sapiens
acacctacgctgccccaggtgagggatgagggggtgagggggccactgcctttcaggctctgagcacggggtccccccagctccccagtcaagctgccccscttcctccccaacagccctcactgtgacctcacctgggctgatggcttaggcccctactggggtgagggaggggccaggcgtggggggagtggacaggga

SEQ ID NO: 468378 - DNA, 201 bp, Homo sapiens
tgcctgcctgtccctctgctccggccccccgccacctcctgcccccacctgtaggggccccaccctcctccagcacgtcttccctgcctccccaggggccmccctggtggggccccacggacctctggcctctggccagctagcagccttccacatcgctgccccgctccctgtcactgccacacgctgggacttcggaga

SEQ ID NO: 468379 - DNA, 201 bp, Homo sapiens
ggggccccacggacctctggcctctggccagctagcagccttccacatcgctgccccgctccctgtcactgccacacgctgggacttcggagacggctccsccgaggtggatgccgctgggccggctgcctcgcatcgctatgtgctgcctgggcgctatcacgtgacggccgtgctggccctgggggccggctcagccct

SEQ ID NO: 468380 - DNA, 201 bp, Homo sapiens
ggacagtgatggggctcccagcgggctgctgtgagggtgggaggatggaggagtgccctgagccccctgccatcccacacccgcccccaggagcctagacrtgtggatcggcttctcgactgtgcagggggtggaggtgggcccagcgccgcagggcgaggccttcagcctggagagctgccagaactggctgcccgggga

SEQ ID NO: 468381 - DNA, 201 bp, Homo sapiens
cccagctcagcctcctgacccaggccctggctaagggctgcaggagtctgtgagtcaggcctacgtggcagctgcggtcctcacacccacacatacgtctsttctcacacgcatccccccaggggccctcagtgagcattgcctgcctcctgctagggtccagctgggtccagtacaccagaacgcacactccagtgtcct

SEQ ID NO: 468382 - DNA, 201 bp, Homo sapiens
cacggagatcttccctggcaacgggcactgctaccgcctggtggtggagaaggcggcctggctgcaggcgcaggagcagtgtcaggcctgggccggggccrccctggcaatggtggacagtcccgccgtgcagcgcttcctggtctcccgggtcaccaggtgcctgcccccaccccccgaggggccataggttgggagatc

SEQ ID NO: 468383 - DNA, 201 bp, Homo sapiens
ctggaggccatgatgctcatcctgcaggcagagaccaccgcgggcaccgtgacgcccaccgccatcggagacagcatcctcaacatcacaggtgccgcggyccgtgccccatgccacccgcccgccccgtgcggccctttcctctgcctccctcctccccccaaccgcgtcgcctttgccccatcccatcttcgtccccct

SEQ ID NO: 468384 - DNA, 201 bp, Homo sapiens
ccgatccccagcacgtcatcgagtactcgttggccctggtcaccgtgctgaacgaggtgagtgcagcctgggaggggacgtcacatctgctgcatgcgtgsttgggaccaagacctgtacccctgcctggagctttgcagagggctcatcccgggccccagagataaatcccagtgaccctgaagcagcaccccgaccttc

SEQ ID NO: 468385 - DNA, 201 bp, Homo sapiens
gatccccagcacgtcatcgagtactcgttggccctggtcaccgtgctgaacgaggtgagtgcagcctgggaggggacgtcacatctgctgcatgcgtgctkgggaccaagacctgtacccctgcctggagctttgcagagggctcatcccgggccccagagataaatcccagtgaccctgaagcagcaccccgaccttccg

SEQ ID NO: 468386 - DNA, 201 bp, Homo sapiens
tcgagtactcgttggccctggtcaccgtgctgaacgaggtgagtgcagcctgggaggggacgtcacatctgctgcatgcgtgcttgggaccaagacctgtwcccctgcctggagctttgcagagggctcatcccgggccccagagataaatcccagtgaccctgaagcagcaccccgaccttccgctcccagcagccacac

SEQ ID NO: 468387 - DNA, 201 bp, Homo sapiens
agtcaagctgccccccttcctccccaacagccctcactgtgacctcacctgggctgatggcttaggcccctactggggtgagggaggggccaggcgtgggrggagtggacagggaagctgggcccctgaactgcgccccccgccctccccgggcctggctcttgctgctctgctgccccgagtgcagctgcacttggaggc

SEQ ID NO: 468388 - DNA, 201 bp, Homo sapiens
gctgaacgaggtgagtgcagcctgggaggggacgtcacatctgctgcatgcgtgcttgggaccaagacctgtacccctgcctggagctttgcagagggctyatcccgggccccagagataaatcccagtgaccctgaagcagcaccccgaccttccgctcccagcagccacacccaccgggccctctccggcgtctgcttt

SEQ ID NO: 468389 - DNA, 201 bp, Homo sapiens
acctcacctgggctgatggcttaggcccctactggggtgagggaggggccaggcgtggggggagtggacagggaagctgggcccctgaactgcgccccccrccctccccgggcctggctcttgctgctctgctgccccgagtgcagctgcacttggaggcggtgccgtcctcgccaggcagccctcagtgctgctacacct

SEQ ID NO: 468390 - DNA, 201 bp, Homo sapiens
ctgggctgatggcttaggcccctactggggtgagggaggggccaggcgtggggggagtggacagggaagctgggcccctgaactgcgccccccgccctccscgggcctggctcttgctgctctgctgccccgagtgcagctgcacttggaggcggtgccgtcctcgccaggcagccctcagtgctgctacacctgtgctcc

SEQ ID NO: 468391 - DNA, 201 bp, Homo sapiens
agaccaccgcgggcaccgtgacgcccaccgccatcggagacagcatcctcaacatcacaggtgccgcggcccgtgccccatgccacccgcccgccccgtgsggccctttcctctgcctccctcctccccccaaccgcgtcgcctttgccccatcccatcttcgtccccctcccctccccccaattcccatcctcatccccc

SEQ ID NO: 468392 - DNA, 201 bp, Homo sapiens
actgccacacgctgggacttcggagacggctccgccgaggtggatgccgctgggccggctgcctcgcatcgctatgtgctgcctgggcgctatcacgtgayggccgtgctggccctgggggccggctcagccctgctggggacagacgtgcaggtggaagcggcacctgccgccctggagctcgtgtgcccgtcctcggtg

SEQ ID NO: 468393 - DNA, 201 bp, Homo sapiens
tcctcacgttctcaggcctccacgctgaggtgaggactctactgggggtcctgggctgggctgggggtcctgccgccttggcgcagcttggactcaagacmctgtgcacctctcagcaggcctttgttggacagatgaagagtgacttgtttctggatgattctaagaggtgggttccctagagaaacctcgagccctggt

SEQ ID NO: 468394 - DNA, 201 bp, Homo sapiens
gagacagcatcctcaacatcacaggtgccgcggcccgtgccccatgccacccgcccgccccgtgcggccctttcctctgcctccctcctccccccaaccgygtcgcctttgccccatcccatcttcgtccccctcccctccccccaattcccatcctcatccccctcccccaattcccattctcctccccctcccccttcc

SEQ ID NO: 468395 - DNA, 201 bp, Homo sapiens
cctctccggcgtctgctttccacaatgcagcccccgcccaggagggcccatgtgcttaccctgttttgcccatgaagaaacagctcagtgttgtgggtcartgcccgcatcacacagcgtctagcacgtaactgcaccccgggagtcgtgggcatctgctggcctcctgccggcctcctgcgctgctgacagcttgctgtg

SEQ ID NO: 468396 - DNA, 201 bp, Homo sapiens
acctgccgggcagcaggtgctggacatcgacagctgcctggactcgtccgtgctggacagctccttcctcacgttctcaggcctccacgctgaggtgaggrctctactgggggtcctgggctgggctgggggtcctgccgccttggcgcagcttggactcaagacactgtgcacctctcagcaggcctttgttggacagat

SEQ ID NO: 468397 - DNA, 201 bp, Homo sapiens
gctccgtcccgcacgtggcttgggagcctgggacccttaaggctgggccgcaggtgcagccgttcaccccgggctcctcaggcggggggcttctgccgagygggtggggagcaggtgggggtgccgcggctgccccactcgggcctgtccccacaggtgagtacctcctgaccgtgctggcatctaatgccttcgagaacc

SEQ ID NO: 468398 - DNA, 201 bp, Homo sapiens
agcatcctcaacatcacaggtgccgcggcccgtgccccatgccacccgcccgccccgtgcggccctttcctctgcctccctcctccccccaaccgcgtcgyctttgccccatcccatcttcgtccccctcccctccccccaattcccatcctcatccccctcccccaattcccattctcctccccctcccccttccctatt

SEQ ID NO: 468399 - DNA, 201 bp, Homo sapiens
cggagacggctccgccgaggtggatgccgctgggccggctgcctcgcatcgctatgtgctgcctgggcgctatcacgtgacggccgtgctggccctggggrccggctcagccctgctggggacagacgtgcaggtggaagcggcacctgccgccctggagctcgtgtgcccgtcctcggtgcagagtgacgagagcctcga

SEQ ID NO: 468400 - DNA, 201 bp, Homo sapiens
ccgccgctggggggctcttgccgcctcttcccactgggcgctgtgcacgccctcaccaccaaggtgcacttcgaatgcacgggtgagtgcaggcctgcgtrgggggagcagcgggatcccccgactctgtgacgtcacggagccctcccgtgatgccgtggggaccgtccctcaggctggcatgacgcggaggatgctggc

SEQ ID NO: 468401 - DNA, 201 bp, Homo sapiens
ggacagacgtgcaggtggaagcggcacctgccgccctggagctcgtgtgcccgtcctcggtgcagagtgacgagagcctcgacctcagcatccagaaccgyggtggttcaggcctggaggccgcctacagcatcgtggccctgggcgaggagccggcccgaggtgagtgtctgctgcccactccccttcctccccagggcc

SEQ ID NO: 468402 - DNA, 201 bp, Homo sapiens
cccgcatcacacagcgtctagcacgtaactgcaccccgggagtcgtgggcatctgctggcctcctgccggcctcctgcgctgctgacagcttgctgtgccscctgcctgccccagtacgagcgggccctggacgtggcggcagagcccaagcacgagcggcagcaccgagcccagatacgcaagaacatcacggagactct

SEQ ID NO: 468403 - DNA, 201 bp, Homo sapiens
acagacgtgcaggtggaagcggcacctgccgccctggagctcgtgtgcccgtcctcggtgcagagtgacgagagcctcgacctcagcatccagaaccgcgktggttcaggcctggaggccgcctacagcatcgtggccctgggcgaggagccggcccgaggtgagtgtctgctgcccactccccttcctccccagggccat

SEQ ID NO: 468404 - DNA, 201 bp, Homo sapiens
gccccctgcctgccccagtacgagcgggccctggacgtggcggcagagcccaagcacgagcggcagcaccgagcccagatacgcaagaacatcacggagaytctggtgtccctgagggtccacactgtggatgacatccagcagatcgctgctgcgctggcccagtgcatggtaggatggccccacctgctcaccctgccc

SEQ ID NO: 468405 - DNA, 201 bp, Homo sapiens
cggcacctgccgccctggagctcgtgtgcccgtcctcggtgcagagtgacgagagcctcgacctcagcatccagaaccgcggtggttcaggcctggaggcygcctacagcatcgtggccctgggcgaggagccggcccgaggtgagtgtctgctgcccactccccttcctccccagggccatccagatggggcagagcctg

SEQ ID NO: 468406 - DNA, 201 bp, Homo sapiens
gtttgtgcagctcggggacgaggcctggctggtggcatgtgcctggcccccgttcccctaccgctacacctgggactttggcaccgaggaagccgcccccrcccgtgccaggggccctgaggtgacgttcatctaccgagacccaggctcctatcttgtgacagtcaccgcgtccaacaacatctctgctgccaatgactc

SEQ ID NO: 468407 - DNA, 201 bp, Homo sapiens
gctacctgtgggatctgggggacggtgggtggctcgagggtccggaggtcacccacgcttacaacagcacaggtgacttcaccgttagggtggccggctgsaatgaggtgagccgcagcgaggcctggctcaatgtgacggtgaagcggcgcgtgcgggggctcgtcgtcaatgcaagccgcacggtggtgcccctgaatg

SEQ ID NO: 468408 - DNA, 201 bp, Homo sapiens
agagcctcgacctcagcatccagaaccgcggtggttcaggcctggaggccgcctacagcatcgtggccctgggcgaggagccggcccgaggtgagtgtctkctgcccactccccttcctccccagggccatccagatggggcagagcctggtacccccgtcttgggcccacactgaccgttgacaccctcgttcccaccgg

SEQ ID NO: 468409 - DNA, 201 bp, Homo sapiens
caccgttagggtggccggctggaatgaggtgagccgcagcgaggcctggctcaatgtgacggtgaagcggcgcgtgcgggggctcgtcgtcaatgcaagcygcacggtggtgcccctgaatgggagcgtgagcttcagcacgtcgctggaggccggcagtgatgtgcgctattcctgggtgctctgtgaccgctgcacgcc

SEQ ID NO: 468410 - DNA, 201 bp, Homo sapiens
gcggggtggcagggcctcccctgctctcactggctgtgctggttgcaccctctgggagtgagtctcgtcgcaggcgtcagaacaaggcagtttttgcagtrctgtgtgaagggctcgtgtgttcatcctgggaatgacctcgtgagcactcactgtccctgaggactaggacagctcctagctggaagtaggtgccagtca

SEQ ID NO: 468411 - DNA, 201 bp, Homo sapiens
gtgagtgtctgctgcccactccccttcctccccagggccatccagatggggcagagcctggtacccccgtcttgggcccacactgaccgttgacaccctcrttcccaccggtctccagcggtgcacccgctctgcccctcggacacggagatcttccctggcaacgggcactgctaccgcctggtggtggagaaggcggcc

SEQ ID NO: 468412 - DNA, 201 bp, Homo sapiens
tccaatgcccactcctgcctggccctgaaggcccctaagcaccactgcagtggcctgtgtgtctgcccccaggtggggttccgggcagggtgtgtgctgcmattaccctggccaggtagagtcttggggcgccccctgccagctcaccttcctgcagccacacctgccgcagccatggctccagccgttgccaaagccctg

SEQ ID NO: 468413 - DNA, 201 bp, Homo sapiens
caccactgcagtggcctgtgtgtctgcccccaggtggggttccgggcagggtgtgtgctgccattaccctggccaggtagagtcttggggcgccccctgcmagctcaccttcctgcagccacacctgccgcagccatggctccagccgttgccaaagccctgctgtcactgtgggctggggccaggctgaccacagggccc

SEQ ID NO: 468414 - DNA, 201 bp, Homo sapiens
gctcagcctcctgacccaggccctggctaagggctgcaggagtctgtgagtcaggcctacgtggcagctgcggtcctcacacccacacatacgtctcttcycacacgcatccccccaggggccctcagtgagcattgcctgcctcctgctagggtccagctgggtccagtacaccagaacgcacactccagtgtcctctgc

SEQ ID NO: 468415 - DNA, 201 bp, Homo sapiens
ggatgacatccagcagatcgctgctgcgctggcccagtgcatggtaggatggccccacctgctcaccctgccccgcatgcctgccagggcactgggttcasccccccagggcagacgggcagcttggccgaggagctgagcctccagcctgggctccttcctgccatggcgttcctcggtctctgacctgcttcagtagcc

SEQ ID NO: 468416 - DNA, 201 bp, Homo sapiens
gctcaccctgccccgcatgcctgccagggcactgggttcagccccccagggcagacgggcagcttggccgaggagctgagcctccagcctgggctccttcmtgccatggcgttcctcggtctctgacctgcttcagtagcctcagccgttctgtcctgtgtgaacgcagggtgcctctcgggggacccagggtgtaaagag

SEQ ID NO: 468417 - DNA, 201 bp, Homo sapiens
ggtgagccgcagcgaggcctggctcaatgtgacggtgaagcggcgcgtgcgggggctcgtcgtcaatgcaagccgcacggtggtgcccctgaatgggagcrtgagcttcagcacgtcgctggaggccggcagtgatgtgcgctattcctgggtgctctgtgaccgctgcacgcccatccctgggggtcctaccatctctta

SEQ ID NO: 468418 - DNA, 201 bp, Homo sapiens
agggcagacgggcagcttggccgaggagctgagcctccagcctgggctccttcctgccatggcgttcctcggtctctgacctgcttcagtagcctcagccwttctgtcctgtgtgaacgcagggtgcctctcgggggacccagggtgtaaagaggggcccagatgtggggagggactaagaagatgctgctctgtgccctc

SEQ ID NO: 468419 - DNA, 201 bp, Homo sapiens
ggtggtgcccctgaatgggagcgtgagcttcagcacgtcgctggaggccggcagtgatgtgcgctattcctgggtgctctgtgaccgctgcacgcccatcyctgggggtcctaccatctcttacaccttccgctccgtgggcaccttcaatatcatcgtcacggctgagaacgaggtgggctccgcccaggacagcatctt

SEQ ID NO: 468420 - DNA, 201 bp, Homo sapiens
cggcacctaccatgtgcagctgcgggccaccaacatgctgggcagcgcctgggccgactgcaccatggacttcgtggagcctgtggggtggctgatggtgrccgcctccccgaacccagctgccgtcaacacaagcgtcaccctcagtgccgagctggctggtggcagtggtgtcgtatacacttggtccttggaggaggg

SEQ ID NO: 468421 - DNA, 201 bp, Homo sapiens
gcacctaccatgtgcagctgcgggccaccaacatgctgggcagcgcctgggccgactgcaccatggacttcgtggagcctgtggggtggctgatggtggcygcctccccgaacccagctgccgtcaacacaagcgtcaccctcagtgccgagctggctggtggcagtggtgtcgtatacacttggtccttggaggaggggc

SEQ ID NO: 468422 - DNA, 201 bp, Homo sapiens
tgggcctggtgctgtgggccagcagcaaggtggtggcgcccgggcagctggtccattttcagatcctgctggctgccggctcagctgtcaccttccgcctrcaggtcggcggggccaaccccgaggtgctccccgggccccgtttctcccacagcttcccccgcgtcggagaccacgtggtgagcgtgcggggcaaaaacc

SEQ ID NO: 468423 - DNA, 201 bp, Homo sapiens
ccggctgctgcttggatgcgagcttggccttgggccggtgctgggggcacagctgtctgccaggcactctcatcaccccagaggccttgtcatcctccctkgccccaggccaggtagcaagagagcagcgcccaggcctgctggcatcaggtctgggcaagtagcaggactaggcatgtcagaggaccccagggtggttag

SEQ ID NO: 468424 - DNA, 201 bp, Homo sapiens
ggtgcagagtgacgagagcctcgacctcagcatccagaaccgcggtggttcaggcctggaggccgcctacagcatcgtggccctgggcgaggagccggccygaggtgagtgtctgctgcccactccccttcctccccagggccatccagatggggcagagcctggtacccccgtcttgggcccacactgaccgttgacacc

SEQ ID NO: 468425 - DNA, 201 bp, Homo sapiens
ctgtgtgtctgcccccaggtggggttccgggcagggtgtgtgctgccattaccctggccaggtagagtcttggggcgccccctgccagctcaccttcctgmagccacacctgccgcagccatggctccagccgttgccaaagccctgctgtcactgtgggctggggccaggctgaccacagggcccccccgtccaccagag

SEQ ID NO: 468426 - DNA, 201 bp, Homo sapiens
actggtacgcctcgcccagctgggtgccgctgaccgccagtggacccgtttcgtgcgcggccgcccgcgccgcttcactagcttcgaccaggtggcgcagstgagctccgcagcccgtggcctggcggcctcgctgctcttcctgcttttggtcaaggtgagggctgggccggtgggcgcggggctgggcgcacaccccag

SEQ ID NO: 468427 - DNA, 201 bp, Homo sapiens
cagcccgtggcctggcggcctcgctgctcttcctgcttttggtcaaggtgagggctgggccggtgggcgcggggctgggcgcacaccccagggctgcaagmagacagatttctcgtccgcaggctgcccagcagctacgcttcgtgcgccagtggtccgtctttggcaagacattatgccgagctctgccagagctcctgg

SEQ ID NO: 468428 - DNA, 201 bp, Homo sapiens
ctgcggccgggctgcatctgcagctcaactatacgctgctggacggtgcgtgcagcgggtggggcacacgcggccccctggccttgttcttggggggaagscgtttctcgtagggcttccatgggtgtctctggtgaaatttgctttctgtttcatgggctgctgggggcctggccagagaggagctgggggccacggaga

SEQ ID NO: 468429 - DNA, 201 bp, Homo sapiens
atgccagccggggccgcgccatccccttctgtgggcagcggggccgcttcaagtacgagatcctcgtcaagacaggctggggccggggctcaggtgagggscgcagcggggtggcagggcctcccctgctctcactggctgtgctggttgcaccctctgggagtgagtctcgtcgcaggcgtcagaacaaggcagtttttg

SEQ ID NO: 468430 - DNA, 201 bp, Homo sapiens
gctcacggtgctgggccgctctggcgaggaggagggctgcgcctccatccgcctgtcccccaaccgcccgccgctggggggctcttgccgcctcttcccaytgggcgctgtgcacgccctcaccaccaaggtgcacttcgaatgcacgggtgagtgcaggcctgcgtggggggagcagcgggatcccccgactctgtgacg

SEQ ID NO: 468431 - DNA, 201 bp, Homo sapiens
caccttcacgctcacggtgctgggccgctctggcgaggaggagggctgcgcctccatccgcctgtcccccaaccgcccgccgctggggggctcttgccgcstcttcccactgggcgctgtgcacgccctcaccaccaaggtgcacttcgaatgcacgggtgagtgcaggcctgcgtggggggagcagcgggatcccccgac

SEQ ID NO: 468432 - DNA, 201 bp, Homo sapiens
tgcaggtgctgatgcggcgatcacagcgcaactacttggaggcccacgttgacctgcgcgactgcgtcacctaccagactgagtaccgctgggaggtgtaycgcaccgccagctgccagcggccggggcgcccagcgcgtgtggccctgcccggcgtggacgtgagccggcctcggctggtgctgccgcggctggcgctgc

SEQ ID NO: 468433 - DNA, 201 bp, Homo sapiens
aaaggcgtccaccaaaggctgctcgggaagggtcaacacacttgagcagccttagctagactgaccagggagaaagagagaagactcagaagccagaatgrtgaaagaacgagggcactttgctaagcagacgccacggacgactgcacagcagcacgccagataactcagaagaagcaagcacgcggctgtgcacgcttc

SEQ ID NO: 468434 - DNA, 201 bp, Homo sapiens
gcctgcccccaccctccctctacctccctgtctctgcactgacctcacgcatgtctgcaggagacctcatccacctggccagctcggacgtgcgggcaccrcagccctcagagctgggagccgagtcaccatctcggatggtggcgtcccaggcctacaacctgacctctgccctcatgcgcatcctcatgcgctcccgcg

SEQ ID NO: 468435 - DNA, 201 bp, Homo sapiens
caactacttggaggcccacgttgacctgcgcgactgcgtcacctaccagactgagtaccgctgggaggtgtatcgcaccgccagctgccagcggccggggygcccagcgcgtgtggccctgcccggcgtggacgtgagccggcctcggctggtgctgccgcggctggcgctgcctgtggggcactactgctttgtgtttgt

SEQ ID NO: 468436 - DNA, 201 bp, Homo sapiens
tctgcactgacctcacgcatgtctgcaggagacctcatccacctggccagctcggacgtgcgggcaccacagccctcagagctgggagccgagtcaccatytcggatggtggcgtcccaggcctacaacctgacctctgccctcatgcgcatcctcatgcgctcccgcgtgctcaacgaggagcccctgacgctggcgggc

SEQ ID NO: 468437 - DNA, 201 bp, Homo sapiens
acttggaggcccacgttgacctgcgcgactgcgtcacctaccagactgagtaccgctgggaggtgtatcgcaccgccagctgccagcggccggggcgcccrgcgcgtgtggccctgcccggcgtggacgtgagccggcctcggctggtgctgccgcggctggcgctgcctgtggggcactactgctttgtgtttgtcgtgt

SEQ ID NO: 468438 - DNA, 201 bp, Homo sapiens
cagactgagtaccgctgggaggtgtatcgcaccgccagctgccagcggccggggcgcccagcgcgtgtggccctgcccggcgtggacgtgagccggcctcrgctggtgctgccgcggctggcgctgcctgtggggcactactgctttgtgtttgtcgtgtcatttggggacacgccactgacacagagcatccaggccaat

SEQ ID NO: 468439 - DNA, 201 bp, Homo sapiens
ggctggcgctgcctgtggggcactactgctttgtgtttgtcgtgtcatttggggacacgccactgacacagagcatccaggccaatgtgacggtggccccygagcgcctggtgcccatcattgagggtggctcataccgcgtgtggtcagacacacgggacctggtgctggatgggagcgagtcctacgaccccaacctgg

SEQ ID NO: 468440 - DNA, 201 bp, Homo sapiens
tgtttgtcgtgtcatttggggacacgccactgacacagagcatccaggccaatgtgacggtggcccccgagcgcctggtgcccatcattgagggtggctcmtaccgcgtgtggtcagacacacgggacctggtgctggatgggagcgagtcctacgaccccaacctggaggacggcgaccagacgccgctcagtttccact

SEQ ID NO: 468441 - DNA, 201 bp, Homo sapiens
gcctggtgcccatcattgagggtggctcataccgcgtgtggtcagacacacgggacctggtgctggatgggagcgagtcctacgaccccaacctggaggayggcgaccagacgccgctcagtttccactgggcctgtgtggcttcgacacaggtcagtgcgtggcagggccgtcctccatgcccctcacccgtccacaccc

SEQ ID NO: 468442 - DNA, 201 bp, Homo sapiens
cctacgaccccaacctggaggacggcgaccagacgccgctcagtttccactgggcctgtgtggcttcgacacaggtcagtgcgtggcagggccgtcctccmtgcccctcacccgtccacacccatgagcccagagaacacccagcttgccaccagggctggcccgtcctcagtgcctggtgggccccgtcccagcatgggg

SEQ ID NO: 468443 - DNA, 201 bp, Homo sapiens
ggagtgtgtgtcctgcaaggcacaggccgtgtacgaagtgagccgcagctcctacgtgtacttggagggccgctgcctcaattgcagcagcggctccaagygaggggtgagtgttgagcggggtgtgggcgggctggggatgggtcccatggccgaggggacggggcctgcaggcagaagtggggctgacagggcagaggg

SEQ ID NO: 468444 - DNA, 201 bp, Homo sapiens
cccatggccgaggggacggggcctgcaggcagaagtggggctgacagggcagagggttgcgccccctcaccaccccttctgcctgcagcggtgggctgcaygtacgttcagcaacaagacgctggtgctggatgagaccaccacatccacgggcagtgcaggcatgcgactggtgctgcggcggggcgtgctgcgggacgg

SEQ ID NO: 468445 - DNA, 201 bp, Homo sapiens
aggcagcgaggggactggaccgggtatgggctctgagactgcgacatccaacctggcggagcctgggctcacgtccgctaccccttccctgcccaggagcrgagacccagcggggagttaccatctgaacctctccagccacttccgctggtcggcgctgcaggtgtccgtgggcctgtacacgtccctgtgccagtactt

SEQ ID NO: 468446 - DNA, 201 bp, Homo sapiens
ctgcaggtggctgggagcccgagccccacacctgccgggcagcaggtgctggacatcgacagctgcctggactcgtccgtgctggacagctccttcctcaygttctcaggcctccacgctgaggtgaggactctactgggggtcctgggctgggctgggggtcctgccgccttggcgcagcttggactcaagacactgtgc

SEQ ID NO: 468447 - DNA, 201 bp, Homo sapiens
catcaggtgagctggggtgagaggagggggctctgaagctcacccttgcagctgggcccaccctatgcctcctgtacctctagatgaagacctgatccagyaggtccttgccgagggggtcagcagcccagcccctacccaagacacccacatggaaacggacctgctcagcagcctgtgagtgtccggctctcgggggag

SEQ ID NO: 468448 - DNA, 201 bp, Homo sapiens
cagccatggctccagccgttgccaaagccctgctgtcactgtgggctggggccaggctgaccacagggcccccccgtccaccagagcctcctggtgtacaygctttttctgctggtgaccctgctggccagctatggggatgcctcatgccatgggcacgcctaccgtctgcaaagcgccatcaagcaggagctgcacagc

SEQ ID NO: 468449 - DNA, 201 bp, Homo sapiens
ctggccagctatggggatgcctcatgccatgggcacgcctaccgtctgcaaagcgccatcaagcaggagctgcacagccgggccttcctggccatcacgcrgtacgggcatccggtgcactggtctgtcttctgggctttagttttgcctttagtccagccagaccctaggggacatgtggacatgtgtagatacctttgt

SEQ ID NO: 468450 - DNA, 201 bp, Homo sapiens
gtctgaggagctctggccatggatggcccacgtgctgctgccctacgtccacgggaaccagtccagcccagagctggggcccccacggctgcggcaggtgyggctgcaggaaggtgagctggcagggcgtgccccaagacttaaatcgttcctcttgttgagagagcagcctttagcggagctctggcatcagccctgctc

SEQ ID NO: 468451 - DNA, 201 bp, Homo sapiens
gcccctcagccacgcctgcactgcgcggtccccgcagctcccgccctgccacccgctcctactgacccgcaccctctgcgcaggagccgcgctgtgttccyggagctcacgcgctacagcccggccgtggggctgcacgccgccgtcacgctgcgcctcgagttcccggcggccggccgcgccctggccgccctcagcgtc

SEQ ID NO: 468452 - DNA, 201 bp, Homo sapiens
gcttcgtgcgccagtggtccgtctttggcaagacattatgccgagctctgccagagctcctgggggtcaccttgggcctggtggtgctcggggtagcctamgcccagctggccatcctggtaggtgactgcgcggccggggagggcgtcttagctcagctcagctcagctgtacgccctcactggtgtcgccttccccgca

SEQ ID NO: 468453 - DNA, 201 bp, Homo sapiens
gcttttggtcaaggtgagggctgggccggtgggcgcggggctgggcgcacaccccagggctgcaagcagacagatttctcgtccgcaggctgcccagcagstacgcttcgtgcgccagtggtccgtctttggcaagacattatgccgagctctgccagagctcctgggggtcaccttgggcctggtggtgctcggggtagc

SEQ ID NO: 468454 - DNA, 201 bp, Homo sapiens
gcactgacctcacgcatgtctgcaggagacctcatccacctggccagctcggacgtgcgggcaccacagccctcagagctgggagccgagtcaccatctcsgatggtggcgtcccaggcctacaacctgacctctgccctcatgcgcatcctcatgcgctcccgcgtgctcaacgaggagcccctgacgctggcgggcgag

SEQ ID NO: 468455 - DNA, 201 bp, Homo sapiens
gggggtgggccgtggagtcggagtggacaccgctcagtattactttctgccgctgtcaaggccgagggccaggcagaatggctgcacgtaggttccccagrgagcaggcaggggcatctgtctgtctgtgggcttcagcactttaaagaggctgtgtggccaaccaggacccagggtcccctccccagctcccttgggaag

SEQ ID NO: 468456 - DNA, 201 bp, Homo sapiens
tctgcaggagacctcatccacctggccagctcggacgtgcgggcaccacagccctcagagctgggagccgagtcaccatctcggatggtggcgtcccaggmctacaacctgacctctgccctcatgcgcatcctcatgcgctcccgcgtgctcaacgaggagcccctgacgctggcgggcgaggagatcgtggcccagggc

SEQ ID NO: 468457 - DNA, 201 bp, Homo sapiens
cgcctcgtagccgtttcactcgcatccagagggccacctgctgcgttctcctcatctgcctcttcctgggcgccaacgccgtgtggtacggggctgttggygactctgcctacaggtgggtgccgtaggggtcggggcagcctcttcctgcccagcccttcctgcccctcagcctcacctgtgtggcctcctctcctccac

SEQ ID NO: 468458 - DNA, 201 bp, Homo sapiens
gccagctcggacgtgcgggcaccacagccctcagagctgggagccgagtcaccatctcggatggtggcgtcccaggcctacaacctgacctctgccctcaygcgcatcctcatgcgctcccgcgtgctcaacgaggagcccctgacgctggcgggcgaggagatcgtggcccagggcaagcgctcggacccgcggagcctg

SEQ ID NO: 468459 - DNA, 201 bp, Homo sapiens
ggtgaaagaacgagggcactttgctaagcagacgccacggacgactgcacagcagcacgccagataactcagaagaagcaagcacgcggctgtgcacgctyccgaaatgcactccagaagaaaatctcagtacatctataggaagtgaagaggctgagttagtcccttagaaacgtcccagtggccgggccgggtgtggtg

SEQ ID NO: 468460 - DNA, 201 bp, Homo sapiens
agctcggacgtgcgggcaccacagccctcagagctgggagccgagtcaccatctcggatggtggcgtcccaggcctacaacctgacctctgccctcatgcscatcctcatgcgctcccgcgtgctcaacgaggagcccctgacgctggcgggcgaggagatcgtggcccagggcaagcgctcggacccgcggagcctgctg

SEQ ID NO: 468461 - DNA, 201 bp, Homo sapiens
ggacgtgcgggcaccacagccctcagagctgggagccgagtcaccatctcggatggtggcgtcccaggcctacaacctgacctctgccctcatgcgcatcstcatgcgctcccgcgtgctcaacgaggagcccctgacgctggcgggcgaggagatcgtggcccagggcaagcgctcggacccgcggagcctgctgtgcta

SEQ ID NO: 468462 - DNA, 201 bp, Homo sapiens
acagccctcagagctgggagccgagtcaccatctcggatggtggcgtcccaggcctacaacctgacctctgccctcatgcgcatcctcatgcgctcccgcrtgctcaacgaggagcccctgacgctggcgggcgaggagatcgtggcccagggcaagcgctcggacccgcggagcctgctgtgctatggcggcgccccagg

SEQ ID NO: 468463 - DNA, 201 bp, Homo sapiens
cgccccttgttctcggcctgcagagggaggctggcgggtgtgcgctgaactttgggccccgcgggagcagcacggtcaccattccacgggagcggctggcrgctggcgtggagtacaccttcagcctgaccgtgtggaaggccggccgcaaggaggaggccaccaaccagacggtgggtgccgcccgcccctcggccactt

SEQ ID NO: 468464 - DNA, 201 bp, Homo sapiens
agagctgggagccgagtcaccatctcggatggtggcgtcccaggcctacaacctgacctctgccctcatgcgcatcctcatgcgctcccgcgtgctcaacraggagcccctgacgctggcgggcgaggagatcgtggcccagggcaagcgctcggacccgcggagcctgctgtgctatggcggcgccccagggcctggctg

SEQ ID NO: 468465 - DNA, 201 bp, Homo sapiens
cggcctgcagagggaggctggcgggtgtgcgctgaactttgggccccgcgggagcagcacggtcaccattccacgggagcggctggcggctggcgtggagkacaccttcagcctgaccgtgtggaaggccggccgcaaggaggaggccaccaaccagacggtgggtgccgcccgcccctcggccacttgccttggacagcc

SEQ ID NO: 468466 - DNA, 201 bp, Homo sapiens
agtcaccatctcggatggtggcgtcccaggcctacaacctgacctctgccctcatgcgcatcctcatgcgctcccgcgtgctcaacgaggagcccctgacrctggcgggcgaggagatcgtggcccagggcaagcgctcggacccgcggagcctgctgtgctatggcggcgccccagggcctggctgccacttctccatcc

SEQ ID NO: 468467 - DNA, 201 bp, Homo sapiens
ccttctctcccctcccctctcctctccccccttttctccactcccctctcctctctcccctcctcctccgctctcatgtgaagaggtgccttgtgtggtcrgtgggctgcatcacgtggtccccaggtggaggccctgggtcatgcagagccacagaaaatgcttagtgaggaggctgtgggggtccagtcaagtgggctc

SEQ ID NO: 468468 - DNA, 201 bp, Homo sapiens
ctcggatggtggcgtcccaggcctacaacctgacctctgccctcatgcgcatcctcatgcgctcccgcgtgctcaacgaggagcccctgacgctggcgggygaggagatcgtggcccagggcaagcgctcggacccgcggagcctgctgtgctatggcggcgccccagggcctggctgccacttctccatccccgaggctt

SEQ ID NO: 468469 - DNA, 201 bp, Homo sapiens
tgggtgccgcccgcccctcggccacttgccttggacagcccagcctccctggtcatctactgttttccgtgttttagtgctggtggaggccgcacgctctyccctctctgtttctgatgcaaattctatgtaacacgacagcctgcttcagctttgcttccttccaaacctgccacagttccacgtacagtcttcaagcca

SEQ ID NO: 468470 - DNA, 201 bp, Homo sapiens
ccactcccctctcctctctcccctcctcctccgctctcatgtgaagaggtgccttgtgtggtcggtgggctgcatcacgtggtccccaggtggaggccctsggtcatgcagagccacagaaaatgcttagtgaggaggctgtgggggtccagtcaagtgggctctccagctgcagggctgggggtgggagccaggtgagga

SEQ ID NO: 468471 - DNA, 201 bp, Homo sapiens
ccttggacagcccagcctccctggtcatctactgttttccgtgttttagtgctggtggaggccgcacgctctcccctctctgtttctgatgcaaattctaygtaacacgacagcctgcttcagctttgcttccttccaaacctgccacagttccacgtacagtcttcaagccacatatgctctagtggcaaaagctacaca

SEQ ID NO: 468472 - DNA, 201 bp, Homo sapiens
tcccctcctcctccgctctcatgtgaagaggtgccttgtgtggtcggtgggctgcatcacgtggtccccaggtggaggccctgggtcatgcagagccacaraaaatgcttagtgaggaggctgtgggggtccagtcaagtgggctctccagctgcagggctgggggtgggagccaggtgaggacccgtgtagagaggaggg

SEQ ID NO: 468473 - DNA, 201 bp, Homo sapiens
caataccaacagtgaggaagagccccttcccaccccagaggtagccactgtccccagcccatgtccctgttgctggatgtggtgggccggttctcaccctyacgctcccctctctggaccggccaggaggcttggtgaccctgagcccgtggtggctgctcctgctgctgtcaggcggggcctgctggtgccccagagtgg

SEQ ID NO: 468474 - DNA, 201 bp, Homo sapiens
catgtgaagaggtgccttgtgtggtcggtgggctgcatcacgtggtccccaggtggaggccctgggtcatgcagagccacagaaaatgcttagtgaggagrctgtgggggtccagtcaagtgggctctccagctgcagggctgggggtgggagccaggtgaggacccgtgtagagaggagggcgtgtgcaaggagtggggc

SEQ ID NO: 468475 - DNA, 201 bp, Homo sapiens
ataccaacagtgaggaagagccccttcccaccccagaggtagccactgtccccagcccatgtccctgttgctggatgtggtgggccggttctcaccctcaygctcccctctctggaccggccaggaggcttggtgaccctgagcccgtggtggctgctcctgctgctgtcaggcggggcctgctggtgccccagagtgggc

SEQ ID NO: 468476 - DNA, 201 bp, Homo sapiens
tgaagaggtgccttgtgtggtcggtgggctgcatcacgtggtccccaggtggaggccctgggtcatgcagagccacagaaaatgcttagtgaggaggctgkgggggtccagtcaagtgggctctccagctgcagggctgggggtgggagccaggtgaggacccgtgtagagaggagggcgtgtgcaaggagtggggccagg

SEQ ID NO: 468477 - DNA, 201 bp, Homo sapiens
ggaggcttggtgaccctgagcccgtggtggctgctcctgctgctgtcaggcggggcctgctggtgccccagagtgggcgtctgttccccagtccctgcttycctcagctggcctgattgggggtcttcccagaggggtcgtctgaggggagggtgtgggagcaggttccatcccagctcagcctcctgacccaggccctgg

SEQ ID NO: 468478 - DNA, 201 bp, Homo sapiens
cgtgcgccagtggtccgtctttggcaagacattatgccgagctctgccagagctcctgggggtcaccttgggcctggtggtgctcggggtagcctacgccyagctggccatcctggtaggtgactgcgcggccggggagggcgtcttagctcagctcagctcagctgtacgccctcactggtgtcgccttccccgcagctc

SEQ ID NO: 468479 - DNA, 201 bp, Homo sapiens
tacggcccagtgggggggagagggacacgccctgggctctgcccagggtgcagccggactgactgagcccctgtgccgcccccagttccgccacaaagtcygctttgaagggatggagccgctgccctctcgctcctccaggggctccaaggtatccccggatgtgcccccacccagcgctggctccgatgcctcgcaccc

SEQ ID NO: 468480 - DNA, 201 bp, Homo sapiens
tccttagctgcaccagtctgctgtcaagtgttcagtggcacacgtcgcgaggggctgccatcacggacggtgcagatgtcccatatatccagcattctagracattctgtcagatggcaccgggctctgtcctgtctgctgaggaggtggcttctcatccctgtcctgagcaggtctgagctgccgcccgctgaccactgc

SEQ ID NO: 468481 - DNA, 201 bp, Homo sapiens
ggaaaaggatttgatggatgtgcaagaattgggctgatgcttaggaaggggcgatgaggtgggtccagaagaaggggggtgaacggtgtgagcaaagaccrtgaggctggaggctggccacgggaggtgtgaggggtaggggcagggtgggaggtgggctcgcgggtgggctggggtcatgaagggcctcaggcgctctgc

SEQ ID NO: 468482 - DNA, 201 bp, Homo sapiens
acccacagaattgcatcagacctaccccacccgttgtttgtgatgctgtagctgagggctcctctgtctgccaggccggtcactggggactctgtccaggkcctggtggttcctgcttcccagcacctgatggtgtccatgagagcagcccctcgggagctgtccgggagagaagggcgctggtggctgctgagcggagag

SEQ ID NO: 468483 - DNA, 201 bp, Homo sapiens
cagtaatttatatggtgttaaaatgtgtatatttttgtatgtcactattttcactagggctgaggggcctgcgcccagagctggcctcccccaacacctgstgcgcttggtaggtgtggtggcgttatggcagcccggctgctgcttggatgcgagcttggccttgggccggtgctgggggcacagctgtctgccaggcac

SEQ ID NO: 468484 - DNA, 201 bp, Homo sapiens
actaggcatgtcagaggaccccagggtggttagaggaaaagactcctcctgggggctggctcccagggtggaggaaggtgactgtgtgtgtgtgtgtgtgygcgcgcgcacgcgcgagtgtgctgtatggcccaggcagcctcaaggccctcggagctggctgtgcctgcttctgtgtaccacttctgtgggcatggccgc

SEQ ID NO: 468485 - DNA, 201 bp, Homo sapiens
gccctcatgcgcatcctcatgcgctcccgcgtgctcaacgaggagcccctgacgctggcgggcgaggagatcgtggcccagggcaagcgctcggacccgcrgagcctgctgtgctatggcggcgccccagggcctggctgccacttctccatccccgaggctttcagcggggccctggccaacctcagtgacgtggtgcag

SEQ ID NO: 468486 - DNA, 201 bp, Homo sapiens
accatcttagccaggctggtcttgaactcctgacctcgtgatccacccatctcagcctcccaaaatgctgagattacaggcgtgagccaccacgcctgacmaagttgaggctaggtcattttttaattttttgtaaagacagggtctcactgtctccaactcctgagctcaagtgatcctcctgcctcagcctcctgaagt

SEQ ID NO: 468487 - DNA, 201 bp, Homo sapiens
aggcctgaactgggaacagccccaggcagcgaggctgtccaggacaggtgtgcttgcgtagccccgggatgcccctagcccctccctgtgagctgcctctmacaggtctgtctctgcttccccaggactggtggagggtctgcggaagcgcctgctgccggcctggtgtgcctccctggcccacgggctcagcctgctcct

SEQ ID NO: 468488 - DNA, 201 bp, Homo sapiens
gcagctgcggtcctcacacccacacatacgtctcttctcacacgcatccccccaggggccctcagtgagcattgcctgcctcctgctagggtccagctggstccagtacaccagaacgcacactccagtgtcctctgccctgtgtatgcccttccgccgtccaagttggaaggtggcaaaccggatgagtatcctgggagg

SEQ ID NO: 468489 - DNA, 201 bp, Homo sapiens
aacatgctgggcagcgcctgggccgactgcaccatggacttcgtggagcctgtggggtggctgatggtggccgcctccccgaacccagctgccgtcaacamaagcgtcaccctcagtgccgagctggctggtggcagtggtgtcgtatacacttggtccttggaggaggggctgagctgggagacctccgagccatttacc

SEQ ID NO: 468490 - DNA, 201 bp, Homo sapiens
cctggctgccacttctccatccccgaggctttcagcggggccctggccaacctcagtgacgtggtgcagctcatctttctggtggactccaatccctttcyctttggctatatcagcaactacaccgtctccaccaaggtggcctcgatggcattccagacacaggccggcgcccagatccccatcgagcggctggcctca

SEQ ID NO: 468491 - DNA, 201 bp, Homo sapiens
ggccaccgcagctccgccaactccgccaactccgttgtggtccagccccaggcctccgtcggtgctgtggtcaccctggacagcagcaaccctgcggccgkgctgcatctgcagctcaactatacgctgctggacggtgcgtgcagcgggtggggcacacgcggccccctggccttgttcttggggggaaggcgtttctcg

SEQ ID NO: 468492 - DNA, 201 bp, Homo sapiens
ctggccttgttcttggggggaaggcgtttctcgtagggcttccatgggtgtctctggtgaaatttgctttctgtttcatgggctgctgggggcctggccaragaggagctgggggccacggagaagcaggtgccagctctggtgcagaggctcctatggcctttcaggcccgtggcagagggtgggctcaggagggccatc

SEQ ID NO: 468493 - DNA, 201 bp, Homo sapiens
gcggggctggacactgctggctccacacaggggcccagcagggagctcgtatgccgctcgtgcctgaagcagacgctgcacaagctggaggccatgatgckcatcctgcaggcagagaccaccgcgggcaccgtgacgcccaccgccatcggagacagcatcctcaacatcacaggtgccgcggcccgtgccccatgccac

SEQ ID NO: 468494 - DNA, 201 bp, Homo sapiens
ggccttgttcttggggggaaggcgtttctcgtagggcttccatgggtgtctctggtgaaatttgctttctgtttcatgggctgctgggggcctggccagaraggagctgggggccacggagaagcaggtgccagctctggtgcagaggctcctatggcctttcaggcccgtggcagagggtgggctcaggagggccatcgt

SEQ ID NO: 468495 - DNA, 201 bp, Homo sapiens
cccccgggtggttgagcttcccggcaggcgtgtgacctgcgcgttctgccccaggccactacctgtctgaggaacctgagccctacctggcagtctacctrcactcggagccccggcccaatgagcacaactgctcggctagcaggaggatccgcccagagtcactccagggtgctgaccaccggccctacaccttcttca

SEQ ID NO: 468496 - DNA, 201 bp, Homo sapiens
tcctctgtgccccgcgtgggactctccagcccgacgggaggtgtgtccaggaggcgacaggctaagggcagagtcctccacagagcccaggctgacaccaktccccccgcagaggtacagccccgtggtggaggccggctcggacatggtcttccggtggaccatcaacgacaagcagtccctgaccttccagaacgtggt

SEQ ID NO: 468497 - DNA, 201 bp, Homo sapiens
gacagacgtgcaggtggaagcggcacctgccgccctggagctcgtgtgcccgtcctcggtgcagagtgacgagagcctcgacctcagcatccagaaccgckgtggttcaggcctggaggccgcctacagcatcgtggccctgggcgaggagccggcccgaggtgagtgtctgctgcccactccccttcctccccagggcca

SEQ ID NO: 468498 - DNA, 201 bp, Homo sapiens
ttgtagctggtactaggtttgctttacagatggggaaactgaggcacagagaggttgaggcattagtagtactacatggctggctggagagccggacagtsagtgtcccagcccgggcttggctcccatggcatgcagagccccgggcacctcctctcctctgtgccccgcgtgggactctccagcccgacgggaggtgtg

SEQ ID NO: 468499 - DNA, 201 bp, Homo sapiens
gagagcagcccctcgggagctgtccgggagagaagggcgctggtggctgctgagcggagagcaaggcccgtgttctccaggcccttggcacagcagtggarcccccgcccctgccttgtgttgtcctcttaggctctggtcctggggtttggaggagggggaccctgggggttggtggcctgtcccagcctgagctggcaa

SEQ ID NO: 468500 - DNA, 201 bp, Homo sapiens
ctcctcggggagacggctgggttttccccagggaagaggggtcaagctgggagaggtgaaggacacagatcacagctgctggcaggtgttcaagggtccargagcgttgctgtctgggtgtcaccagtagccttcctggggggctcacgcaggtgcctctccacttgtggctccctggctgctgaagctcagcagggacag

SEQ ID NO: 468501 - DNA, 201 bp, Homo sapiens
gccggggcttctgaggccacagcctgccttgggttaatgatgctgccgagaggtggtggcttttggaaaagatggcgtactgcaaaacgtgctgctctgcrtggctcgaagcttcgtggggagacgtgggcagagccgtggctgactcacagaccccccaccccagagcctgccctgccctccctgccccgacccttctcc

SEQ ID NO: 468502 - DNA, 201 bp, Homo sapiens
accttcgacatgggggacggcaccgtgctgtcgggcccggaggcaacagtggagcatgtgtacctgcgggcacagaactgcacagtgaccgtgggtgcggscagccccgccggccacctggcccggagcctgcacgtgctggtcttcgtcctggaggtgctgcgcgttgaacccgccgcctgcatccccacgcagcctgac

SEQ ID NO: 468503 - DNA, 201 bp, Homo sapiens
cctttcccacctgcatccctgaatgacaggagagtgtgggagagtgtagggacagcaggcgcagaccccggggcccctgcctgggattggcgtcggggaaracaggcattctggagcgacccctaggcctgatgccttagagcgcaactgccagagacacagcttccttggggggctggccaggccacggaggggcccctg

SEQ ID NO: 468504 - DNA, 201 bp, Homo sapiens
catccctgaatgacaggagagtgtgggagagtgtagggacagcaggcgcagaccccggggcccctgcctgggattggcgtcggggaagacaggcattctgsagcgacccctaggcctgatgccttagagcgcaactgccagagacacagcttccttggggggctggccaggccacggaggggcccctggctcccatttctg

SEQ ID NO: 468505 - DNA, 201 bp, Homo sapiens
tccctgaatgacaggagagtgtgggagagtgtagggacagcaggcgcagaccccggggcccctgcctgggattggcgtcggggaagacaggcattctggascgacccctaggcctgatgccttagagcgcaactgccagagacacagcttccttggggggctggccaggccacggaggggcccctggctcccatttctggt

SEQ ID NO: 468506 - DNA, 201 bp, Homo sapiens
cctttcctcacctcagaaggcccttaggggttcaatgctctgcagcctttgcccggtctccctcctaccccacgccccccacttgctgccccagtccctgmcagggcccagctccaatgcccactcctgcctggccctgaaggcccctaagcaccactgcagtggcctgtgtgtctgcccccaggtggggttccgggcagg

SEQ ID NO: 468507 - DNA, 201 bp, Homo sapiens
ggcctggtggagaaggaggtgctggccgcgagtaaggcctcgttccatgttcccactccgtgggaggttgggcagggtggtcctgccccgtggcctcctgmagtgcggccctccctgccttctaggcgacgcagcccttttgcgcttccggcgcctgctggtggctgagctgcagcgtggcttctttgacaagcacatctg

SEQ ID NO: 468508 - DNA, 201 bp, Homo sapiens
catatgtttccttgtccagaagttaattttaggccataaacctgcatgggacagacacactggcgtctctagattgtagagatgcttgttggatggttgaracccaatcatagtttgcagggttgaaggggggctcattgcaccctgagagactgtgcactgctgtaagggcagctggtcaggctgtgggcgatgggttta

SEQ ID NO: 468509 - DNA, 201 bp, Homo sapiens
cataagccgcgaccaggaggggttgctcccgagtccgtggcaggaaccagaggccacatgtggctgctcgtatttaagttaattaaaatggaacgatggcygggcgcggtggctcacacctgtaatcccagcactttgggaggccgaggcgggcagatcacttgaggtcaggagttccaagaccagcctggccaacacagt

SEQ ID NO: 468510 - DNA, 201 bp, Homo sapiens
aattttaggccataaacctgcatgggacagacacactggcgtctctagattgtagagatgcttgttggatggttgagacccaatcatagtttgcagggttraaggggggctcattgcaccctgagagactgtgcactgctgtaagggcagctggtcaggctgtgggcgatgggtttatcagcagcaagcgggcgggagagg

SEQ ID NO: 468511 - DNA, 201 bp, Homo sapiens
gaatttaaaactctgctccctgacctcacacgagcccccgtgagtctctcacgccctctgctgtgttctcgcctggctaaagcgagtggcttttgaggtgragtctgaacccctgatgggaaactgcgggctgcccgcggtgccaccatgctgggtacatgggggacagggctgtctccatcttgcgggtacctgcctctt

SEQ ID NO: 468512 - DNA, 201 bp, Homo sapiens
ggcgtgtgacctgcgcgttctgccccaggccactacctgtctgaggaacctgagccctacctggcagtctacctacactcggagccccggcccaatgagcrcaactgctcggctagcaggaggatccgcccagagtcactccagggtgctgaccaccggccctacaccttcttcatttccccggggtgagctctgcgggcc

SEQ ID NO: 468513 - DNA, 201 bp, Homo sapiens
ccgggtcaccaggtgcctgcccccaccccccgaggggccataggttgggagatctctgaagcactggggcagagcctgcggctggggagtctcaggaggarggaggtgggagctgggccggccctggtgagcaggtggcgccggccggtggggccgttcctgtcagctctgcagatgcagaggtggacatgagctgggggc

SEQ ID NO: 468514 - DNA, 201 bp, Homo sapiens
tgtctgaggaacctgagccctacctggcagtctacctacactcggagccccggcccaatgagcacaactgctcggctagcaggaggatccgcccagagtcmctccagggtgctgaccaccggccctacaccttcttcatttccccggggtgagctctgcgggccagcctggcagggcagggcagggcatcatgggtcagca

SEQ ID NO: 468515 - DNA, 201 bp, Homo sapiens
gtctcaggaggaaggaggtgggagctgggccggccctggtgagcaggtggcgccggccggtggggccgttcctgtcagctctgcagatgcagaggtggacrtgagctgggggcagcctccggacactcctgggcacgccatacgggaggtggcctgcacggggatccctgccggtacccacaggccccgtgggtgggtgct

SEQ ID NO: 468516 - DNA, 201 bp, Homo sapiens
cccagtggggacctgcagggacccctgacgcctctggcacagcaggacggcctctcagccccgcacgagcccgtggaggtagtcggccccccacgttctawaacctgccctcctgcctgcccctggaggccttgcctgccctgcccactgtgggtctcgccaaaaaacttgggggccttaatgttgcttgtgcccagtgaa

SEQ ID NO: 468517 - DNA, 201 bp, Homo sapiens
gtctcgccaaaaaacttgggggccttaatgttgcttgtgcccagtgaagatggttgggaaaatccagagtgcagagaggaaagcgtttactcacattaccyccaggccttttctctgagcgtgtgtgagttattcctgaaaggcaggtcaggggtcctgccccccatggacagtttccaccggagtcttcctctcgagcga

SEQ ID NO: 468518 - DNA, 201 bp, Homo sapiens
accaccggccctacaccttcttcatttccccggggtgagctctgcgggccagcctggcagggcagggcagggcatcatgggtcagcattgcctgggttacrggccccatggggacggcaggcagcgaggggactggaccgggtatgggctctgagactgcgacatccaacctggcggagcctgggctcacgtccgctaccc

SEQ ID NO: 468519 - DNA, 201 bp, Homo sapiens
cttaatgttgcttgtgcccagtgaagatggttgggaaaatccagagtgcagagaggaaagcgtttactcacattacctccaggccttttctctgagcgtgkgtgagttattcctgaaaggcaggtcaggggtcctgccccccatggacagtttccaccggagtcttcctctcgagcgacaggagccaggcctgtgggggtc

SEQ ID NO: 468520 - DNA, 201 bp, Homo sapiens
ccagcctggcagggcagggcagggcatcatgggtcagcattgcctgggttactggccccatggggacggcaggcagcgaggggactggaccgggtatgggytctgagactgcgacatccaacctggcggagcctgggctcacgtccgctaccccttccctgcccaggagcagagacccagcggggagttaccatctgaacc

SEQ ID NO: 468521 - DNA, 201 bp, Homo sapiens
aaagcgtttactcacattacctccaggccttttctctgagcgtgtgtgagttattcctgaaaggcaggtcaggggtcctgccccccatggacagtttccaycggagtcttcctctcgagcgacaggagccaggcctgtgggggtctgatggctcgctctccttccctcccctcttcctgggaagttcgggtagggggagtc

SEQ ID NO: 468522 - DNA, 201 bp, Homo sapiens
tactggccccatggggacggcaggcagcgaggggactggaccgggtatgggctctgagactgcgacatccaacctggcggagcctgggctcacgtccgctrccccttccctgcccaggagcagagacccagcggggagttaccatctgaacctctccagccacttccgctggtcggcgctgcaggtgtccgtgggcctgta

SEQ ID NO: 468523 - DNA, 201 bp, Homo sapiens
ctctggtgccaacgccacggccacggctcgctggcctgggggcagtgtcagcgcccgctttgagaatgtctgccctgccctggtggccaccttcgtgcccrgctgcccctgggagaccaacgataccctgttctcagtggtagcactgccgtggctcagtgagggggagcacgtggtggacgtggtggtggaaaacagcgc

SEQ ID NO: 468524 - DNA, 201 bp, Homo sapiens
aacctggcggagcctgggctcacgtccgctaccccttccctgcccaggagcagagacccagcggggagttaccatctgaacctctccagccacttccgctrgtcggcgctgcaggtgtccgtgggcctgtacacgtccctgtgccagtacttcagcgaggaggacatggtgtggcggacagaggggctgctgcccctggag

SEQ ID NO: 468525 - DNA, 201 bp, Homo sapiens
ggtgtccgtgggcctgtacacgtccctgtgccagtacttcagcgaggaggacatggtgtggcggacagaggggctgctgcccctggaggagacctcgcccygccaggccgtctgcctcacccgccacctcaccgccttcggcgccagcctcttcgtgcccccaagccatgtccgctttgtgtttcctgtgagtgaccctgt

SEQ ID NO: 468526 - DNA, 201 bp, Homo sapiens
cagtttccaccggagtcttcctctcgagcgacaggagccaggcctgtgggggtctgatggctcgctctccttccctcccctcttcctgggaagttcgggtrgggggagtctgggcttcaggctgggatggggtctgtggagctgaggcggccccctgcccaccaggtcatggtattcccgggcctgcgtctgagccgtgaa

SEQ ID NO: 468527 - DNA, 201 bp, Homo sapiens
gcctgagagcaggtccccggacaacaggacccagctggcccccgcgtgcatgccagggggacgctggtgccctggagccaacatctgcttgccgctggacrcctcctgccacccccaggcctgcgccaatggctgcacgtcagggccagggctacccggggccccctatgcgctatggagagagttcctcttctccgttcc

SEQ ID NO: 468528 - DNA, 201 bp, Homo sapiens
ccctggaggagacctcgccccgccaggccgtctgcctcacccgccacctcaccgccttcggcgccagcctcttcgtgcccccaagccatgtccgctttgtstttcctgtgagtgaccctgtgctcctgggagcctctgcagagtcgaggagggcctgggtgggctcggctctatcctgagaaggcacagcttgcacgtgac

SEQ ID NO: 468529 - DNA, 201 bp, Homo sapiens
cctggaggagacctcgccccgccaggccgtctgcctcacccgccacctcaccgccttcggcgccagcctcttcgtgcccccaagccatgtccgctttgtgyttcctgtgagtgaccctgtgctcctgggagcctctgcagagtcgaggagggcctgggtgggctcggctctatcctgagaaggcacagcttgcacgtgacc

SEQ ID NO: 468530 - DNA, 201 bp, Homo sapiens
aactgtcctgcctgtccttgtcacgagcactgtggggaggctccttgaggtgtggctgacgaagcggggagccctgcgtgtccaccctcatccgtcgtgcrggggtccacgggccatgaccgtgaggacgtgatgcagccctgcctccctctccacaggtcaccctccacggccaggatgtcctcatgctccctggtgacc

SEQ ID NO: 468531 - DNA, 201 bp, Homo sapiens
tcatgctgacatgtgctgtgtgcctggtgacctacatggtcatggccgccatcctgcacaagctggaccagttggatgccagccggggccgcgccatcccyttctgtgggcagcggggccgcttcaagtacgagatcctcgtcaagacaggctggggccggggctcaggtgaggggcgcagcggggtggcagggcctcccc

SEQ ID NO: 468532 - DNA, 201 bp, Homo sapiens
ccccgcacgagcccgtggaggtagtcggccccccacgttctacaacctgccctcctgcctgcccctggaggccttgcctgccctgcccactgtgggtctcsccaaaaaacttgggggccttaatgttgcttgtgcccagtgaagatggttgggaaaatccagagtgcagagaggaaagcgtttactcacattacctccagg

SEQ ID NO: 468533 - DNA, 201 bp, Homo sapiens
ccgagcactgcgtccggctcgggcccaccgggtggtgtaacaccgacctgtgctcagcgccgcacagctacgtctgcgagctgcagcccggaggtgtgcgrggggccaggcaggggcctgagacgctggctgtggttaggggcctgccgagcgcccgcggtggagcctgggctgaggaggaggggctggtgggggggtttt

SEQ ID NO: 468534 - DNA, 201 bp, Homo sapiens
cacggagactctggtgtccctgagggtccacactgtggatgacatccagcagatcgctgctgcgctggcccagtgcatggtaggatggccccacctgctcwccctgccccgcatgcctgccagggcactgggttcagccccccagggcagacgggcagcttggccgaggagctgagcctccagcctgggctccttcctgcc

SEQ ID NO: 468535 - DNA, 201 bp, Homo sapiens
ttgcgccccctcaccaccccttctgcctgcagcggtgggctgcacgtacgttcagcaacaagacgctggtgctggatgagaccaccacatccacgggcagygcaggcatgcgactggtgctgcggcggggcgtgctgcgggacggcgagggatacaccttcacgctcacggtgctgggccgctctggcgaggaggagggct

SEQ ID NO: 468536 - DNA, 201 bp, Homo sapiens
agggcctgggaccccagaggaccctgcactctgctctgtgctcttgcctgggcttagggccgctcggtggtcctgctgccagatgcctgggccctgctgtktcccccatccttgcagggaaccagaacgtgggggcagggcatcagacagcggcgatgatgtcacctggcgggtgcagaggaagcccgaggggcggggtgg

SEQ ID NO: 468537 - DNA, 201 bp, Homo sapiens
caatggctcccttgggctggagctgcagcagccgtacctgttctctgctgtgggccgtgggcgccccgccagctacctgtgggatctgggggacggtgggyggctcgagggtccggaggtcacccacgcttacaacagcacaggtgacttcaccgttagggtggccggctggaatgaggtgagccgcagcgaggcctggct

SEQ ID NO: 468538 - DNA, 201 bp, Homo sapiens
accttcagcctgaccgtgtggaaggccggccgcaaggaggaggccaccaaccagacggtgggtgccgcccgcccctcggccacttgccttggacagcccarcctccctggtcatctactgttttccgtgttttagtgctggtggaggccgcacgctctcccctctctgtttctgatgcaaattctatgtaacacgacagcc

SEQ ID NO: 468539 - DNA, 201 bp, Homo sapiens
cacccagcgctggctccgatgcctcgcacccctccacctcctccagccagctggatgggctgagcgtgagcctgggccggctggggacaaggtgtgagccygagccctcccgcctccaagccgtgttcgaggccctgctcacccagtttgaccgactcaaccaggccacagaggacgtctaccagctggagcagcagctgc

SEQ ID NO: 468540 - DNA, 201 bp, Homo sapiens
cctggccctgggtggacaggtccaggtggcactcggcatagggctgagatgggtgcagagggctgaggcccccaggcctctcctggcttggtttccccagrtgagtgttcatttgggtcttccatcagaaaggcccctcctgacctctgggagtggggagctcaagggtgggaggccatagcttggggatgctggcaatgt

SEQ ID NO: 468541 - DNA, 201 bp, Homo sapiens
cgggctgcatctgcagctcaactatacgctgctggacggtgcgtgcagcgggtggggcacacgcggccccctggccttgttcttggggggaaggcgtttcycgtagggcttccatgggtgtctctggtgaaatttgctttctgtttcatgggctgctgggggcctggccagagaggagctgggggccacggagaagcaggt

SEQ ID NO: 468542 - DNA, 201 bp, Homo sapiens
agggacgcaggcggacgcctgacttcggtgcctggagtggctcttggttccctggctcccagcaccactcccactctcgtttggggtagggtcttccggcwttttgtcggggggaccctgtgacccaagaggctcaagaaactgcccgcccaggttaacatgggcttggctgcaactgcctcctggaggccgggatgaatt

SEQ ID NO: 468543 - DNA, 201 bp, Homo sapiens
cctggcagggcagggcagggcatcatgggtcagcattgcctgggttactggccccatggggacggcaggcagcgaggggactggaccgggtatgggctctragactgcgacatccaacctggcggagcctgggctcacgtccgctaccccttccctgcccaggagcagagacccagcggggagttaccatctgaacctctc

SEQ ID NO: 468544 - DNA, 201 bp, Homo sapiens
gacgcaggcggacgcctgacttcggtgcctggagtggctcttggttccctggctcccagcaccactcccactctcgtttggggtagggtcttccggctttwtgtcggggggaccctgtgacccaagaggctcaagaaactgcccgcccaggttaacatgggcttggctgcaactgcctcctggaggccgggatgaattcac

SEQ ID NO: 468545 - DNA, 201 bp, Homo sapiens
agcctgctcctggtggctgtggctgtggctgtctcagggtgggtgggtgcgagcttccccccgggcgtgagtgttgcgtggctcctgtccagcagcgccascttcctggcctcattcctcggctgggagccactgaaggtgagggggctgccaggggtaggctacaggcctccatcacgggggacccctctgaagccaccc

SEQ ID NO: 468546 - DNA, 201 bp, Homo sapiens
catcatgggtcagcattgcctgggttactggccccatggggacggcaggcagcgaggggactggaccgggtatgggctctgagactgcgacatccaacctkgcggagcctgggctcacgtccgctaccccttccctgcccaggagcagagacccagcggggagttaccatctgaacctctccagccacttccgctggtcgg

SEQ ID NO: 468547 - DNA, 201 bp, Homo sapiens
gctccaatgcccactcctgcctggccctgaaggcccctaagcaccactgcagtggcctgtgtgtctgcccccaggtggggttccgggcagggtgtgtgctsccattaccctggccaggtagagtcttggggcgccccctgccagctcaccttcctgcagccacacctgccgcagccatggctccagccgttgccaaagccc

SEQ ID NO: 468548 - DNA, 201 bp, Homo sapiens
tgtgcttgcgtagccccgggatgcccctagcccctccctgtgagctgcctctcacaggtctgtctctgcttccccaggactggtggagggtctgcggaagsgcctgctgccggcctggtgtgcctccctggcccacgggctcagcctgctcctggtggctgtggctgtggctgtctcagggtgggtgggtgcgagcttccc

SEQ ID NO: 468549 - DNA, 201 bp, Homo sapiens
tgcacaggacgggcccatgacagacaactgtctgccccagaacatccccaggataaggctgagaagcccaggtctagccgtggccagcagggcagtgggarccatgttccctgggtctctggtggccgctcactcgaggcgggcatggggcagtaggggctggagcgtgtgactgatgctgtggcaggtctgaggagctct

SEQ ID NO: 468550 - DNA, 201 bp, Homo sapiens
cccgctgaccactgccctcgtcctgcaggtggctgggagcccgagccccacacctgccgggcagcaggtgctggacatcgacagctgcctggactcgtccrtgctggacagctccttcctcacgttctcaggcctccacgctgaggtgaggactctactgggggtcctgggctgggctgggggtcctgccgccttggcgca

SEQ ID NO: 468551 - DNA, 201 bp, Homo sapiens
cctggccactggccccagcaggacaccccttcgggccaagaacaaggtccaccccagcagcacttagtcctccttcctggcgggggtgggccgtggagtcrgagtggacaccgctcagtattactttctgccgctgtcaaggccgagggccaggcagaatggctgcacgtaggttccccagagagcaggcaggggcatctg

SEQ ID NO: 468552 - DNA, 201 bp, Homo sapiens
ccctcctaccccacgccccccacttgctgccccagtccctgccagggcccagctccaatgcccactcctgcctggccctgaaggcccctaagcaccactgmagtggcctgtgtgtctgcccccaggtggggttccgggcagggtgtgtgctgccattaccctggccaggtagagtcttggggcgccccctgccagctcacc

SEQ ID NO: 468553 - DNA, 201 bp, Homo sapiens
cctgccgggagccggaggtggacgtggtcctgcccctgcaggtgctgatgcggcgatcacagcgcaactacttggaggcccacgttgacctgcgcgactgygtcacctaccagactgagtaccgctgggaggtgtatcgcaccgccagctgccagcggccggggcgcccagcgcgtgtggccctgcccggcgtggacgtga

SEQ ID NO: 468554 - DNA, 201 bp, Homo sapiens
ctgggaggtgtatcgcaccgccagctgccagcggccggggcgcccagcgcgtgtggccctgcccggcgtggacgtgagccggcctcggctggtgctgccgyggctggcgctgcctgtggggcactactgctttgtgtttgtcgtgtcatttggggacacgccactgacacagagcatccaggccaatgtgacggtggcccc

SEQ ID NO: 468555 - DNA, 201 bp, Homo sapiens
caggagtgccgcggcctcctgaccagcctggctccggggtgccggaagggctggggtgcggcacccacgccacccctctccggcagggcatggtcctgggsctcctgtgccgtgtatgacagcgggggctacgtgcaggagctgggcctgagcctggaggagagccgcgaccggctgcgcttcctgcagctgcacaactgg

SEQ ID NO: 468556 - DNA, 201 bp, Homo sapiens
tcctgggaatgacctcgtgagcactcactgtccctgaggactaggacagctcctagctggaagtaggtgccagtcagtcagggtgggcagcccacgttctrcacagtagcgtggccccacaagtgacgtgagcatcgctaccactgtgggagactgtgcatccacccgcgatcctgactgcatagctcgtctctcagacgg

SEQ ID NO: 468557 - DNA, 201 bp, Homo sapiens
cgaggcccgtgtactgcagggagtcctagtggtgagtatggccgaggctccaccaccagcccccaggcaggtgcctgcagacagggtgctcacacagggcktgaggcctggcttcccagtgagggcagcagcccagttactggggacgtcggccccgggcaggtcctgctggctggctcctcgggctacctggtgggcttt

SEQ ID NO: 468558 - DNA, 201 bp, Homo sapiens
tagtggtgagtatggccgaggctccaccaccagcccccaggcaggtgcctgcagacagggtgctcacacagggcgtgaggcctggcttcccagtgagggcrgcagcccagttactggggacgtcggccccgggcaggtcctgctggctggctcctcgggctacctggtgggctttaaattcctggaaagtcacggctctga

SEQ ID NO: 468559 - DNA, 201 bp, Homo sapiens
tcagtgacgtggtgcagctcatctttctggtggactccaatccctttccctttggctatatcagcaactacaccgtctccaccaaggtggcctcgatggcrttccagacacaggccggcgcccagatccccatcgagcggctggcctcagagcgcgccatcaccgtgaaggtgcccaacaactcggactgggctgcccggg

SEQ ID NO: 468560 - DNA, 201 bp, Homo sapiens
tcactgtccctgaggactaggacagctcctagctggaagtaggtgccagtcagtcagggtgggcagcccacgttctgcacagtagcgtggccccacaagtkacgtgagcatcgctaccactgtgggagactgtgcatccacccgcgatcctgactgcatagctcgtctctcagacggaggcgccagcaccctccccgtggc

SEQ ID NO: 468561 - DNA, 201 bp, Homo sapiens
gcagggcgggggcgggctccaccttcacctctgccttctgctctgcttcatgctgcccgaggacgctgccatggctgtgggtgagtggagggagggacgcyaatcagggccaggcctctcacctgccacctgggctcactgacgcctgtccctgcagctgacggcctccaaccacgtgagcaacgtcaccgtgaactacaa

SEQ ID NO: 468562 - DNA, 201 bp, Homo sapiens
ctgtccctgaggactaggacagctcctagctggaagtaggtgccagtcagtcagggtgggcagcccacgttctgcacagtagcgtggccccacaagtgacrtgagcatcgctaccactgtgggagactgtgcatccacccgcgatcctgactgcatagctcgtctctcagacggaggcgccagcaccctccccgtggctgt

SEQ ID NO: 468563 - DNA, 201 bp, Homo sapiens
aggactaggacagctcctagctggaagtaggtgccagtcagtcagggtgggcagcccacgttctgcacagtagcgtggccccacaagtgacgtgagcatcrctaccactgtgggagactgtgcatccacccgcgatcctgactgcatagctcgtctctcagacggaggcgccagcaccctccccgtggctgtttcttcagt

SEQ ID NO: 468564 - DNA, 201 bp, Homo sapiens
gatggggagcaggccctccaccagttccagcctccgtacaacgagtccttcccggttccagacccctcggtggcccaggtgctggtggagcacaatgtcaygcacacctacgctgccccaggtgagggatgagggggtgagggggccactgcctttcaggctctgagcacggggtccccccagctccccagtcaagctgcc

SEQ ID NO: 468565 - DNA, 201 bp, Homo sapiens
cccggttccagacccctcggtggcccaggtgctggtggagcacaatgtcatgcacacctacgctgccccaggtgagggatgagggggtgagggggccactkcctttcaggctctgagcacggggtccccccagctccccagtcaagctgccccccttcctccccaacagccctcactgtgacctcacctgggctgatggct

SEQ ID NO: 468566 - DNA, 201 bp, Homo sapiens
tcccccaaccgcccgccgctggggggctcttgccgcctcttcccactgggcgctgtgcacgccctcaccaccaaggtgcacttcgaatgcacgggtgagtrcaggcctgcgtggggggagcagcgggatcccccgactctgtgacgtcacggagccctcccgtgatgccgtggggaccgtccctcaggctggcatgacgcg

SEQ ID NO: 468567 - DNA, 201 bp, Homo sapiens
agtagcgtggccccacaagtgacgtgagcatcgctaccactgtgggagactgtgcatccacccgcgatcctgactgcatagctcgtctctcagacggaggygccagcaccctccccgtggctgtttcttcagtacctccattttcctttcattggaattgcccttctggcattccctttttgttttcgtttttcttttttt

SEQ ID NO: 468568 - DNA, 201 bp, Homo sapiens
cacaagtgacgtgagcatcgctaccactgtgggagactgtgcatccacccgcgatcctgactgcatagctcgtctctcagacggaggcgccagcaccctcmccgtggctgtttcttcagtacctccattttcctttcattggaattgcccttctggcattccctttttgttttcgtttttctttttttagagacggagtct

SEQ ID NO: 468569 - DNA, 201 bp, Homo sapiens
cacctgtaatccgagcactttgggaggccaggcaggcaaatcacggggtcaggagatcgagaccatcctggctaacggtgaaaccctgtctctaataaaargtacaaaaaaattagcccggcgtagtggcaggcgcctgtagtcccagctccttgggagactgaggcaggagaatggcgtgaacccgggaggcggagcttg

SEQ ID NO: 468570 - DNA, 201 bp, Homo sapiens
acccacacatacgtctcttctcacacgcatccccccaggggccctcagtgagcattgcctgcctcctgctagggtccagctgggtccagtacaccagaacrcacactccagtgtcctctgccctgtgtatgcccttccgccgtccaagttggaaggtggcaaaccggatgagtatcctgggagggagtgagctcaccggca

SEQ ID NO: 468571 - DNA, 201 bp, Homo sapiens
gtacaaaaaaattagcccggcgtagtggcaggcgcctgtagtcccagctccttgggagactgaggcaggagaatggcgtgaacccgggaggcggagcttgsagtgagctgagattgcgccactgcactccagcctgggtgacacagcaagactccatctcaaaaaaaaaagaaaaaaaatactgtcacctgggtctgtcac

SEQ ID NO: 468572 - DNA, 201 bp, Homo sapiens
agatccgagtgtggcacgacaacaaaggtttgtgcggaccctgccaagctctgcccctctgcccccgcattggggcgccctgcgagcctgacctccctccygcgcctctgcagggctcagccctgcctggttcctgcagcacgtcatcgtcagggacctgcagacggcacgcagcgccttcttcctggtcaatgactggct

SEQ ID NO: 468573 - DNA, 201 bp, Homo sapiens
ctggggacgtcggccccgggcaggtcctgctggctggctcctcgggctacctggtgggctttaaattcctggaaagtcacggctctgacagtggctccgcyaactcattccactgtctcatttcacaaaatgaatttaaaactctgctccctgacctcacacgagcccccgtgagtctctcacgccctctgctgtgttctc

SEQ ID NO: 468574 - DNA, 201 bp, Homo sapiens
gactgccacctgctcaccacccccctctgctcgtaggtctttggccatcaccctcccagagcccaacggcagcgcaacggggctcacagtctggctgcacsggctcaccgctagtgtgctcccagggctgctgcggcaggccgatccccagcacgtcatcgagtactcgttggccctggtcaccgtgctgaacgaggtgag

SEQ ID NO: 468575 - DNA, 201 bp, Homo sapiens
tgagctgcagcgtggcttctttgacaagcacatctggctctccatatgggaccggccgcctcgtagccgtttcactcgcatccagagggccacctgctgcrttctcctcatctgcctcttcctgggcgccaacgccgtgtggtacggggctgttggcgactctgcctacaggtgggtgccgtaggggtcggggcagcctct

SEQ ID NO: 468576 - DNA, 201 bp, Homo sapiens
tgccggcctcctgcgctgctgacagcttgctgtgccccctgcctgccccagtacgagcgggccctggacgtggcggcagagcccaagcacgagcggcagcrccgagcccagatacgcaagaacatcacggagactctggtgtccctgagggtccacactgtggatgacatccagcagatcgctgctgcgctggcccagtgc

SEQ ID NO: 468577 - DNA, 201 bp, Homo sapiens
cgggcactgagaggaacttcacagcccgcgtgcagcgcggctctcgggtcgcctacgcctggtacttctcgctgcagaaggtccagggcgactcgctggtyatcctgtcgggccgcgacgtcacctacacgcccgtggccgcggggctgttggagatccaggtgcgcgccttcaacgccctgggcagtgagaaccgcacgc

SEQ ID NO: 468578 - DNA, 201 bp, Homo sapiens
gagactctggtgtccctgagggtccacactgtggatgacatccagcagatcgctgctgcgctggcccagtgcatggtaggatggccccacctgctcacccygccccgcatgcctgccagggcactgggttcagccccccagggcagacgggcagcttggccgaggagctgagcctccagcctgggctccttcctgccatgg

SEQ ID NO: 468579 - DNA, 201 bp, Homo sapiens
gggtcagcattgcctgggttactggccccatggggacggcaggcagcgaggggactggaccgggtatgggctctgagactgcgacatccaacctggcggarcctgggctcacgtccgctaccccttccctgcccaggagcagagacccagcggggagttaccatctgaacctctccagccacttccgctggtcggcgctgc

SEQ ID NO: 468580 - DNA, 201 bp, Homo sapiens
gcattgcctgggttactggccccatggggacggcaggcagcgaggggactggaccgggtatgggctctgagactgcgacatccaacctggcggagcctggrctcacgtccgctaccccttccctgcccaggagcagagacccagcggggagttaccatctgaacctctccagccacttccgctggtcggcgctgcaggtgt

SEQ ID NO: 468581 - DNA, 201 bp, Homo sapiens
gaggtgacacgacctgtcccaggcatcacagccgggatgtgcatagcaggggtttggaactatgaggtgcccaggacccagggttggattgaaaagggcgsaggggactaagataagcagacagttgtccccagcgctggggagagtcttgggaccagtctgatgccttgtatttcccaggctccaggctcctcgccggga

SEQ ID NO: 468582 - DNA, 201 bp, Homo sapiens
cactggtacgcctcgcccagctgggtgccgctgaccgccagtggacccgtttcgtgcgcggccgcccgcgccgcttcactagcttcgaccaggtggcgcasctgagctccgcagcccgtggcctggcggcctcgctgctcttcctgcttttggtcaaggtgagggctgggccggtgggcgcggggctgggcgcacacccca

SEQ ID NO: 468583 - DNA, 201 bp, Homo sapiens
tagctcgtctctcagacggaggcgccagcaccctccccgtggctgtttcttcagtacctccattttcctttcattggaattgcccttctggcattcccttkttgttttcgtttttctttttttagagacggagtctcactctgttgcccaggctggagtgcaatggcatgatcttggctcacagcaacttccagctcccgg

SEQ ID NO: 468584 - DNA, 201 bp, Homo sapiens
tgcttttggtcaaggtgagggctgggccggtgggcgcggggctgggcgcacaccccagggctgcaagcagacagatttctcgtccgcaggctgcccagcasctacgcttcgtgcgccagtggtccgtctttggcaagacattatgccgagctctgccagagctcctgggggtcaccttgggcctggtggtgctcggggtag

SEQ ID NO: 468585 - DNA, 201 bp, Homo sapiens
cgtggcccatccccgggcctgcggccagcactgcccagccgccttgcccgggccagtcggggtgtggacctggccactggccccagcaggacaccccttcrggccaagaacaaggtccaccccagcagcacttagtcctccttcctggcgggggtgggccgtggagtcggagtggacaccgctcagtattactttctgccg

SEQ ID NO: 468586 - DNA, 201 bp, Homo sapiens
tcgccaccccgcacagcctgggtagcgtgtggaagatccgagtgtggcacgacaacaaaggtttgtgcggaccctgccaagctctgcccctctgcccccgsattggggcgccctgcgagcctgacctccctcctgcgcctctgcagggctcagccctgcctggttcctgcagcacgtcatcgtcagggacctgcagacggc

SEQ ID NO: 468587 - DNA, 201 bp, Homo sapiens
caatgactggctttcggtggagacggaggccaacgggggcctggtggagaaggaggtgctggccgcgagtaaggcctcgttccatgttcccactccgtggraggttgggcagggtggtcctgccccgtggcctcctgcagtgcggccctccctgccttctaggcgacgcagcccttttgcgcttccggcgcctgctggtgg

SEQ ID NO: 468588 - DNA, 201 bp, Homo sapiens
tcagtaatttatatggtgttaaaatgtgtatatttttgtatgtcactattttcactagggctgaggggcctgcgcccagagctggcctcccccaacacctsctgcgcttggtaggtgtggtggcgttatggcagcccggctgctgcttggatgcgagcttggccttgggccggtgctgggggcacagctgtctgccaggca

SEQ ID NO: 468589 - DNA, 201 bp, Homo sapiens
cctgctgcgttctcctcatctgcctcttcctgggcgccaacgccgtgtggtacggggctgttggcgactctgcctacaggtgggtgccgtaggggtcgggrcagcctcttcctgcccagcccttcctgcccctcagcctcacctgtgtggcctcctctcctccacacagcacggggcatgtgtccaggctgagcccgctga

SEQ ID NO: 468590 - DNA, 201 bp, Homo sapiens
gcacggggcatgtgtccaggctgagcccgctgagcgtcgacacagtcgctgttggcctggtgtccagcgtggttgtctatcccgtctacctggccatcctytttctcttccggatgtcccggagcaaggtgggctggggctggggacccgggagtactgggaatggagcctgggcctcggcaccatgcctagggccgccac

SEQ ID NO: 468591 - DNA, 201 bp, Homo sapiens
agcacgcggctgtgcacgcttccgaaatgcactccagaagaaaatctcagtacatctataggaagtgaagaggctgagttagtcccttagaaacgtcccartggccgggccgggtgtggtggctcacgcctgtaatcccaacacttcaggtggccgaggtgggcggatctgagtccaggagtttgagaccagcctgggcaa

SEQ ID NO: 468592 - DNA, 201 bp, Homo sapiens
gtgtggtggctcacgcctgtaatcccaacacttcaggtggccgaggtgggcggatctgagtccaggagtttgagaccagcctgggcaacatagcaagaccmcatctatataaaacattaaaaagggccaggcgcggtggctcacgcctgtaatcccagcactttgggaggccgaggcgggcagatcacttgaggtcaggag

SEQ ID NO: 468593 - DNA, 201 bp, Homo sapiens
gctctggcgaggaggagggctgcgcctccatccgcctgtcccccaaccgcccgccgctggggggctcttgccgcctcttcccactgggcgctgtgcacgcyctcaccaccaaggtgcacttcgaatgcacgggtgagtgcaggcctgcgtggggggagcagcgggatcccccgactctgtgacgtcacggagccctcccgt

SEQ ID NO: 468594 - DNA, 201 bp, Homo sapiens
gaggctgaggcaggagaatggcatgaacccaggaggcggagcttgcagtgagccgagattgcgccactgcactccatcctgggcaacggagcaagactccrtctccaaaaaaaaaaaaaaaaaatcccacaaagaaaagcccaggctcagagccttcacgatagaatttttctaagcagttaaggaagaattaacaccaat

SEQ ID NO: 468595 - DNA, 201 bp, Homo sapiens
agcaagactccgtctccaaaaaaaaaaaaaaaaaatcccacaaagaaaagcccaggctcagagccttcacgatagaatttttctaagcagttaaggaagawttaacaccaatccttcacagactctttccaagaatacagcaggtgggaacgcttcccattcatacggaaacgggaggccgcaccccttaggaatgcacac

SEQ ID NO: 468596 - DNA, 201 bp, Homo sapiens
atcccacaaagaaaagcccaggctcagagccttcacgatagaatttttctaagcagttaaggaagaattaacaccaatccttcacagactctttccaagawtacagcaggtgggaacgcttcccattcatacggaaacgggaggccgcaccccttaggaatgcacacgtggggtcctcaagaggttacatgcaaactaacc

SEQ ID NO: 468597 - DNA, 201 bp, Homo sapiens
actaaccccagcagcacacagagaaggcgcataagccgcgaccaggaggggttgctcccgagtccgtggcaggaaccagaggccacatgtggctgctcgtrtttaagttaattaaaatggaacgatggccgggcgcggtggctcacacctgtaatcccagcactttgggaggccgaggcgggcagatcacttgaggtcagg

SEQ ID NO: 468598 - DNA, 201 bp, Homo sapiens
gtggtggtgcaggaccagctgggagccgctgtggtcgccctcaacaggtgagccaggccgtgggagggcgcccccgagactgccacctgctcaccaccccsctctgctcgtaggtctttggccatcaccctcccagagcccaacggcagcgcaacggggctcacagtctggctgcacgggctcaccgctagtgtgctccca

SEQ ID NO: 468599 - DNA, 201 bp, Homo sapiens
cctctgctcgtaggtctttggccatcaccctcccagagcccaacggcagcgcaacggggctcacagtctggctgcacgggctcaccgctagtgtgctcccrgggctgctgcggcaggccgatccccagcacgtcatcgagtactcgttggccctggtcaccgtgctgaacgaggtgagtgcagcctgggaggggacgtcac

SEQ ID NO: 468600 - DNA, 201 bp, Homo sapiens
cctcgtgagcactcactgtccctgaggactaggacagctcctagctggaagtaggtgccagtcagtcagggtgggcagcccacgttctgcacagtagcgtrgccccacaagtgacgtgagcatcgctaccactgtgggagactgtgcatccacccgcgatcctgactgcatagctcgtctctcagacggaggcgccagcac

SEQ ID NO: 468601 - DNA, 201 bp, Homo sapiens
accgttagggtggccggctggaatgaggtgagccgcagcgaggcctggctcaatgtgacggtgaagcggcgcgtgcgggggctcgtcgtcaatgcaagccscacggtggtgcccctgaatgggagcgtgagcttcagcacgtcgctggaggccggcagtgatgtgcgctattcctgggtgctctgtgaccgctgcacgccc

SEQ ID NO: 468602 - DNA, 201 bp, Homo sapiens
ctggccatcctttttctcttccggatgtcccggagcaaggtgggctggggctggggacccgggagtactgggaatggagcctgggcctcggcaccatgccyagggccgccactttccagtgctgcagccagagggaaaggcgtccaccaaaggctgctcgggaagggtcaacacacttgagcagccttagctagactgacc

SEQ ID NO: 468603 - DNA, 201 bp, Homo sapiens
tttcggtggagacggaggccaacgggggcctggtggagaaggaggtgctggccgcgagtaaggcctcgttccatgttcccactccgtgggaggttgggcarggtggtcctgccccgtggcctcctgcagtgcggccctccctgccttctaggcgacgcagcccttttgcgcttccggcgcctgctggtggctgagctgcag

SEQ ID NO: 468604 - DNA, 201 bp, Homo sapiens
tggccctcgggcacccatcaggctgtccctgtgcacctggctcccacccttccagctcatagcaggaactggggtgaggagtgcgtggggcagcaagggcytgggaccccagaggaccctgcactctgctctgtgctcttgcctgggcttagggccgctcggtggtcctgctgccagatgcctgggccctgctgtgtcccc

SEQ ID NO: 468605 - DNA, 201 bp, Homo sapiens
acccgctgggctcagccaacgccaccgtggaagtggatgtgcaggtgcctgtgagtggcctcagcatcagggccagcgagcccggaggcagcttcgtggcrgccgggtcctctgtgcccttttgggggcagctggccacgggcaccaatgtgagctggtgctgggctgtgcccggcggcagcagcaagcgtggccctcatg

SEQ ID NO: 468606 - DNA, 201 bp, Homo sapiens
catgatcttggctcacagcaacttccagctcccgggtttaagccattccccttaagcgattctcctgagtagctgggagtacaggtgcacaccaccacacycagttaatttttcaccatgtcagccaggcgaactcctgacctcaggtgatccgcctgcctcggcctgccagagtgctgggatgacaggtgtgagccacca

SEQ ID NO: 468607 - DNA, 201 bp, Homo sapiens
gatgtcctcatgctccctggtgacctcgttggcttgcagcacgacgctggccctggcgccctcctgcactgctcgccggctcccggccaccctggtccccrggccccgtacctctccgccaacgcctcgtcatggctgccccacttgccagcccagctggagggcacttgggcctgccctgcctgtgccctgcggctgctt

SEQ ID NO: 468608 - DNA, 201 bp, Homo sapiens
cctcgggcacccatcaggctgtccctgtgcacctggctcccacccttccagctcatagcaggaactggggtgaggagtgcgtggggcagcaagggcctggraccccagaggaccctgcactctgctctgtgctcttgcctgggcttagggccgctcggtggtcctgctgccagatgcctgggccctgctgtgtcccccatc

SEQ ID NO: 468609 - DNA, 201 bp, Homo sapiens
ggagggcgtcttagctcagctcagctcagctgtacgccctcactggtgtcgccttccccgcagctcgtgtcttcctgtgtggactccctctggagcgtggyccaggccctgttggtgctgtgccctgggactgggctctctaccctgtgtcctgccgagtcctggcacctgtcacccctgctgtgtgtggggctctgggca

SEQ ID NO: 468610 - DNA, 201 bp, Homo sapiens
gcttgcagtgagccgagattgcgccactgcactccatcctgggcaacggagcaagactccgtctccaaaaaaaaaaaaaaaaaatcccacaaagaaaagcycaggctcagagccttcacgatagaatttttctaagcagttaaggaagaattaacaccaatccttcacagactctttccaagaatacagcaggtgggaacg

SEQ ID NO: 468611 - DNA, 201 bp, Homo sapiens
gctcccgagtccgtggcaggaaccagaggccacatgtggctgctcgtatttaagttaattaaaatggaacgatggccgggcgcggtggctcacacctgtamtcccagcactttgggaggccgaggcgggcagatcacttgaggtcaggagttccaagaccagcctggccaacacagtgaaaccccgtctctactaaaaata

SEQ ID NO: 468612 - DNA, 201 bp, Homo sapiens
tctccacaggtcaccctccacggccaggatgtcctcatgctccctggtgacctcgttggcttgcagcacgacgctggccctggcgccctcctgcactgctygccggctcccggccaccctggtccccaggccccgtacctctccgccaacgcctcgtcatggctgccccacttgccagcccagctggagggcacttgggcc

SEQ ID NO: 468613 - DNA, 201 bp, Homo sapiens
taggctacaggcctccatcacgggggacccctctgaagccaccccctccccaggtcttgctggaagccctgtacttctcactggtggccaagcggctgcasccggatgaagatgacaccctggtagagagcccggctgtgacgcctgtgagcgcacgtgtgccccgcgtacggccaccccacggctttgcactcttcctgg

SEQ ID NO: 468614 - DNA, 201 bp, Homo sapiens
attgcgccattgcactccagcctgggtgacagcgagactccatctaaaaaagaaaatatgaaatttaaaactctgttccttagctgcaccagtctgctgtyaagtgttcagtggcacacgtcgcgaggggctgccatcacggacggtgcagatgtcccatatatccagcattctaggacattctgtcagatggcaccgggc

SEQ ID NO: 468615 - DNA, 201 bp, Homo sapiens
cgccattgcactccagcctgggtgacagcgagactccatctaaaaaagaaaatatgaaatttaaaactctgttccttagctgcaccagtctgctgtcaagygttcagtggcacacgtcgcgaggggctgccatcacggacggtgcagatgtcccatatatccagcattctaggacattctgtcagatggcaccgggctctg

SEQ ID NO: 468616 - DNA, 201 bp, Homo sapiens
taacgatgccgcccgccgcgcccgcccgcctggcgctggccctgggcctgggcctgtggctcggggcgctggcggggggccccgggcgcggctgcgggccytgcgagcccccctgcctctgcggcccagcgcccggcgccgcctgccgcgtcaactgctcgggccgcgggctgcggacgctcggtcccgcgctgcgcatcc

SEQ ID NO: 468617 - DNA, 201 bp, Homo sapiens
cagacagatttctcgtccgcaggctgcccagcagctacgcttcgtgcgccagtggtccgtctttggcaagacattatgccgagctctgccagagctcctgrgggtcaccttgggcctggtggtgctcggggtagcctacgcccagctggccatcctggtaggtgactgcgcggccggggagggcgtcttagctcagctcag

SEQ ID NO: 468618 - DNA, 201 bp, Homo sapiens
tggccatcaccctcccagagcccaacggcagcgcaacggggctcacagtctggctgcacgggctcaccgctagtgtgctcccagggctgctgcggcaggcygatccccagcacgtcatcgagtactcgttggccctggtcaccgtgctgaacgaggtgagtgcagcctgggaggggacgtcacatctgctgcatgcgtgct

SEQ ID NO: 468619 - DNA, 201 bp, Homo sapiens
cccacctgcatccctgaatgacaggagagtgtgggagagtgtagggacagcaggcgcagaccccggggcccctgcctgggattggcgtcggggaagacagkcattctggagcgacccctaggcctgatgccttagagcgcaactgccagagacacagcttccttggggggctggccaggccacggaggggcccctggctcc

SEQ ID NO: 468620 - DNA, 201 bp, Homo sapiens
agctcagctgtacgccctcactggtgtcgccttccccgcagctcgtgtcttcctgtgtggactccctctggagcgtggcccaggccctgttggtgctgtgycctgggactgggctctctaccctgtgtcctgccgagtcctggcacctgtcacccctgctgtgtgtggggctctgggcactgcggctgtggggcgccctac

SEQ ID NO: 468621 - DNA, 201 bp, Homo sapiens
cctccggacactcctgggcacgccatacgggaggtggcctgcacggggatccctgccggtacccacaggccccgtgggtgggtgctgctgtgagcctgggstggtgggccctggtctccgggctctgagcctcagtttccccatctggaaagggggacagtgatggggctcccagcgggctgctgtgagggtgggaggatg

SEQ ID NO: 468622 - DNA, 201 bp, Homo sapiens
  misc_feature (1)...(201): n = A,T,C or G
ccagcattctaggacattctgtcagatggcaccgggctctgtcctgtctgctgaggaggtggcttctcatccctgtcctgagcaggtctgagctgccgccngctgaccactgccctcgtcctgcaggtggctgggagcccgagccccacacctgccgggcagcaggtgctggacatcgacagctgcctggactcgtccgtg

SEQ ID NO: 468623 - DNA, 201 bp, Homo sapiens
cgcctggcgctggccctgggcctgggcctgtggctcggggcgctggcggggggccccgggcgcggctgcgggccctgcgagcccccctgcctctgcggccyagcgcccggcgccgcctgccgcgtcaactgctcgggccgcgggctgcggacgctcggtcccgcgctgcgcatccccgcggacgccacagcgctgtgagta

SEQ ID NO: 468624 - DNA, 201 bp, Homo sapiens
cgctcggtcccgcgctgcgcatccccgcggacgccacagcgctgtgagtagcgggcccagcggcacccgggagaggccgcgggacgggcgggcgtgggcgsgttccctggcccgggacgggaagcaggacgcgggccaggacgctcccagggcgaggctccggcgcggcacggcggccctgctaaataaggaacgcctgga

SEQ ID NO: 468625 - DNA, 201 bp, Homo sapiens
agaggccgcgggacgggcgggcgtgggcgcgttccctggcccgggacgggaagcaggacgcgggccaggacgctcccagggcgaggctccggcgcggcacrgcggccctgctaaataaggaacgcctggagccgcggttggcacggccccggggagccgaaaaaccccgggtctggagacagacgtcccacccgggggctc

SEQ ID NO: 468626 - DNA, 201 bp, Homo sapiens
tatttcccaggctccaggctcctcgccgggacagtgtctccttgggtgcgtgctggatccctgggggacgtggcacatccccaggcttgctaaacattggrtgggttctggcatttggttttgtaacgtttctgggtcactcccgcctgtggccacccttccttaggggagccgtgtgtccttggggctttgctgggtggt

SEQ ID NO: 468627 - DNA, 201 bp, Homo sapiens
ggtggcgggcagacccgctgcagcatgagacacgtgtcagctacctcgggccggcaggctggccctgctgcccacagccctgggacgtggccccacctgtkacgggtgtggaggggcagcctccaggcctggccacaccctctgctgttgctgctcctgctccaggattggcaagggtgctgggaaggggtgaagacccgt

SEQ ID NO: 468628 - DNA, 201 bp, Homo sapiens
ctccggggtgccggaagggctggggtgcggcacccacgccacccctctccggcagggcatggtcctggggctcctgtgccgtgtatgacagcgggggctamgtgcaggagctgggcctgagcctggaggagagccgcgaccggctgcgcttcctgcagctgcacaactggctggacaacaggtgggagctccctcccctgc

SEQ ID NO: 468629 - DNA, 201 bp, Homo sapiens
cgcacaccccagggctgcaagcagacagatttctcgtccgcaggctgcccagcagctacgcttcgtgcgccagtggtccgtctttggcaagacattatgcygagctctgccagagctcctgggggtcaccttgggcctggtggtgctcggggtagcctacgcccagctggccatcctggtaggtgactgcgcggccgggga

SEQ ID NO: 468630 - DNA, 201 bp, Homo sapiens
ctacgtgtacttggagggccgctgcctcaattgcagcagcggctccaagcgaggggtgagtgttgagcggggtgtgggcgggctggggatgggtcccatgsccgaggggacggggcctgcaggcagaagtggggctgacagggcagagggttgcgccccctcaccaccccttctgcctgcagcggtgggctgcacgtacgt

SEQ ID NO: 468631 - DNA, 201 bp, Homo sapiens
acagatggggaaactgaggcacagagaggttgaggcattagtagtactacatggctggctggagagccggacagtgagtgtcccagcccgggcttggctcycatggcatgcagagccccgggcacctcctctcctctgtgccccgcgtgggactctccagcccgacgggaggtgtgtccaggaggcgacaggctaagggca

SEQ ID NO: 468632 - DNA, 201 bp, Homo sapiens
ccgagagtctttgggagctttggggaggttgtgccaagcctgagcctcgacgtcccccttcccggctttctgttggctcttctgaggccagggcatctctrtgagggcctcctgctggagccgtctctgtggatctcctctgccatcctggcccatgagtgggtgatgcgctggccaccatctggtgacagtggccgggca

SEQ ID NO: 468633 - DNA, 201 bp, Homo sapiens
tgagcacaactgctcggctagcaggaggatccgcccagagtcactccagggtgctgaccaccggccctacaccttcttcatttccccggggtgagctctgygggccagcctggcagggcagggcagggcatcatgggtcagcattgcctgggttactggccccatggggacggcaggcagcgaggggactggaccgggtat

SEQ ID NO: 468634 - DNA, 201 bp, Homo sapiens
cgaggaggacatggtgtggcggacagaggggctgctgcccctggaggagacctcgccccgccaggccgtctgcctcacccgccacctcaccgccttcggcrccagcctcttcgtgcccccaagccatgtccgctttgtgtttcctgtgagtgaccctgtgctcctgggagcctctgcagagtcgaggagggcctgggtggg

SEQ ID NO: 468635 - DNA, 201 bp, Homo sapiens
cacctcggtacgcccgtccccggccagaccccgcgcctcccaccggcagcgtcccgccccctcgcggggccccgccccggcagcgtctcacccctcgcagsgccccgccccctcgcagcgtcccgccccctcgcagggccccgccccggcagcgtcccgccccctcgtagggccccgccccggcagcgtcccgccccctcg

SEQ ID NO: 468636 - DNA, 201 bp, Homo sapiens
gtggtccgtctttggcaagacattatgccgagctctgccagagctcctgggggtcaccttgggcctggtggtgctcggggtagcctacgcccagctggccrtcctggtaggtgactgcgcggccggggagggcgtcttagctcagctcagctcagctgtacgccctcactggtgtcgccttccccgcagctcgtgtcttcc

SEQ ID NO: 468637 - DNA, 201 bp, Homo sapiens
tctgagcctcagtttccccatctggaaagggggacagtgatggggctcccagcgggctgctgtgagggtgggaggatggaggagtgccctgagccccctgscatcccacacccgcccccaggagcctagacgtgtggatcggcttctcgactgtgcagggggtggaggtgggcccagcgccgcagggcgaggccttcagcc

SEQ ID NO: 468638 - DNA, 201 bp, Homo sapiens
gaagaaacagctcagtgttgtgggtcagtgcccgcatcacacagcgtctagcacgtaactgcaccccgggagtcgtgggcatctgctggcctcctgccggyctcctgcgctgctgacagcttgctgtgccccctgcctgccccagtacgagcgggccctggacgtggcggcagagcccaagcacgagcggcagcaccgagc

SEQ ID NO: 468639 - DNA, 201 bp, Homo sapiens
ccgctctgcccctcggacacggagatcttccctggcaacgggcactgctaccgcctggtggtggagaaggcggcctggctgcaggcgcaggagcagtgtcrggcctgggccggggccgccctggcaatggtggacagtcccgccgtgcagcgcttcctggtctcccgggtcaccaggtgcctgcccccaccccccgagggg

SEQ ID NO: 468640 - DNA, 201 bp, Homo sapiens
cagagaggttgaggcattagtagtactacatggctggctggagagccggacagtgagtgtcccagcccgggcttggctcccatggcatgcagagccccggscacctcctctcctctgtgccccgcgtgggactctccagcccgacgggaggtgtgtccaggaggcgacaggctaagggcagagtcctccacagagcccagg

SEQ ID NO: 468641 - DNA, 201 bp, Homo sapiens
ctccactcccctctcctctctcccctcctcctccgctctcatgtgaagaggtgccttgtgtggtcggtgggctgcatcacgtggtccccaggtggaggccstgggtcatgcagagccacagaaaatgcttagtgaggaggctgtgggggtccagtcaagtgggctctccagctgcagggctgggggtgggagccaggtgag

SEQ ID NO: 468642 - DNA, 201 bp, Homo sapiens
ccctctggagcgtggcccaggccctgttggtgctgtgccctgggactgggctctctaccctgtgtcctgccgagtcctggcacctgtcacccctgctgtgwgtggggctctgggcactgcggctgtggggcgccctacggctgggggctgttattctccgctggcgctaccacgccttgcgtggagagctgtaccggccgg

SEQ ID NO: 468643 - DNA, 201 bp, Homo sapiens
tggtggacagtcccgccgtgcagcgcttcctggtctcccgggtcaccaggtgcctgcccccaccccccgaggggccataggttgggagatctctgaagcastggggcagagcctgcggctggggagtctcaggaggaaggaggtgggagctgggccggccctggtgagcaggtggcgccggccggtggggccgttcctgtc

SEQ ID NO: 468644 - DNA, 201 bp, Homo sapiens
agagccggacagtgagtgtcccagcccgggcttggctcccatggcatgcagagccccgggcacctcctctcctctgtgccccgcgtgggactctccagccygacgggaggtgtgtccaggaggcgacaggctaagggcagagtcctccacagagcccaggctgacaccattccccccgcagaggtacagccccgtggtgga

SEQ ID NO: 468645 - DNA, 201 bp, Homo sapiens
cccgccgtgcagcgcttcctggtctcccgggtcaccaggtgcctgcccccaccccccgaggggccataggttgggagatctctgaagcactggggcagagmctgcggctggggagtctcaggaggaaggaggtgggagctgggccggccctggtgagcaggtggcgccggccggtggggccgttcctgtcagctctgcaga

SEQ ID NO: 468646 - DNA, 201 bp, Homo sapiens
cggtggggccgttcctgtcagctctgcagatgcagaggtggacatgagctgggggcagcctccggacactcctgggcacgccatacgggaggtggcctgcrcggggatccctgccggtacccacaggccccgtgggtgggtgctgctgtgagcctgggctggtgggccctggtctccgggctctgagcctcagtttcccca

SEQ ID NO: 468647 - DNA, 201 bp, Homo sapiens
ggctgtggggcgccctacggctgggggctgttattctccgctggcgctaccacgccttgcgtggagagctgtaccggccggcctgggagccccaggactasgagatggtggagttgttcctgcgcaggctgcgcctctggatgggcctcagcaaggtcaaggaggtgggtacggcccagtgggggggagagggacacgccc

SEQ ID NO: 468648 - DNA, 201 bp, Homo sapiens
gtgctgggctgtgcccggcggcagcagcaagcgtggccctcatgtcaccatggtcttcccggatgctggcaccttctccatccggctcaatgcctccaacrcagtcagctgggtctcagccacgtacaacctcacggcggaggagcccatcgtgggcctggtgctgtgggccagcagcaaggtggtggcgcccgggcagct

SEQ ID NO: 468649 - DNA, 201 bp, Homo sapiens
gcctacaacctgacctctgccctcatgcgcatcctcatgcgctcccgcgtgctcaacgaggagcccctgacgctggcgggcgaggagatcgtggcccaggrcaagcgctcggacccgcggagcctgctgtgctatggcggcgccccagggcctggctgccacttctccatccccgaggctttcagcggggccctggccaac

SEQ ID NO: 468650 - DNA, 201 bp, Homo sapiens
cacttcgaatgcacgggtgagtgcaggcctgcgtggggggagcagcgggatcccccgactctgtgacgtcacggagccctcccgtgatgccgtggggaccrtccctcaggctggcatgacgcggaggatgctggcgccccgctggtgtacgccctgctgctgcggcgctgtcgccagggccactgcgaggagttctgtgtc

SEQ ID NO: 468651 - DNA, 201 bp, Homo sapiens
aggccacgtcgccccttgttctcggcctgcagagggaggctggcgggtgtgcgctgaactttgggccccgcgggagcagcacggtcaccattccacgggarcggctggcggctggcgtggagtacaccttcagcctgaccgtgtggaaggccggccgcaaggaggaggccaccaaccagacggtgggtgccgcccgcccct

SEQ ID NO: 468652 - DNA, 201 bp, Homo sapiens
acggagccctcccgtgatgccgtggggaccgtccctcaggctggcatgacgcggaggatgctggcgccccgctggtgtacgccctgctgctgcggcgctgycgccagggccactgcgaggagttctgtgtctacaagggcagcctctccagctacggagccgtgctgcccccgggtttcaggccacacttcgaggtgggcc

SEQ ID NO: 468653 - DNA, 201 bp, Homo sapiens
gccagctctggtgcagaggctcctatggcctttcaggcccgtggcagagggtgggctcaggagggccatcgtgggtgtcccccgggtggttgagcttcccrgcaggcgtgtgacctgcgcgttctgccccaggccactacctgtctgaggaacctgagccctacctggcagtctacctacactcggagccccggcccaatg

SEQ ID NO: 468654 - DNA, 201 bp, Homo sapiens
agccagctggatgggctgagcgtgagcctgggccggctggggacaaggtgtgagcctgagccctcccgcctccaagccgtgttcgaggccctgctcacccmgtttgaccgactcaaccaggccacagaggacgtctaccagctggagcagcagctgcacagcctgcaaggccgcaggagcagccgggcgcccgccggatct

SEQ ID NO: 468655 - DNA, 201 bp, Homo sapiens
ggcccgtggcagagggtgggctcaggagggccatcgtgggtgtcccccgggtggttgagcttcccggcaggcgtgtgacctgcgcgttctgccccaggccrctacctgtctgaggaacctgagccctacctggcagtctacctacactcggagccccggcccaatgagcacaactgctcggctagcaggaggatccgccca

SEQ ID NO: 468656 - DNA, 201 bp, Homo sapiens
ggatgggctgagcgtgagcctgggccggctggggacaaggtgtgagcctgagccctcccgcctccaagccgtgttcgaggccctgctcacccagtttgacygactcaaccaggccacagaggacgtctaccagctggagcagcagctgcacagcctgcaaggccgcaggagcagccgggcgcccgccggatcttcccgtgg

SEQ ID NO: 468657 - DNA, 201 bp, Homo sapiens
gctgcacagcctgcaaggccgcaggagcagccgggcgcccgccggatcttcccgtggcccatccccgggcctgcggccagcactgcccagccgccttgccygggccagtcggggtgtggacctggccactggccccagcaggacaccccttcgggccaagaacaaggtccaccccagcagcacttagtcctccttcctggc

SEQ ID NO: 468658 - DNA, 201 bp, Homo sapiens
ccagtacaccagaacgcacactccagtgtcctctgccctgtgtatgcccttccgccgtccaagttggaaggtggcaaaccggatgagtatcctgggagggrgtgagctcaccggcagtggccaggcccctgggaaacctggagtttgggagcagcatcctccatgggtcccccagtccttccagcaggccaaatagacctg

SEQ ID NO: 468659 - DNA, 201 bp, Homo sapiens
ggtgctgatccggagtggccgggtgcccattgtgtccttggagtgtgtgtcctgcaaggcacaggccgtgtacgaagtgagccgcagctcctacgtgtacytggagggccgctgcctcaattgcagcagcggctccaagcgaggggtgagtgttgagcggggtgtgggcgggctggggatgggtcccatggccgaggggac

SEQ ID NO: 468660 - DNA, 201 bp, Homo sapiens
cagcaaggaatatactttggagggagacacacatgttcttttctggagctctgcagtggccacggcagcccagcccgccaagcaccctggaatgaaaacakcccgctgctgtctgggcctggcctgcactctgctgcctgcgctccagctggctgaggccgggcacgtctgcgggcacagcagcgggggcgccacagtctc

SEQ ID NO: 468661 - DNA, 201 bp, Homo sapiens
caggcgatccttccgtctcagctcccacggtgctgtgttaccggcgtgtgccccagtgcctggccgtcttggaggtcttgtttctctgggtttatgcctcraggtggcgcctgctcccctgtgctccctggtagcctggtagtgagcctgcttctcacacagtcatacctggttgtggtcccacagtgggaccaccctgtt

SEQ ID NO: 468662 - DNA, 201 bp, Homo sapiens
gcctggccgtcttggaggtcttgtttctctgggtttatgcctcaaggtggcgcctgctcccctgtgctccctggtagcctggtagtgagcctgcttctcayacagtcatacctggttgtggtcccacagtgggaccaccctgttgggttcagaacaggagatgggggcccctcgagtctgtgtgggggctgtggacagggt

SEQ ID NO: 468663 - DNA, 201 bp, Homo sapiens
ggcacacgcggccccctggccttgttcttggggggaaggcgtttctcgtagggcttccatgggtgtctctggtgaaatttgctttctgtttcatgggctgytgggggcctggccagagaggagctgggggccacggagaagcaggtgccagctctggtgcagaggctcctatggcctttcaggcccgtggcagagggtggg

SEQ ID NO: 468664 - DNA, 201 bp, Homo sapiens
caggaccagctgggagccgctgtggtcgccctcaacaggtgagccaggccgtgggagggcgcccccgagactgccacctgctcaccacccccctctgctcrtaggtctttggccatcaccctcccagagcccaacggcagcgcaacggggctcacagtctggctgcacgggctcaccgctagtgtgctcccagggctgctg

SEQ ID NO: 468665 - DNA, 201 bp, Homo sapiens
gcccccgcattggggcgccctgcgagcctgacctccctcctgcgcctctgcagggctcagccctgcctggttcctgcagcacgtcatcgtcagggacctgyagacggcacgcagcgccttcttcctggtcaatgactggctttcggtggagacggaggccaacgggggcctggtggagaaggaggtgctggccgcgagtaa

SEQ ID NO: 468666 - DNA, 201 bp, Homo sapiens
cgtcggagaccacgtggtgagcgtgcggggcaaaaaccacgtgagctgggcccaggcgcaggtgcgcatcgtggtgctggaggccgtgagtgggctgcagrtgcccaactgctgcgagcctggcatcgccacgggcactgagaggaacttcacagcccgcgtgcagcgcggctctcgggtcgcctacgcctggtacttctc

SEQ ID NO: 468667 - DNA, 201 bp, Homo sapiens
tgctgacatgtgctgtgtgcctggtgacctacatggtcatggccgccatcctgcacaagctggaccagttggatgccagccggggccgcgccatccccttstgtgggcagcggggccgcttcaagtacgagatcctcgtcaagacaggctggggccggggctcaggtgaggggcgcagcggggtggcagggcctcccctgc

SEQ ID NO: 468668 - DNA, 201 bp, Homo sapiens
acgagggcactttgctaagcagacgccacggacgactgcacagcagcacgccagataactcagaagaagcaagcacgcggctgtgcacgcttccgaaatgyactccagaagaaaatctcagtacatctataggaagtgaagaggctgagttagtcccttagaaacgtcccagtggccgggccgggtgtggtggctcacgcc

SEQ ID NO: 468669 - DNA, 201 bp, Homo sapiens
aaccccagcagcacacagagaaggcgcataagccgcgaccaggaggggttgctcccgagtccgtggcaggaaccagaggccacatgtggctgctcgtattwaagttaattaaaatggaacgatggccgggcgcggtggctcacacctgtaatcccagcactttgggaggccgaggcgggcagatcacttgaggtcaggagt

SEQ ID NO: 468670 - DNA, 201 bp, Homo sapiens
tggccgggtgcccattgtgtccttggagtgtgtgtcctgcaaggcacaggccgtgtacgaagtgagccgcagctcctacgtgtacttggagggccgctgcytcaattgcagcagcggctccaagcgaggggtgagtgttgagcggggtgtgggcgggctggggatgggtcccatggccgaggggacggggcctgcaggcag

SEQ ID NO: 468671 - DNA, 201 bp, Homo sapiens
acggaaacgggaggccgcaccccttaggaatgcacacgtggggtcctcaagaggttacatgcaaactaaccccagcagcacacagagaaggcgcataagcygcgaccaggaggggttgctcccgagtccgtggcaggaaccagaggccacatgtggctgctcgtatttaagttaattaaaatggaacgatggccgggcgcg

SEQ ID NO: 468672 - DNA, 201 bp, Homo sapiens
gcttctcacacagtcatacctggttgtggtcccacagtgggaccaccctgttgggttcagaacaggagatgggggcccctcgagtctgtgtgggggctgtrgacagggttgggagaccttggctctgtgggggactgtggacaggggatggggggccttggccctgcgtgggatgggttgggggtccgtgcccttcctggc

SEQ ID NO: 468673 - DNA, 201 bp, Homo sapiens
aacaggagatgggggcccctcgagtctgtgtgggggctgtggacagggttgggagaccttggctctgtgggggactgtggacaggggatggggggccttgkccctgcgtgggatgggttgggggtccgtgcccttcctggccctgggtggacaggtccaggtggcactcggcatagggctgagatgggtgcagagggctga

SEQ ID NO: 468674 - DNA, 201 bp, Homo sapiens
tggctctgtgggggactgtggacaggggatggggggccttggccctgcgtgggatgggttgggggtccgtgcccttcctggccctgggtggacaggtccakgtggcactcggcatagggctgagatgggtgcagagggctgaggcccccaggcctctcctggcttggtttccccagatgagtgttcatttgggtcttccat

SEQ ID NO: 468675 - DNA, 201 bp, Homo sapiens
aggctggcatgacgcggaggatgctggcgccccgctggtgtacgccctgctgctgcggcgctgtcgccagggccactgcgaggagttctgtgtctacaagrgcagcctctccagctacggagccgtgctgcccccgggtttcaggccacacttcgaggtgggcctggccgtggtggtgcaggaccagctgggagccgctgt

SEQ ID NO: 468676 - DNA, 201 bp, Homo sapiens
tgggggtccgtgcccttcctggccctgggtggacaggtccaggtggcactcggcatagggctgagatgggtgcagagggctgaggcccccaggcctctccyggcttggtttccccagatgagtgttcatttgggtcttccatcagaaaggcccctcctgacctctgggagtggggagctcaagggtgggaggccatagctt

SEQ ID NO: 468677 - DNA, 201 bp, Homo sapiens
cgctcccctctctggaccggccaggaggcttggtgaccctgagcccgtggtggctgctcctgctgctgtcaggcggggcctgctggtgccccagagtgggygtctgttccccagtccctgctttcctcagctggcctgattgggggtcttcccagaggggtcgtctgaggggagggtgtgggagcaggttccatcccagct

SEQ ID NO: 468678 - DNA, 201 bp, Homo sapiens
cgtggacgtgagccggcctcggctggtgctgccgcggctggcgctgcctgtggggcactactgctttgtgtttgtcgtgtcatttggggacacgccactgrcacagagcatccaggccaatgtgacggtggcccccgagcgcctggtgcccatcattgagggtggctcataccgcgtgtggtcagacacacgggacctggt

SEQ ID NO: 468679 - DNA, 201 bp, Homo sapiens
aaacctcgagccctggtgcaggtcactgtgtctggggtgccgggggtgtgcgggctgcgtgtccttgctgggtgtctgtggctccatgtggtcacaccacscgggagcaggtttgctcggaagcccagggtgtccgtgcgtgactggacgggggtgggctgtgtgtgtgacacatcccctggtaccttgctgacccgcgcc

SEQ ID NO: 468680 - DNA, 201 bp, Homo sapiens
tcacggtgctgggccgctctggcgaggaggagggctgcgcctccatccgcctgtcccccaaccgcccgccgctggggggctcttgccgcctcttcccactrggcgctgtgcacgccctcaccaccaaggtgcacttcgaatgcacgggtgagtgcaggcctgcgtggggggagcagcgggatcccccgactctgtgacgtc

SEQ ID NO: 468681 - DNA, 201 bp, Homo sapiens
gatgcaaattctatgtaacacgacagcctgcttcagctttgcttccttccaaacctgccacagttccacgtacagtcttcaagccacatatgctctagtgrcaaaagctacacagtcccctagcaataccaacagtgaggaagagccccttcccaccccagaggtagccactgtccccagcccatgtccctgttgctggat

SEQ ID NO: 468682 - DNA, 201 bp, Homo sapiens
ctcccagagcccaacggcagcgcaacggggctcacagtctggctgcacgggctcaccgctagtgtgctcccagggctgctgcggcaggccgatccccagcwcgtcatcgagtactcgttggccctggtcaccgtgctgaacgaggtgagtgcagcctgggaggggacgtcacatctgctgcatgcgtgcttgggaccaaga

SEQ ID NO: 468683 - DNA, 201 bp, Homo sapiens
gccctgcgtgtccaccctcatccgtcgtgcgggggtccacgggccatgaccgtgaggacgtgatgcagccctgcctccctctccacaggtcaccctccacrgccaggatgtcctcatgctccctggtgacctcgttggcttgcagcacgacgctggccctggcgccctcctgcactgctcgccggctcccggccaccctgg

SEQ ID NO: 468684 - DNA, 201 bp, Homo sapiens
ctgggcacgccatacgggaggtggcctgcacggggatccctgccggtacccacaggccccgtgggtgggtgctgctgtgagcctgggctggtgggccctgstctccgggctctgagcctcagtttccccatctggaaagggggacagtgatggggctcccagcgggctgctgtgagggtgggaggatggaggagtgccctg

SEQ ID NO: 468685 - DNA, 201 bp, Homo sapiens
cccaggccctgttggtgctgtgccctgggactgggctctctaccctgtgtcctgccgagtcctggcacctgtcacccctgctgtgtgtggggctctgggcrctgcggctgtggggcgccctacggctgggggctgttattctccgctggcgctaccacgccttgcgtggagagctgtaccggccggcctgggagccccagg

SEQ ID NO: 468686 - DNA, 201 bp, Homo sapiens
cccgtcctcagtgcctggtgggccccgtcccagcatggggagggggtctcccgcgctgtctcctgggccgggctctgctttaaaactggatggggctctcrggccacgtcgccccttgttctcggcctgcagagggaggctggcgggtgtgcgctgaactttgggccccgcgggagcagcacggtcaccattccacgggag

SEQ ID NO: 468687 - DNA, 201 bp, Homo sapiens
tcggcatagggctgagatgggtgcagagggctgaggcccccaggcctctcctggcttggtttccccagatgagtgttcatttgggtcttccatcagaaagkcccctcctgacctctgggagtggggagctcaagggtgggaggccatagcttggggatgctggcaatgtgtgggatgggcccagggatggcctctggccta

SEQ ID NO: 468688 - DNA, 201 bp, Homo sapiens
ctctcctggcttggtttccccagatgagtgttcatttgggtcttccatcagaaaggcccctcctgacctctgggagtggggagctcaagggtgggaggccwtagcttggggatgctggcaatgtgtgggatgggcccagggatggcctctggcctactaagggctctggccctgacccacggccactcactcctcagagac

SEQ ID NO: 468689 - DNA, 201 bp, Homo sapiens
cccagatgagtgttcatttgggtcttccatcagaaaggcccctcctgacctctgggagtggggagctcaagggtgggaggccatagcttggggatgctggmaatgtgtgggatgggcccagggatggcctctggcctactaagggctctggccctgacccacggccactcactcctcagagacgtctcccacaacctgctc

SEQ ID NO: 468690 - DNA, 201 bp, Homo sapiens
gccgcccgctgaccactgccctcgtcctgcaggtggctgggagcccgagccccacacctgccgggcagcaggtgctggacatcgacagctgcctggactcrtccgtgctggacagctccttcctcacgttctcaggcctccacgctgaggtgaggactctactgggggtcctgggctgggctgggggtcctgccgccttgg

SEQ ID NO: 468691 - DNA, 201 bp, Homo sapiens
tttcagctgcccacgaaggcctgcttcagccagaggcctgcagcgccttctgcttctccaccggccagggcctcgcagccctctcggagcagggctggtgmctgtgtggggcggcccagccctccagtgcctcctttgcctgcctgtccctctgctccggccccccgccacctcctgcccccacctgtaggggccccaccc

SEQ ID NO: 468692 - DNA, 201 bp, Homo sapiens
tggggcggcccagccctccagtgcctcctttgcctgcctgtccctctgctccggccccccgccacctcctgcccccacctgtaggggccccaccctcctcyagcacgtcttccctgcctccccaggggccaccctggtggggccccacggacctctggcctctggccagctagcagccttccacatcgctgccccgctccc

SEQ ID NO: 468693 - DNA, 201 bp, Homo sapiens
ctcctgacctctgggagtggggagctcaagggtgggaggccatagcttggggatgctggcaatgtgtgggatgggcccagggatggcctctggcctactargggctctggccctgacccacggccactcactcctcagagacgtctcccacaacctgctccgggcgctggacgttgggctcctggcgaacctctcggcgct

SEQ ID NO: 468694 - DNA, 201 bp, Homo sapiens
gcctactaagggctctggccctgacccacggccactcactcctcagagacgtctcccacaacctgctccgggcgctggacgttgggctcctggcgaacctytcggcgctggcagagctgtgagtgtcccccagtcgtgccagcatgcggggctcactccgggtgggctggcggcaccgcctcttgctgctcagctgtgggg

SEQ ID NO: 468695 - DNA, 201 bp, Homo sapiens
gaggagtgccctgagccccctgccatcccacacccgcccccaggagcctagacgtgtggatcggcttctcgactgtgcagggggtggaggtgggcccagcsccgcagggcgaggccttcagcctggagagctgccagaactggctgcccggggagccacacccagccacagccgagcactgcgtccggctcgggcccaccg

SEQ ID NO: 468696 - DNA, 201 bp, Homo sapiens
cacgcagcctgacgcgcggctcacggcctacgtcaccgggaacccggcccactacctcttcgactggaccttcggggatggctcctccaacacgaccgtgygggggtgcccgacggtgacacacaacttcacgcggagcggcacgttccccctggcgctggtgctgtccagccgcgtgaacagggcgcattacttcaccag

SEQ ID NO: 468697 - DNA, 201 bp, Homo sapiens
gggctacctggtgggctttaaattcctggaaagtcacggctctgacagtggctccgctaactcattccactgtctcatttcacaaaatgaatttaaaactmtgctccctgacctcacacgagcccccgtgagtctctcacgccctctgctgtgttctcgcctggctaaagcgagtggcttttgaggtggagtctgaacccc

SEQ ID NO: 468698 - DNA, 201 bp, Homo sapiens
ctccgtgggcaccttcaatatcatcgtcacggctgagaacgaggtgggctccgcccaggacagcatcttcgtctatgtcctgcagctcatagaggggctgyaggtggtgggcggtggccgctacttccccaccaaccacacggtacagctgcaggccgtggttagggatggcaccaacgtctcctacagctggactgcctg

SEQ ID NO: 468699 - DNA, 201 bp, Homo sapiens
cttggtcaccatgacggcagggaacccgctgggctcagccaacgccaccgtggaagtggatgtgcaggtgcctgtgagtggcctcagcatcagggccagcragcccggaggcagcttcgtggcggccgggtcctctgtgcccttttgggggcagctggccacgggcaccaatgtgagctggtgctgggctgtgcccggcgg

SEQ ID NO: 468700 - DNA, 201 bp, Homo sapiens
cgcctccatccgcctgtcccccaaccgcccgccgctggggggctcttgccgcctcttcccactgggcgctgtgcacgccctcaccaccaaggtgcacttcraatgcacgggtgagtgcaggcctgcgtggggggagcagcgggatcccccgactctgtgacgtcacggagccctcccgtgatgccgtggggaccgtccctc

SEQ ID NO: 468701 - DNA, 201 bp, Homo sapiens
gcctcagcatcagggccagcgagcccggaggcagcttcgtggcggccgggtcctctgtgcccttttgggggcagctggccacgggcaccaatgtgagctgrtgctgggctgtgcccggcggcagcagcaagcgtggccctcatgtcaccatggtcttcccggatgctggcaccttctccatccggctcaatgcctccaacg

SEQ ID NO: 468702 - DNA, 201 bp, Homo sapiens
cgagcctggcatcgccacgggcactgagaggaacttcacagcccgcgtgcagcgcggctctcgggtcgcctacgcctggtacttctcgctgcagaaggtcyagggcgactcgctggtcatcctgtcgggccgcgacgtcacctacacgcccgtggccgcggggctgttggagatccaggtgcgcgccttcaacgccctggg

SEQ ID NO: 468703 - DNA, 201 bp, Homo sapiens
gacgtgagccggcctcggctggtgctgccgcggctggcgctgcctgtggggcactactgctttgtgtttgtcgtgtcatttggggacacgccactgacacrgagcatccaggccaatgtgacggtggcccccgagcgcctggtgcccatcattgagggtggctcataccgcgtgtggtcagacacacgggacctggtgctg

SEQ ID NO: 468704 - DNA, 201 bp, Homo sapiens
aaccgcacgctggtgctggaggttcaggacgccgtccagtatgtggccctgcagagcggcccctgcttcaccaaccgctcggcgcagtttgaggccgccaycagccccagcccccggcgtgtggcctaccactgggactttggggatgggtcgccagggcaggacacagatgagcccagggccgagcactcctacctgagg

SEQ ID NO: 468705 - DNA, 201 bp, Homo sapiens
cactactgctttgtgtttgtcgtgtcatttggggacacgccactgacacagagcatccaggccaatgtgacggtggcccccgagcgcctggtgcccatcaytgagggtggctcataccgcgtgtggtcagacacacgggacctggtgctggatgggagcgagtcctacgaccccaacctggaggacggcgaccagacgccg

SEQ ID NO: 468706 - DNA, 201 bp, Homo sapiens
gacgccgtccagtatgtggccctgcagagcggcccctgcttcaccaaccgctcggcgcagtttgaggccgccaccagccccagcccccggcgtgtggcctrccactgggactttggggatgggtcgccagggcaggacacagatgagcccagggccgagcactcctacctgaggcctggggactaccgcgtgcaggtgaac

SEQ ID NO: 468707 - DNA, 201 bp, Homo sapiens
ttcccaccagacctggtccccaacacctgcccctgccccgcagaaacctgagtgggaacccgtttgagtgtgactgtggcctggcgtggctgccgcgatgkgcggaggagcagcaggtgcgggtggtgcagcccgaggcagccacgtgtgctgggcctggctccctggctggccagcctctgcttggcatccccttgctgg

SEQ ID NO: 468708 - DNA, 201 bp, Homo sapiens
gtggcagcagtgtccttttcagctgcccacgaaggcctgcttcagccagaggcctgcagcgccttctgcttctccaccggccagggcctcgcagccctctmggagcagggctggtgcctgtgtggggcggcccagccctccagtgcctcctttgcctgcctgtccctctgctccggccccccgccacctcctgcccccacc

SEQ ID NO: 468709 - DNA, 201 bp, Homo sapiens
aggcgcataagccgcgaccaggaggggttgctcccgagtccgtggcaggaaccagaggccacatgtggctgctcgtatttaagttaattaaaatggaacgwtggccgggcgcggtggctcacacctgtaatcccagcactttgggaggccgaggcgggcagatcacttgaggtcaggagttccaagaccagcctggccaac

SEQ ID NO: 468710 - DNA, 201 bp, Homo sapiens
cagagggctcatcccgggccccagagataaatcccagtgaccctgaagcagcaccccgaccttccgctcccagcagccacacccaccgggccctctccggygtctgctttccacaatgcagcccccgcccaggagggcccatgtgcttaccctgttttgcccatgaagaaacagctcagtgttgtgggtcagtgcccgcat

SEQ ID NO: 468711 - DNA, 201 bp, Homo sapiens
ccgcgaccaggaggggttgctcccgagtccgtggcaggaaccagaggccacatgtggctgctcgtatttaagttaattaaaatggaacgatggccgggcgyggtggctcacacctgtaatcccagcactttgggaggccgaggcgggcagatcacttgaggtcaggagttccaagaccagcctggccaacacagtgaaacc

SEQ ID NO: 468712 - DNA, 201 bp, Homo sapiens
aaccagaggccacatgtggctgctcgtatttaagttaattaaaatggaacgatggccgggcgcggtggctcacacctgtaatcccagcactttgggaggcsgaggcgggcagatcacttgaggtcaggagttccaagaccagcctggccaacacagtgaaaccccgtctctactaaaaatacaaaaaattagctgggcatg

SEQ ID NO: 468713 - DNA, 201 bp, Homo sapiens
agcagtgtccttttcagctgcccacgaaggcctgcttcagccagaggcctgcagcgccttctgcttctccaccggccagggcctcgcagccctctcggagyagggctggtgcctgtgtggggcggcccagccctccagtgcctcctttgcctgcctgtccctctgctccggccccccgccacctcctgcccccacctgtag

SEQ ID NO: 468714 - DNA, 201 bp, Homo sapiens
ctttgggaggccgaggcgggcagatcacttgaggtcaggagttccaagaccagcctggccaacacagtgaaaccccgtctctactaaaaatacaaaaaatyagctgggcatggtggcaggcacctgtaatcccagctactcaggaggctgagccaggacaatcgcctgaacgcgggaggtggaggttgcagtgagctgaga

SEQ ID NO: 468715 - DNA, 201 bp, Homo sapiens
caccagtctgctgtcaagtgttcagtggcacacgtcgcgaggggctgccatcacggacggtgcagatgtcccatatatccagcattctaggacattctgtmagatggcaccgggctctgtcctgtctgctgaggaggtggcttctcatccctgtcctgagcaggtctgagctgccgcccgctgaccactgccctcgtcctg

SEQ ID NO: 468716 - DNA, 201 bp, Homo sapiens
cctgagcaggtctgagctgccgcccgctgaccactgccctcgtcctgcaggtggctgggagcccgagccccacacctgccgggcagcaggtgctggacatygacagctgcctggactcgtccgtgctggacagctccttcctcacgttctcaggcctccacgctgaggtgaggactctactgggggtcctgggctgggctg

SEQ ID NO: 468717 - DNA, 201 bp, Homo sapiens
ttaaatcgttcctcttgttgagagagcagcctttagcggagctctggcatcagccctgctccctagctgtgtgacctttgccctcttaacaccgccgtttycttctctgtatatgagagatggtaacgttgtctaattgatggctgctgggagggttccctggggtggcgccgaaccagagctcaggcgagctggccagca

SEQ ID NO: 468718 - DNA, 201 bp, Homo sapiens
gggccggctcagccctgctggggacagacgtgcaggtggaagcggcacctgccgccctggagctcgtgtgcccgtcctcggtgcagagtgacgagagcctygacctcagcatccagaaccgcggtggttcaggcctggaggccgcctacagcatcgtggccctgggcgaggagccggcccgaggtgagtgtctgctgccca

SEQ ID NO: 468719 - DNA, 201 bp, Homo sapiens
gccttcttcctggtcaatgactggctttcggtggagacggaggccaacgggggcctggtggagaaggaggtgctggccgcgagtaaggcctcgttccatgktcccactccgtgggaggttgggcagggtggtcctgccccgtggcctcctgcagtgcggccctccctgccttctaggcgacgcagcccttttgcgcttccg

SEQ ID NO: 468720 - DNA, 201 bp, Homo sapiens
ccccgtcttgggcccacactgaccgttgacaccctcgttcccaccggtctccagcggtgcacccgctctgcccctcggacacggagatcttccctggcaaygggcactgctaccgcctggtggtggagaaggcggcctggctgcaggcgcaggagcagtgtcaggcctgggccggggccgccctggcaatggtggacagtc

SEQ ID NO: 468721 - DNA, 201 bp, Homo sapiens
gaacgcctccaacctggtgagcttcttcgtggcgcaggccacggtgaccgtccaggtgctggcctgccgggagccggaggtggacgtggtcctgcccctgyaggtgctgatgcggcgatcacagcgcaactacttggaggcccacgttgacctgcgcgactgcgtcacctaccagactgagtaccgctgggaggtgtatcg

SEQ ID NO: 468722 - DNA, 201 bp, Homo sapiens
agcaggttccatcccagctcagcctcctgacccaggccctggctaagggctgcaggagtctgtgagtcaggcctacgtggcagctgcggtcctcacacccmcacatacgtctcttctcacacgcatccccccaggggccctcagtgagcattgcctgcctcctgctagggtccagctgggtccagtacaccagaacgcaca

SEQ ID NO: 468723 - DNA, 201 bp, Homo sapiens
agcttcttcgtggcgcaggccacggtgaccgtccaggtgctggcctgccgggagccggaggtggacgtggtcctgcccctgcaggtgctgatgcggcgatsacagcgcaactacttggaggcccacgttgacctgcgcgactgcgtcacctaccagactgagtaccgctgggaggtgtatcgcaccgccagctgccagcgg

SEQ ID NO: 468724 - DNA, 201 bp, Homo sapiens
aaatagacctgtgttggaggtaaccccactcccacgccaggtgctgatccggagtggccgggtgcccattgtgtccttggagtgtgtgtcctgcaaggcayaggccgtgtacgaagtgagccgcagctcctacgtgtacttggagggccgctgcctcaattgcagcagcggctccaagcgaggggtgagtgttgagcgggg

SEQ ID NO: 468725 - DNA, 201 bp, Homo sapiens
tgaggaacctgagccctacctggcagtctacctacactcggagccccggcccaatgagcacaactgctcggctagcaggaggatccgcccagagtcactcyagggtgctgaccaccggccctacaccttcttcatttccccggggtgagctctgcgggccagcctggcagggcagggcagggcatcatgggtcagcattgc

SEQ ID NO: 468726 - DNA, 201 bp, Homo sapiens
gctgcggacgctcggtcccgcgctgcgcatccccgcggacgccacagcgctgtgagtagcgggcccagcggcacccgggagaggccgcgggacgggcgggygtgggcgcgttccctggcccgggacgggaagcaggacgcgggccaggacgctcccagggcgaggctccggcgcggcacggcggccctgctaaataaggaa

SEQ ID NO: 468727 - DNA, 201 bp, Homo sapiens
taccacggcccacgtgggcatcatgctgtatggggtggacagccggagcggccaccggcacctggacggcgacagagccttccaccgcaacagcctggacwtcttccggatcgccaccccgcacagcctgggtagcgtgtggaagatccgagtgtggcacgacaacaaaggtttgtgcggaccctgccaagctctgcccct

SEQ ID NO: 468728 - DNA, 201 bp, Homo sapiens
cagcatcaggtgagctggggtgagaggagggggctctgaagctcacccttgcagctgggcccaccctatgcctcctgtacctctagatgaagacctgatcyagcaggtccttgccgagggggtcagcagcccagcccctacccaagacacccacatggaaacggacctgctcagcagcctgtgagtgtccggctctcgggg

SEQ ID NO: 468729 - DNA, 201 bp, Homo sapiens
cctgtgagctgcctctcacaggtctgtctctgcttccccaggactggtggagggtctgcggaagcgcctgctgccggcctggtgtgcctccctggcccacrggctcagcctgctcctggtggctgtggctgtggctgtctcagggtgggtgggtgcgagcttccccccgggcgtgagtgttgcgtggctcctgtccagcag

SEQ ID NO: 468730 - DNA, 201 bp, Homo sapiens
ggctgtggctgtctcagggtgggtgggtgcgagcttccccccgggcgtgagtgttgcgtggctcctgtccagcagcgccagcttcctggcctcattcctcrgctgggagccactgaaggtgagggggctgccaggggtaggctacaggcctccatcacgggggacccctctgaagccaccccctccccaggtcttgctgga

SEQ ID NO: 468731 - DNA, 201 bp, Homo sapiens
tcactggtggccaagcggctgcacccggatgaagatgacaccctggtagagagcccggctgtgacgcctgtgagcgcacgtgtgccccgcgtacggccacyccacggctttgcactcttcctggccaaggaagaagcccgcaaggtcaagaggctacatggcatgctgcgggtgagcctgggtgcggcctgtgcccctgcc

SEQ ID NO: 468732 - DNA, 201 bp, Homo sapiens
gccttccacatcgctgccccgctccctgtcactgccacacgctgggacttcggagacggctccgccgaggtggatgccgctgggccggctgcctcgcatckctatgtgctgcctgggcgctatcacgtgacggccgtgctggccctgggggccggctcagccctgctggggacagacgtgcaggtggaagcggcacctgcc

SEQ ID NO: 468733 - DNA, 201 bp, Homo sapiens
ccccgtccaccagagcctcctggtgtacatgctttttctgctggtgaccctgctggccagctatggggatgcctcatgccatgggcacgcctaccgtctgyaaagcgccatcaagcaggagctgcacagccgggccttcctggccatcacgcggtacgggcatccggtgcactggtctgtcttctgggctttagttttgcc

SEQ ID NO: 468734 - DNA, 201 bp, Homo sapiens
aggagaatcgattgaacctggtaggtgaaggttgtagtgagccgagatcgcgccactgcactccagcctgggcaacaagagcgaaactccgtctcaaaaamaaaaaaattcctcaatttcttggttgttttgtaacttatcaacaaatggtcatatagaggttaccttgtatgtagtcacgcacatagtcacgcacatggc

SEQ ID NO: 468735 - DNA, 201 bp, Homo sapiens
ggcttgcagcacgacgctggccctggcgccctcctgcactgctcgccggctcccggccaccctggtccccaggccccgtacctctccgccaacgcctcgtsatggctgccccacttgccagcccagctggagggcacttgggcctgccctgcctgtgccctgcggctgcttgcagccacggaacagctcaccgtgctgctg

SEQ ID NO: 468736 - DNA, 201 bp, Homo sapiens
ctggactcaaacaaaaaggaaaacttcctgatttacaaaaggcagataaccatcacatgagggcatctttatgaataaattgctggttggttttaaaaatacagagtatggggaaatccaggggtagtcactacatgctgaccagccccaggtatctccggcccaaagctctgtgaaatccagattcagtgcttccgcggg

SEQ ID NO: 468737 - DNA, 201 bp, Homo sapiens
tggactcaaacaaaaaggaaaacttcctgatttacaaaaggcagataaccatcacatgagggcatctttatgaataaattgctggttggttttaaaaatacagagtatggggaaatccaggggtagtcactacatgctgaccagccccaggtatctccggcccaaagctctgtgaaatccagattcagtgcttccgcgggg

SEQ ID NO: 468738 - DNA, 201 bp, Homo sapiens
gctgggagtgctgcccaggtggggagacctgtcctcacagcaaggccaggattgctggtgcaggcagttgggcatctctgacggtggcctgtgggcaaatsagggccccaacaccctcccctcctcacagggaccccggagaacggcagcgagcctgagagcaggtccccggacaacaggacccagctggcccccgcgtgc

SEQ ID NO: 468739 - DNA, 201 bp, Homo sapiens
tcctgcagctttgacgtggtctccccagtggctgggctgcgggtcatctaccctgccccccgcgacggccgcctctacgtgcccaccaacggctcagcctyggtgctccaggtggactctggtgccaacgccacggccacggctcgctggcctgggggcagtgtcagcgcccgctttgagaatgtctgccctgccctggtg

SEQ ID NO: 468740 - DNA, 201 bp, Homo sapiens
ggccaggctgaccacagggcccccccgtccaccagagcctcctggtgtacatgctttttctgctggtgaccctgctggccagctatggggatgcctcatgmcatgggcacgcctaccgtctgcaaagcgccatcaagcaggagctgcacagccgggccttcctggccatcacgcggtacgggcatccggtgcactggtctg

SEQ ID NO: 468741 - DNA, 201 bp, Homo sapiens
tggggacaaggtgtgagcctgagccctcccgcctccaagccgtgttcgaggccctgctcacccagtttgaccgactcaaccaggccacagaggacgtctascagctggagcagcagctgcacagcctgcaaggccgcaggagcagccgggcgcccgccggatcttcccgtggcccatccccgggcctgcggccagcactgc

SEQ ID NO: 468742 - DNA, 201 bp, Homo sapiens
actgggcgctgtgcacgccctcaccaccaaggtgcacttcgaatgcacgggtgagtgcaggcctgcgtggggggagcagcgggatcccccgactctgtgasgtcacggagccctcccgtgatgccgtggggaccgtccctcaggctggcatgacgcggaggatgctggcgccccgctggtgtacgccctgctgctgcggcg

SEQ ID NO: 468743 - DNA, 201 bp, Homo sapiens
cgaagtgagccgcagctcctacgtgtacttggagggccgctgcctcaattgcagcagcggctccaagcgaggggtgagtgttgagcggggtgtgggcgggytggggatgggtcccatggccgaggggacggggcctgcaggcagaagtggggctgacagggcagagggttgcgccccctcaccaccccttctgcctgcagc

SEQ ID NO: 468744 - DNA, 201 bp, Homo sapiens
tggggcgccctgcgagcctgacctccctcctgcgcctctgcagggctcagccctgcctggttcctgcagcacgtcatcgtcagggacctgcagacggcacrcagcgccttcttcctggtcaatgactggctttcggtggagacggaggccaacgggggcctggtggagaaggaggtgctggccgcgagtaaggcctcgttc

SEQ ID NO: 468745 - DNA, 201 bp, Homo sapiens
gcggggtgtgggcgggctggggatgggtcccatggccgaggggacggggcctgcaggcagaagtggggctgacagggcagagggttgcgccccctcaccaycccttctgcctgcagcggtgggctgcacgtacgttcagcaacaagacgctggtgctggatgagaccaccacatccacgggcagtgcaggcatgcgactgg

SEQ ID NO: 468746 - DNA, 201 bp, Homo sapiens
ccgagcctcccacccctccctcttgcctcccaggtaccacggcccacgtgggcatcatgctgtatggggtggacagccggagcggccaccggcacctggayggcgacagagccttccaccgcaacagcctggacatcttccggatcgccaccccgcacagcctgggtagcgtgtggaagatccgagtgtggcacgacaaca

SEQ ID NO: 468747 - DNA, 201 bp, Homo sapiens
cccggcctggggctctgtgtgtttcagcactctacccagaccctcccggccccagggtccacacgtgctcggccgcaggaggcttcagcaccagcgattasgacgttggctgggagagtcctcacaatggctcggggacgtgggcctattcagcgccggatctgctggggtgagcagagcgagggccccgggcgtctacgc

SEQ ID NO: 468748 - DNA, 201 bp, Homo sapiens
gcctgcaggcagaagtggggctgacagggcagagggttgcgccccctcaccaccccttctgcctgcagcggtgggctgcacgtacgttcagcaacaagacrctggtgctggatgagaccaccacatccacgggcagtgcaggcatgcgactggtgctgcggcggggcgtgctgcgggacggcgagggatacaccttcacgc

SEQ ID NO: 468749 - DNA, 201 bp, Homo sapiens
gagttaccatctgaacctctccagccacttccgctggtcggcgctgcaggtgtccgtgggcctgtacacgtccctgtgccagtacttcagcgaggaggacrtggtgtggcggacagaggggctgctgcccctggaggagacctcgccccgccaggccgtctgcctcacccgccacctcaccgccttcggcgccagcctctt

SEQ ID NO: 468750 - DNA, 201 bp, Homo sapiens
cctgctcacccagtttgaccgactcaaccaggccacagaggacgtctaccagctggagcagcagctgcacagcctgcaaggccgcaggagcagccgggcgyccgccggatcttcccgtggcccatccccgggcctgcggccagcactgcccagccgccttgcccgggccagtcggggtgtggacctggccactggccccag

SEQ ID NO: 468751 - DNA, 201 bp, Homo sapiens
tgccctggtggccaccttcgtgcccggctgcccctgggagaccaacgataccctgttctcagtggtagcactgccgtggctcagtgagggggagcacgtgrtggacgtggtggtggaaaacagcgccagccgggccaacctcagcctgcgggtgacggcggaggagcccatctgtggcctccgcgccacgcccagccccga

SEQ ID NO: 468752 - DNA, 201 bp, Homo sapiens
gggcgtctgttccccagtccctgctttcctcagctggcctgattgggggtcttcccagaggggtcgtctgaggggagggtgtgggagcaggttccatcccrgctcagcctcctgacccaggccctggctaagggctgcaggagtctgtgagtcaggcctacgtggcagctgcggtcctcacacccacacatacgtctcttc

SEQ ID NO: 468753 - DNA, 201 bp, Homo sapiens
gaagcaggacgcgggccaggacgctcccagggcgaggctccggcgcggcacggcggccctgctaaataaggaacgcctggagccgcggttggcacggcccsggggagccgaaaaaccccgggtctggagacagacgtcccacccgggggctctgcagacgccagcgggggcggggcgcggaggccgcgctcagctgggagg

SEQ ID NO: 468754 - DNA, 201 bp, Homo sapiens
gcctgggctcacgtccgctaccccttccctgcccaggagcagagacccagcggggagttaccatctgaacctctccagccacttccgctggtcggcgctgsaggtgtccgtgggcctgtacacgtccctgtgccagtacttcagcgaggaggacatggtgtggcggacagaggggctgctgcccctggaggagacctcgcc

SEQ ID NO: 468755 - DNA, 201 bp, Homo sapiens
gcttggctgcaactgcctcctggaggccgggatgaattcacagcctaccatgtccctcaggtccagcactcctggggagaagacagagacgctggcgctgyagaggctgggggagctggggccacccagcccaggcctgaactgggaacagccccaggcagcgaggctgtccaggacaggtgtgcttgcgtagccccggga

SEQ ID NO: 468756 - DNA, 201 bp, Homo sapiens
cccctctgaagccaccccctccccaggtcttgctggaagccctgtacttctcactggtggccaagcggctgcacccggatgaagatgacaccctggtagasagcccggctgtgacgcctgtgagcgcacgtgtgccccgcgtacggccaccccacggctttgcactcttcctggccaaggaagaagcccgcaaggtcaaga

SEQ ID NO: 468757 - DNA, 201 bp, Homo sapiens
ggacggtgggtggctcgagggtccggaggtcacccacgcttacaacagcacaggtgacttcaccgttagggtggccggctggaatgaggtgagccgcagckaggcctggctcaatgtgacggtgaagcggcgcgtgcgggggctcgtcgtcaatgcaagccgcacggtggtgcccctgaatgggagcgtgagcttcagcac

SEQ ID NO: 468758 - DNA, 201 bp, Homo sapiens
cgcccaggacagcatcttcgtctatgtcctgcagctcatagaggggctgcaggtggtgggcggtggccgctacttccccaccaaccacacggtacagctgyaggccgtggttagggatggcaccaacgtctcctacagctggactgcctggagggacaggggcccggccctggccggcagcggcaaaggcttctcgctcac

SEQ ID NO: 468759 - DNA, 201 bp, Homo sapiens
tgcccggcggcagcagcaagcgtggccctcatgtcaccatggtcttcccggatgctggcaccttctccatccggctcaatgcctccaacgcagtcagctgrgtctcagccacgtacaacctcacggcggaggagcccatcgtgggcctggtgctgtgggccagcagcaaggtggtggcgcccgggcagctggtccattttc

SEQ ID NO: 468760 - DNA, 201 bp, Homo sapiens
tgctgcggcgctgtcgccagggccactgcgaggagttctgtgtctacaagggcagcctctccagctacggagccgtgctgcccccgggtttcaggccacamttcgaggtgggcctggccgtggtggtgcaggaccagctgggagccgctgtggtcgccctcaacaggtgagccaggccgtgggagggcgcccccgagactg

SEQ ID NO: 468761 - DNA, 201 bp, Homo sapiens
catccacgggcagtgcaggcatgcgactggtgctgcggcggggcgtgctgcgggacggcgagggatacaccttcacgctcacggtgctgggccgctctggygaggaggagggctgcgcctccatccgcctgtcccccaaccgcccgccgctggggggctcttgccgcctcttcccactgggcgctgtgcacgccctcacca

SEQ ID NO: 468762 - DNA, 201 bp, Homo sapiens
atacaccttcacgctcacggtgctgggccgctctggcgaggaggagggctgcgcctccatccgcctgtcccccaaccgcccgccgctggggggctcttgcygcctcttcccactgggcgctgtgcacgccctcaccaccaaggtgcacttcgaatgcacgggtgagtgcaggcctgcgtggggggagcagcgggatccccc

SEQ ID NO: 468763 - DNA, 201 bp, Homo sapiens
catctaccctgccccccgcgacggccgcctctacgtgcccaccaacggctcagccttggtgctccaggtggactctggtgccaacgccacggccacggctygctggcctgggggcagtgtcagcgcccgctttgagaatgtctgccctgccctggtggccaccttcgtgcccggctgcccctgggagaccaacgataccct

SEQ ID NO: 468764 - DNA, 201 bp, Homo sapiens
tgttggagatccaggtgcgcgccttcaacgccctgggcagtgagaaccgcacgctggtgctggaggttcaggacgccgtccagtatgtggccctgcagagyggcccctgcttcaccaaccgctcggcgcagtttgaggccgccaccagccccagcccccggcgtgtggcctaccactgggactttggggatgggtcgccag

SEQ ID NO: 468765 - DNA, 201 bp, Homo sapiens
tggtgagcttcttcgtggcgcaggccacggtgaccgtccaggtgctggcctgccgggagccggaggtggacgtggtcctgcccctgcaggtgctgatgcgrcgatcacagcgcaactacttggaggcccacgttgacctgcgcgactgcgtcacctaccagactgagtaccgctgggaggtgtatcgcaccgccagctgcc

SEQ ID NO: 468766 - DNA, 201 bp, Homo sapiens
ggccacgtcgccccttgttctcggcctgcagagggaggctggcgggtgtgcgctgaactttgggccccgcgggagcagcacggtcaccattccacgggagyggctggcggctggcgtggagtacaccttcagcctgaccgtgtggaaggccggccgcaaggaggaggccaccaaccagacggtgggtgccgcccgcccctc

SEQ ID NO: 468767 - DNA, 201 bp, Homo sapiens
gcctgcagagggaggctggcgggtgtgcgctgaactttgggccccgcgggagcagcacggtcaccattccacgggagcggctggcggctggcgtggagtamaccttcagcctgaccgtgtggaaggccggccgcaaggaggaggccaccaaccagacggtgggtgccgcccgcccctcggccacttgccttggacagccca

SEQ ID NO: 468768 - DNA, 201 bp, Homo sapiens
ccggcctcctgcgctgctgacagcttgctgtgccccctgcctgccccagtacgagcgggccctggacgtggcggcagagcccaagcacgagcggcagcacygagcccagatacgcaagaacatcacggagactctggtgtccctgagggtccacactgtggatgacatccagcagatcgctgctgcgctggcccagtgcat

SEQ ID NO: 468769 - DNA, 201 bp, Homo sapiens
gggcctggtgctgtgggccagcagcaaggtggtggcgcccgggcagctggtccattttcagatcctgctggctgccggctcagctgtcaccttccgcctgyaggtcggcggggccaaccccgaggtgctccccgggccccgtttctcccacagcttcccccgcgtcggagaccacgtggtgagcgtgcggggcaaaaacca

SEQ ID NO: 468770 - DNA, 201 bp, Homo sapiens
gcccggggccaccgcagctccgccaactccgccaactccgttgtggtccagccccaggcctccgtcggtgctgtggtcaccctggacagcagcaaccctgyggccgggctgcatctgcagctcaactatacgctgctggacggtgcgtgcagcgggtggggcacacgcggccccctggccttgttcttggggggaaggcgt

SEQ ID NO: 468771 - DNA, 201 bp, Homo sapiens
gtcggcggggccaaccccgaggtgctccccgggccccgtttctcccacagcttcccccgcgtcggagaccacgtggtgagcgtgcggggcaaaaaccacgwgagctgggcccaggcgcaggtgcgcatcgtggtgctggaggccgtgagtgggctgcaggtgcccaactgctgcgagcctggcatcgccacgggcactgag

SEQ ID NO: 468772 - DNA, 201 bp, Homo sapiens
gtccagccccaggcctccgtcggtgctgtggtcaccctggacagcagcaaccctgcggccgggctgcatctgcagctcaactatacgctgctggacggtgygtgcagcgggtggggcacacgcggccccctggccttgttcttggggggaaggcgtttctcgtagggcttccatgggtgtctctggtgaaatttgctttct

SEQ ID NO: 468773 - DNA, 201 bp, Homo sapiens
caaccccgaggtgctccccgggccccgtttctcccacagcttcccccgcgtcggagaccacgtggtgagcgtgcggggcaaaaaccacgtgagctgggccyaggcgcaggtgcgcatcgtggtgctggaggccgtgagtgggctgcaggtgcccaactgctgcgagcctggcatcgccacgggcactgagaggaacttcac

SEQ ID NO: 468774 - DNA, 201 bp, Homo sapiens
ctggtacttctcgctgcagaaggtccagggcgactcgctggtcatcctgtcgggccgcgacgtcacctacacgcccgtggccgcggggctgttggagatcyaggtgcgcgccttcaacgccctgggcagtgagaaccgcacgctggtgctggaggttcaggacgccgtccagtatgtggccctgcagagcggcccctgctt

SEQ ID NO: 468775 - DNA, 201 bp, Homo sapiens
ggtgagcttcttcgtggcgcaggccacggtgaccgtccaggtgctggcctgccgggagccggaggtggacgtggtcctgcccctgcaggtgctgatgcggygatcacagcgcaactacttggaggcccacgttgacctgcgcgactgcgtcacctaccagactgagtaccgctgggaggtgtatcgcaccgccagctgcca

SEQ ID NO: 468776 - DNA, 201 bp, Homo sapiens
agcggccggggcgcccagcgcgtgtggccctgcccggcgtggacgtgagccggcctcggctggtgctgccgcggctggcgctgcctgtggggcactactgmtttgtgtttgtcgtgtcatttggggacacgccactgacacagagcatccaggccaatgtgacggtggcccccgagcgcctggtgcccatcattgagggtg

SEQ ID NO: 468777 - DNA, 201 bp, Homo sapiens
gggtggggagcaggtgggggtgccgcggctgccccactcgggcctgtccccacaggtgagtacctcctgaccgtgctggcatctaatgccttcgagaacckgacgcagcaggtgcctgtgagcgtgcgcgcctccctgccctccgtggctgtgggtgtgagtgacggcgtcctggtggccggccggcccgtcaccttctac

SEQ ID NO: 468778 - DNA, 201 bp, Homo sapiens
tgtgagtgacggcgtcctggtggccggccggcccgtcaccttctacccgcacccgctgccctcgcctgggggtgttctttacacgtgggacttcggggacrgctcccctgtcctgacccagagccagccggctgccaaccacacctatgcctcgaggggcacctaccacgtgcgcctggaggtcaacaacacggtgagcgg

SEQ ID NO: 468779 - DNA, 201 bp, Homo sapiens
atccgcctgtcccccaaccgcccgccgctggggggctcttgccgcctcttcccactgggcgctgtgcacgccctcaccaccaaggtgcacttcgaatgcaygggtgagtgcaggcctgcgtggggggagcagcgggatcccccgactctgtgacgtcacggagccctcccgtgatgccgtggggaccgtccctcaggctgg

SEQ ID NO: 468780 - DNA, 201 bp, Homo sapiens
ggctgcaagcagacagatttctcgtccgcaggctgcccagcagctacgcttcgtgcgccagtggtccgtctttggcaagacattatgccgagctctgccakagctcctgggggtcaccttgggcctggtggtgctcggggtagcctacgcccagctggccatcctggtaggtgactgcgcggccggggagggcgtcttagc

SEQ ID NO: 468781 - DNA, 201 bp, Homo sapiens
cgtccgcaggctgcccagcagctacgcttcgtgcgccagtggtccgtctttggcaagacattatgccgagctctgccagagctcctgggggtcaccttggrcctggtggtgctcggggtagcctacgcccagctggccatcctggtaggtgactgcgcggccggggagggcgtcttagctcagctcagctcagctgtacgc

SEQ ID NO: 468782 - DNA, 201 bp, Homo sapiens
ggacgtgagccggcctcggctggtgctgccgcggctggcgctgcctgtggggcactactgctttgtgtttgtcgtgtcatttggggacacgccactgacayagagcatccaggccaatgtgacggtggcccccgagcgcctggtgcccatcattgagggtggctcataccgcgtgtggtcagacacacgggacctggtgct

SEQ ID NO: 468783 - DNA, 201 bp, Homo sapiens
cccagtcaagctgccccccttcctccccaacagccctcactgtgacctcacctgggctgatggcttaggcccctactggggtgagggaggggccaggcgtkgggggagtggacagggaagctgggcccctgaactgcgccccccgccctccccgggcctggctcttgctgctctgctgccccgagtgcagctgcacttgga

SEQ ID NO: 468784 - DNA, 201 bp, Homo sapiens
ggagttaccatctgaacctctccagccacttccgctggtcggcgctgcaggtgtccgtgggcctgtacacgtccctgtgccagtacttcagcgaggaggayatggtgtggcggacagaggggctgctgcccctggaggagacctcgccccgccaggccgtctgcctcacccgccacctcaccgccttcggcgccagcctct

SEQ ID NO: 468785 - DNA, 201 bp, Homo sapiens
tcaccaccccttctgcctgcagcggtgggctgcacgtacgttcagcaacaagacgctggtgctggatgagaccaccacatccacgggcagtgcaggcatgygactggtgctgcggcggggcgtgctgcgggacggcgagggatacaccttcacgctcacggtgctgggccgctctggcgaggaggagggctgcgcctccat

SEQ ID NO: 468786 - DNA, 201 bp, Homo sapiens
gcactgctgtaagggcagctggtcaggctgtgggcgatgggtttatcagcagcaagcgggcgggagagggacgcaggcggacgcctgacttcggtgcctgsagtggctcttggttccctggctcccagcaccactcccactctcgtttggggtagggtcttccggctttttgtcggggggaccctgtgacccaagaggctc

SEQ ID NO: 468787 - DNA, 201 bp, Homo sapiens
ccatctgtgtaggcaaggacatcgcagactcccctttctcatctccctcgttcagcctccgaggccggagtctccatccctgtgcctgcctgtgggtccckggaggacctgaggctgcccatgtcacccccggcatctcatcctggggacagttcagccgtgggagggatctgtaaggacagaatgccgctgagcctgggg

SEQ ID NO: 468788 - DNA, 201 bp, Homo sapiens
gatgctcatcctgcaggcagagaccaccgcgggcaccgtgacgcccaccgccatcggagacagcatcctcaacatcacaggtgccgcggcccgtgccccaygccacccgcccgccccgtgcggccctttcctctgcctccctcctccccccaaccgcgtcgcctttgccccatcccatcttcgtccccctcccctcccccc

SEQ ID NO: 468789 - DNA, 201 bp, Homo sapiens
ggggagcacgtggtggacgtggtggtggaaaacagcgccagccgggccaacctcagcctgcgggtgacggcggaggagcccatctgtggcctccgcgccaygcccagccccgaggcccgtgtactgcagggagtcctagtggtgagtatggccgaggctccaccaccagcccccaggcaggtgcctgcagacagggtgctc

SEQ ID NO: 468790 - DNA, 201 bp, Homo sapiens
gctgccccacacccagggaagttctcctcagtcccactgttgcattccccgaccccggctcccccggcccaggagcgcctgtggggcagaaggcccagccmcaagacttcccggccctgccagcctcaggcttcacccaccctcgcgccaactgtgggcagagcccagggggagggcaggagagccagcgcctggctggga

SEQ ID NO: 468791 - DNA, 201 bp, Homo sapiens
tggtgaaatttgctttctgtttcatgggctgctgggggcctggccagagaggagctgggggccacggagaagcaggtgccagctctggtgcagaggctcckatggcctttcaggcccgtggcagagggtgggctcaggagggccatcgtgggtgtcccccgggtggttgagcttcccggcaggcgtgtgacctgcgcgttc

SEQ ID NO: 468792 - DNA, 201 bp, Homo sapiens
cgacagcctgcttcagctttgcttccttccaaacctgccacagttccacgtacagtcttcaagccacatatgctctagtggcaaaagctacacagtccccyagcaataccaacagtgaggaagagccccttcccaccccagaggtagccactgtccccagcccatgtccctgttgctggatgtggtgggccggttctcacc

SEQ ID NO: 468793 - DNA, 201 bp, Homo sapiens
ctgcctccctctccacaggtcaccctccacggccaggatgtcctcatgctccctggtgacctcgttggcttgcagcacgacgctggccctggcgccctccygcactgctcgccggctcccggccaccctggtccccaggccccgtacctctccgccaacgcctcgtcatggctgccccacttgccagcccagctggagggc

SEQ ID NO: 468794 - DNA, 201 bp, Homo sapiens
tgctcggaagcccagggtgtccgtgcgtgactggacgggggtgggctgtgtgtgtgacacatcccctggtaccttgctgacccgcgccacctgcagtctgstgtgctggccctccggcgagggaacgctcagttggccggacctgctcagtgacccgtccattgtgggtagcaatctgcggcagctggcacggggccaggc

SEQ ID NO: 468795 - DNA, 201 bp, Homo sapiens
actaccgcgtgcaggtgaacgcctccaacctggtgagcttcttcgtggcgcaggccacggtgaccgtccaggtgctggcctgccgggagccggaggtggaygtggtcctgcccctgcaggtgctgatgcggcgatcacagcgcaactacttggaggcccacgttgacctgcgcgactgcgtcacctaccagactgagtacc

SEQ ID NO: 468796 - DNA, 201 bp, Homo sapiens
taggggccagggtgcccaggcactggtggcaggagaagggctacatctggggctgaggcgggctgggtccttttctccctgcagctcccgaggcccagccmtggcccagcctggcattcctgaccttagcagcgccatgatctgaagacaggctggcttctgtgaggccacctcagaaagggctttgtgcccaggcagagg

SEQ ID NO: 468797 - DNA, 201 bp, Homo sapiens
gcccagggcaagcgctcggacccgcggagcctgctgtgctatggcggcgccccagggcctggctgccacttctccatccccgaggctttcagcggggcccyggccaacctcagtgacgtggtgcagctcatctttctggtggactccaatccctttccctttggctatatcagcaactacaccgtctccaccaaggtggcc

SEQ ID NO: 468798 - DNA, 201 bp, Homo sapiens
cagggcagggcatcatgggtcagcattgcctgggttactggccccatggggacggcaggcagcgaggggactggaccgggtatgggctctgagactgcgayatccaacctggcggagcctgggctcacgtccgctaccccttccctgcccaggagcagagacccagcggggagttaccatctgaacctctccagccacttc

SEQ ID NO: 468799 - DNA, 201 bp, Homo sapiens
tggggacggcaggcagcgaggggactggaccgggtatgggctctgagactgcgacatccaacctggcggagcctgggctcacgtccgctaccccttccctkcccaggagcagagacccagcggggagttaccatctgaacctctccagccacttccgctggtcggcgctgcaggtgtccgtgggcctgtacacgtccctgt

SEQ ID NO: 468800 - DNA, 201 bp, Homo sapiens
ctgctgtgctatggcggcgccccagggcctggctgccacttctccatccccgaggctttcagcggggccctggccaacctcagtgacgtggtgcagctcayctttctggtggactccaatccctttccctttggctatatcagcaactacaccgtctccaccaaggtggcctcgatggcattccagacacaggccggcgcc

SEQ ID NO: 468801 - DNA, 201 bp, Homo sapiens
aggccacagcctgccttgggttaatgatgctgccgagaggtggtggcttttggaaaagatggcgtactgcaaaacgtgctgctctgcgtggctcgaagctycgtggggagacgtgggcagagccgtggctgactcacagaccccccaccccagagcctgccctgccctccctgccccgacccttctccctcctgacccatg

SEQ ID NO: 468802 - DNA, 201 bp, Homo sapiens
gctcatctttctggtggactccaatccctttccctttggctatatcagcaactacaccgtctccaccaaggtggcctcgatggcattccagacacaggccrgcgcccagatccccatcgagcggctggcctcagagcgcgccatcaccgtgaaggtgcccaacaactcggactgggctgcccggggccaccgcagctccgc

SEQ ID NO: 468803 - DNA, 201 bp, Homo sapiens
tgggttttccccagggaagaggggtcaagctgggagaggtgaaggacacagatcacagctgctggcaggtgttcaagggtccaagagcgttgctgtctggstgtcaccagtagccttcctggggggctcacgcaggtgcctctccacttgtggctccctggctgctgaagctcagcagggacagctgtgtccagttccagg

SEQ ID NO: 468804 - DNA, 201 bp, Homo sapiens
tgttattctccgctggcgctaccacgccttgcgtggagagctgtaccggccggcctgggagccccaggactacgagatggtggagttgttcctgcgcaggytgcgcctctggatgggcctcagcaaggtcaaggaggtgggtacggcccagtgggggggagagggacacgccctgggctctgcccagggtgcagccggact

SEQ ID NO: 468805 - DNA, 201 bp, Homo sapiens
ggcctcagagcgcgccatcaccgtgaaggtgcccaacaactcggactgggctgcccggggccaccgcagctccgccaactccgccaactccgttgtggtcyagccccaggcctccgtcggtgctgtggtcaccctggacagcagcaaccctgcggccgggctgcatctgcagctcaactatacgctgctggacggtgcgtg

SEQ ID NO: 468806 - DNA, 201 bp, Homo sapiens
agagatttctccaaagaagacgcacagatggccaacagcgtgtgagaagatggtcggcctcattagtcatgagggaaacgtaaatcaaaaccactgtccasccgggcgcggtgcctcacgcctgtaatcccagcactttaggagagcagatggcttgaggccaggagtttgaggccagcctgggcaacatagcgagaccaa

SEQ ID NO: 468807 - DNA, 201 bp, Homo sapiens
gtgcttgcgtagccccgggatgcccctagcccctccctgtgagctgcctctcacaggtctgtctctgcttccccaggactggtggagggtctgcggaagcrcctgctgccggcctggtgtgcctccctggcccacgggctcagcctgctcctggtggctgtggctgtggctgtctcagggtgggtgggtgcgagcttcccc

SEQ ID NO: 468808 - DNA, 201 bp, Homo sapiens
tctccaaagaagacgcacagatggccaacagcgtgtgagaagatggtcggcctcattagtcatgagggaaacgtaaatcaaaaccactgtccagccgggcscggtgcctcacgcctgtaatcccagcactttaggagagcagatggcttgaggccaggagtttgaggccagcctgggcaacatagcgagaccaataaatag

SEQ ID NO: 468809 - DNA, 201 bp, Homo sapiens
atggccaacagcgtgtgagaagatggtcggcctcattagtcatgagggaaacgtaaatcaaaaccactgtccagccgggcgcggtgcctcacgcctgtaaycccagcactttaggagagcagatggcttgaggccaggagtttgaggccagcctgggcaacatagcgagaccaataaatagatattagtggtggcgcctgt

SEQ ID NO: 468810 - DNA, 201 bp, Homo sapiens
tggacagggttgggagaccttggctctgtgggggactgtggacaggggatggggggccttggccctgcgtgggatgggttgggggtccgtgcccttcctgrccctgggtggacaggtccaggtggcactcggcatagggctgagatgggtgcagagggctgaggcccccaggcctctcctggcttggtttccccagatgag

SEQ ID NO: 468811 - DNA, 201 bp, Homo sapiens
ggacgtggtcctgcccctgcaggtgctgatgcggcgatcacagcgcaactacttggaggcccacgttgacctgcgcgactgcgtcacctaccagactgagkaccgctgggaggtgtatcgcaccgccagctgccagcggccggggcgcccagcgcgtgtggccctgcccggcgtggacgtgagccggcctcggctggtgct

SEQ ID NO: 468812 - DNA, 201 bp, Homo sapiens
tttggggacacgccactgacacagagcatccaggccaatgtgacggtggcccccgagcgcctggtgcccatcattgagggtggctcataccgcgtgtggtsagacacacgggacctggtgctggatgggagcgagtcctacgaccccaacctggaggacggcgaccagacgccgctcagtttccactgggcctgtgtggct

SEQ ID NO: 468813 - DNA, 201 bp, Homo sapiens
ctggccccgagccccgagcgggcgtcgctcagcagcaggtcgcggccgcagccccatccagccccgcgcccgccatgccgtccgcgggccccgcctgagcygcggcctccgcgcgcgggcgggcctggggacggcggggccatgcgcgcgctgccctaacgatgccgcccgccgcgcccgcccgcctggcgctggccctgg

SEQ ID NO: 468814 - DNA, 201 bp, Homo sapiens
acctgtctgaggaacctgagccctacctggcagtctacctacactcggagccccggcccaatgagcacaactgctcggctagcaggaggatccgcccagastcactccagggtgctgaccaccggccctacaccttcttcatttccccggggtgagctctgcgggccagcctggcagggcagggcagggcatcatgggtca

SEQ ID NO: 468815 - DNA, 201 bp, Homo sapiens
cacgtccgctaccccttccctgcccaggagcagagacccagcggggagttaccatctgaacctctccagccacttccgctggtcggcgctgcaggtgtccstgggcctgtacacgtccctgtgccagtacttcagcgaggaggacatggtgtggcggacagaggggctgctgcccctggaggagacctcgccccgccaggc

SEQ ID NO: 468816 - DNA, 201 bp, Homo sapiens
aggagcagagacccagcggggagttaccatctgaacctctccagccacttccgctggtcggcgctgcaggtgtccgtgggcctgtacacgtccctgtgccrgtacttcagcgaggaggacatggtgtggcggacagaggggctgctgcccctggaggagacctcgccccgccaggccgtctgcctcacccgccacctcacc

SEQ ID NO: 468817 - DNA, 201 bp, Homo sapiens
cccagcggggagttaccatctgaacctctccagccacttccgctggtcggcgctgcaggtgtccgtgggcctgtacacgtccctgtgccagtacttcagckaggaggacatggtgtggcggacagaggggctgctgcccctggaggagacctcgccccgccaggccgtctgcctcacccgccacctcaccgccttcggcgc

SEQ ID NO: 468818 - DNA, 201 bp, Homo sapiens
ggccctacaccttcttcatttccccggggtgagctctgcgggccagcctggcagggcagggcagggcatcatgggtcagcattgcctgggttactggcccyatggggacggcaggcagcgaggggactggaccgggtatgggctctgagactgcgacatccaacctggcggagcctgggctcacgtccgctaccccttccc

SEQ ID NO: 468819 - DNA, 201 bp, Homo sapiens
atggggtggttctgccactgccctcgctcccccaccttggggtgcctctccccctgctcgtgggggagaccctgcctgggatctgctttccagcaaggaayatactttggagggagacacacatgttcttttctggagctctgcagtggccacggcagcccagcccgccaagcaccctggaatgaaaacatcccgctgctg

SEQ ID NO: 468820 - DNA, 201 bp, Homo sapiens
agggcaagcgctcggacccgcggagcctgctgtgctatggcggcgccccagggcctggctgccacttctccatccccgaggctttcagcggggccctggcyaacctcagtgacgtggtgcagctcatctttctggtggactccaatccctttccctttggctatatcagcaactacaccgtctccaccaaggtggcctcga

SEQ ID NO: 468821 - DNA, 201 bp, Homo sapiens
gctgcggcctccgcgcgcgggcgggcctggggacggcggggccatgcgcgcgctgccctaacgatgccgcccgccgcgcccgcccgcctggcgctggcccwgggcctgggcctgtggctcggggcgctggcggggggccccgggcgcggctgcgggccctgcgagcccccctgcctctgcggcccagcgcccggcgccgcc

SEQ ID NO: 468822 - DNA, 201 bp, Homo sapiens
ccgggagaggccgcgggacgggcgggcgtgggcgcgttccctggcccgggacgggaagcaggacgcgggccaggacgctcccagggcgaggctccggcgcrgcacggcggccctgctaaataaggaacgcctggagccgcggttggcacggccccggggagccgaaaaaccccgggtctggagacagacgtcccacccggg

SEQ ID NO: 468823 - DNA, 201 bp, Homo sapiens
agggcgaggctccggcgcggcacggcggccctgctaaataaggaacgcctggagccgcggttggcacggccccggggagccgaaaaaccccgggtctggasacagacgtcccacccgggggctctgcagacgccagcgggggcggggcgcggaggccgcgctcagctgggaggacaaacagtcgctaattggagaggaatt

SEQ ID NO: 468824 - DNA, 201 bp, Homo sapiens
ggcggccctgctaaataaggaacgcctggagccgcggttggcacggccccggggagccgaaaaaccccgggtctggagacagacgtcccacccgggggctstgcagacgccagcgggggcggggcgcggaggccgcgctcagctgggaggacaaacagtcgctaattggagaggaattgggatgcggcctggggctgcggg

SEQ ID NO: 468825 - DNA, 201 bp, Homo sapiens
gccctgctaaataaggaacgcctggagccgcggttggcacggccccggggagccgaaaaaccccgggtctggagacagacgtcccacccgggggctctgcrgacgccagcgggggcggggcgcggaggccgcgctcagctgggaggacaaacagtcgctaattggagaggaattgggatgcggcctggggctgcggggtac

SEQ ID NO: 468826 - DNA, 201 bp, Homo sapiens
ctggagccgcggttggcacggccccggggagccgaaaaaccccgggtctggagacagacgtcccacccgggggctctgcagacgccagcgggggcggggcscggaggccgcgctcagctgggaggacaaacagtcgctaattggagaggaattgggatgcggcctggggctgcggggtacccggagaggtggggatggctg

SEQ ID NO: 468827 - DNA, 201 bp, Homo sapiens
cgtcccacccgggggctctgcagacgccagcgggggcggggcgcggaggccgcgctcagctgggaggacaaacagtcgctaattggagaggaattgggatkcggcctggggctgcggggtacccggagaggtggggatggctgtagggggcggcagggaagagttccaggaggtgtctggaaaaggatttgatggatgtgc

SEQ ID NO: 468828 - DNA, 201 bp, Homo sapiens
gcctcctgctggagccgtctctgtggatctcctctgccatcctggcccatgagtgggtgatgcgctggccaccatctggtgacagtggccgggcaccgctsccaaatgtgggtcccgcatctgcaagcccctccctgggtcccctagggtatggggtggttctgccactgccctcgctcccccaccttggggtgcctctcc

SEQ ID NO: 468829 - DNA, 201 bp, Homo sapiens
cccacccgggggctctgcagacgccagcgggggcggggcgcggaggccgcgctcagctgggaggacaaacagtcgctaattggagaggaattgggatgcgscctggggctgcggggtacccggagaggtggggatggctgtagggggcggcagggaagagttccaggaggtgtctggaaaaggatttgatggatgtgcaag

SEQ ID NO: 468830 - DNA, 201 bp, Homo sapiens
cgggggcggggcgcggaggccgcgctcagctgggaggacaaacagtcgctaattggagaggaattgggatgcggcctggggctgcggggtacccggagagrtggggatggctgtagggggcggcagggaagagttccaggaggtgtctggaaaaggatttgatggatgtgcaagaattgggctgatgcttaggaaggggcg

SEQ ID NO: 468831 - DNA, 201 bp, Homo sapiens
gcgcggaggccgcgctcagctgggaggacaaacagtcgctaattggagaggaattgggatgcggcctggggctgcggggtacccggagaggtggggatggytgtagggggcggcagggaagagttccaggaggtgtctggaaaaggatttgatggatgtgcaagaattgggctgatgcttaggaaggggcgatgaggtggg

SEQ ID NO: 468832 - DNA, 201 bp, Homo sapiens
gtgcgggcaccacagccctcagagctgggagccgagtcaccatctcggatggtggcgtcccaggcctacaacctgacctctgccctcatgcgcatcctcaygcgctcccgcgtgctcaacgaggagcccctgacgctggcgggcgaggagatcgtggcccagggcaagcgctcggacccgcggagcctgctgtgctatggc

SEQ ID NO: 468833 - DNA, 201 bp, Homo sapiens
tccagccccaggcctccgtcggtgctgtggtcaccctggacagcagcaaccctgcggccgggctgcatctgcagctcaactatacgctgctggacggtgcrtgcagcgggtggggcacacgcggccccctggccttgttcttggggggaaggcgtttctcgtagggcttccatgggtgtctctggtgaaatttgctttctg

SEQ ID NO: 468834 - DNA, 201 bp, Homo sapiens
cagcctggcattcctgaccttagcagcgccatgatctgaagacaggctggcttctgtgaggccacctcagaaagggctttgtgcccaggcagaggcggaasccagctcttccttctggttgaggcaggaatgaggccagcgctggggcaagcccatgcccagggaacgtcacagctgtgggagtacaggggctccgggttc

SEQ ID NO: 468835 - DNA, 201 bp, Homo sapiens
gcgctcagctgggaggacaaacagtcgctaattggagaggaattgggatgcggcctggggctgcggggtacccggagaggtggggatggctgtagggggckgcagggaagagttccaggaggtgtctggaaaaggatttgatggatgtgcaagaattgggctgatgcttaggaaggggcgatgaggtgggtccagaagaag

SEQ ID NO: 468836 - DNA, 201 bp, Homo sapiens
attggagaggaattgggatgcggcctggggctgcggggtacccggagaggtggggatggctgtagggggcggcagggaagagttccaggaggtgtctggamaaggatttgatggatgtgcaagaattgggctgatgcttaggaaggggcgatgaggtgggtccagaagaaggggggtgaacggtgtgagcaaagaccgtga

SEQ ID NO: 468837 - DNA, 201 bp, Homo sapiens
gcccccccccccaccatccctcttcctaccttggcttcctccattgacacactggaccctgctggctgcccggggaggtgtttgggggatggtgttggggraggaggagggccccttgagcctcagtgtgcccatcaggagcgtaaggtcagtgcagcacctgcccacacaggctgtgaagggtgggagtggagagggatg

SEQ ID NO: 468838 - DNA, 201 bp, Homo sapiens
ggcagggtgggaggtgggctcgcgggtgggctggggtcatgaagggcctcaggcgctctgctattgggttccaaggctatcctgagaacaggggtgagggsggattgccgtggggggttaaagccttgtcatgttcgctttcgggagataaaaacaacaggtggcctttatggagacgctgcccagagccaggtctgtgcc

SEQ ID NO: 468839 - DNA, 201 bp, Homo sapiens
aggggggattgccgtggggggttaaagccttgtcatgttcgctttcgggagataaaaacaacaggtggcctttatggagacgctgcccagagccaggtctktgccaggctcctgttgggggtcgtcatgcggaatcctgactctgaccatccgaggcatagggaccgtggagatttgcatttcacagatgaggaaacaggt

SEQ ID NO: 468840 - DNA, 201 bp, Homo sapiens
agataagcagacagttgtccccagcgctggggagagtcttgggaccagtctgatgccttgtatttcccaggctccaggctcctcgccgggacagtgtctcyttgggtgcgtgctggatccctgggggacgtggcacatccccaggcttgctaaacattgggtgggttctggcatttggttttgtaacgtttctgggtcact

SEQ ID NO: 468841 - DNA, 201 bp, Homo sapiens
tctgatgccttgtatttcccaggctccaggctcctcgccgggacagtgtctccttgggtgcgtgctggatccctgggggacgtggcacatccccaggcttkctaaacattgggtgggttctggcatttggttttgtaacgtttctgggtcactcccgcctgtggccacccttccttaggggagccgtgtgtccttggggct

SEQ ID NO: 468842 - DNA, 201 bp, Homo sapiens
ggcctcctcctgcctggcaacagcacccacagaattgcatcagacctaccccacccgttgtttgtgatgctgtagctgagggctcctctgtctgccaggcyggtcactggggactctgtccaggtcctggtggttcctgcttcccagcacctgatggtgtccatgagagcagcccctcgggagctgtccgggagagaaggg

SEQ ID NO: 468843 - DNA, 201 bp, Homo sapiens
ccgtgcagcgcttcctggtctcccgggtcaccaggtgcctgcccccaccccccgaggggccataggttgggagatctctgaagcactggggcagagcctgsggctggggagtctcaggaggaaggaggtgggagctgggccggccctggtgagcaggtggcgccggccggtggggccgttcctgtcagctctgcagatgca

SEQ ID NO: 468844 - DNA, 201 bp, Homo sapiens
tgcagcgcttcctggtctcccgggtcaccaggtgcctgcccccaccccccgaggggccataggttgggagatctctgaagcactggggcagagcctgcggstggggagtctcaggaggaaggaggtgggagctgggccggccctggtgagcaggtggcgccggccggtggggccgttcctgtcagctctgcagatgcagag

SEQ ID NO: 468845 - DNA, 201 bp, Homo sapiens
acgggaggtggcctgcacggggatccctgccggtacccacaggccccgtgggtgggtgctgctgtgagcctgggctggtgggccctggtctccgggctctragcctcagtttccccatctggaaagggggacagtgatggggctcccagcgggctgctgtgagggtgggaggatggaggagtgccctgagccccctgccat

SEQ ID NO: 468846 - DNA, 201 bp, Homo sapiens
aggcctccgtcggtgctgtggtcaccctggacagcagcaaccctgcggccgggctgcatctgcagctcaactatacgctgctggacggtgcgtgcagcggktggggcacacgcggccccctggccttgttcttggggggaaggcgtttctcgtagggcttccatgggtgtctctggtgaaatttgctttctgtttcatggg

SEQ ID NO: 468847 - DNA, 201 bp, Homo sapiens
gggtgggtgctgctgtgagcctgggctggtgggccctggtctccgggctctgagcctcagtttccccatctggaaagggggacagtgatggggctcccagygggctgctgtgagggtgggaggatggaggagtgccctgagccccctgccatcccacacccgcccccaggagcctagacgtgtggatcggcttctcgactg

SEQ ID NO: 468848 - DNA, 201 bp, Homo sapiens
gtgctgctgtgagcctgggctggtgggccctggtctccgggctctgagcctcagtttccccatctggaaagggggacagtgatggggctcccagcgggctsctgtgagggtgggaggatggaggagtgccctgagccccctgccatcccacacccgcccccaggagcctagacgtgtggatcggcttctcgactgtgcagg

SEQ ID NO: 468849 - DNA, 201 bp, Homo sapiens
gctgtgagcctgggctggtgggccctggtctccgggctctgagcctcagtttccccatctggaaagggggacagtgatggggctcccagcgggctgctgtragggtgggaggatggaggagtgccctgagccccctgccatcccacacccgcccccaggagcctagacgtgtggatcggcttctcgactgtgcagggggtg

SEQ ID NO: 468850 - DNA, 201 bp, Homo sapiens
agggctcctctgtctgccaggccggtcactggggactctgtccaggtcctggtggttcctgcttcccagcacctgatggtgtccatgagagcagcccctcrggagctgtccgggagagaagggcgctggtggctgctgagcggagagcaaggcccgtgttctccaggcccttggcacagcagtggagcccccgcccctgcc

SEQ ID NO: 468851 - DNA, 201 bp, Homo sapiens
ccacacccagccacagccgagcactgcgtccggctcgggcccaccgggtggtgtaacaccgacctgtgctcagcgccgcacagctacgtctgcgagctgcrgcccggaggtgtgcggggggccaggcaggggcctgagacgctggctgtggttaggggcctgccgagcgcccgcggtggagcctgggctgaggaggagggg

SEQ ID NO: 468852 - DNA, 201 bp, Homo sapiens
acccagccacagccgagcactgcgtccggctcgggcccaccgggtggtgtaacaccgacctgtgctcagcgccgcacagctacgtctgcgagctgcagccyggaggtgtgcggggggccaggcaggggcctgagacgctggctgtggttaggggcctgccgagcgcccgcggtggagcctgggctgaggaggaggggctgg

SEQ ID NO: 468853 - DNA, 201 bp, Homo sapiens
gtttgtctggggccattccctctgctgtggattgggagggccccgggagctgccccacacccagggaagttctcctcagtcccactgttgcattccccgascccggctcccccggcccaggagcgcctgtggggcagaaggcccagccccaagacttcccggccctgccagcctcaggcttcacccaccctcgcgccaact

SEQ ID NO: 468854 - DNA, 201 bp, Homo sapiens
caccaaggtgcacttcgaatgcacgggtgagtgcaggcctgcgtggggggagcagcgggatcccccgactctgtgacgtcacggagccctcccgtgatgcygtggggaccgtccctcaggctggcatgacgcggaggatgctggcgccccgctggtgtacgccctgctgctgcggcgctgtcgccagggccactgcgagga

SEQ ID NO: 468855 - DNA, 201 bp, Homo sapiens
gtgttctccaggcccttggcacagcagtggagcccccgcccctgccttgtgttgtcctcttaggctctggtcctggggtttggaggagggggaccctgggrgttggtggcctgtcccagcctgagctggcaagattccgaatgccaggcccctcaagtgtgcaacagggcacagggtgacctcatgtgggcaggtgggtgc

SEQ ID NO: 468856 - DNA, 201 bp, Homo sapiens
tgtcctcttaggctctggtcctggggtttggaggagggggaccctgggggttggtggcctgtcccagcctgagctggcaagattccgaatgccaggccccycaagtgtgcaacagggcacagggtgacctcatgtgggcaggtgggtgctgttctgtacacacctggggccgccgctgggagagttctggaaggtggggtg

SEQ ID NO: 468857 - DNA, 201 bp, Homo sapiens
gggcacagggtgacctcatgtgggcaggtgggtgctgttctgtacacacctggggccgccgctgggagagttctggaaggtggggtgaggggacccatggsaaactagggccctaggaaggatgtgaaggccctggctggccccccaggccaccctctgtgctgtggggcagcccagccattttgctgtctaccctgcaaa

SEQ ID NO: 468858 - DNA, 201 bp, Homo sapiens
cccgggctctgccatgccctcctatgctcaggtgtgctgaggtccacacggccctgccgttgcactgcagctgcctgcaggattcagtgcagtggcatgcrgtgcaggtgcggtgccccggagccacaggccacaccacagggcctgcatgcacaggggctgcggtgtctgggtttgggtaactacgccctgtgacatttg

SEQ ID NO: 468859 - DNA, 201 bp, Homo sapiens
actacatgctgaccagccccaggtatctccggcccaaagctctgtgaaatccagattcagtgcttccgcggggatttctgacggcagctcagactccgcakccacacagagcgcgtggccctcaccctcccggcttcctcaacccttggccgtcccttgctcggacagtgcttcgggctgaccaggtcggaggcttgggtt

SEQ ID NO: 468860 - DNA, 201 bp, Homo sapiens
gtgcagtcgcatgatctcggctcactgcaaagtctgcctcccacgttcaagcagttatctgcctcagcctcccaagtagctaagattacaggcgcccgccrccacagccggctaattttttgtgtgtgtgttttagtagagaggaggtttcaccatcttagccaggctggtcttgaactcctgacctcgtgatccacccat

SEQ ID NO: 468861 - DNA, 201 bp, Homo sapiens
caagagtgtcttttatcctccgagagacagcaaaacaggaagcattcagtgcagtgtgaccctgggtcaggccgttctttcggtgatgggctgacgagggygcaggtacgggagagcgtcctgagagcccgggactcggcgtctcgcagttggtctcgtcctccccctcaacgtgtcttcgctgcctctgtacctcttctc

SEQ ID NO: 468862 - DNA, 201 bp, Homo sapiens
ctgaggggagggtgtgggagcaggttccatcccagctcagcctcctgacccaggccctggctaagggctgcaggagtctgtgagtcaggcctacgtggcarctgcggtcctcacacccacacatacgtctcttctcacacgcatccccccaggggccctcagtgagcattgcctgcctcctgctagggtccagctgggtcc

SEQ ID NO: 468863 - DNA, 201 bp, Homo sapiens
agtggctcttggttccctggctcccagcaccactcccactctcgtttggggtagggtcttccggctttttgtcggggggaccctgtgacccaagaggctcmagaaactgcccgcccaggttaacatgggcttggctgcaactgcctcctggaggccgggatgaattcacagcctaccatgtccctcaggtccagcactcct

SEQ ID NO: 468864 - DNA, 201 bp, Homo sapiens
catgggcttggctgcaactgcctcctggaggccgggatgaattcacagcctaccatgtccctcaggtccagcactcctggggagaagacagagacgctggygctgcagaggctgggggagctggggccacccagcccaggcctgaactgggaacagccccaggcagcgaggctgtccaggacaggtgtgcttgcgtagccc

SEQ ID NO: 468865 - DNA, 201 bp, Homo sapiens
ggctgaggggcctgcgcccagagctggcctcccccaacacctgctgcgcttggtaggtgtggtggcgttatggcagcccggctgctgcttggatgcgagcwtggccttgggccggtgctgggggcacagctgtctgccaggcactctcatcaccccagaggccttgtcatcctcccttgccccaggccaggtagcaagaga

SEQ ID NO: 468866 - DNA, 201 bp, Homo sapiens
aggccctcggagctggctgtgcctgcttctgtgtaccacttctgtgggcatggccgcttctagagcctcgacacccccccaacccccgcaccaagcagacraagtcaataaaagagctgtctgactgcaatctgtgcctctatgtctgtgcactggggtcaggactttatttatttcactgacaggcaataccgtccaagg

SEQ ID NO: 468867 - DNA, 201 bp, Homo sapiens
agggcgtcttagctcagctcagctcagctgtacgccctcactggtgtcgccttccccgcagctcgtgtcttcctgtgtggactccctctggagcgtggccyaggccctgttggtgctgtgccctgggactgggctctctaccctgtgtcctgccgagtcctggcacctgtcacccctgctgtgtgtggggctctgggcact

SEQ ID NO: 468868 - DNA, 201 bp, Homo sapiens
gaggccagggcatctctatgagggcctcctgctggagccgtctctgtggatctcctctgccatcctggcccatgagtgggtgatgcgctggccaccatctsgtgacagtggccgggcaccgctgccaaatgtgggtcccgcatctgcaagcccctccctgggtcccctagggtatggggtggttctgccactgccctcgct

SEQ ID NO: 468869 - DNA, 201 bp, Homo sapiens
ctcgctcccccaccttggggtgcctctccccctgctcgtgggggagaccctgcctgggatctgctttccagcaaggaatatactttggagggagacacacrtgttcttttctggagctctgcagtggccacggcagcccagcccgccaagcaccctggaatgaaaacatcccgctgctgtctgggcctggcctgcactctg

SEQ ID NO: 468870 - DNA, 201 bp, Homo sapiens
ggcactgcggctgtggggcgccctacggctgggggctgttattctccgctggcgctaccacgccttgcgtggagagctgtaccggccggcctgggagcccyaggactacgagatggtggagttgttcctgcgcaggctgcgcctctggatgggcctcagcaaggtcaaggaggtgggtacggcccagtgggggggagaggg

SEQ ID NO: 468871 - DNA, 201 bp, Homo sapiens
ggggggccaggcaggggcctgagacgctggctgtggttaggggcctgccgagcgcccgcggtggagcctgggctgaggaggaggggctggtgggggggttytcgggcggctcggtccccagtctgttcgtcctggtgtcctgggccctggcccggcgcctcactgtgcactcgccaccccaggcccagtgcaggatgccga

SEQ ID NO: 468872 - DNA, 201 bp, Homo sapiens
gccccccatggacagtttccaccggagtcttcctctcgagcgacaggagccaggcctgtgggggtctgatggctcgctctccttccctcccctcttcctgsgaagttcgggtagggggagtctgggcttcaggctgggatggggtctgtggagctgaggcggccccctgcccaccaggtcatggtattcccgggcctgcgt

SEQ ID NO: 468873 - DNA, 201 bp, Homo sapiens
ttaggtggacagagcaggggttccagagacaccagctcattccaggtgtcctgggggtggattgggtggggcctgcctgggggccggcctgggtcagtcgsctggccggagacggacgcagcactgggctgggagtgctgcccaggtggggagacctgtcctcacagcaaggccaggattgctggtgcaggcagttgggca

SEQ ID NO: 468874 - DNA, 201 bp, Homo sapiens
cctgcctgggggccggcctgggtcagtcggctggccggagacggacgcagcactgggctgggagtgctgcccaggtggggagacctgtcctcacagcaagrccaggattgctggtgcaggcagttgggcatctctgacggtggcctgtgggcaaatcagggccccaacaccctcccctcctcacagggaccccggagaacg

SEQ ID NO: 468875 - DNA, 201 bp, Homo sapiens
tgggaacacccctgaggggccgaggctccagggcgagggggcccgacctggggttcacacgcccgggtggcgggcagacccgctgcagcatgagacacgtstcagctacctcgggccggcaggctggccctgctgcccacagccctgggacgtggccccacctgtgacgggtgtggaggggcagcctccaggcctggccac

SEQ ID NO: 468876 - DNA, 201 bp, Homo sapiens
gggtcagtcggctggccggagacggacgcagcactgggctgggagtgctgcccaggtggggagacctgtcctcacagcaaggccaggattgctggtgcagrcagttgggcatctctgacggtggcctgtgggcaaatcagggccccaacaccctcccctcctcacagggaccccggagaacggcagcgagcctgagagcag

SEQ ID NO: 468877 - DNA, 201 bp, Homo sapiens
acacccctgaggggccgaggctccagggcgagggggcccgacctggggttcacacgcccgggtggcgggcagacccgctgcagcatgagacacgtgtcagmtacctcgggccggcaggctggccctgctgcccacagccctgggacgtggccccacctgtgacgggtgtggaggggcagcctccaggcctggccacaccct

SEQ ID NO: 468878 - DNA, 201 bp, Homo sapiens
acctcatgtgggcaggtgggtgctgttctgtacacacctggggccgccgctgggagagttctggaaggtggggtgaggggacccatgggaaactagggccytaggaaggatgtgaaggccctggctggccccccaggccaccctctgtgctgtggggcagcccagccattttgctgtctaccctgcaaactcctcctcggg

SEQ ID NO: 468879 - DNA, 201 bp, Homo sapiens
taaaactctgttccttagctgcaccagtctgctgtcaagtgttcagtggcacacgtcgcgaggggctgccatcacggacggtgcagatgtcccatatatcyagcattctaggacattctgtcagatggcaccgggctctgtcctgtctgctgaggaggtggcttctcatccctgtcctgagcaggtctgagctgccgcccg

SEQ ID NO: 468880 - DNA, 201 bp, Homo sapiens
ctgcaaactcctcctcggggagacggctgggttttccccagggaagaggggtcaagctgggagaggtgaaggacacagatcacagctgctggcaggtgttyaagggtccaagagcgttgctgtctgggtgtcaccagtagccttcctggggggctcacgcaggtgcctctccacttgtggctccctggctgctgaagctca

SEQ ID NO: 468881 - DNA, 201 bp, Homo sapiens
agagcaggtccccggacaacaggacccagctggcccccgcgtgcatgccagggggacgctggtgccctggagccaacatctgcttgccgctggacgcctcytgccacccccaggcctgcgccaatggctgcacgtcagggccagggctacccggggccccctatgcgctatggagagagttcctcttctccgttcccgcgg

SEQ ID NO: 468882 - DNA, 201 bp, Homo sapiens
ttgtggctccctggctgctgaagctcagcagggacagctgtgtccagttccaggtggaggacagccggggcttctgaggccacagcctgccttgggttaakgatgctgccgagaggtggtggcttttggaaaagatggcgtactgcaaaacgtgctgctctgcgtggctcgaagcttcgtggggagacgtgggcagagccg

SEQ ID NO: 468883 - DNA, 201 bp, Homo sapiens
ctgtggccacacacctgggacttccttctccacccagtggtgccccagcagccgctaaggagcccgctgggtcccacgctaggatggtcctaactcctccygccttccagatcggacgctcggcgctggggaccccttgtgtcccggggctggggcaccgtcctgccccccatgggggtgtactcctcccgacaagcttgg

SEQ ID NO: 468884 - DNA, 201 bp, Homo sapiens
cgcctcctgccacccccaggcctgcgccaatggctgcacgtcagggccagggctacccggggccccctatgcgctatggagagagttcctcttctccgttsccgcggggccccccgcgcagtactcggtgtgtggccctgacctgggtctgttccctgcatctcctcaggccaccttcctgtctgctgcccagggtctggg

SEQ ID NO: 468885 - DNA, 201 bp, Homo sapiens
acccagtggtgccccagcagccgctaaggagcccgctgggtcccacgctaggatggtcctaactcctcccgccttccagatcggacgctcggcgctggggrccccttgtgtcccggggctggggcaccgtcctgccccccatgggggtgtactcctcccgacaagcttggcttcagcttccctgggagcacatcctggccc

SEQ ID NO: 468886 - DNA, 201 bp, Homo sapiens
gattacaggcatgagccaccacgcccagccctgacccatgttttgaaccaaattccagccacccttttatctgcaagcattttggagggcatcgcaatacygcagacccacctaacacaacagacagttccttcatgccaccgaaggcctggtgtgttcacatttttggtttaatagtttgaattaagagccaaataaggt

SEQ ID NO: 468887 - DNA, 201 bp, Homo sapiens
tggtcctaactcctcccgccttccagatcggacgctcggcgctggggaccccttgtgtcccggggctggggcaccgtcctgccccccatgggggtgtactyctcccgacaagcttggcttcagcttccctgggagcacatcctggccctcgggcacccatcaggctgtccctgtgcacctggctcccacccttccagctca

SEQ ID NO: 468888 - DNA, 201 bp, Homo sapiens
agccctgacccatgttttgaaccaaattccagccacccttttatctgcaagcattttggagggcatcgcaatactgcagacccacctaacacaacagacarttccttcatgccaccgaaggcctggtgtgttcacatttttggtttaatagtttgaattaagagccaaataaggtccacacactgcaattagttgatgtct

SEQ ID NO: 468889 - DNA, 201 bp, Homo sapiens
taactcctcccgccttccagatcggacgctcggcgctggggaccccttgtgtcccggggctggggcaccgtcctgccccccatgggggtgtactcctcccracaagcttggcttcagcttccctgggagcacatcctggccctcgggcacccatcaggctgtccctgtgcacctggctcccacccttccagctcatagcag

SEQ ID NO: 468890 - DNA, 201 bp, Homo sapiens
ggcatctctgacggtggcctgtgggcaaatcagggccccaacaccctcccctcctcacagggaccccggagaacggcagcgagcctgagagcaggtccccrgacaacaggacccagctggcccccgcgtgcatgccagggggacgctggtgccctggagccaacatctgcttgccgctggacgcctcctgccacccccagg

SEQ ID NO: 468891 - DNA, 201 bp, Homo sapiens
gtgggcaaatcagggccccaacaccctcccctcctcacagggaccccggagaacggcagcgagcctgagagcaggtccccggacaacaggacccagctggyccccgcgtgcatgccagggggacgctggtgccctggagccaacatctgcttgccgctggacgcctcctgccacccccaggcctgcgccaatggctgcacg

SEQ ID NO: 468892 - DNA, 201 bp, Homo sapiens
tgctcagtgacccgtccattgtgggtagcaatctgcggcagctggcacggggccaggcgggccatgggctgggcccagaggaggacggcttctccctggcyagcccctactcgcctgccaaatccttctcagcatcaggtgagctggggtgagaggagggggctctgaagctcacccttgcagctgggcccaccctatgcc

SEQ ID NO: 468893 - DNA, 201 bp, Homo sapiens
caactgctcggctagcaggaggatccgcccagagtcactccagggtgctgaccaccggccctacaccttcttcatttccccggggtgagctctgcgggccrgcctggcagggcagggcagggcatcatgggtcagcattgcctgggttactggccccatggggacggcaggcagcgaggggactggaccgggtatgggctc

SEQ ID NO: 468894 - DNA, 201 bp, Homo sapiens
ctcgtcaagacaggctggggccggggctcaggtgaggggcgcagcggggtggcagggcctcccctgctctcactggctgtgctggttgcaccctctgggartgagtctcgtcgcaggcgtcagaacaaggcagtttttgcagtgctgtgtgaagggctcgtgtgttcatcctgggaatgacctcgtgagcactcactgtcc

SEQ ID NO: 468895 - DNA, 201 bp, Homo sapiens
ggccccgccccggcagcgtctcacccctcgcagcgccccgccccctcgcagcgtcccgccccctcgcagggccccgccccggcagcgtcccgccccctcgyagggccccgccccggcagcgtcccgccccctcgcagggccccgccccggcagcgtccctcccgccctcctgaccgcgccccccacaggtgtgcctgctgc

SEQ ID NO: 468896 - DNA, 201 bp, Homo sapiens
acgcagcccttttgcgcttccggcgcctgctggtggctgagctgcagcgtggcttctttgacaagcacatctggctctccatatgggaccggccgcctcgkagccgtttcactcgcatccagagggccacctgctgcgttctcctcatctgcctcttcctgggcgccaacgccgtgtggtacggggctgttggcgactctg

SEQ ID NO: 468897 - DNA, 201 bp, Homo sapiens
cagtgagccgagattgcgccactgcactccatcctgggcaacggagcaagactccgtctccaaaaaaaaaaaaaaaaaatcccacaaagaaaagcccaggstcagagccttcacgatagaatttttctaagcagttaaggaagaattaacaccaatccttcacagactctttccaagaatacagcaggtgggaacgcttcc

SEQ ID NO: 468898 - DNA, 201 bp, Homo sapiens
cctgcatctcctcaggccaccttcctgtctgctgcccagggtctgggtctgtgcaccagacacacccagcctgcaggcccctcccacgtccttgccacctmtgacctccgacctctgcagtgccctcggccctctcccagtgggagaagctctcgcctgggcccttggcacgagctgtgcctcctcttcctctctcccagc

SEQ ID NO: 468899 - DNA, 201 bp, Homo sapiens
tgctgcccagggtctgggtctgtgcaccagacacacccagcctgcaggcccctcccacgtccttgccacctctgacctccgacctctgcagtgccctcggscctctcccagtgggagaagctctcgcctgggcccttggcacgagctgtgcctcctcttcctctctcccagcacagctgctccttcctgtctgccaggtct

SEQ ID NO: 468900 - DNA, 201 bp, Homo sapiens
cttgaggtgtggctgacgaagcggggagccctgcgtgtccaccctcatccgtcgtgcgggggtccacgggccatgaccgtgaggacgtgatgcagccctgsctccctctccacaggtcaccctccacggccaggatgtcctcatgctccctggtgacctcgttggcttgcagcacgacgctggccctggcgccctcctgca

SEQ ID NO: 468901 - DNA, 201 bp, Homo sapiens
tcctcccgacaagcttggcttcagcttccctgggagcacatcctggccctcgggcacccatcaggctgtccctgtgcacctggctcccacccttccagctyatagcaggaactggggtgaggagtgcgtggggcagcaagggcctgggaccccagaggaccctgcactctgctctgtgctcttgcctgggcttagggccgc

SEQ ID NO: 468902 - DNA, 201 bp, Homo sapiens
tcgccggctcccggccaccctggtccccaggccccgtacctctccgccaacgcctcgtcatggctgccccacttgccagcccagctggagggcacttgggsctgccctgcctgtgccctgcggctgcttgcagccacggaacagctcaccgtgctgctgggcttgaggcccaaccctggactgcggctgcctgggcgctat

SEQ ID NO: 468903 - DNA, 201 bp, Homo sapiens
cccttccagctcatagcaggaactggggtgaggagtgcgtggggcagcaagggcctgggaccccagaggaccctgcactctgctctgtgctcttgcctggscttagggccgctcggtggtcctgctgccagatgcctgggccctgctgtgtcccccatccttgcagggaaccagaacgtgggggcagggcatcagacagcg

SEQ ID NO: 468904 - DNA, 201 bp, Homo sapiens
gctgccccacttgccagcccagctggagggcacttgggcctgccctgcctgtgccctgcggctgcttgcagccacggaacagctcaccgtgctgctgggcytgaggcccaaccctggactgcggctgcctgggcgctatgaggtccgggcagaggtgggcaatggcgtgtccaggcacaacctctcctgcagctttgacgt

SEQ ID NO: 468905 - DNA, 201 bp, Homo sapiens
cccagctggagggcacttgggcctgccctgcctgtgccctgcggctgcttgcagccacggaacagctcaccgtgctgctgggcttgaggcccaaccctggrctgcggctgcctgggcgctatgaggtccgggcagaggtgggcaatggcgtgtccaggcacaacctctcctgcagctttgacgtggtctccccagtggctg

SEQ ID NO: 468906 - DNA, 201 bp, Homo sapiens
cttcccttcctctctttttccttgtgcaatttgttgaagaaactggctcctgcagcctggatttctcgctgtgtcttgggggtgccacctccatggtgtcwcctccgtggtgctgtgagtgtgtgctttgtgtttcttgtaaattggtcgttggagccgacatcccattgtcccagaggttgtcctggctggcactggcct

SEQ ID NO: 468907 - DNA, 201 bp, Homo sapiens
ggagggcacttgggcctgccctgcctgtgccctgcggctgcttgcagccacggaacagctcaccgtgctgctgggcttgaggcccaaccctggactgcggmtgcctgggcgctatgaggtccgggcagaggtgggcaatggcgtgtccaggcacaacctctcctgcagctttgacgtggtctccccagtggctgggctgcg

SEQ ID NO: 468908 - DNA, 201 bp, Homo sapiens
tgcaatttgttgaagaaactggctcctgcagcctggatttctcgctgtgtcttgggggtgccacctccatggtgtcacctccgtggtgctgtgagtgtgtsctttgtgtttcttgtaaattggtcgttggagccgacatcccattgtcccagaggttgtcctggctggcactggcctaggtgtagatgtcatcagctcagg

SEQ ID NO: 468909 - DNA, 201 bp, Homo sapiens
ggtgtcacctccgtggtgctgtgagtgtgtgctttgtgtttcttgtaaattggtcgttggagccgacatcccattgtcccagaggttgtcctggctggcastggcctaggtgtagatgtcatcagctcagggccccctgctctaaaggccacttctggtgctggttgccactcaccctggctgggggtcacctgggtctgc

SEQ ID NO: 468910 - DNA, 201 bp, Homo sapiens
cgacggccgcctctacgtgcccaccaacggctcagccttggtgctccaggtggactctggtgccaacgccacggccacggctcgctggcctgggggcagtstcagcgcccgctttgagaatgtctgccctgccctggtggccaccttcgtgcccggctgcccctgggagaccaacgataccctgttctcagtggtagcact

SEQ ID NO: 468911 - DNA, 201 bp, Homo sapiens
tctggtgccaacgccacggccacggctcgctggcctgggggcagtgtcagcgcccgctttgagaatgtctgccctgccctggtggccaccttcgtgcccgsctgcccctgggagaccaacgataccctgttctcagtggtagcactgccgtggctcagtgagggggagcacgtggtggacgtggtggtggaaaacagcgcc

SEQ ID NO: 468912 - DNA, 201 bp, Homo sapiens
agtgaggaagagccccttcccaccccagaggtagccactgtccccagcccatgtccctgttgctggatgtggtgggccggttctcaccctcacgctccccwctctggaccggccaggaggcttggtgaccctgagcccgtggtggctgctcctgctgctgtcaggcggggcctgctggtgccccagagtgggcgtctgttc

SEQ ID NO: 468913 - DNA, 201 bp, Homo sapiens
ccttgggctggggtgagggccgggagaaggagccagcctggagcctggcacgcagggagtgcatggccagaaccggtgacaggcagggctgcctgctggcrtggaagaagtgtccatggcacccccaggcctggttcacagtgggatgggcggggagccggggggctctggggtcctcggctgacctgcccccacccctgc

SEQ ID NO: 468914 - DNA, 201 bp, Homo sapiens
gtcacctccgtggtgctgtgagtgtgtgctttgtgtttcttgtaaattggtcgttggagccgacatcccattgtcccagaggttgtcctggctggcactgrcctaggtgtagatgtcatcagctcagggccccctgctctaaaggccacttctggtgctggttgccactcaccctggctgggggtcacctgggtctgctgc

SEQ ID NO: 468915 - DNA, 201 bp, Homo sapiens
acgccactgacacagagcatccaggccaatgtgacggtggcccccgagcgcctggtgcccatcattgagggtggctcataccgcgtgtggtcagacacacrggacctggtgctggatgggagcgagtcctacgaccccaacctggaggacggcgaccagacgccgctcagtttccactgggcctgtgtggcttcgacacag

SEQ ID NO: 468916 - DNA, 201 bp, Homo sapiens
gcgcccgctttgagaatgtctgccctgccctggtggccaccttcgtgcccggctgcccctgggagaccaacgataccctgttctcagtggtagcactgccrtggctcagtgagggggagcacgtggtggacgtggtggtggaaaacagcgccagccgggccaacctcagcctgcgggtgacggcggaggagcccatctgtg

SEQ ID NO: 468917 - DNA, 201 bp, Homo sapiens
cggggccttgccctttcccacctgcatccctgaatgacaggagagtgtgggagagtgtagggacagcaggcgcagaccccggggcccctgcctgggattgscgtcggggaagacaggcattctggagcgacccctaggcctgatgccttagagcgcaactgccagagacacagcttccttggggggctggccaggccacgg

SEQ ID NO: 468918 - DNA, 201 bp, Homo sapiens
agcaggcgcagaccccggggcccctgcctgggattggcgtcggggaagacaggcattctggagcgacccctaggcctgatgccttagagcgcaactgccasagacacagcttccttggggggctggccaggccacggaggggcccctggctcccatttctggtccctggatcctgagagcgaggactagggattgtcacca

SEQ ID NO: 468919 - DNA, 201 bp, Homo sapiens
cgcctcccaccggcagcgtcccgccccctcgcggggccccgccccggcagcgtctcacccctcgcagcgccccgccccctcgcagcgtcccgccccctcgyagggccccgccccggcagcgtcccgccccctcgtagggccccgccccggcagcgtcccgccccctcgcagggccccgccccggcagcgtccctcccgccc

SEQ ID NO: 468920 - DNA, 201 bp, Homo sapiens
gtgctgccgcggctggcgctgcctgtggggcactactgctttgtgtttgtcgtgtcatttggggacacgccactgacacagagcatccaggccaatgtgayggtggcccccgagcgcctggtgcccatcattgagggtggctcataccgcgtgtggtcagacacacgggacctggtgctggatgggagcgagtcctacgac

SEQ ID NO: 468921 - DNA, 201 bp, Homo sapiens
ggggtgccggaagggctggggtgcggcacccacgccacccctctccggcagggcatggtcctggggctcctgtgccgtgtatgacagcgggggctacgtgyaggagctgggcctgagcctggaggagagccgcgaccggctgcgcttcctgcagctgcacaactggctggacaacaggtgggagctccctcccctgccctc

SEQ ID NO: 468922 - DNA, 201 bp, Homo sapiens
agtcaggcctacgtggcagctgcggtcctcacacccacacatacgtctcttctcacacgcatccccccaggggccctcagtgagcattgcctgcctcctgytagggtccagctgggtccagtacaccagaacgcacactccagtgtcctctgccctgtgtatgcccttccgccgtccaagttggaaggtggcaaaccggat

SEQ ID NO: 468923 - DNA, 201 bp, Homo sapiens
gtcaggcctacgtggcagctgcggtcctcacacccacacatacgtctcttctcacacgcatccccccaggggccctcagtgagcattgcctgcctcctgcyagggtccagctgggtccagtacaccagaacgcacactccagtgtcctctgccctgtgtatgcccttccgccgtccaagttggaaggtggcaaaccggatg

SEQ ID NO: 468924 - DNA, 201 bp, Homo sapiens
cctcagtgagcattgcctgcctcctgctagggtccagctgggtccagtacaccagaacgcacactccagtgtcctctgccctgtgtatgcccttccgccgyccaagttggaaggtggcaaaccggatgagtatcctgggagggagtgagctcaccggcagtggccaggcccctgggaaacctggagtttgggagcagcatc

SEQ ID NO: 468925 - DNA, 201 bp, Homo sapiens
tggtggccaccttcgtgcccggctgcccctgggagaccaacgataccctgttctcagtggtagcactgccgtggctcagtgagggggagcacgtggtggaygtggtggtggaaaacagcgccagccgggccaacctcagcctgcgggtgacggcggaggagcccatctgtggcctccgcgccacgcccagccccgaggccc

SEQ ID NO: 468926 - DNA, 201 bp, Homo sapiens
agtgagcattgcctgcctcctgctagggtccagctgggtccagtacaccagaacgcacactccagtgtcctctgccctgtgtatgcccttccgccgtccargttggaaggtggcaaaccggatgagtatcctgggagggagtgagctcaccggcagtggccaggcccctgggaaacctggagtttgggagcagcatcctcc

SEQ ID NO: 468927 - DNA, 201 bp, Homo sapiens
cataccgcgtgtggtcagacacacgggacctggtgctggatgggagcgagtcctacgaccccaacctggaggacggcgaccagacgccgctcagtttccastgggcctgtgtggcttcgacacaggtcagtgcgtggcagggccgtcctccatgcccctcacccgtccacacccatgagcccagagaacacccagcttgcc

SEQ ID NO: 468928 - DNA, 201 bp, Homo sapiens
gccagccgggccaacctcagcctgcgggtgacggcggaggagcccatctgtggcctccgcgccacgcccagccccgaggcccgtgtactgcagggagtccyagtggtgagtatggccgaggctccaccaccagcccccaggcaggtgcctgcagacagggtgctcacacagggcgtgaggcctggcttcccagtgagggca

SEQ ID NO: 468929 - DNA, 201 bp, Homo sapiens
ttggaaggtggcaaaccggatgagtatcctgggagggagtgagctcaccggcagtggccaggcccctgggaaacctggagtttgggagcagcatcctccaygggtcccccagtccttccagcaggccaaatagacctgtgttggaggtaaccccactcccacgccaggtgctgatccggagtggccgggtgcccattgtgt

SEQ ID NO: 468930 - DNA, 201 bp, Homo sapiens
gcccagttactggggacgtcggccccgggcaggtcctgctggctggctcctcgggctacctggtgggctttaaattcctggaaagtcacggctctgacagyggctccgctaactcattccactgtctcatttcacaaaatgaatttaaaactctgctccctgacctcacacgagcccccgtgagtctctcacgccctctgc

SEQ ID NO: 468931 - DNA, 201 bp, Homo sapiens
cgctaccccttccctgcccaggagcagagacccagcggggagttaccatctgaacctctccagccacttccgctggtcggcgctgcaggtgtccgtgggcytgtacacgtccctgtgccagtacttcagcgaggaggacatggtgtggcggacagaggggctgctgcccctggaggagacctcgccccgccaggccgtctg

SEQ ID NO: 468932 - DNA, 201 bp, Homo sapiens
aaaccggatgagtatcctgggagggagtgagctcaccggcagtggccaggcccctgggaaacctggagtttgggagcagcatcctccatgggtcccccagwccttccagcaggccaaatagacctgtgttggaggtaaccccactcccacgccaggtgctgatccggagtggccgggtgcccattgtgtccttggagtgtg

SEQ ID NO: 468933 - DNA, 201 bp, Homo sapiens
gctggcccgtcctcagtgcctggtgggccccgtcccagcatggggagggggtctcccgcgctgtctcctgggccgggctctgctttaaaactggatggggytctcaggccacgtcgccccttgttctcggcctgcagagggaggctggcgggtgtgcgctgaactttgggccccgcgggagcagcacggtcaccattccac

SEQ ID NO: 468934 - DNA, 201 bp, Homo sapiens
ccccgggcaggtcctgctggctggctcctcgggctacctggtgggctttaaattcctggaaagtcacggctctgacagtggctccgctaactcattccacygtctcatttcacaaaatgaatttaaaactctgctccctgacctcacacgagcccccgtgagtctctcacgccctctgctgtgttctcgcctggctaaagc

SEQ ID NO: 468935 - DNA, 201 bp, Homo sapiens
gctggggtggcctctggtccccttctttgttggttcccttctcaagctcttgccctggccccgggccccaccgggcagcctgtgtgtgcgtctctcctgcsccgggtaggctcctgtgggagcggagctccggtgggaggagcagggctggaggctggcaggggctgggcgggtgttcagggatggaggccgccccggctt

SEQ ID NO: 468936 - DNA, 201 bp, Homo sapiens
agtttgggagcagcatcctccatgggtcccccagtccttccagcaggccaaatagacctgtgttggaggtaaccccactcccacgccaggtgctgatccgsagtggccgggtgcccattgtgtccttggagtgtgtgtcctgcaaggcacaggccgtgtacgaagtgagccgcagctcctacgtgtacttggagggccgct

SEQ ID NO: 468937 - DNA, 201 bp, Homo sapiens
ggctacctggtgggctttaaattcctggaaagtcacggctctgacagtggctccgctaactcattccactgtctcatttcacaaaatgaatttaaaactcygctccctgacctcacacgagcccccgtgagtctctcacgccctctgctgtgttctcgcctggctaaagcgagtggcttttgaggtggagtctgaacccct

SEQ ID NO: 468938 - DNA, 201 bp, Homo sapiens
gccccgggccccaccgggcagcctgtgtgtgcgtctctcctgcgccgggtaggctcctgtgggagcggagctccggtgggaggagcagggctggaggctgrcaggggctgggcgggtgttcagggatggaggccgccccggcttggggctggctgccgggtggtcattgctgggaagagcaagtctaggcggaggcacctg

SEQ ID NO: 468939 - DNA, 201 bp, Homo sapiens
gtccttccagcaggccaaatagacctgtgttggaggtaaccccactcccacgccaggtgctgatccggagtggccgggtgcccattgtgtccttggagtgwgtgtcctgcaaggcacaggccgtgtacgaagtgagccgcagctcctacgtgtacttggagggccgctgcctcaattgcagcagcggctccaagcgagggg

SEQ ID NO: 468940 - DNA, 201 bp, Homo sapiens
tccacgtacagtcttcaagccacatatgctctagtggcaaaagctacacagtcccctagcaataccaacagtgaggaagagccccttcccaccccagaggyagccactgtccccagcccatgtccctgttgctggatgtggtgggccggttctcaccctcacgctcccctctctggaccggccaggaggcttggtgaccct

SEQ ID NO: 468941 - DNA, 201 bp, Homo sapiens
tcagaaatggcgtgacctgtgcagcctgtcctgggttctgtaagccagtgtaggtgcctcccctcactgctccgagctctctgggtgaggagctggggcargagcgccgggagggtctgagaagactcagagagaggtggactctttgtagctggtactaggtttgctttacagatggggaaactgaggcacagagaggtt

SEQ ID NO: 468942 - DNA, 201 bp, Homo sapiens
ctctcctgcgccgggtaggctcctgtgggagcggagctccggtgggaggagcagggctggaggctggcaggggctgggcgggtgttcagggatggaggccsccccggcttggggctggctgccgggtggtcattgctgggaagagcaagtctaggcggaggcacctgctgggtcactcgtggggagggtgacacctgggga

SEQ ID NO: 468943 - DNA, 201 bp, Homo sapiens
ggtcattgctgggaagagcaagtctaggcggaggcacctgctgggtcactcgtggggagggtgacacctggggaagtagaggcccgtggcaggaggtgagrcctcggggtcctggggagcaggggggtggtgtgcagacctgcggagccatagtccctgtgccaggagcactactgggagtgcgtgggaccaggaggggtg

SEQ ID NO: 468944 - DNA, 201 bp, Homo sapiens
gccttagagcgcaactgccagagacacagcttccttggggggctggccaggccacggaggggcccctggctcccatttctggtccctggatcctgagagcraggactagggattgtcaccaaggcctccatgagccctcagcagaaggagggccaccctcgagggctccgttatcactggagcccgcgttcaaccaacacg

SEQ ID NO: 468945 - DNA, 201 bp, Homo sapiens
cagtgagtgtcccagcccgggcttggctcccatggcatgcagagccccgggcacctcctctcctctgtgccccgcgtgggactctccagcccgacgggagktgtgtccaggaggcgacaggctaagggcagagtcctccacagagcccaggctgacaccattccccccgcagaggtacagccccgtggtggaggccggctc

SEQ ID NO: 468946 - DNA, 201 bp, Homo sapiens
attctccaaggacagagatggatgatggggagggggctggcctggaaggacccccagtgcaggtgacattgaagccaggtttcaaagctcccacagggagytgcccagagagagtccccaaggggcaaggtgactcgggggcaggggtagggcctctgtcaggagagcctaggagaggcctgtgtcttctaggaagagccc

SEQ ID NO: 468947 - DNA, 201 bp, Homo sapiens
caggctaagggcagagtcctccacagagcccaggctgacaccattccccccgcagaggtacagccccgtggtggaggccggctcggacatggtcttccggyggaccatcaacgacaagcagtccctgaccttccagaacgtggtcttcaatgtcatttatcagagcgcggcggtcttcaagctctcagtaggtgggcgggg

SEQ ID NO: 468948 - DNA, 201 bp, Homo sapiens
tggaccatcaacgacaagcagtccctgaccttccagaacgtggtcttcaatgtcatttatcagagcgcggcggtcttcaagctctcagtaggtgggcgggrgtggggaggggaggggatggggcggggcagggcgggggcgggctccaccttcacctctgccttctgctctgcttcatgctgcccgaggacgctgccatgg

SEQ ID NO: 468949 - DNA, 201 bp, Homo sapiens
ctggctcaagcgatccttcctcctcagccccccgagtagctggaactacagttacacactaccatgcctggctgattctttttttccttgtagagatgggrtcttgctatgctgtccatcctggtctcaaactcctggccttcccaaagcactgggtttacaggcataagccaccacacccagtttccttttcttcttttt

SEQ ID NO: 468950 - DNA, 201 bp, Homo sapiens
gtagggcctctgtcaggagagcctaggagaggcctgtgtcttctaggaagagccctggcagccgagcggaggcagtggtgaggacctgcatcctgcatgtscagctggcctcacccggggtccctgagccgggtcttacgtggctcccgcactcgggcgttcagaacgtgcctgcgtgagaaacggtagtttctttattag

SEQ ID NO: 468951 - DNA, 201 bp, Homo sapiens
gggcgggggcgggctccaccttcacctctgccttctgctctgcttcatgctgcccgaggacgctgccatggctgtgggtgagtggagggagggacgccaakcagggccaggcctctcacctgccacctgggctcactgacgcctgtccctgcagctgacggcctccaaccacgtgagcaacgtcaccgtgaactacaacgt

SEQ ID NO: 468952 - DNA, 201 bp, Homo sapiens
atcctggtctcaaactcctggccttcccaaagcactgggtttacaggcataagccaccacacccagtttccttttcttctttttaactggaatagttgackttttctttattagctgtgtgtcaggagggtatttttggcctttagtatgtcgtgtaagttgctagtgcttttctgagattgtagtttgttttctaatttt

SEQ ID NO: 468953 - DNA, 201 bp, Homo sapiens
tctaggaagagccctggcagccgagcggaggcagtggtgaggacctgcatcctgcatgtccagctggcctcacccggggtccctgagccgggtcttacgtkgctcccgcactcgggcgttcagaacgtgcctgcgtgagaaacggtagtttctttattagacgcggatgcaaactcgccaaacttgtggacaaaaatgtgg

SEQ ID NO: 468954 - DNA, 201 bp, Homo sapiens
caccacacccagtttccttttcttctttttaactggaatagttgacgttttctttattagctgtgtgtcaggagggtatttttggcctttagtatgtcgtstaagttgctagtgcttttctgagattgtagtttgttttctaattttatttatattttgcgtagaagttgtgtattttagatggagttaggtcggctggtc

SEQ ID NO: 468955 - DNA, 201 bp, Homo sapiens
tgcatcctgcatgtccagctggcctcacccggggtccctgagccgggtcttacgtggctcccgcactcgggcgttcagaacgtgcctgcgtgagaaacggyagtttctttattagacgcggatgcaaactcgccaaacttgtggacaaaaatgtggacaagaagtcacacgctcactcctgtacgcgattgccggcagggg

SEQ ID NO: 468956 - DNA, 201 bp, Homo sapiens
atgtccagctggcctcacccggggtccctgagccgggtcttacgtggctcccgcactcgggcgttcagaacgtgcctgcgtgagaaacggtagtttctttmttagacgcggatgcaaactcgccaaacttgtggacaaaaatgtggacaagaagtcacacgctcactcctgtacgcgattgccggcaggggtgggggaagg

SEQ ID NO: 468957 - DNA, 201 bp, Homo sapiens
ttgggaccccaggcgcatgccgccatgcctggctaatgtgtatttttttgtagatacggggtctcactgtgttgcccagggtggtttcaaaatcctgggcycaggcgatccttccgtctcagctcccacggtgctgtgttaccggcgtgtgccccagtgcctggccgtcttggaggtcttgtttctctgggtttatgcctc

SEQ ID NO: 468958 - DNA, 201 bp, Homo sapiens
gctggcctcacccggggtccctgagccgggtcttacgtggctcccgcactcgggcgttcagaacgtgcctgcgtgagaaacggtagtttctttattagacrcggatgcaaactcgccaaacttgtggacaaaaatgtggacaagaagtcacacgctcactcctgtacgcgattgccggcaggggtgggggaagggatgggg

SEQ ID NO: 468959 - DNA, 201 bp, Homo sapiens
cacacgctcactcctgtacgcgattgccggcaggggtgggggaagggatggggaggctttggttgtgtctgcagcagttgggaatgtggggcacccgagckcccactgcagaggcgactgtggagacagagagcacctgcaggtcatccatgcagtatcggcttgcatccagatcatacagggaacactatgattcaacaa

SEQ ID NO: 468960 - DNA, 201 bp, Homo sapiens
aagaccctgtctcaaaaaaaaaaaaaaaaaaaaaaaaaaatcacaggatctgaacagagatttctccaaagaagacgcacagatggccaacagcgtgtgaraagatggtcggcctcattagtcatgagggaaacgtaaatcaaaaccactgtccagccgggcgcggtgcctcacgcctgtaatcccagcactttaggagag

SEQ ID NO: 468961 - DNA, 201 bp, Homo sapiens
tgcagagtcgaggagggcctgggtgggctcggctctatcctgagaaggcacagcttgcacgtgacctcctgggcccggcggctgtgtcctcacaggagccracagcggatgtaaactacatcgtcatgctgacatgtgctgtgtgcctggtgacctacatggtcatggccgccatcctgcacaagctggaccagttggatg

SEQ ID NO: 468962 - DNA, 201 bp, Homo sapiens
gtgagctggggtgagaggagggggctctgaagctcacccttgcagctgggcccaccctatgcctcctgtacctctagatgaagacctgatccagcaggtcmttgccgagggggtcagcagcccagcccctacccaagacacccacatggaaacggacctgctcagcagcctgtgagtgtccggctctcgggggagggggga

SEQ ID NO: 468963 - DNA, 201 bp, Homo sapiens
aaatggcggatgacgccggtgcagcgggggggcccgggggccctggtggccctgggatggggaaccgcggtggcttccgcggaggtttcggcagtggcatycggggccggggtcgcggccgtggacggggccggggccgaggccgcggagctcgcggaggcaaggccgaggataaggaggtaggtatcagccacgctcggg

SEQ ID NO: 468964 - DNA, 201 bp, Homo sapiens
tcggactcctgaccttgtgatccgcccacctcagtctcccaaagtgctgggattacaggcttgagccaccgcccccggccgtgactttggttcttgaatakcgtaatggtattaagtttttttttaatgctctccctacaattttcttgtttgtttcaggaatcagagatcattgatttcttcctgggggcctctctcaag

SEQ ID NO: 468965 - DNA, 201 bp, Homo sapiens
actggcgccttttctccctttagtggatgcccgtcaccaagttgggccgcttggtcaaggacatgaagatcaagtccctggaggagatctatctcttctcyctgcccattaaggtacgcgtcggtcgttggggcgttgagcaagtgcgaccccggagtcatttgggctggggttggaggattagcatctgccattgactcg

SEQ ID NO: 468966 - DNA, 201 bp, Homo sapiens
gccttttctccctttagtggatgcccgtcaccaagttgggccgcttggtcaaggacatgaagatcaagtccctggaggagatctatctcttctccctgccyattaaggtacgcgtcggtcgttggggcgttgagcaagtgcgaccccggagtcatttgggctggggttggaggattagcatctgccattgactcgcattaa

SEQ ID NO: 468967 - DNA, 201 bp, Homo sapiens
ggccggggtcgcggccgtggacggggccggggccgaggccgcggagctcgcggaggcaaggccgaggataaggaggtaggtatcagccacgctcggggtcsggcccctgggcggcgccggagagcggtcctggtcactggcgccttttctccctttagtggatgcccgtcaccaagttgggccgcttggtcaaggacatga

SEQ ID NO: 468968 - DNA, 201 bp, Homo sapiens
cgattctcctgcctcagcctcctgaatagctggggttacaggcgcactccaccatgcccggctaattttttgtgtctttaatagaggtggggtttcaccaygtggccaggctggtatcggactcctgaccttgtgatccgcccacctcagtctcccaaagtgctgggattacaggcttgagccaccgcccccggccgtgac

SEQ ID NO: 468969 - DNA, 201 bp, Homo sapiens
ccaggttcaagcgattctcctgcctcagcctcctgaatagctggggttacaggcgcactccaccatgcccggctaattttttgtgtctttaatagaggtgsggtttcaccatgtggccaggctggtatcggactcctgaccttgtgatccgcccacctcagtctcccaaagtgctgggattacaggcttgagccaccgccc

SEQ ID NO: 468970 - DNA, 201 bp, Homo sapiens
tcgcggggggctgccagatgcgtaggccacactgactagttccttcttgtcgcttttcccagcaaatggcggatgacgccggtgcagcgggggggcccggrggccctggtggccctgggatggggaaccgcggtggcttccgcggaggtttcggcagtggcatccggggccggggtcgcggccgtggacggggccggggcc

SEQ ID NO: 468971 - DNA, 201 bp, Homo sapiens
tcacaggttgtcttataggagctcggcccgctcccgcttggggcggggctgcggagatctcgcggcgcttggcgtgctataaaagctgcttcccagtaggyctcgttcttcttttccgacaaaacacgtgagtcctgttggtcgctgcagcgggcctctgcgtgggcggcgggaatccgcggacatcgggtcgggtctagg

SEQ ID NO: 468972 - DNA, 201 bp, Homo sapiens
ggagaggattccacttagaggttggatggatacctgagcgaagccagagccacaaaaggcatttcagcgcatcttcccacattcgcagcgaattcatttcsaaagaactgaaagagaagcagcgcttggttcatgccatccgagaggatgatgaagttcaggttgtgggaggacactgtaagggttagcaaactgtcatag

SEQ ID NO: 468973 - DNA, 201 bp, Homo sapiens
ggactcctgaccttgtgatccgcccacctcagtctcccaaagtgctgggattacaggcttgagccaccgcccccggccgtgactttggttcttgaatatcrtaatggtattaagtttttttttaatgctctccctacaattttcttgtttgtttcaggaatcagagatcattgatttcttcctgggggcctctctcaagga

SEQ ID NO: 468974 - DNA, 201 bp, Homo sapiens; identical to SEQ ID NO: 197097

SEQ ID NO: 468975 - DNA, 201 bp, Homo sapiens; identical to SEQ ID NO: 197091

SEQ ID NO: 468976 - DNA, 201 bp, Homo sapiens; identical to SEQ ID NO: 197098

SEQ ID NO: 468977 - DNA, 201 bp, Homo sapiens; identical to SEQ ID NO: 197111

SEQ ID NO: 468978 - DNA, 201 bp, Homo sapiens; identical to SEQ ID NO: 197120

SEQ ID NO: 468979 - DNA, 201 bp, Homo sapiens
gacctgtaaccacacagggttttcctttcaagcacatagatggcacacacgtaatcggttagtactatccaatatttgttgaataatttaactatctgcctttctttctttctttctttttcttttcttttcttttctttctttcgttctttctttctttttcttttctttctttctttctttctttcttttgaggcagag

SEQ ID NO: 468980 - DNA, 201 bp, Homo sapiens
acctgtaaccacacagggttttcctttcaagcacatagatggcacacacgtaatcggttagtactatccaatatttgttgaataatttaactatctgcctttctttctttctttctttttcttttcttttcttttctttctttcgttctttctttctttttcttttctttctttctttctttctttcttttgaggcagagt

SEQ ID NO: 468981 - DNA, 201 bp, Homo sapiens
cctgtaaccacacagggttttcctttcaagcacatagatggcacacacgtaatcggttagtactatccaatatttgttgaataatttaactatctgcctttctttctttctttctttttcttttcttttcttttctttctttcgttctttctttctttttcttttctttctttctttctttctttcttttgaggcagagtc

SEQ ID NO: 468982 - DNA, 201 bp, Homo sapiens
tgttacccaggctggagtgcaatggcatggactcagctcactgcaacctccacctcccagtttcaagcgattctcctgcctcagcctcccgagtagctggractacaggcgtgcaccaccacacccagctaattttgtatttttagtagagatggggtttcaccatgttggtcaggctggtctgaaactcctgacctcagg

SEQ ID NO: 468983 - DNA, 201 bp, Homo sapiens
aacttaaacataagttagtaatactcttagttggatgcaccgatttcagtgattttcagatgtttgtggaaggcacaccagttacaactcatgtgtcagtsagtattccttgttgtgaggtttcctgttctacactccacctttgtcttttctcatgtcaaatagagagcaatttaaaatacagtttgatttaaaaaaaaa

SEQ ID NO: 468984 - DNA, 201 bp, Homo sapiens
ttcgccacgcgtggcagacagacccgccactatccgagacaaagcatccagtgtttaccccaccgagtcattcaggaactgaacagcactatttaataaarctaaatataaaccacaagaggtagaaaataggagggatggggaaaaataaggttttcagaactattcatcttataaaatcaaaagtgatgtgttaactcc

SEQ ID NO: 468985 - DNA, 201 bp, Homo sapiens
gcctccatttatttaacaaatttcgactgagcacctgcgacagatgagttgatgagtcaggtacgtgctttatgtgggaacggaacagccaagagctcccrtgcacgaagttttacagctcaggattaggtgcaggaatgagaactgcaggcaggcctaagtctaatgcacaatctggcctaatgacagggcagcagaata

SEQ ID NO: 468986 - DNA, 201 bp, Homo sapiens
gttttatgtttcactcagtattctcagaaaatctctttctgtagaacattctgtccctgatatcaggttcctaagaacctactaagcctccttcgtagttkcactgacttcacattcttgtgaaaaggtcatgctaccttgacatttcctctgtacagatttcagggaaaaacataatttgtcctctgtgattgcatttct

SEQ ID NO: 468987 - DNA, 201 bp, Homo sapiens
gaccttatctcaataataatatatgaataatagttgcagatactgacgcctttgtatgtcaggccttggggcaccgagggatttgtgtgcattgttcatgrtgttccacagcacctttcagagttggtatgatgcctgtttcatggaataaaaactgaagcctagagtttgtctgtcactgcctctgccagttgcttgcta

SEQ ID NO: 468988 - DNA, 201 bp, Homo sapiens
taattacctgtggcaatattggcttcataattcatcagctcaaaataaaaatatggctcttgtctcacgttctttcctgtctctattgatgttttgctacrgtgcatatggtgtagttgagtgttagtcaagatgaattttaaatgatatttagtcttaacgatttttaaatccatgggtttctacactttaggtatcaga

SEQ ID NO: 468989 - DNA, 201 bp, Homo sapiens
tttcctccttccacataagacatttacattctctagcggtttaagacattaatcagtaattcctaacacagatgtgcatcagtatcccctagaccataaargcacagttcttaaacctcactccaaacctgctgaatcagacttttagtgcagtgtgtccaggaatgcatgttttaaacatgtttctcatgtaattcttaa

SEQ ID NO: 468990 - DNA, 201 bp, Homo sapiens
aagcacacatgataaaagtttgctacataacctcattagaaaagagttatatgtgcctaagtaaaaacaagattttaaaattatgtgtatttatctttttstttctcccaggctaaagaattacctccaaagccattgtcaagaccacagcagtcatctgcaccagtccagctgaactctggctctcaaagtaaatatttt

SEQ ID NO: 468991 - DNA, 201 bp, Homo sapiens
acagcacggacttggtagcctgttccgccatcttcccgcgcgcagaggcgccgagacaccgcggcgttccgcacgccgacgcggcgcaggcgcactgccascctcttgccccgcgcgcctgcgcagtcccgcaccaacgccaacagggcagcgcgtgtgagagccacgcctgcgcaatcggctccagtgcgcctgcggagg

SEQ ID NO: 468992 - DNA, 201 bp, Homo sapiens
gaaatgttatctatattataggttttgttggtcatttggattgcagcatatttctacacttaccatttttcttttgatcttgtttttcataattttactcyatgaaagttttaaattttatctaaaaataagtctatcatttagtttttatagatttggatactttggtcatgattaaggtcttcccacctcctacacaag

SEQ ID NO: 468993 - DNA, 201 bp, Homo sapiens
gttgctggtccatttgatgaagaagtccagagcggcttgtgacttcagtctggctttgcagagcccaggtgctctctccaccttctgccaggttcccctaygaaggctttgctctcagactctccccttgtggagacaaaaatcccacagcaagtggaaacagaagtgccttggaaaaagttattctggcagctcctatac

SEQ ID NO: 468994 - DNA, 201 bp, Homo sapiens
taaaaataaaatacagtggtctgtccctcagtagactcaggagctggttcaggacaccctcccacccctacccagtataccaaaacgtgcatactcaggtyctatagttggcccctgagaatgtggagcccaagtataggaaaagtcagccctccatacagatgggtttctcattcagacaacacggtattttccatctgt

SEQ ID NO: 468995 - DNA, 201 bp, Homo sapiens
tgatttaaagcgcaatcaaatgatgatgatcctatcaacttagtgatttaaaatatttgctcagcaagggcaggatctggcaattttgtgtattttgtatratatatactaatcagttttcaaaatcaccactctcctcttttttggcaggtaacagaaatgaatataagctctatcctggactttccagctatcatgaga

SEQ ID NO: 468996 - DNA, 201 bp, Homo sapiens
tttaaaaaataagccaatttatattggacatttgggttacatgtgcatataaaaacagtcatattcctcaactgaccatagactagcatacaagtgtcctyctttctggatgtaattaagtttcagaggcaaagtggttcagatgggagccaatgggctgacctcctcatgaagtaaactcgacaaaaatcatgaagtatt

SEQ ID NO: 468997 - DNA, 201 bp, Homo sapiens
caccactctccagaccacgatgtcgacatcagggccatccttactttagaccagcaagtgagaaatccaggttccccagggctccctcaggtttgataatyccctagaattactccccaaactcaggaaagcagaacacttaccattacaatttcattatagtaacagcaacaaaaacaaaaacaaacaaacaaacaaaca

SEQ ID NO: 468998 - DNA, 201 bp, Homo sapiens
aatatttgctcagcaagggcaggatctggcaattttgtgtattttgtataatatatactaatcagttttcaaaatcaccactctcctcttttttggcaggyaacagaaatgaatataagctctatcctggactttccagctatcatgagagagttggtaaatcagtaaatctatatgttataaatgattcatattcatttt

SEQ ID NO: 468999 - DNA, 201 bp, Homo sapiens
tttatgttttaaggatttcatgttcaaatatccaatctattaatatttaatcccctcagttttctgtatgtctgagtaattccaacaagagcaagactcastgggtttgcaaactttcttcctatgaagacagcctggcacttccacatggtacagtggggaaactactcactttcatctggcaacagcttatcctccaga

SEQ ID NO: 469000 - DNA, 201 bp, Homo sapiens
gatttaccatagtaaaaatggtccttcaatctgtcttacttaaatattcttcagaggtttccctgaagagaattgagcaattatttgcaaatgtgagtggkacacaaattgagggcaaagttaaacaatcataaaatagcctgtttattttttcacattgaatactttcgtcattggagtcacaaagctatatgctgctgg

SEQ ID NO: 469001 - DNA, 201 bp, Homo sapiens
tattggtgacataatttcctaagatagtccctgatttgctgggaaatattccaaataaggttgtatccattatttcccaagcgattttgtaatcatgaaawtgcttaactaggagaaaccttaagacttctaagcagtctcagaattttagatgtagatgtattttaaacaaatctaattggatccaatttaaaaagctga

SEQ ID NO: 469002 - DNA, 201 bp, Homo sapiens
atgcagaggcagtgcttatgaatatttaggtagcagcagaagggttgtgtgcatgaccccaacaccggcaggaggcatggcgggtcctgcccatgcatccyccactccatctttcccagtagaagaaactgctgctaatgagaggaatggcactgggggagggaggccagtgggtaatggcgggttgagactgcattttgc

SEQ ID NO: 469003 - DNA, 201 bp, Homo sapiens
ggaatatttatagcagttttatttgtaatagccaaaagctggaaacaacccaattgtctatcaacagtgactggaaggacaaattgtgctatgtccacacrttagaataccagttggcagtcaaaaaggaagagctgatctgtgcagcaatttgagtctcagtaatttcatggtgagtaaaataagctagacagaaaagaa

SEQ ID NO: 469004 - DNA, 201 bp, Homo sapiens
gagctcattttcctaattttcccctcctccccaatatacaattctagttgaaacagtatgatgtacttgtatccattctataatttttcaatgctaattayggtaacattacatgtatacatttattactttgagatataataattttaccatttcatgctttccatttgttgagattttatgtctttcaataagactttg

SEQ ID NO: 469005 - DNA, 201 bp, Homo sapiens
gcccggtaccccacccagggcagagcacagctcctttcacagtgcatggcagcgactgctcattaacgtgtagaatttaatcgtgtacttagaacgtttarcttaacttctgttgtttctagactatgtcaaaattttattttggtgacattcttttatccttattccttaaaattgttaactaaaagtaaatataggaca

SEQ ID NO: 469006 - DNA, 201 bp, Homo sapiens
ggaggctggattccaagatcaaggttccaggagactcagtgtctggcaaggtctcggtttctgcctcagagatggtgccatctggctgtgtcctcacaagkaggaaggtgcaagaagctcccctcaggctctgtctgtaagacactgatcccattcatgagggggaaacgtaatgacctaatcagcccccagagaccccac

SEQ ID NO: 469007 - DNA, 201 bp, Homo sapiens
aacacaaaacacacaacttcaagtccaaggacggtacctgccgggcaacgtggctcatgggaatgccgtgcctcttcatgcagctctgccctcggtagtcwggggggttccctatctcatacccggaagttgccgcgctgtctaccctccactgcaggggaagaaacatggaattttttttttttttttgcaatttcctgc

SEQ ID NO: 469008 - DNA, 201 bp, Homo sapiens
cccactgaaacacaaaacacacaacttcaagtccaaggacggtacctgccgggcaacgtggctcatgggaatgccgtgcctcttcatgcagctctgccctyggtagtcaggggggttccctatctcatacccggaagttgccgcgctgtctaccctccactgcaggggaagaaacatggaattttttttttttttttgcaa

SEQ ID NO: 469009 - DNA, 201 bp, Homo sapiens
tcttttactatattacacaaattatagtaaaatttgtgtaataaaagatgtcgataaggaagcaactcatgatctgggaaagcaaaggaggaaatatttasgtttgactttataaaataaaaaggctttccaggcaaaatgcataatgggcacccagcgatgaaggctcagtaagcatgtgaagtgctaccgaacaacgaa

SEQ ID NO: 469010 - DNA, 201 bp, Homo sapiens
tgttatcattgttgtcgtccttattatgcatttttgattttataaatgagactgcaagtgtataaatgcatggtagctaagatggctgtggctcccagaayattccctgatgttcacaagcactcttttaattcacttcttcctattatctaacgtgtctgggagacaagagggaggagaacagagttcctggaggttctt

SEQ ID NO: 469011 - DNA, 201 bp, Homo sapiens
aattgagggcaaagttaaacaatcataaaatagcctgtttattttttcacattgaatactttcgtcattggagtcacaaagctatatgctgctggatatawaactgtcggagaattaaacatttcatgtaaataaaataccaaaaattaggtactcaagcatattttaaaaatttatatcatgcagataaaaatatgttga

SEQ ID NO: 469012 - DNA, 201 bp, Homo sapiens
tgaatgcctagctttttagtaactcagtggggtttgcttcccggtaaccaggaaggtttttcttcatggaaggaatcattacttgactcaccttttattgrtgaattctttgtgggcattaaacttctccttgtgaaaattatctctaatatttacattaaagaggaactttaagtcatttggagtttttcaaagaaaaaa

SEQ ID NO: 469013 - DNA, 201 bp, Homo sapiens
ttgttaaagtgctcctaaacttgacaaggtcagctgactggctgcacttgcttgggaagggaggggatccctacagagagacagagctgagggaagctggytgaaaaagagctgaggccacagatcccccaaagaatgccttggtaatgtgacattgggaactagagttcctttctctattagaaacttcctataaacagc

SEQ ID NO: 469014 - DNA, 201 bp, Homo sapiens
tgagggcagggaccaaaccaggtgtgtgatctcgccttctttctctttcttagttcataatatatttatttctctaattattcctcataaaatatattcckgaaactgcttagaaccaattcagttatcagggattacccagaaccatagcatcagatgctgttatttgtacagtctggaaacccagtgaggcaggtcacc

SEQ ID NO: 469015 - DNA, 201 bp, Homo sapiens
tgagggctgatatgcaacatttaacaccaaccatcagcggatgttttgaagggtaaggttttattttcctgacacaaatgccacagaatccagtcactttmgacagcaggatgcaactgtaatttcaccaattttatacttactatgtgtcttgtatatgtgggcactgccagatgctggctacaccagcacaagaaagac

SEQ ID NO: 469016 - DNA, 201 bp, Homo sapiens
cctgcccctcccacagtgttcctcttcagtaaatggaaattccatccttggatttccttggtcctcagggtgacttcagagccaactttcgttcttctatstcatgccctctattaaatccaccagagattctgttgcctttcagacactcgctgacccaatatttgcgctcccccatgcccaccctgaagcgagctgccc

SEQ ID NO: 469017 - DNA, 201 bp, Homo sapiens
gaattttaataaccttgaatttatagcctatttattctgcttaagcacgagaggtgttaaaacagtttttgccctcagaaatttacaatggaaacaattaytatgttaccgttagataatcaactctctcgaatccttctgatctcttaaatctgtgacaaaattctagctgaagactagacctacagctaagttgttcta

SEQ ID NO: 469018 - DNA, 201 bp, Homo sapiens
tgtgtcagccaggatagtctcgatctcctgacctcgtgatccgcctgcctcggcctcccaaagtgctgggattacaggcgtgagccaccgctccaggccatttttttttttttacaaaacttgtacacatgctattatggaatcattttcatagccatggaaggtggttgtcatcgctctcattttatccgtaaaatagct

SEQ ID NO: 469019 - DNA, 201 bp, Homo sapiens
tctgcctttttatttggttgtttaattcattcacatttaatagattattgatatcattggatttatatcagccattttacttttttctatatctcatgccktttttgtccctctgtttccactttactgttttcaattaagtgaacattttgtactatggcattttgattccttttatgattttttaactctatttttgag

SEQ ID NO: 469020 - DNA, 201 bp, Homo sapiens
tgagggtagagccacaaatttcaattcttacatttccatttgcaaagtgactagagaaaaagaaatcagcttaaatgaggtattaagtaatgtttagagtygtaggtattaactagaatataaatccttagaaattgtctttataccttcaaaaattatactatgcatttatcatagaaatgtgattacaaagaagtctga

SEQ ID NO: 469021 - DNA, 201 bp, Homo sapiens
gtaagtcaactgaacaaagagctgggctttgggccctggaacgtgattacacaccgactgagaaatgcaggacctcagggtggggtctagtcaggctggcygcagcagggcacgaacctgcctcagtgggccttctccaagaacgctctgcagcacctgacacactgctggtacaccgtctcaaagtcagagtcattcccc

SEQ ID NO: 469022 - DNA, 201 bp, Homo sapiens
acgctcatagttctcttgtgaacacttcaaacatcgctaagcatttgatctggccatgtatatggtagctgtgttttaatttgagaatcttgagggtagasccacaaatttcaattcttacatttccatttgcaaagtgactagagaaaaagaaatcagcttaaatgaggtattaagtaatgtttagagtcgtaggtatta

SEQ ID NO: 469023 - DNA, 201 bp, Homo sapiens
tgacccactgaaacacaaaacacacaacttcaagtccaaggacggtacctgccgggcaacgtggctcatgggaatgccgtgcctcttcatgcagctctgcyctcggtagtcaggggggttccctatctcatacccggaagttgccgcgctgtctaccctccactgcaggggaagaaacatggaattttttttttttttttg

SEQ ID NO: 469024 - DNA, 201 bp, Homo sapiens
caatgacccactgaaacacaaaacacacaacttcaagtccaaggacggtacctgccgggcaacgtggctcatgggaatgccgtgcctcttcatgcagctcwgccctcggtagtcaggggggttccctatctcatacccggaagttgccgcgctgtctaccctccactgcaggggaagaaacatggaatttttttttttttt

SEQ ID NO: 469025 - DNA, 201 bp, Homo sapiens
accgctgtcaatgacccactgaaacacaaaacacacaacttcaagtccaaggacggtacctgccgggcaacgtggctcatgggaatgccgtgcctcttcakgcagctctgccctcggtagtcaggggggttccctatctcatacccggaagttgccgcgctgtctaccctccactgcaggggaagaaacatggaatttttt

SEQ ID NO: 469026 - DNA, 201 bp, Homo sapiens
ctgtacaaggagctgcgggaagagaaatgctggcagaagcctctcctgtggatatactgcagccctgaccaggggctgggggaaggaagtctgtgttcttrcaaacccccttccccaagaggagcttccatcaggctgacctgcagcggggcacaggttatagctcaaatgtcaccaactctctcttccttaccaatattt

SEQ ID NO: 469027 - DNA, 201 bp, Homo sapiens
aatgtgtcttcattttcttcacttgccatatgcccttaggacaatttccagaagtgttaatttttaaaataatttttaccagttacggttattttgctgtggagagggtctgtgtcctctttatgccaccactgcagtgtcattctgatttgtagatacattctacagtgggatggagattcaactgtaattgttaagttt

SEQ ID NO: 469028 - DNA, 201 bp, Homo sapiens
caacaaacttgcaatatcagcaggatgattactatggcctaaatgtttaataaaaattatgcaggaaggaacagaagacagagcaccgctcagccccagckcacagtcaggctctctcattataaattacctagcttttatgtgcattttaataagtaaattccaaagtcaggcaagtctttcaacaccgtgcaaccagaa

SEQ ID NO: 469029 - DNA, 201 bp, Homo sapiens
ataacttatgtaacaaatgcacaataaaggatttccacttgcagctataaatgaaacagcttgtggcaaatcacccctactactaaaaacaactagaaacsccatataaaaaaccagtgctgcagagacagtcgggctttgtggccaccaggccgctctggctgtgctgctctagcacaaaagcagccgcgaactacaggt

SEQ ID NO: 469030 - DNA, 201 bp, Homo sapiens
cattccccaccatgtataccatccaccatgtacaatcctaaccatatatactccccaccatatatacactccccataaccttcccaccataatagtccccmctatagttgcttcccgccataggcatttcctaccatgcacatttcccactagacaccatatgcattctccatcatgtatgctacccaccatatgcattcc

SEQ ID NO: 469031 - DNA, 201 bp, Homo sapiens
ttggccttacttaactgtaccacgatgtaccaagcagaagcggaacataagaaccagtgtagctacaaggtcatgggtagtactttgtattttccgagtgkgtatgtgggaagcattatggaaggcaaatttgttatctaaaaatacatacaagatacaggttatacaatcactggtgaaaatgcttaactttgcataaga

SEQ ID NO: 469032 - DNA, 201 bp, Homo sapiens
ccatcatttctcatgtgctgtatctctcaagttttgaatatcagtttttaattcagtaaactaaaaatttaaaactagtgactacttttaatgttttatgktaaatctgaccttttcttaagttctttatttaaaaactaagtattttcaatttatttacatatccttacacacacacacacacacacacataattttatg

SEQ ID NO: 469033 - DNA, 201 bp, Homo sapiens
aacaaagagctgggctttgggccctggaacgtgattacacaccgactgagaaatgcaggacctcagggtggggtctagtcaggctggccgcagcagggcaygaacctgcctcagtgggccttctccaagaacgctctgcagcacctgacacactgctggtacaccgtctcaaagtcagagtcattcccctaaatggacagg

SEQ ID NO: 469034 - DNA, 201 bp, Homo sapiens
gtcaggctggccgcagcagggcacgaacctgcctcagtgggccttctccaagaacgctctgcagcacctgacacactgctggtacaccgtctcaaagtcaragtcattcccctaaatggacaggaaaaagaagaaaatggcaaaacctgcataacaaaaacatccttaacacaatctcatctgttatttaatatggcagga

SEQ ID NO: 469035 - DNA, 201 bp, Homo sapiens
ggccgcagcagggcacgaacctgcctcagtgggccttctccaagaacgctctgcagcacctgacacactgctggtacaccgtctcaaagtcagagtcattyccctaaatggacaggaaaaagaagaaaatggcaaaacctgcataacaaaaacatccttaacacaatctcatctgttatttaatatggcaggatacaaatg

SEQ ID NO: 469036 - DNA, 201 bp, Homo sapiens
tttgacactctaaatcttcaatgaatttggagtttatctttctgtaacacaaagctgtgaatgaatttttgtttttctccccaaatgaacattatctagtwtgcaatacatcatttcaacatagaattgaggtgtcatttttattatatactaaatttgtaaatatatttgggttaatttctgaattttcttctttgtgaa

SEQ ID NO: 469037 - DNA, 201 bp, Homo sapiens
acattgtattccaaattaagacaattattattttggatctgtagaacaacagatgcctagtatctcagcatctaaaaatataataaagactagccccacasgtttacaaataattatctttaactgtaaaataacagcttactttccccacaacaatatgaaaacttgcattattaactgtcctaaaggctagcagtagct

SEQ ID NO: 469038 - DNA, 201 bp, Homo sapiens
ggccttacttaactgtaccacgatgtaccaagcagaagcggaacataagaaccagtgtagctacaaggtcatgggtagtactttgtattttccgagtgtgwatgtgggaagcattatggaaggcaaatttgttatctaaaaatacatacaagatacaggttatacaatcactggtgaaaatgcttaactttgcataagaaa

SEQ ID NO: 469039 - DNA, 201 bp, Homo sapiens
atgttgaaaaggtctcttaagcagcatcccctgaagagaggtcagcatgttcctgatggatttagggttggtgacctttcttttcaccctggcctcccctyctgggagcccactccagtgtttttcccagatgtttctcctccgagggggttgagcatctgctcctagagtcctgtatggagagcaggtgcgatggtcggg

SEQ ID NO: 469040 - DNA, 201 bp, Homo sapiens
ggccagctcctttactgcatgctgttttatcagcaaggtcttcgttacctgtatcttgtgcggacctcctgtctcatcctgtgacttggaatgcctaaccytctgggaatgcagcccagtaggtctcagccttatttcacccagctcctattcaaaatggagtccctctggtttgaacacctctgacaattgtatatgaga

SEQ ID NO: 469041 - DNA, 201 bp, Homo sapiens
atattctgtaccgtgtatactaccgaccatgtgcaatcctaaccatatatactccccagtatatgtattctccccagtatatgtacactccccaccatatrtacactccccaccatatatacactccccaataacattcccaagtcttcattatataggcttcccaccagacattcccactatacacattccccactgtcc

SEQ ID NO: 469042 - DNA, 201 bp, Homo sapiens
agcctgttccgccatcttcccgcgcgcagaggcgccgagacaccgcggcgttccgcacgccgacgcggcgcaggcgcactgccagcctcttgccccgcgckcctgcgcagtcccgcaccaacgccaacagggcagcgcgtgtgagagccacgcctgcgcaatcggctccagtgcgcctgcggaggcggtcctatgacggta

SEQ ID NO: 469043 - DNA, 201 bp, Homo sapiens
ttatgctgcccaccatattctgtaccgtgtatactaccgaccatgtgcaatcctaaccatatatactccccagtatatgtattctccccagtatatgtacwctccccaccatatatacactccccaccatatatacactccccaataacattcccaagtcttcattatataggcttcccaccagacattcccactatacac

SEQ ID NO: 469044 - DNA, 201 bp, Homo sapiens
tggcctcctccccctcatggttcctaggccggcggcacaacctacagcgcacaagcccgatccaactctccagaggacgtcagaacatgagtaagtcggcrccctcttacccagacacacaaacagcacggacttggtagcctgttccgccatcttcccgcgcgcagaggcgccgagacaccgcggcgttccgcacgccga

SEQ ID NO: 469045 - DNA, 201 bp, Homo sapiens
tatccaccatttatgctgcccaccatattctgtaccgtgtatactaccgaccatgtgcaatcctaaccatatatactccccagtatatgtattctccccastatatgtacactccccaccatatatacactccccaccatatatacactccccaataacattcccaagtcttcattatataggcttcccaccagacattcc

SEQ ID NO: 469046 - DNA, 201 bp, Homo sapiens
taaagtatattttcatataacataatttgatattctgtattactttcactgttaaattctcagagtattatttggaacggcatgaaaaattaaaatttcgrtcatgttttagagacagtggagtgtaaatctgtggctaattctgttggtcgtttgtattataaatgtaaaatagtattccagctattgtgcaatatgtaa

SEQ ID NO: 469047 - DNA, 201 bp, Homo sapiens
cagatgccaagagccccggatatatggcaggcgcgaggggacccaggtttagcgggcaggctgggcgggtgcacggggcggatggggaacaggggcgctgyggcacactcctagaacaccctaggcctcccagtccctggcctcctccccctcatggttcctaggccggcggcacaacctacagcgcacaagcccgatcca

SEQ ID NO: 469048 - DNA, 201 bp, Homo sapiens
gcacccttcataattgtgctgtagtaaggagctcaattattttccatcattagcttcaccaatgaaaaacctctgatgcttttctacacttcaatctcaayagggtccaaacaaatgctttgaatgaacaaagttttttacatttcaaaagcatacaactcttactgtcctctatatggctaccaagtaaaatgccattta

SEQ ID NO: 469049 - DNA, 201 bp, Homo sapiens
ctgctcaaaaccctccaatgtttattcagagtaagcccaagtcttcacatggcctcccaagatctggacctaaaacaggggtctgaaaatcggctcatggwccactgcctttatgtacagcccacagcggtaagaataatttttacattgttgagtagttggaaaaaatctaaaagtagagtaccttgtgacatgtgaaaa

SEQ ID NO: 469050 - DNA, 201 bp, Homo sapiens
tttttcttaatcttcacatcaaccgattgagcacatcaattaatacttgctggtgactgagagaacgtgagctccagagaggctgggatttttgtctgttktgttcaccacaccacttagaggaatgcatgccatatagtagatgctcaacaacaacaaaaaatcactgaattgtattgaaatacaatagtcccctctttt

SEQ ID NO: 469051 - DNA, 201 bp, Homo sapiens
ggaatagagaggcctcgtgcccatctgttgagtgactgacttttgttcattgctcctgtgtgccccgaattcctagagataacctctgtgtacactgactstgtttaacacttgctcgtctatccaggcacatagatcaaaatgcttaccttcccattgttttccacgttaacagctcacgtaattgcgaaggctaaaggc

SEQ ID NO: 469052 - DNA, 201 bp, Homo sapiens
ataccatccaccatgtacaatcctaaccatatatactccccaccatatatacactccccataaccttcccaccataatagtccccactatagttgcttccygccataggcatttcctaccatgcacatttcccactagacaccatatgcattctccatcatgtatgctacccaccatatgcattccccaacatgtgtacca

SEQ ID NO: 469053 - DNA, 201 bp, Homo sapiens
actagacaccatatgcattctccatcatgtatgctacccaccatatgcattccccaacatgtgtaccacccaccatgtgcatttttcaccatggttactayccaccatatgcattctccaccatatgaattatccaccatttatgctgcccaccatattctgtaccgtgtatactaccgaccatgtgcaatcctaaccata

SEQ ID NO: 469054 - DNA, 201 bp, Homo sapiens
catatgaattatccaccatttatgctgcccaccatattctgtaccgtgtatactaccgaccatgtgcaatcctaaccatatatactccccagtatatgtaytctccccagtatatgtacactccccaccatatatacactccccaccatatatacactccccaataacattcccaagtcttcattatataggcttcccacc

SEQ ID NO: 469055 - DNA, 201 bp, Homo sapiens
tattttagatctgagtgattatatagaatttgacccatatgtatgttttaaaatatataaaatgtcctcactgagaatggatacctgcatatgcatgtatraaatcctctcatttataaaaattctagtcctcttagtatcaggtccttatcagtgcggatttaaaaatgactgtggaccttacctcaaaaaattcctttc

SEQ ID NO: 469056 - DNA, 201 bp, Homo sapiens
tgctgttgcctcccctggcccatgctgcctcccctgacccatgctgcctcccctggcccatgctgctgcctcccctggcccatgctgcctcccctgacccrtgctgcctctcatttgatgggtcatattatttttcagttctaactttggacttccacattgcagtgattaatttgagtaacaaatgctttcactgtgttg

SEQ ID NO: 469057 - DNA, 201 bp, Homo sapiens
tgtgttctcctagttgtgaccttcccaaggctgtgatttttttcctgaaacagtcaggccaggggtgctggctgcacagggtctgcctcatgcaggctccrtgagaaagtggactggaagtgaaacagggacatccacagaccagcctttctaatcatgggcctcagggcagctgccagtcaccaatgctgactgtgatct

SEQ ID NO: 469058 - DNA, 201 bp, Homo sapiens
ctggcaacaaagcttgcctgttctgggctaaagttgtggcgcattgttttttgcctgggtcagtctcagtttttctccggacatctcccgtaccttccacrtggtgtatccagtgctgcaaaaatgttacatttgctccaggttcttcatctgaccttccaaacacagaaagggattggagtaccaccttcttaattattt

SEQ ID NO: 469059 - DNA, 201 bp, Homo sapiens
tctctctgtctgcccaagatctctgtgccgttgctccagagctggaggctggggcagtggctcccttctcttggagtgacatccctgcagccttgggtggkgtagtagcttggcttgcctctgtcagggtggagcttttgccccacaggtgaactggggcaagagtgagtggggtcctggtgctcctggactgttgtgcta

SEQ ID NO: 469060 - DNA, 201 bp, Homo sapiens
aacgtgaactgtacttacataatagggatcttcaataataagttgtttttgtggatcatagctcccaagtagttcaattttagctttgcaggttttaactygattactttttctattcaaatctctgtaaaattgaaatatgaacttagttttctgatctacggtttcaagttaaacagggacatctgctagggtgttctg

SEQ ID NO: 469061 - DNA, 201 bp, Homo sapiens
gtcttgctttatgggctgtgtgaatgccatgatttcttaggcagctcacagctcttgggtctggggaccggcccacgttccagtcagaaacagcaccgctrtcaatgacccactgaaacacaaaacacacaacttcaagtccaaggacggtacctgccgggcaacgtggctcatgggaatgccgtgcctcttcatgcagct

SEQ ID NO: 469062 - DNA, 201 bp, Homo sapiens
aatgaatggtacttacattctctgagatgttttgatcggttacaagtttcctgaaaactgcttctgcaatgggtgatcgacaaatgttacctttaaaaaargggaggggtggggaaacagggttaggttggatggaagggcacatgccagctccccttctttacacacctgacacacgggggctgtgctatccctcaggaa

SEQ ID NO: 469063 - DNA, 201 bp, Homo sapiens
gtgactgagtgcgtaagtcaggaacagactaaaattgtccgtttacttcgaggcattcattcattcactaacacaagtgagtagatgaccaacattgtccmtgcaaattcagattatcacatctggtacatgtttgagttgtagtcataagctcataaagaacagctatcctctttaaatgtttctatcaatggttttttt

SEQ ID NO: 469064 - DNA, 201 bp, Homo sapiens
aacacaacaacaagccaacaagtgatcaagctgatctacaagtaactcactgcctgctaacacaagtgttaacacttttaagggaagcaatgaaatctagkcactcaacatggtaatatctacaatcctgttttactagaaaggagtaaaaacaggaaaacataacccatagctggaagaagaatcagtcaaaaacagatc

SEQ ID NO: 469065 - DNA, 201 bp, Homo sapiens
gtgacttattcactggaagttaaatgtttaaaagaaaaaaaaaacagttttcttacctctgtaacttcgtggtctctgtctgcatcccacggggtagacarccgacataatcctggagcttcaggagcagttactgttatttcaaggaaaataaatgtccctgatattgagtcttcttcactgtcgtgtgttgcaatccag

SEQ ID NO: 469066 - DNA, 201 bp, Homo sapiens
ctcttcacatcactctccccatcaccagacaaccacatcagagcctgactgacgatgagatgcaggtaaaggtaacaagacaaggcccaggctcgcaagcttctgtccccaaaaggccacctgcttgacagccacaggtgtcacagctgtaactgggttcattttggccaagagataggtaaagtttaaaatattgatacc

SEQ ID NO: 469067 - DNA, 201 bp, Homo sapiens
cttcacatcactctccccatcaccagacaaccacatcagagcctgactgacgatgagatgcaggtaaaggtaacaagacaaggcccaggctcgcaagcttctgtccccaaaaggccacctgcttgacagccacaggtgtcacagctgtaactgggttcattttggccaagagataggtaaagtttaaaatattgataccct

SEQ ID NO: 469068 - DNA, 201 bp, Homo sapiens
ccctgtccacatctgagtcttgtcatccagttcaattacatagagtccagaggggtgcatgtgagctttgagagtgccacattaataagcacacatgataraagtttgctacataacctcattagaaaagagttatatgtgcctaagtaaaaacaagattttaaaattatgtgtatttatctttttgtttctcccaggcta

SEQ ID NO: 469069 - DNA, 201 bp, Homo sapiens
attattttaaaaaataagccaatttatattggacatttgggttacatgtgcatataaaaacagtcatattcctcaactgaccatagactagcatacaagtktccttctttctggatgtaattaagtttcagaggcaaagtggttcagatgggagccaatgggctgacctcctcatgaagtaaactcgacaaaaatcatgaa

SEQ ID NO: 469070 - DNA, 201 bp, Homo sapiens
ttttcttaatcttcacatcaaccgattgagcacatcaattaatacttgctggtgactgagagaacgtgagctccagagaggctgggatttttgtctgttgkgttcaccacaccacttagaggaatgcatgccatatagtagatgctcaacaacaacaaaaaatcactgaattgtattgaaatacaatagtcccctcttttc

SEQ ID NO: 469071 - DNA, 201 bp, Homo sapiens
gcatataaaaacagtcatattcctcaactgaccatagactagcatacaagtgtccttctttctggatgtaattaagtttcagaggcaaagtggttcagatkggagccaatgggctgacctcctcatgaagtaaactcgacaaaaatcatgaagtattgaaggtgccaacgactgattccataaatgtttctctcttcccta

SEQ ID NO: 469072 - DNA, 201 bp, Homo sapiens
ttgtggcactaagcaggtgaggctgcgatgcttcaggtacagagagccagtgtctggaaactgacgggctggtatacaggagccctaaaacactgggccarcatttgaactttgcgtagccactatgaggagaaatagaaagtcctatggaaaagggtaatatgacttattcaacaaacatattttgtatgccaactctat

SEQ ID NO: 469073 - DNA, 201 bp, Homo sapiens
ttttatgttgcttgttctactatttttgtaactggggcaaagtgagatgttcaactagtctaagaatgcttaaaataccccataagctgtctgaatcaaasatttttattgattctcctgccaaacacaactgatttccatctacaattactttttaaggtaagaaacagtaagtcaactgaacaaagagctgggctttgg

SEQ ID NO: 469074 - DNA, 201 bp, Homo sapiens
acggttttgatgcttagatgaccaatgcacagctgtgtagaaatggcactggacaaaaggaaatgatccaatggtagcagactgagggaaacccagcaggrccacagcatttcctcccccaggaatgaggcagggcccctctgaaatgctgtcttcaagagaaggcaaaagggagagagtgatctttctaggttttatggc

SEQ ID NO: 469075 - DNA, 201 bp, Homo sapiens
acagagcaccgctcagccccagctcacagtcaggctctctcattataaattacctagcttttatgtgcattttaataagtaaattccaaagtcaggcaagyctttcaacaccgtgcaaccagaagtgaaacaaaatggacacaccatagctggttaagctcaccctaaataaacacattcattaatatacaagtctggtta

SEQ ID NO: 469076 - DNA, 201 bp, Homo sapiens
acagccttcagtttctacattgtaagacctaagcatattatgtacttttttcccacagagactgtagtttccacagcagtaaaaaatcttacctacaaacsataaagggaaagacaacaaattagccttgaataccctctatatgctaatttgtgttgtgaagtttttcctttcgacattctaaattttgtttagttttct

SEQ ID NO: 469077 - DNA, 201 bp, Homo sapiens
cttcatgcagctctgccctcggtagtcaggggggttccctatctcatacccggaagttgccgcgctgtctaccctccactgcaggggaagaaacatggaattttttttttttttttgcaatttcctgcccagaggagttcaggttggcctctttaagataatgaatggtacttacattctctgagatgttttgatcggtta

SEQ ID NO: 469078 - DNA, 201 bp, Homo sapiens
ccgcgctgtctaccctccactgcaggggaagaaacatggaattttttttttttttttgcaatttcctgcccagaggagttcaggttggcctctttaagatmatgaatggtacttacattctctgagatgttttgatcggttacaagtttcctgaaaactgcttctgcaatgggtgatcgacaaatgttacctttaaaaaaa

SEQ ID NO: 469079 - DNA, 201 bp, Homo sapiens
ttgtgtattttgtataatatatactaatcagttttcaaaatcaccactctcctcttttttggcaggtaacagaaatgaatataagctctatcctggacttkccagctatcatgagagagttggtaaatcagtaaatctatatgttataaatgattcatattcattttgtgatcacaaacttcctaattaatctgacaggtt

SEQ ID NO: 469080 - DNA, 201 bp, Homo sapiens
tgcttctgcaatgggtgatcgacaaatgttacctttaaaaaaagggaggggtggggaaacagggttaggttggatggaagggcacatgccagctccccttytttacacacctgacacacgggggctgtgctatccctcaggaaaaacaaaggccaacactatcctttgacgcctttgtccaaccagtgagggtagaccctg

SEQ ID NO: 469081 - DNA, 201 bp, Homo sapiens
tttctatgtatgggtcacactctcccacttctttgtcttattatttttggttgagaatcagaaattttagatattatattgtatcaactctgggtgctcarcctctccccctaggagcctcttattgtttgcttgctgtttgtttagagatatggctggactgtttgaatgaattctgtgccccactactgtgaagcctcc

SEQ ID NO: 469082 - DNA, 201 bp, Homo sapiens
gaattttaaatgatatttagtcttaacgatttttaaatccatgggtttctacactttaggtatcagacttggtgataattctgaattatgaccgtgctgtrgaagcttttgcaaaaggcggaaatctgaccctcggagggaacttgactgtggcggttgggcccttgggaaggtgagttctttaaatagatgttagacagt

SEQ ID NO: 469083 - DNA, 201 bp, Homo sapiens
cgcgctgtctaccctccactgcaggggaagaaacatggaattttttttttttttttgcaatttcctgcccagaggagttcaggttggcctctttaagatamtgaatggtacttacattctctgagatgttttgatcggttacaagtttcctgaaaactgcttctgcaatgggtgatcgacaaatgttacctttaaaaaaag

SEQ ID NO: 469084 - DNA, 201 bp, Homo sapiens
ataaaaataaaatacagtggtctgtccctcagtagactcaggagctggttcaggacaccctcccacccctacccagtataccaaaacgtgcatactcaggkcctatagttggcccctgagaatgtggagcccaagtataggaaaagtcagccctccatacagatgggtttctcattcagacaacacggtattttccatctg

SEQ ID NO: 469085 - DNA, 201 bp, Homo sapiens
ctacagccttcagtttctacattgtaagacctaagcatattatgtacttttttcccacagagactgtagtttccacagcagtaaaaaatcttacctacaamccataaagggaaagacaacaaattagccttgaataccctctatatgctaatttgtgttgtgaagtttttcctttcgacattctaaattttgtttagtttt

SEQ ID NO: 469086 - DNA, 201 bp, Homo sapiens
cattgtattccaaattaagacaattattattttggatctgtagaacaacagatgcctagtatctcagcatctaaaaatataataaagactagccccacacstttacaaataattatctttaactgtaaaataacagcttactttccccacaacaatatgaaaacttgcattattaactgtcctaaaggctagcagtagctt

SEQ ID NO: 469087 - DNA, 201 bp, Homo sapiens
agcacccttcataattgtgctgtagtaaggagctcaattattttccatcattagcttcaccaatgaaaaacctctgatgcttttctacacttcaatctcamtagggtccaaacaaatgctttgaatgaacaaagttttttacatttcaaaagcatacaactcttactgtcctctatatggctaccaagtaaaatgccattt

SEQ ID NO: 469088 - DNA, 201 bp, Homo sapiens
atgctgtctatccacctattgccctctagcttatcagatccattgtgatgctatcacagtgcctgagttcgagtcacccttagtttactaataatggcccsaaatcataagaatagtgaagctagcaattcagatacggcaaagagaagccataagcactacccttaagtaaaaaggtgaaagtttttgacttcttatgga

SEQ ID NO: 469089 - DNA, 201 bp, Homo sapiens
cacctattgccctctagcttatcagatccattgtgatgctatcacagtgcctgagttcgagtcacccttagtttactaataatggccccaaatcataagartagtgaagctagcaattcagatacggcaaagagaagccataagcactacccttaagtaaaaaggtgaaagtttttgacttcttatggaaagaaaaaaaaa

SEQ ID NO: 469090 - DNA, 201 bp, Homo sapiens
tgcaaaagttgcgaccacagttttaaatgcttagttaaggtggcaacggtattacatttgtgggtgtaagaaacgagcagacacatgttccaattgacagsaattgggtttggtactacccacagtttcgggatccactggggagtcttggaatgtatcccctacagctaaagtgggactactgtatatgcaaggatacac

SEQ ID NO: 469091 - DNA, 201 bp, Homo sapiens
ccaggcctacctgggcccattggaggggaacgagagggattctagtagtcgcaaagaaagtaccttggcttgtaggggctgtggctgcagatgccaagagscccggatatatggcaggcgcgaggggacccaggtttagcgggcaggctgggcgggtgcacggggcggatggggaacaggggcgctgcggcacactcctag

SEQ ID NO: 469092 - DNA, 201 bp, Homo sapiens
ttgaccagttctttctttcagcattttgtcatcctactgttttctgaagtctactgtttttgaagagaaatctatctattattctaattggggttcctttwatgtgatgagtcatttttctcttgctcctttccagattttctcttgcattttaagattttttacaattatctatccagagtgttatctttttacatttat

SEQ ID NO: 469093 - DNA, 201 bp, Homo sapiens
gtttagagatatggctggactgtttgaatgaattctgtgccccactactgtgaagcctccaatgttgtctatgggcatgcatatagttttcctgagatgayaggtgttctgactgtccctgtccgtgacctgtctgttaagctgtttgtctccattggtattacacactgttgttagcctccactaattgcctgctgattg

SEQ ID NO: 469094 - DNA, 201 bp, Homo sapiens
tggtattacacactgttgttagcctccactaattgcctgctgattgctccattgtttccaacaatgccctggggacataaattgctccacagtttgatccmgttaaaattgtgctcctgtgcacaggtagtctttgaggctcatttctatttcaggagggctcttcttagctatctctgtccctggttctccctgataatt

SEQ ID NO: 469095 - DNA, 201 bp, Homo sapiens
ccagaggacgtcagaacatgagtaagtcggcgccctcttacccagacacacaaacagcacggacttggtagcctgttccgccatcttcccgcgcgcagagrcgccgagacaccgcggcgttccgcacgccgacgcggcgcaggcgcactgccagcctcttgccccgcgcgcctgcgcagtcccgcaccaacgccaacaggg

SEQ ID NO: 469096 - DNA, 201 bp, Homo sapiens
ttcttcacttgccatatgcccttaggacaatttccagaagtgttaatttttaaaataatttttaccagttacggttattttgctgtggagagggtctgtgkcctctttatgccaccactgcagtgtcattctgatttgtagatacattctacagtgggatggagattcaactgtaattgttaagttttagctcttcttttg

SEQ ID NO: 469097 - DNA, 201 bp, Homo sapiens
agagggattctagtagtcgcaaagaaagtaccttggcttgtaggggctgtggctgcagatgccaagagccccggatatatggcaggcgcgaggggacccasgtttagcgggcaggctgggcgggtgcacggggcggatggggaacaggggcgctgcggcacactcctagaacaccctaggcctcccagtccctggcctcct

SEQ ID NO: 469098 - DNA, 201 bp, Homo sapiens
agttcaggttaccgactcgaggtctgtttttttttttaatagacacatttacagctacatattccctctgagcattgccctggctgccttccataagtgtrggtatgttgtgtcttcattttccttaatctcaaaatattatctaatttctcatgtgatttcttctttgagccatttgttatttaagagtgtgttgcttaa

SEQ ID NO: 469099 - DNA, 201 bp, Homo sapiens
cgtgctgtggtttcactggagagtgaatgtcagactcattcttccaggggcataagtgtaagtgaccctaagcttagccagaaggccggcgtggggttaayttatgttcgacaatctcaacctttagactcccagattctacagggtggagagttccctggttcttggaacatcagaggtactgaataattgtctaaatta

SEQ ID NO: 469100 - DNA, 201 bp, Homo sapiens
ttctagtgttgtaaaacacagctaattccctagttcagaaaaccaactcactgccttactacagccttcagtttctacattgtaagacctaagcatattaygtacttttttcccacagagactgtagtttccacagcagtaaaaaatcttacctacaaaccataaagggaaagacaacaaattagccttgaataccctcta

SEQ ID NO: 469101 - DNA, 201 bp, Homo sapiens
gaagcttttgcaaaaggcggaaatctgaccctcggagggaacttgactgtggcggttgggcccttgggaaggtgagttctttaaatagatgttagacagtmaaggtttaacaactgcatattttattttgcattaataggaaacttgaattaaaatgaacagatttgtacatccccagatttatacatgcccgaaagattt

SEQ ID NO: 469102 - DNA, 201 bp, Homo sapiens
aatttttaaaatatatttacacatgctgcactgtattctttttcaacacagttctatgttaccagagccttctgtaataatttcatgtatgttcttccccyggcctgtttttcctctaggccacattaaaacatctaatttaggcctacagtaagtaaaacatagaaacagctgaagaaggtacagaacaaaataattcat

SEQ ID NO: 469103 - DNA, 201 bp, Homo sapiens
cctgccgggcaacgtggctcatgggaatgccgtgcctcttcatgcagctctgccctcggtagtcaggggggttccctatctcatacccggaagttgccgcrctgtctaccctccactgcaggggaagaaacatggaattttttttttttttttgcaatttcctgcccagaggagttcaggttggcctctttaagataatga

SEQ ID NO: 469104 - DNA, 201 bp, Homo sapiens
ttttgccatatatgatgataatcaccatatatattcagttgtaaatgctgttttttccacttcgcattttaagatagctggaaaccatcattctcagcaarctatcacaaggacagaaaaccaaacaccacatgttctcattcacaggtgggaattgaacaatgagaacacttggacacagggaggggaacatcacacact

SEQ ID NO: 469105 - DNA, 201 bp, Homo sapiens
gcgggtgcacggggcggatggggaacaggggcgctgcggcacactcctagaacaccctaggcctcccagtccctggcctcctccccctcatggttcctagsccggcggcacaacctacagcgcacaagcccgatccaactctccagaggacgtcagaacatgagtaagtcggcgccctcttacccagacacacaaacagca

SEQ ID NO: 469106 - DNA, 201 bp, Homo sapiens
cgggtgcacggggcggatggggaacaggggcgctgcggcacactcctagaacaccctaggcctcccagtccctggcctcctccccctcatggttcctaggscggcggcacaacctacagcgcacaagcccgatccaactctccagaggacgtcagaacatgagtaagtcggcgccctcttacccagacacacaaacagcac

SEQ ID NO: 469107 - DNA, 201 bp, Homo sapiens
cggcacaacctacagcgcacaagcccgatccaactctccagaggacgtcagaacatgagtaagtcggcgccctcttacccagacacacaaacagcacggamttggtagcctgttccgccatcttcccgcgcgcagaggcgccgagacaccgcggcgttccgcacgccgacgcggcgcaggcgcactgccagcctcttgccc

SEQ ID NO: 469108 - DNA, 201 bp, Homo sapiens
aggccactgtgtaccactaaaataactaaaattttaaaaactggacattgcaagtgttggtgaggatatggaataaccagaactcttataaaagtttctgrtggaagcctgaaatgtgtaatcactttagagaactcttaggtggctccttacattgttaaatacacatttaccacatgaactggcaattcctatcctagg

SEQ ID NO: 469109 - DNA, 201 bp, Homo sapiens
tactgacatcttttaaagaaatttaaatagaactccaaaatgaccctaagtcagttttcactttttaaaattttattttattttgaggcagggctttgccstgttgcccaggctggagtgcagtagcccagtcatagctcactgcagccttgatctcctgagttcaagtgatcttcctgcctccgcctcctgggtagcaag

SEQ ID NO: 469110 - DNA, 201 bp, Homo sapiens
ctaaggatacttacaattgtttttcaattatatgctaaacacggagtggattattcgtgagttttctggaaaaggggtgggcaattcccggaactgagagktcctctcctttttagaccatatagggtaacttcctgatgttgccatggcatttgtaaactgtcatggcgctggtgggagtgtcttttggcagctaacgca

SEQ ID NO: 469111 - DNA, 201 bp, Homo sapiens
ggctggagccttcacttacacatgggttctgggtggaggaaggaagctccagacctctcagctgctcttgcctggaatggagcttctgtacaaggagctgygggaagagaaatgctggcagaagcctctcctgtggatatactgcagccctgaccaggggctgggggaaggaagtctgtgttcttgcaaacccccttcccc

SEQ ID NO: 469112 - DNA, 201 bp, Homo sapiens
ggacctgtaaccacacagggttttcctttcaagcacatagatggcacacacgtaatcggttagtactatccaatatttgttgaataatttaactatctgcctttctttctttctttctttttcttttcttttcttttctttctttcgttctttctttctttttcttttctttctttctttctttctttcttttgaggcaga

SEQ ID NO: 469113 - DNA, 201 bp, Homo sapiens
gggtcgaggggaggcagagcagtaggacaaatagctaatgcacgcagggcttaaaacctagacaacaggttgatgggtgcagcaaaccaccatgacacatrtttatctatatagcacctacatgttctgcacttgtatcctggaacttaaaattagaaaaaaaaaaataataaaagccaacatggcattcattactgccaa

SEQ ID NO: 469114 - DNA, 201 bp, Homo sapiens
gctattgagatgtgctgtatgatacacaccagactttgaagactcagtgtgaaaaataaaaagaattttaagaggggtgggggtcgaggggaggcagagcmgtaggacaaatagctaatgcacgcagggcttaaaacctagacaacaggttgatgggtgcagcaaaccaccatgacacatgtttatctatatagcacctac

SEQ ID NO: 469115 - DNA, 201 bp, Homo sapiens
ccaatgcccacctcgacctcccaaagtgttgggattagaggcgtgagccaccgcgccctgcctgcatgtggctattgagatgtgctgtatgatacacaccrgactttgaagactcagtgtgaaaaataaaaagaattttaagaggggtgggggtcgaggggaggcagagcagtaggacaaatagctaatgcacgcagggct

SEQ ID NO: 469116 - DNA, 201 bp, Homo sapiens
cacattttttagtgggcagaaagatgttagaattcatgaattagaataagcacaaaggagggcgagaggggaggccgtggaagccgcattcctccccttgmcttgggcgcccacccccgaaggggcgcgtcccctccctgctccactgcacgtgggtgtttaaccaggggatatccagtgcctcaagcaccacgacccggg

SEQ ID NO: 469117 - DNA, 201 bp, Homo sapiens
tgagtgtatatgtggtctcagtcacttagctcctttgaaacttaattttctctactgaaaaaaaaaaatgggagtgataattcccactgcaaaaggctttygttttgaggatgagattttagatgaaataataaatgtatgcatagcctattcctgacacatgacataaactcaaataaaagtcactattgccattatcta

SEQ ID NO: 469118 - DNA, 201 bp, Homo sapiens
ccgaaggggcgcgtcccctccctgctccactgcacgtgggtgtttaaccaggggatatccagtgcctcaagcaccacgacccgggagaaaactgagttgakaaggtaacttttagaattctccccatttgaccttttgctctgtaagcaaatcaagtaattttaaaagtcttcatgggttggaggggcgtggtggcttacg

SEQ ID NO: 469119 - DNA, 201 bp, Homo sapiens
cagagaagcacccgcacctggagagtcaggagggcctcacatcagaacgcctgagcaaatacagttttgaaggatactaattttttaaaaagttcattcayatgagttagacaaagagaaagaagcaggacattctaggaagaaggaacggcccaggcaaaagcgacgcgtacattggcgtggtaagttgtgttcctctgt

SEQ ID NO: 469120 - DNA, 201 bp, Homo sapiens
tcaccatgttggtgaggctggtcttgaactcctgacctcaagtgatttgcccacctcggcctcccaaagtgttggaattacaggcatgagccaccacgccyggctgccaaaactatttattttgacttttcattgactggttactcctgaaaatctttttttatcttaatctctggctcatagaaatataggacatttctt

SEQ ID NO: 469121 - DNA, 201 bp, Homo sapiens
aaaatgaatgaatgaatgaaagaaggaaagggaaaggaagctcctttctcttctattcccagtattgccccccaaaaagaagtaatccataaacccccaaygtatatttctgttttcttaactatttctgaataaaatgttcagtgttggctgggcatggtggctcacgcctgtaatcctagcactttgggaggctgaggc

SEQ ID NO: 469122 - DNA, 201 bp, Homo sapiens
catctgtgctgttgcatttgttaacagtgtactcccttttcttgctgagtattaataaaactgtggatgcaccatggttgtagacctgtgcactttttttycttctttttttttctgagacaggttatcattctaattcctggctggagtgcagtggtgcgatcatagctaactctagcttcgacctcccacctccgtctc

SEQ ID NO: 469123 - DNA, 201 bp, Homo sapiens
tgtttcaaaaatgcttcaaaatttatttttgaaaatataaggaatgaaattctaactttctaatttgaatggaaggatgagttggtagcacacgaagcgcwaaattgagtaatgtagattttattatttttaacgaatcctttgtttaatattttgcaggttcaatttgttttacttgtgatatacagagagttttttata

SEQ ID NO: 469124 - DNA, 201 bp, Homo sapiens
gtgatccgcctgccttggcctccccaagtgctaagattacaggcatgagccaccatgcacagccatgcatatctcctttatgtaacttaacatctgcagcrtttgtttgtgtgagttttttattctgtctgcatttgtgtatgtgagtctttttctatggatttttcccaccatggctgtaagcaccatgagagtgaggaa

SEQ ID NO: 469125 - DNA, 201 bp, Homo sapiens
tttgaatggaaggatgagttggtagcacacgaagcgctaaattgagtaatgtagattttattatttttaacgaatcctttgtttaatattttgcaggttcmatttgttttacttgtgatatacagagagttttttataccttcccagcttatatttgaatattccttttcaaggttttataaagagatttctctcctttac

SEQ ID NO: 469126 - DNA, 201 bp, Homo sapiens
gccactttattattttaattctgaatctcatgaagaaataggcagcctttggagaagataaaaaatttctgctgaataacagtataatctaactatgaaamatcaaaacttttggaaatatttagaacaaatgtaagtctgtagagagctttttcttttagatttgaaaactagtactgctttctttataggaaattaaag

SEQ ID NO: 469127 - DNA, 201 bp, Homo sapiens
atttctaataacactgcccttttctgggtattttgtattaaacctaaaatttgtgatgttttagactgtttcactaacgtgttttgataatgtctcagtamccttgggaaaacattataaagtagtgggcaatgatgaaacctactctgggtgtttttaggcaaattttttaacttctttgatgctagtgttctcatttat

SEQ ID NO: 469128 - DNA, 201 bp, Homo sapiens
aataatcaacaacagaaaataaaaatattttgccccaccatcttaaggttacaagacttagaggtatattttatttacatgcatgcatacacacacacacmcacaaattatatatagatgtgtggaaaatatagaaaagtagaaaaatgtatacaaatatttgaaatacattatgtggaatcatgtttgtatttttcttag

SEQ ID NO: 469129 - DNA, 201 bp, Homo sapiens
tgacggaaggcaacggctgcctttcagtgctccacctggcagcgttgtagaggcatcttctaatctgagacatggaaacttcattccccggccagactttscgggccctagacacacagaccccatgcgacgacctccccagggtctacctaatcagctacctgtgcacccagatttggaacaagtgccaccatctcaaca

SEQ ID NO: 469130 - DNA, 201 bp, Homo sapiens
tgcctgccgcctcggccccccaaagtgctgggattacaggcatgagcccctgcacctggcccaggaagaccattttttaaaaacatgcaacctttctgccygtaatccaaggaaatttgacctattgttcatagtttttattgggtatcatgaagttaattattcatgcatttcatagatacgtaattgctttctagaact

SEQ ID NO: 469131 - DNA, 201 bp, Homo sapiens
acctattgttcatagtttttattgggtatcatgaagttaattattcatgcatttcatagatacgtaattgctttctagaactacagtcacattcccttgayatgggtattttggaacagtaatcagtcaaatttgaaatgaaagtttaaatttgtatccttgggattttgtaattttagacccacccaagacttataccca

SEQ ID NO: 469132 - DNA, 201 bp, Homo sapiens
taaaaatactttattgctaaaaaatgctactgatcatctgagctttcagtaaattgtaagattttttgctgatagaggatgttggtggctgctgactgatsccagcagtgattgctgaaggttggggtgcctctggtagtttcttacaataagacaacaatgaagtttgctacattgattgcctgtttctttcatgaaaga

SEQ ID NO: 469133 - DNA, 201 bp, Homo sapiens
taatcctggcactttgggaggcagaagcaggaggatcacttgagcccaagagttctaggctgcagtgagctatgatcacaccactgcactccaacctgagwgacggagcaagttcttgtctcaaaaataaaagtaataacaataatgataaattttcctctaaatacaatggtgaatgaggtagaaatgttgagttcataa

SEQ ID NO: 469134 - DNA, 201 bp, Homo sapiens
actcttcacgtcatagtaataggagtaatgacgatgatgagtgtggacaactaatgagcacttaactgtagtaccaggcactattctcagaattcattagygtgacaaccctctaaggtagggtctgttatccccattatacagatggggcagaaacggcagggagaagttaagtgacttgcttaaggtaataaatgtagt

SEQ ID NO: 469135 - DNA, 201 bp, Homo sapiens
cctttttaacatgttttataaatattttttcctatcctaattgtgtgtcatggcagaagttaatttttatgcttttaaaatgatactgtcttaaatcatastgttattatgagggttaaatgaaaacaatgaatggaattcacataacattgtgccttgtatgtattaattgctttaaaaagggtagttattttacctcct

SEQ ID NO: 469136 - DNA, 201 bp, Homo sapiens
ttcataattactctttcttattaactatttaaggaacatgagaccaggaagttaaatacctgggtatatgcagatatatatctagaattggtaccaaagtwaatacaggcataccttggagatactgtaggttccattatagactaccacaataaagtgagtatcaccataaagcaaggcacacaaatattttggtttacc

SEQ ID NO: 469137 - DNA, 201 bp, Homo sapiens
gaaaatggaaatgctaagaaggaagttgaaaatcctgctaatttggagatctttgattaaaactagaaataagaatatgggaagcatcaacttccaagatrccctcattgtagataataccatttaggatctaggctcaagccctgggaaactccagggctttggaagtcaaatagaggaagaacacgtacaggagatgaa

SEQ ID NO: 469138 - DNA, 201 bp, Homo sapiens
ctagaattggtaccaaagtaaatacaggcataccttggagatactgtaggttccattatagactaccacaataaagtgagtatcaccataaagcaaggcasacaaatattttggtttaccagtgcatgtaaatattatgtttatattctactgcagtctattaaatgttcagtagcgttatatttaaaaaaccaatgtgca

SEQ ID NO: 469139 - DNA, 201 bp, Homo sapiens
ctctgctatttgactgatttgtatatttacactcttatcttcactcagttcctctacttgcctttttatttttaatatgaagttgaatttgtaattcattktctttcctttcctaaggaaaaaggacatttaagactataagtttaccttcggctgtagctttggctgaagccaaatttattgtatttgtaactttatgta

SEQ ID NO: 469140 - DNA, 201 bp, Homo sapiens
gacttatcattggaaaggaaaaactctgctatttgactgatttgtatatttacactcttatcttcactcagttcctctacttgcctttttatttttaataygaagttgaatttgtaattcattttctttcctttcctaaggaaaaaggacatttaagactataagtttaccttcggctgtagctttggctgaagccaaatt

SEQ ID NO: 469141 - DNA, 201 bp, Homo sapiens
caggatggtctcgatctcctgacctcgtgatccacccgccttggccttccaaagtgccgggattacaggtgtgagccacccggcccagccaaatttttgtrtctctttcttttcttctttctgattcagccctcaggagtcacttagctttgttatgttgattcagtgcagtagactgatgacagtgaggaagagtttgat

SEQ ID NO: 469142 - DNA, 201 bp, Homo sapiens
tgttggggtaattgaacttttaggatgagggaattgtctgccacaattattctatgagcttaatgtttccatgtctttttcttcattttggaagttgtggraaaattataatgaaagagtatataaacgttttcctctgtattatagcatatctgacagtttcctttattaaaaagtacaatacattagggagagacttga

SEQ ID NO: 469143 - DNA, 201 bp, Homo sapiens
gaatcccatgcttgtctttatatgtgaattcagttccttttgagttagtaagaaattatgcctgtgttggggtaattgaacttttaggatgagggaattgyctgccacaattattctatgagcttaatgtttccatgtctttttcttcattttggaagttgtggaaaaattataatgaaagagtatataaacgttttcctc

SEQ ID NO: 469144 - DNA, 201 bp, Homo sapiens
aagtgatccttctgcctcagcctctcaagtagcaggtactataggcatgcgccactgcagctggctttgagacaatagaatttattgaatatctactgtakgtcagatgttggaaatcatatcagtgtacaaagcaggtagaattctctgcatagagtttatattttaatgttaggtaacccaactcttaaaaaaaatcag

SEQ ID NO: 469145 - DNA, 201 bp, Homo sapiens
ggggcagtgtcttgttacgttgcccaggctggtttccaactcctgggctcaagtgatccttctgcctcagcctctcaagtagcaggtactataggcatgcrccactgcagctggctttgagacaatagaatttattgaatatctactgtatgtcagatgttggaaatcatatcagtgtacaaagcaggtagaattctctgc

SEQ ID NO: 469146 - DNA, 201 bp, Homo sapiens
gtgcagttttcaacttgaggttgtcagaatgtaatattacacattatattacacacatctacagaatccaaactgtgatgttcctggagtattggaacaawacctatgactttttgtttctatttatttttaactcttctaataaccgcttccttaagaaaagtcatacatcatcactttggtgtatcagaaacaaattcc

SEQ ID NO: 469147 - DNA, 201 bp, Homo sapiens
agtttgaaaagtattattgactataagtgatcttcagctgtgcagttttcaacttgaggttgtcagaatgtaatattacacattatattacacacatctayagaatccaaactgtgatgttcctggagtattggaacaatacctatgactttttgtttctatttatttttaactcttctaataaccgcttccttaagaaaa

SEQ ID NO: 469148 - DNA, 201 bp, Homo sapiens
cggctctgcaggccgggaagttgtaaagctcctccatagctgatgggcggcggcggccgggccgaagcctgcggacacggaagggctgcagctcagcggcyggttacatcccgcccggccgtctgtggccacccaaccccttaactatttttaagtgtacattttagtgatgtgagatacattcataatgtagacactatc

SEQ ID NO: 469149 - DNA, 201 bp, Homo sapiens
tgtgtgagaaaatggaaatgctaagaaggaagttgaaaatcctgctaatttggagatctttgattaaaactagaaataagaatatgggaagcatcaacttscaagatgccctcattgtagataataccatttaggatctaggctcaagccctgggaaactccagggctttggaagtcaaatagaggaagaacacgtacagg

SEQ ID NO: 469150 - DNA, 201 bp, Homo sapiens
caggctggtctcgaactcctgacctcaagtgatctgcctgccttggccttccaaagtgctgggattacaggtgtgagccactgctcctggcccttaactawtttttttttttaaccttccacagtccttttattttggaataggctgtaaacaatcaaaccacgagaacatgattgtacaacagtaaaatgttctcctgta

SEQ ID NO: 469151 - DNA, 201 bp, Homo sapiens
taagcatatgtatttatacataagcaatcataattgaatacattgttgcagatattattttgaacaaacttatctattagatcagttaataagaaaaaagtttttttttaaaattttatcttcacttgccccttctgagatgctcttcctttcttgatataggtctaagtttttgacctgtaccgttcttgttctctctga

SEQ ID NO: 469152 - DNA, 201 bp, Homo sapiens
atcttttcatgtttttttggtcatttgtataacttctttggaaaatgtctgtggaagttctttgctcatttttgagttgggttgtttttgtcaggtgttcrtcccacctcatcctcctgagtacccaggactacaggcacatgccactatgccccactaatagaatctattttagacctaattatattctgtctacctgaa

SEQ ID NO: 469153 - DNA, 201 bp, Homo sapiens
tgatcctattaaaaaaaaattcttagacctcatgccttcttaccccctaccgctgactctgccccagccaccgtatatccttcttgtccctctaacccccytcacttgctctcatctcaagaattttgcatttgctgttacttctactgcaatgcttttctcccagatatctgtatggtttgcttcatcttcagttctgtg

SEQ ID NO: 469154 - DNA, 201 bp, Homo sapiens
cctagtctgctttttcactatagattagtattcacttcctagaatttttaataaaagcttcatatactatatactcgtttttggtctggcttctttaactmagtgtaattattttgaaattcatccatattgctgcacagatcagtagtgattcttttttattactgagtgctggagataccacaatttgtgtattgaatc

SEQ ID NO: 469155 - DNA, 201 bp, Homo sapiens
tagattagtattcacttcctagaatttttaataaaagcttcatatactatatactcgtttttggtctggcttctttaactcagtgtaattattttgaaatkcatccatattgctgcacagatcagtagtgattcttttttattactgagtgctggagataccacaatttgtgtattgaatcacctgttggtgaacatttgg

SEQ ID NO: 469156 - DNA, 201 bp, Homo sapiens
gaagtgctggatttaagggagaaaatgactgtaaactctgatattttctacttgatatggtaaaatgctggaaaaatgccctaattacttattttgtataycttcaaattgtgccttatgttgaatataagtctaagccttaaaatttaacatttaactctatgtacttattatttttttttttttctgtagacctcgaag

SEQ ID NO: 469157 - DNA, 201 bp, Homo sapiens
actatatactcgtttttggtctggcttctttaactcagtgtaattattttgaaattcatccatattgctgcacagatcagtagtgattcttttttattacygagtgctggagataccacaatttgtgtattgaatcacctgttggtgaacatttgggtccttcaaaattttgagctattacaaaaaatgccgatgagctca

SEQ ID NO: 469158 - DNA, 201 bp, Homo sapiens
tattgctgcacagatcagtagtgattcttttttattactgagtgctggagataccacaatttgtgtattgaatcacctgttggtgaacatttgggtccttyaaaattttgagctattacaaaaaatgccgatgagctcattaactaacttcctacctcacttggcttctgcccttcagggtgaggcgttcagagccgggtt

SEQ ID NO: 469159 - DNA, 201 bp, Homo sapiens
ttcttttttattactgagtgctggagataccacaatttgtgtattgaatcacctgttggtgaacatttgggtccttcaaaattttgagctattacaaaaawtgccgatgagctcattaactaacttcctacctcacttggcttctgcccttcagggtgaggcgttcagagccgggttgggggcagtggggtagtggagata

SEQ ID NO: 469160 - DNA, 201 bp, Homo sapiens
ctgggattacagccacccgccaccacgcccggctaatttttgtatttttagtagacacagggttctcccagtgtttgccaggctggcctcgaactcctgayctcacgtgatccgcccaccttggcctcccaaaatgctaggattacaggcgtgagccactatgcccggccctttgattattgaagatgattatttcaccac

SEQ ID NO: 469161 - DNA, 201 bp, Homo sapiens
ttttattactgagtgctggagataccacaatttgtgtattgaatcacctgttggtgaacatttgggtccttcaaaattttgagctattacaaaaaatgccratgagctcattaactaacttcctacctcacttggcttctgcccttcagggtgaggcgttcagagccgggttgggggcagtggggtagtggagatagccct

SEQ ID NO: 469162 - DNA, 201 bp, Homo sapiens
ctcagtaaccgtgagctattagaatacaagtgctcaaccagtgcttgagcaattgtgtcttgtgtccaacagaactcaacagaatcccatgcttgtctttrtatgtgaattcagttccttttgagttagtaagaaattatgcctgtgttggggtaattgaacttttaggatgagggaattgtctgccacaattattctatg

SEQ ID NO: 469163 - DNA, 201 bp, Homo sapiens
atgagaggtcaaggcaaatacagtttagataaatgttttaataggagcagaaaactattttttttaacctggctttactaaagttaataaagccaagtgtrtattagtctttgttttgtctttgtccttggaaagtccattgtccacttcttttagggaacatagtgaacatagggcaaggagaacagtgaaagaaagaat

SEQ ID NO: 469164 - DNA, 201 bp, Homo sapiens
aacatttgggtccttcaaaattttgagctattacaaaaaatgccgatgagctcattaactaacttcctacctcacttggcttctgcccttcagggtgaggygttcagagccgggttgggggcagtggggtagtggagatagcccttggaatccaaggtgcggtttagcttttaagcttagtcttcctgggctgctggtgtt

SEQ ID NO: 469165 - DNA, 201 bp, Homo sapiens
gtattttcaacttctagaccaatacaaaatgtaaaataagtaaaagacgtgatatagttgtatcctttctaaacactgacctattttttttttttcctttsctaccttttttttttttttgagacagagtctcgctgtgtcgcccaggctagagtgcagtggtgcgatgttggcttactgcagccttcgcccctcgggttc

SEQ ID NO: 469166 - DNA, 201 bp, Homo sapiens
aaaatgccgatgagctcattaactaacttcctacctcacttggcttctgcccttcagggtgaggcgttcagagccgggttgggggcagtggggtagtggasatagcccttggaatccaaggtgcggtttagcttttaagcttagtcttcctgggctgctggtgttgcgaggttgagggatggagatgaccctcaggtgctg

SEQ ID NO: 469167 - DNA, 201 bp, Homo sapiens
ttctgcccttcagggtgaggcgttcagagccgggttgggggcagtggggtagtggagatagcccttggaatccaaggtgcggtttagcttttaagcttagycttcctgggctgctggtgttgcgaggttgagggatggagatgaccctcaggtgctgcatgggcctggagcgggtttttcctggagctggagagggcatga

SEQ ID NO: 469168 - DNA, 201 bp, Homo sapiens
aaacttactttgacaagtattttatgaaaaatattatttttggttatacatgacttatcacaacttgttataaaacaatttacatgaaacaataaaaagcrtatactttagatgtaaactataattttgcttccaaggaacatgatcttgtagttattgacaatatgtcagaatccaatatgttgattgtttcttagccag

SEQ ID NO: 469169 - DNA, 201 bp, Homo sapiens
gttcagagccgggttgggggcagtggggtagtggagatagcccttggaatccaaggtgcggtttagcttttaagcttagtcttcctgggctgctggtgttrcgaggttgagggatggagatgaccctcaggtgctgcatgggcctggagcgggtttttcctggagctggagagggcatgatggcccgtgtgcgggagtgga

SEQ ID NO: 469170 - DNA, 201 bp, Homo sapiens
tgggagaccaaataagcaattaccacctacccagatgcaggagaacccaaaaaggaatagtaaaattcacataaaagaggatagggagggaaagaactcayctaagtaactgtagaaaatagtgtcttgattaaataacataaaactagaggcaaaaagaactgtacagtcatgctgtagtgttgagatcagaagtatgaa

SEQ ID NO: 469171 - DNA, 201 bp, Homo sapiens
cagacatacagaaatatagatgtgtgcatatgtatgagttaatttgaatatgtgtatttcctacctctatcccctgagagggcatagaaacaatgacaccycagtagcattgagaatacctagtgcttagatcttggtctccaaccattgctcttcaatgaaaggaaccagggctccttgagaagtagttccttacgggac

SEQ ID NO: 469172 - DNA, 201 bp, Homo sapiens
taagaatgtagataggcaaatttaaacttctaaatgtaatttgtctaaaaaagttgaaaaacagtgtatagtaaaagtctctcctccaaccaatggaaagyacttttatgtaagatcctttaagttactgacttgaatctttacgtaaggtaatttgctagtatctattttataaataatgttatttaatactgttttatt

SEQ ID NO: 469173 - DNA, 201 bp, Homo sapiens
aactgcttatacagatttctcattcttggcattactcctgattcctccttcatctacatgcacacgcgcctacacacacgcacacacacacagacacacaygtctgcctctcggatctccttctagagtcttagttcttgttttttttttcagaatttgggcaactaacaaggctagaaaggaggccatctaaaaaagtga

SEQ ID NO: 469174 - DNA, 201 bp, Homo sapiens
aaatttaggctcaagggatatcgggggaaattcagccagatattgggcaaaattcacccccgataattcacgtaggttcttttctattttccctaagcttyggctggtttgagaaatagagggacagagtacaaaggagagaaattttaaagctgggcatccgggggagacatcacatgttggtaggttccgtgatgcccc

SEQ ID NO: 469175 - DNA, 201 bp, Homo sapiens
tgttagcagggtccaactgtctgtgttacatgaggctccagttatctcagctaagctgtttatgagccacactcacaaaaaagatcaccaaaagttaagtmtttttggtatatgtataggaacacctttctattagggcctgtttcaagcagcatttttggtgctttggatacaaagatagtatggtgcctcaattgaagg

SEQ ID NO: 469176 - DNA, 201 bp, Homo sapiens
gtgcggtttagcttttaagcttagtcttcctgggctgctggtgttgcgaggttgagggatggagatgaccctcaggtgctgcatgggcctggagcgggttyttcctggagctggagagggcatgatggcccgtgtgcgggagtggaaggcacagcattgtcattgctcttcttggaactgctttttctagtgaggaggtgg

SEQ ID NO: 469177 - DNA, 201 bp, Homo sapiens
agcgggtttttcctggagctggagagggcatgatggcccgtgtgcgggagtggaaggcacagcattgtcattgctcttcttggaactgctttttctagtgwggaggtggagggcctgggaaaggagggtgatgtggccagaaccccaggtccccagctgggggaggaggtggagcagacgcagggagattctgtacctgca

SEQ ID NO: 469178 - DNA, 201 bp, Homo sapiens
ggcccgtgtgcgggagtggaaggcacagcattgtcattgctcttcttggaactgctttttctagtgaggaggtggagggcctgggaaaggagggtgatgtsgccagaaccccaggtccccagctgggggaggaggtggagcagacgcagggagattctgtacctgcaccctgtcctcgccagtgaggtttggcacctagaa

SEQ ID NO: 469179 - DNA, 201 bp, Homo sapiens
ggcctgggaaaggagggtgatgtggccagaaccccaggtccccagctgggggaggaggtggagcagacgcagggagattctgtacctgcaccctgtcctcrccagtgaggtttggcacctagaactgcaagcagtattaccaggttcttttgtggtcttcagcaagtcctattaggcatctgcctgagtggtgggggttga

SEQ ID NO: 469180 - DNA, 201 bp, Homo sapiens
aaccctgttaatgcaagaaaaaaatcccatacctcaataaaataacactctgtttgtctcaagagtggaaacacaacacatttcctctcaactggtggtcscagatcgaccatcacagtgtatggatgtgttgggaggtgtgggaataggactgcactgaggctctagaaggccagcaggtggggcagactgaatggaggg

SEQ ID NO: 469181 - DNA, 201 bp, Homo sapiens
aaaggagggtgatgtggccagaaccccaggtccccagctgggggaggaggtggagcagacgcagggagattctgtacctgcaccctgtcctcgccagtgargtttggcacctagaactgcaagcagtattaccaggttcttttgtggtcttcagcaagtcctattaggcatctgcctgagtggtgggggttgaggggaggg

SEQ ID NO: 469182 - DNA, 201 bp, Homo sapiens
gtagcttgggattcaagtcataaatatactaggtctgtcttacctttcggtgcttttatttgttcccttttgaacatggctgaattttacttttctgtccmcctgcccgccattcgtgctacccctccttcctttttccactctcatctttttcccattttccagtctgtaaatcctacctatccttttattttttaaatt

SEQ ID NO: 469183 - DNA, 201 bp, Homo sapiens
accccaggtccccagctgggggaggaggtggagcagacgcagggagattctgtacctgcaccctgtcctcgccagtgaggtttggcacctagaactgcaarcagtattaccaggttcttttgtggtcttcagcaagtcctattaggcatctgcctgagtggtgggggttgaggggaggggctttctctcctggggggaaaa

SEQ ID NO: 469184 - DNA, 201 bp, Homo sapiens
ggggaggaggtggagcagacgcagggagattctgtacctgcaccctgtcctcgccagtgaggtttggcacctagaactgcaagcagtattaccaggttctwttgtggtcttcagcaagtcctattaggcatctgcctgagtggtgggggttgaggggaggggctttctctcctggggggaaaaagagctgctgggtaactg

SEQ ID NO: 469185 - DNA, 201 bp, Homo sapiens
ggaggtggagcagacgcagggagattctgtacctgcaccctgtcctcgccagtgaggtttggcacctagaactgcaagcagtattaccaggttcttttgtsgtcttcagcaagtcctattaggcatctgcctgagtggtgggggttgaggggaggggctttctctcctggggggaaaaagagctgctgggtaactgtgctc

SEQ ID NO: 469186 - DNA, 201 bp, Homo sapiens
ctctgtttgtctcaagagtggaaacacaacacatttcctctcaactggtggtcccagatcgaccatcacagtgtatggatgtgttgggaggtgtgggaatrggactgcactgaggctctagaaggccagcaggtggggcagactgaatggagggaggggactggcattcagtaactactggagagtgggaagagtgaggta

SEQ ID NO: 469187 - DNA, 201 bp, Homo sapiens
gaggtggagcagacgcagggagattctgtacctgcaccctgtcctcgccagtgaggtttggcacctagaactgcaagcagtattaccaggttcttttgtgstcttcagcaagtcctattaggcatctgcctgagtggtgggggttgaggggaggggctttctctcctggggggaaaaagagctgctgggtaactgtgctca

SEQ ID NO: 469188 - DNA, 201 bp, Homo sapiens
attctgtacctgcaccctgtcctcgccagtgaggtttggcacctagaactgcaagcagtattaccaggttcttttgtggtcttcagcaagtcctattaggyatctgcctgagtggtgggggttgaggggaggggctttctctcctggggggaaaaagagctgctgggtaactgtgctcagctgtggctacctgggaagtgg

SEQ ID NO: 469189 - DNA, 201 bp, Homo sapiens
aaacaaacatgaacacaggtttcttggatccttccttagatccactacttagttcatcctcggctccaacaaaatctggaactcacggtatgtagaattaktcacagatattttctttatatcatataacatacatcttcctttcagttaaatctttttgaaatgtttttgtttggcctcatatgcattttaaaaatcaac

SEQ ID NO: 469190 - DNA, 201 bp, Homo sapiens
actcatgatgccccttttctgaactgcttatacagatttctcattcttggcattactcctgattcctccttcatctacatgcacacgcgcctacacacacrcacacacacacagacacacatgtctgcctctcggatctccttctagagtcttagttcttgttttttttttcagaatttgggcaactaacaaggctagaaa

SEQ ID NO: 469191 - DNA, 201 bp, Homo sapiens
ctgaggagagtgactcatgatgccccttttctgaactgcttatacagatttctcattcttggcattactcctgattcctccttcatctacatgcacacgcrcctacacacacgcacacacacacagacacacatgtctgcctctcggatctccttctagagtcttagttcttgttttttttttcagaatttgggcaactaa

SEQ ID NO: 469192 - DNA, 201 bp, Homo sapiens
aaccatttttgtatgtgcttatcttcatctaggaagctttctttggaaaagatcttctagatacaagtagacaaagcaagataagtttagataatctgtcrgaagatggagctcagcttttatataaaacaaacatgaacacaggtttcttggatccttccttagatccactacttagttcatcctcggctccaacaaaat

SEQ ID NO: 469193 - DNA, 201 bp, Homo sapiens
attttctaaccatttttgtatgtgcttatcttcatctaggaagctttctttggaaaagatcttctagatacaagtagacaaagcaagataagtttagatartctgtcagaagatggagctcagcttttatataaaacaaacatgaacacaggtttcttggatccttccttagatccactacttagttcatcctcggctcca

SEQ ID NO: 469194 - DNA, 201 bp, Homo sapiens
cctttaatccaatggcaagtgatcctaacaactcttggacatcatcagctcccactgtggaaggagaaaatgacacaatgtcgaatgcccagagaagcacrcttaagtgggagaaagaggaggctctgggtgaaatggcaactgttgccccagttctctacaccaatattaatttccccaacttaaaggaagaattccctg

SEQ ID NO: 469195 - DNA, 201 bp, Homo sapiens
cctcgccagtgaggtttggcacctagaactgcaagcagtattaccaggttcttttgtggtcttcagcaagtcctattaggcatctgcctgagtggtggggrttgaggggaggggctttctctcctggggggaaaaagagctgctgggtaactgtgctcagctgtggctacctgggaagtggggtctgagggctgaaggatt

SEQ ID NO: 469196 - DNA, 201 bp, Homo sapiens
gctgggtaactgtgctcagctgtggctacctgggaagtggggtctgagggctgaaggattgtgatgaactctggcctgcttcctcaggtagttcagattcyttctcttgctgaatgacttatcattggaaaggaaaaactctgctatttgactgatttgtatatttacactcttatcttcactcagttcctctacttgcct

SEQ ID NO: 469197 - DNA, 201 bp, Homo sapiens
tttcctttcctaaggaaaaaggacatttaagactataagtttaccttcggctgtagctttggctgaagccaaatttattgtatttgtaactttatgtatgyatataccttaccgaatatctttatcttttttttaagttgtgctgaagtatgttaatttatgctttcatttcatttaatcagataatttaactaaggtagg

SEQ ID NO: 469198 - DNA, 201 bp, Homo sapiens
atttaagactataagtttaccttcggctgtagctttggctgaagccaaatttattgtatttgtaactttatgtatgtatataccttaccgaatatctttawcttttttttaagttgtgctgaagtatgttaatttatgctttcatttcatttaatcagataatttaactaaggtaggttttttaaaataaatgtgttgata

SEQ ID NO: 469199 - DNA, 201 bp, Homo sapiens
actgtgttagccagcatggtctcgatctcatgacctcgtgatctgcctgccgcctcggccccccaaagtgctgggattacaggcatgagcccctgcacctrgcccaggaagaccattttttaaaaacatgcaacctttctgcctgtaatccaaggaaatttgacctattgttcatagtttttattgggtatcatgaagtta

SEQ ID NO: 469200 - DNA, 201 bp, Homo sapiens
tttaagactataagtttaccttcggctgtagctttggctgaagccaaatttattgtatttgtaactttatgtatgtatataccttaccgaatatctttatrttttttttaagttgtgctgaagtatgttaatttatgctttcatttcatttaatcagataatttaactaaggtaggttttttaaaataaatgtgttgatac

SEQ ID NO: 469201 - DNA, 201 bp, Homo sapiens
ttaagactataagtttaccttcggctgtagctttggctgaagccaaatttattgtatttgtaactttatgtatgtatataccttaccgaatatctttatcktttttttaagttgtgctgaagtatgttaatttatgctttcatttcatttaatcagataatttaactaaggtaggttttttaaaataaatgtgttgatact

SEQ ID NO: 469202 - DNA, 201 bp, Homo sapiens
taagactataagtttaccttcggctgtagctttggctgaagccaaatttattgtatttgtaactttatgtatgtatataccttaccgaatatctttatctyttttttaagttgtgctgaagtatgttaatttatgctttcatttcatttaatcagataatttaactaaggtaggttttttaaaataaatgtgttgatactt

SEQ ID NO: 469203 - DNA, 201 bp, Homo sapiens
agtttaccttcggctgtagctttggctgaagccaaatttattgtatttgtaactttatgtatgtatataccttaccgaatatctttatcttttttttaagytgtgctgaagtatgttaatttatgctttcatttcatttaatcagataatttaactaaggtaggttttttaaaataaatgtgttgatacttgtagtgactt

SEQ ID NO: 469204 - DNA, 201 bp, Homo sapiens
tatctttatcttttttttaagttgtgctgaagtatgttaatttatgctttcatttcatttaatcagataatttaactaaggtaggttttttaaaataaatrtgttgatacttgtagtgactttttaaaggtgtagcatttgtgtttattaatttcatttagttagatgaagtccttttaccttattttttgacttgttgat

SEQ ID NO: 469205 - DNA, 201 bp, Homo sapiens
tctaataaccgcttccttaagaaaagtcatacatcatcactttggtgtatcagaaacaaattccttatgcaataaaagcatacttctttctcattcacctmctgggatctagaaaccctgttaatgcaagaaaaaaatcccatacctcaataaaataacactctgtttgtctcaagagtggaaacacaacacatttcctct

SEQ ID NO: 469206 - DNA, 201 bp, Homo sapiens
ttttttaagttgtgctgaagtatgttaatttatgctttcatttcatttaatcagataatttaactaaggtaggttttttaaaataaatgtgttgatacttktagtgactttttaaaggtgtagcatttgtgtttattaatttcatttagttagatgaagtccttttaccttattttttgacttgttgattcaacaagttgt

SEQ ID NO: 469207 - DNA, 201 bp, Homo sapiens
tactggagagtgggaagagtgaggtagactatccatctggtgaaggtggctgcttccttgaggtttgttactttctgtaatgttaattccctcaacttttraaatttgatttttagacaagttatacattcaaatgatttaaaattggaaaataattaaaaggtaaacagtgaagtctctccctttcccctgccttcatgc

SEQ ID NO: 469208 - DNA, 201 bp, Homo sapiens
gaattagtgtttatgcatagtctatgtgaaacaactacaagagaaaatattttcagaaaagttgagcaaacactaacttagtacaacctgaagtggaatcygctaagatgcgttacagttgatagtggcaaaaataactgtggagcagaaagacttgagttggacaaatttacaaagcttgttaaatgtcaggtgtttaaa

SEQ ID NO: 469209 - DNA, 201 bp, Homo sapiens
tttggaaatgcatcaacagttttacccaccatagcttttgcatcgtgtaacaatttttgcttcaattgttaaacattattttgaaaactcaaggaacagtraagtctgttttattgcccatatttttactatttgtttgttctttcttccttcaggatgttctgagaatccttctttttatcattctcctttctggttcaa

SEQ ID NO: 469210 - DNA, 201 bp, Homo sapiens
tttgatagataattatgacatctatgaattctcattgtttgcaccttttgactatattttcaaattcctgttcagattttcctggttcttagtatggtatracatgttatatttggttgaatcctttgcattttaagtgttgtgttatgaagctctgcattttatttaaatacccccttttagtaggatttatctgaaact

SEQ ID NO: 469211 - DNA, 201 bp, Homo sapiens
ggatgaaaatgtaggaattatctgtgtaattgtgctaattgcacatgtgggaaggatgagatttattaagagaatatactgccagtagagtatagaatctygaggaatgctttttaattaaatgtaattaagtatatgcttaactcatctgatttatattaggtgtgcaattacatgtttcttatctttcttccttttaaa

SEQ ID NO: 469212 - DNA, 201 bp, Homo sapiens
ttatctttcttccttttaaaggttaggtgaaagtaaaaaaagtggtgagagatttgagacattgagtgagaggtataggatcttggaaatgaatgatcatyagagacaggttgtacagttaagtaacatgactacttgaaaaacattgtttcattggaccatgggaaggttgttgctaatcttcagtggagtaacttcaat

SEQ ID NO: 469213 - DNA, 201 bp, Homo sapiens
gcaactaacaaggctagaaaggaggccatctaaaaaagtgattggtgttgaaaagttgctgctcctgtcctagcagcacaactcttcacgtcatagtaatrggagtaatgacgatgatgagtgtggacaactaatgagcacttaactgtagtaccaggcactattctcagaattcattagtgtgacaaccctctaaggtag

SEQ ID NO: 469214 - DNA, 201 bp, Homo sapiens
tacttttgcattcagttgccttctagtcagaattaagtgcaaaaacccaaaattgggacaagaaaatacaactatttatggcaaagacccatattttgttrgtatgtttctctacaagttgtgctaccaacctgaatagtgcacctggcaggccaccagcacgggagtacaagctgcgcagtgagagctgcttccatttca

SEQ ID NO: 469215 - DNA, 201 bp, Homo sapiens
tttgtcttggtagcctgccgcttccctgcttttttgacaaaagacagcagaattttcttggagttttacgtatgtgtgtgcctgttggtgtttctgagttrtctgcttctctagcaacttttcttgtatatatgagtcagaaaggaaacctagggaattcatcctcttttgtttcttggctcctgaagccctaattggtct

SEQ ID NO: 469216 - DNA, 201 bp, Homo sapiens
ttatgatttagtagctaaatttgaagctgatacctctgtgtttagttgggatgagttacatctgtgggcttaggcaattgtagagcagggcagcacactasggttttactctagtcacctcaggccagtacagaatattaccaatgtgctgttcctggcagaagacataaatgtgagcatttagcatgaggattaattttt

SEQ ID NO: 469217 - DNA, 201 bp, Homo sapiens
tttaagttgtgctgaagtatgttaatttatgctttcatttcatttaatcagataatttaactaaggtaggttttttaaaataaatgtgttgatacttgtaktgactttttaaaggtgtagcatttgtgtttattaatttcatttagttagatgaagtccttttaccttattttttgacttgttgattcaacaagttgttac

SEQ ID NO: 469218 - DNA, 201 bp, Homo sapiens
tgttcctatcaatttatcatatttttaaacaaataccttgtggctgttatttagcaagtaggtcacgccagtgttaatatattgtgctttttaccagtatraaattgttctttattctatgtaatgtgttttttgttgagggatcaggaagggcaggtattttgctttgcctgacactatggccacgtagggtgttagttt

SEQ ID NO: 469219 - DNA, 201 bp, Homo sapiens
caatttatcatatttttaaacaaataccttgtggctgttatttagcaagtaggtcacgccagtgttaatatattgtgctttttaccagtataaaattgttmtttattctatgtaatgtgttttttgttgagggatcaggaagggcaggtattttgctttgcctgacactatggccacgtagggtgttagtttaacagttga

SEQ ID NO: 469220 - DNA, 201 bp, Homo sapiens
aatatattgtgctttttaccagtataaaattgttctttattctatgtaatgtgttttttgttgagggatcaggaagggcaggtattttgctttgcctgacwctatggccacgtagggtgttagtttaacagttgaatggttatcttttcacatctttttattttggattcttttgtgttataaaaatgttatcttttgaaa

SEQ ID NO: 469221 - DNA, 201 bp, Homo sapiens
gaggtatacaacatgctttgtatacatagtgaaatgattactatggtcaaacaaatgtctgtatccttcaccttccatagttactctctgtgtgtgtacasctaaaatctctttcagcaaattttcattacaatattattaactgtggttctcatgctgtgtattaatttgatctctagaattactcgtcttacctaactg

SEQ ID NO: 469222 - DNA, 201 bp, Homo sapiens
ttgttctttattctatgtaatgtgttttttgttgagggatcaggaagggcaggtattttgctttgcctgacactatggccacgtagggtgttagtttaacrgttgaatggttatcttttcacatctttttattttggattcttttgtgttataaaaatgttatcttttgaaaagcttaatagaggtaactgtttggattga

SEQ ID NO: 469223 - DNA, 201 bp, Homo sapiens
attctatgtaatgtgttttttgttgagggatcaggaagggcaggtattttgctttgcctgacactatggccacgtagggtgttagtttaacagttgaatgrttatcttttcacatctttttattttggattcttttgtgttataaaaatgttatcttttgaaaagcttaatagaggtaactgtttggattgatggttgtaa

SEQ ID NO: 469224 - DNA, 201 bp, Homo sapiens
tatatgagtcagaaaggaaacctagggaattcatcctcttttgtttcttggctcctgaagccctaattggtctgccctctctctacattttgttgtcttcytttgtttgtcttatgtatcacggctaagggtttttaaagctgtatttagtggaaagaacagggaaaagtacattttctgcattttgtctggaagtggaag

SEQ ID NO: 469225 - DNA, 201 bp, Homo sapiens
attttggattcttttgtgttataaaaatgttatcttttgaaaagcttaatagaggtaactgtttggattgatggttgtaattgaaatgcttggctgttttraggcaaaattgttcttataattcctttctacttttctcttcttttacttcctgcaatgatttataattcagaatctcattttgtgaatgtaaatgattat

SEQ ID NO: 469226 - DNA, 201 bp, Homo sapiens
ttaaagctgtatttagtggaaagaacagggaaaagtacattttctgcattttgtctggaagtggaagtctgcattcatttttgctgtttttccctgaatayagagttctgggatgattatgtttttcttcttcaagcatttaaaagatgttgcattgtttcctgtcttccatggtttctaatgagaagtcaggtgtggtgt

SEQ ID NO: 469227 - DNA, 201 bp, Homo sapiens
tttgtaccctccgacctacttctgcccatcccacccatcccctacctccagacccttgataaccaccattctactctctatacgttcagcttctcaccccsctgcctaccattctgcttattaagtgagatcatacagtatttttctgtgtctggcttactttatttagtatactttcctcccggttcatccatgttgtca

SEQ ID NO: 469228 - DNA, 201 bp, Homo sapiens
ggattttctctttatctttggttttcagcagtctgactatgatgtgcctaggtgtggttttctttgtattcatcctgcttgggggttgctgagcttcttgmaactgtaagttgatatttttcaccaaatttgtgaaaagcttgacttttatttcttattctttttctgtctcatttctctctcctcttcctctgtaactct

SEQ ID NO: 469229 - DNA, 201 bp, Homo sapiens
ttggattcttttgtgttataaaaatgttatcttttgaaaagcttaatagaggtaactgtttggattgatggttgtaattgaaatgcttggctgttttgagrcaaaattgttcttataattcctttctacttttctcttcttttacttcctgcaatgatttataattcagaatctcattttgtgaatgtaaatgattataaa

SEQ ID NO: 469230 - DNA, 201 bp, Homo sapiens
tcttttacttcctgcaatgatttataattcagaatctcattttgtgaatgtaaatgattataaatgttaaagatataaaatttctcccattccccactgamaatgaagtttttattccccttttctctgtttgatttgattaacctagattataaaccttgtcacaattttctttcaaaaatatatttcctctgttaattc

SEQ ID NO: 469231 - DNA, 201 bp, Homo sapiens
tcattttgtgaatgtaaatgattataaatgttaaagatataaaatttctcccattccccactgaaaatgaagtttttattccccttttctctgtttgattygattaacctagattataaaccttgtcacaattttctttcaaaaatatatttcctctgttaattccaactttaccctcaatctttcggagtcttggttatg

SEQ ID NO: 469232 - DNA, 201 bp, Homo sapiens
gagacagagtcatcattttcatcatcagcagacataagcaaggcagatgtgtcttcctccccaacaccttcttcagacttgccttcgcatgacatgctgcrtaattacccttcagctcttagttcctctgctggaaacatcatgccaacaacttacatctcagtcactccaaaaattggcatgggtaaaccagctattact

SEQ ID NO: 469233 - DNA, 201 bp, Homo sapiens
gtatgacaaaactgatttttttttcattttgcattatgccaaaattagattgaaggaaacagtgttacttgaggacctgctgtatgttcatttagcttaaygtctcagttcccaagaacctattgatgacattaagggaggacttaatatatgtgtatacacacgtcacaatttctttatccattcatctgtccttgaatg

SEQ ID NO: 469234 - DNA, 201 bp, Homo sapiens
tcagaatttgggcaactaacaaggctagaaaggaggccatctaaaaaagtgattggtgttgaaaagttgctgctcctgtcctagcagcacaactcttcacktcatagtaataggagtaatgacgatgatgagtgtggacaactaatgagcacttaactgtagtaccaggcactattctcagaattcattagtgtgacaacc

SEQ ID NO: 469235 - DNA, 201 bp, Homo sapiens
gagtcttagttcttgttttttttttcagaatttgggcaactaacaaggctagaaaggaggccatctaaaaaagtgattggtgttgaaaagttgctgctccygtcctagcagcacaactcttcacgtcatagtaataggagtaatgacgatgatgagtgtggacaactaatgagcacttaactgtagtaccaggcactattc

SEQ ID NO: 469236 - DNA, 201 bp, Homo sapiens
gttattttgatcttaagagtcatataaataggtcaaaatgtttattttactgtcctactttgcttttttttttgagcctctggttatgttttcttgtatakttactttctcatcctttctcttttcttaccttcctctttgactccttatctttctatgccaaccctctctaaaaagtcagtatgtaatatagttgctctt

SEQ ID NO: 469237 - DNA, 201 bp, Homo sapiens
tgtattacctggggtgaggcttgcttcatgtatattttctctaatctaaatgtcagttaatgatgaaaatctcatagcaagttattttgatcttaagagtyatataaataggtcaaaatgtttattttactgtcctactttgcttttttttttgagcctctggttatgttttcttgtatatttactttctcatcctttctc

SEQ ID NO: 469238 - DNA, 201 bp, Homo sapiens
tgaaggagcaaaggagagtgacaagggactggatgccatttataaggatggggaagactgggatgaaaccggttaagggagaaattttaaacatggcaaamttaagaggggttttgtgtgagaaaatggaaatgctaagaaggaagttgaaaatcctgctaatttggagatctttgattaaaactagaaataagaatatgg

SEQ ID NO: 469239 - DNA, 201 bp, Homo sapiens
ttaaagatataaaatttctcccattccccactgaaaatgaagtttttattccccttttctctgtttgatttgattaacctagattataaaccttgtcacarttttctttcaaaaatatatttcctctgttaattccaactttaccctcaatctttcggagtcttggttatgttcctttaaaaataattataaattttctga

SEQ ID NO: 469240 - DNA, 201 bp, Homo sapiens
agggtcggagaagcataaccagcagtagactcttgtagcaggttaggtgagagatggtggtggccacgactgagctgctagtggtggaagtgacaagaagyagaaggattggagacaaaacttgaagataaaaagtcttgaatttgctgatgatttgcattgatgaagtgttgggggagaggactgaaggagcaaaggaga

SEQ ID NO: 469241 - DNA, 201 bp, Homo sapiens
tttctcccattccccactgaaaatgaagtttttattccccttttctctgtttgatttgattaacctagattataaaccttgtcacaattttctttcaaaamtatatttcctctgttaattccaactttaccctcaatctttcggagtcttggttatgttcctttaaaaataattataaattttctgaaaccctacatgtct

SEQ ID NO: 469242 - DNA, 201 bp, Homo sapiens
actgtgatgttcctggagtattggaacaatacctatgactttttgtttctatttatttttaactcttctaataaccgcttccttaagaaaagtcatacatyatcactttggtgtatcagaaacaaattccttatgcaataaaagcatacttctttctcattcacctcctgggatctagaaaccctgttaatgcaagaaaaa

SEQ ID NO: 469243 - DNA, 201 bp, Homo sapiens
ataacactctgtttgtctcaagagtggaaacacaacacatttcctctcaactggtggtcccagatcgaccatcacagtgtatggatgtgttgggaggtgtrggaataggactgcactgaggctctagaaggccagcaggtggggcagactgaatggagggaggggactggcattcagtaactactggagagtgggaagagt

SEQ ID NO: 469244 - DNA, 201 bp, Homo sapiens
tctttcctttttttctttccttcctttctttctctttctctctctttttttttttctttgaaagggtgtcactctgttgcccaggctggagtacagtgccrtgctcacaactcactgcagtctcaacttcctgggctcaggcaatcctcccaccacagcctccaagtggctgggactacagttgtgtgctcaccacaccag

SEQ ID NO: 469245 - DNA, 201 bp, Homo sapiens
gaaaatgaagtttttattccccttttctctgtttgatttgattaacctagattataaaccttgtcacaattttctttcaaaaatatatttcctctgttaaytccaactttaccctcaatctttcggagtcttggttatgttcctttaaaaataattataaattttctgaaaccctacatgtctgaaagagactgttccctt

SEQ ID NO: 469246 - DNA, 201 bp, Homo sapiens
atttttgacttggaaaccattctgctaaatagggaataagttcatttcaaactatgataagggacatcagttgaagatatgacatattatttaacttaacsgtgagggaaacatctaagtattttcctgagcatctggataattttaaatatacataattcatctacttagggaggtgccaggttttttcaaggagtaatt

SEQ ID NO: 469247 - DNA, 201 bp, Homo sapiens
ccccttttctctgtttgatttgattaacctagattataaaccttgtcacaattttctttcaaaaatatatttcctctgttaattccaactttaccctcaayctttcggagtcttggttatgttcctttaaaaataattataaattttctgaaaccctacatgtctgaaagagactgttccctttaggctataagaacttgg

SEQ ID NO: 469248 - DNA, 201 bp, Homo sapiens
ttctctgtttgatttgattaacctagattataaaccttgtcacaattttctttcaaaaatatatttcctctgttaattccaactttaccctcaatctttcrgagtcttggttatgttcctttaaaaataattataaattttctgaaaccctacatgtctgaaagagactgttccctttaggctataagaacttggcacagt

SEQ ID NO: 469249 - DNA, 201 bp, Homo sapiens
ggaaacagtgttacttgaggacctgctgtatgttcatttagcttaacgtctcagttcccaagaacctattgatgacattaagggaggacttaatatatgtrtatacacacgtcacaatttctttatccattcatctgtccttgaatgggtaagtaaattgtccatcaggacacttagtttgtttccatatcttggctattg

SEQ ID NO: 469250 - DNA, 201 bp, Homo sapiens
ttgtcacaattttctttcaaaaatatatttcctctgttaattccaactttaccctcaatctttcggagtcttggttatgttcctttaaaaataattataamttttctgaaaccctacatgtctgaaagagactgttccctttaggctataagaacttggcacagtataatgtttcatattacaaatttttctttcttatac

SEQ ID NO: 469251 - DNA, 201 bp, Homo sapiens
gtgttacttgaggacctgctgtatgttcatttagcttaacgtctcagttcccaagaacctattgatgacattaagggaggacttaatatatgtgtatacamacgtcacaatttctttatccattcatctgtccttgaatgggtaagtaaattgtccatcaggacacttagtttgtttccatatcttggctattgggagtaa

SEQ ID NO: 469252 - DNA, 201 bp, Homo sapiens
tgtcacaattttctttcaaaaatatatttcctctgttaattccaactttaccctcaatctttcggagtcttggttatgttcctttaaaaataattataaaktttctgaaaccctacatgtctgaaagagactgttccctttaggctataagaacttggcacagtataatgtttcatattacaaatttttctttcttatact

SEQ ID NO: 469253 - DNA, 201 bp, Homo sapiens
gaacctattgatgacattaagggaggacttaatatatgtgtatacacacgtcacaatttctttatccattcatctgtccttgaatgggtaagtaaattgtscatcaggacacttagtttgtttccatatcttggctattgggagtaatgtcgccatgaatatgggagtgcagatgtctctctcagatgctgattttattac

SEQ ID NO: 469254 - DNA, 201 bp, Homo sapiens
attacatggtgtggcttccttcaggagtttattagggatttggagattcccaaatattctactaacttatacccttgagagaggggagaataaacagaggrgtgaatgtgaacttcagaattcctagcttcatagtctaaatagaaatcctctaagatcataaaatgtccctaagaactcatgccttacattaattttttt

SEQ ID NO: 469255 - DNA, 201 bp, Homo sapiens
tattttatgtaataacttcgctattttattaaaattctgtttttaaaattctgaaatgtcattttaagtataggagacaggtgaaattgttcaagtttacyactaaaccaggaataaggaagcttagattcttgtccttttttcaaaaagaaaaattttaaaaccaggcttattgaggtacagttgatataagctatattt

SEQ ID NO: 469256 - DNA, 201 bp, Homo sapiens
aatatatttcctctgttaattccaactttaccctcaatctttcggagtcttggttatgttcctttaaaaataattataaattttctgaaaccctacatgtytgaaagagactgttccctttaggctataagaacttggcacagtataatgtttcatattacaaatttttctttcttatactctgaaaacattttcttcagt

SEQ ID NO: 469257 - DNA, 201 bp, Homo sapiens
atatatttcctctgttaattccaactttaccctcaatctttcggagtcttggttatgttcctttaaaaataattataaattttctgaaaccctacatgtcrgaaagagactgttccctttaggctataagaacttggcacagtataatgtttcatattacaaatttttctttcttatactctgaaaacattttcttcagtt

SEQ ID NO: 469258 - DNA, 201 bp, Homo sapiens
tacttccttttttttatttttggttaagaccgactttttgatagtttttagtagtttaattataaaaccatttaggctttgattacttcaatttttttttytttttgagatagaatttcgcccttgttgcccaggctggagtgcagtggtgcaatctcggctcaccgcaacttctgcctcccaggttcaagcaattctcct

SEQ ID NO: 469259 - DNA, 201 bp, Homo sapiens
ctttcggagtcttggttatgttcctttaaaaataattataaattttctgaaaccctacatgtctgaaagagactgttccctttaggctataagaacttggmacagtataatgtttcatattacaaatttttctttcttatactctgaaaacattttcttcagttttttcagtttatgctgtcacaagaaaaatcttaactt

SEQ ID NO: 469260 - DNA, 201 bp, Homo sapiens
tactactaaaccaggaataaggaagcttagattcttgtccttttttcaaaaagaaaaattttaaaaccaggcttattgaggtacagttgatataagctatrtttgacatgtacaattccataagctttgatatatatatatatatacacccttgaaaacgataccacaatcatgatagtgaatatattcatctcccaaagc

SEQ ID NO: 469261 - DNA, 201 bp, Homo sapiens
gaaaaatggctattcaggtccttgcctattttaaaatccagttatttgggatttttttgctactgagttgtgtgagttccttatatgttttggattttaaycccttatcagatgtgtggtttgccaatattttcccctaatccctgtgctaccttttcaccccggtgttttttttttttttttattgctatgcagaagctt

SEQ ID NO: 469262 - DNA, 201 bp, Homo sapiens
gaagcttagattcttgtccttttttcaaaaagaaaaattttaaaaccaggcttattgaggtacagttgatataagctatatttgacatgtacaattccatmagctttgatatatatatatatatacacccttgaaaacgataccacaatcatgatagtgaatatattcatctcccaaagcttcttcatgcccctctgtaat

SEQ ID NO: 469263 - DNA, 201 bp, Homo sapiens
ctatgttgtccaggctggtctcaaacttctgagctcaagcagttttcccaccttggcttcccaaagtgctgggattacaggcgtgagtcaccatgccccascctgtagtcttacattcttgtaatgtcttcgtctggttttggtatcagcataactacagcttcatagaatgaatcaggaagtatattctcctcttcagtt

SEQ ID NO: 469264 - DNA, 201 bp, Homo sapiens
gaaatatccacaggtggactgctgccaaatccagcagaacagtatgccagatgtcaggagcatgagtaaaatgagaaaagagaaatggcttttgacaacasttccttactaatagtagggaagaagacataggtacagattcaagttgattggaaattatgaaagtgaggtaattgacctgcagtggttgctgctcagtga

SEQ ID NO: 469265 - DNA, 201 bp, Homo sapiens
agcgaggaaggcagtgaaatatccacaggtggactgctgccaaatccagcagaacagtatgccagatgtcaggagcatgagtaaaatgagaaaagagaaayggcttttgacaacacttccttactaatagtagggaagaagacataggtacagattcaagttgattggaaattatgaaagtgaggtaattgacctgcagtg

SEQ ID NO: 469266 - DNA, 201 bp, Homo sapiens
aaagattagcgaggaaggcagtgaaatatccacaggtggactgctgccaaatccagcagaacagtatgccagatgtcaggagcatgagtaaaatgagaaargagaaatggcttttgacaacacttccttactaatagtagggaagaagacataggtacagattcaagttgattggaaattatgaaagtgaggtaattgacc

SEQ ID NO: 469267 - DNA, 201 bp, Homo sapiens
gaagaacacgtacaggagatgaagaaagattagcgaggaaggcagtgaaatatccacaggtggactgctgccaaatccagcagaacagtatgccagatgtyaggagcatgagtaaaatgagaaaagagaaatggcttttgacaacacttccttactaatagtagggaagaagacataggtacagattcaagttgattggaa

SEQ ID NO: 469268 - DNA, 201 bp, Homo sapiens
gatctaggctcaagccctgggaaactccagggctttggaagtcaaatagaggaagaacacgtacaggagatgaagaaagattagcgaggaaggcagtgaawtatccacaggtggactgctgccaaatccagcagaacagtatgccagatgtcaggagcatgagtaaaatgagaaaagagaaatggcttttgacaacacttc

SEQ ID NO: 469269 - DNA, 201 bp, Homo sapiens
tctgaaaccctacatgtctgaaagagactgttccctttaggctataagaacttggcacagtataatgtttcatattacaaatttttctttcttatactctsaaaacattttcttcagttttttcagtttatgctgtcacaagaaaaatcttaactttaaaaaatttaatcataatcctttttttcttcctgaaagctttgg

SEQ ID NO: 469270 - DNA, 201 bp, Homo sapiens
ttgaaatagaatagtgacttgcttgatcacatttgtacttttgaaaagtttctctggctgctgtggggaaaggcttcagtagatgcagggtcggagaagcwtaaccagcagtagactcttgtagcaggttaggtgagagatggtggtggccacgactgagctgctagtggtggaagtgacaagaagtagaaggattggaga

SEQ ID NO: 469271 - DNA, 201 bp, Homo sapiens
ccctttaggctataagaacttggcacagtataatgtttcatattacaaatttttctttcttatactctgaaaacattttcttcagttttttcagtttatgytgtcacaagaaaaatcttaactttaaaaaatttaatcataatcctttttttcttcctgaaagctttgggagatgtgtgagtccccatcccccacgccacc

SEQ ID NO: 469272 - DNA, 201 bp, Homo sapiens
ggctataagaacttggcacagtataatgtttcatattacaaatttttctttcttatactctgaaaacattttcttcagttttttcagtttatgctgtcacragaaaaatcttaactttaaaaaatttaatcataatcctttttttcttcctgaaagctttgggagatgtgtgagtccccatcccccacgccaccccagcac

SEQ ID NO: 469273 - DNA, 201 bp, Homo sapiens
ataatgtgggcacttgattggttctgtctgaggatcctagtcttttgagatctttaagaagttccacaatcttaatattacatggtgtggcttccttcagkagtttattagggatttggagattcccaaatattctactaacttatacccttgagagaggggagaataaacagaggagtgaatgtgaacttcagaattcct

SEQ ID NO: 469274 - DNA, 201 bp, Homo sapiens
tgctgtcacaagaaaaatcttaactttaaaaaatttaatcataatcctttttttcttcctgaaagctttgggagatgtgtgagtccccatcccccacgccrccccagcacctttttaaaaaaatatatttacttaaaaaattaccttctttacactctctaataatatctagtaactactggataatttttgttcttgctc

SEQ ID NO: 469275 - DNA, 201 bp, Homo sapiens
agttcagggtattgctgaatgtggttgtttggaagtaaaatgctttagttttagttatatagattttaataagatactactttctatataatttatcaggyactttaggcattttaatttgcaaatttaggacaatttgctttaacgtttcttcacttttgtccattggatgtaatttccataaagtattcatttccctaa

SEQ ID NO: 469276 - DNA, 201 bp, Homo sapiens
ttaatcataatcctttttttcttcctgaaagctttgggagatgtgtgagtccccatcccccacgccaccccagcacctttttaaaaaaatatatttacttwaaaaattaccttctttacactctctaataatatctagtaactactggataatttttgttcttgctcttgatcttctttattagggttttcattatcttga

SEQ ID NO: 469277 - DNA, 201 bp, Homo sapiens
agagtgaatataagctgagaaacttgagagtttggttataaaagggaccacaggtatctgtgaagaaaacttagtaggaatgaagataaatatttttaaarttctgccactgaacacctcagatctgtctgccactttatcttcaggtcattgtttaagccagggtcacgcagactggcccatagactaaatctggcccat

SEQ ID NO: 469278 - DNA, 201 bp, Homo sapiens
ccaccccagcacctttttaaaaaaatatatttacttaaaaaattaccttctttacactctctaataatatctagtaactactggataatttttgttcttgytcttgatcttctttattagggttttcattatcttgagaactggtagagaattctgggtgtctttctcagcttgttctgtctcccctttggtgtgcttctt

SEQ ID NO: 469279 - DNA, 201 bp, Homo sapiens
tctagtaactactggataatttttgttcttgctcttgatcttctttattagggttttcattatcttgagaactggtagagaattctgggtgtctttctcarcttgttctgtctcccctttggtgtgcttctttctaatttgctctttgtaatctgctattctcttttgagagtgacagaattacataatttctgggaatac

SEQ ID NO: 469280 - DNA, 201 bp, Homo sapiens
gctggtctcaaacttctgagctcaagcagttttcccaccttggcttcccaaagtgctgggattacaggcgtgagtcaccatgccccagcctgtagtcttamattcttgtaatgtcttcgtctggttttggtatcagcataactacagcttcatagaatgaatcaggaagtatattctcctcttcagttttctggaaaagtt

SEQ ID NO: 469281 - DNA, 201 bp, Homo sapiens
ataatttttgttcttgctcttgatcttctttattagggttttcattatcttgagaactggtagagaattctgggtgtctttctcagcttgttctgtctccyctttggtgtgcttctttctaatttgctctttgtaatctgctattctcttttgagagtgacagaattacataatttctgggaatactattggatacttaat

SEQ ID NO: 469282 - DNA, 201 bp, Homo sapiens
ttggaactgctttttctagtgaggaggtggagggcctgggaaaggagggtgatgtggccagaaccccaggtccccagctgggggaggaggtggagcagackcagggagattctgtacctgcaccctgtcctcgccagtgaggtttggcacctagaactgcaagcagtattaccaggttcttttgtggtcttcagcaagtcc

SEQ ID NO: 469283 - DNA, 201 bp, Homo sapiens
ctggtctcaaacttctgagctcaagcagttttcccaccttggcttcccaaagtgctgggattacaggcgtgagtcaccatgccccagcctgtagtcttacwttcttgtaatgtcttcgtctggttttggtatcagcataactacagcttcatagaatgaatcaggaagtatattctcctcttcagttttctggaaaagttg

SEQ ID NO: 469284 - DNA, 201 bp, Homo sapiens
  misc_feature (1)...(201): n = A,T,C or G
tgatcttctttattagggttttcattatcttgagaactggtagagaattctgggtgtctttctcagcttgttctgtctcccctttggtgtgcttctttctnatttgctctttgtaatctgctattctcttttgagagtgacagaattacataatttctgggaatactattggatacttaatctttttatcctgttctatga

SEQ ID NO: 469285 - DNA, 201 bp, Homo sapiens
ctttggtgtgcttctttctaatttgctctttgtaatctgctattctcttttgagagtgacagaattacataatttctgggaatactattggatacttaatytttttatcctgttctatgaagggactatagtgtggtggttcaaagcttatgctgtggagtcaaaatgcagttttttcagttactaaattgatgatctttg

SEQ ID NO: 469286 - DNA, 201 bp, Homo sapiens
ttagcaagtaggtcacgccagtgttaatatattgtgctttttaccagtataaaattgttctttattctatgtaatgtgttttttgttgagggatcaggaarggcaggtattttgctttgcctgacactatggccacgtagggtgttagtttaacagttgaatggttatcttttcacatctttttattttggattcttttgt

SEQ ID NO: 469287 - DNA, 201 bp, Homo sapiens
ccaataggcctctcctgtcatatctctgtagagggagggatagggatatgtccttatcactgggtgggtgttgaactcaggctccccactttttttccacycacactctagagggaggaagccgcgttactgctcagtgggtatgaatgtcctgtgtcccagttggcctgctgtggtatcatgttgtccgtgggcaggagt

SEQ ID NO: 469288 - DNA, 201 bp, Homo sapiens
gcttaaactggtttgttgttgtctatgagttttttgtcttggtagcctgccgcttccctgcttttttgacaaaagacagcagaattttcttggagttttaygtatgtgtgtgcctgttggtgtttctgagttgtctgcttctctagcaacttttcttgtatatatgagtcagaaaggaaacctagggaattcatcctcttt

SEQ ID NO: 469289 - DNA, 201 bp, Homo sapiens
ttgctttctgtttgctaaataaaaatcccttttaaaaattcagtattgccacactttgccatattaaaaatgttttagattactatattatcctgaaactrcatgtacacacacacccctaaaataagttttatggtatttcatatgcctgtacaggagaaaaaatagggaaagaatacaatcatcgtaagttcttattat

SEQ ID NO: 469290 - DNA, 201 bp, Homo sapiens
atatccgtatattagaaatactgaagttcagtattctgttacatgaatttctttggtattaggcatttctgtattatacttctgtttttatttactgtttyttctacatattcttcacgttggggattggctgtaaaataagctgcattttcctggctgtgattgtgatgtaagcaagattctttggtttccagctatttt

SEQ ID NO: 469291 - DNA, 201 bp, Homo sapiens
ctgaagttcagtattctgttacatgaatttctttggtattaggcatttctgtattatacttctgtttttatttactgtttcttctacatattcttcacgtyggggattggctgtaaaataagctgcattttcctggctgtgattgtgatgtaagcaagattctttggtttccagctattttttgttaacatcactggcatt

SEQ ID NO: 469292 - DNA, 201 bp, Homo sapiens
tcagtattctgttacatgaatttctttggtattaggcatttctgtattatacttctgtttttatttactgtttcttctacatattcttcacgttggggatyggctgtaaaataagctgcattttcctggctgtgattgtgatgtaagcaagattctttggtttccagctattttttgttaacatcactggcattttcatat

SEQ ID NO: 469293 - DNA, 201 bp, Homo sapiens
gacttgtcaaaaattagctcataatatatgcttgggtttatttttgggctctgtattcagttccattgatccatgtgtctgtttttatgccagtaccataytgttttgttaactatcactttgtaatataacttgaaatcaggtagtgtgataccttctactttgtttttctttctcaagattcttttggctattcagggt

SEQ ID NO: 469294 - DNA, 201 bp, Homo sapiens
tattctgttacatgaatttctttggtattaggcatttctgtattatacttctgtttttatttactgtttcttctacatattcttcacgttggggattggckgtaaaataagctgcattttcctggctgtgattgtgatgtaagcaagattctttggtttccagctattttttgttaacatcactggcattttcatattttg

SEQ ID NO: 469295 - DNA, 201 bp, Homo sapiens
tgataccttctactttgtttttctttctcaagattcttttggctattcagggtcttttatgatttaatacaaattttagaattgtgttttctatttttgtraaaaatgcctttggaaatttgatagggattgcattgaatctgtagatcactttggatagtatggacattttaacaatattcttccaatctacaaacatgg

SEQ ID NO: 469296 - DNA, 201 bp, Homo sapiens
gtattaggcatttctgtattatacttctgtttttatttactgtttcttctacatattcttcacgttggggattggctgtaaaataagctgcattttcctgrctgtgattgtgatgtaagcaagattctttggtttccagctattttttgttaacatcactggcattttcatattttgttgaacattaccaattctttggtc

SEQ ID NO: 469297 - DNA, 201 bp, Homo sapiens
ctattcagggtcttttatgatttaatacaaattttagaattgtgttttctatttttgtgaaaaatgcctttggaaatttgatagggattgcattgaatctstagatcactttggatagtatggacattttaacaatattcttccaatctacaaacatggggatatcgttatatttatttgtgtctttagttttttttctgt

SEQ ID NO: 469298 - DNA, 201 bp, Homo sapiens
tgtattatacttctgtttttatttactgtttcttctacatattcttcacgttggggattggctgtaaaataagctgcattttcctggctgtgattgtgatrtaagcaagattctttggtttccagctattttttgttaacatcactggcattttcatattttgttgaacattaccaattctttggtctttaccagtaaagt

SEQ ID NO: 469299 - DNA, 201 bp, Homo sapiens
gaattgtgttttctatttttgtgaaaaatgcctttggaaatttgatagggattgcattgaatctgtagatcactttggatagtatggacattttaacaatwttcttccaatctacaaacatggggatatcgttatatttatttgtgtctttagttttttttctgttttttgagacagagtcacgctctgttgcccaggcag

SEQ ID NO: 469300 - DNA, 201 bp, Homo sapiens
ttcttctacatattcttcacgttggggattggctgtaaaataagctgcattttcctggctgtgattgtgatgtaagcaagattctttggtttccagctatyttttgttaacatcactggcattttcatattttgttgaacattaccaattctttggtctttaccagtaaagtaaatactaaccaaagaaatgtagatttac

SEQ ID NO: 469301 - DNA, 201 bp, Homo sapiens
ataatttctgggaatactattggatacttaatctttttatcctgttctatgaagggactatagtgtggtggttcaaagcttatgctgtggagtcaaaatgyagttttttcagttactaaattgatgatctttggctacctgtttaacttccctaagtcagtgtatagaaggttaacggtacttacctcacagggatgttgg

SEQ ID NO: 469302 - DNA, 201 bp, Homo sapiens
cctttggaaatttgatagggattgcattgaatctgtagatcactttggatagtatggacattttaacaatattcttccaatctacaaacatggggatatcrttatatttatttgtgtctttagttttttttctgttttttgagacagagtcacgctctgttgcccaggcagaagtgcagtggtgtgatctccgctcactgc

SEQ ID NO: 469303 - DNA, 201 bp, Homo sapiens
acgttggggattggctgtaaaataagctgcattttcctggctgtgattgtgatgtaagcaagattctttggtttccagctattttttgttaacatcactgrcattttcatattttgttgaacattaccaattctttggtctttaccagtaaagtaaatactaaccaaagaaatgtagatttaccttaagttctgtttcatg

SEQ ID NO: 469304 - DNA, 201 bp, Homo sapiens
  misc_feature (1)...(201): n = A,T,C or G
aagcttatgctgtggagtcaaaatgcagttttttcagttactaaattgatgatctttggctacctgtttaacttccctaagtcagtgtatagaaggttaanggtacttacctcacagggatgttggatttaatgaagtggtatctataaagtgcccagcacaatgcctaacacaaagtaagtacagaaatagttaccagag

SEQ ID NO: 469305 - DNA, 201 bp, Homo sapiens
caatctacaaacatggggatatcgttatatttatttgtgtctttagttttttttctgttttttgagacagagtcacgctctgttgcccaggcagaagtgcrgtggtgtgatctccgctcactgcaacctctgccgcctcctgggttcaagcaattctgctgcctcagccccccaagtagctgggattacaggtgcctgcca

SEQ ID NO: 469306 - DNA, 201 bp, Homo sapiens
tttcagttactaaattgatgatctttggctacctgtttaacttccctaagtcagtgtatagaaggttaacggtacttacctcacagggatgttggatttartgaagtggtatctataaagtgcccagcacaatgcctaacacaaagtaagtacagaaatagttaccagagtttttcatggattgaaaggtttgtcctttga

SEQ ID NO: 469307 - DNA, 201 bp, Homo sapiens
ggcgtgagccaccatgcccggctgtgtgtctttagtttcttttgtcaatattttatagtgtttagtatataaagctttcacttccttcattaaatttgttyctcagtgttttattctttttgatgttattttaaatggaaatgttttcttcatttttttttcagatcattatttgtataaagaaatgcatctgatttttgt

SEQ ID NO: 469308 - DNA, 201 bp, Homo sapiens
tggctgtaaaataagctgcattttcctggctgtgattgtgatgtaagcaagattctttggtttccagctattttttgttaacatcactggcattttcatawtttgttgaacattaccaattctttggtctttaccagtaaagtaaatactaaccaaagaaatgtagatttaccttaagttctgtttcatggtgggcaaatt

SEQ ID NO: 469309 - DNA, 201 bp, Homo sapiens
tacctcacagggatgttggatttaatgaagtggtatctataaagtgcccagcacaatgcctaacacaaagtaagtacagaaatagttaccagagtttttcwtggattgaaaggtttgtcctttgaaccatttgaagagtgatcatctttctctgctgttaaattcttctgtagttctctctgtagtcttgagtcataattt

SEQ ID NO: 469310 - DNA, 201 bp, Homo sapiens
ttttgttaacatcactggcattttcatattttgttgaacattaccaattctttggtctttaccagtaaagtaaatactaaccaaagaaatgtagatttacyttaagttctgtttcatggtgggcaaattattaagttgattttaatgattttctataatagtattatatgagcttttctaggaattcacttcaaaattaaa

SEQ ID NO: 469311 - DNA, 201 bp, Homo sapiens
ctgctacttgactgaattcatttattctagtaactgtggaatttttgggggtttctacatacaggatcatgtcatctgcacacagggataattttacccgmttttttctgctgatgccttttatttccttttcttatgtgattgctctggctaggactatgttgaatataagtgttaagagtaggcatccttgccttgtag

SEQ ID NO: 469312 - DNA, 201 bp, Homo sapiens
cctcacagggatgttggatttaatgaagtggtatctataaagtgcccagcacaatgcctaacacaaagtaagtacagaaatagttaccagagtttttcatrgattgaaaggtttgtcctttgaaccatttgaagagtgatcatctttctctgctgttaaattcttctgtagttctctctgtagtcttgagtcataatttgc

SEQ ID NO: 469313 - DNA, 201 bp, Homo sapiens
ttacccgcttttttctgctgatgccttttatttccttttcttatgtgattgctctggctaggactatgttgaatataagtgttaagagtaggcatccttgycttgtagcagatattgaagaaaagctttcagtctttccctgttgtaggtttgtttttgaataggcaatacctgtgcatgatacaagaaatacagaggtct

SEQ ID NO: 469314 - DNA, 201 bp, Homo sapiens
ctaacacaaagtaagtacagaaatagttaccagagtttttcatggattgaaaggtttgtcctttgaaccatttgaagagtgatcatctttctctgctgttkaattcttctgtagttctctctgtagtcttgagtcataatttgctcatttgtttgcatttaacttttgagtgtttactgtgtgtgaaactgtagtgaaggc

SEQ ID NO: 469315 - DNA, 201 bp, Homo sapiens
tccttgccttgtagcagatattgaagaaaagctttcagtctttccctgttgtaggtttgtttttgaataggcaatacctgtgcatgatacaagaaatacaraggtcttaaaaagagtgaacagtgttaagttagcctaccttttgaccatcccttccttggaaagaaccagtgttttcttatagctttccagagattagtc

SEQ ID NO: 469316 - DNA, 201 bp, Homo sapiens
ctttctctgctgttaaattcttctgtagttctctctgtagtcttgagtcataatttgctcatttgtttgcatttaacttttgagtgtttactgtgtgtgayactgtagtgaaggctggagatgttgggacaaatcagtgtgcccccacagggctgtcagtctagtttggggctgctccctggtgagctggagtgggggtaa

SEQ ID NO: 469317 - DNA, 201 bp, Homo sapiens
ggaaaaagagctgctgggtaactgtgctcagctgtggctacctgggaagtggggtctgagggctgaaggattgtgatgaactctggcctgcttcctcaggyagttcagattccttctcttgctgaatgacttatcattggaaaggaaaaactctgctatttgactgatttgtatatttacactcttatcttcactcagttc

SEQ ID NO: 469318 - DNA, 201 bp, Homo sapiens
cttgagtcataatttgctcatttgtttgcatttaacttttgagtgtttactgtgtgtgaaactgtagtgaaggctggagatgttgggacaaatcagtgtgyccccacagggctgtcagtctagtttggggctgctccctggtgagctggagtgggggtaatcttttcaggatctttattgtaaaccagtcattgtcagata

SEQ ID NO: 469319 - DNA, 201 bp, Homo sapiens
tcattgctcttcttggaactgctttttctagtgaggaggtggagggcctgggaaaggagggtgatgtggccagaaccccaggtccccagctgggggaggakgtggagcagacgcagggagattctgtacctgcaccctgtcctcgccagtgaggtttggcacctagaactgcaagcagtattaccaggttcttttgtggtc

SEQ ID NO: 469320 - DNA, 201 bp, Homo sapiens
gtcataatttgctcatttgtttgcatttaacttttgagtgtttactgtgtgtgaaactgtagtgaaggctggagatgttgggacaaatcagtgtgcccccrcagggctgtcagtctagtttggggctgctccctggtgagctggagtgggggtaatcttttcaggatctttattgtaaaccagtcattgtcagataggttt

SEQ ID NO: 469321 - DNA, 201 bp, Homo sapiens
gtgaaggctggagatgttgggacaaatcagtgtgcccccacagggctgtcagtctagtttggggctgctccctggtgagctggagtgggggtaatcttttmaggatctttattgtaaaccagtcattgtcagataggtttctttttcctatttttatctcaagaatgtctgtttgttggtatgttatgtgtttttagaaag

SEQ ID NO: 469322 - DNA, 201 bp, Homo sapiens
gtctctggcttacagacatgtgtgtctaaatattcatatttaatttctgtcatgacaccaaagctatccagtagtatcgataatcttgtacatgacctccraaaggttgtttcagtattcccacacatcttctccctgactgggagggttggaaccaacctcatttctttgtgtagtgcttttaaaaattattgtgtttca

SEQ ID NO: 469323 - DNA, 201 bp, Homo sapiens
tcaattatagctgtggttgaagctcagaagagagttctagtctagagacctggacctgaagacataattaaaagcaagtgaatttgttaagtgcaaatggrttgcacttaacagaactctgagttctgtgttccccttctctgattatgttttatttcatgggaacactgcactaagcagcacaatttctagaaccatttg

SEQ ID NO: 469324 - DNA, 201 bp, Homo sapiens
gcgattaaacccaggataaggttgccatctcagaaatctgtaatgattattaaataataaaatttaagagcttgtaatatttgaattacttcttagtgtaygttgaactaattactatgaaataagtaactttatatttcttttctagattttgatgcaattacagatcctataatgaaagccaaaatggtggcccttaaa

SEQ ID NO: 469325 - DNA, 201 bp, Homo sapiens
actaggaacattttataacacaagactacagaagcacaacctgtacaatatcaatgtaatattatgatacaacatgtagcctctataaacaccactgtatmattgtgaatgaattaaagtgaaaaaaggcaaattaaatcttagtattatttaaacttgttttaactttacagactcactggggttccctagaccacattt

SEQ ID NO: 469326 - DNA, 201 bp, Homo sapiens
gctgatgtttgaatagaatcttaaaagaaataagaatgcaaaggcagatatttggggaaagagcattgctgatgcggggaacagtgagtgcaaaagccccrgaggcaggaatgtgcttagcatgttcatagaactgaaagggccagtgtggcaggagctgagttatggagaaaacatcataagagaagtagcgtggggagt

SEQ ID NO: 469327 - DNA, 201 bp, Homo sapiens
gtttttgaaaagatggtagatttgaaggataaggagttcagagaagtagaaaggcaaataggggccgttataaataaggacagtggcatgagccaacaggsttatctctcatgtttatagaacatggctagatctggtttccctataagttgatttcttactgttattctgagttgaatgcgtatcttttgtctcaatgaa

SEQ ID NO: 469328 - DNA, 201 bp, Homo sapiens
tttaccttaagttctgtttcatggtgggcaaattattaagttgattttaatgattttctataatagtattatatgagcttttctaggaattcacttcaaawttaaacgaacattttaataggaaacatctgaaagatctagtttgtgatagctagtgattggattatcagatgttatctggaggtacaagctagccaacta

SEQ ID NO: 469329 - DNA, 201 bp, Homo sapiens
taagttctgtttcatggtgggcaaattattaagttgattttaatgattttctataatagtattatatgagcttttctaggaattcacttcaaaattaaacraacattttaataggaaacatctgaaagatctagtttgtgatagctagtgattggattatcagatgttatctggaggtacaagctagccaactagtagaac

SEQ ID NO: 469330 - DNA, 201 bp, Homo sapiens
taatgattttctataatagtattatatgagcttttctaggaattcacttcaaaattaaacgaacattttaataggaaacatctgaaagatctagtttgtgrtagctagtgattggattatcagatgttatctggaggtacaagctagccaactagtagaacggtaagccagtgctgtctaatataaatataatgcagacca

SEQ ID NO: 469331 - DNA, 201 bp, Homo sapiens
ttcagtctttccctgttgtaggtttgtttttgaataggcaatacctgtgcatgatacaagaaatacagaggtcttaaaaagagtgaacagtgttaagttascctaccttttgaccatcccttccttggaaagaaccagtgttttcttatagctttccagagattagtcatctagatacaagtatgtatatatgggagaatt

SEQ ID NO: 469332 - DNA, 201 bp, Homo sapiens
gtgctgtctaatataaatataatgcagaccatatgtgtaattttaaattttcaagtagttacactttaaaaaaacaaaaacaggtgaaataaattttaatrtattttatttaacctggtatattcaaaacaatatttcagcatttagtataaaaatgaacaagatgctttatacttaaaacatcagttctggctagctgca

SEQ ID NO: 469333 - DNA, 201 bp, Homo sapiens
tagctttccagagattagtcatctagatacaagtatgtatatatgggagaatttctcatatttgggtgatatggtctttttcttttctttctgtctgtctktctttctgtcctcgtctcgtctcttctcttctcttttcttcgtttctttcgatggagtcttgctttgtcgcccaggctggagtgcagtggcgcaatctcg

SEQ ID NO: 469334 - DNA, 201 bp, Homo sapiens
gtagttacactttaaaaaaacaaaaacaggtgaaataaattttaatctattttatttaacctggtatattcaaaacaatatttcagcatttagtataaaartgaacaagatgctttatacttaaaacatcagttctggctagctgcattagaagtgctcagtggtcacatatgatggtggctgccttattggacgatgcaa

SEQ ID NO: 469335 - DNA, 201 bp, Homo sapiens
ttagccaggatggtgtctatctcctgacctcgtgatccgcccgcctcagcctcccaaggtgctgggattacaggcatgagccaccgtgcctggccgatacrgtctttttctttatttcagcctgtgggaatcagaaggcccttgtgaagatgttggttagaagagactttagcctacagtgataccacctgtgtgagggca

SEQ ID NO: 469336 - DNA, 201 bp, Homo sapiens
  misc_feature (1)...(201): n = A,T,C or G
tataaaaatgaacaagatgctttatacttaaaacatcagttctggctagctgcattagaagtgctcagtggtcacatatgatggtggctgccttattggangatgcaagacaaaacattttgagaaatataaaaacagcagttccggaattattggtgaaattaaaataccaaaagaattcaagatcgacaaactaagact

SEQ ID NO: 469337 - DNA, 201 bp, Homo sapiens
ctgacagagaatgtgtggaaggtaagttttgagcattatatacttctgaaaatgtctttattttaccttcctacctgactcatcttttccaggttggaaayacattttcatttatcaattttagtcaattgatccactgtcttttagtttctagtatatgaagaactcggttctctctatgtgacctgcgttttcttggaa

SEQ ID NO: 469338 - DNA, 201 bp, Homo sapiens
ctagctgcattagaagtgctcagtggtcacatatgatggtggctgccttattggacgatgcaagacaaaacattttgagaaatataaaaacagcagttccrgaattattggtgaaattaaaataccaaaagaattcaagatcgacaaactaagactgtggctgtgctttcacaatttttaaggactgaagtagaaatattc

SEQ ID NO: 469339 - DNA, 201 bp, Homo sapiens
tcagtgtgcccccacagggctgtcagtctagtttggggctgctccctggtgagctggagtgggggtaatcttttcaggatctttattgtaaaccagtcatygtcagataggtttctttttcctatttttatctcaagaatgtctgtttgttggtatgttatgtgtttttagaaagtttttacttgaaaataagttcaaact

SEQ ID NO: 469340 - DNA, 201 bp, Homo sapiens
ttttgtctatttttgatttttaaaatctgttttgttaggcactgagtggtctctttcagtctgctgtcttatatccttcagtggtaggaaatgttcttgarctatattattgataacaattccctctgtttttccagaattctgcttttcagatgtgaaacatactcagtttttctctgcttctttccaattcatgtcctt

SEQ ID NO: 469341 - DNA, 201 bp, Homo sapiens
agtctagtttggggctgctccctggtgagctggagtgggggtaatcttttcaggatctttattgtaaaccagtcattgtcagataggtttctttttcctayttttatctcaagaatgtctgtttgttggtatgttatgtgtttttagaaagtttttacttgaaaataagttcaaactctaaaagttggagaaaataaaaat

SEQ ID NO: 469342 - DNA, 201 bp, Homo sapiens
ggaaatgttcttgaactatattattgataacaattccctctgtttttccagaattctgcttttcagatgtgaaacatactcagtttttctctgcttctttycaattcatgtccttattttatcttcctctactgagttttatttctatttcagttatttcaagagctttctttcctccctttgaatgtttcttttgtagca

SEQ ID NO: 469343 - DNA, 201 bp, Homo sapiens
cacatatgatggtggctgccttattggacgatgcaagacaaaacattttgagaaatataaaaacagcagttccggaattattggtgaaattaaaataccaraagaattcaagatcgacaaactaagactgtggctgtgctttcacaatttttaaggactgaagtagaaatattctttttctgttgttcatggaacacattt

SEQ ID NO: 469344 - DNA, 201 bp, Homo sapiens
cttaaaaaatcacaatcctgctatcaacttcctaaacttacatcaatgtagtatgtttatctaatgtactagccatattccagttatgtcatttgatcttmtgtccttcataacctaccccttcctccaagtaggttctaggatttagtttttgtcattggtatttttgaagaatagagttcttctcgatatacttgtttt

SEQ ID NO: 469345 - DNA, 201 bp, Homo sapiens
caagacaaaacattttgagaaatataaaaacagcagttccggaattattggtgaaattaaaataccaaaagaattcaagatcgacaaactaagactgtggstgtgctttcacaatttttaaggactgaagtagaaatattctttttctgttgttcatggaacacattttaatgcagataattgctaaaccatttgttgctg

SEQ ID NO: 469346 - DNA, 201 bp, Homo sapiens
ttatttcaagagctttctttcctccctttgaatgtttcttttgtagcatcctattcttgcctcatgggtatcttatattatccctcagaggattttaatcytttttaagattttttttcttcctacttagtctgttaattccaaattgtcttttatgttctcaggtctctgtctttcatgttacagatcaggggtgttgca

SEQ ID NO: 469347 - DNA, 201 bp, Homo sapiens
attcaagatcgacaaactaagactgtggctgtgctttcacaatttttaaggactgaagtagaaatattctttttctgttgttcatggaacacattttaatrcagataattgctaaaccatttgttgctgcaacaaatctttcacattttcaagtatattcagttttaaatatataatccaaataacccaatattggagatt

SEQ ID NO: 469348 - DNA, 201 bp, Homo sapiens
ttaaaaaatcacaatcctgctatcaacttcctaaacttacatcaatgtagtatgtttatctaatgtactagccatattccagttatgtcatttgatcttawgtccttcataacctaccccttcctccaagtaggttctaggatttagtttttgtcattggtatttttgaagaatagagttcttctcgatatacttgttttt

SEQ ID NO: 469349 - DNA, 201 bp, Homo sapiens
tatgttctcaggtctctgtctttcatgttacagatcaggggtgttgcagatcttctggcttccatggcccacaatggaagaagcattgtcttgggccacayataaaatacactaatgatagctgatgagcttttttaaaaaaaaaaaaactcataaaaagtctcataatgttttatgaaagtttatgaatttgtgttgggc

SEQ ID NO: 469350 - DNA, 201 bp, Homo sapiens
aaatcacaatcctgctatcaacttcctaaacttacatcaatgtagtatgtttatctaatgtactagccatattccagttatgtcatttgatcttatgtccytcataacctaccccttcctccaagtaggttctaggatttagtttttgtcattggtatttttgaagaatagagttcttctcgatatacttgtttttttctt

SEQ ID NO: 469351 - DNA, 201 bp, Homo sapiens
tctctgtctttcatgttacagatcaggggtgttgcagatcttctggcttccatggcccacaatggaagaagcattgtcttgggccacacataaaatacackaatgatagctgatgagcttttttaaaaaaaaaaaaactcataaaaagtctcataatgttttatgaaagtttatgaatttgtgttgggctgcatttaaagc

SEQ ID NO: 469352 - DNA, 201 bp, Homo sapiens
agttcttctcgatatacttgtttttttctttttttcaaacaaatttccccattttgtctttgatatccccttataattagatgagaggcatgcattattgrccagaatactgcaaagtactgatccatcctcagggtatcacagctggaagcacacattattccactttccctcatgggaatcacctggtcaggctgttgt

SEQ ID NO: 469353 - DNA, 201 bp, Homo sapiens
atgttacagatcaggggtgttgcagatcttctggcttccatggcccacaatggaagaagcattgtcttgggccacacataaaatacactaatgatagctgrtgagcttttttaaaaaaaaaaaaactcataaaaagtctcataatgttttatgaaagtttatgaatttgtgttgggctgcatttaaagcatcttggctgca

SEQ ID NO: 469354 - DNA, 201 bp, Homo sapiens
gtctttgatatccccttataattagatgagaggcatgcattattggccagaatactgcaaagtactgatccatcctcagggtatcacagctggaagcacayattattccactttccctcatgggaatcacctggtcaggctgttgtccaatttcttttccccctcctttgtatctaataaagcagtatgtaaggacacttt

SEQ ID NO: 469355 - DNA, 201 bp, Homo sapiens
gatccatcctcagggtatcacagctggaagcacacattattccactttccctcatgggaatcacctggtcaggctgttgtccaatttcttttccccctccyttgtatctaataaagcagtatgtaaggacactttaagaccatgcaaatatcttgcttttcctcagaatttccttctagatttgaaaaacttactccctag

SEQ ID NO: 469356 - DNA, 201 bp, Homo sapiens
cacattattccactttccctcatgggaatcacctggtcaggctgttgtccaatttcttttccccctcctttgtatctaataaagcagtatgtaaggacacwttaagaccatgcaaatatcttgcttttcctcagaatttccttctagatttgaaaaacttactccctaggctgggtgtggtggctcatgcctataatctta

SEQ ID NO: 469357 - DNA, 201 bp, Homo sapiens
ggagaattgcttgaacccgggaggcagaggttgcagtgagccgaactcatgctactacactccagcctgggtgacagagatagactctgtctcaaaaacarcaacaacaacaacagcaacaacaacaacaacaacaaacttactgcctgatgatgccattttaacctgctttgttttggttgcaaatgatgcatttccagc

SEQ ID NO: 469358 - DNA, 201 bp, Homo sapiens
tttatccttatattgtgaatttctaatttttattgtattaggtctagggacacatctgcttttactgaatataacctaggaaatacctgctttttaaaatmtgtggacatttctttacgaccatacatgtggatttttttttgaaaattctatgtatatttgaatagaatgttttctctatttttggaatacagagatctg

SEQ ID NO: 469359 - DNA, 201 bp, Homo sapiens
gttgtttatagctatagaatatagaattccttatggttatccatttctccttttaagtagagtgatagttgttagaagaaaaataaccccccaatactttyttctagtgttaattcttaaagtgtgattgacttttatttactttttggtgcagtaattgcagttcatgagtcaatgttgatgtcctataaaccttaattt

SEQ ID NO: 469360 - DNA, 201 bp, Homo sapiens
atcaagtatacatttttaatacctctttttatggttaattccttttgttgtgattactactgtttttatgagggagaagtccttgacatgtagaccaaaakgtaattaaggaccttttcattcatgatatcataaaaccttgttgcttagaaaaaagcaaaagaaaaagctccattaatttattatgttctcatggagaag

SEQ ID NO: 469361 - DNA, 201 bp, Homo sapiens
tttttaatacctctttttatggttaattccttttgttgtgattactactgtttttatgagggagaagtccttgacatgtagaccaaaaggtaattaaggaycttttcattcatgatatcataaaaccttgttgcttagaaaaaagcaaaagaaaaagctccattaatttattatgttctcatggagaagaaataccaaaat

SEQ ID NO: 469362 - DNA, 201 bp, Homo sapiens
cttggatttctttcattatctgttttttaaactgttggcattcctctggtataagtgtgtctgctttggcaataagttggatgataatcactttttcatgygaacgcttcataaactcaatatccaatggtttaagttcatgtcctgaaggagcaatgaagtataaacaacactgcaccctgctattaggcatctgacgtc

SEQ ID NO: 469363 - DNA, 201 bp, Homo sapiens
gatttctttcattatctgttttttaaactgttggcattcctctggtataagtgtgtctgctttggcaataagttggatgataatcactttttcatgcgaaygcttcataaactcaatatccaatggtttaagttcatgtcctgaaggagcaatgaagtataaacaacactgcaccctgctattaggcatctgacgtctgtt

SEQ ID NO: 469364 - DNA, 201 bp, Homo sapiens
cccatttttgatatctcaaatctttcatcatagtttagtcagccatatttttcctagaatttttttaaaaactattttgtcttgctatcaagctattactytgtagttttacatacattctttattttaactaaactgttatgagcaataatttgtgataacttttttttttttctgagacagagttttgcttttgttgcc

SEQ ID NO: 469365 - DNA, 201 bp, Homo sapiens
ggctgtgctttcacaatttttaaggactgaagtagaaatattctttttctgttgttcatggaacacattttaatgcagataattgctaaaccatttgttgytgcaacaaatctttcacattttcaagtatattcagttttaaatatataatccaaataacccaatattggagattttctgaaggtgagatgttaggacaca

SEQ ID NO: 469366 - DNA, 201 bp, Homo sapiens
tattttaactaaactgttatgagcaataatttgtgataacttttttttttttctgagacagagttttgcttttgttgcccaggttggagtgcaatggcgcrcatgatcttgactcactgcaacctctgcctcccaggttcaagcgattctcctccctcggcctcccgagtagctggaattacagccatgcaccaccatgcc

SEQ ID NO: 469367 - DNA, 201 bp, Homo sapiens
gctgtgctttcacaatttttaaggactgaagtagaaatattctttttctgttgttcatggaacacattttaatgcagataattgctaaaccatttgttgcrgcaacaaatctttcacattttcaagtatattcagttttaaatatataatccaaataacccaatattggagattttctgaaggtgagatgttaggacacag

SEQ ID NO: 469368 - DNA, 201 bp, Homo sapiens
aaggtggaggttgcagtgagcagagatcgagccactactccagcctgggcagaaaaaaaaaaaaaaaaaaaaaagtgaagttaaactaaatttagatctgktgagtttgaaatgatggttgtatatacctctaagatcagtaaaacctaaatcaatctagagaacaggtgttaaagatacatttttggtggggtgtggtgc

SEQ ID NO: 469369 - DNA, 201 bp, Homo sapiens
ttgttgctgcaacaaatctttcacattttcaagtatattcagttttaaatatataatccaaataacccaatattggagattttctgaaggtgagatgttargacacagaaaatggaatttatatctcaggtattggacatccattatcaaatatcaaatcatatagaattattttcctttaaggaggttagtaattaaagt

SEQ ID NO: 469370 - DNA, 201 bp, Homo sapiens
aggggtgttgcagatcttctggcttccatggcccacaatggaagaagcattgtcttgggccacacataaaatacactaatgatagctgatgagcttttttwaaaaaaaaaaaactcataaaaagtctcataatgttttatgaaagtttatgaatttgtgttgggctgcatttaaagcatcttggctgcaggttggacaagc

SEQ ID NO: 469371 - DNA, 201 bp, Homo sapiens
agatctgttgagtttgaaatgatggttgtatatacctctaagatcagtaaaacctaaatcaatctagagaacaggtgttaaagatacatttttggtggggygtggtgcctcatgcctgtaatcctgccattttgggaggccaaggcgggtggcttgcttgagctcaggagtttgagaccagctgggcaatatgaagaaacc

SEQ ID NO: 469372 - DNA, 201 bp, Homo sapiens
  misc_feature (1)...(201): n = A,T,C or G
ttggagattttctgaaggtgagatgttaggacacagaaaatggaatttatatctcaggtattggacatccattatcaaatatcaaatcatatagaattatnttcctttaaggaggttagtaattaaagtttagttttttgtatttttcctttcatatggaatatttcaggtgctatttagtgagaaatatgatgcttattt

SEQ ID NO: 469373 - DNA, 201 bp, Homo sapiens
cataaaaagtctcataatgttttatgaaagtttatgaatttgtgttgggctgcatttaaagcatcttggctgcaggttggacaagcttgttatagaccatwgtcggataatctttatggtacatgcatgattaaaagtgaagaactaaagatggagactggatagatagtatttttattttttaaaaaaggaattaagtag

SEQ ID NO: 469374 - DNA, 201 bp, Homo sapiens
gatctgttgagtttgaaatgatggttgtatatacctctaagatcagtaaaacctaaatcaatctagagaacaggtgttaaagatacatttttggtggggtrtggtgcctcatgcctgtaatcctgccattttgggaggccaaggcgggtggcttgcttgagctcaggagtttgagaccagctgggcaatatgaagaaaccc

SEQ ID NO: 469375 - DNA, 201 bp, Homo sapiens
aatggaatttatatctcaggtattggacatccattatcaaatatcaaatcatatagaattattttcctttaaggaggttagtaattaaagtttagtttttygtatttttcctttcatatggaatatttcaggtgctatttagtgagaaatatgatgcttattttctttatgacatgtttcaaatatatctcaaatgtatga

SEQ ID NO: 469376 - DNA, 201 bp, Homo sapiens
gtacatgcatgattaaaagtgaagaactaaagatggagactggatagatagtatttttattttttaaaaaaggaattaagtagttgattagaaagctttcwgtatgtggtggtgcttgtcgatttgtaagtttagtggggtgatttgtgctgaccatttggtgaaccctctggtttccgtatctttagatgttcttcttga

SEQ ID NO: 469377 - DNA, 201 bp, Homo sapiens
ctctaagatcagtaaaacctaaatcaatctagagaacaggtgttaaagatacatttttggtggggtgtggtgcctcatgcctgtaatcctgccattttggraggccaaggcgggtggcttgcttgagctcaggagtttgagaccagctgggcaatatgaagaaaccccatctctacagaaaatacaaaaattagccaggca

SEQ ID NO: 469378 - DNA, 201 bp, Homo sapiens
tatcaaatatcaaatcatatagaattattttcctttaaggaggttagtaattaaagtttagttttttgtatttttcctttcatatggaatatttcaggtgytatttagtgagaaatatgatgcttattttctttatgacatgtttcaaatatatctcaaatgtatgatttagaacctaactgactacaggaatagtaacac

SEQ ID NO: 469379 - DNA, 201 bp, Homo sapiens
gcactcctgcctaaaactccatctcaaaaaaaaccaggtgttttactcttaaaataagacattaaaaaaatacttctgttgtctcccctcatagaattggyaatctcttccttctccaccctcatcccctgctgtaattctatattgaaatttcattgtattttgtgccagatgtctttgtgtaaaaccaacttagttctg

SEQ ID NO: 469380 - DNA, 201 bp, Homo sapiens
tgattaaaagtgaagaactaaagatggagactggatagatagtatttttattttttaaaaaaggaattaagtagttgattagaaagctttctgtatgtggyggtgcttgtcgatttgtaagtttagtggggtgatttgtgctgaccatttggtgaaccctctggtttccgtatctttagatgttcttcttgaactgctcag

SEQ ID NO: 469381 - DNA, 201 bp, Homo sapiens
ggaggctagagatctggctgctagctttctgagaattcagtggggaaacgtggggtctggcagcgggagcaggatggggttgtccacatttagtatgcccrtattttcttggtcctattttcagtcttcatcccattgttccatttaaggtcacccaggaatcctgcatcccacaaatgagagtagcagcttctcagtgtg

SEQ ID NO: 469382 - DNA, 201 bp, Homo sapiens
gaacccgggaggcagaggttgcagtgagccgaactcatgctactacactccagcctgggtgacagagatagactctgtctcaaaaacaacaacaacaacarcagcaacaacaacaacaacaacaaacttactgcctgatgatgccattttaacctgctttgttttggttgcaaatgatgcatttccagctctagcactccc

SEQ ID NO: 469383 - DNA, 201 bp, Homo sapiens
tggtccttcttaaattcacactgtatgacagctattttgacttttgttgctgttcaccaatgcttttattcttatgtgttgtctggattttcttaagtaayagtttcatcaggtttaaggatctgtgataagctctgttctaatttaagctcaatgtttttgtcttttttatttatctcttctctttttacggctgtcttt

SEQ ID NO: 469384 - DNA, 201 bp, Homo sapiens
ggcagaggttgcagtgagccgaactcatgctactacactccagcctgggtgacagagatagactctgtctcaaaaacaacaacaacaacaacagcaacaamaacaacaacaacaaacttactgcctgatgatgccattttaacctgctttgttttggttgcaaatgatgcatttccagctctagcactcccaccgcattta

SEQ ID NO: 469385 - DNA, 201 bp, Homo sapiens
ggaatatttcaggtgctatttagtgagaaatatgatgcttattttctttatgacatgtttcaaatatatctcaaatgtatgatttagaacctaactgactrcaggaatagtaacacatttttctgatggctgtgaatagaataagattccttttgttttttgttttcttgcctattgtagacgcaggatttcacaaagatg

SEQ ID NO: 469386 - DNA, 201 bp, Homo sapiens
aattttgatgatagtctatacatcatgtaacttgacttatttagttgtcaacaaatatcttttttttttgagacctgagtcttgctctgttgcccaggctrgagtgcagtgctgcgatcctggctcactgcaacctctgcctcccggattcagattttcctgcctccgccttctgagtagctggattacagatgtgcacca

SEQ ID NO: 469387 - DNA, 201 bp, Homo sapiens
tcttcatcccattgttccatttaaggtcacccaggaatcctgcatcccacaaatgagagtagcagcttctcagtgtgtaaacctaggaagcagatgtaggragtatgacttctgcagataattaaatctcttgttgcttgggttttctcccacttatttccaaaggtggccagttttcctagtttctcagccttctgagga

SEQ ID NO: 469388 - DNA, 201 bp, Homo sapiens
atttagaacctaactgactacaggaatagtaacacatttttctgatggctgtgaatagaataagattccttttgttttttgttttcttgcctattgtagaygcaggatttcacaaagatgaggaaaaattagacatgataaggtaggagaagtaacagacagcaaattggatattgtttcatacaaattgtcctaatgacc

SEQ ID NO: 469389 - DNA, 201 bp, Homo sapiens
cagattttcctgcctccgccttctgagtagctggattacagatgtgcaccaccacgcctggctaatttttgtatttttagtagagacagggtttcagcatrttgaccaggctggtcttgaactcttgacctcagaagatctgcccacctcggcctcccaaagtgctgtgattacaggcgtcagccaccgcgcccggcctag

SEQ ID NO: 469390 - DNA, 201 bp, Homo sapiens
tagtttctcagccttctgaggagtgttataaactggattctttttttcagttctttctgctctcaactgagaatttgcctttgttaagttgtttttctccyttcctattgtctttttttttttttttttaaaggagattgggtctttctctgttgtccaggctagaatgcagtagtgtgatcataactcactgtagcctca

SEQ ID NO: 469391 - DNA, 201 bp, Homo sapiens
tgggtgacagagatagactctgtctcaaaaacaacaacaacaacaacagcaacaacaacaacaacaacaaacttactgcctgatgatgccattttaacctrctttgttttggttgcaaatgatgcatttccagctctagcactcccaccgcatttaccagttagccctctgctttcttttgtaagcaagaacacttctttc

SEQ ID NO: 469392 - DNA, 201 bp, Homo sapiens
attggatattgtttcatacaaattgtcctaatgacctagttgtattttctcatcttttattgaagttatctattcataaataatttagtatttcatttttyagcatttaaaaatattttttatttttttatagagatgggggtcttgctgtgtagaccaggctggttacgaactcctggcctcaagcgatccttccatctc

SEQ ID NO: 469393 - DNA, 201 bp, Homo sapiens
gcttagtcataagccgatagccattatcagattgttatggaattggcctcaaatatagaccaaatataataaaaaacaaaagacaaataccctgttcatgycattactgaaatatgttatctctaatactgagaatattgaaggagttaacaacttgattttaaaatgtatttgataaacatgtctttttcctgtaataca

SEQ ID NO: 469394 - DNA, 201 bp, Homo sapiens
tcaaaaacaacaacaacaacaacagcaacaacaacaacaacaacaaacttactgcctgatgatgccattttaacctgctttgttttggttgcaaatgatgyatttccagctctagcactcccaccgcatttaccagttagccctctgctttcttttgtaagcaagaacacttctttcacatgttaaacttacttattaata

SEQ ID NO: 469395 - DNA, 201 bp, Homo sapiens
ttagtatttcatttttcagcatttaaaaatattttttatttttttatagagatgggggtcttgctgtgtagaccaggctggttacgaactcctggcctcargcgatccttccatctcgggtctcccagagtgctgggattacaggtgtgagccccacagcgcctggcccatttttcagcatttttataggtgtatgtactt

SEQ ID NO: 469396 - DNA, 201 bp, Homo sapiens
cctccgccttctgagtagctggattacagatgtgcaccaccacgcctggctaatttttgtatttttagtagagacagggtttcagcatgttgaccaggctkgtcttgaactcttgacctcagaagatctgcccacctcggcctcccaaagtgctgtgattacaggcgtcagccaccgcgcccggcctagagatacctttta

SEQ ID NO: 469397 - DNA, 201 bp, Homo sapiens
cgatagccattatcagattgttatggaattggcctcaaatatagaccaaatataataaaaaacaaaagacaaataccctgttcatgccattactgaaataygttatctctaatactgagaatattgaaggagttaacaacttgattttaaaatgtatttgataaacatgtctttttcctgtaatacaatgtaaagcatata

SEQ ID NO: 469398 - DNA, 201 bp, Homo sapiens
acaacaacaacaacagcaacaacaacaacaacaacaaacttactgcctgatgatgccattttaacctgctttgttttggttgcaaatgatgcatttccagstctagcactcccaccgcatttaccagttagccctctgctttcttttgtaagcaagaacacttctttcacatgttaaacttacttattaatactgactcat

SEQ ID NO: 469399 - DNA, 201 bp, Homo sapiens
ataaacatgtctttttcctgtaatacaatgtaaagcatatataacttggaaaagtttgattaccatagtgttaaaatagcattctctaaaatagcattctstaagcattccatttacctcattcagtgaagtatttattgaacatgtattaggtatcctactaacaatacatctgttactaagaaaatctgtgtacctgtt

SEQ ID NO: 469400 - DNA, 201 bp, Homo sapiens
tttcacatgttaaacttacttattaatactgactcatgagctcctattatcttcaatcatttacaactcattacctaattattttttggctgaaatagtcrcatacttgctgtcagttgctccttcaagctggcgctggtgttgtgccctcaccacttacttgaacacttcatactttttggtgtaacaagatgttacaag

SEQ ID NO: 469401 - DNA, 201 bp, Homo sapiens
attatcttcaatcatttacaactcattacctaattattttttggctgaaatagtcccatacttgctgtcagttgctccttcaagctggcgctggtgttgtrccctcaccacttacttgaacacttcatactttttggtgtaacaagatgttacaagctcatcttatacctcctgtgccccagccctggaataagtccattg

SEQ ID NO: 469402 - DNA, 201 bp, Homo sapiens
tcattacctaattattttttggctgaaatagtcccatacttgctgtcagttgctccttcaagctggcgctggtgttgtgccctcaccacttacttgaacayttcatactttttggtgtaacaagatgttacaagctcatcttatacctcctgtgccccagccctggaataagtccattgttaaataagtaacccagattcc

SEQ ID NO: 469403 - DNA, 201 bp, Homo sapiens
aaaggtaattaaggaccttttcattcatgatatcataaaaccttgttgcttagaaaaaagcaaaagaaaaagctccattaatttattatgttctcatggasaagaaataccaaaattgtggcatatttcattgtctggttaataccttaaaatgacaaggctttttcccccatgacattggttgatggctctgccagtcct

SEQ ID NO: 469404 - DNA, 201 bp, Homo sapiens
atcatgcaagataagaggaaagaacattccagggagagggaacagaccactacacagaccttgaggaatggatttggcatgattcatgaacaggcagcatrtcattttacttggagcatagtagcctactaggtgggtagtagagacatcatcaaggcgaacaaaggctagatcatgtaggccttgtaagcaagggaagga

SEQ ID NO: 469405 - DNA, 201 bp, Homo sapiens
tcaagctggcgctggtgttgtgccctcaccacttacttgaacacttcatactttttggtgtaacaagatgttacaagctcatcttatacctcctgtgcccsagccctggaataagtccattgttaaataagtaacccagattcctttagtggggaatgggtgctgggtgtgctcattgctactgaagggtgtttgcttctt

SEQ ID NO: 469406 - DNA, 201 bp, Homo sapiens
aagctccattaatttattatgttctcatggagaagaaataccaaaattgtggcatatttcattgtctggttaataccttaaaatgacaaggctttttcccycatgacattggttgatggctctgccagtccttgaagtgagttaagtagtgtgatgcattttgaagagaaaaaaattaatttgaaaaagtattaactcaaa

SEQ ID NO: 469407 - DNA, 201 bp, Homo sapiens
ggcgctggtgttgtgccctcaccacttacttgaacacttcatactttttggtgtaacaagatgttacaagctcatcttatacctcctgtgccccagccctrgaataagtccattgttaaataagtaacccagattcctttagtggggaatgggtgctgggtgtgctcattgctactgaagggtgtttgcttcttcatcctt

SEQ ID NO: 469408 - DNA, 201 bp, Homo sapiens
agaaataccaaaattgtggcatatttcattgtctggttaataccttaaaatgacaaggctttttcccccatgacattggttgatggctctgccagtccttsaagtgagttaagtagtgtgatgcattttgaagagaaaaaaattaatttgaaaaagtattaactcaaaagttaaaatacttcattgactggagatgacagt

SEQ ID NO: 469409 - DNA, 201 bp, Homo sapiens
tccatttcaagtatttattattcagattatttaaagcaaagctttcacaaagccttttgtcagctttcctataatcctcaaataatttttcctggctggaygctttggcttactcctgtaatcctggcactttgggaggcagaagcaggaggatcacttgagcccaagagttctaggctgcagtgagctatgatcacacca

SEQ ID NO: 469410 - DNA, 201 bp, Homo sapiens
attattcagattatttaaagcaaagctttcacaaagccttttgtcagctttcctataatcctcaaataatttttcctggctggacgctttggcttactccygtaatcctggcactttgggaggcagaagcaggaggatcacttgagcccaagagttctaggctgcagtgagctatgatcacaccactgcactccaacctga

SEQ ID NO: 469411 - DNA, 201 bp, Homo sapiens
tttaaaattactggggactccatagtttttgtttatgaggattttaactatggactgttcagcattttagaaattaaaactaggaacattttataacacargactacagaagcacaacctgtacaatatcaatgtaatattatgatacaacatgtagcctctataaacaccactgtataattgtgaatgaattaaagtgaa

SEQ ID NO: 469412 - DNA, 201 bp, Homo sapiens
agtatttcatttttcagcatttaaaaatattttttatttttttatagagatgggggtcttgctgtgtagaccaggctggttacgaactcctggcctcaagwgatccttccatctcgggtctcccagagtgctgggattacaggtgtgagccccacagcgcctggcccatttttcagcatttttataggtgtatgtactttg

SEQ ID NO: 469413 - DNA, 201 bp, Homo sapiens
ggtttcagcatgttgaccaggctggtcttgaactcttgacctcagaagatctgcccacctcggcctcccaaagtgctgtgattacaggcgtcagccaccgygcccggcctagagataccttttaaggtggttctaaagcctcagaaattatttatcctgaagagaaagattaaagttttattcattgcattatgagggaaa

SEQ ID NO: 469414 - DNA, 201 bp, Homo sapiens
catttttcagcatttaaaaatattttttatttttttatagagatgggggtcttgctgtgtagaccaggctggttacgaactcctggcctcaagcgatcctyccatctcgggtctcccagagtgctgggattacaggtgtgagccccacagcgcctggcccatttttcagcatttttataggtgtatgtactttgcgacctg

SEQ ID NO: 469415 - DNA, 201 bp, Homo sapiens
attatttatcctgaagagaaagattaaagttttattcattgcattatgagggaaagtttaggcagagtatcttatggttttgtttttcattaaaagatcastgttctttcagattttaagtccatttaaaaactttgcatagtaatatatgtacatggttgaaaaaagtctaatagcccagaatgcttataataaggatca

SEQ ID NO: 469416 - DNA, 201 bp, Homo sapiens
tgttaaaatagcattctctaaaatagcattctctaagcattccatttacctcattcagtgaagtatttattgaacatgtattaggtatcctactaacaatrcatctgttactaagaaaatctgtgtacctgttctcatggagaatatagtctagcagggacacagattttaaagaaccaataaaaataaagcatgacatta

SEQ ID NO: 469417 - DNA, 201 bp, Homo sapiens
ttgctgtgtagaccaggctggttacgaactcctggcctcaagcgatccttccatctcgggtctcccagagtgctgggattacaggtgtgagccccacagcrcctggcccatttttcagcatttttataggtgtatgtactttgcgacctgggtttaagaaagtgattattgacactgccacatattgtaatcaactcggta

SEQ ID NO: 469418 - DNA, 201 bp, Homo sapiens
tataagtgagaacatggcctccaggtccttccatccttccacgttgctacaaaagacatgatttcattcttcctttatggctgaatagtattcgtgtgtgktgtgtgtgtgtgtgtgtgtgtgtgtgtgtgtgtgtgtgtgtatgtgtcccagtttttctttatccagtcgtctgttgatggatatggagattgattccct

SEQ ID NO: 469419 - DNA, 201 bp, Homo sapiens
ccttgcaatttaaagtttattttgagggcattgggaagacatgaaaggattttaagcagaaaatggatacatatttatagaaagatcatttatgcagtaayttaaagaactgattggagagaggtaagctttaaggtggggaactagataggagcatgttgtattaatagtgagtcatctgaggttggactaagatggtag

SEQ ID NO: 469420 - DNA, 201 bp, Homo sapiens
ctggttacgaactcctggcctcaagcgatccttccatctcgggtctcccagagtgctgggattacaggtgtgagccccacagcgcctggcccatttttcarcatttttataggtgtatgtactttgcgacctgggtttaagaaagtgattattgacactgccacatattgtaatcaactcggtagattttagaacatcaag

SEQ ID NO: 469421 - DNA, 201 bp, Homo sapiens
gttgctacaaaagacatgatttcattcttcctttatggctgaatagtattcgtgtgtggtgtgtgtgtgtgtgtgtgtgtgtgtgtgtgtgtgtgtgtgtrtgtgtcccagtttttctttatccagtcgtctgttgatggatatggagattgattccctatctttgctattgtgagtgttgctgtgataaaggtacgagtg

SEQ ID NO: 469422 - DNA, 201 bp, Homo sapiens
tgcaaatggattgcacttaacagaactctgagttctgtgttccccttctctgattatgttttatttcatgggaacactgcactaagcagcacaatttctasaaccatttggggctgcttctatctcctttcatactttccctaccaacagggatgtacaattaaaatggctcagcaacaaccctactttttattccccatg

SEQ ID NO: 469423 - DNA, 201 bp, Homo sapiens
acgaactcctggcctcaagcgatccttccatctcgggtctcccagagtgctgggattacaggtgtgagccccacagcgcctggcccatttttcagcatttytataggtgtatgtactttgcgacctgggtttaagaaagtgattattgacactgccacatattgtaatcaactcggtagattttagaacatcaagctaatg

SEQ ID NO: 469424 - DNA, 201 bp, Homo sapiens
aagacatgatttcattcttcctttatggctgaatagtattcgtgtgtggtgtgtgtgtgtgtgtgtgtgtgtgtgtgtgtgtgtgtgtgtatgtgtcccaktttttctttatccagtcgtctgttgatggatatggagattgattccctatctttgctattgtgagtgttgctgtgataaaggtacgagtgcagttatctt

SEQ ID NO: 469425 - DNA, 201 bp, Homo sapiens
cttaacagaactctgagttctgtgttccccttctctgattatgttttatttcatgggaacactgcactaagcagcacaatttctagaaccatttggggctkcttctatctcctttcatactttccctaccaacagggatgtacaattaaaatggctcagcaacaaccctactttttattccccatgatgtagggattatat

SEQ ID NO: 469426 - DNA, 201 bp, Homo sapiens
caagatgttacaagctcatcttatacctcctgtgccccagccctggaataagtccattgttaaataagtaacccagattcctttagtggggaatgggtgcygggtgtgctcattgctactgaagggtgtttgcttcttcatcctttcagcaggtggtgtcaggaaatacatgcgtgtgtatacacttacagaagtttgtcc

SEQ ID NO: 469427 - DNA, 201 bp, Homo sapiens
ctggcctcaagcgatccttccatctcgggtctcccagagtgctgggattacaggtgtgagccccacagcgcctggcccatttttcagcatttttataggtrtatgtactttgcgacctgggtttaagaaagtgattattgacactgccacatattgtaatcaactcggtagattttagaacatcaagctaatggccctacc

SEQ ID NO: 469428 - DNA, 201 bp, Homo sapiens
tggttaggcactgtggctcatgcctataattctagtactttgggaggctaagacaggaggatcacttaagcacaggagttcgagaccagtctgctgggcarcatagtgagacactgtctctaactgggggggggaaagaaaagccaggtgtgcggccacgtgcctgtagtcccagctactcaggagtcgagatgggaggat

SEQ ID NO: 469429 - DNA, 201 bp, Homo sapiens
gaaccatttggggctgcttctatctcctttcatactttccctaccaacagggatgtacaattaaaatggctcagcaacaaccctactttttattccccatkatgtagggattatatatttgataggtttttccagttttgtgtatacatttacttttttccagaaggagaacttatggattgtgatggaaaatcagaatct

SEQ ID NO: 469430 - DNA, 201 bp, Homo sapiens
caacctcatttctttgtgtagtgcttttaaaaattattgtgtttcacataaggcatattaagtgtttttgcaccagatgtatgtattacatggatgttttyctttgactaatttattaccaatgatccatagtaatcaaagaacacagcaaggttatcagtaaggaattggtggaaatcatcatagtctaaaaagtgattt

SEQ ID NO: 469431 - DNA, 201 bp, Homo sapiens
tcaagcgatccttccatctcgggtctcccagagtgctgggattacaggtgtgagccccacagcgcctggcccatttttcagcatttttataggtgtatgtrctttgcgacctgggtttaagaaagtgattattgacactgccacatattgtaatcaactcggtagattttagaacatcaagctaatggccctaccctagac

SEQ ID NO: 469432 - DNA, 201 bp, Homo sapiens
acaggaggatcacttaagcacaggagttcgagaccagtctgctgggcaacatagtgagacactgtctctaactgggggggggaaagaaaagccaggtgtgyggccacgtgcctgtagtcccagctactcaggagtcgagatgggaggattacttgagcccaaaaggtcgagaatgcagtgagtcatggttgcgccactgca

SEQ ID NO: 469433 - DNA, 201 bp, Homo sapiens
taggtttttccagttttgtgtatacatttacttttttccagaaggagaacttatggattgtgatggaaaatcagaatctagtcctgagcgggaagctgtgratgatgaaactaagggagtggaaggaacagatggtgtcaaaaagagaaaaaggaaaccatacagaccaggtatagtgcctgaggtagacatttcaatatc

SEQ ID NO: 469434 - DNA, 201 bp, Homo sapiens
gttacaagctcatcttatacctcctgtgccccagccctggaataagtccattgttaaataagtaacccagattcctttagtggggaatgggtgctgggtgygctcattgctactgaagggtgtttgcttcttcatcctttcagcaggtggtgtcaggaaatacatgcgtgtgtatacacttacagaagtttgtccaaccca

SEQ ID NO: 469435 - DNA, 201 bp, Homo sapiens
cttccatctcgggtctcccagagtgctgggattacaggtgtgagccccacagcgcctggcccatttttcagcatttttataggtgtatgtactttgcgacytgggtttaagaaagtgattattgacactgccacatattgtaatcaactcggtagattttagaacatcaagctaatggccctaccctagaccaattaaaat

SEQ ID NO: 469436 - DNA, 201 bp, Homo sapiens
taagggagtggaaggaacagatggtgtcaaaaagagaaaaaggaaaccatacagaccaggtatagtgcctgaggtagacatttcaatatcatcaacacttkgttaattaaagaaaaatacaatactgaagacttcaattaaaattaaatattcaggcttcagaactgtctaaacaaaaatatgtgcacataaattaaagaa

SEQ ID NO: 469437 - DNA, 201 bp, Homo sapiens
gtgccccagccctggaataagtccattgttaaataagtaacccagattcctttagtggggaatgggtgctgggtgtgctcattgctactgaagggtgtttrcttcttcatcctttcagcaggtggtgtcaggaaatacatgcgtgtgtatacacttacagaagtttgtccaacccatgacccgcaggctacatgtggtcca

SEQ ID NO: 469438 - DNA, 201 bp, Homo sapiens
attacaggtgtgagccccacagcgcctggcccatttttcagcatttttataggtgtatgtactttgcgacctgggtttaagaaagtgattattgacactgmcacatattgtaatcaactcggtagattttagaacatcaagctaatggccctaccctagaccaattaaaatgcacttctaggatcatctttaactgtaacc

SEQ ID NO: 469439 - DNA, 201 bp, Homo sapiens
tagtcccagctactcaggagtcgagatgggaggattacttgagcccaaaaggtcgagaatgcagtgagtcatggttgcgccactgcactccagccggtgcracagagcaagaccctgtctcaacaaacaaaaaacccttaaaatttttttaatgctactattgttgtaatgagtcatattaagtgggattatacatgtacc

SEQ ID NO: 469440 - DNA, 201 bp, Homo sapiens
gactttatggtggccgaaatttcaagagtaacacagtaacagttaagtcatactgggactcaggctaatcttttctccgttgccctaggcattgatgtccmcctggcaaatgagggtgagaagcggtgagggattgcatgggaggtttggggacaaggcctgggagtagtacagaggcatctttcacttttgcccacattt

SEQ ID NO: 469441 - DNA, 201 bp, Homo sapiens
atttcaatatcatcaacacttggttaattaaagaaaaatacaatactgaagacttcaattaaaattaaatattcaggcttcagaactgtctaaacaaaaawatgtgcacataaattaaagaactaaactatttgaatacgactttttagctctagagttctttattttgaatgtgtgaatacttcacaatgaatcattatt

SEQ ID NO: 469442 - DNA, 201 bp, Homo sapiens
atgggtgctgggtgtgctcattgctactgaagggtgtttgcttcttcatcctttcagcaggtggtgtcaggaaatacatgcgtgtgtatacacttacagawgtttgtccaacccatgacccgcaggctacatgtggtccaggatggctttgaatgtggcccaacagaaattcataaaatttcttaaaacattatgaggtgt

SEQ ID NO: 469443 - DNA, 201 bp, Homo sapiens
agcgcctggcccatttttcagcatttttataggtgtatgtactttgcgacctgggtttaagaaagtgattattgacactgccacatattgtaatcaactcrgtagattttagaacatcaagctaatggccctaccctagaccaattaaaatgcacttctaggatcatctttaactgtaaccctgaaagcggagttctgaac

SEQ ID NO: 469444 - DNA, 201 bp, Homo sapiens
ttgagcccaaaaggtcgagaatgcagtgagtcatggttgcgccactgcactccagccggtgcaacagagcaagaccctgtctcaacaaacaaaaaaccctyaaaatttttttaatgctactattgttgtaatgagtcatattaagtgggattatacatgtaccaaacttttattttttcttgagtgagattatttcatggt

SEQ ID NO: 469445 - DNA, 201 bp, Homo sapiens
atatagttcctctggatgtgtacttctgtaacgcttttaattttcagtattcactttctaatatctttttttgaaaaaacttatttcagtgtttatgcagkagtgccagtaagtatacagtgtgaaggggaataagacagagttattatggctcctagaatttatagtccagttaaaaaccatgactgattaaacactcat

SEQ ID NO: 469446 - DNA, 201 bp, Homo sapiens
gtgctcattgctactgaagggtgtttgcttcttcatcctttcagcaggtggtgtcaggaaatacatgcgtgtgtatacacttacagaagtttgtccaaccyatgacccgcaggctacatgtggtccaggatggctttgaatgtggcccaacagaaattcataaaatttcttaaaacattatgaggtgttttttttgtgtgt

SEQ ID NO: 469447 - DNA, 201 bp, Homo sapiens
gttattatggctcctagaatttatagtccagttaaaaaccatgactgattaaacactcatttcttatctgcctcaggagtggagagaaaagcggtcttgcytgtcagttttatttgccttattggaaaaaattattaaaattgtcacaatacagaagttgtaggcttttatgtatttatttaaaaaatttttttcccgctt

SEQ ID NO: 469448 - DNA, 201 bp, Homo sapiens
aaatttcttaaaacattatgaggtgttttttttgtgtgtgtgtgtgtgtgtgcgtgtgtgtgtagctcatcggctatcgttagtgttagtgtatcttgtgwgtggcccaagacaattcttcttctttcagtgtggtccagggaagccaaaacattgaacacccctacacttaacgtatatacacataaatattcatataca

SEQ ID NO: 469449 - DNA, 201 bp, Homo sapiens
agtgttagtgtatcttgtgtgtggcccaagacaattcttcttctttcagtgtggtccagggaagccaaaacattgaacacccctacacttaacgtatatayacataaatattcatatacatatgcataacttagaaataatgaatttacaccagtacctccagttcttgtccttctccactgaattctttgccttctcatt

SEQ ID NO: 469450 - DNA, 201 bp, Homo sapiens
acatatgcataacttagaaataatgaatttacaccagtacctccagttcttgtccttctccactgaattctttgccttctcattcttgcatgtctgttctyctacaataaaaattctgggttgtagcaacatcagcacatttattcagttgctcaatctaaaaagcaagtctgcttcagtttgctctcagtaatagatttt

SEQ ID NO: 469451 - DNA, 201 bp, Homo sapiens
cataacttagaaataatgaatttacaccagtacctccagttcttgtccttctccactgaattctttgccttctcattcttgcatgtctgttcttctacaayaaaaattctgggttgtagcaacatcagcacatttattcagttgctcaatctaaaaagcaagtctgcttcagtttgctctcagtaatagattttattcccc

SEQ ID NO: 469452 - DNA, 201 bp, Homo sapiens
tgatgctcaaagtggacttgggagaatgaggaagagtttgtgaatcattctaagggaaaactgaataagtaaatgcaacattttacataatttcttctgayttcttatgtgttcacttgccctagactgcccctcttgtttggggcttatttctgtgcgttttaccacttgcaagataatggaggcaggttgaaatgggaa

SEQ ID NO: 469453 - DNA, 201 bp, Homo sapiens
tagaaataatgaatttacaccagtacctccagttcttgtccttctccactgaattctttgccttctcattcttgcatgtctgttcttctacaataaaaatwctgggttgtagcaacatcagcacatttattcagttgctcaatctaaaaagcaagtctgcttcagtttgctctcagtaatagattttattcccctttcttt

SEQ ID NO: 469454 - DNA, 201 bp, Homo sapiens
cacatggagtgctcagtaaccgtgagctattagaatacaagtgctcaaccagtgcttgagcaattgtgtcttgtgtccaacagaactcaacagaatcccaygcttgtctttatatgtgaattcagttccttttgagttagtaagaaattatgcctgtgttggggtaattgaacttttaggatgagggaattgtctgccaca

SEQ ID NO: 469455 - DNA, 201 bp, Homo sapiens
ttcttgaatgccagactcatgagtttgggctttatcctgtagtccaggagttataaactgtttacagggagcaggtaagcaatttaaatgaacagtaggcygcttctaagaatctgaatgacaactgacactttagaccttgggttggggagaaaatgggaaataataacagccttggggaagtctaggagtccttatgcc

SEQ ID NO: 469456 - DNA, 201 bp, Homo sapiens
aactattaatagatgagaattcaagaagattgagtctaacccctcattttatagataactgagccccagagagattatggaatactagaagtcatatattraggtgttacttttacagtaaataaaggagatggtagtctactgtattggtgtagacccatagtaaatcatgcctatgggtattcatgctattgtatagtc

SEQ ID NO: 469457 - DNA, 201 bp, Homo sapiens
agaacaatacccggtctcagaaaaaaaaaatgcatttgggatacgagtgataaaaatcattattttccatcctcttttactgaaatagttaaatgaagttkctccttaaccttaccctttatttttctaaagtattttgaaatacagatttttattattgaggactttaaatagtatttaaaaatggaattgtcacagtgt

SEQ ID NO: 469458 - DNA, 201 bp, Homo sapiens
ctttttttttctttttgagacagagtcttgctctgtcgcgtggctggagtgcagtgatgcgatcttggctcactgcaacctccgcctcctgggttcaagcrattctcgtgcctcagcctccctagtagctgtgattacaggcatctgccaccacgcctggctaatttttttttttttttttttttagtagagactgggttt

SEQ ID NO: 469459 - DNA, 201 bp, Homo sapiens
tcgtgcctcagcctccctagtagctgtgattacaggcatctgccaccacgcctggctaatttttttttttttttttttttagtagagactgggttttgccrtgttggccaggctggtctcgaaatactgacctcaggtgatccacttgccttgtcctcccaaagtgctgggattacaggtgtgagccactgcgcccagccc

SEQ ID NO: 469460 - DNA, 201 bp, Homo sapiens
atggtagaacgatttctattaatttgggtatatatccagtaatgggatacctggattgaatggtagttctcagttctttgagaaatccccaaagtgctttygacagtggctgaactaattaacattcccactagcagtgtataagccttcccttttctctacaaccttgccaacatgttttttttgtgtgtgactttttaa

SEQ ID NO: 469461 - DNA, 201 bp, Homo sapiens
cctttgcccatttttaaatggggttgttttttgcttgttttttttttattataaactatttttttattatactttaaattctagggtacatgtgcacaacktgcaggtttgttacatatgtatacaaggtgccatgttggtgtgctgcacccattaacttgtcatttacattaagtatatctcctaatgctagttttttgc

SEQ ID NO: 469462 - DNA, 201 bp, Homo sapiens
tataggtgtatgtactttgcgacctgggtttaagaaagtgattattgacactgccacatattgtaatcaactcggtagattttagaacatcaagctaatgrccctaccctagaccaattaaaatgcacttctaggatcatctttaactgtaaccctgaaagcggagttctgaactagagaaatgtgctacttgtcttactg

SEQ ID NO: 469463 - DNA, 201 bp, Homo sapiens
ttaagtgggattatacatgtaccaaacttttattttttcttgagtgagattatttcatggttattttaattggcatgccttacgattgagttaaattgatkatatttgtcacttttttttgcaaactgcctaccagtaccctatttcgggtactttgcagcttcaaataagaaaaattttaattaaaaatgcattaaacca

SEQ ID NO: 469464 - DNA, 201 bp, Homo sapiens
aggtgtatgtactttgcgacctgggtttaagaaagtgattattgacactgccacatattgtaatcaactcggtagattttagaacatcaagctaatggccytaccctagaccaattaaaatgcacttctaggatcatctttaactgtaaccctgaaagcggagttctgaactagagaaatgtgctacttgtcttactgatt

SEQ ID NO: 469465 - DNA, 201 bp, Homo sapiens
tatacatgtaccaaacttttattttttcttgagtgagattatttcatggttattttaattggcatgccttacgattgagttaaattgattatatttgtcawttttttttgcaaactgcctaccagtaccctatttcgggtactttgcagcttcaaataagaaaaattttaattaaaaatgcattaaaccataaataaaatt

SEQ ID NO: 469466 - DNA, 201 bp, Homo sapiens
tattggaaaaaattattaaaattgtcacaatacagaagttgtaggcttttatgtatttatttaaaaaatttttttcccgcttatcacacgtgttgagtagkctttccttaggcagtttattaatatcttgtttaccaatgaggttttaaattggatttgtacaatctttatgcttcttattgcttatattttattggtaag

SEQ ID NO: 469467 - DNA, 201 bp, Homo sapiens
gtgtatgtactttgcgacctgggtttaagaaagtgattattgacactgccacatattgtaatcaactcggtagattttagaacatcaagctaatggccctmccctagaccaattaaaatgcacttctaggatcatctttaactgtaaccctgaaagcggagttctgaactagagaaatgtgctacttgtcttactgatttt

SEQ ID NO: 469468 - DNA, 201 bp, Homo sapiens
acttttattttttcttgagtgagattatttcatggttattttaattggcatgccttacgattgagttaaattgattatatttgtcacttttttttgcaaaytgcctaccagtaccctatttcgggtactttgcagcttcaaataagaaaaattttaattaaaaatgcattaaaccataaataaaatttacctcacatgact

SEQ ID NO: 469469 - DNA, 201 bp, Homo sapiens
tttgatatggaaggaagaactttcttacttcattcgtattccatgagaccttaaaagataacctatcttttaaataggtcatatctataataaggacctamgattagttgcttctgaattgttttatgaaaatgatttcatttcttcctgatcatgaggcttataagtgtacttttttagacattgcagatttcttccagg

SEQ ID NO: 469470 - DNA, 201 bp, Homo sapiens
tgtaatcaactcggtagattttagaacatcaagctaatggccctaccctagaccaattaaaatgcacttctaggatcatctttaactgtaaccctgaaagyggagttctgaactagagaaatgtgctacttgtcttactgatttttaaaaatgcattaaactgaatactgtaaggaatgctctttaaaaatggtggaaaat

SEQ ID NO: 469471 - DNA, 201 bp, Homo sapiens
taagaaaaattttaattaaaaatgcattaaaccataaataaaatttacctcacatgactggaagtccaggtgtaattcagtggctcaattaaattatcackgacctagatggttttcattttcctgctgttttatactcagcttgttgtcgatagttgctaaattaattcacttaaataatcatttaccacctaaaatgta

SEQ ID NO: 469472 - DNA, 201 bp, Homo sapiens
agaagctgctttgcctcacccccttttttaaccagtgaaagaactgaggcattgagaagtatttagtaagcagaattacatagtctgactccagattccaygctgttaaacacagggctctatgtgtcccatgtataaatgccctcataccttggagtaccagacaccgtccccctgaaatcatatcagtcaaagaatatt

SEQ ID NO: 469473 - DNA, 201 bp, Homo sapiens
aattatcacggacctagatggttttcattttcctgctgttttatactcagcttgttgtcgatagttgctaaattaattcacttaaataatcatttaccacytaaaatgtattaggcagtagtccataagcacgggaaatacagcagtgagcaaaacaaagttcattgccttccttcacgggcttatattttagtggggata

SEQ ID NO: 469474 - DNA, 201 bp, Homo sapiens
tcaactcggtagattttagaacatcaagctaatggccctaccctagaccaattaaaatgcacttctaggatcatctttaactgtaaccctgaaagcggagwtctgaactagagaaatgtgctacttgtcttactgatttttaaaaatgcattaaactgaatactgtaaggaatgctctttaaaaatggtggaaaataaagt

SEQ ID NO: 469475 - DNA, 201 bp, Homo sapiens
tatcacggacctagatggttttcattttcctgctgttttatactcagcttgttgtcgatagttgctaaattaattcacttaaataatcatttaccacctamaatgtattaggcagtagtccataagcacgggaaatacagcagtgagcaaaacaaagttcattgccttccttcacgggcttatattttagtggggataagg

SEQ ID NO: 469476 - DNA, 201 bp, Homo sapiens
catctaggtagtttgtgccttctatcctccagctaatgtaccagttagccggttaatatacagacagtcatccatcacttaagttcagagaaatacatcaytaggcattttcatcgttgcgtgaacatcatagagtgcacttccacaaacctagatggtatagcttactacacatttaggctgtatggtacgctaaattca

SEQ ID NO: 469477 - DNA, 201 bp, Homo sapiens
caactcggtagattttagaacatcaagctaatggccctaccctagaccaattaaaatgcacttctaggatcatctttaactgtaaccctgaaagcggagtyctgaactagagaaatgtgctacttgtcttactgatttttaaaaatgcattaaactgaatactgtaaggaatgctctttaaaaatggtggaaaataaagtg

SEQ ID NO: 469478 - DNA, 201 bp, Homo sapiens
cctgctgttttatactcagcttgttgtcgatagttgctaaattaattcacttaaataatcatttaccacctaaaatgtattaggcagtagtccataagcaygggaaatacagcagtgagcaaaacaaagttcattgccttccttcacgggcttatattttagtggggataagggagaagacagtcaaacaaataggtagaa

SEQ ID NO: 469479 - DNA, 201 bp, Homo sapiens
gtcaaatagataagccagcgtaatttagtgtttgatatttacactgatactgttgagaagaggaagtgcacacaggtctttttgtattctgtttgataagygataagagtggctttgccttttttttttttttttttggtcgtttttaacttctattttacctaaaaatcaggttattgatttagattagcacagatttaa

SEQ ID NO: 469480 - DNA, 201 bp, Homo sapiens
aactcggtagattttagaacatcaagctaatggccctaccctagaccaattaaaatgcacttctaggatcatctttaactgtaaccctgaaagcggagttytgaactagagaaatgtgctacttgtcttactgatttttaaaaatgcattaaactgaatactgtaaggaatgctctttaaaaatggtggaaaataaagtgg

SEQ ID NO: 469481 - DNA, 201 bp, Homo sapiens
gtaatttagtgtttgatatttacactgatactgttgagaagaggaagtgcacacaggtctttttgtattctgtttgataagtgataagagtggctttgccttttttttttttttttttggtcgtttttaacttctattttacctaaaaatcaggttattgatttagattagcacagatttaattttggaaaatgacttact

SEQ ID NO: 469482 - DNA, 201 bp, Homo sapiens
aatgcacttctaggatcatctttaactgtaaccctgaaagcggagttctgaactagagaaatgtgctacttgtcttactgatttttaaaaatgcattaaamtgaatactgtaaggaatgctctttaaaaatggtggaaaataaagtggaaattttaaatttgtcatattaaatcataacatttgtttttatttctgtcttc

SEQ ID NO: 469483 - DNA, 201 bp, Homo sapiens
gatagttgctaaattaattcacttaaataatcatttaccacctaaaatgtattaggcagtagtccataagcacgggaaatacagcagtgagcaaaacaaarttcattgccttccttcacgggcttatattttagtggggataagggagaagacagtcaaacaaataggtagaatttatagattgtcagaagatgttaagtt

SEQ ID NO: 469484 - DNA, 201 bp, Homo sapiens
tattgatttagattagcacagatttaattttggaaaatgacttactattcaagataaagcagttttatcctgtgtactgtggaaatgtagggagaaattayttatcagtttacctaatttcttttttggataggtattggtggatttatggtgcggcaaagaagtcgaactgggcaagggaaaaccaaaagatctgtgatc

SEQ ID NO: 469485 - DNA, 201 bp, Homo sapiens
tgcacttctaggatcatctttaactgtaaccctgaaagcggagttctgaactagagaaatgtgctacttgtcttactgatttttaaaaatgcattaaactkaatactgtaaggaatgctctttaaaaatggtggaaaataaagtggaaattttaaatttgtcatattaaatcataacatttgtttttatttctgtcttcag

SEQ ID NO: 469486 - DNA, 201 bp, Homo sapiens
atagttgctaaattaattcacttaaataatcatttaccacctaaaatgtattaggcagtagtccataagcacgggaaatacagcagtgagcaaaacaaagktcattgccttccttcacgggcttatattttagtggggataagggagaagacagtcaaacaaataggtagaatttatagattgtcagaagatgttaagttt

SEQ ID NO: 469487 - DNA, 201 bp, Homo sapiens
atggtgcggcaaagaagtcgaactgggcaagggaaaaccaaaagatctgtgatcagaaaagattcctcaggctctatttccgagcagttaccttgcagagrtgatggtatagtactgacttaaaaaaaaattttttttttaatgtaaccctttggtcttgatatttctattggaaaaaactatcctaaataatgttacagt

SEQ ID NO: 469488 - DNA, 201 bp, Homo sapiens
ctaggatcatctttaactgtaaccctgaaagcggagttctgaactagagaaatgtgctacttgtcttactgatttttaaaaatgcattaaactgaatactrtaaggaatgctctttaaaaatggtggaaaataaagtggaaattttaaatttgtcatattaaatcataacatttgtttttatttctgtcttcagtccattt

SEQ ID NO: 469489 - DNA, 201 bp, Homo sapiens
ctaaattaattcacttaaataatcatttaccacctaaaatgtattaggcagtagtccataagcacgggaaatacagcagtgagcaaaacaaagttcattgycttccttcacgggcttatattttagtggggataagggagaagacagtcaaacaaataggtagaatttatagattgtcagaagatgttaagttttatggaa

SEQ ID NO: 469490 - DNA, 201 bp, Homo sapiens
aaactatcctaaataatgttacagtcaataagagccttattgcctcttattgttactcaataagagtcttattgccttttattgatgaaaggatttgagtkcgtatagagttcatatctgtaatacagtaatcaggttttataaggaaatggtttaaatccaatagactttattcttttgagattttttgacaagctcttt

SEQ ID NO: 469491 - DNA, 201 bp, Homo sapiens
caaagcctttctttgactgccttagctacttatcatataatttgaaattctcaagtgacagtgcacctcagtttttatctatttatgtatctgtctgtctrtctatctatctatctatctatctatctatctatctatctaggggtctcactatgtcacccaggttggcatgcagtggcacaatcatgggtcactgcagcc

SEQ ID NO: 469492 - DNA, 201 bp, Homo sapiens
ataagtaaatgcaacattttacataatttcttctgacttcttatgtgttcacttgccctagactgcccctcttgtttggggcttatttctgtgcgttttamcacttgcaagataatggaggcaggttgaaatgggaaagataccagatgactaattttttttcgcccacatttccatcttttgttaagaaatttgaagttg

SEQ ID NO: 469493 - DNA, 201 bp, Homo sapiens
tgcaagataatggaggcaggttgaaatgggaaagataccagatgactaattttttttcgcccacatttccatcttttgttaagaaatttgaagttgattgytacattgaagtatgtagttttgtgtttttttctgtgagtctttaaccatttgtgtccctgttaacttacaattgatgagtttattttgtatttattttta

SEQ ID NO: 469494 - DNA, 201 bp, Homo sapiens
atttgatgccttagcaagcaataaatataaactctttttttgagataaatataaactcttttttttttttttttttttgagatgatgtctcactgtgtcayccaggctagagtgcagtggtgccatctcggctctccacaacctctgcctcccaggttcaagggattctcatgtgtcagcgccctgaatagctgggattac

SEQ ID NO: 469495 - DNA, 201 bp, Homo sapiens
cttactgatttttaaaaatgcattaaactgaatactgtaaggaatgctctttaaaaatggtggaaaataaagtggaaattttaaatttgtcatattaaatyataacatttgtttttatttctgtcttcagtccatttctctcattgcacagttgtattcccattctaattaggaaattctgagataataatcttaggtctt

SEQ ID NO: 469496 - DNA, 201 bp, Homo sapiens
aatgtattaggcagtagtccataagcacgggaaatacagcagtgagcaaaacaaagttcattgccttccttcacgggcttatattttagtggggataaggragaagacagtcaaacaaataggtagaatttatagattgtcagaagatgttaagttttatggaaaaaaataaagccatggaagggacgggaagggctgggt

SEQ ID NO: 469497 - DNA, 201 bp, Homo sapiens
catttctctcattgcacagttgtattcccattctaattaggaaattctgagataataatcttaggtcttcttgtattatttaccctgtatgtatcatcacrtcttatagaaagatattgaatgtaatcacactactatgatctagttcagacaccttcatgttctaattgctttcatgatggtattgaaagtttttattaa

SEQ ID NO: 469498 - DNA, 201 bp, Homo sapiens
cagcagtgagcaaaacaaagttcattgccttccttcacgggcttatattttagtggggataagggagaagacagtcaaacaaataggtagaatttatagaktgtcagaagatgttaagttttatggaaaaaaataaagccatggaagggacgggaagggctgggttggattgttttaagtggggccatcagagaaggcctc

SEQ ID NO: 469499 - DNA, 201 bp, Homo sapiens
tgtgctcaagcgatcctcctgcctcagcctcccaaagtgctgggattacaaatgtgagcccagctgatatctaaaaaaaattttgtttttgagacagtctycctctgttacccaggctggagtgctgtggtgccgtctcagctcactgcaaccttcacctcccgagtccaagcaattctcgtgcgtcagcgtcccaagtgg

SEQ ID NO: 469500 - DNA, 201 bp, Homo sapiens
aatatttttagtagagacggtgtttcgccatattggttaggctggtctcgaattcctgacctcaggtgatccacccgccttgtcctcccaaagtgctgggrttacaggggtgagccaccacgcccagcctacagtaaatatttcaagaaaatttcataaatgaaaacataggtactgtattttgatatctcttggacaaat

SEQ ID NO: 469501 - DNA, 201 bp, Homo sapiens
ttttagtggggataagggagaagacagtcaaacaaataggtagaatttatagattgtcagaagatgttaagttttatggaaaaaaataaagccatggaagrgacgggaagggctgggttggattgttttaagtggggccatcagagaaggcctcagtgagctgatgtttgaatagaatcttaaaagaaataagaatgcaaa

SEQ ID NO: 469502 - DNA, 201 bp, Homo sapiens
agtccaagcaattctcgtgcgtcagcgtcccaagtggctgggattacaggcgtgaaccactgcatccagccaggagttgttttttttttttgctattggtrgtgagcaggaggtggcaagtgatggtttgtgtgaaggtgtatttcttattaaactgaccctgagctttatgcaagtcacctctggcctgtctgccttgga

SEQ ID NO: 469503 - DNA, 201 bp, Homo sapiens
caaacaaataggtagaatttatagattgtcagaagatgttaagttttatggaaaaaaataaagccatggaagggacgggaagggctgggttggattgtttwaagtggggccatcagagaaggcctcagtgagctgatgtttgaatagaatcttaaaagaaataagaatgcaaaggcagatatttggggaaagagcattgct

SEQ ID NO: 469504 - DNA, 201 bp, Homo sapiens
aaggttcctgcttttcacttggcctccactgaatgggatggaggggtggttaagttatcactgggcagtgctttgagtttggattctccaataggcctctsctgtcatatctctgtagagggagggatagggatatgtccttatcactgggtgggtgttgaactcaggctccccactttttttccacccacactctagagg

SEQ ID NO: 469505 - DNA, 201 bp, Homo sapiens
ccatattggttaggctggtctcgaattcctgacctcaggtgatccacccgccttgtcctcccaaagtgctgggattacaggggtgagccaccacgcccagmctacagtaaatatttcaagaaaatttcataaatgaaaacataggtactgtattttgatatctcttggacaaattataagaagtttactttatattataag

SEQ ID NO: 469506 - DNA, 201 bp, Homo sapiens
aggtagaatttatagattgtcagaagatgttaagttttatggaaaaaaataaagccatggaagggacgggaagggctgggttggattgttttaagtggggscatcagagaaggcctcagtgagctgatgtttgaatagaatcttaaaagaaataagaatgcaaaggcagatatttggggaaagagcattgctgatgcgggg

SEQ ID NO: 469507 - DNA, 201 bp, Homo sapiens
atacatttcctttgtatatcacctcaacaaagtactaagtaatactttgtttgctttatataaagataccagaaacatatcaaatacatatataatatttaaataaaatgactaaaaactaattttgtttgttgaagaaataatcactaattcagttattcttaaacttgtgtgtgcatcataataaccagacggcttgtt

SEQ ID NO: 469508 - DNA, 201 bp, Homo sapiens
caggtgatccacccgccttgtcctcccaaagtgctgggattacaggggtgagccaccacgcccagcctacagtaaatatttcaagaaaatttcataaatgraaacataggtactgtattttgatatctcttggacaaattataagaagtttactttatattataagaagagtactttcagttttaaaagtagccagagaac

SEQ ID NO: 469509 - DNA, 201 bp, Homo sapiens
gtagaatttatagattgtcagaagatgttaagttttatggaaaaaaataaagccatggaagggacgggaagggctgggttggattgttttaagtggggccmtcagagaaggcctcagtgagctgatgtttgaatagaatcttaaaagaaataagaatgcaaaggcagatatttggggaaagagcattgctgatgcggggaa

SEQ ID NO: 469510 - DNA, 201 bp, Homo sapiens
tacatttcctttgtatatcacctcaacaaagtactaagtaatactttgtttgctttatataaagataccagaaacatatcaaatacatatataatatttaaataaaatgactaaaaactaattttgtttgttgaagaaataatcactaattcagttattcttaaacttgtgtgtgcatcataataaccagacggcttgtta

SEQ ID NO: 469511 - DNA, 201 bp, Homo sapiens
atctcttggacaaattataagaagtttactttatattataagaagagtactttcagttttaaaagtagccagagaaccatagtgttaaacctaaaaaatayctacccctttggaacaccaagctaacaacacagccgattagaagtaccagactttccttttagttcacttgtgcttgttgtggtatttttggagatatta

SEQ ID NO: 469512 - DNA, 201 bp, Homo sapiens
acatttcctttgtatatcacctcaacaaagtactaagtaatactttgtttgctttatataaagataccagaaacatatcaaatacatatataatatttaaataaaatgactaaaaactaattttgtttgttgaagaaataatcactaattcagttattcttaaacttgtgtgtgcatcataataaccagacggcttgttaa

SEQ ID NO: 469513 - DNA, 201 bp, Homo sapiens
tataagaagagtactttcagttttaaaagtagccagagaaccatagtgttaaacctaaaaaatacctacccctttggaacaccaagctaacaacacagccrattagaagtaccagactttccttttagttcacttgtgcttgttgtggtatttttggagatattactgttgctagtgccacctaatttgtattgtgaaatt

SEQ ID NO: 469514 - DNA, 201 bp, Homo sapiens
ctgatgtttgaatagaatcttaaaagaaataagaatgcaaaggcagatatttggggaaagagcattgctgatgcggggaacagtgagtgcaaaagccccaraggcaggaatgtgcttagcatgttcatagaactgaaagggccagtgtggcaggagctgagttatggagaaaacatcataagagaagtagcgtggggagtc

SEQ ID NO: 469515 - DNA, 201 bp, Homo sapiens
catttcctttgtatatcacctcaacaaagtactaagtaatactttgtttgctttatataaagataccagaaacatatcaaatacatatataatatttaaataaaatgactaaaaactaattttgtttgttgaagaaataatcactaattcagttattcttaaacttgtgtgtgcatcataataaccagacggcttgttaaa

SEQ ID NO: 469516 - DNA, 201 bp, Homo sapiens
tcagttttaaaagtagccagagaaccatagtgttaaacctaaaaaatacctacccctttggaacaccaagctaacaacacagccgattagaagtaccagamtttccttttagttcacttgtgcttgttgtggtatttttggagatattactgttgctagtgccacctaatttgtattgtgaaattattgaaggctaaagct

SEQ ID NO: 469517 - DNA, 201 bp, Homo sapiens
agatatttggggaaagagcattgctgatgcggggaacagtgagtgcaaaagccccagaggcaggaatgtgcttagcatgttcatagaactgaaagggccartgtggcaggagctgagttatggagaaaacatcataagagaagtagcgtggggagtcagattgtgcagggccttgtagaccattgtgagatcttttgactt

SEQ ID NO: 469518 - DNA, 201 bp, Homo sapiens
atttcctttgtatatcacctcaacaaagtactaagtaatactttgtttgctttatataaagataccagaaacatatcaaatacatatataatatttaaataaaatgactaaaaactaattttgtttgttgaagaaataatcactaattcagttattcttaaacttgtgtgtgcatcataataaccagacggcttgttaaat

SEQ ID NO: 469519 - DNA, 201 bp, Homo sapiens
ttttaaaagtagccagagaaccatagtgttaaacctaaaaaatacctacccctttggaacaccaagctaacaacacagccgattagaagtaccagactttycttttagttcacttgtgcttgttgtggtatttttggagatattactgttgctagtgccacctaatttgtattgtgaaattattgaaggctaaagctgata

SEQ ID NO: 469520 - DNA, 201 bp, Homo sapiens
aaagccccagaggcaggaatgtgcttagcatgttcatagaactgaaagggccagtgtggcaggagctgagttatggagaaaacatcataagagaagtagcrtggggagtcagattgtgcagggccttgtagaccattgtgagatcttttgacttttactctggattagatgagagtcctttgggggcttttaagtggagga

SEQ ID NO: 469521 - DNA, 201 bp, Homo sapiens
tgctccaatatggacagttggcttagttccaaatagtttagacaagtagactttcacaataaggactggagttacatgcttaaaggagtgttgtaaagaarcataagatggtccttttatttgcctaatgtctattcagaaagaaaacgataaggtatttgatgtttgtgaataagctcgaatgagaattcaaatgtgttt

SEQ ID NO: 469522 - DNA, 201 bp, Homo sapiens
taaatgatggagaaaagacttctttgcatccttgtgatccagatctatttgagaaaagaaccaatcgagaaactgctggccccagtgcaaatgtcattcargcatccactcaactacctgctcaagatgtaataaactcttgtggcataactggatcaactccagttctctcaagtttacttgctaatgagaaatctgata

SEQ ID NO: 469523 - DNA, 201 bp, Homo sapiens
gttaaacctaaaaaatacctacccctttggaacaccaagctaacaacacagccgattagaagtaccagactttccttttagttcacttgtgcttgttgtgstatttttggagatattactgttgctagtgccacctaatttgtattgtgaaattattgaaggctaaagctgataatagctgtttctgtagttatcaaaaca

SEQ ID NO: 469524 - DNA, 201 bp, Homo sapiens
atagaactgaaagggccagtgtggcaggagctgagttatggagaaaacatcataagagaagtagcgtggggagtcagattgtgcagggccttgtagaccaktgtgagatcttttgacttttactctggattagatgagagtcctttgggggcttttaagtggaggactggctttatctgaccaagactctaaaactctcat

SEQ ID NO: 469525 - DNA, 201 bp, Homo sapiens
ggactctgaaccatccactaggtggtgaattttcagaagctcctttgtcaacatctgtaccgtctgaaacaacgtctgataatttacagataaccacccarccttctgatggtctagaggaaaaacttgattctgatgacccttctgtgaaggaactggatgttaaagaccttgagggggttgaagtcaaagacttagatg

SEQ ID NO: 469526 - DNA, 201 bp, Homo sapiens
ttaaaggagtgttgtaaagaagcataagatggtccttttatttgcctaatgtctattcagaaagaaaacgataaggtatttgatgtttgtgaataagctcraatgagaattcaaatgtgtttgggggctgaactgtaagttataaaaattaggccaaaaccagagtgtatgtatttttaggaataatcatctgatttttag

SEQ ID NO: 469527 - DNA, 201 bp, Homo sapiens
aggcagaattgcttgaacctgggaggcagaggtggcagtgagctgagatcttgccactgcactccagcctgggcgacagagtgagactccatctcaaaaamaaaaaaaaaaaaaaaaaaaggaaagaatcatagatttttttttttttttggtattaagaggaacaggaataaaatataagaaacatctgtttgtaaattt

SEQ ID NO: 469528 - DNA, 201 bp, Homo sapiens
gtttcttcccatttagcggcagaagttacgtgaaatcattctccagcagcaacagcagaagaagattgcaggtcgacaggagaaggggtcacaggactcamccgcagtgcctcatccagggcctcttcaacactggcaaccagagaatgttaaccaggctttcaccagacccccacctccctatcctgggaacattaggtc

SEQ ID NO: 469529 - DNA, 201 bp, Homo sapiens
aatagttaaatgtaactggtatttcatcaaactttgaaacattaccatagccacataatgaaagtatcaggatttaaaaagccactaacctgtcaggcacrgtggcgcatgcttgtaatcccagctacttgagaggctgagacaggaggatcacttgagtccaggaatttgaggccagcctgggcaacatagcaagatccc

SEQ ID NO: 469530 - DNA, 201 bp, Homo sapiens
tattcatggatcaagacttaaaacattaatgatttttgctgcttcatcagtgatattctcaatgatactctacattatttttactgtagttgtagtgccarttgagaatgtgacaacttctaatacagcttggtgccaactgctttcagttttggaaatgcatcaacagttttacccaccatagcttttgcatcgtgtaac

SEQ ID NO: 469531 - DNA, 201 bp, Homo sapiens
actcagttttgcaatagtttcccagctatctatcaatacacaaactcttaaattactagaggggtacctggaagtgacttttcatttggatgacccctgtwtttaggtacctttttggattggcgtcttcatgggactttattcattatgtattgtaataaatgaaatgctttttatctaacaatagaaatcagtggtttg

SEQ ID NO: 469532 - DNA, 201 bp, Homo sapiens
ttattgtatgttgcgtttattgtggcttttgctataaatatgttacttttaactgttttgtaataggttttaatgaaagctatacttgaacatatattaaraagttattttatgttcataaagtaaagatatttattttttcccagggataaaaattcagcctttaatccaatggcaagtgatcctaacaactcttggaca

SEQ ID NO: 469533 - DNA, 201 bp, Homo sapiens
taaccaaaatctgagaatacagaagtcaaatgttggccctatggagcttggcatacaagaaaagttggtcctctctatgcatgggtttccctgtgttttcyatccacattcagttgaaaaaaatgtgtgtttatgtggacccatgcagttaaaaaccatgttgttcaagggccagctttacttcaactccttgttacttgt

SEQ ID NO: 469534 - DNA, 201 bp, Homo sapiens
tatctggaacacaagagagtcactaatgggataaatacatgcattaatgggatttgtcaatgaagggcaaaatttagtgcattagcttgaatgaggaggtrggtcctactggctggcctcttgggtagaggccaggactgccgctaaacattctgcaatatgcaggacagcctcccacaccaaaactatacagcttaaaat

SEQ ID NO: 469535 - DNA, 201 bp, Homo sapiens
attgatttttattatcatctttattttttcctatcttctcactttgagtttaatttgatcttctttttttgtttactcttacgtgtccctgcttggaaggsacacttgtgaagtttaggtcagaactttctattctccttggctcatatctgtggtctaggaaaatgaaatttctatcaccttctggataaatcacactat

SEQ ID NO: 469536 - DNA, 201 bp, Homo sapiens
aatatatttaaagtaatttcctcggttgttaacatggcatttttgtcaagcaattttgttttctctgaaacatacctcagattgtttttagtttttccagrggaaactttattcattttttactagagaaaagaacatggcaaacagtgaatctgtgtttcaggaagggtaacgtcgtttttcttttaatttcccttttga

SEQ ID NO: 469537 - DNA, 201 bp, Homo sapiens
tatcttctcactttgagtttaatttgatcttctttttttgtttactcttacgtgtccctgcttggaagggacacttgtgaagtttaggtcagaactttctrttctccttggctcatatctgtggtctaggaaaatgaaatttctatcaccttctggataaatcacactattatctatgcaggcaacaatagcacgtatttt

SEQ ID NO: 469538 - DNA, 201 bp, Homo sapiens
aaggtggcaattcacattaagaatgtagataggcaaatttaaacttctaaatgtaatttgtctaaaaaagttgaaaaacagtgtatagtaaaagtctctcytccaaccaatggaaagtacttttatgtaagatcctttaagttactgacttgaatctttacgtaaggtaatttgctagtatctattttataaataatgtta

SEQ ID NO: 469539 - DNA, 201 bp, Homo sapiens
ttgtttactcttacgtgtccctgcttggaagggacacttgtgaagtttaggtcagaactttctattctccttggctcatatctgtggtctaggaaaatgawatttctatcaccttctggataaatcacactattatctatgcaggcaacaatagcacgtattttctcaaagattacctttgccctcaaggtaggttttatt

SEQ ID NO: 469540 - DNA, 201 bp, Homo sapiens
ctttcttccttcaggatgttctgagaatccttctttttatcattctcctttctggttcaataacttttctcactattcttttggtgtagttttgtctcatractaatttttagttctcattcatctcacaatttcttgatttccctttcattactaatggatgtttttgctggatatagaattctttgttgtcagttcttt

SEQ ID NO: 469541 - DNA, 201 bp, Homo sapiens
ctccttggctcatatctgtggtctaggaaaatgaaatttctatcaccttctggataaatcacactattatctatgcaggcaacaatagcacgtattttctsaaagattacctttgccctcaaggtaggttttatttttctagcagtctaacggtcatgaaataaattataaaataaaaacagtgggtcttcaagctagatg

SEQ ID NO: 469542 - DNA, 201 bp, Homo sapiens
tagtgttcaaacatttattttaataaaatgagtatagaaacagaaattataatcatatataagtatttaaatacactttaccttttctgaaaagaattacmtggatttttttttttcgtttcagtgccttcctcagactgctgtgaatcttcacttgtagcacaaattgtcacaaaagtaaaagagctaggtaaaatttga

SEQ ID NO: 469543 - DNA, 201 bp, Homo sapiens
tccttcaggatgttctgagaatccttctttttatcattctcctttctggttcaataacttttctcactattcttttggtgtagttttgtctcatgactaakttttagttctcattcatctcacaatttcttgatttccctttcattactaatggatgtttttgctggatatagaattctttgttgtcagttcttttaggac

SEQ ID NO: 469544 - DNA, 201 bp, Homo sapiens
ttttatgattttggcaatgccctccttgtcttcttctacagcttctagttcagagctttgttttgtttcataatcactctagaaattattaacaaaccagwgggtacttagttgatttagtcaaatagaactaagtccagactgagcaatattggttgataatcatatggctaatactgaaattttgatgttattcaaaat

SEQ ID NO: 469545 - DNA, 201 bp, Homo sapiens
ggctcatatctgtggtctaggaaaatgaaatttctatcaccttctggataaatcacactattatctatgcaggcaacaatagcacgtattttctcaaagaytacctttgccctcaaggtaggttttatttttctagcagtctaacggtcatgaaataaattataaaataaaaacagtgggtcttcaagctagatgatacta

SEQ ID NO: 469546 - DNA, 201 bp, Homo sapiens
gtctcatgactaatttttagttctcattcatctcacaatttcttgatttccctttcattactaatggatgtttttgctggatatagaattctttgttgtcrgttcttttaggacttgcaaaaatgttatgctgctttgttctggcctccatggtttcaggtgagaaatctgctgtcatttgagttgtttttcatctgtgga

SEQ ID NO: 469547 - DNA, 201 bp, Homo sapiens
tggataaatcacactattatctatgcaggcaacaatagcacgtattttctcaaagattacctttgccctcaaggtaggttttatttttctagcagtctaamggtcatgaaataaattataaaataaaaacagtgggtcttcaagctagatgatactattttctttcttgcatggacaattattttaaaatattttggtttt

SEQ ID NO: 469548 - DNA, 201 bp, Homo sapiens
ttagttctcattcatctcacaatttcttgatttccctttcattactaatggatgtttttgctggatatagaattctttgttgtcagttcttttaggacttrcaaaaatgttatgctgctttgttctggcctccatggtttcaggtgagaaatctgctgtcatttgagttgtttttcatctgtggataaggtgtcatttctc

SEQ ID NO: 469549 - DNA, 201 bp, Homo sapiens
ccagtgtggcaggagctgagttatggagaaaacatcataagagaagtagcgtggggagtcagattgtgcagggccttgtagaccattgtgagatcttttgmcttttactctggattagatgagagtcctttgggggcttttaagtggaggactggctttatctgaccaagactctaaaactctcatgctggctgctgtgtt

SEQ ID NO: 469550 - DNA, 201 bp, Homo sapiens
acaccaagctaacaacacagccgattagaagtaccagactttccttttagttcacttgtgcttgttgtggtatttttggagatattactgttgctagtgcyacctaatttgtattgtgaaattattgaaggctaaagctgataatagctgtttctgtagttatcaaaacaggattaggtctaatttcttgttctacttgat

SEQ ID NO: 469551 - DNA, 201 bp, Homo sapiens
tctcacaatttcttgatttccctttcattactaatggatgtttttgctggatatagaattctttgttgtcagttcttttaggacttgcaaaaatgttatgytgctttgttctggcctccatggtttcaggtgagaaatctgctgtcatttgagttgtttttcatctgtggataaggtgtcatttctcttatttatctcagg

SEQ ID NO: 469552 - DNA, 201 bp, Homo sapiens
cgtggggagtcagattgtgcagggccttgtagaccattgtgagatcttttgacttttactctggattagatgagagtcctttgggggcttttaagtggagkactggctttatctgaccaagactctaaaactctcatgctggctgctgtgttgagactagaatgaaggagatcaaggaagaagcaggcatgttagataata

SEQ ID NO: 469553 - DNA, 201 bp, Homo sapiens
ttacctttgccctcaaggtaggttttatttttctagcagtctaacggtcatgaaataaattataaaataaaaacagtgggtcttcaagctagatgatactrttttctttcttgcatggacaattattttaaaatattttggtttttctgcacttattatttaaatatgacagtatgactccccacccccacttgaatctag

SEQ ID NO: 469554 - DNA, 201 bp, Homo sapiens
gtaccagactttccttttagttcacttgtgcttgttgtggtatttttggagatattactgttgctagtgccacctaatttgtattgtgaaattattgaagsctaaagctgataatagctgtttctgtagttatcaaaacaggattaggtctaatttcttgttctacttgatatcgaactcaattttatatatgagacttct

SEQ ID NO: 469555 - DNA, 201 bp, Homo sapiens
gccgaaaagatttgttgagggatgtggcatgtgagaaaaagaggattcgtagttcacaccaggttcaatgaccagtaaagatgaagtatatttgttcatgmacatctattttatttggaattaaaaacctttcctggaagcccttagcagattttttttttttttttttttttgagatggagttttgcttcttgttgccca

SEQ ID NO: 469556 - DNA, 201 bp, Homo sapiens
tttgccctcaaggtaggttttatttttctagcagtctaacggtcatgaaataaattataaaataaaaacagtgggtcttcaagctagatgatactattttytttcttgcatggacaattattttaaaatattttggtttttctgcacttattatttaaatatgacagtatgactccccacccccacttgaatctagggaca

SEQ ID NO: 469557 - DNA, 201 bp, Homo sapiens
cagtgagctgagatcttgccactgcactccagcctgggcgacagagtgagactccatctcaaaaaaaaaaaaaaaaaaaaaaaaaggaaagaatcatagatttttttttttttttggtattaagaggaacaggaataaaatataagaaacatctgtttgtaaatttttaatgaagagaaagaatatttgataaaacttact

SEQ ID NO: 469558 - DNA, 201 bp, Homo sapiens
atctgtggataaggtgtcatttctcttatttatctcagggttttttagtttagtcattagttttcagaagtttatgatatatattagcattgatttatttrtgtgtatcctcttaggatttattcaatttcttgaatctgtgggtcttcgaataattgttcagctgcgtcatgttccttttctgagattccagtgacagga

SEQ ID NO: 469559 - DNA, 201 bp, Homo sapiens
gaggattcgtagttcacaccaggttcaatgaccagtaaagatgaagtatatttgttcatgcacatctattttatttggaattaaaaacctttcctggaagyccttagcagattttttttttttttttttttttgagatggagttttgcttcttgttgcccaggctggagtgcaatggcacgatctcggctcactgcactgc

SEQ ID NO: 469560 - DNA, 201 bp, Homo sapiens
aacagtgggtcttcaagctagatgatactattttctttcttgcatggacaattattttaaaatattttggtttttctgcacttattatttaaatatgacartatgactccccacccccacttgaatctagggacattgtagttttctactgcagactttgtttctggtttatactgggaatatattgtttatcattttcag

SEQ ID NO: 469561 - DNA, 201 bp, Homo sapiens
taccagactttccttttagttcacttgtgcttgttgtggtatttttggagatattactgttgctagtgccacctaatttgtattgtgaaattattgaaggstaaagctgataatagctgtttctgtagttatcaaaacaggattaggtctaatttcttgttctacttgatatcgaactcaattttatatatgagacttctt

SEQ ID NO: 469562 - DNA, 201 bp, Homo sapiens
cattgatttatttgtgtgtatcctcttaggatttattcaatttcttgaatctgtgggtcttcgaataattgttcagctgcgtcatgttccttttctgagaytccagtgacaggaatgttgcatcacttattatagtcccacaagtgtctttaatgtcttttttaaaaaaaaaatatttatttatttatttatttattgtca

SEQ ID NO: 469563 - DNA, 201 bp, Homo sapiens
gatgaagtatatttgttcatgcacatctattttatttggaattaaaaacctttcctggaagcccttagcagattttttttttttttttttttttgagatgsagttttgcttcttgttgcccaggctggagtgcaatggcacgatctcggctcactgcactgcatcctctgcctcctgggttcaagcgattctcctgcctca

SEQ ID NO: 469564 - DNA, 201 bp, Homo sapiens
gctagatgatactattttctttcttgcatggacaattattttaaaatattttggtttttctgcacttattatttaaatatgacagtatgactccccacccmcacttgaatctagggacattgtagttttctactgcagactttgtttctggtttatactgggaatatattgtttatcattttcagtgaaagcgttcactgg

SEQ ID NO: 469565 - DNA, 201 bp, Homo sapiens
ttccttttagttcacttgtgcttgttgtggtatttttggagatattactgttgctagtgccacctaatttgtattgtgaaattattgaaggctaaagctgrtaatagctgtttctgtagttatcaaaacaggattaggtctaatttcttgttctacttgatatcgaactcaattttatatatgagacttcttttaagaatt

SEQ ID NO: 469566 - DNA, 201 bp, Homo sapiens
ggtgtggtggcttgtgcctgtaatcctagctactagctgaggcaggaggattgcttgaggctaggagtttgagaccagcctgggcaatatagtgagaccacccccccccccccaacctcttcaacaaatttaaaaattttttaaaagaaatagacaaatgaagttagtattaatcaggaagctgttactgctttctacttc

SEQ ID NO: 469567 - DNA, 201 bp, Homo sapiens
gcctcctgagtcgctggaattataggtgtgtgccaccatgcccagctaatttttgtatttttagtagagacagggttttgccatgttggccaggctggtcytgaactcctcacctcaggtgatccacccatctcggcctcccaaaatgctaggattacaggcctgagcgaccgcacctggccacttttttttttttttttt

SEQ ID NO: 469568 - DNA, 201 bp, Homo sapiens
gtgacaagaagtagaaggattggagacaaaacttgaagataaaaagtcttgaatttgctgatgatttgcattgatgaagtgttgggggagaggactgaagragcaaaggagagtgacaagggactggatgccatttataaggatggggaagactgggatgaaaccggttaagggagaaattttaaacatggcaaacttaag

SEQ ID NO: 469569 - DNA, 201 bp, Homo sapiens
ggaagggctgggttggattgttttaagtggggccatcagagaaggcctcagtgagctgatgtttgaatagaatcttaaaagaaataagaatgcaaaggcaratatttggggaaagagcattgctgatgcggggaacagtgagtgcaaaagccccagaggcaggaatgtgcttagcatgttcatagaactgaaagggccagt

SEQ ID NO: 469570 - DNA, 201 bp, Homo sapiens
tccttttagttcacttgtgcttgttgtggtatttttggagatattactgttgctagtgccacctaatttgtattgtgaaattattgaaggctaaagctgayaatagctgtttctgtagttatcaaaacaggattaggtctaatttcttgttctacttgatatcgaactcaattttatatatgagacttcttttaagaattc

SEQ ID NO: 469571 - DNA, 201 bp, Homo sapiens
gtgtggtggcttgtgcctgtaatcctagctactagctgaggcaggaggattgcttgaggctaggagtttgagaccagcctgggcaatatagtgagaccacccccccccccccaacctcttcaacaaatttaaaaattttttaaaagaaatagacaaatgaagttagtattaatcaggaagctgttactgctttctacttct

SEQ ID NO: 469572 - DNA, 201 bp, Homo sapiens
gttggccaggctggtcttgaactcctcacctcaggtgatccacccatctcggcctcccaaaatgctaggattacaggcctgagcgaccgcacctggccacttttttttttttttttttttaaatcagttcattttcttctcttgtttaggttgggtaatctctcccattttgttgttcagcttagtttgtattttattttt

SEQ ID NO: 469573 - DNA, 201 bp, Homo sapiens
agtttaacgtgtatgcatttatcgattgcttatgtttctccttgcattctttggcctactggttttggttgtttatagctatagaatatagaattccttayggttatccatttctccttttaagtagagtgatagttgttagaagaaaaataaccccccaatactttcttctagtgttaattcttaaagtgtgattgactt

SEQ ID NO: 469574 - DNA, 201 bp, Homo sapiens
tttttttttgagatggagttttgcttcttgttgcccaggctggagtgcaatggcacgatctcggctcactgcactgcatcctctgcctcctgggttcaagygattctcctgcctcaacctccccagtagctgggattacaggcatgcaccaccatgcccggctaattttgtgtttttagtagagacagggtttctctctat

SEQ ID NO: 469575 - DNA, 201 bp, Homo sapiens
ttagttcacttgtgcttgttgtggtatttttggagatattactgttgctagtgccacctaatttgtattgtgaaattattgaaggctaaagctgataatarctgtttctgtagttatcaaaacaggattaggtctaatttcttgttctacttgatatcgaactcaattttatatatgagacttcttttaagaattccctaa

SEQ ID NO: 469576 - DNA, 201 bp, Homo sapiens
ctaaattcactctactttttataaaaaaacctttaaaagatatcttaggaaattaaagggttttttcttccatttctttttttctttctttcttttaaagttttttcccccctttaactgaaatgtggaataaacatatttgtaaattttacttattttaggatggcagtataacacatcagatttctaggcctaatcctc

SEQ ID NO: 469577 - DNA, 201 bp, Homo sapiens
gtgatccacccatctcggcctcccaaaatgctaggattacaggcctgagcgaccgcacctggccacttttttttttttttttttttaaatcagttcatttwcttctcttgtttaggttgggtaatctctcccattttgttgttcagcttagtttgtattttatttttgttagcatattttttagttttcaacttggtattt

SEQ ID NO: 469578 - DNA, 201 bp, Homo sapiens
ctcctgggttcaagcgattctcctgcctcaacctccccagtagctgggattacaggcatgcaccaccatgcccggctaattttgtgtttttagtagagacrgggtttctctctattggtcaggcaggtgatctgcctgcttcagcctcccaaagtgttgggattacaggcatgagccaccgcgctcggccaacagattttt

SEQ ID NO: 469579 - DNA, 201 bp, Homo sapiens
cacttgtgcttgttgtggtatttttggagatattactgttgctagtgccacctaatttgtattgtgaaattattgaaggctaaagctgataatagctgttyctgtagttatcaaaacaggattaggtctaatttcttgttctacttgatatcgaactcaattttatatatgagacttcttttaagaattccctaaatagtg

SEQ ID NO: 469580 - DNA, 201 bp, Homo sapiens
gccaagattctactataacccatggacacagttatccgggatcaacccaatcgctcattcagttgtattctgatataatcccagaggaaaaagggaaaaaraaaagaacaagaaagaagaaaagagatgatgatgcagaatccaccaaggctccatcaactccccattcagatataactgccccaccgactccaggcatct

SEQ ID NO: 469581 - DNA, 201 bp, Homo sapiens
gtatccatccatgtcctagatacaagtgagggtgagagagcaaggatgttccttgcagccatgataatgggaagtggactctgtaaggaacaggttgtgastggggagtggctattggttaggtaactaatagtctgtttgtcattgcccatttttctgttaagtcgatcatcctttttaaatgatttgtaaataattttt

SEQ ID NO: 469582 - DNA, 201 bp, Homo sapiens
gctgataatagctgtttctgtagttatcaaaacaggattaggtctaatttcttgttctacttgatatcgaactcaattttatatatgagacttcttttaakaattccctaaatagtgaagtgtttgctgctgtagctccactgtatacaagtgattatatttaccaaaaagacaaactgtaaactcttttgtttcttttac

SEQ ID NO: 469583 - DNA, 201 bp, Homo sapiens
caccacaccctgaggtcaaggctgcagtgagcatgattgtgccattgccctctacctctagcttgggtgacagagcaagtctctgtctccaaaaagaaaaraaaaaaactatcttaactcataagctgttctccaaccttattttatcatcctcatgaaattctttatctttgcaaaatttgtaatttgactttgcacttg

SEQ ID NO: 469584 - DNA, 201 bp, Homo sapiens
aactaatagtctgtttgtcattgcccatttttctgttaagtcgatcatcctttttaaatgatttgtaaataatttttgcatgctaagaaagtaagtatttrttatataattctagattctaaatattttggagctgtaaatgaggttttaaactctgagatcagttttctaattttgaaataaagtgaatctccattgaaa

SEQ ID NO: 469585 - DNA, 201 bp, Homo sapiens
caagtgattatatttaccaaaaagacaaactgtaaactcttttgtttcttttaccagttatcttcctttcggctctctctcttcattgctttcacttttcstaaattagacttactgtttataagcaaccttggttttacatagtatgttggaagagtgtggggctggggttgatttaggatttggaggtgtaaagtttgc

SEQ ID NO: 469586 - DNA, 201 bp, Homo sapiens
atgctaagaaagtaagtatttgttatataattctagattctaaatattttggagctgtaaatgaggttttaaactctgagatcagttttctaattttgaartaaagtgaatctccattgaaatttacaagtaggggctggtgatcgcagagtccaatgcataatttatagtttttcctattctgggtgcagttgtcatttt

SEQ ID NO: 469587 - DNA, 201 bp, Homo sapiens
aagtgattatatttaccaaaaagacaaactgtaaactcttttgtttcttttaccagttatcttcctttcggctctctctcttcattgctttcacttttccyaaattagacttactgtttataagcaaccttggttttacatagtatgttggaagagtgtggggctggggttgatttaggatttggaggtgtaaagtttgcc

SEQ ID NO: 469588 - DNA, 201 bp, Homo sapiens
gtagagaatagaattttcaagattgagatagagtaacttgaaatacctttatgtaaaagttgtgaagtaacttttgaacttttataaactaatatgactastttgggtagatatggtagacttggaaaaaaaaaagaccacttcttgaataaaataagaagaaatactttgcttttacttatttgtccttgaacaaattat

SEQ ID NO: 469589 - DNA, 201 bp, Homo sapiens
ggctgacatgcagtggtgtgaacacaactcacgtcagctgcgatctcctgggctcaagcgatcctactgtcctcagcctcccatgcagctgcgaccacagrcacacgccatcatgcctggctaattttttgattttttgcagaggtgggggtctcactttgttgcccaggccagtctagaactcctgggttcaagtgatcc

SEQ ID NO: 469590 - DNA, 201 bp, Homo sapiens
cccaccatggctgtaagcaccatgagagtgaggaaaatagctgttttgctttatcatattttctctggtgcctaacaaagtatctggaacacaagagagtmactaatgggataaatacatgcattaatgggatttgtcaatgaagggcaaaatttagtgcattagcttgaatgaggaggtaggtcctactggctggcctct

SEQ ID NO: 469591 - DNA, 201 bp, Homo sapiens
gccaaagttatagctttaataatcgttaccacttttagaggcctggagaaccaaagatttaagcagtattctttttgttttccaaaatacacatcagaaamatacctttcagtacgaataaattatgtttgatagatgtagactacaaaaaaaatttttttctagttcatcttgtaaacattaagtcagagtttaaggcca

SEQ ID NO: 469592 - DNA, 201 bp, Homo sapiens
gtttttgatatttcatatgtgaagcacttttacagataactttataaaaatcctgttgttaaagagattgacagttgttagttaaggcttatcaattcaatttttttgtgacttttgcagttacccaagcaaaatatgtttgcttctgcagggccaaactgccctctgtgtaacctcaaccacagtcatcagccagtgttt

SEQ ID NO: 469593 - DNA, 201 bp, Homo sapiens
atggcaaaagacactgacagagtctggaaaaatccatgtaccagcttccttatgtgctgtgccttccatgaggatcacacagactaccttctttccccctyaacgaaaatacaacaacatatgtgactgcccaagaaacacagtttttatctaggctggtcatgtaggtgtactctctgcctagcatgtgtgaaatttcca

SEQ ID NO: 469594 - DNA, 201 bp, Homo sapiens
gcttccttatgtgctgtgccttccatgaggatcacacagactaccttctttcccccttaacgaaaatacaacaacatatgtgactgcccaagaaacacagkttttatctaggctggtcatgtaggtgtactctctgcctagcatgtgtgaaatttccagactcataaaaagaatagcaggataagccacattatttccata

SEQ ID NO: 469595 - DNA, 201 bp, Homo sapiens
aatgtggctctgttctgcccggctcaccagcggtcagagttcaaggttgtctctcttgttccctgaacattgctgttatcctgttcttttttcaaggtgcycagatttcatatagttcaaacacacatgctctgcaaacaatttgtgcagttaatgcaatcatcacagggtcctgaggcgacatacatcctcctcagctta

SEQ ID NO: 469596 - DNA, 201 bp, Homo sapiens
aaatattttggtttttctgcacttattatttaaatatgacagtatgactccccacccccacttgaatctagggacattgtagttttctactgcagactttrtttctggtttatactgggaatatattgtttatcattttcagtgaaagcgttcactggttaaatttccttttaaaaataataatggatctttacaatttct

SEQ ID NO: 469597 - DNA, 201 bp, Homo sapiens
atttaaatatgacagtatgactccccacccccacttgaatctagggacattgtagttttctactgcagactttgtttctggtttatactgggaatatattktttatcattttcagtgaaagcgttcactggttaaatttccttttaaaaataataatggatctttacaatttctttgagctgctcagtgggtataatgtgt

SEQ ID NO: 469598 - DNA, 201 bp, Homo sapiens
ccccacccccacttgaatctagggacattgtagttttctactgcagactttgtttctggtttatactgggaatatattgtttatcattttcagtgaaagcrttcactggttaaatttccttttaaaaataataatggatctttacaatttctttgagctgctcagtgggtataatgtgttgaattttctgttagtggttgg

SEQ ID NO: 469599 - DNA, 201 bp, Homo sapiens
aatctctcccattttgttgttcagcttagtttgtattttatttttgttagcatattttttagttttcaacttggtatttgtttctttcttgatttctttgyaaaactttgtattgtttcctttgtttcaaaagtatgtttgtaattgctttttttttttttttttttttttgaggcagactcttgctctgttgcccaggtt

SEQ ID NO: 469600 - DNA, 201 bp, Homo sapiens
gaatctagggacattgtagttttctactgcagactttgtttctggtttatactgggaatatattgtttatcattttcagtgaaagcgttcactggttaaayttccttttaaaaataataatggatctttacaatttctttgagctgctcagtgggtataatgtgttgaattttctgttagtggttgggaggtagaaataga

SEQ ID NO: 469601 - DNA, 201 bp, Homo sapiens
tttgtttctttcttgatttctttgcaaaactttgtattgtttcctttgtttcaaaagtatgtttgtaattgctttttttttttttttttttttttgaggcrgactcttgctctgttgcccaggttggaatgcagtaaatgatctcagctcactgcaacctctgcttcctgggtttaagtgattctcatgcctcagcctcct

SEQ ID NO: 469602 - DNA, 201 bp, Homo sapiens
tactgcagactttgtttctggtttatactgggaatatattgtttatcattttcagtgaaagcgttcactggttaaatttccttttaaaaataataatggayctttacaatttctttgagctgctcagtgggtataatgtgttgaattttctgttagtggttgggaggtagaaatagatactttatctctattttagccatt

SEQ ID NO: 469603 - DNA, 201 bp, Homo sapiens
ttgcaaaactttgtattgtttcctttgtttcaaaagtatgtttgtaattgctttttttttttttttttttttttgaggcagactcttgctctgttgcccasgttggaatgcagtaaatgatctcagctcactgcaacctctgcttcctgggtttaagtgattctcatgcctcagcctcctgagtagctggaatcacaggcg

SEQ ID NO: 469604 - DNA, 201 bp, Homo sapiens
acttaatttttattggtttgacatagtattttctgagaaaaataattaaaatcttccactgttgttgatttaatttttttagtcttccagttttgttagtacaggttgagtttctcctatccaaaatgcttgggacaggccaggtgtggtggttcatgcctgtaattccatcactttaggtggccaaggcaggtggatcac

SEQ ID NO: 469605 - DNA, 201 bp, Homo sapiens
gcctccagagtagctgggactacaggtgcataccaccacacccggctaatgtttaaatttttagtagagacaagatatcactatgttgccctttcttcctrcaaaaaaagctgataaactggcttattatataacaaggaattctcattttattttacttatattgtattattgttctttaatttcagtgatgtgaagcag

SEQ ID NO: 469606 - DNA, 201 bp, Homo sapiens
cagtgggtataatgtgttgaattttctgttagtggttgggaggtagaaatagatactttatctctattttagccatttccataattatatatctcaatagycttgtcaatgcatcattagttctatgactgaattaatgattacttttagtagtcacttaatttcttactgatgatgatgattctacttttgtgaatcatc

SEQ ID NO: 469607 - DNA, 201 bp, Homo sapiens
ttcctttcggctctctctcttcattgctttcacttttcctaaattagacttactgtttataagcaaccttggttttacatagtatgttggaagagtgtggkgctggggttgatttaggatttggaggtgtaaagtttgccagtgagacaccaaaccttctctggctgcttttaaaactgatagtactcttgggctgtaaga

SEQ ID NO: 469608 - DNA, 201 bp, Homo sapiens
cctccagagtagctgggactacaggtgcataccaccacacccggctaatgtttaaatttttagtagagacaagatatcactatgttgccctttcttccttraaaaaaagctgataaactggcttattatataacaaggaattctcattttattttacttatattgtattattgttctttaatttcagtgatgtgaagcagt

SEQ ID NO: 469609 - DNA, 201 bp, Homo sapiens
tgtcaatgcatcattagttctatgactgaattaatgattacttttagtagtcacttaatttcttactgatgatgatgattctacttttgtgaatcatcttkgatgattctctaaaatcttagaaagctgattttgttaatactatgcatgtaacacatcaatacattttctctattaaaaaaaattaaagcattataggta

SEQ ID NO: 469610 - DNA, 201 bp, Homo sapiens
gtctcgaactcctgacctcaagtgatccaaccacctctgcctcccaaagtgctgggattgcaggcgtgagccactgtgtccggctgtaattgcttgttgamgcagtgttatatagtttaaaatctttgatagataattatgacatctatgaattctcattgtttgcaccttttgactatattttcaaattcctgttcagat

SEQ ID NO: 469611 - DNA, 201 bp, Homo sapiens
caagatatcactatgttgccctttcttccttcaaaaaaagctgataaactggcttattatataacaaggaattctcattttattttacttatattgtattmttgttctttaatttcagtgatgtgaagcagtgttttttggaggttttgagtgtgagctttctcatcagatactgaagagtttttgagccttaactccatt

SEQ ID NO: 469612 - DNA, 201 bp, Homo sapiens
tacttttgtgaatcatcttggatgattctctaaaatcttagaaagctgattttgttaatactatgcatgtaacacatcaatacattttctctattaaaaaraattaaagcattataggtagatcagaatttaccattactaactcctcagtccttcttatttccctgttatcagtttggtatatttatatattaggttgat

SEQ ID NO: 469613 - DNA, 201 bp, Homo sapiens
tttcacttttcctaaattagacttactgtttataagcaaccttggttttacatagtatgttggaagagtgtggggctggggttgatttaggatttggaggygtaaagtttgccagtgagacaccaaaccttctctggctgcttttaaaactgatagtactcttgggctgtaagagtgactttgatcatatttaacaaccag

SEQ ID NO: 469614 - DNA, 201 bp, Homo sapiens
ccaaagtgctgggattgcaggcgtgagccactgtgtccggctgtaattgcttgttgaagcagtgttatatagtttaaaatctttgatagataattatgacmtctatgaattctcattgtttgcaccttttgactatattttcaaattcctgttcagattttcctggttcttagtatggtataacatgttatatttggttga

SEQ ID NO: 469615 - DNA, 201 bp, Homo sapiens
cttccttcaaaaaaagctgataaactggcttattatataacaaggaattctcattttattttacttatattgtattattgttctttaatttcagtgatgtraagcagtgttttttggaggttttgagtgtgagctttctcatcagatactgaagagtttttgagccttaactccattacttaattagctgtgtgacccaga

SEQ ID NO: 469616 - DNA, 201 bp, Homo sapiens
atcagtttggtatatttatatattaggttgatccatatgaaattgccaatattatttctgaactgatgaaaagcagcaatttcttatgattcaacctattrtatatgcccatagactacatataatgactttgcatgtttttatattatagtgctatacctcaaatactgttctgcaatttattttttcactcaacaacgt

SEQ ID NO: 469617 - DNA, 201 bp, Homo sapiens
agcaaccttggttttacatagtatgttggaagagtgtggggctggggttgatttaggatttggaggtgtaaagtttgccagtgagacaccaaaccttctcyggctgcttttaaaactgatagtactcttgggctgtaagagtgactttgatcatatttaacaaccagcaatagaatttgacttttaatagaaagttgcttc

SEQ ID NO: 469618 - DNA, 201 bp, Homo sapiens
ccatgagagtgaggaaaatagctgttttgctttatcatattttctctggtgcctaacaaagtatctggaacacaagagagtcactaatgggataaatacaygcattaatgggatttgtcaatgaagggcaaaatttagtgcattagcttgaatgaggaggtaggtcctactggctggcctcttgggtagaggccaggactg

SEQ ID NO: 469619 - DNA, 201 bp, Homo sapiens
gtccggctgtaattgcttgttgaagcagtgttatatagtttaaaatctttgatagataattatgacatctatgaattctcattgtttgcaccttttgactrtattttcaaattcctgttcagattttcctggttcttagtatggtataacatgttatatttggttgaatcctttgcattttaagtgttgtgttatgaagct

SEQ ID NO: 469620 - DNA, 201 bp, Homo sapiens
gatccatatgaaattgccaatattatttctgaactgatgaaaagcagcaatttcttatgattcaacctattatatatgcccatagactacatataatgackttgcatgtttttatattatagtgctatacctcaaatactgttctgcaatttattttttcactcaacaacgtcttttgataatttctttcatggcagtcta

SEQ ID NO: 469621 - DNA, 201 bp, Homo sapiens
ttaggatttggaggtgtaaagtttgccagtgagacaccaaaccttctctggctgcttttaaaactgatagtactcttgggctgtaagagtgactttgatcrtatttaacaaccagcaatagaatttgacttttaatagaaagttgcttctaaatagcctatcctccacgtgtcattattgttctcatttccccatcccaca

SEQ ID NO: 469622 - DNA, 201 bp, Homo sapiens
gtcactaatgggataaatacatgcattaatgggatttgtcaatgaagggcaaaatttagtgcattagcttgaatgaggaggtaggtcctactggctggccycttgggtagaggccaggactgccgctaaacattctgcaatatgcaggacagcctcccacaccaaaactatacagcttaaaatgccgatagtgctgaggtt

SEQ ID NO: 469623 - DNA, 201 bp, Homo sapiens
tgttatatagtttaaaatctttgatagataattatgacatctatgaattctcattgtttgcaccttttgactatattttcaaattcctgttcagattttcstggttcttagtatggtataacatgttatatttggttgaatcctttgcattttaagtgttgtgttatgaagctctgcattttatttaaataccccctttta

SEQ ID NO: 469624 - DNA, 201 bp, Homo sapiens
tgaagcagtgttttttggaggttttgagtgtgagctttctcatcagatactgaagagtttttgagccttaactccattacttaattagctgtgtgacccasaccacttcattgtacagctccgttcttgttgtgctggggagggcattcacacaaaatacaatgaaattgtgcttcctggtggttctgatgtgactttagg

SEQ ID NO: 469625 - DNA, 201 bp, Homo sapiens
gatagtactcttgggctgtaagagtgactttgatcatatttaacaaccagcaatagaatttgacttttaatagaaagttgcttctaaatagcctatcctcmacgtgtcattattgttctcatttccccatcccacagtccttgtataacttactagcttggacagtttacctgagaaattggcctcaaaacagaaagaaac

SEQ ID NO: 469626 - DNA, 201 bp, Homo sapiens
tcccacaccaaaactatacagcttaaaatgccgatagtgctgaggttgagaaatcctggtttgacatattattcctgtgttaaaattaatatatttaaagyaatttcctcggttgttaacatggcatttttgtcaagcaattttgttttctctgaaacatacctcagattgtttttagtttttccaggggaaactttattc

SEQ ID NO: 469627 - DNA, 201 bp, Homo sapiens
agataattatgacatctatgaattctcattgtttgcaccttttgactatattttcaaattcctgttcagattttcctggttcttagtatggtataacatgktatatttggttgaatcctttgcattttaagtgttgtgttatgaagctctgcattttatttaaatacccccttttagtaggatttatctgaaactttgctt

SEQ ID NO: 469628 - DNA, 201 bp, Homo sapiens
attacttaattagctgtgtgacccagaccacttcattgtacagctccgttcttgttgtgctggggagggcattcacacaaaatacaatgaaattgtgcttyctggtggttctgatgtgactttaggcaagttcattaaacactgcgctttcaataagataatgcatgtggaatgctgagcacagtgcctttaagacactga

SEQ ID NO: 469629 - DNA, 201 bp, Homo sapiens
agcaatagaatttgacttttaatagaaagttgcttctaaatagcctatcctccacgtgtcattattgttctcatttccccatcccacagtccttgtataayttactagcttggacagtttacctgagaaattggcctcaaaacagaaagaaacttaatgctaatattaaactatttttgggttaaattatttttcttgggt

SEQ ID NO: 469630 - DNA, 201 bp, Homo sapiens
tgcattttaagtgttgtgttatgaagctctgcattttatttaaatacccccttttagtaggatttatctgaaactttgcttttggggtggaggtggggcayagccttgttactactcccaggtgtatgtgaagattccagttccttagtaggcctttgttgactcattgatggagacgtacacctagtaaatgctgagtag

SEQ ID NO: 469631 - DNA, 201 bp, Homo sapiens
gtactttaggcattttaatttgcaaatttaggacaatttgctttaacgtttcttcacttttgtccattggatgtaatttccataaagtattcatttccctragtaaaaaccaaaaccaaaccgacaactaatggtcactgaagaaagagtgattaaatgcttagattataatggtatttgcattttaatgttaccagctct

SEQ ID NO: 469632 - DNA, 201 bp, Homo sapiens
tggtggttctgatgtgactttaggcaagttcattaaacactgcgctttcaataagataatgcatgtggaatgctgagcacagtgcctttaagacactgaaygggatatgagaacagttccatagcccttcatttttacttttgattaagagttgtttactaataactaactaggtgagttataaatggggaagtagggtca

SEQ ID NO: 469633 - DNA, 201 bp, Homo sapiens
atttccccatcccacagtccttgtataacttactagcttggacagtttacctgagaaattggcctcaaaacagaaagaaacttaatgctaatattaaactrtttttgggttaaattatttttcttgggttcaaattcagtccctgccaggtagtgtttttttagtttctgtagtatttgatagcaagttgattctatttac

SEQ ID NO: 469634 - DNA, 201 bp, Homo sapiens
ttccccatcccacagtccttgtataacttactagcttggacagtttacctgagaaattggcctcaaaacagaaagaaacttaatgctaatattaaactatktttgggttaaattatttttcttgggttcaaattcagtccctgccaggtagtgtttttttagtttctgtagtatttgatagcaagttgattctatttacaa

SEQ ID NO: 469635 - DNA, 201 bp, Homo sapiens
ggtggttctgatgtgactttaggcaagttcattaaacactgcgctttcaataagataatgcatgtggaatgctgagcacagtgcctttaagacactgaagkggatatgagaacagttccatagcccttcatttttacttttgattaagagttgtttactaataactaactaggtgagttataaatggggaagtagggtcat

SEQ ID NO: 469636 - DNA, 201 bp, Homo sapiens
tatttcatcaaataaggatgatgaagaaaactctatgcacaatacagttgtgttgttttctagcagtgacaagttcactttgaatcaggtttgaacttgamaatttactgtcttcctcattgaattcctccttgcacatttctgctttatctcatatacacagaagtcattcaatatttagctatagagctatattagtta

SEQ ID NO: 469637 - DNA, 201 bp, Homo sapiens
catgctacaaatgtttaatcattttatttatctaaagttcctttcttggccaggcgcggcgtctcatgcctgtaatcccagcactttgggaggctgaggcrggtggatcacctgaggtcaggagttcgagaccagcctaaccaacatggcaaaaccctgtctctactaaaaaaatataaaaattaaccgtgtgtggtggtg

SEQ ID NO: 469638 - DNA, 201 bp, Homo sapiens
taacttactagcttggacagtttacctgagaaattggcctcaaaacagaaagaaacttaatgctaatattaaactatttttgggttaaattatttttcttrggttcaaattcagtccctgccaggtagtgtttttttagtttctgtagtatttgatagcaagttgattctatttacaacttaataatgattacattaggaa

SEQ ID NO: 469639 - DNA, 201 bp, Homo sapiens
tgactttaggcaagttcattaaacactgcgctttcaataagataatgcatgtggaatgctgagcacagtgcctttaagacactgaaggggatatgagaacwgttccatagcccttcatttttacttttgattaagagttgtttactaataactaactaggtgagttataaatggggaagtagggtcattgtgaagtggcta

SEQ ID NO: 469640 - DNA, 201 bp, Homo sapiens
aatcccagcactttgggaggctgaggcgggtggatcacctgaggtcaggagttcgagaccagcctaaccaacatggcaaaaccctgtctctactaaaaaartataaaaattaaccgtgtgtggtggtgtgtgcctgtaatctcagctacttgggaggctgaggcaggagaatttcttgaacccaggaggtggaggttgtag

SEQ ID NO: 469641 - DNA, 201 bp, Homo sapiens
ggttcaaattcagtccctgccaggtagtgtttttttagtttctgtagtatttgatagcaagttgattctatttacaacttaataatgattacattaggaastattttgcttttaattcagtttgtagattaaggaggcattatatagattttttagtaatttttagtaactttttttaagtgaagaaattcaagattctag

SEQ ID NO: 469642 - DNA, 201 bp, Homo sapiens
tgctgagcacagtgcctttaagacactgaaggggatatgagaacagttccatagcccttcatttttacttttgattaagagttgtttactaataactaacyaggtgagttataaatggggaagtagggtcattgtgaagtggctatgaaacagcatagaggatatattttaaaagctgtatttttactacctattttcaaa

SEQ ID NO: 469643 - DNA, 201 bp, Homo sapiens
ttgacgtctctatttggaagtgtattagacacctcacccttaacatgtccagtaccatgcttgattctgcctccacctctgccccaaatctgcttctcccyacgatttcctcatttcaataaataatgccagtattcactcagttgtttagtccagaaactttgaaagttaatccttgatttctatcttttctcatacctt

SEQ ID NO: 469644 - DNA, 201 bp, Homo sapiens
gggaggctgaggcgggtggatcacctgaggtcaggagttcgagaccagcctaaccaacatggcaaaaccctgtctctactaaaaaaatataaaaattaacygtgtgtggtggtgtgtgcctgtaatctcagctacttgggaggctgaggcaggagaatttcttgaacccaggaggtggaggttgtagtgagctgagttttc

SEQ ID NO: 469645 - DNA, 201 bp, Homo sapiens
ttacatgaaacaataaaaagcatatactttagatgtaaactataattttgcttccaaggaacatgatcttgtagttattgacaatatgtcagaatccaatrtgttgattgtttcttagccaggttttcctccatgacttgagtatttccttcatcacttcttgttttgttgttgctttaaaaagcacttttaactttagtg

SEQ ID NO: 469646 - DNA, 201 bp, Homo sapiens
atttcaagtacttaccatgtctacaaggtgtgatctgttcctgactgcctctctcatgtcatttgtcactcactgtgctctcaccacattggcctcactcytttaaatgtgctgatggggtttctgtctgagagctttggtgcttgctctgcttgtctcctggcttacctcccagagaggctaccttgctgataatactag

SEQ ID NO: 469647 - DNA, 201 bp, Homo sapiens
gtgtgtggtggtgtgtgcctgtaatctcagctacttgggaggctgaggcaggagaatttcttgaacccaggaggtggaggttgtagtgagctgagttttcrccactgcactccatcctgggcaacagagcaggacttcttctcaaaatgaatgaatgaatgaaagaaggaaagggaaaggaagctcctttctcttctattc

SEQ ID NO: 469648 - DNA, 201 bp, Homo sapiens
ctctagctttctcttgactagcgtaagcatggtgtatattattccattcttttattttaacctgtttgcatctttgtatttaacttgtgtttcttgaaggygatagttttatttctctgataaaaacatataagaagacaatcacattaaatgtatatggtctaaaacctctgctttttaattgggggtatttagaccatg

SEQ ID NO: 469649 - DNA, 201 bp, Homo sapiens
ttcatggcagtctatacaagtttctacctccctacttttaaaatgttgcgtaattttctaatgtttggatttgtcattgctttacttactccctaatgatkaatattggcattattaacacttgtagtcattagggttcatatgactataaattgctcttataaagcattagtactatccattaaaactgcctttaggctg

SEQ ID NO: 469650 - DNA, 201 bp, Homo sapiens
taggttcttatttggtatgttacgggcaaccatatggacttttgagcaggtgaaaaatacagtattaatgggtagggatagcttgggagggaaggagacawggacattgagcttcagaaaaaccagttagtaaaatatttcagatgatacattggtaatagaaaaggatccgttgaaatgtgaggcattcacttggaaaga

SEQ ID NO: 469651 - DNA, 201 bp, Homo sapiens
gcccaggctggtctcgaactcctgagctcaagcgatccacccactttagcctcccaaagtgctaagattataggcatgagccaccacacccagctggttartcttctttcagttgttcctcaagaaaagtaattcagttgttttatgttttgaccttgaacataacctgttgtgtttcaactctgtctttccaggcttagg

SEQ ID NO: 469652 - DNA, 201 bp, Homo sapiens
cagttagtaaaatatttcagatgatacattggtaatagaaaaggatccgttgaaatgtgaggcattcacttggaaagaactggcagaatgtggtaattaaytgctataaggaccccaaaataaaaggaataatcaaacatcactcaaagcttttagcacagtttttgataacagtcagtgtcagaaggagaagacaacttt

SEQ ID NO: 469653 - DNA, 201 bp, Homo sapiens
aagctctgcattttatttaaatacccccttttagtaggatttatctgaaactttgcttttggggtggaggtggggcacagccttgttactactcccaggtrtatgtgaagattccagttccttagtaggcctttgttgactcattgatggagacgtacacctagtaaatgctgagtaggagtgaaaactctggacttgcat

SEQ ID NO: 469654 - DNA, 201 bp, Homo sapiens
atcttctttcagttgttcctcaagaaaagtaattcagttgttttatgttttgaccttgaacataacctgttgtgtttcaactctgtctttccaggcttagrttgtaagctttttaaagaaagaggattgtattttatgattttggcaatgccctccttgtcttcttctacagcttctagttcagagctttgttttgtttca

SEQ ID NO: 469655 - DNA, 201 bp, Homo sapiens
aaatatttcagatgatacattggtaatagaaaaggatccgttgaaatgtgaggcattcacttggaaagaactggcagaatgtggtaattaactgctataargaccccaaaataaaaggaataatcaaacatcactcaaagcttttagcacagtttttgataacagtcagtgtcagaaggagaagacaactttgttcctaaa

SEQ ID NO: 469656 - DNA, 201 bp, Homo sapiens
tctgaaactttgcttttggggtggaggtggggcacagccttgttactactcccaggtgtatgtgaagattccagttccttagtaggcctttgttgactcaytgatggagacgtacacctagtaaatgctgagtaggagtgaaaactctggacttgcattacacctttgtgaataccaccctggctcaaaaggttcctgctt

SEQ ID NO: 469657 - DNA, 201 bp, Homo sapiens
atcactctagaaattattaacaaaccagtgggtacttagttgatttagtcaaatagaactaagtccagactgagcaatattggttgataatcatatggctratactgaaattttgatgttattcaaaataatattctaaagcagtgctaatagaaatataatgagaaccacatatgcaatttaaaacttcctagtaaccac

SEQ ID NO: 469658 - DNA, 201 bp, Homo sapiens
cgttgaaatgtgaggcattcacttggaaagaactggcagaatgtggtaattaactgctataaggaccccaaaataaaaggaataatcaaacatcactcaargcttttagcacagtttttgataacagtcagtgtcagaaggagaagacaactttgttcctaaaagttatattgtaaaataaatgtagcttatacatttttg

SEQ ID NO: 469659 - DNA, 201 bp, Homo sapiens
ttttggggtggaggtggggcacagccttgttactactcccaggtgtatgtgaagattccagttccttagtaggcctttgttgactcattgatggagacgtrcacctagtaaatgctgagtaggagtgaaaactctggacttgcattacacctttgtgaataccaccctggctcaaaaggttcctgcttttcacttggcctc

SEQ ID NO: 469660 - DNA, 201 bp, Homo sapiens
agtgtcagaaggagaagacaactttgttcctaaaagttatattgtaaaataaatgtagcttatacatttttgaaagtgaaatctcaggattcatggtatcwttacttctacttgccaaattattaaaatggtgttatatttcttaagatattttaaagcctctattgtagaacagaaatagtagaaaatggaactaatgtt

SEQ ID NO: 469661 - DNA, 201 bp, Homo sapiens
agtcaaatagaactaagtccagactgagcaatattggttgataatcatatggctaatactgaaattttgatgttattcaaaataatattctaaagcagtgytaatagaaatataatgagaaccacatatgcaatttaaaacttcctagtaaccacattaaaaagttacagtgagctgggtgcagtggatcatttgcggtca

SEQ ID NO: 469662 - DNA, 201 bp, Homo sapiens
aatctcaggattcatggtatctttacttctacttgccaaattattaaaatggtgttatatttcttaagatattttaaagcctctattgtagaacagaaatrgtagaaaatggaactaatgtttattaacaattactatggaagagggaatagaaatgtgttgctcttgaacagatttattcagctttggcactgttgacat

SEQ ID NO: 469663 - DNA, 201 bp, Homo sapiens
tactcccaggtgtatgtgaagattccagttccttagtaggcctttgttgactcattgatggagacgtacacctagtaaatgctgagtaggagtgaaaactytggacttgcattacacctttgtgaataccaccctggctcaaaaggttcctgcttttcacttggcctccactgaatgggatggaggggtggttaagttatc

SEQ ID NO: 469664 - DNA, 201 bp, Homo sapiens
ggctaatactgaaattttgatgttattcaaaataatattctaaagcagtgctaatagaaatataatgagaaccacatatgcaatttaaaacttcctagtarccacattaaaaagttacagtgagctgggtgcagtggatcatttgcggtcaggagttagagaccagcctgaccaatatggtgaaaccccgtctctactaaa

SEQ ID NO: 469665 - DNA, 201 bp, Homo sapiens
acactgaaggggatatgagaacagttccatagcccttcatttttacttttgattaagagttgtttactaataactaactaggtgagttataaatggggaartagggtcattgtgaagtggctatgaaacagcatagaggatatattttaaaagctgtatttttactacctattttcaaactgcatatttcattttagtttg

SEQ ID NO: 469666 - DNA, 201 bp, Homo sapiens
gaacagaaatagtagaaaatggaactaatgtttattaacaattactatggaagagggaatagaaatgtgttgctcttgaacagatttattcagctttggcrctgttgacattttggactagctaattccttgtcatgggcagtatctcctgtgtgtaggatgttaagcagcattcctggcctccacccgctagatatagta

SEQ ID NO: 469667 - DNA, 201 bp, Homo sapiens
cttgcattacacctttgtgaataccaccctggctcaaaaggttcctgcttttcacttggcctccactgaatgggatggaggggtggttaagttatcactgrgcagtgctttgagtttggattctccaataggcctctcctgtcatatctctgtagagggagggatagggatatgtccttatcactgggtgggtgttgaact

SEQ ID NO: 469668 - DNA, 201 bp, Homo sapiens
tttcatatcatagttcattgtttattgatgaattcatacacatatgcaaaaaaagataatagatgctcagcagaaaaaaagttcaataagtgctgaacagkgtgcttaacatagcagtgaacagaaaggggcatgatctttaattacagtgtaaaaagtgctgcaactggattgtaggggaagagcccatacattacaggg

SEQ ID NO: 469669 - DNA, 201 bp, Homo sapiens
attcaaaataatattctaaagcagtgctaatagaaatataatgagaaccacatatgcaatttaaaacttcctagtaaccacattaaaaagttacagtgagytgggtgcagtggatcatttgcggtcaggagttagagaccagcctgaccaatatggtgaaaccccgtctctactaaaaatacagaaattagctgggcatgg

SEQ ID NO: 469670 - DNA, 201 bp, Homo sapiens
ctgaaggggatatgagaacagttccatagcccttcatttttacttttgattaagagttgtttactaataactaactaggtgagttataaatggggaagtarggtcattgtgaagtggctatgaaacagcatagaggatatattttaaaagctgtatttttactacctattttcaaactgcatatttcattttagtttggag

SEQ ID NO: 469671 - DNA, 201 bp, Homo sapiens
ttgagtttggattctccaataggcctctcctgtcatatctctgtagagggagggatagggatatgtccttatcactgggtgggtgttgaactcaggctccscactttttttccacccacactctagagggaggaagccgcgttactgctcagtgggtatgaatgtcctgtgtcccagttggcctgctgtggtatcatgttg

SEQ ID NO: 469672 - DNA, 201 bp, Homo sapiens
cttgaggtttgttactttctgtaatgttaattccctcaacttttaaaatttgatttttagacaagttatacattcaaatgatttaaaattggaaaataatwaaaaggtaaacagtgaagtctctccctttcccctgccttcatgcccccagtttacatctccagaaacctcagaggtttcttgtgtaaccttccagatgtg

SEQ ID NO: 469673 - DNA, 201 bp, Homo sapiens
ttaacatagcagtgaacagaaaggggcatgatctttaattacagtgtaaaaagtgctgcaactggattgtaggggaagagcccatacattacaggggcagstaaccttttctgagtggtttgtgtaagttcttgatcaaagctaagatctgaaggataatttaaactttggtaattatagctatattttagttttaaggtc

SEQ ID NO: 469674 - DNA, 201 bp, Homo sapiens
tgggtgcagtggatcatttgcggtcaggagttagagaccagcctgaccaatatggtgaaaccccgtctctactaaaaatacagaaattagctgggcatggyggtggacaactgtaatcccagctacctgggaggctgaggcaggagaacagcttgaaccaggaggcagaggttgcaacgagccgagatcgcgccattacac

SEQ ID NO: 469675 - DNA, 201 bp, Homo sapiens
gagaactttactgaaaaataaagaagtagtagtatgtgagtttggatcatttctgtggttaggtggtggctacactaaggcctttccaattcttggtcctrtgagaggtaggtagggttgtggggggtaggggagaacagataaatgagatacatttatatttttttgcatggtaacttataaggcattgccaagagaggg

SEQ ID NO: 469676 - DNA, 201 bp, Homo sapiens
atttattcagctttggcactgttgacattttggactagctaattccttgtcatgggcagtatctcctgtgtgtaggatgttaagcagcattcctggcctcyacccgctagatatagtagcacacccggcacccctccccccctccctgcccccgtgacaaccaaaaatgtctttagacattgccagatgtcccttggggag

SEQ ID NO: 469677 - DNA, 201 bp, Homo sapiens
taggcctctcctgtcatatctctgtagagggagggatagggatatgtccttatcactgggtgggtgttgaactcaggctccccactttttttccacccacwctctagagggaggaagccgcgttactgctcagtgggtatgaatgtcctgtgtcccagttggcctgctgtggtatcatgttgtccgtgggcaggagtgggg

SEQ ID NO: 469678 - DNA, 201 bp, Homo sapiens
tgggaggctgaggctgaggtcaggagtttgaaaccagcctggccaatgtgatgaaaccccctctctactaaaaatacaaaaattagcttggcatggtgacktgtgcctgtaatcccagctactcgagaggctgaggcaggagaatcacttgaatcctggaggcagagattgcagtgagccaagatcgttctattgcactcc

SEQ ID NO: 469679 - DNA, 201 bp, Homo sapiens
aacagaaaggggcatgatctttaattacagtgtaaaaagtgctgcaactggattgtaggggaagagcccatacattacaggggcagctaaccttttctgartggtttgtgtaagttcttgatcaaagctaagatctgaaggataatttaaactttggtaattatagctatattttagttttaaggtctaaggaatatacta

SEQ ID NO: 469680 - DNA, 201 bp, Homo sapiens
gtaatcccagctacctgggaggctgaggcaggagaacagcttgaaccaggaggcagaggttgcaacgagccgagatcgcgccattacactccagcctgggyaacaagagtgaaactcctctcaaaacaaaataaagattatagtgaacaggcgaaattaattttaatgccttccatttcgaccgatatatctaaaatatta

SEQ ID NO: 469681 - DNA, 201 bp, Homo sapiens
gaagggctgggttggattgttttaagtggggccatcagagaaggcctcagtgagctgatgtttgaatagaatcttaaaagaaataagaatgcaaaggcagwtatttggggaaagagcattgctgatgcggggaacagtgagtgcaaaagccccagaggcaggaatgtgcttagcatgttcatagaactgaaagggccagtg

SEQ ID NO: 469682 - DNA, 201 bp, Homo sapiens
gtgacaaccaaaaatgtctttagacattgccagatgtcccttggggagcaaaaattactccctctccccagttaagaaccattgttctagagtacagaatyaatcccactaaataaatgttattggcgtgtttagaacagtgcctagcacatagctggcactcaaatatttgttgaataaatgagtagtcagattttcatt

SEQ ID NO: 469683 - DNA, 201 bp, Homo sapiens
ctctgtagagggagggatagggatatgtccttatcactgggtgggtgttgaactcaggctccccactttttttccacccacactctagagggaggaagccrcgttactgctcagtgggtatgaatgtcctgtgtcccagttggcctgctgtggtatcatgttgtccgtgggcaggagtggggaatggctgactatgtcctc

SEQ ID NO: 469684 - DNA, 201 bp, Homo sapiens
atgatctttaattacagtgtaaaaagtgctgcaactggattgtaggggaagagcccatacattacaggggcagctaaccttttctgagtggtttgtgtaarttcttgatcaaagctaagatctgaaggataatttaaactttggtaattatagctatattttagttttaaggtctaaggaatatactagataatttgtcag

SEQ ID NO: 469685 - DNA, 201 bp, Homo sapiens
tagtgaacaggcgaaattaattttaatgccttccatttcgaccgatatatctaaaatattaccatttcaacacgtaatatgtaattatgtgctgtattttmtgtttgcaggacatctcagttcagactagctacattgcagatcccaagtgtgtgtcattaaaatagtgatagatttgtgtgggtacatacatatattatc

SEQ ID NO: 469686 - DNA, 201 bp, Homo sapiens
aataaagaagtagtagtatgtgagtttggatcatttctgtggttaggtggtggctacactaaggcctttccaattcttggtcctgtgagaggtaggtaggrttgtggggggtaggggagaacagataaatgagatacatttatatttttttgcatggtaacttataaggcattgccaagagagggaattcactgcaggcaa

SEQ ID NO: 469687 - DNA, 201 bp, Homo sapiens
ctttagacattgccagatgtcccttggggagcaaaaattactccctctccccagttaagaaccattgttctagagtacagaatcaatcccactaaataaawgttattggcgtgtttagaacagtgcctagcacatagctggcactcaaatatttgttgaataaatgagtagtcagattttcattgtgaattaaaaacagaa

SEQ ID NO: 469688 - DNA, 201 bp, Homo sapiens
ggctccccactttttttccacccacactctagagggaggaagccgcgttactgctcagtgggtatgaatgtcctgtgtcccagttggcctgctgtggtatyatgttgtccgtgggcaggagtggggaatggctgactatgtcctccttttaagtctttgcaaaaggtatatggcttgggcttttatttgtaccatttggct

SEQ ID NO: 469689 - DNA, 201 bp, Homo sapiens
  misc_feature (1)...(201): n = A,T,C or G
aatttaaactttggtaattatagctatattttagttttaaggtctaaggaatatactagataatttgtcagaatatctaagtataatgataatttttcttnagaactataaaattacacaaagtctgtcttctttttgaagtgagataaaattttggcatcaaagctaacttttaaattatgatgaataatacataattac

SEQ ID NO: 469690 - DNA, 201 bp, Homo sapiens
tacactaaggcctttccaattcttggtcctgtgagaggtaggtagggttgtggggggtaggggagaacagataaatgagatacatttatatttttttgcayggtaacttataaggcattgccaagagagggaattcactgcaggcaaagaaaaatataaaacatagtgtatatagggctttgtagcatccgtggtttcagg

SEQ ID NO: 469691 - DNA, 201 bp, Homo sapiens
gggaggaagccgcgttactgctcagtgggtatgaatgtcctgtgtcccagttggcctgctgtggtatcatgttgtccgtgggcaggagtggggaatggctkactatgtcctccttttaagtctttgcaaaaggtatatggcttgggcttttatttgtaccatttggcttaaactggtttgttgttgtctatgagttttttg

SEQ ID NO: 469692 - DNA, 201 bp, Homo sapiens
ttaaggtctaaggaatatactagataatttgtcagaatatctaagtataatgataatttttcttcagaactataaaattacacaaagtctgtcttcttttygaagtgagataaaattttggcatcaaagctaacttttaaattatgatgaataatacataattaccagaaaattcttacttctgaaataaaattattcaac

SEQ ID NO: 469693 - DNA, 201 bp, Homo sapiens
ttgcatggtaacttataaggcattgccaagagagggaattcactgcaggcaaagaaaaatataaaacatagtgtatatagggctttgtagcatccgtggtktcaggcatttatgggagccaggcaggggtagggtatggggttgaaatgtatttcctatggataagcacaggactactttatatcacttaatccaagaccc

SEQ ID NO: 469694 - DNA, 201 bp, Homo sapiens
ttcttttcttttcttttttatttttttgagatggagtctcacactgtcagcgggctggaatgcagtggcatgatctcggctcactgcaacctctgcctccygggttcaagtgattctcctgcctcagccttccaagtagctgggattacaggtgcccaccaccatgcccagcgaatattttgtattttttttttagtagag

SEQ ID NO: 469695 - DNA, 201 bp, Homo sapiens
taaggtctaaggaatatactagataatttgtcagaatatctaagtataatgataatttttcttcagaactataaaattacacaaagtctgtcttctttttraagtgagataaaattttggcatcaaagctaacttttaaattatgatgaataatacataattaccagaaaattcttacttctgaaataaaattattcaaca

SEQ ID NO: 469696 - DNA, 201 bp, Homo sapiens
aaagaaaaatataaaacatagtgtatatagggctttgtagcatccgtggtttcaggcatttatgggagccaggcaggggtagggtatggggttgaaatgtrtttcctatggataagcacaggactactttatatcacttaatccaagacccttttactggtgaggaatccagcatttaaatttatgtatgtatatgataaa

SEQ ID NO: 469697 - DNA, 201 bp, Homo sapiens
ttctttttttttttttttttaggagacagggtcttgctctgttttccaggttggtctcaattcctgggcccaagcagttctcccacctgggcctgccaagrtgctagtattataggcgtgagccactgcgcccagccctttatagtttttttcttttttttgagatgaagtttccctctgtcaccaggctggagtgcagtg

SEQ ID NO: 469698 - DNA, 201 bp, Homo sapiens
  misc_feature (1)...(201): n = A,T,C or G
agataatttgtcagaatatctaagtataatgataatttttcttcagaactataaaattacacaaagtctgtcttctttttgaagtgagataaaattttggnatcaaagctaacttttaaattatgatgaataatacataattaccagaaaattcttacttctgaaataaaattattcaacattatttttatcttagagtac

SEQ ID NO: 469699 - DNA, 201 bp, Homo sapiens
tatagggctttgtagcatccgtggtttcaggcatttatgggagccaggcaggggtagggtatggggttgaaatgtatttcctatggataagcacaggactrctttatatcacttaatccaagacccttttactggtgaggaatccagcatttaaatttatgtatgtatatgataaagctagaatttttccagatctgagac

SEQ ID NO: 469700 - DNA, 201 bp, Homo sapiens
ggttggtctcaattcctgggcccaagcagttctcccacctgggcctgccaaggtgctagtattataggcgtgagccactgcgcccagccctttatagtttytttcttttttttgagatgaagtttccctctgtcaccaggctggagtgcagtggcgcgatctcggcttactgcaacctctgcctccctggttcaagcgact

SEQ ID NO: 469701 - DNA, 201 bp, Homo sapiens
agaatatctaagtataatgataatttttcttcagaactataaaattacacaaagtctgtcttctttttgaagtgagataaaattttggcatcaaagctaamttttaaattatgatgaataatacataattaccagaaaattcttacttctgaaataaaattattcaacattatttttatcttagagtacgactttctgtct

SEQ ID NO: 469702 - DNA, 201 bp, Homo sapiens
atccgtggtttcaggcatttatgggagccaggcaggggtagggtatggggttgaaatgtatttcctatggataagcacaggactactttatatcacttaayccaagacccttttactggtgaggaatccagcatttaaatttatgtatgtatatgataaagctagaatttttccagatctgagactcaaagctctttgtgt

SEQ ID NO: 469703 - DNA, 201 bp, Homo sapiens
tcagaactataaaattacacaaagtctgtcttctttttgaagtgagataaaattttggcatcaaagctaacttttaaattatgatgaataatacataattrccagaaaattcttacttctgaaataaaattattcaacattatttttatcttagagtacgactttctgtctcatatttttgagaactgtctactgccaaca

SEQ ID NO: 469704 - DNA, 201 bp, Homo sapiens
ctactttatatcacttaatccaagacccttttactggtgaggaatccagcatttaaatttatgtatgtatatgataaagctagaatttttccagatctgasactcaaagctctttgtgttttcgtttatactccagctcttttgaggagctttaaagtctagttacaaagacaggaaaaacaagaacggccacagtggctc

SEQ ID NO: 469705 - DNA, 201 bp, Homo sapiens
gcgatctcggcttactgcaacctctgcctccctggttcaagcgactctcctgcctcagcctcccgagtagctgggactacagatgtgtgccagcatgcccwgctactttttgtagttttagtagagacggggtttcgccatgttggctaggatggtctcaatctcttgacctcgtgatccacccgcctcagcctcccaaag

SEQ ID NO: 469706 - DNA, 201 bp, Homo sapiens
tgccatcgtttgtcattgaattggtctcagcctacgtcaagtaaaaagggaaattagagctcacattttcttattaaaggatgtatactttagagaactctttttttttttttttttttaatagagacacagtctccttctgttgcccaggctggagtgcagtggcacagtcatagctcactgcagcctcaaacttactgg

SEQ ID NO: 469707 - DNA, 201 bp, Homo sapiens
acacatgttcctggtgatggcaccagcgtatatcagatgtgcttgggctgaacaccaaagagctacaacaggctgttaaagggaatattatgaggactacrtatttttaaatagagtgaaccgtggaccacatagtttggttttatacatgtattttttccctagctaaattatcacatgctaaatattggaacatagttt

SEQ ID NO: 469708 - DNA, 201 bp, Homo sapiens
atatatattagcattgatttatttgtgtgtatcctcttaggatttattcaatttcttgaatctgtgggtcttcgaataattgttcagctgcgtcatgttcyttttctgagattccagtgacaggaatgttgcatcacttattatagtcccacaagtgtctttaatgtcttttttaaaaaaaaaatatttatttatttattt

SEQ ID NO: 469709 - DNA, 201 bp, Homo sapiens
ctgtattttatgtttgcaggacatctcagttcagactagctacattgcagatcccaagtgtgtgtcattaaaatagtgatagatttgtgtgggtacatacmtatattatcatttatagtttcctgattagaattctgcataatcaagtcttactaagacaggtttattatattttctcattacttcttggtctataggaat

SEQ ID NO: 469710 - DNA, 201 bp, Homo sapiens
ttgccagatgtcccttggggagcaaaaattactccctctccccagttaagaaccattgttctagagtacagaatcaatcccactaaataaatgttattggygtgtttagaacagtgcctagcacatagctggcactcaaatatttgttgaataaatgagtagtcagattttcattgtgaattaaaaacagaacaaaacttg

SEQ ID NO: 469711 - DNA, 201 bp, Homo sapiens
tgtgtgggtacatacatatattatcatttatagtttcctgattagaattctgcataatcaagtcttactaagacaggtttattatattttctcattacttmttggtctataggaattctacctctaaagagagaattaggtgaataataaaatgtcacgactccattttacggtagtatcttagcattaatatttggaatt

SEQ ID NO: 469712 - DNA, 201 bp, Homo sapiens
gtgaattaaaaacagaacaaaacttgatgactgaccactcaagttgcttttacaaaagaaatgggatgtccattgaacatctgttttagatctgatttccyaatctggattattaaaatgaggaggctattttttcccagtatataaatgattctaatactttttgctgtaaaacttttggagtctctctgctaaattatg

SEQ ID NO: 469713 - DNA, 201 bp, Homo sapiens
ctcagtgggtatgaatgtcctgtgtcccagttggcctgctgtggtatcatgttgtccgtgggcaggagtggggaatggctgactatgtcctccttttaagyctttgcaaaaggtatatggcttgggcttttatttgtaccatttggcttaaactggtttgttgttgtctatgagttttttgtcttggtagcctgccgcttc

SEQ ID NO: 469714 - DNA, 201 bp, Homo sapiens
gtacatacatatattatcatttatagtttcctgattagaattctgcataatcaagtcttactaagacaggtttattatattttctcattacttcttggtcyataggaattctacctctaaagagagaattaggtgaataataaaatgtcacgactccattttacggtagtatcttagcattaatatttggaattgttattc

SEQ ID NO: 469715 - DNA, 201 bp, Homo sapiens
atgggatgtccattgaacatctgttttagatctgatttcccaatctggattattaaaatgaggaggctattttttcccagtatataaatgattctaatacwttttgctgtaaaacttttggagtctctctgctaaattatgttccagtttcgtagcttgggattcaagtcataaatatactaggtctgtcttacctttcgg

SEQ ID NO: 469716 - DNA, 201 bp, Homo sapiens
gtgggtatgaatgtcctgtgtcccagttggcctgctgtggtatcatgttgtccgtgggcaggagtggggaatggctgactatgtcctccttttaagtcttkgcaaaaggtatatggcttgggcttttatttgtaccatttggcttaaactggtttgttgttgtctatgagttttttgtcttggtagcctgccgcttccctg

SEQ ID NO: 469717 - DNA, 201 bp, Homo sapiens
ataaatgattctaatactttttgctgtaaaacttttggagtctctctgctaaattatgttccagtttcgtagcttgggattcaagtcataaatatactagktctgtcttacctttcggtgcttttatttgttcccttttgaacatggctgaattttacttttctgtccacctgcccgccattcgtgctacccctccttcct

SEQ ID NO: 469718 - DNA, 201 bp, Homo sapiens
acatacatatattatcatttatagtttcctgattagaattctgcataatcaagtcttactaagacaggtttattatattttctcattacttcttggtctawaggaattctacctctaaagagagaattaggtgaataataaaatgtcacgactccattttacggtagtatcttagcattaatatttggaattgttattcta

SEQ ID NO: 469719 - DNA, 201 bp, Homo sapiens
tttttgctgtaaaacttttggagtctctctgctaaattatgttccagtttcgtagcttgggattcaagtcataaatatactaggtctgtcttacctttcgrtgcttttatttgttcccttttgaacatggctgaattttacttttctgtccacctgcccgccattcgtgctacccctccttcctttttccactctcatctt

SEQ ID NO: 469720 - DNA, 201 bp, Homo sapiens
gcagacattggttttgattgtagcatgtgcagaccctatatgcctgcgtctaatggtaagagaataatttaaactgtgagtctgcactcttgtaccactcwcttgcaccttactgtccataaccaatgaattagcttagctctactctattttgtctttgtgaaacttactttgacaagtattttatgaaaaatattattt

SEQ ID NO: 469721 - DNA, 201 bp, Homo sapiens
gctgtggtatcatgttgtccgtgggcaggagtggggaatggctgactatgtcctccttttaagtctttgcaaaaggtatatggcttgggcttttatttgtwccatttggcttaaactggtttgttgttgtctatgagttttttgtcttggtagcctgccgcttccctgcttttttgacaaaagacagcagaattttcttgg

SEQ ID NO: 469722 - DNA, 201 bp, Homo sapiens
cctgattagaattctgcataatcaagtcttactaagacaggtttattatattttctcattacttcttggtctataggaattctacctctaaagagagaatkaggtgaataataaaatgtcacgactccattttacggtagtatcttagcattaatatttggaattgttattctagaccttagccaaaatatatgttttgat

SEQ ID NO: 469723 - DNA, 201 bp, Homo sapiens
tttttccactctcatctttttcccattttccagtctgtaaatcctacctatccttttattttttaaattacaagatctcattctgttacttaggcaggagygcggtggcacaatcatagttgactgcagcttcgaatttctgggcccaaatgaccctcccatctcagcctcccaagtagctgggaatacaggtgcgcaata

SEQ ID NO: 469724 - DNA, 201 bp, Homo sapiens
ggcttttatttgtaccatttggcttaaactggtttgttgttgtctatgagttttttgtcttggtagcctgccgcttccctgcttttttgacaaaagacagyagaattttcttggagttttacgtatgtgtgtgcctgttggtgtttctgagttgtctgcttctctagcaacttttcttgtatatatgagtcagaaaggaaa

SEQ ID NO: 469725 - DNA, 201 bp, Homo sapiens
aaacattataaagtagtgggcaatgatgaaacctactctgggtgtttttaggcaaattttttaacttctttgatgctagtgttctcatttataaaataggwgaaccaggatgagcccataggatagttgtgctgatgaggtgcaaggatgcatgccaggcacccagcactggctcttcccacacatggagtgctcagtaac

SEQ ID NO: 469726 - DNA, 201 bp, Homo sapiens
gattagaattctgcataatcaagtcttactaagacaggtttattatattttctcattacttcttggtctataggaattctacctctaaagagagaattagktgaataataaaatgtcacgactccattttacggtagtatcttagcattaatatttggaattgttattctagaccttagccaaaatatatgttttgattat

SEQ ID NO: 469727 - DNA, 201 bp, Homo sapiens
cccttttactggtgaggaatccagcatttaaatttatgtatgtatatgataaagctagaatttttccagatctgagactcaaagctctttgtgttttcgtytatactccagctcttttgaggagctttaaagtctagttacaaagacaggaaaaacaagaacggccacagtggctcacgcctgtaatcccagcactttggg

SEQ ID NO: 469728 - DNA, 201 bp, Homo sapiens
cttaaactggtttgttgttgtctatgagttttttgtcttggtagcctgccgcttccctgcttttttgacaaaagacagcagaattttcttggagttttacrtatgtgtgtgcctgttggtgtttctgagttgtctgcttctctagcaacttttcttgtatatatgagtcagaaaggaaacctagggaattcatcctctttt

SEQ ID NO: 469729 - DNA, 201 bp, Homo sapiens
tacacaaagtctgtcttctttttgaagtgagataaaattttggcatcaaagctaacttttaaattatgatgaataatacataattaccagaaaattcttayttctgaaataaaattattcaacattatttttatcttagagtacgactttctgtctcatatttttgagaactgtctactgccaacataatattaaactatc

SEQ ID NO: 469730 - DNA, 201 bp, Homo sapiens
ctccattttacggtagtatcttagcattaatatttggaattgttattctagaccttagccaaaatatatgttttgattatgaattttctgaagctttccasttaagtgtaaaacaagtgaaaaatataacttcgtattctgtgtattttgctttttataggtgtctactgcagatatttcatcaaataaggatgatgaaga

SEQ ID NO: 469731 - DNA, 201 bp, Homo sapiens
taaatttatgtatgtatatgataaagctagaatttttccagatctgagactcaaagctctttgtgttttcgtttatactccagctcttttgaggagctttmaagtctagttacaaagacaggaaaaacaagaacggccacagtggctcacgcctgtaatcccagcactttgggaggctgaggccgagaccagcctggtgaa

SEQ ID NO: 469732 - DNA, 201 bp, Homo sapiens
tttccactctcatctttttcccattttccagtctgtaaatcctacctatccttttattttttaaattacaagatctcattctgttacttaggcaggagtgyggtggcacaatcatagttgactgcagcttcgaatttctgggcccaaatgaccctcccatctcagcctcccaagtagctgggaatacaggtgcgcaatact

SEQ ID NO: 469733 - DNA, 201 bp, Homo sapiens
tatgtgtgtgcctgttggtgtttctgagttgtctgcttctctagcaacttttcttgtatatatgagtcagaaaggaaacctagggaattcatcctcttttktttcttggctcctgaagccctaattggtctgccctctctctacattttgttgtcttcttttgtttgtcttatgtatcacggctaagggtttttaaagctg

SEQ ID NO: 469734 - DNA, 201 bp, Homo sapiens
tttgctttttataggtgtctactgcagatatttcatcaaataaggatgatgaagaaaactctatgcacaatacagttgtgttgttttctagcagtgacaarttcactttgaatcaggtttgaacttgacaatttactgtcttcctcattgaattcctccttgcacatttctgctttatctcatatacacagaagtcattca

SEQ ID NO: 469735 - DNA, 201 bp, Homo sapiens
acaaagtctgtcttctttttgaagtgagataaaattttggcatcaaagctaacttttaaattatgatgaataatacataattaccagaaaattcttacttstgaaataaaattattcaacattatttttatcttagagtacgactttctgtctcatatttttgagaactgtctactgccaacataatattaaactatcgac

SEQ ID NO: 469736 - DNA, 201 bp, Homo sapiens
cattctgttacttaggcaggagtgcggtggcacaatcatagttgactgcagcttcgaatttctgggcccaaatgaccctcccatctcagcctcccaagtarctgggaatacaggtgcgcaatactgtgcccggctagtttttttttttttttcttttgagacagagtttcgctcttgttgcccaggctggagtgcaatggt

SEQ ID NO: 469737 - DNA, 201 bp, Homo sapiens
ttgtctgcttctctagcaacttttcttgtatatatgagtcagaaaggaaacctagggaattcatcctcttttgtttcttggctcctgaagccctaattggyctgccctctctctacattttgttgtcttcttttgtttgtcttatgtatcacggctaagggtttttaaagctgtatttagtggaaagaacagggaaaagta

SEQ ID NO: 469738 - DNA, 201 bp, Homo sapiens
taaaattattcaacattatttttatcttagagtacgactttctgtctcatatttttgagaactgtctactgccaacataatattaaactatcgactaaaargaatttaagatgtatgttagccaaatctcagagaaaaaccaatggaaatattgagagaagtaatttaggtatcttttgcccccactgcctaccactaaat

SEQ ID NO: 469739 - DNA, 201 bp, Homo sapiens
ttttctagcagtgacaagttcactttgaatcaggtttgaacttgacaatttactgtcttcctcattgaattcctccttgcacatttctgctttatctcatmtacacagaagtcattcaatatttagctatagagctatattagttaagaaggtatttttaaagtaaaatttgtaggtttttagcttagtctccatttaaaa

SEQ ID NO: 469740 - DNA, 201 bp, Homo sapiens
gagctttaaagtctagttacaaagacaggaaaaacaagaacggccacagtggctcacgcctgtaatcccagcactttgggaggctgaggccgagaccagcytggtgaatatagtgaaaccccgtatctactaaaaatacaaaaattagcccggtgtggtggtgtgtgcctgtaatcccagctactcaggaggctgaggtag

SEQ ID NO: 469741 - DNA, 201 bp, Homo sapiens
cacatgctgccacccctggctaagtttttatattttagtagagatggggtttcaccatgttacccagctggtctcgaattcctgagctcaggcaatccgcytgcctcggcctcccaaagtgttaggattacaggtgtgagccaccatgcccagccattcccggctagtttttgtagatactggggtctcgctgtgttgcct

SEQ ID NO: 469742 - DNA, 201 bp, Homo sapiens
gcaacttttcttgtatatatgagtcagaaaggaaacctagggaattcatcctcttttgtttcttggctcctgaagccctaattggtctgccctctctctayattttgttgtcttcttttgtttgtcttatgtatcacggctaagggtttttaaagctgtatttagtggaaagaacagggaaaagtacattttctgcatttt

SEQ ID NO: 469743 - DNA, 201 bp, Homo sapiens
ctgcctagcatgtgtgaaatttccagactcataaaaagaatagcaggataagccacattatttccatagtctagatatagtaaaccatgattaccagttakggaaccctcttgaaattcaagttctcagaagccagcctaggaccaactgtgcaaacagacagaccctccttcacaggataatgtaatagtctcagatctg

SEQ ID NO: 469744 - DNA, 201 bp, Homo sapiens
tgtaggtttttagcttagtctccatttaaaatatgttctgttttcttaacttcaggatatgtgtgtagtttgtggcagttttggccaaggagcagaaggargattacttgcctgttctcagtgtggtcagtgttaccatccatactgtgtcagtattaaggtaaacatccttaaattgagttaacaaatatgtattgaatt

SEQ ID NO: 469745 - DNA, 201 bp, Homo sapiens
actatcgactaaaaggaatttaagatgtatgttagccaaatctcagagaaaaaccaatggaaatattgagagaagtaatttaggtatcttttgcccccacwgcctaccactaaataaaattacaaacaataaaacgtcctaggtggtgatgcaatgagaggcactaatggtgtggtaagagagatgatggttcaccgggag

SEQ ID NO: 469746 - DNA, 201 bp, Homo sapiens
ctagttacaaagacaggaaaaacaagaacggccacagtggctcacgcctgtaatcccagcactttgggaggctgaggccgagaccagcctggtgaatataktgaaaccccgtatctactaaaaatacaaaaattagcccggtgtggtggtgtgtgcctgtaatcccagctactcaggaggctgaggtaggagaattgcttg

SEQ ID NO: 469747 - DNA, 201 bp, Homo sapiens
agatactggggtctcgctgtgttgcctaggctggtctcgaacccatgggctcaagtgatcctcccattacagcctcctaaagtgctgggattacaggcatrggccactgtgccctgccctgtcctcctttttgaagtctctctctctctgtcttttatacttattttttctctcttgtcatgtctttgtccttgtcttttt

SEQ ID NO: 469748 - DNA, 201 bp, Homo sapiens
ggtctgccctctctctacattttgttgtcttcttttgtttgtcttatgtatcacggctaagggtttttaaagctgtatttagtggaaagaacagggaaaaktacattttctgcattttgtctggaagtggaagtctgcattcatttttgctgtttttccctgaatacagagttctgggatgattatgtttttcttcttcaa

SEQ ID NO: 469749 - DNA, 201 bp, Homo sapiens
ttagggaaccctcttgaaattcaagttctcagaagccagcctaggaccaactgtgcaaacagacagaccctccttcacaggataatgtaatagtctcagawctgctttgttaatttttgtttgcatagagttttataattggaaggtgtctcaaatgctacatatttctgtctaatggactatagtaagagtgttgtatag

SEQ ID NO: 469750 - DNA, 201 bp, Homo sapiens
gccaaatctcagagaaaaaccaatggaaatattgagagaagtaatttaggtatcttttgcccccactgcctaccactaaataaaattacaaacaataaaaygtcctaggtggtgatgcaatgagaggcactaatggtgtggtaagagagatgatggttcaccgggagcactaaggaaaggtctgctgttgagaaaatatgt

SEQ ID NO: 469751 - DNA, 201 bp, Homo sapiens
ttgaacctgggaggcagaggttgcagtgagctgtgccactgcactccagcctgtgtgccagagactctgtgtcaaaaaaaaaaaaaaaaaaaaaggccggkcatgcagtggctcatgtctgtaatcccattgctttgggaggccaaggcaggcagattacctaaggtcaggagttcaagaccagcctgttcaacatggcaa

SEQ ID NO: 469752 - DNA, 201 bp, Homo sapiens
tgccctctctctacattttgttgtcttcttttgtttgtcttatgtatcacggctaagggtttttaaagctgtatttagtggaaagaacagggaaaagtacrttttctgcattttgtctggaagtggaagtctgcattcatttttgctgtttttccctgaatacagagttctgggatgattatgtttttcttcttcaagcat

SEQ ID NO: 469753 - DNA, 201 bp, Homo sapiens
gaaccctcttgaaattcaagttctcagaagccagcctaggaccaactgtgcaaacagacagaccctccttcacaggataatgtaatagtctcagatctgckttgttaatttttgtttgcatagagttttataattggaaggtgtctcaaatgctacatatttctgtctaatggactatagtaagagtgttgtatagtatat

SEQ ID NO: 469754 - DNA, 201 bp, Homo sapiens
aatctcagagaaaaaccaatggaaatattgagagaagtaatttaggtatcttttgcccccactgcctaccactaaataaaattacaaacaataaaacgtcytaggtggtgatgcaatgagaggcactaatggtgtggtaagagagatgatggttcaccgggagcactaaggaaaggtctgctgttgagaaaatatgtaagg

SEQ ID NO: 469755 - DNA, 201 bp, Homo sapiens
tctgcctcggcctcccaaagtgctgggattacaggcgtgagccgttgctcctggcagagattctaagttttttgagaatagtgactgtatttcttgggtcrtggctctatcttatacatctggcacagtgtgtgtgtgtgtagcaggtgtctaatatttgttaaacacacatggtccttaatatcaaacggcatgggattt

SEQ ID NO: 469756 - DNA, 201 bp, Homo sapiens
accaactgtgcaaacagacagaccctccttcacaggataatgtaatagtctcagatctgctttgttaatttttgtttgcatagagttttataattggaagrtgtctcaaatgctacatatttctgtctaatggactatagtaagagtgttgtatagtatataacattgaattattctccattatagacaggctgtgataag

SEQ ID NO: 469757 - DNA, 201 bp, Homo sapiens
ccaatggaaatattgagagaagtaatttaggtatcttttgcccccactgcctaccactaaataaaattacaaacaataaaacgtcctaggtggtgatgcartgagaggcactaatggtgtggtaagagagatgatggttcaccgggagcactaaggaaaggtctgctgttgagaaaatatgtaaggccatacctgaagggt

SEQ ID NO: 469758 - DNA, 201 bp, Homo sapiens
gtgctgggattacaggcgtgagccgttgctcctggcagagattctaagttttttgagaatagtgactgtatttcttgggtcatggctctatcttatacatytggcacagtgtgtgtgtgtgtagcaggtgtctaatatttgttaaacacacatggtccttaatatcaaacggcatgggatttaagacatgaacttgggttt

SEQ ID NO: 469759 - DNA, 201 bp, Homo sapiens
tgtgcaaacagacagaccctccttcacaggataatgtaatagtctcagatctgctttgttaatttttgtttgcatagagttttataattggaaggtgtctyaaatgctacatatttctgtctaatggactatagtaagagtgttgtatagtatataacattgaattattctccattatagacaggctgtgataagtgttct

SEQ ID NO: 469760 - DNA, 201 bp, Homo sapiens
acaaacaataaaacgtcctaggtggtgatgcaatgagaggcactaatggtgtggtaagagagatgatggttcaccgggagcactaaggaaaggtctgctgrtgagaaaatatgtaaggccatacctgaagggttagaaaacgccagacatggctggccgtggtggctcacgtctgtaatcccagcactttgggatgccaag

SEQ ID NO: 469761 - DNA, 201 bp, Homo sapiens
gagaatagtgactgtatttcttgggtcatggctctatcttatacatctggcacagtgtgtgtgtgtgtagcaggtgtctaatatttgttaaacacacatgrtccttaatatcaaacggcatgggatttaagacatgaacttgggtttgagtctcagcactttcatttcttagttgtatgaccttgaccatttaatctgttt

SEQ ID NO: 469762 - DNA, 201 bp, Homo sapiens
ctattgtagaacagaaatagtagaaaatggaactaatgtttattaacaattactatggaagagggaatagaaatgtgttgctcttgaacagatttattcarctttggcactgttgacattttggactagctaattccttgtcatgggcagtatctcctgtgtgtaggatgttaagcagcattcctggcctccacccgctag

SEQ ID NO: 469763 - DNA, 201 bp, Homo sapiens
ctgctttgttaatttttgtttgcatagagttttataattggaaggtgtctcaaatgctacatatttctgtctaatggactatagtaagagtgttgtatagyatataacattgaattattctccattatagacaggctgtgataagtgttctaatgtttatacaaaagaactttgtaactttgagcagagtaaagagactgt

SEQ ID NO: 469764 - DNA, 201 bp, Homo sapiens
gcaatgagaggcactaatggtgtggtaagagagatgatggttcaccgggagcactaaggaaaggtctgctgttgagaaaatatgtaaggccatacctgaasggttagaaaacgccagacatggctggccgtggtggctcacgtctgtaatcccagcactttgggatgccaaggctggtggatcacaaggtcaggtgtttga

SEQ ID NO: 469765 - DNA, 201 bp, Homo sapiens
atgggttgtaatgagaattaaatgataatgtatacaaaatacctaacttgattggatttgtggtactcagtagctataatgaccattttaaccccaatatsagaaggattcactcatcacactgttgtatacttcgtagctattacttctttaatccccaaggacttgtttaacaaagtgttcttcagtttctacttccta

SEQ ID NO: 469766 - DNA, 201 bp, Homo sapiens
gttttataattggaaggtgtctcaaatgctacatatttctgtctaatggactatagtaagagtgttgtatagtatataacattgaattattctccattatwgacaggctgtgataagtgttctaatgtttatacaaaagaactttgtaactttgagcagagtaaagagactgttaatgatacttttgactgcaagtagtag

SEQ ID NO: 469767 - DNA, 201 bp, Homo sapiens
caatgagaggcactaatggtgtggtaagagagatgatggttcaccgggagcactaaggaaaggtctgctgttgagaaaatatgtaaggccatacctgaagrgttagaaaacgccagacatggctggccgtggtggctcacgtctgtaatcccagcactttgggatgccaaggctggtggatcacaaggtcaggtgtttgag

SEQ ID NO: 469768 - DNA, 201 bp, Homo sapiens
aattaaatgataatgtatacaaaatacctaacttgattggatttgtggtactcagtagctataatgaccattttaaccccaatatgagaaggattcactcrtcacactgttgtatacttcgtagctattacttctttaatccccaaggacttgtttaacaaagtgttcttcagtttctacttcctagttcctttgtggaac

SEQ ID NO: 469769 - DNA, 201 bp, Homo sapiens
tgtatagtatataacattgaattattctccattatagacaggctgtgataagtgttctaatgtttatacaaaagaactttgtaactttgagcagagtaaaragactgttaatgatacttttgactgcaagtagtagaaaaatgttgtgtttaactctgaaatatgctttgcctcatattagtatttctactctagctttct

SEQ ID NO: 469770 - DNA, 201 bp, Homo sapiens
acccaccttggcctgccagagtgctgggattataggcatacgccagctgcacccagcccatttttgatatctcaaatctttcatcatagtttagtcagccrtatttttcctagaatttttttaaaaactattttgtcttgctatcaagctattactctgtagttttacatacattctttattttaactaaactgttatgag

SEQ ID NO: 469771 - DNA, 201 bp, Homo sapiens
aagaagtcagataaattatttccatttcaagtatttattattcagattatttaaagcaaagctttcacaaagccttttgtcagctttcctataatcctcamataatttttcctggctggacgctttggcttactcctgtaatcctggcactttgggaggcagaagcaggaggatcacttgagcccaagagttctaggctgc

SEQ ID NO: 469772 - DNA, 201 bp, Homo sapiens
agcagagtaaagagactgttaatgatacttttgactgcaagtagtagaaaaatgttgtgtttaactctgaaatatgctttgcctcatattagtatttctaytctagctttctcttgactagcgtaagcatggtgtatattattccattcttttattttaacctgtttgcatctttgtatttaacttgtgtttcttgaaggc

SEQ ID NO: 469773 - DNA, 201 bp, Homo sapiens
ataagaaggtcttgacaagcctggcttaagcagttatgagtggatgtgggtgtagagaccagactgtagtgttttgaagagtgaatataagctgagaaacktgagagtttggttataaaagggaccacaggtatctgtgaagaaaacttagtaggaatgaagataaatatttttaaaattctgccactgaacacctcagat

SEQ ID NO: 469774 - DNA, 201 bp, Homo sapiens
tagtttggacctccatggttaagtctagattgtcacttttgcttatgtagaaagtacacaaacaaaagtatgtggagctgctttcttaagtttagcacttaaaaaaaaaaagtctgaaaatactctaaagataattccaaagaaaatatcaatttaacattttaatttaaatctgaggggaaaggaacatagctatagaca

SEQ ID NO: 469775 - DNA, 201 bp, Homo sapiens
aggtttttagcttagtctccatttaaaatatgttctgttttcttaacttcaggatatgtgtgtagtttgtggcagttttggccaaggagcagaaggaagaytacttgcctgttctcagtgtggtcagtgttaccatccatactgtgtcagtattaaggtaaacatccttaaattgagttaacaaatatgtattgaattttt

SEQ ID NO: 469776 - DNA, 201 bp, Homo sapiens
gcctaggctggtctcgaacccatgggctcaagtgatcctcccattacagcctcctaaagtgctgggattacaggcatgggccactgtgccctgccctgtcytcctttttgaagtctctctctctctgtcttttatacttattttttctctcttgtcatgtctttgtccttgtcttttttgatggagtcttactctgtcaca

SEQ ID NO: 469777 - DNA, 201 bp, Homo sapiens
gttttcttaacttcaggatatgtgtgtagtttgtggcagttttggccaaggagcagaaggaagattacttgcctgttctcagtgtggtcagtgttaccatmcatactgtgtcagtattaaggtaaacatccttaaattgagttaacaaatatgtattgaatttttatttggttttagtagtaacatgagctcccagttctc

SEQ ID NO: 469778 - DNA, 201 bp, Homo sapiens
tacaggcatgggccactgtgccctgccctgtcctcctttttgaagtctctctctctctgtcttttatacttattttttctctcttgtcatgtctttgtccytgtcttttttgatggagtcttactctgtcacacaggctggattgcagtggcacagttctagctcactgcagccttgaactcctggggtcaagtgatcctc

SEQ ID NO: 469779 - DNA, 201 bp, Homo sapiens
ttttgttgtcttcttttgtttgtcttatgtatcacggctaagggtttttaaagctgtatttagtggaaagaacagggaaaagtacattttctgcattttgyctggaagtggaagtctgcattcatttttgctgtttttccctgaatacagagttctgggatgattatgtttttcttcttcaagcatttaaaagatgttgca

SEQ ID NO: 469780 - DNA, 201 bp, Homo sapiens
cttattttttctctcttgtcatgtctttgtccttgtcttttttgatggagtcttactctgtcacacaggctggattgcagtggcacagttctagctcactrcagccttgaactcctggggtcaagtgatcctctagctcaagtgatcctcctacttcagcctctgagtagctggggctctatgtgtgcaccaccacgcctg

SEQ ID NO: 469781 - DNA, 201 bp, Homo sapiens
cagttttggccaaggagcagaaggaagattacttgcctgttctcagtgtggtcagtgttaccatccatactgtgtcagtattaaggtaaacatccttaaaytgagttaacaaatatgtattgaatttttatttggttttagtagtaacatgagctcccagttctcacaattaagtattatgattattaaacatatgtgaca

SEQ ID NO: 469782 - DNA, 201 bp, Homo sapiens
cacacaggctggattgcagtggcacagttctagctcactgcagccttgaactcctggggtcaagtgatcctctagctcaagtgatcctcctacttcagccwctgagtagctggggctctatgtgtgcaccaccacgcctggctcctttgtccatttttgtttgtttgttttttggagacagagtcttactctgtcgcctag

SEQ ID NO: 469783 - DNA, 201 bp, Homo sapiens
gtcttatgtatcacggctaagggtttttaaagctgtatttagtggaaagaacagggaaaagtacattttctgcattttgtctggaagtggaagtctgcatkcatttttgctgtttttccctgaatacagagttctgggatgattatgtttttcttcttcaagcatttaaaagatgttgcattgtttcctgtcttccatggt

SEQ ID NO: 469784 - DNA, 201 bp, Homo sapiens
agcagaaggaagattacttgcctgttctcagtgtggtcagtgttaccatccatactgtgtcagtattaaggtaaacatccttaaattgagttaacaaataygtattgaatttttatttggttttagtagtaacatgagctcccagttctcacaattaagtattatgattattaaacatatgtgacagtatttaaatactta

SEQ ID NO: 469785 - DNA, 201 bp, Homo sapiens
gagtgcagtggcatgatctcggctcactgcaacctccaccttctgggttcaggcgattctcctgcctcagcctcctgagtagctgggattacaggtgcccrccaccacgcctggcttatttttgtatatttagtagagatggggtttcaccatgttgaccaggctggtcttgaactccagacctgtgttctgcctgccttg

SEQ ID NO: 469786 - DNA, 201 bp, Homo sapiens
tatcacggctaagggtttttaaagctgtatttagtggaaagaacagggaaaagtacattttctgcattttgtctggaagtggaagtctgcattcatttttyctgtttttccctgaatacagagttctgggatgattatgtttttcttcttcaagcatttaaaagatgttgcattgtttcctgtcttccatggtttctaatg

SEQ ID NO: 469787 - DNA, 201 bp, Homo sapiens
ttaccatccatactgtgtcagtattaaggtaaacatccttaaattgagttaacaaatatgtattgaatttttatttggttttagtagtaacatgagctccyagttctcacaattaagtattatgattattaaacatatgtgacagtatttaaatacttaaaatactgcttttaagggtttcctatctcaagaaatttgctc

SEQ ID NO: 469788 - DNA, 201 bp, Homo sapiens
atcacggctaagggtttttaaagctgtatttagtggaaagaacagggaaaagtacattttctgcattttgtctggaagtggaagtctgcattcatttttgytgtttttccctgaatacagagttctgggatgattatgtttttcttcttcaagcatttaaaagatgttgcattgtttcctgtcttccatggtttctaatga

SEQ ID NO: 469789 - DNA, 201 bp, Homo sapiens
gcaggactgtcggggcgaggtggccgaggcaggtcaaagctgaaaagtggaatcggagctgttgtattacctggggtgaggcttgcttcatgtatattttmtctaatctaaatgtcagttaatgatgaaaatctcatagcaagttattttgatcttaagagtcatataaataggtcaaaatgtttattttactgtcctact

SEQ ID NO: 469790 - DNA, 201 bp, Homo sapiens
atccttaaattgagttaacaaatatgtattgaatttttatttggttttagtagtaacatgagctcccagttctcacaattaagtattatgattattaaacrtatgtgacagtatttaaatacttaaaatactgcttttaagggtttcctatctcaagaaatttgctcctctataaatcttatattgtacaatatacttgtc

SEQ ID NO: 469791 - DNA, 201 bp, Homo sapiens
cctaacttgattggatttgtggtactcagtagctataatgaccattttaaccccaatatgagaaggattcactcatcacactgttgtatacttcgtagctrttacttctttaatccccaaggacttgtttaacaaagtgttcttcagtttctacttcctagttcctttgtggaactggtaaaaatttaaaatatcttaaca

SEQ ID NO: 469792 - DNA, 201 bp, Homo sapiens
accaggctggtcttgaactccagacctgtgttctgcctgccttggactcccgaagtgctgggaatacaggcatgagccactgcaccctggccttaactacrtattttttatatctgcacagtgttttggaaaaagtggttcaactgaaagaatgaaaagatgggggcagaatttgctttttaaaaaaataataataattta

SEQ ID NO: 469793 - DNA, 201 bp, Homo sapiens
agggtttttaaagctgtatttagtggaaagaacagggaaaagtacattttctgcattttgtctggaagtggaagtctgcattcatttttgctgtttttccstgaatacagagttctgggatgattatgtttttcttcttcaagcatttaaaagatgttgcattgtttcctgtcttccatggtttctaatgagaagtcaggt

SEQ ID NO: 469794 - DNA, 201 bp, Homo sapiens
caaatatgtattgaatttttatttggttttagtagtaacatgagctcccagttctcacaattaagtattatgattattaaacatatgtgacagtatttaartacttaaaatactgcttttaagggtttcctatctcaagaaatttgctcctctataaatcttatattgtacaatatacttgtcttgaaaaagtaaaacata

SEQ ID NO: 469795 - DNA, 201 bp, Homo sapiens
tgctttttaaaaaaataataataatttaaaaaaagggcattgaaaaaagtttcagtggtgttgggagggccttggaacaaggaatgaatggaagatgaggsagtggagggaggccatgtatggactctttctacagaccaggctgttgaaggagagagggctaacaggaaatgaagtgcgggggaagttttttgaagatgg

SEQ ID NO: 469796 - DNA, 201 bp, Homo sapiens
tacagagttctgggatgattatgtttttcttcttcaagcatttaaaagatgttgcattgtttcctgtcttccatggtttctaatgagaagtcaggtgtggygtcagtagtatcattattcccatgtatataataatgttttgatattctctggctgctttcaggattttctctttatctttggttttcagcagtctgacta

SEQ ID NO: 469797 - DNA, 201 bp, Homo sapiens
aaatatgtattgaatttttatttggttttagtagtaacatgagctcccagttctcacaattaagtattatgattattaaacatatgtgacagtatttaaayacttaaaatactgcttttaagggtttcctatctcaagaaatttgctcctctataaatcttatattgtacaatatacttgtcttgaaaaagtaaaacataa

SEQ ID NO: 469798 - DNA, 201 bp, Homo sapiens
actcatcacactgttgtatacttcgtagctattacttctttaatccccaaggacttgtttaacaaagtgttcttcagtttctacttcctagttcctttgtkgaactggtaaaaatttaaaatatcttaacataatattttatttcaaatgataaacagtaaggtaaaatgtggtttttcttggacaacttatggtagaatg

SEQ ID NO: 469799 - DNA, 201 bp, Homo sapiens
agtttcagtggtgttgggagggccttggaacaaggaatgaatggaagatgagggagtggagggaggccatgtatggactctttctacagaccaggctgttraaggagagagggctaacaggaaatgaagtgcgggggaagttttttgaagatgggagaaagaggacaacttttatatatttcatttcatttgattccttat

SEQ ID NO: 469800 - DNA, 201 bp, Homo sapiens
cttcaagcatttaaaagatgttgcattgtttcctgtcttccatggtttctaatgagaagtcaggtgtggtgtcagtagtatcattattcccatgtatatartaatgttttgatattctctggctgctttcaggattttctctttatctttggttttcagcagtctgactatgatgtgcctaggtgtggttttctttgtatt

SEQ ID NO: 469801 - DNA, 201 bp, Homo sapiens
taacatgagctcccagttctcacaattaagtattatgattattaaacatatgtgacagtatttaaatacttaaaatactgcttttaagggtttcctatctsaagaaatttgctcctctataaatcttatattgtacaatatacttgtcttgaaaaagtaaaacataaaaatatatgcatttaatttaaaagacaatttata

SEQ ID NO: 469802 - DNA, 201 bp, Homo sapiens
gacttgtttaacaaagtgttcttcagtttctacttcctagttcctttgtggaactggtaaaaatttaaaatatcttaacataatattttatttcaaatgayaaacagtaaggtaaaatgtggtttttcttggacaacttatggtagaatgatgtctagaatatttagttatgtcatttaatactttttttctttacaattt

SEQ ID NO: 469803 - DNA, 201 bp, Homo sapiens
ttgggagggccttggaacaaggaatgaatggaagatgagggagtggagggaggccatgtatggactctttctacagaccaggctgttgaaggagagagggytaacaggaaatgaagtgcgggggaagttttttgaagatgggagaaagaggacaacttttatatatttcatttcatttgattccttataaatttgtaagga

SEQ ID NO: 469804 - DNA, 201 bp, Homo sapiens
ttctaatgagaagtcaggtgtggtgtcagtagtatcattattcccatgtatataataatgttttgatattctctggctgctttcaggattttctctttatmtttggttttcagcagtctgactatgatgtgcctaggtgtggttttctttgtattcatcctgcttgggggttgctgagcttcttgaaactgtaagttgata

SEQ ID NO: 469805 - DNA, 201 bp, Homo sapiens
ttaaacatatgtgacagtatttaaatacttaaaatactgcttttaagggtttcctatctcaagaaatttgctcctctataaatcttatattgtacaatatmcttgtcttgaaaaagtaaaacataaaaatatatgcatttaatttaaaagacaatttatagtattcacaaagattttaggtttagctaattcattttgtct

SEQ ID NO: 469806 - DNA, 201 bp, Homo sapiens
gtttaacaaagtgttcttcagtttctacttcctagttcctttgtggaactggtaaaaatttaaaatatcttaacataatattttatttcaaatgataaacwgtaaggtaaaatgtggtttttcttggacaacttatggtagaatgatgtctagaatatttagttatgtcatttaatactttttttctttacaatttaaaaa

SEQ ID NO: 469807 - DNA, 201 bp, Homo sapiens
agggccttggaacaaggaatgaatggaagatgagggagtggagggaggccatgtatggactctttctacagaccaggctgttgaaggagagagggctaacrggaaatgaagtgcgggggaagttttttgaagatgggagaaagaggacaacttttatatatttcatttcatttgattccttataaatttgtaaggaagata

SEQ ID NO: 469808 - DNA, 201 bp, Homo sapiens
taataatgttttgatattctctggctgctttcaggattttctctttatctttggttttcagcagtctgactatgatgtgcctaggtgtggttttctttgtrttcatcctgcttgggggttgctgagcttcttgaaactgtaagttgatatttttcaccaaatttgtgaaaagcttgacttttatttcttattctttttctg

SEQ ID NO: 469809 - DNA, 201 bp, Homo sapiens
tcttcagtttctacttcctagttcctttgtggaactggtaaaaatttaaaatatcttaacataatattttatttcaaatgataaacagtaaggtaaaatgyggtttttcttggacaacttatggtagaatgatgtctagaatatttagttatgtcatttaatactttttttctttacaatttaaaaaaaaatttattttat

SEQ ID NO: 469810 - DNA, 201 bp, Homo sapiens
agcttgacttttatttcttattctttttctgtctcatttctctctcctcttcctctgtaactctaattacatgaatgttagtatatttgatattttgtagrttactgagggtctgttcgttttcttcccagtgtttttacttttagttcctcagaatagatacactattcatgtattttcaaggagatggaccaattttct

SEQ ID NO: 469811 - DNA, 201 bp, Homo sapiens
agttcctttgtggaactggtaaaaatttaaaatatcttaacataatattttatttcaaatgataaacagtaaggtaaaatgtggtttttcttggacaactwatggtagaatgatgtctagaatatttagttatgtcatttaatactttttttctttacaatttaaaaaaaaatttattttattttagattcagggggtaca

SEQ ID NO: 469812 - DNA, 201 bp, Homo sapiens
tatttcaaatgataaacagtaaggtaaaatgtggtttttcttggacaacttatggtagaatgatgtctagaatatttagttatgtcatttaatactttttytctttacaatttaaaaaaaaatttattttattttagattcagggggtacacgtgcaggtttgttacatggctagattatgtaatgccgaggtttggcctg

SEQ ID NO: 469813 - DNA, 201 bp, Homo sapiens
cagtaaggtaaaatgtggtttttcttggacaacttatggtagaatgatgtctagaatatttagttatgtcatttaatactttttttctttacaatttaaawaaaaatttattttattttagattcagggggtacacgtgcaggtttgttacatggctagattatgtaatgccgaggtttggcctgctagcgcagccatcat

SEQ ID NO: 469814 - DNA, 201 bp, Homo sapiens
atttagttatgtcatttaatactttttttctttacaatttaaaaaaaaatttattttattttagattcagggggtacacgtgcaggtttgttacatggctrgattatgtaatgccgaggtttggcctgctagcgcagccatcatccaaagtgaccctagtacccaataggtagttttcaacctgtgtgcctcctcttctac

SEQ ID NO: 469815 - DNA, 201 bp, Homo sapiens
tacaatttaaaaaaaaatttattttattttagattcagggggtacacgtgcaggtttgttacatggctagattatgtaatgccgaggtttggcctgctagygcagccatcatccaaagtgaccctagtacccaataggtagttttcaacctgtgtgcctcctcttctaccttctcttttggaatctctagtctattacttc

SEQ ID NO: 469816 - DNA, 201 bp, Homo sapiens
aaacagtctgcatctagagttcatgctcataacattctatttattgcctttctggttttatgacccccttcttatctaagtgtatgctctgtgccccgcayatacaaactagttcccataacatgtgtaatataatccctcctttcccagggtttcccggcttcctgtccttccccttagctttctatcatcagtttttcc

SEQ ID NO: 469817 - DNA, 201 bp, Homo sapiens
tgccctagtgacttgagattccagactacaatgttagatttgattgaacttatatctggaacctcttttccattccatcgatctgtctattcattcaccastacgacactgtttttgttatagagcctttgtagtatctggtaatgttgggccccttcagaacttatccatttcacaggtttcttatctgtgcttgtgtat

SEQ ID NO: 469818 - DNA, 201 bp, Homo sapiens
tatgctgagatttctaataacactgcccttttctgggtattttgtattaaacctaaaatttgtgatgttttagactgtttcactaacgtgttttgataatrtctcagtacccttgggaaaacattataaagtagtgggcaatgatgaaacctactctgggtgtttttaggcaaattttttaacttctttgatgctagtgtt

SEQ ID NO: 469819 - DNA, 201 bp, Homo sapiens
tggtagctgcggtcctagcattaatttaaccctatacttaagacttggcctttctgggatcactactgaattctgctccctgttcaccagtgtctttgtaytctgactggttgtgcttcacttgtctttgagccttttgcaagctgtggtaattgtgcagcttacaaattcccagtagatgtactttcccctggttgtggg

SEQ ID NO: 469820 - DNA, 201 bp, Homo sapiens
tgtccaggctggtcttgaacttctgaactcaagcaattcacctgcctcggcctcccaaagtgctgggattacaggcatgagcccccgtggctggcatgaattttttttttttttttttttgagacagagtcttcctctgtcacccaggctggagtgcagtggcacgatctcggctcactgcaacctctgcctcccaggttc

SEQ ID NO: 469821 - DNA, 201 bp, Homo sapiens
taaacatatgtgacagtatttaaatacttaaaatactgcttttaagggtttcctatctcaagaaatttgctcctctataaatcttatattgtacaatatayttgtcttgaaaaagtaaaacataaaaatatatgcatttaatttaaaagacaatttatagtattcacaaagattttaggtttagctaattcattttgtctg

SEQ ID NO: 469822 - DNA, 201 bp, Homo sapiens
ggaacaaggaatgaatggaagatgagggagtggagggaggccatgtatggactctttctacagaccaggctgttgaaggagagagggctaacaggaaatgwagtgcgggggaagttttttgaagatgggagaaagaggacaacttttatatatttcatttcatttgattccttataaatttgtaaggaagatagagcttgt

SEQ ID NO: 469823 - DNA, 201 bp, Homo sapiens
aacaaggaatgaatggaagatgagggagtggagggaggccatgtatggactctttctacagaccaggctgttgaaggagagagggctaacaggaaatgaartgcgggggaagttttttgaagatgggagaaagaggacaacttttatatatttcatttcatttgattccttataaatttgtaaggaagatagagcttgtat

SEQ ID NO: 469824 - DNA, 201 bp, Homo sapiens
ctatctcaagaaatttgctcctctataaatcttatattgtacaatatacttgtcttgaaaaagtaaaacataaaaatatatgcatttaatttaaaagacawtttatagtattcacaaagattttaggtttagctaattcattttgtctgctgatttaaaaagctgagaactggaatatttagtaaaaaattattagcccat

SEQ ID NO: 469825 - DNA, 201 bp, Homo sapiens
aatgaatggaagatgagggagtggagggaggccatgtatggactctttctacagaccaggctgttgaaggagagagggctaacaggaaatgaagtgcgggsgaagttttttgaagatgggagaaagaggacaacttttatatatttcatttcatttgattccttataaatttgtaaggaagatagagcttgtattatttca

SEQ ID NO: 469826 - DNA, 201 bp, Homo sapiens
tattctttttctgtctcatttctctctcctcttcctctgtaactctaattacatgaatgttagtatatttgatattttgtagattactgagggtctgttcrttttcttcccagtgtttttacttttagttcctcagaatagatacactattcatgtattttcaaggagatggaccaattttctaccaatctcttgttaagc

SEQ ID NO: 469827 - DNA, 201 bp, Homo sapiens
aagaaatttgctcctctataaatcttatattgtacaatatacttgtcttgaaaaagtaaaacataaaaatatatgcatttaatttaaaagacaatttatastattcacaaagattttaggtttagctaattcattttgtctgctgatttaaaaagctgagaactggaatatttagtaaaaaattattagcccattctgttc

SEQ ID NO: 469828 - DNA, 201 bp, Homo sapiens
gaggccatgtatggactctttctacagaccaggctgttgaaggagagagggctaacaggaaatgaagtgcgggggaagttttttgaagatgggagaaagargacaacttttatatatttcatttcatttgattccttataaatttgtaaggaagatagagcttgtattatttcagtgaagttgaaaatagagtacagaaaa

SEQ ID NO: 469829 - DNA, 201 bp, Homo sapiens
ttctttttctgtctcatttctctctcctcttcctctgtaactctaattacatgaatgttagtatatttgatattttgtagattactgagggtctgttcgtyttcttcccagtgtttttacttttagttcctcagaatagatacactattcatgtattttcaaggagatggaccaattttctaccaatctcttgttaagccc

SEQ ID NO: 469830 - DNA, 201 bp, Homo sapiens
tcccgcattctctctcctctatgctcactcgtatacaaaatgacattttctccttatagccaaaagaaacaaaacaagtgtcatatttaatgcaattggtrataatcgagagtcagcgctgctcactttgaagcatttcaggatagaggctttctggggaaccttttaagtggtatcgtgtgcttggttttaaatatggac

SEQ ID NO: 469831 - DNA, 201 bp, Homo sapiens
tattttgtagattactgagggtctgttcgttttcttcccagtgtttttacttttagttcctcagaatagatacactattcatgtattttcaaggagatggrccaattttctaccaatctcttgttaagcccatccactaaaattttcattgaaattaccatacttattagttgtagaattttcttttcttttcttttgaga

SEQ ID NO: 469832 - DNA, 201 bp, Homo sapiens
tagccaaaagaaacaaaacaagtgtcatatttaatgcaattggtaataatcgagagtcagcgctgctcactttgaagcatttcaggatagaggctttctgkggaaccttttaagtggtatcgtgtgcttggttttaaatatggacaggtctcaatacttcactagttgtatctaaggttcttggttttttctttttaagaa

SEQ ID NO: 469833 - DNA, 201 bp, Homo sapiens
gagaaagaggacaacttttatatatttcatttcatttgattccttataaatttgtaaggaagatagagcttgtattatttcagtgaagttgaaaatagagyacagaaaaattaagatacagcacccccaaaactgagaacttctgacataatacactgttggaaatacttacttcagagtgaagaaaatattggaagttag

SEQ ID NO: 469834 - DNA, 201 bp, Homo sapiens
agttcctcagaatagatacactattcatgtattttcaaggagatggaccaattttctaccaatctcttgttaagcccatccactaaaattttcattgaaaktaccatacttattagttgtagaattttcttttcttttcttttgagacagggtctttgtctcccaggctggagtgcaatggcgcgatctcggcttacagcc

SEQ ID NO: 469835 - DNA, 201 bp, Homo sapiens
ttacatatttgaataaagtgtcatggccactggaagcaagcatggaggtatagctgtacagcagaggtcttaaactgtatactccacaaggaaatcttttstagtactgccataccatgtaatataaatactaacctcagtttcagtaacaggttgtgaaccatgagtgatttttatacctttctcccctgcccttcaaac

SEQ ID NO: 469836 - DNA, 201 bp, Homo sapiens
tatttcatttcatttgattccttataaatttgtaaggaagatagagcttgtattatttcagtgaagttgaaaatagagtacagaaaaattaagatacagcrcccccaaaactgagaacttctgacataatacactgttggaaatacttacttcagagtgaagaaaatattggaagttaggcttgttaattgctctgcatgg

SEQ ID NO: 469837 - DNA, 201 bp, Homo sapiens
ataggtgcccaccaccacacccagctaatttttgtatttttagtagagatggggtttcgccatgttggctaggctgctctcaaaatcctggccttaggtgrtccaccttccttggccttccagagtgctgggattacaggcaggagccatcgcgcccagactgaaactctatttaaatatagattttagccaatgatattc

SEQ ID NO: 469838 - DNA, 201 bp, Homo sapiens
gtgagtttaggaatcaaaatgaaagattgtaattaatactatccaaaatagaagactagtacggttaatttatgtagtcttttaaaattagttgctcatgstatgtgactgaaaaacacagagtatataaagccaattaaaaaatagagttatatatgcataaaacatgtttcttttcttctttgtactttatattctgta

SEQ ID NO: 469839 - DNA, 201 bp, Homo sapiens
acaatttaaaaaaaaatttattttattttagattcagggggtacacgtgcaggtttgttacatggctagattatgtaatgccgaggtttggcctgctagcrcagccatcatccaaagtgaccctagtacccaataggtagttttcaacctgtgtgcctcctcttctaccttctcttttggaatctctagtctattacttcc

SEQ ID NO: 469840 - DNA, 201 bp, Homo sapiens
  misc_feature (1)...(201): n = A,T,C or G
atttgattccttataaatttgtaaggaagatagagcttgtattatttcagtgaagttgaaaatagagtacagaaaaattaagatacagcacccccaaaacngagaacttctgacataatacactgttggaaatacttacttcagagtgaagaaaatattggaagttaggcttgttaattgctctgcatggttcataattac

SEQ ID NO: 469841 - DNA, 201 bp, Homo sapiens
tccaccttccttggccttccagagtgctgggattacaggcaggagccatcgcgcccagactgaaactctatttaaatatagattttagccaatgatattcygctttttttccaagggtataatgtcctcccattccagccagtttttggttatttacaggtaacttcaattagttagcttttacgttttcttcagatttga

SEQ ID NO: 469842 - DNA, 201 bp, Homo sapiens
taaaacatgtttcttttcttctttgtactttatattctgtataaaagttgctgctatcattagattttgttttttagaatacttaatgttttggacctaasgaaattgaataagatccctttcaagatagtaatgtatttcttttaacccatccaacaattaccgaattcccattttacagatgagtacgacttacataag

SEQ ID NO: 469843 - DNA, 201 bp, Homo sapiens
tatgttcacatgtactcattgtttagctcccacttacaaatgagaccatgtggtatttgattttctggttctgagttacttcttttaggatagaggatgaraaagagtgtagcctccagctccatccatgttgctgcgaaggacatgattccattcttttttatggctgtatatttttacctttttttgcgagggggagag

SEQ ID NO: 469844 - DNA, 201 bp, Homo sapiens
ataaatttgtaaggaagatagagcttgtattatttcagtgaagttgaaaatagagtacagaaaaattaagatacagcacccccaaaactgagaacttctgwcataatacactgttggaaatacttacttcagagtgaagaaaatattggaagttaggcttgttaattgctctgcatggttcataattactctttcttatta

SEQ ID NO: 469845 - DNA, 201 bp, Homo sapiens
ggtataatgtcctcccattccagccagtttttggttatttacaggtaacttcaattagttagcttttacgttttcttcagatttgagacattttaggaaasttactctgatattagtccctatgctgttacccaataaataaataaatttatgtgtgagagccattgttttgttaaggtatattttgcatacgctataatt

SEQ ID NO: 469846 - DNA, 201 bp, Homo sapiens
atttgaattcctgtttttaaaaattatgtatggttccttttgcacgatgacactgttttggacagtatagaatactgcagtctcattgagaaatacagcartatctagaaatatactagggatatgtgaattggctcagcttgcatttttattgtaggaggcaattgtttgtggataagtttgatacctttgaagcttctt

SEQ ID NO: 469847 - DNA, 201 bp, Homo sapiens
gctcccacttacaaatgagaccatgtggtatttgattttctggttctgagttacttcttttaggatagaggatgaaaaagagtgtagcctccagctccatmcatgttgctgcgaaggacatgattccattcttttttatggctgtatatttttacctttttttgcgagggggagaggatttaaatatggaccagcataatg

SEQ ID NO: 469848 - DNA, 201 bp, Homo sapiens
gcttgtattatttcagtgaagttgaaaatagagtacagaaaaattaagatacagcacccccaaaactgagaacttctgacataatacactgttggaaatayttacttcagagtgaagaaaatattggaagttaggcttgttaattgctctgcatggttcataattactctttcttattaactatttaaggaacatgagacc

SEQ ID NO: 469849 - DNA, 201 bp, Homo sapiens
attccagccagtttttggttatttacaggtaacttcaattagttagcttttacgttttcttcagatttgagacattttaggaaagttactctgatattagyccctatgctgttacccaataaataaataaatttatgtgtgagagccattgttttgttaaggtatattttgcatacgctataattcaccctttctaaggtg

SEQ ID NO: 469850 - DNA, 201 bp, Homo sapiens
atgtatggttccttttgcacgatgacactgttttggacagtatagaatactgcagtctcattgagaaatacagcagtatctagaaatatactagggatatrtgaattggctcagcttgcatttttattgtaggaggcaattgtttgtggataagtttgatacctttgaagcttctttttaagcttgctggggcaagtctag

SEQ ID NO: 469851 - DNA, 201 bp, Homo sapiens
atggctgtatatttttacctttttttgcgagggggagaggatttaaatatggaccagcataatgaagaaaatgtctgtaatcccactattcacataacccytgctagtttaaaaaaagttcgtgtaggccgagcatggtggctcacacctgtaatcccagcactttgggagtccaaggctggaggatcacttgagcttaag

SEQ ID NO: 469852 - DNA, 201 bp, Homo sapiens
aagaaaatattggaagttaggcttgttaattgctctgcatggttcataattactctttcttattaactatttaaggaacatgagaccaggaagttaaatamctgggtatatgcagatatatatctagaattggtaccaaagtaaatacaggcataccttggagatactgtaggttccattatagactaccacaataaagtg

SEQ ID NO: 469853 - DNA, 201 bp, Homo sapiens
acaggtaacttcaattagttagcttttacgttttcttcagatttgagacattttaggaaagttactctgatattagtccctatgctgttacccaataaatraataaatttatgtgtgagagccattgttttgttaaggtatattttgcatacgctataattcaccctttctaaggtgtgtattgaatgtgatttggtaaat

SEQ ID NO: 469854 - DNA, 201 bp, Homo sapiens
ttacctttttttgcgagggggagaggatttaaatatggaccagcataatgaagaaaatgtctgtaatcccactattcacataacccctgctagtttaaaamaagttcgtgtaggccgagcatggtggctcacacctgtaatcccagcactttgggagtccaaggctggaggatcacttgagcttaagagtttaagaccagc

SEQ ID NO: 469855 - DNA, 201 bp, Homo sapiens
ggaaagttactctgatattagtccctatgctgttacccaataaataaataaatttatgtgtgagagccattgttttgttaaggtatattttgcatacgctrtaattcaccctttctaaggtgtgtattgaatgtgatttggtaaatatgaacagtcatgtaattaccatcatagtcaagatacagaatagaccctttaccc

SEQ ID NO: 469856 - DNA, 201 bp, Homo sapiens
ggaccagcataatgaagaaaatgtctgtaatcccactattcacataacccctgctagtttaaaaaaagttcgtgtaggccgagcatggtggctcacacctrtaatcccagcactttgggagtccaaggctggaggatcacttgagcttaagagtttaagaccagcctgagtaacatagtgaaacctcatgtctacaaaaaa

SEQ ID NO: 469857 - DNA, 201 bp, Homo sapiens
agagttcgaggctgcagtaagctgtgattgtgccactgcactccaccaggtatttaaaaaaaaaaaaagtaaataattagaaaatttaaatagtgtaaacyagaggcctctcctatcagtttgctagagctaccataacaaaataccacaaactgagtgacgtaagtgacagtattttttttttttttttttttgagacgg

SEQ ID NO: 469858 - DNA, 201 bp, Homo sapiens
tcgaggctgcagtaagctgtgattgtgccactgcactccaccaggtatttaaaaaaaaaaaaagtaaataattagaaaatttaaatagtgtaaactagagkcctctcctatcagtttgctagagctaccataacaaaataccacaaactgagtgacgtaagtgacagtattttttttttttttttttttgagacggagtct

SEQ ID NO: 469859 - DNA, 201 bp, Homo sapiens
actgcactccaccaggtatttaaaaaaaaaaaaagtaaataattagaaaatttaaatagtgtaaactagaggcctctcctatcagtttgctagagctaccrtaacaaaataccacaaactgagtgacgtaagtgacagtattttttttttttttttttttgagacggagtctcactctgtcaccaggctgcacgatctctg

SEQ ID NO: 469860 - DNA, 201 bp, Homo sapiens
accaggtatttaaaaaaaaaaaaagtaaataattagaaaatttaaatagtgtaaactagaggcctctcctatcagtttgctagagctaccataacaaaatrccacaaactgagtgacgtaagtgacagtattttttttttttttttttttgagacggagtctcactctgtcaccaggctgcacgatctctgctcactgcag

SEQ ID NO: 469861 - DNA, 201 bp, Homo sapiens
ccctcttgtttggggcttatttctgtgcgttttaccacttgcaagataatggaggcaggttgaaatgggaaagataccagatgactaattttttttcgccmacatttccatcttttgttaagaaatttgaagttgattgctacattgaagtatgtagttttgtgtttttttctgtgagtctttaaccatttgtgtccctgt

SEQ ID NO: 469862 - DNA, 201 bp, Homo sapiens
tatttctgtgcgttttaccacttgcaagataatggaggcaggttgaaatgggaaagataccagatgactaattttttttcgcccacatttccatcttttgytaagaaatttgaagttgattgctacattgaagtatgtagttttgtgtttttttctgtgagtctttaaccatttgtgtccctgttaacttacaattgatga

SEQ ID NO: 469863 - DNA, 201 bp, Homo sapiens
taattttttttcgcccacatttccatcttttgttaagaaatttgaagttgattgctacattgaagtatgtagttttgtgtttttttctgtgagtctttaascatttgtgtccctgttaacttacaattgatgagtttattttgtatttatttttaggcagggtaaaaaatagtaatatgtctcataaataaaatatatgtt

SEQ ID NO: 469864 - DNA, 201 bp, Homo sapiens
tttttcgcccacatttccatcttttgttaagaaatttgaagttgattgctacattgaagtatgtagttttgtgtttttttctgtgagtctttaaccatttrtgtccctgttaacttacaattgatgagtttattttgtatttatttttaggcagggtaaaaaatagtaatatgtctcataaataaaatatatgttcctatt

SEQ ID NO: 469865 - DNA, 201 bp, Homo sapiens
gaagttaaatacctgggtatatgcagatatatatctagaattggtaccaaagtaaatacaggcataccttggagatactgtaggttccattatagactacyacaataaagtgagtatcaccataaagcaaggcacacaaatattttggtttaccagtgcatgtaaatattatgtttatattctactgcagtctattaaatg

SEQ ID NO: 469866 - DNA, 201 bp, Homo sapiens
gaagtatgtagttttgtgtttttttctgtgagtctttaaccatttgtgtccctgttaacttacaattgatgagtttattttgtatttatttttaggcaggrtaaaaaatagtaatatgtctcataaataaaatatatgttcctattactagttttggtgggatttaaaaactttataataatcctcaatatagaaacctgc

SEQ ID NO: 469867 - DNA, 201 bp, Homo sapiens
ctctttaaaattactggggactccatagtttttgtttatgaggattttaactatggactgttcagcattttagaaattaaaactaggaacattttataacrcaagactacagaagcacaacctgtacaatatcaatgtaatattatgatacaacatgtagcctctataaacaccactgtataattgtgaatgaattaaagt

SEQ ID NO: 469868 - DNA, 201 bp, Homo sapiens
tgggtatatgcagatatatatctagaattggtaccaaagtaaatacaggcataccttggagatactgtaggttccattatagactaccacaataaagtgartatcaccataaagcaaggcacacaaatattttggtttaccagtgcatgtaaatattatgtttatattctactgcagtctattaaatgttcagtagcgtta

SEQ ID NO: 469869 - DNA, 201 bp, Homo sapiens
cttacaattgatgagtttattttgtatttatttttaggcagggtaaaaaatagtaatatgtctcataaataaaatatatgttcctattactagttttggtrggatttaaaaactttataataatcctcaatatagaaacctgcccttttaaccatattactatttgctttaaaaaaaaatctttaggttttgtttcaaaaa

SEQ ID NO: 469870 - DNA, 201 bp, Homo sapiens
gtaatattatgatacaacatgtagcctctataaacaccactgtataattgtgaatgaattaaagtgaaaaaaggcaaattaaatcttagtattatttaaayttgttttaactttacagactcactggggttccctagaccacattttggtagctgcggtcctagcattaatttaaccctatacttaagacttggcctttct

SEQ ID NO: 469871 - DNA, 201 bp, Homo sapiens
ggtatatgcagatatatatctagaattggtaccaaagtaaatacaggcataccttggagatactgtaggttccattatagactaccacaataaagtgagtrtcaccataaagcaaggcacacaaatattttggtttaccagtgcatgtaaatattatgtttatattctactgcagtctattaaatgttcagtagcgttata

SEQ ID NO: 469872 - DNA, 201 bp, Homo sapiens
gttttgttaaggtatattttgcatacgctataattcaccctttctaaggtgtgtattgaatgtgatttggtaaatatgaacagtcatgtaattaccatcayagtcaagatacagaatagaccctttacccataaattcactcatgaccttttgaagttactgcctacctcccactccagctcctgccaatcaccgatctgt

SEQ ID NO: 469873 - DNA, 201 bp, Homo sapiens
tggtgggatttaaaaactttataataatcctcaatatagaaacctgcccttttaaccatattactatttgctttaaaaaaaaatctttaggttttgtttcwaaaatgcttcaaaatttatttttgaaaatataaggaatgaaattctaactttctaatttgaatggaaggatgagttggtagcacacgaagcgctaaattg

SEQ ID NO: 469874 - DNA, 201 bp, Homo sapiens
tcactggggttccctagaccacattttggtagctgcggtcctagcattaatttaaccctatacttaagacttggcctttctgggatcactactgaattctrctccctgttcaccagtgtctttgtactctgactggttgtgcttcacttgtctttgagccttttgcaagctgtggtaattgtgcagcttacaaattcccag

SEQ ID NO: 469875 - DNA, 201 bp, Homo sapiens
tgattttttgaatattgaacaagtgtagcattcctgggataaaccctacatggtgtggtatattactcttcttatgttcctgagtttgatttgctaatatrttcttgatgatttttgtgtttatgttcacttaggaaattggtctttagttttgcttctttgtactgtctttgcctgattttggctttaggataatgctga

SEQ ID NO: 469876 - DNA, 201 bp, Homo sapiens
ggtgtgtattgaatgtgatttggtaaatatgaacagtcatgtaattaccatcatagtcaagatacagaatagaccctttacccataaattcactcatgacyttttgaagttactgcctacctcccactccagctcctgccaatcaccgatctgttgctttcctatagttttgccttttctagactaatatatgaatggaac

SEQ ID NO: 469877 - DNA, 201 bp, Homo sapiens
taggttttgtttcaaaaatgcttcaaaatttatttttgaaaatataaggaatgaaattctaactttctaatttgaatggaaggatgagttggtagcacacraagcgctaaattgagtaatgtagattttattatttttaacgaatcctttgtttaatattttgcaggttcaatttgttttacttgtgatatacagagagtt

SEQ ID NO: 469878 - DNA, 201 bp, Homo sapiens
cactactgaattctgctccctgttcaccagtgtctttgtactctgactggttgtgcttcacttgtctttgagccttttgcaagctgtggtaattgtgcagyttacaaattcccagtagatgtactttcccctggttgtgggtctttgggcttctagaagtacggcttggtgttccaccaaagacttcaggggatcctttgt

SEQ ID NO: 469879 - DNA, 201 bp, Homo sapiens
atatatatctagaattggtaccaaagtaaatacaggcataccttggagatactgtaggttccattatagactaccacaataaagtgagtatcaccataaarcaaggcacacaaatattttggtttaccagtgcatgtaaatattatgtttatattctactgcagtctattaaatgttcagtagcgttatatttaaaaaacc

SEQ ID NO: 469880 - DNA, 201 bp, Homo sapiens
gggtgagttttggtagtttgtcatttcctatgaattggtccatttcatttaaagatatcaaacttatgtgtgtggagttgttcatactgctcttttattgkcttctttttttttttttgagacggagtctccctccgttgtccaggctggagtgcagttgtgtgatctcggctcactgcaagctctgcctccagggttcac

SEQ ID NO: 469881 - DNA, 201 bp, Homo sapiens
ccactccagctcctgccaatcaccgatctgttgctttcctatagttttgccttttctagactaatatatgaatggaaccatacagtatagaatcttttctrtctgcctttttttacttagcataatggttttgagattggtccattcactagcttacagttaagtttcgttcaatttttggccagtatataaagctgctgt

SEQ ID NO: 469882 - DNA, 201 bp, Homo sapiens
tgaaaatataaggaatgaaattctaactttctaatttgaatggaaggatgagttggtagcacacgaagcgctaaattgagtaatgtagattttattatttytaacgaatcctttgtttaatattttgcaggttcaatttgttttacttgtgatatacagagagttttttataccttcccagcttatatttgaatattcctt

SEQ ID NO: 469883 - DNA, 201 bp, Homo sapiens
tgaattctgctccctgttcaccagtgtctttgtactctgactggttgtgcttcacttgtctttgagccttttgcaagctgtggtaattgtgcagcttacamattcccagtagatgtactttcccctggttgtgggtctttgggcttctagaagtacggcttggtgttccaccaaagacttcaggggatcctttgtagattt

SEQ ID NO: 469884 - DNA, 201 bp, Homo sapiens
caaagtaaatacaggcataccttggagatactgtaggttccattatagactaccacaataaagtgagtatcaccataaagcaaggcacacaaatattttgrtttaccagtgcatgtaaatattatgtttatattctactgcagtctattaaatgttcagtagcgttatatttaaaaaaccaatgtgcatactttaatttaa

SEQ ID NO: 469885 - DNA, 201 bp, Homo sapiens
cctgccaatcaccgatctgttgctttcctatagttttgccttttctagactaatatatgaatggaaccatacagtatagaatcttttctgtctgccttttyttacttagcataatggttttgagattggtccattcactagcttacagttaagtttcgttcaatttttggccagtatataaagctgctgtgagcatttatg

SEQ ID NO: 469886 - DNA, 201 bp, Homo sapiens
aatataaggaatgaaattctaactttctaatttgaatggaaggatgagttggtagcacacgaagcgctaaattgagtaatgtagattttattatttttaaygaatcctttgtttaatattttgcaggttcaatttgttttacttgtgatatacagagagttttttataccttcccagcttatatttgaatattccttttca

SEQ ID NO: 469887 - DNA, 201 bp, Homo sapiens
gaagtacggcttggtgttccaccaaagacttcaggggatcctttgtagatttctggagctcttagtcgttattgcttcttcattttgagtactgtgtcctrcaaattccactgccttgccttccctaacctcagcgaggccattgattgtactctgctgaggttctccctccctgggcagcattctggaaaatgtttctag

SEQ ID NO: 469888 - DNA, 201 bp, Homo sapiens
caggcataccttggagatactgtaggttccattatagactaccacaataaagtgagtatcaccataaagcaaggcacacaaatattttggtttaccagtgyatgtaaatattatgtttatattctactgcagtctattaaatgttcagtagcgttatatttaaaaaaccaatgtgcatactttaatttaaaaatactttat

SEQ ID NO: 469889 - DNA, 201 bp, Homo sapiens
gccaatcaccgatctgttgctttcctatagttttgccttttctagactaatatatgaatggaaccatacagtatagaatcttttctgtctgcctttttttrcttagcataatggttttgagattggtccattcactagcttacagttaagtttcgttcaatttttggccagtatataaagctgctgtgagcatttatgtaa

SEQ ID NO: 469890 - DNA, 201 bp, Homo sapiens
tccaccaaagacttcaggggatcctttgtagatttctggagctcttagtcgttattgcttcttcattttgagtactgtgtcctgcaaattccactgccttrccttccctaacctcagcgaggccattgattgtactctgctgaggttctccctccctgggcagcattctggaaaatgtttctaggcagaatatcataggac

SEQ ID NO: 469891 - DNA, 201 bp, Homo sapiens
tgagtatcaccataaagcaaggcacacaaatattttggtttaccagtgcatgtaaatattatgtttatattctactgcagtctattaaatgttcagtagcrttatatttaaaaaaccaatgtgcatactttaatttaaaaatactttattgctaaaaaatgctactgatcatctgagctttcagtaaattgtaagattttt

SEQ ID NO: 469892 - DNA, 201 bp, Homo sapiens
tctgttgctttcctatagttttgccttttctagactaatatatgaatggaaccatacagtatagaatcttttctgtctgcctttttttacttagcataatsgttttgagattggtccattcactagcttacagttaagtttcgttcaatttttggccagtatataaagctgctgtgagcatttatgtaacatgcttcgttg

SEQ ID NO: 469893 - DNA, 201 bp, Homo sapiens
tcttagtcgttattgcttcttcattttgagtactgtgtcctgcaaattccactgccttgccttccctaacctcagcgaggccattgattgtactctgctgmggttctccctccctgggcagcattctggaaaatgtttctaggcagaatatcataggactccctgagtgtttccttcctctcagagaccactgtctcctgt

SEQ ID NO: 469894 - DNA, 201 bp, Homo sapiens
agcaaggcacacaaatattttggtttaccagtgcatgtaaatattatgtttatattctactgcagtctattaaatgttcagtagcgttatatttaaaaaamcaatgtgcatactttaatttaaaaatactttattgctaaaaaatgctactgatcatctgagctttcagtaaattgtaagattttttgctgatagaggatg

SEQ ID NO: 469895 - DNA, 201 bp, Homo sapiens
taatggttttgagattggtccattcactagcttacagttaagtttcgttcaatttttggccagtatataaagctgctgtgagcatttatgtaacatgcttygttgtggatgtatcttttcatgtttcttgggtaaatacctaggactggaatttctgacttgttggaaatatattcttaactttggaaaacagtttcacag

SEQ ID NO: 469896 - DNA, 201 bp, Homo sapiens
cattttgagtactgtgtcctgcaaattccactgccttgccttccctaacctcagcgaggccattgattgtactctgctgaggttctccctccctgggcagsattctggaaaatgtttctaggcagaatatcataggactccctgagtgtttccttcctctcagagaccactgtctcctgtactatgtgttgtccaatatct

SEQ ID NO: 469897 - DNA, 201 bp, Homo sapiens
gtaaatattatgtttatattctactgcagtctattaaatgttcagtagcgttatatttaaaaaaccaatgtgcatactttaatttaaaaatactttattgytaaaaaatgctactgatcatctgagctttcagtaaattgtaagattttttgctgatagaggatgttggtggctgctgactgatcccagcagtgattgctg

SEQ ID NO: 469898 - DNA, 201 bp, Homo sapiens
aagtttcgttcaatttttggccagtatataaagctgctgtgagcatttatgtaacatgcttcgttgtggatgtatcttttcatgtttcttgggtaaatacytaggactggaatttctgacttgttggaaatatattcttaactttggaaaacagtttcacagtttcttaagtgtctgtatacttctccatttctagagatc

SEQ ID NO: 469899 - DNA, 201 bp, Homo sapiens
gaggttctccctccctgggcagcattctggaaaatgtttctaggcagaatatcataggactccctgagtgtttccttcctctcagagaccactgtctcctktactatgtgttgtccaatatctgaaaacagttgtatcatacactttgtcccattttctactatcttatgggagaacaggctggtcccacctactccatta

SEQ ID NO: 469900 - DNA, 201 bp, Homo sapiens
tctactgcagtctattaaatgttcagtagcgttatatttaaaaaaccaatgtgcatactttaatttaaaaatactttattgctaaaaaatgctactgatcwtctgagctttcagtaaattgtaagattttttgctgatagaggatgttggtggctgctgactgatcccagcagtgattgctgaaggttggggtgcctctgg

SEQ ID NO: 469901 - DNA, 201 bp, Homo sapiens
atttctgacttgttggaaatatattcttaactttggaaaacagtttcacagtttcttaagtgtctgtatacttctccatttctagagatctgagagttccwtttgctgtacattgttgccagcactggatattgccactgtttctaaattttagccatctggttggcatttagtgataatttattgtgggtttgattttgc

SEQ ID NO: 469902 - DNA, 201 bp, Homo sapiens
cttaactttggaaaacagtttcacagtttcttaagtgtctgtatacttctccatttctagagatctgagagttccatttgctgtacattgttgccagcacwggatattgccactgtttctaaattttagccatctggttggcatttagtgataatttattgtgggtttgattttgcattccctgatgattaattagattga

SEQ ID NO: 469903 - DNA, 201 bp, Homo sapiens
tttgtcagaacttaaatactgaggaagaagtggaaaatgtagcagacattggttttgattgtagcatgtgcagaccctatatgcctgcgtctaatggtaavagaataatttaaactgtgagtctgcactcttgtaccactcacttgcaccttactgtccataaccaatgaattagcttagctctactctattttgtctttg

SEQ ID NO: 469904 - DNA, 201 bp, Homo sapiens
tagtgccaattgagaatgtgacaacttctaatacagcttggtgccaactgctttcagttttggaaatgcatcaacagttttacccaccatagcttttgcaycgtgtaacaatttttgcttcaattgttaaacattattttgaaaactcaaggaacagtaaagtctgttttattgcccatatttttactatttgtttgttct

SEQ ID NO: 469905 - DNA, 201 bp, Homo sapiens
aattgttaaacattattttgaaaactcaaggaacagtaaagtctgttttattgcccatatttttactatttgtttgttctttcttccttcaggatgttctragaatccttctttttatcattctcctttctggttcaataacttttctcactattcttttggtgtagttttgtctcatgactaatttttagttctcattca

SEQ ID NO: 469906 - DNA, 201 bp, Homo sapiens
tggtagcacacgaagcgctaaattgagtaatgtagattttattatttttaacgaatcctttgtttaatattttgcaggttcaatttgttttacttgtgatrtacagagagttttttataccttcccagcttatatttgaatattccttttcaaggttttataaagagatttctctcctttacccctttcagcgatgtgcat

SEQ ID NO: 469907 - DNA, 201 bp, Homo sapiens
aatattttgcaggttcaatttgttttacttgtgatatacagagagttttttataccttcccagcttatatttgaatattccttttcaaggttttataaagmgatttctctcctttacccctttcagcgatgtgcattttgtaagcaccttggagccactatcaaatgctgtgaagagaaatgtacccagatgtatcattat

SEQ ID NO: 469908 - DNA, 201 bp, Homo sapiens
cttgtgatatacagagagttttttataccttcccagcttatatttgaatattccttttcaaggttttataaagagatttctctcctttacccctttcagcratgtgcattttgtaagcaccttggagccactatcaaatgctgtgaagagaaatgtacccagatgtatcattatccttgtgctgcaggagccggcaccttt

SEQ ID NO: 469909 - DNA, 201 bp, Homo sapiens
tataaaaatggaatcatgttatatttatttttctccgtcttccttttctctgtaataatcagaggtccctctcgatcaactgacgtagcttcatttcattmttttgaatggttacctgatgttccatagtgttgatgaactgcagttaaaccattgcattactgatgagtgtgtatttgatttataatttttctcataaca

SEQ ID NO: 469910 - DNA, 201 bp, Homo sapiens
atatacagagagttttttataccttcccagcttatatttgaatattccttttcaaggttttataaagagatttctctcctttacccctttcagcgatgtgmattttgtaagcaccttggagccactatcaaatgctgtgaagagaaatgtacccagatgtatcattatccttgtgctgcaggagccggcacctttcaggat

SEQ ID NO: 469911 - DNA, 201 bp, Homo sapiens
gtagcgttatatttaaaaaaccaatgtgcatactttaatttaaaaatactttattgctaaaaaatgctactgatcatctgagctttcagtaaattgtaagrttttttgctgatagaggatgttggtggctgctgactgatcccagcagtgattgctgaaggttggggtgcctctggtagtttcttacaataagacaacaat

SEQ ID NO: 469912 - DNA, 201 bp, Homo sapiens
tttcagcgatgtgcattttgtaagcaccttggagccactatcaaatgctgtgaagagaaatgtacccagatgtatcattatccttgtgctgcaggagccgrcacctttcaggatttcagtcacatcttcctgctttgtccagaacacattgaccaagctcctgaaagatgtaagtttactacggatagacttttaaacttc

SEQ ID NO: 469913 - DNA, 201 bp, Homo sapiens
gtttctaggcagaatatcataggactccctgagtgtttccttcctctcagagaccactgtctcctgtactatgtgttgtccaatatctgaaaacagttgtwtcatacactttgtcccattttctactatcttatgggagaacaggctggtcccacctactccattatagttgaagcgtgtatccgtattagattataaaac

SEQ ID NO: 469914 - DNA, 201 bp, Homo sapiens
ttaaaaatactttattgctaaaaaatgctactgatcatctgagctttcagtaaattgtaagattttttgctgatagaggatgttggtggctgctgactgawcccagcagtgattgctgaaggttggggtgcctctggtagtttcttacaataagacaacaatgaagtttgctacattgattgcctgtttctttcatgaaag

SEQ ID NO: 469915 - DNA, 201 bp, Homo sapiens
tcagcgatgtgcattttgtaagcaccttggagccactatcaaatgctgtgaagagaaatgtacccagatgtatcattatccttgtgctgcaggagccggcwcctttcaggatttcagtcacatcttcctgctttgtccagaacacattgaccaagctcctgaaagatgtaagtttactacggatagacttttaaacttcaa

SEQ ID NO: 469916 - DNA, 201 bp, Homo sapiens
gttttgccctactggatgttaagaattaaatctttcttttctagattgagcttccaagaaacactttttaaatctaaaaattttaatgtaaagaaataatrtgcttgcatttaaaaatcaagtatacatttttaatacctctttttatggttaattccttttgttgtgattactactgtttttatgagggagaagtccttg

SEQ ID NO: 469917 - DNA, 201 bp, Homo sapiens
ctaggcagaatatcataggactccctgagtgtttccttcctctcagagaccactgtctcctgtactatgtgttgtccaatatctgaaaacagttgtatcayacactttgtcccattttctactatcttatgggagaacaggctggtcccacctactccattatagttgaagcgtgtatccgtattagattataaaacatat

SEQ ID NO: 469918 - DNA, 201 bp, Homo sapiens
gatattgccactgtttctaaattttagccatctggttggcatttagtgataatttattgtgggtttgattttgcattccctgatgattaattagattgagyctctttttatgtctttttttgccatttgtgtatctttggtgacatgtctgttattttgtctctaccatttttttccaattgatttacttgtcatcttctt

SEQ ID NO: 469919 - DNA, 201 bp, Homo sapiens
ccttgtgctgcaggagccggcacctttcaggatttcagtcacatcttcctgctttgtccagaacacattgaccaagctcctgaaagatgtaagtttactayggatagacttttaaacttcaaccaatgtatttactgaaaataacaaatgttgtaaattccctgagtgttattctacttgtattaaaaggtaataatacat

SEQ ID NO: 469920 - DNA, 201 bp, Homo sapiens
cactgtctcctgtactatgtgttgtccaatatctgaaaacagttgtatcatacactttgtcccattttctactatcttatgggagaacaggctggtcccayctactccattatagttgaagcgtgtatccgtattagattataaaacatatctgtaacaactttggacatggtaccatggatggaatcctggatgacatct

SEQ ID NO: 469921 - DNA, 201 bp, Homo sapiens
aatactttattgctaaaaaatgctactgatcatctgagctttcagtaaattgtaagattttttgctgatagaggatgttggtggctgctgactgatcccarcagtgattgctgaaggttggggtgcctctggtagtttcttacaataagacaacaatgaagtttgctacattgattgcctgtttctttcatgaaagatttc

SEQ ID NO: 469922 - DNA, 201 bp, Homo sapiens
atattgccactgtttctaaattttagccatctggttggcatttagtgataatttattgtgggtttgattttgcattccctgatgattaattagattgagcytctttttatgtctttttttgccatttgtgtatctttggtgacatgtctgttattttgtctctaccatttttttccaattgatttacttgtcatcttcttg

SEQ ID NO: 469923 - DNA, 201 bp, Homo sapiens
ttgtgctgcaggagccggcacctttcaggatttcagtcacatcttcctgctttgtccagaacacattgaccaagctcctgaaagatgtaagtttactacgsatagacttttaaacttcaaccaatgtatttactgaaaataacaaatgttgtaaattccctgagtgttattctacttgtattaaaaggtaataatacataa

SEQ ID NO: 469924 - DNA, 201 bp, Homo sapiens
actgtctcctgtactatgtgttgtccaatatctgaaaacagttgtatcatacactttgtcccattttctactatcttatgggagaacaggctggtcccacmtactccattatagttgaagcgtgtatccgtattagattataaaacatatctgtaacaactttggacatggtaccatggatggaatcctggatgacatctt

SEQ ID NO: 469925 - DNA, 201 bp, Homo sapiens
aaaaaatgctactgatcatctgagctttcagtaaattgtaagattttttgctgatagaggatgttggtggctgctgactgatcccagcagtgattgctgawggttggggtgcctctggtagtttcttacaataagacaacaatgaagtttgctacattgattgcctgtttctttcatgaaagatttctctgtagcacgtga

SEQ ID NO: 469926 - DNA, 201 bp, Homo sapiens
ggttggcatttagtgataatttattgtgggtttgattttgcattccctgatgattaattagattgagcctctttttatgtctttttttgccatttgtgtawctttggtgacatgtctgttattttgtctctaccatttttttccaattgatttacttgtcatcttcttgagttgtaagagtttttttatatattattcaca

SEQ ID NO: 469927 - DNA, 201 bp, Homo sapiens
ggatttcagtcacatcttcctgctttgtccagaacacattgaccaagctcctgaaagatgtaagtttactacggatagacttttaaacttcaaccaatgtrtttactgaaaataacaaatgttgtaaattccctgagtgttattctacttgtattaaaaggtaataatacataatctttaaaatctgagggatcgttgcca

SEQ ID NO: 469928 - DNA, 201 bp, Homo sapiens
actatgtgttgtccaatatctgaaaacagttgtatcatacactttgtcccattttctactatcttatgggagaacaggctggtcccacctactccattatmgttgaagcgtgtatccgtattagattataaaacatatctgtaacaactttggacatggtaccatggatggaatcctggatgacatcttatttgaaaaaac

SEQ ID NO: 469929 - DNA, 201 bp, Homo sapiens
gactgatcccagcagtgattgctgaaggttggggtgcctctggtagtttcttacaataagacaacaatgaagtttgctacattgattgcctgtttctttcrtgaaagatttctctgtagcacgtgatgctgtttgatagcattttttacccaaaagtagaacttttttcaaaattggagtcagctcaaacactgctttaac

SEQ ID NO: 469930 - DNA, 201 bp, Homo sapiens
ccctgatgattaattagattgagcctctttttatgtctttttttgccatttgtgtatctttggtgacatgtctgttattttgtctctaccatttttttccrattgatttacttgtcatcttcttgagttgtaagagtttttttatatattattcacagaagtcagttttggagatgcattttataaatatttttgcctaat

SEQ ID NO: 469931 - DNA, 201 bp, Homo sapiens
ctgctttgtccagaacacattgaccaagctcctgaaagatgtaagtttactacggatagacttttaaacttcaaccaatgtatttactgaaaataacaaawgttgtaaattccctgagtgttattctacttgtattaaaaggtaataatacataatctttaaaatctgagggatcgttgccagggatcgctggggagggaa

SEQ ID NO: 469932 - DNA, 201 bp, Homo sapiens
ctatgtgttgtccaatatctgaaaacagttgtatcatacactttgtcccattttctactatcttatgggagaacaggctggtcccacctactccattatarttgaagcgtgtatccgtattagattataaaacatatctgtaacaactttggacatggtaccatggatggaatcctggatgacatcttatttgaaaaaact

SEQ ID NO: 469933 - DNA, 201 bp, Homo sapiens
ctacattgattgcctgtttctttcatgaaagatttctctgtagcacgtgatgctgtttgatagcattttttacccaaaagtagaacttttttcaaaattgkagtcagctcaaacactgctttaacaactaaggttatatagtattctgaatcctttgttgttattcaacaatttcacagcctcttcaccaggagtagattc

SEQ ID NO: 469934 - DNA, 201 bp, Homo sapiens
tatgtctttttttgccatttgtgtatctttggtgacatgtctgttattttgtctctaccatttttttccaattgatttacttgtcatcttcttgagttgtragagtttttttatatattattcacagaagtcagttttggagatgcattttataaatatttttgcctaatgtgtgacttgttttcatttatttagcaatgt

SEQ ID NO: 469935 - DNA, 201 bp, Homo sapiens
tgtccaatatctgaaaacagttgtatcatacactttgtcccattttctactatcttatgggagaacaggctggtcccacctactccattatagttgaagcrtgtatccgtattagattataaaacatatctgtaacaactttggacatggtaccatggatggaatcctggatgacatcttatttgaaaaaacttttaaaac

SEQ ID NO: 469936 - DNA, 201 bp, Homo sapiens
tcagtttactttgcccaaatctactacaggaatcacttttttttttttttttttttgagacggagtctcgctttgtcgccctggctggagtgcagtggtgygatcttggtttagtgcaacctctgcctcctggttcaagcgattctcctgactcagctcccccgagtatctgggactacaggtgtgtgccaccacgcccgg

SEQ ID NO: 469937 - DNA, 201 bp, Homo sapiens
gtctttttttgccatttgtgtatctttggtgacatgtctgttattttgtctctaccatttttttccaattgatttacttgtcatcttcttgagttgtaagwgtttttttatatattattcacagaagtcagttttggagatgcattttataaatatttttgcctaatgtgtgacttgttttcatttatttagcaatgttta

SEQ ID NO: 469938 - DNA, 201 bp, Homo sapiens
tatctgaaaacagttgtatcatacactttgtcccattttctactatcttatgggagaacaggctggtcccacctactccattatagttgaagcgtgtatcmgtattagattataaaacatatctgtaacaactttggacatggtaccatggatggaatcctggatgacatcttatttgaaaaaacttttaaaactaaggct

SEQ ID NO: 469939 - DNA, 201 bp, Homo sapiens
ctacaggtgtgtgccaccacgcccggcttatttttgtatttttagtagaaatagggttttgccatgttggccagggtcttcttgaactcctggcttcaagwgatccgcctgccttggcatcccagagtgctgggattacaggcatgagccaccgtacctggccgaaatgtatttcttaaacagtaagacttaaaaattgaa

SEQ ID NO: 469940 - DNA, 201 bp, Homo sapiens
ttgccatttgtgtatctttggtgacatgtctgttattttgtctctaccatttttttccaattgatttacttgtcatcttcttgagttgtaagagttttttwatatattattcacagaagtcagttttggagatgcattttataaatatttttgcctaatgtgtgacttgttttcatttatttagcaatgtttattgaacag

SEQ ID NO: 469941 - DNA, 201 bp, Homo sapiens
aaaacatatctgtaacaactttggacatggtaccatggatggaatcctggatgacatcttatttgaaaaaacttttaaaactaaggctagactggttcaayggaagaaaaaaatgatagtacaaccccagtacctaggttaaaaggaaatttcaaagagggagaaattgttgaagtgttgaagtactagaagtcaagaaac

SEQ ID NO: 469942 - DNA, 201 bp, Homo sapiens
ggtcttcttgaactcctggcttcaagtgatccgcctgccttggcatcccagagtgctgggattacaggcatgagccaccgtacctggccgaaatgtatttsttaaacagtaagacttaaaaattgaaattactcattgatacgtgggctgcaggatagatgtatcgtactggcaggcatgaaagtaacattcttctttctg

SEQ ID NO: 469943 - DNA, 201 bp, Homo sapiens
tctctaccatttttttccaattgatttacttgtcatcttcttgagttgtaagagtttttttatatattattcacagaagtcagttttggagatgcattttwtaaatatttttgcctaatgtgtgacttgttttcatttatttagcaatgtttattgaacagcagagggtttaattttgatgacattggtcatttgttaatt

SEQ ID NO: 469944 - DNA, 201 bp, Homo sapiens
taaaactaaggctagactggttcaacggaagaaaaaaatgatagtacaaccccagtacctaggttaaaaggaaatttcaaagagggagaaattgttgaagygttgaagtactagaagtcaagaaacacaaacactaatgtttccattagatttgagaataagaaggtcttgacaagcctggcttaagcagttatgagtgga

SEQ ID NO: 469945 - DNA, 201 bp, Homo sapiens
cttcttgaactcctggcttcaagtgatccgcctgccttggcatcccagagtgctgggattacaggcatgagccaccgtacctggccgaaatgtatttcttraacagtaagacttaaaaattgaaattactcattgatacgtgggctgcaggatagatgtatcgtactggcaggcatgaaagtaacattcttctttctgaac

SEQ ID NO: 469946 - DNA, 201 bp, Homo sapiens
atttgagataagattcatgtttctttgttttccatacggattatttagcagttccagcatcattctaaaagactatttattgctctcttggattatcttgrccccttggtcaaaaattaattgaatatggaaaagtgagtctatttctgtattttctgtttttctgacttatttgtctctccttttaccaaaaccaaacat

SEQ ID NO: 469947 - DNA, 201 bp, Homo sapiens
atttattgctctcttggattatcttggccccttggtcaaaaattaattgaatatggaaaagtgagtctatttctgtattttctgtttttctgacttatttrtctctccttttaccaaaaccaaacataaagattttttttcaaaatcatgagttgatatttatgttttcagtttaattcaatagcacaattacatatcttt

SEQ ID NO: 469948 - DNA, 201 bp, Homo sapiens
cacctagagtgtgacaaaccaacagatcatgaactggatactcagctcaaagaagagtatatctgcatgtattgtaaacacctgggagctgagatggatcstttacagccaggtgaggaagtggagatagctgagctcactacaggtaaatttgagaatgatttttttttaaattttttgtttttgtaatgttgtgccatt

SEQ ID NO: 469949 - DNA, 201 bp, Homo sapiens
ctcaagagtagtgaagtcagagtgcttgttttggaaattttacattaaagtgtatatgtcatcaaattttgaacagtttaatgcataatagtattttcccyagcctgaacattcttagagactggattaagacaatgatatttcagtgaaaaccatctgttttatgaattacttcataaaagtaatttttattttgggcta

SEQ ID NO: 469950 - DNA, 201 bp, Homo sapiens
cccattatgttcgtatgtagcttcctgaattacagtaactgagtaactaagaaaataaaattgagacttttcggggggatttggatttcaggtgtgtttgrtgcagacactgtggagcaacatctgcaggtctaagatgtgaatggcagaacaattacacacagtgcgctccttgtgcaagcttatcttcctgtccagtct

SEQ ID NO: 469951 - DNA, 201 bp, Homo sapiens
cctgcgtctaatggtaagagaataatttaaactgtgagtctgcactcttgtaccactcacttgcaccttactgtccataaccaatgaattagcttagctcyactctattttgtctttgtgaaacttactttgacaagtattttatgaaaaatattatttttggttatacatgacttatcacaacttgttataaaacaattt

SEQ ID NO: 469952 - DNA, 201 bp, Homo sapiens
cacattgaccaagctcctgaaagatgtaagtttactacggatagacttttaaacttcaaccaatgtatttactgaaaataacaaatgttgtaaattccctkagtgttattctacttgtattaaaaggtaataatacataatctttaaaatctgagggatcgttgccagggatcgctggggagggaaatgttatcagtggtt

SEQ ID NO: 469953 - DNA, 201 bp, Homo sapiens
caagctcctgaaagatgtaagtttactacggatagacttttaaacttcaaccaatgtatttactgaaaataacaaatgttgtaaattccctgagtgttatkctacttgtattaaaaggtaataatacataatctttaaaatctgagggatcgttgccagggatcgctggggagggaaatgttatcagtggtttcattgaaa

SEQ ID NO: 469954 - DNA, 201 bp, Homo sapiens
agacttttaaacttcaaccaatgtatttactgaaaataacaaatgttgtaaattccctgagtgttattctacttgtattaaaaggtaataatacataatcwttaaaatctgagggatcgttgccagggatcgctggggagggaaatgttatcagtggtttcattgaaattaaatccaaaaagttatttcctcagaaaaatc

SEQ ID NO: 469955 - DNA, 201 bp, Homo sapiens
caatgtatttactgaaaataacaaatgttgtaaattccctgagtgttattctacttgtattaaaaggtaataatacataatctttaaaatctgagggatcrttgccagggatcgctggggagggaaatgttatcagtggtttcattgaaattaaatccaaaaagttatttcctcagaaaaatcaaataaagtttgcatggt

SEQ ID NO: 469956 - DNA, 201 bp, Homo sapiens
tgaactcctggcttcaagtgatccgcctgccttggcatcccagagtgctgggattacaggcatgagccaccgtacctggccgaaatgtatttcttaaacartaagacttaaaaattgaaattactcattgatacgtgggctgcaggatagatgtatcgtactggcaggcatgaaagtaacattcttctttctgaacatatc

SEQ ID NO: 469957 - DNA, 201 bp, Homo sapiens
ataacaaatgttgtaaattccctgagtgttattctacttgtattaaaaggtaataatacataatctttaaaatctgagggatcgttgccagggatcgctgsggagggaaatgttatcagtggtttcattgaaattaaatccaaaaagttatttcctcagaaaaatcaaataaagtttgcatggtttttattcttaaaacat

SEQ ID NO: 469958 - DNA, 201 bp, Homo sapiens
aaggaaatttcaaagagggagaaattgttgaagtgttgaagtactagaagtcaagaaacacaaacactaatgtttccattagatttgagaataagaaggtmttgacaagcctggcttaagcagttatgagtggatgtgggtgtagagaccagactgtagtgttttgaagagtgaatataagctgagaaacttgagagtttg

SEQ ID NO: 469959 - DNA, 201 bp, Homo sapiens
tcatatctatgatctatataactattcttattttatatattttgttatactggaacagctcgtgcccttggtctcttgcctcggcacctgggtggcttgcygcccacagaaattcatttatgtttcgtatataccttatacacatagcctgaaggtaattttatagaatatttaagtaattttatgcttgaaacaaagttt

SEQ ID NO: 469960 - DNA, 201 bp, Homo sapiens
gaatataagctgagaaacttgagagtttggttataaaagggaccacaggtatctgtgaagaaaacttagtaggaatgaagataaatatttttaaaattctrccactgaacacctcagatctgtctgccactttatcttcaggtcattgtttaagccagggtcacgcagactggcccatagactaaatctggcccatttcct

SEQ ID NO: 469961 - DNA, 201 bp, Homo sapiens
ttgaaattactcattgatacgtgggctgcaggatagatgtatcgtactggcaggcatgaaagtaacattcttctttctgaacatatccatcaaagccctckaatgacctggtccattgttagtgagtgctaatattttgaaaggaatgttttttccttagcagtaggtcttgacagtggactgaaaatattcagtaagcca

SEQ ID NO: 469962 - DNA, 201 bp, Homo sapiens
aagtgagtctatttctgtattttctgtttttctgacttatttgtctctccttttaccaaaaccaaacataaagattttttttcaaaatcatgagttgatakttatgttttcagtttaattcaatagcacaattacatatctttaaaacagttttatacctgtagctaagctatagttgtatattttcttttaatatcatct

SEQ ID NO: 469963 - DNA, 201 bp, Homo sapiens
tcatctatcttagtcttctgtaatctgcagttgtgctgtttttcttttccaaatagtattttataattcaatgaaaatgtttaaatgcgtgaaatttacawtatacaggaaattataactctttactattgtatcattaaatagagatctctcctttttcttactatgtgttttccctatgagcatatatgttttgggatc

SEQ ID NO: 469964 - DNA, 201 bp, Homo sapiens
caggtatctgtgaagaaaacttagtaggaatgaagataaatatttttaaaattctgccactgaacacctcagatctgtctgccactttatcttcaggtcaytgtttaagccagggtcacgcagactggcccatagactaaatctggcccatttcctgtgtttgcaaataaacttttattgaaatatggccatgttcttttg

SEQ ID NO: 469965 - DNA, 201 bp, Homo sapiens
acagtggactgaaaatattcagtaagccaacctctaaacagatgtgctgtcatccaggagactgttgttccatatgtagacagcaagcagattagatatarcataattcttaagagctctaggactttttgagtggcaaatgagcattagcttcaacgtcaagttaccagctgcattagcccctaacaagagagtcagttt

SEQ ID NO: 469966 - DNA, 201 bp, Homo sapiens
gtctatttctgtattttctgtttttctgacttatttgtctctccttttaccaaaaccaaacataaagattttttttcaaaatcatgagttgatatttatgktttcagtttaattcaatagcacaattacatatctttaaaacagttttatacctgtagctaagctatagttgtatattttcttttaatatcatctttccta

SEQ ID NO: 469967 - DNA, 201 bp, Homo sapiens
cagttgtgctgtttttcttttccaaatagtattttataattcaatgaaaatgtttaaatgcgtgaaatttacattatacaggaaattataactctttactrttgtatcattaaatagagatctctcctttttcttactatgtgttttccctatgagcatatatgttttgggatcttttttctcctagtctattgaatttcc

SEQ ID NO: 469968 - DNA, 201 bp, Homo sapiens
cagactggcccatagactaaatctggcccatttcctgtgtttgcaaataaacttttattgaaatatggccatgttcttttgtttacatatatttgtagcgstttttgcattacactggcagagtttttataaagttgcaacagatcatatggccctcaaaactttctgtttactctctggccctttattggaaatgtttgc

SEQ ID NO: 469969 - DNA, 201 bp, Homo sapiens
tgctgtcatccaggagactgttgttccatatgtagacagcaagcagattagatatagcataattcttaagagctctaggactttttgagtggcaaatgagyattagcttcaacgtcaagttaccagctgcattagcccctaacaagagagtcagtttttatttatttatttattatttatttattatttttaaaagagaca

SEQ ID NO: 469970 - DNA, 201 bp, Homo sapiens
tttctgacttatttgtctctccttttaccaaaaccaaacataaagattttttttcaaaatcatgagttgatatttatgttttcagtttaattcaatagcamaattacatatctttaaaacagttttatacctgtagctaagctatagttgtatattttcttttaatatcatctttcctataactgaaaaagtcattaaaag

SEQ ID NO: 469971 - DNA, 201 bp, Homo sapiens
ttcaatgaaaatgtttaaatgcgtgaaatttacattatacaggaaattataactctttactattgtatcattaaatagagatctctcctttttcttactakgtgttttccctatgagcatatatgttttgggatcttttttctcctagtctattgaatttccaatctcattatgaaacctccatgatattttattcaatct

SEQ ID NO: 469972 - DNA, 201 bp, Homo sapiens
catttcctgtgtttgcaaataaacttttattgaaatatggccatgttcttttgtttacatatatttgtagcggtttttgcattacactggcagagtttttrtaaagttgcaacagatcatatggccctcaaaactttctgtttactctctggccctttattggaaatgtttgctggctactgccataagccaccctgatct

SEQ ID NO: 469973 - DNA, 201 bp, Homo sapiens
ggagactgttgttccatatgtagacagcaagcagattagatatagcataattcttaagagctctaggactttttgagtggcaaatgagcattagcttcaaygtcaagttaccagctgcattagcccctaacaagagagtcagtttttatttatttatttattatttatttattatttttaaaagagacaagagtctcgcct

SEQ ID NO: 469974 - DNA, 201 bp, Homo sapiens
attttttttcaaaatcatgagttgatatttatgttttcagtttaattcaatagcacaattacatatctttaaaacagttttatacctgtagctaagctatrgttgtatattttcttttaatatcatctttcctataactgaaaaagtcattaaaagaagaaaagattattgtttttgtttcaatttcaaagtaatcaaaac

SEQ ID NO: 469975 - DNA, 201 bp, Homo sapiens
ttacattatacaggaaattataactctttactattgtatcattaaatagagatctctcctttttcttactatgtgttttccctatgagcatatatgttttrggatcttttttctcctagtctattgaatttccaatctcattatgaaacctccatgatattttattcaatcttttttatgtcacctcttagttacctaatg

SEQ ID NO: 469976 - DNA, 201 bp, Homo sapiens
gagctgagatcacaccactgcactccagcctaggcaacagagcagagcaagactccatctcaaaaaaaaaaaaaaaaaaaaaaaaaaggccttgtaatgarcaaccaactcttgtcttactctacctccacgtctgaggcagtcgcttttaatcttttcaggtctttttttcttgtggttaatgctatagctctaaataat

SEQ ID NO: 469977 - DNA, 201 bp, Homo sapiens
ttaagagctctaggactttttgagtggcaaatgagcattagcttcaacgtcaagttaccagctgcattagcccctaacaagagagtcagtttttatttatktatttattatttatttattatttttaaaagagacaagagtctcgccttgttgcccaggctggccttgaactcctgggctcaagcgattctcctaccttgg

SEQ ID NO: 469978 - DNA, 201 bp, Homo sapiens
aaaatcatgagttgatatttatgttttcagtttaattcaatagcacaattacatatctttaaaacagttttatacctgtagctaagctatagttgtatatyttcttttaatatcatctttcctataactgaaaaagtcattaaaagaagaaaagattattgtttttgtttcaatttcaaagtaatcaaaactaagtgtact

SEQ ID NO: 469979 - DNA, 201 bp, Homo sapiens
cagcctaggcaacagagcagagcaagactccatctcaaaaaaaaaaaaaaaaaaaaaaaaaaggccttgtaatgaacaaccaactcttgtcttactctacstccacgtctgaggcagtcgcttttaatcttttcaggtctttttttcttgtggttaatgctatagctctaaataatcaactggtttactgctttatcaatg

SEQ ID NO: 469980 - DNA, 201 bp, Homo sapiens
ctttttgagtggcaaatgagcattagcttcaacgtcaagttaccagctgcattagcccctaacaagagagtcagtttttatttatttatttattatttatktattatttttaaaagagacaagagtctcgccttgttgcccaggctggccttgaactcctgggctcaagcgattctcctaccttggcctctcaaagtgctg

SEQ ID NO: 469981 - DNA, 201 bp, Homo sapiens
ttcatctcttggtcatttctccagtcttttctgtgatttccgcttgcacccccatgattctaatgagcatgataatttggggatgttaccagtatcttcayttacaggctgagaatttttgttgtaaccagcaagaattatgcccaactgccatgatcagtctgtttttattatttagtttgataagaaataaacgtcagt

SEQ ID NO: 469982 - DNA, 201 bp, Homo sapiens
ttgatatttatgttttcagtttaattcaatagcacaattacatatctttaaaacagttttatacctgtagctaagctatagttgtatattttcttttaatrtcatctttcctataactgaaaaagtcattaaaagaagaaaagattattgtttttgtttcaatttcaaagtaatcaaaactaagtgtactagtattaaata

SEQ ID NO: 469983 - DNA, 201 bp, Homo sapiens
tgttcactgcaggtctaaacagtatactatgagtttcttttgtctttcatggagttttttataacaagaaagtaatagtgactctccattcgttctttgtktttgcctactctagaactatcatataagattagtttttaaagtactgtttttttctgggagaagtcctaccctccttctagacattcccttctcctgctc

SEQ ID NO: 469984 - DNA, 201 bp, Homo sapiens
tttgagtggcaaatgagcattagcttcaacgtcaagttaccagctgcattagcccctaacaagagagtcagtttttatttatttatttattatttatttaktatttttaaaagagacaagagtctcgccttgttgcccaggctggccttgaactcctgggctcaagcgattctcctaccttggcctctcaaagtgctggga

SEQ ID NO: 469985 - DNA, 201 bp, Homo sapiens
ttttcagtttaattcaatagcacaattacatatctttaaaacagttttatacctgtagctaagctatagttgtatattttcttttaatatcatctttcctrtaactgaaaaagtcattaaaagaagaaaagattattgtttttgtttcaatttcaaagtaatcaaaactaagtgtactagtattaaatagttaaagctagt

SEQ ID NO: 469986 - DNA, 201 bp, Homo sapiens
actagaaaccttagtgtccccacatgaggaaagtatttcattatgtcctgaggaacagttggttatagaaaggctacaaggagaaaaggaacagaaagaarattctgaactttctactggattgatggactctgaaatgactcctacaattgagggttgtgtgaaagatgtttcataccaaggaggcaaatctataaagtt

SEQ ID NO: 469987 - DNA, 201 bp, Homo sapiens
tttcttttgtctttcatggagttttttataacaagaaagtaatagtgactctccattcgttctttgtttttgcctactctagaactatcatataagattaktttttaaagtactgtttttttctgggagaagtcctaccctccttctagacattcccttctcctgctctgatatgtgccagtggcttctaggtatgttgtt

SEQ ID NO: 469988 - DNA, 201 bp, Homo sapiens
aatgagcattagcttcaacgtcaagttaccagctgcattagcccctaacaagagagtcagtttttatttatttatttattatttatttattatttttaaargagacaagagtctcgccttgttgcccaggctggccttgaactcctgggctcaagcgattctcctaccttggcctctcaaagtgctgggataacaggtgtg

SEQ ID NO: 469989 - DNA, 201 bp, Homo sapiens
ttttatacctgtagctaagctatagttgtatattttcttttaatatcatctttcctataactgaaaaagtcattaaaagaagaaaagattattgtttttgyttcaatttcaaagtaatcaaaactaagtgtactagtattaaatagttaaagctagtagatcaataaggaaatttaatgttattgcttttttctatctttt

SEQ ID NO: 469990 - DNA, 201 bp, Homo sapiens
tctgaaatgactcctacaattgagggttgtgtgaaagatgtttcataccaaggaggcaaatctataaagttatcatctgagacagagtcatcattttcatyatcagcagacataagcaaggcagatgtgtcttcctccccaacaccttcttcagacttgccttcgcatgacatgctgcataattacccttcagctcttagt

SEQ ID NO: 469991 - DNA, 201 bp, Homo sapiens
tagtgactctccattcgttctttgtttttgcctactctagaactatcatataagattagtttttaaagtactgtttttttctgggagaagtcctaccctcyttctagacattcccttctcctgctctgatatgtgccagtggcttctaggtatgttgttctcatccttaaacttcctggcctgatgtcctttgttggatct

SEQ ID NO: 469992 - DNA, 201 bp, Homo sapiens
caacgtcaagttaccagctgcattagcccctaacaagagagtcagtttttatttatttatttattatttatttattatttttaaaagagacaagagtctcrccttgttgcccaggctggccttgaactcctgggctcaagcgattctcctaccttggcctctcaaagtgctgggataacaggtgtggccccagcctgacct

SEQ ID NO: 469993 - DNA, 201 bp, Homo sapiens
ttgtttttgtttcaatttcaaagtaatcaaaactaagtgtactagtattaaatagttaaagctagtagatcaataaggaaatttaatgttattgctttttkctatctttttttgagtttactagtgatgtaaaagatttgagttatttgctgtgattatataaatactcttttgatgcataattcagcagttaacatcatg

SEQ ID NO: 469994 - DNA, 201 bp, Homo sapiens
ccacgactgagctgctagtggtggaagtgacaagaagtagaaggattggagacaaaacttgaagataaaaagtcttgaatttgctgatgatttgcattgaygaagtgttgggggagaggactgaaggagcaaaggagagtgacaagggactggatgccatttataaggatggggaagactgggatgaaaccggttaaggga

SEQ ID NO: 469995 - DNA, 201 bp, Homo sapiens
ttgtttcaatttcaaagtaatcaaaactaagtgtactagtattaaatagttaaagctagtagatcaataaggaaatttaatgttattgcttttttctatcmttttttgagtttactagtgatgtaaaagatttgagttatttgctgtgattatataaatactcttttgatgcataattcagcagttaacatcatgttaatt

SEQ ID NO: 469996 - DNA, 201 bp, Homo sapiens
tattccattacctatctcttaccccaagagtagtcacattcttatttctggttattttaattcctggtggtatttttatgtgattaatgagatagtacttkttaatttgatgatattctagaaacctggtaagtactatgtaccttgtcttaagttttggttacttaattggtaaaattatagcatgcaccattgaattac

SEQ ID NO: 469997 - DNA, 201 bp, Homo sapiens
gtcttgtttttctttaaaatgttatctttgtggagtaaacatttttctttatgctgtttagcatcttcatcagattagttcagggtattgctgaatgtggktgtttggaagtaaaatgctttagttttagttatatagattttaataagatactactttctatataatttatcaggtactttaggcattttaatttgcaaa

SEQ ID NO: 469998 - DNA, 201 bp, Homo sapiens
aaatttaggacaatttgctttaacgtttcttcacttttgtccattggatgtaatttccataaagtattcatttccctaagtaaaaaccaaaaccaaaccgrcaactaatggtcactgaagaaagagtgattaaatgcttagattataatggtatttgcattttaatgttaccagctctctacagtttaacgtgtatgcatt

SEQ ID NO: 469999 - DNA, 201 bp, Homo sapiens
taatggtcactgaagaaagagtgattaaatgcttagattataatggtatttgcattttaatgttaccagctctctacagtttaacgtgtatgcatttatckattgcttatgtttctccttgcattctttggcctactggttttggttgtttatagctatagaatatagaattccttatggttatccatttctccttttaag

SEQ ID NO: 470000 - DNA, 201 bp, Homo sapiens
agtgaaagcgttcactggttaaatttccttttaaaaataataatggatctttacaatttctttgagctgctcagtgggtataatgtgttgaattttctgtwagtggttgggaggtagaaatagatactttatctctattttagccatttccataattatatatctcaatagtcttgtcaatgcatcattagttctatgact

SEQ ID NO: 470001 - DNA, 201 bp, Homo sapiens
cgactccattttacggtagtatcttagcattaatatttggaattgttattctagaccttagccaaaatatatgttttgattatgaattttctgaagctttycagttaagtgtaaaacaagtgaaaaatataacttcgtattctgtgtattttgctttttataggtgtctactgcagatatttcatcaaataaggatgatga

SEQ ID NO: 470002 - DNA, 201 bp, Homo sapiens
caaactccgcctcctgggttcacgccattctcctgcctcagcctccctcccgagtagctgggactacaggtgcctgccaccatgcccggctaattttttgyagttttaatagagatggggtttcaccgtgttagctaggatggtctcgatctcctaacctcgtgatctgcccgcctcggcctcccaaagtgctgggattac

SEQ ID NO: 470003 - DNA, 201 bp, Homo sapiens
ggtgaatcctttccagaaggttttcagtttactttgcccaaatctactacaggaatcacttttttttttttttttttttgagacggagtctcgctttgtcrccctggctggagtgcagtggtgcgatcttggtttagtgcaacctctgcctcctggttcaagcgattctcctgactcagctcccccgagtatctgggacta

SEQ ID NO: 470004 - DNA, 201 bp, Homo sapiens
tgtcagttttatttgccttattggaaaaaattattaaaattgtcacaatacagaagttgtaggcttttatgtatttatttaaaaaatttttttcccgcttwtcacacgtgttgagtaggctttccttaggcagtttattaatatcttgtttaccaatgaggttttaaattggatttgtacaatctttatgcttcttattgc

SEQ ID NO: 470005 - DNA, 201 bp, Homo sapiens
aattataactctttactattgtatcattaaatagagatctctcctttttcttactatgtgttttccctatgagcatatatgttttgggatcttttttctcytagtctattgaatttccaatctcattatgaaacctccatgatattttattcaatcttttttatgtcacctcttagttacctaatgttagcttttatctgt

SEQ ID NO: 470006 - DNA, 201 bp, Homo sapiens
atagagatctctcctttttcttactatgtgttttccctatgagcatatatgttttgggatcttttttctcctagtctattgaatttccaatctcattatgraacctccatgatattttattcaatcttttttatgtcacctcttagttacctaatgttagcttttatctgttccttagcaatgttaataaaagcttttttc

SEQ ID NO: 470007 - DNA, 201 bp, Homo sapiens
tcctttttcttactatgtgttttccctatgagcatatatgttttgggatcttttttctcctagtctattgaatttccaatctcattatgaaacctccatgwtattttattcaatcttttttatgtcacctcttagttacctaatgttagcttttatctgttccttagcaatgttaataaaagcttttttcctatcttctcc

SEQ ID NO: 470008 - DNA, 201 bp, Homo sapiens
tatgttttgggatcttttttctcctagtctattgaatttccaatctcattatgaaacctccatgatattttattcaatcttttttatgtcacctcttagtyacctaatgttagcttttatctgttccttagcaatgttaataaaagcttttttcctatcttctccaggtctgtgaaacgtaagtatagctaccccaggctt

SEQ ID NO: 470009 - DNA, 201 bp, Homo sapiens
cttagttacctaatgttagcttttatctgttccttagcaatgttaataaaagcttttttcctatcttctccaggtctgtgaaacgtaagtatagctacccyaggcttaaactaatctcaaatacagttagtctacatgatcattacccttttctttgttgagtaccataatttcattttccattaaaattattttgtgtcc

SEQ ID NO: 470010 - DNA, 201 bp, Homo sapiens
aagattagtttttaaagtactgtttttttctgggagaagtcctaccctccttctagacattcccttctcctgctctgatatgtgccagtggcttctaggtrtgttgttctcatccttaaacttcctggcctgatgtcctttgttggatctgttgatttatagatcccaagtcttcctattctttataatacatcctcattc

SEQ ID NO: 470011 - DNA, 201 bp, Homo sapiens
tcaagttaccagctgcattagcccctaacaagagagtcagtttttatttatttatttattatttatttattatttttaaaagagacaagagtctcgccttkttgcccaggctggccttgaactcctgggctcaagcgattctcctaccttggcctctcaaagtgctgggataacaggtgtggccccagcctgacctttgaa

SEQ ID NO: 470012 - DNA, 201 bp, Homo sapiens
tatctgttccttagcaatgttaataaaagcttttttcctatcttctccaggtctgtgaaacgtaagtatagctaccccaggcttaaactaatctcaaatayagttagtctacatgatcattacccttttctttgttgagtaccataatttcattttccattaaaattattttgtgtccacatatgtaatcatatcaccatt

SEQ ID NO: 470013 - DNA, 201 bp, Homo sapiens
accctccttctagacattcccttctcctgctctgatatgtgccagtggcttctaggtatgttgttctcatccttaaacttcctggcctgatgtcctttgtyggatctgttgatttatagatcccaagtcttcctattctttataatacatcctcattctgttccgcatatctctaagtaactttattagaaaggagaatga

SEQ ID NO: 470014 - DNA, 201 bp, Homo sapiens
tatttatttatttattatttatttattatttttaaaagagacaagagtctcgccttgttgcccaggctggccttgaactcctgggctcaagcgattctccyaccttggcctctcaaagtgctgggataacaggtgtggccccagcctgacctttgaagcaaggcattgattttccctctctagctgtgaaagtcctagatg

SEQ ID NO: 470015 - DNA, 201 bp, Homo sapiens
gttattgcttttttctatctttttttgagtttactagtgatgtaaaagatttgagttatttgctgtgattatataaatactcttttgatgcataattcagsagttaacatcatgttaatttgtggcattagtaattttactgatagcccttctgtgattctgatttttggtagtggtttttacctggtaagtagcatttta

SEQ ID NO: 470016 - DNA, 201 bp, Homo sapiens
cttctccaggtctgtgaaacgtaagtatagctaccccaggcttaaactaatctcaaatacagttagtctacatgatcattacccttttctttgttgagtamcataatttcattttccattaaaattattttgtgtccacatatgtaatcatatcaccattagtaacctagtgtacaaattataggtaaggcaaactagaat

SEQ ID NO: 470017 - DNA, 201 bp, Homo sapiens
ccctccttctagacattcccttctcctgctctgatatgtgccagtggcttctaggtatgttgttctcatccttaaacttcctggcctgatgtcctttgttrgatctgttgatttatagatcccaagtcttcctattctttataatacatcctcattctgttccgcatatctctaagtaactttattagaaaggagaatgag

SEQ ID NO: 470018 - DNA, 201 bp, Homo sapiens
gagtctcgccttgttgcccaggctggccttgaactcctgggctcaagcgattctcctaccttggcctctcaaagtgctgggataacaggtgtggccccagmctgacctttgaagcaaggcattgattttccctctctagctgtgaaagtcctagatggcatcttcttctaatggaaggctcttttgtctacataaaacacc

SEQ ID NO: 470019 - DNA, 201 bp, Homo sapiens
gggagaggactgaaggagcaaaggagagtgacaagggactggatgccatttataaggatggggaagactgggatgaaaccggttaagggagaaattttaamcatggcaaacttaagaggggttttgtgtgagaaaatggaaatgctaagaaggaagttgaaaatcctgctaatttggagatctttgattaaaactagaaat

SEQ ID NO: 470020 - DNA, 201 bp, Homo sapiens
ttgagtttactagtgatgtaaaagatttgagttatttgctgtgattatataaatactcttttgatgcataattcagcagttaacatcatgttaatttgtgrcattagtaattttactgatagcccttctgtgattctgatttttggtagtggtttttacctggtaagtagcattttatcagttggcaggtactggaaatct

SEQ ID NO: 470021 - DNA, 201 bp, Homo sapiens
gagtaccataatttcattttccattaaaattattttgtgtccacatatgtaatcatatcaccattagtaacctagtgtacaaattataggtaaggcaaacyagaattttaaattatatttaggctaataagggatttaaagttttaaaatgcgttagattgtacactcttcaatctggaagagaagaacttcatgcactgc

SEQ ID NO: 470022 - DNA, 201 bp, Homo sapiens
atatgtgccagtggcttctaggtatgttgttctcatccttaaacttcctggcctgatgtcctttgttggatctgttgatttatagatcccaagtcttcctwttctttataatacatcctcattctgttccgcatatctctaagtaactttattagaaaggagaatgagggagctgaattttgagtcttcctgtgtctacaa

SEQ ID NO: 470023 - DNA, 201 bp, Homo sapiens
ctgtgaaagtcctagatggcatcttcttctaatggaaggctcttttgtctacataaaacaccttgtttagtatagccacctccagcaatgatcttagttakatattctagataacttgctacagcttccatgtcagcacttgctgcttcactttccacttttatgttatgacgagagcatttttcctcatgaaccaatctc

SEQ ID NO: 470024 - DNA, 201 bp, Homo sapiens
ttataaggatggggaagactgggatgaaaccggttaagggagaaattttaaacatggcaaacttaagaggggttttgtgtgagaaaatggaaatgctaagraggaagttgaaaatcctgctaatttggagatctttgattaaaactagaaataagaatatgggaagcatcaacttccaagatgccctcattgtagataata

SEQ ID NO: 470025 - DNA, 201 bp, Homo sapiens
gagtttactagtgatgtaaaagatttgagttatttgctgtgattatataaatactcttttgatgcataattcagcagttaacatcatgttaatttgtggcmttagtaattttactgatagcccttctgtgattctgatttttggtagtggtttttacctggtaagtagcattttatcagttggcaggtactggaaatctgc

SEQ ID NO: 470026 - DNA, 201 bp, Homo sapiens
gtaccataatttcattttccattaaaattattttgtgtccacatatgtaatcatatcaccattagtaacctagtgtacaaattataggtaaggcaaactaraattttaaattatatttaggctaataagggatttaaagttttaaaatgcgttagattgtacactcttcaatctggaagagaagaacttcatgcactgcaa

SEQ ID NO: 470027 - DNA, 201 bp, Homo sapiens
ggatctgttgatttatagatcccaagtcttcctattctttataatacatcctcattctgttccgcatatctctaagtaactttattagaaaggagaatgarggagctgaattttgagtcttcctgtgtctacaacgtgttctgtcttcacacatagttgcttgtgtagctaggttgagaattgtactttgaaaagtatttt

SEQ ID NO: 470028 - DNA, 201 bp, Homo sapiens
gatattctagataacttgctacagcttccatgtcagcacttgctgcttcactttccacttttatgttatgacgagagcatttttcctcatgaaccaatctytacttgcttccagtttttcttctgcagttttctcacctctctcagccttcatagaattgaagaaggttagagccttgctgtggattaggctttttgctta

SEQ ID NO: 470029 - DNA, 201 bp, Homo sapiens
gatttgagttatttgctgtgattatataaatactcttttgatgcataattcagcagttaacatcatgttaatttgtggcattagtaattttactgatagcycttctgtgattctgatttttggtagtggtttttacctggtaagtagcattttatcagttggcaggtactggaaatctgctttatcacttcttttttaaga

SEQ ID NO: 470030 - DNA, 201 bp, Homo sapiens
cttcatgcactgcaactgttacggctactatttatgtactgagttacttcagcaagtgcataaactggcagttatcagagtggattatattctgggtggcmtaataaatatactttgtcatctcaataaaacaattttgtgtgtatataggaatctgaattttattcagccttttgtagttaatcatgctttagacctcag

SEQ ID NO: 470031 - DNA, 201 bp, Homo sapiens
ttctttataatacatcctcattctgttccgcatatctctaagtaactttattagaaaggagaatgagggagctgaattttgagtcttcctgtgtctacaaygtgttctgtcttcacacatagttgcttgtgtagctaggttgagaattgtactttgaaaagtattttcctgtagaattggaaacttatactcttctagcat

SEQ ID NO: 470032 - DNA, 201 bp, Homo sapiens
ttatgttatgacgagagcatttttcctcatgaaccaatctctacttgcttccagtttttcttctgcagttttctcacctctctcagccttcatagaattgwagaaggttagagccttgctgtggattaggctttttgcttaagggaatgttatggctggtttaatcttccatatggaccactaaaactttcttcatattag

SEQ ID NO: 470033 - DNA, 201 bp, Homo sapiens
atataaatactcttttgatgcataattcagcagttaacatcatgttaatttgtggcattagtaattttactgatagcccttctgtgattctgatttttggyagtggtttttacctggtaagtagcattttatcagttggcaggtactggaaatctgctttatcacttcttttttaagaaaagtggaaaacacaaacagttt

SEQ ID NO: 470034 - DNA, 201 bp, Homo sapiens
tcttcctgtgtctacaacgtgttctgtcttcacacatagttgcttgtgtagctaggttgagaattgtactttgaaaagtattttcctgtagaattggaaamttatactcttctagcatctggagttgggaagtttggtgccattctgatgggtgttcctttgaatttaactcttttattttcttctctggtagcttttagg

SEQ ID NO: 470035 - DNA, 201 bp, Homo sapiens
aggtggggtttccagtgagctgagatcatgccactgcactccagcctgggtgacagagcgagactccatctcaaaaaaaataaaatgaaatgaaaaaattaaaaaaaaaaatcactcagccaatctgtgtcttctggagtattaaatttatttccatttaaaataattattgataggcaaggagatgctatcgccattttg

SEQ ID NO: 470036 - DNA, 201 bp, Homo sapiens
tgttaatttgtggcattagtaattttactgatagcccttctgtgattctgatttttggtagtggtttttacctggtaagtagcattttatcagttggcagktactggaaatctgctttatcacttcttttttaagaaaagtggaaaacacaaacagtttgttcaccaaagttatgtttcaaggattccattcaaccagaat

SEQ ID NO: 470037 - DNA, 201 bp, Homo sapiens
tgtagaattggaaacttatactcttctagcatctggagttgggaagtttggtgccattctgatgggtgttcctttgaatttaactcttttattttcttctstggtagcttttaggctttcatgtacctcatgatctgaatttttattctgtaccctcattacttgctgttttattataatgtgggcacttgattggttctg

SEQ ID NO: 470038 - DNA, 201 bp, Homo sapiens
atgctatcgccattttgtcaatttttctgactcttgtaagtttgtttgtttcagtcttcctctcttgctgtcttcctttgtgatttgatgatttttttgayagtgatatgcgttggttcttttctggtttatgtatctactacagccttttttttgtggttaccatgaagcttacataaaacatcttatagtgttaatagt

SEQ ID NO: 470039 - DNA, 201 bp, Homo sapiens
tactgcagatatttcatcaaataaggatgatgaagaaaactctatgcacaatacagttgtgttgttttctagcagtgacaagttcactttgaatcaggttygaacttgacaatttactgtcttcctcattgaattcctccttgcacatttctgctttatctcatatacacagaagtcattcaatatttagctatagagcta

SEQ ID NO: 470040 - DNA, 201 bp, Homo sapiens
tagagctatattagttaagaaggtatttttaaagtaaaatttgtaggtttttagcttagtctccatttaaaatatgttctgttttcttaacttcaggataygtgtgtagtttgtggcagttttggccaaggagcagaaggaagattacttgcctgttctcagtgtggtcagtgttaccatccatactgtgtcagtattaag

SEQ ID NO: 470041 - DNA, 201 bp, Homo sapiens
tttggtagtggtttttacctggtaagtagcattttatcagttggcaggtactggaaatctgctttatcacttcttttttaagaaaagtggaaaacacaaasagtttgttcaccaaagttatgtttcaaggattccattcaaccagaatctggttcaccttattgactcaccttgggggtatatgtactagatttttacata

SEQ ID NO: 470042 - DNA, 201 bp, Homo sapiens
taactcttttattttcttctctggtagcttttaggctttcatgtacctcatgatctgaatttttattctgtaccctcattacttgctgttttattataatrtgggcacttgattggttctgtctgaggatcctagtcttttgagatctttaagaagttccacaatcttaatattacatggtgtggcttccttcaggagttt

SEQ ID NO: 470043 - DNA, 201 bp, Homo sapiens
attttgtcaatttttctgactcttgtaagtttgtttgtttcagtcttcctctcttgctgtcttcctttgtgatttgatgatttttttgatagtgatatgcrttggttcttttctggtttatgtatctactacagccttttttttgtggttaccatgaagcttacataaaacatcttatagtgttaatagtctattttaagc

SEQ ID NO: 470044 - DNA, 201 bp, Homo sapiens
gtagcattttatcagttggcaggtactggaaatctgctttatcacttcttttttaagaaaagtggaaaacacaaacagtttgttcaccaaagttatgtttsaaggattccattcaaccagaatctggttcaccttattgactcaccttgggggtatatgtactagatttttacatacatctgtttggagaaactcgtttta

SEQ ID NO: 470045 - DNA, 201 bp, Homo sapiens
acagaggagtgaatgtgaacttcagaattcctagcttcatagtctaaatagaaatcctctaagatcataaaatgtccctaagaactcatgccttacattawtttttttggtattttttctattgattctaagcatggaaatgtagatggagattttgttgatgtattttcaaattatgtatcaataatagggaagcttact

SEQ ID NO: 470046 - DNA, 201 bp, Homo sapiens
atttttatacctttctcccctgcccttcaaacatcactgtattatatcattgtcagtaaaatgtcagtatagtaagcaaatcaacattatctccttcagamttctttgttgataactacactagtatttattttatagggtaatacaggtttttgtgagtttaggaatcaaaatgaaagattgtaattaatactatccaaa

SEQ ID NO: 470047 - DNA, 201 bp, Homo sapiens
gttggcaggtactggaaatctgctttatcacttcttttttaagaaaagtggaaaacacaaacagtttgttcaccaaagttatgtttcaaggattccattcraccagaatctggttcaccttattgactcaccttgggggtatatgtactagatttttacatacatctgtttggagaaactcgttttatctgtgtaatgttt

SEQ ID NO: 470048 - DNA, 201 bp, Homo sapiens
ccaaagacttcaggggatcctttgtagatttctggagctcttagtcgttattgcttcttcattttgagtactgtgtcctgcaaattccactgccttgcctyccctaacctcagcgaggccattgattgtactctgctgaggttctccctccctgggcagcattctggaaaatgtttctaggcagaatatcataggactccc

SEQ ID NO: 470049 - DNA, 201 bp, Homo sapiens
catacatctgtttggagaaactcgttttatctgtgtaatgtttgtaagaccagaagttcttttactgttcttgaaataaaacttttaagaagctgagtatwcttctgttagtttcaaatttggactaaaattacacccaggttttggactaaagagaaagcaaataatctgttctcatgttcttaaaagacatgatttaag

SEQ ID NO: 470050 - DNA, 201 bp, Homo sapiens
agtgaatataagctgagaaacttgagagtttggttataaaagggaccacaggtatctgtgaagaaaacttagtaggaatgaagataaatatttttaaaatkctgccactgaacacctcagatctgtctgccactttatcttcaggtcattgtttaagccagggtcacgcagactggcccatagactaaatctggcccattt

SEQ ID NO: 470051 - DNA, 201 bp, Homo sapiens
tactcttctagcatctggagttgggaagtttggtgccattctgatgggtgttcctttgaatttaactcttttattttcttctctggtagcttttaggcttycatgtacctcatgatctgaatttttattctgtaccctcattacttgctgttttattataatgtgggcacttgattggttctgtctgaggatcctagtctt

SEQ ID NO: 470052 - DNA, 201 bp, Homo sapiens
ctcttctagcatctggagttgggaagtttggtgccattctgatgggtgttcctttgaatttaactcttttattttcttctctggtagcttttaggctttcwtgtacctcatgatctgaatttttattctgtaccctcattacttgctgttttattataatgtgggcacttgattggttctgtctgaggatcctagtctttt

SEQ ID NO: 470053 - DNA, 201 bp, Homo sapiens
tttttattctgtaccctcattacttgctgttttattataatgtgggcacttgattggttctgtctgaggatcctagtcttttgagatctttaagaagttcyacaatcttaatattacatggtgtggcttccttcaggagtttattagggatttggagattcccaaatattctactaacttatacccttgagagaggggaga

SEQ ID NO: 470054 - DNA, 201 bp, Homo sapiens
tggtatattcagtgatgcagttctgaacttgtatatggcatgatgtatttttatcttacagaataaatcaattgtatatatttttctcttgataaatagcygtatgaaatttgtttcctgaatatttttcttctcttgtacaatatcctgacatcctaccagtatttgtcctaccgggtttttgttgttttctgttctgta

SEQ ID NO: 470055 - DNA, 201 bp, Homo sapiens
gattgtgtgctcacgctggcgatcagtgtgtgcttaaccaagtgcccacatcgccacattcttcagcagttcaggtgtgggttgttgtcttcaaaatgccragtgccaagcttgctgtttgtctccgtgctctcagaggtgactctggtccggcggctcacccattgggattatttttggccttaattgctgcatttgctt

SEQ ID NO: 470056 - DNA, 201 bp, Homo sapiens
cttgtttcccatttgtagctggtgttactatttttttgtttagttggtctgataaatatagactgatgttaccttaattgaataggcagcttttcatgtcsgccatttggatttgctttcataggaattgcgtattcatatcctttgtccatttttcaatttttagcagtttacactattcagaattttcccctacaaaat

SEQ ID NO: 470057 - DNA, 201 bp, Homo sapiens
gtttcttttacagatcactaaagtggttcttagcaaaggttggaggtgtcttgagtgcactgtgtgtgaggcctgtgggaaggcaactgacccaggaagaytcctgctgtgtgatgactgtgacataagttatcacacctactgcctagaccctccattgcagacagttcccaaaggaggctggaagtgcaaatggtactc

SEQ ID NO: 470058 - DNA, 201 bp, Homo sapiens
aaggcaactgacccaggaagactcctgctgtgtgatgactgtgacataagttatcacacctactgcctagaccctccattgcagacagttcccaaaggagrctggaagtgcaaatggtactctagggtttgtttgccttgttagtctttcaagttcagagctttctcataccactttggtttttaaaaattagccacacct

SEQ ID NO: 470059 - DNA, 201 bp, Homo sapiens
atgcactgcaactgttacggctactatttatgtactgagttacttcagcaagtgcataaactggcagttatcagagtggattatattctgggtggcataayaaatatactttgtcatctcaataaaacaattttgtgtgtatataggaatctgaattttattcagccttttgtagttaatcatgctttagacctcagcaaa

SEQ ID NO: 470060 - DNA, 201 bp, Homo sapiens
gcttcatcttatgccactgttggcatttcatgtctacttttgtgtatactcaaatactcatcactttcattgatcagtagtaaagtttgctgaggagtcartttgattagtagtcaagagcctgatcttagaatccaaatagacctggaatttactcctctgcccttttaaattatctttagttatagcctgtctttgctt

SEQ ID NO: 470061 - DNA, 201 bp, Homo sapiens
ttcagcaagtgcataaactggcagttatcagagtggattatattctgggtggcataataaatatactttgtcatctcaataaaacaattttgtgtgtatakaggaatctgaattttattcagccttttgtagttaatcatgctttagacctcagcaaacaacatgcaaacttttacaagaatgttgttgtagtgttagaat

SEQ ID NO: 470062 - DNA, 201 bp, Homo sapiens
tctgaattttattcagccttttgtagttaatcatgctttagacctcagcaaacaacatgcaaacttttacaagaatgttgttgtagtgttagaatattttwttacttaatggcagtgctactttctactgaaaactgtgttctaacagtgtataccttcagttacatgttagcaatcataaatcagtttgtaaaataataa

SEQ ID NO: 470063 - DNA, 201 bp, Homo sapiens
gtataccttcagttacatgttagcaatcataaatcagtttgtaaaataataaatactgaggtgagataatatgctgttgttgatcatgtatataatgaaargtttatggcaacataaagctaaaagatacactaaaattatgagtactctgcctttttccaaaatagacttatggagactcataaaaatacatgagcaata

SEQ ID NO: 470064 - DNA, 201 bp, Homo sapiens
tgagtactctgcctttttccaaaatagacttatggagactcataaaaatacatgagcaataggataaaactaaagtaaggaaatttggcaatggaaaattkagataggataaatatgaaggtaatagagagaccccccccaaaaatatataactccagacgtaaccacaaatttggccccataccttttcagcagtcaata

SEQ ID NO: 470065 - DNA, 201 bp, Homo sapiens
ctttttccaaaatagacttatggagactcataaaaatacatgagcaataggataaaactaaagtaaggaaatttggcaatggaaaatttagataggataartatgaaggtaatagagagaccccccccaaaaatatataactccagacgtaaccacaaatttggccccataccttttcagcagtcaatacaaagaaggaaa

SEQ ID NO: 470066 - DNA, 201 bp, Homo sapiens
tagacttatggagactcataaaaatacatgagcaataggataaaactaaagtaaggaaatttggcaatggaaaatttagataggataaatatgaaggtaayagagagaccccccccaaaaatatataactccagacgtaaccacaaatttggccccataccttttcagcagtcaatacaaagaaggaaatatgagccctta

SEQ ID NO: 470067 - DNA, 201 bp, Homo sapiens
tccatttgtgccagagggctcttagtcagctgccctttattcttgttgttatcaactccattataagtcacagctgccagttttctgcttctgtagttctyatagtggacattattagtaacatctttcaagtcctgagtgtgtgtttttatcagcatatttcttagaattgtaaaatcacaatgttcaccattttcaact

SEQ ID NO: 470068 - DNA, 201 bp, Homo sapiens
aaatatataactccagacgtaaccacaaatttggccccataccttttcagcagtcaatacaaagaaggaaatatgagcccttaatctgattcttactattyataacaagacgtcacttgatataatgatataataataacaagacatcacttgatacaatgcaatgaaaaattatcttaaagtagccaccttgcagtagaa

SEQ ID NO: 470069 - DNA, 201 bp, Homo sapiens
ttcttactatttataacaagacgtcacttgatataatgatataataataacaagacatcacttgatacaatgcaatgaaaaattatcttaaagtagccacyttgcagtagaaaaatatcagtttcatagggctgtttcttatagcagccttcaaactaagtcggtggtgtaaaatcaaggcctaaatgactaaattagatt

SEQ ID NO: 470070 - DNA, 201 bp, Homo sapiens
tgctgtgactcttacctttattttactttcctgaagtgtttataaattaaattttattatgcttgtaaggtggacatgattataatcgtgcttaatttttaaaattttgttttttagtcatctgcatcacagtcaccaaaagcaccttttacaaagcttttaaaaatacatatatctggtcatttcacatcaactttatta

SEQ ID NO: 470071 - DNA, 201 bp, Homo sapiens
ttataacaagacgtcacttgatataatgatataataataacaagacatcacttgatacaatgcaatgaaaaattatcttaaagtagccaccttgcagtagraaaatatcagtttcatagggctgtttcttatagcagccttcaaactaagtcggtggtgtaaaatcaaggcctaaatgactaaattagatttctttggggt

SEQ ID NO: 470072 - DNA, 201 bp, Homo sapiens
aagcatttgtttttatactgaactctaagtttcccatctgccttgttttgataactaatgacaaagtgaaaaaactgagccctctatctctcttttttccytaagccctggtttagtataattattttatatctgaagataaatgttttatcaaggaaataaagactgggagaaacagtaatccaggctgttagtataatc

SEQ ID NO: 470073 - DNA, 201 bp, Homo sapiens
gacctcgtgatccacctgccttgccctcccaaagtgctgagattacaggcgtgagtcaccgcgccgtgcctgattattattttttttaattttgttttttygagacagagtttcgtcctttgttccccaggctggagtgcagtggcgtgatcttggctcactgcaacctccgcctcccaggttcaagtgattctcctgtct

SEQ ID NO: 470074 - DNA, 201 bp, Homo sapiens
acttgactttcaggtcactgcattgtcttggtttttttttgtttgtttgtttgtttttttgttttttcctactccttcactggttttttctcattctcttygctcatcttcttatgtattaggtggtcttattcagtttaatggcttattatctatttttgtgctattattatgttatctaaatgctaatgactctaaaat

SEQ ID NO: 470075 - DNA, 201 bp, Homo sapiens
tggtgggattacgggcatgagccaccacacccagctgagaaaatttgatcttttgttggtggtggctgttaccagtctctgcgcattttttttatatgaataaaatcaacttgagtgaagtgctagttacttgaagagaagagaaactttttttttcttgagaatcacataatcaggtctttgcaaacttgttttcattaa

SEQ ID NO: 470076 - DNA, 201 bp, Homo sapiens
tttttagtagagacagggttttccatgttggtcaggctggtcttgaactcctgacctcaggtgatccgcccacctcagcttcccaaagtgttgcgattatrggcatgaaccactgcacctggccaaaaatagcctttatttttcagagcaattttaggtttgtagcaaaattgtgaggaaggtactgaaatctcccataaa

SEQ ID NO: 470077 - DNA, 201 bp, Homo sapiens
atagtgaatatattcatctcccaaagcttcttcatgcccctctgtaattttctgcattccccctgccatccgtccttgtccccaagattagtttgcatttyctagagttgtatataagtggaatcatacagaactgtacactttttggactgatttatttcagcacaattatttggagattcatctgtgctgttgcatttg

SEQ ID NO: 470078 - DNA, 201 bp, Homo sapiens
agcacttgagagaaatacaaatgaaaatattttccaaaggtacaccaattttggaagttaccttatcttttggaagctaccgtttcatgaaatcagtgcaygttttttggtagactgtggactatcttacaagtaaggccgtgtataggctaagcatttaagtttacacctatagtccatacttcctgagctgcagaccca

SEQ ID NO: 470079 - DNA, 201 bp, Homo sapiens
ttatcggggaaaacgctgatgagttatttctgtcgtgggccatcctttgaccagcttgagattgtctgtagtctccatcagatggggtgactttgtgtctrctttgcttcttttcagcttcctggggttgaggcatgtgaaaattataccttccgatacggccgaaatcctctcatggaacttcctcttgccgttaacccc

SEQ ID NO: 470080 - DNA, 201 bp, Homo sapiens
gtgtatattggtcagccagtgtttgttgcatgggctaatctttttcttcaaggagcatttggcagggtttacctaagtttggctttgaaactgaatttgcrtactcatatttaagtagatctacctgcaggccaatagtgttaacataagctagaagaccattttattatcggggaaaacgctgatgagttatttctgtcg

SEQ ID NO: 470081 - DNA, 201 bp, Homo sapiens
cctgtttgtcagtgagtctaactgaaccatatctacacaatagttttagaaaattgtatgattctaaggcattgttttcaagaataaaaatatcattggtrtgttttctttggacaggcagaggaaaccccaaaagccactgagtaatgtgcctaattgttttctttggaatcgccctgcctaaatgatacttatctttta

SEQ ID NO: 470082 - DNA, 201 bp, Homo sapiens
tatttgacatgtacaattccataagctttgatatatatatatatatacacccttgaaaacgataccacaatcatgatagtgaatatattcatctcccaaarcttcttcatgcccctctgtaattttctgcattccccctgccatccgtccttgtccccaagattagtttgcattttctagagttgtatataagtggaatca

SEQ ID NO: 470083 - DNA, 201 bp, Homo sapiens
catgttggccaggctgggctcaaactcctgacctcaggtgatccacctgcctcagccacccaaagtgctgggattacaggtgtgagccaccgtacctggcrgggaccccctttttcttaaagtcagtttctagaaggcaggaatgacatctaaatcatactgtatacattgtcataagacaatgtataggaacatcagata

SEQ ID NO: 470084 - DNA, 201 bp, Homo sapiens
tccatccaggttattgctctggtatgtctttcacagaagaacattctgaagacttatttttaacaggtagttgtttgtagtatgcctgtaataaaatctargctagatgacaaataaatttagatcttaaaatacatcagcctaaatgcaagaaggattttttttttcaccagatagtttaagttggtgtgcagtccctgc

SEQ ID NO: 470085 - DNA, 201 bp, Homo sapiens
gtagtaataactgctttattctttattcatcaactgcacaagcgaaaaactcagaaaacaaggtgagattaggataatctcagctgataacaatgtgtaaygagtgacttctgtgttctgggcatatgggagtgaataaagatgtgtccctgccttcatggagctctgtgtggggaatccaaagcaggtgctgacccggca

SEQ ID NO: 470086 - DNA, 201 bp, Homo sapiens
tctgaccacctgtaggaactgacggggtctgtcagatgttacaatatctaaaatagtttaatgtgttactagatatttaatgttaattggaatccctttaygaggatttctgtttataaatttctttttttggatattagttcgttagagctaatttttttcctgaggttctttaagtctaaataaaatttgttggatttt

SEQ ID NO: 470087 - DNA, 201 bp, Homo sapiens
tactcaaaattttgtttggtaaataaccattctaaattaatgatatattaactctggagcatagatcggagggggctaaataaatgtcttctttattctcrttaattctcataatgcaatttaataattcatgatgtgacatcaagagttagaaattgagtaggtgagggctgggcacggtggctcatgcctgtaatccca

SEQ ID NO: 470088 - DNA, 201 bp, Homo sapiens
ggtttattgttgtttgtagatgtctaaaatgaaagagcagaagttgctatatcagagaacgccgtcgtggaagagagtttaagaactgtctggggtttgaygtctttgtgtcagttctttaactgtaagattctaattggggagaatcaagttcccttagtagatgatcgctagccaactctttagatccagagggttctt

SEQ ID NO: 470089 - DNA, 201 bp, Homo sapiens
gtgcctttttaccaccatttcagtatgtatttcttaatagtaggaatattcttaaaaaatcacaatcctgctatcaacttcctaaacttacatcaatgtartatgtttatctaatgtactagccatattccagttatgtcatttgatcttatgtccttcataacctaccccttcctccaagtaggttctaggatttagttt

SEQ ID NO: 470090 - DNA, 201 bp, Homo sapiens
tatacagatggggcagaaacggcagggagaagttaagtgacttgcttaaggtaataaatgtagtaagaagcagaggtgggattgaacctaaacagtctgcrtctagagttcatgctcataacattctatttattgcctttctggttttatgacccccttcttatctaagtgtatgctctgtgccccgcatatacaaactag

SEQ ID NO: 470091 - DNA, 201 bp, Homo sapiens
taatgtgggcacttgattggttctgtctgaggatcctagtcttttgagatctttaagaagttccacaatcttaatattacatggtgtggcttccttcaggwgtttattagggatttggagattcccaaatattctactaacttatacccttgagagaggggagaataaacagaggagtgaatgtgaacttcagaattccta

SEQ ID NO: 470092 - DNA, 201 bp, Homo sapiens
tgatataatgatataataataacaagacatcacttgatacaatgcaatgaaaaattatcttaaagtagccaccttgcagtagaaaaatatcagtttcatarggctgtttcttatagcagccttcaaactaagtcggtggtgtaaaatcaaggcctaaatgactaaattagatttctttggggttttttttttttttttttt

SEQ ID NO: 470093 - DNA, 201 bp, Homo sapiens
tgaaaaattatcttaaagtagccaccttgcagtagaaaaatatcagtttcatagggctgtttcttatagcagccttcaaactaagtcggtggtgtaaaatyaaggcctaaatgactaaattagatttctttggggttttttttttttttttttttttgagatggagtctcgcactgtcactctggctggaatgcagtggca

SEQ ID NO: 470094 - DNA, 201 bp, Homo sapiens
agaaaaatatcagtttcatagggctgtttcttatagcagccttcaaactaagtcggtggtgtaaaatcaaggcctaaatgactaaattagatttctttggkgttttttttttttttttttttttgagatggagtctcgcactgtcactctggctggaatgcagtggcatggccttggctcactgcaaactccgccttccag

SEQ ID NO: 470095 - DNA, 201 bp, Homo sapiens
gtcggtggtgtaaaatcaaggcctaaatgactaaattagatttctttggggttttttttttttttttttttttgagatggagtctcgcactgtcactctgbctggaatgcagtggcatggccttggctcactgcaaactccgccttccaggttcatgcgatttctcctgcctcagcctcccaagtagctgggattacaggc

SEQ ID NO: 470096 - DNA, 201 bp, Homo sapiens
aattagatttctttggggttttttttttttttttttttttgagatggagtctcgcactgtcactctggctggaatgcagtggcatggccttggctcactgmaaactccgccttccaggttcatgcgatttctcctgcctcagcctcccaagtagctgggattacaggcgcataccatcacacccggctaattttttgtatt

SEQ ID NO: 470097 - DNA, 201 bp, Homo sapiens
gtcccagctacttgggaggctgaggcaggagaatggcgtgaacctgggaggcagagctttcagtgagctgagatcgcgccactgcactccagcctgggcgrcagagcgagactctgtctttaaaaaaaaaaaaaaaaatcaagttgtataagtgaggtggacaagtgaatccatagactatagtgtgtgaatgtagataga

SEQ ID NO: 470098 - DNA, 201 bp, Homo sapiens
tggccttggctcactgcaaactccgccttccaggttcatgcgatttctcctgcctcagcctcccaagtagctgggattacaggcgcataccatcacacccrgctaattttttgtatttttagtagagacagggtttcactgtgttggctagattcgtctcgaactcctgacctcgtgatctgcccgtctcagcctcccaaa

SEQ ID NO: 470099 - DNA, 201 bp, Homo sapiens
taccatcacacccggctaattttttgtatttttagtagagacagggtttcactgtgttggctagattcgtctcgaactcctgacctcgtgatctgcccgtytcagcctcccaaagtgctgggatacagaggtgtgagccatcgtgcccggcctccttggggatcttaagcagtgcattctaactacacagcgttctgaccc

SEQ ID NO: 470100 - DNA, 201 bp, Homo sapiens
atagctagaggagaaaagagaacaggatgaactctgaaagcctgtcttcttacctgctttatgggatcagatctggtgccgatcctatttcttaaaaaacaaaaaaaaaacaaaaaaaccctatagtctgaatctgtttttttctctttgaaatgcaggaaacataatttcaaaaggttgtatacctgcaaacctactggc

SEQ ID NO: 470101 - DNA, 201 bp, Homo sapiens
gattcgtctcgaactcctgacctcgtgatctgcccgtctcagcctcccaaagtgctgggatacagaggtgtgagccatcgtgcccggcctccttggggatyttaagcagtgcattctaactacacagcgttctgacccatctgttaagacgatcataatcttggattaagtaccaaggatataatttaaagaatattgcag

SEQ ID NO: 470102 - DNA, 201 bp, Homo sapiens
gtctcgaactcctgacctcgtgatctgcccgtctcagcctcccaaagtgctgggatacagaggtgtgagccatcgtgcccggcctccttggggatcttaarcagtgcattctaactacacagcgttctgacccatctgttaagacgatcataatcttggattaagtaccaaggatataatttaaagaatattgcagatagg

SEQ ID NO: 470103 - DNA, 201 bp, Homo sapiens
gcactttgttggtgggctttgttcaccacactgtgtcctgcacttaatagttcctgacggagattaggtgctgtataaatttttttttcttttttcttttytttttttttttttgaggcggagtctcgctctgttgcccaggctggaatgcagtggcgcgatcttggctcactgcaagctccacctcctgggttcacgcca

SEQ ID NO: 470104 - DNA, 201 bp, Homo sapiens
tcgtgatctgcccgtctcagcctcccaaagtgctgggatacagaggtgtgagccatcgtgcccggcctccttggggatcttaagcagtgcattctaactasacagcgttctgacccatctgttaagacgatcataatcttggattaagtaccaaggatataatttaaagaatattgcagataggatgttttgtcacctttt

SEQ ID NO: 470105 - DNA, 201 bp, Homo sapiens
ataatcttcaggatttaaagtttataagacattgttaccattaaacataattagtttgcatttttttaagcctacatcatatagagagttaaataatctawtagacagttaagtattagattatttaatctaattaaataatctaatagacatgaaggtagtggaaaatctccatgcaacatatttcagaaatcattgtcc

SEQ ID NO: 470106 - DNA, 201 bp, Homo sapiens
ggtattaattacaagtaattcctagactattgtaggtttttttttttttttttgagacagggtctcgctctgtcacccaggccagattgcagtggtgcaakctcagctccctgcaatctctgcctcccaaattcaagcaattctagtgcctcaacctaccaagtagctgggactacaggcatgcaccaccacaccctgagg

SEQ ID NO: 470107 - DNA, 201 bp, Homo sapiens
ggcttacaatatttatcatctggctctttacataaaaatgttgccatccatgcgctaaactatttagaatataactggaaactaattttcagaaccgtcaragattcaatgcagaattcattacagtaagttcagctactataatcgtctatagcagagtactgctgttaaatttagaaataatggagcctgaaaatattc

SEQ ID NO: 470108 - DNA, 201 bp, Homo sapiens
ttctgggtcagcatttcatgttcgagaaaataaattgagagattactgtagtctcgatttttaatcactaacttaatttttcaaaaatcttttataccaayttaaaaacaaaacaaactcggccgggcgcagtggctcatgcctgtaatcccagcactttgggaggctgagggggcagatcacttgaggtcaggagttcga

SEQ ID NO: 470109 - DNA, 201 bp, Homo sapiens
gatattgaggtataaatatacctcatttgacagtttgataatatagaccaccaattttcacttactttttttctgggtcagcatttcatgttcgagaaaakaaattgagagattactgtagtctcgatttttaatcactaacttaatttttcaaaaatcttttataccaatttaaaaacaaaacaaactcggccgggcgca

SEQ ID NO: 470110 - DNA, 201 bp, Homo sapiens
tgaaagtgttcaacaaatttagtctttttaatctgggtggggggtgtgatattcgtgctggtaattcatcttgtcttaaaatgttgtacaggccgggcgcrgtggctcacgcctgtaatcccagcactttgggaggccgaggcgggcggatcacgaggtcaggagatcgagaccatcctggctaacacggtgaaaccccgt

SEQ ID NO: 470111 - DNA, 201 bp, Homo sapiens
ccttttctctctgtttaggatattttttcattattaagaaataggaaagaacttataaactcaggaaaattaacatgggaagtgatttcctagtctatgcrctagaccttaatgggatatgtctttgtctcttcaaaatctgtaaaatcgtattcataaaatgcatgtataccttagtatgtagtttggcttgtgggttag

SEQ ID NO: 470112 - DNA, 201 bp, Homo sapiens
cccttaaagaataaagaagagaatattggtacaaaatgaagagatatagccatttggggagaattactggcagttgtaaaagtagaaaatgttttgcttgsttaactattccctccccttattttaaaaaatataactacagaataataattaccaatgttttcaacttatggatttcctttataagtcatagactttaaa

SEQ ID NO: 470113 - DNA, 201 bp, Homo sapiens
gtcattcaatatttagctatagagctatattagttaagaaggtatttttaaagtaaaatttgtaggtttttagcttagtctccatttaaaatatgttctgytttcttaacttcaggatatgtgtgtagtttgtggcagttttggccaaggagcagaaggaagattacttgcctgttctcagtgtggtcagtgttaccatcc

SEQ ID NO: 470114 - DNA, 201 bp, Homo sapiens
cctcctatctaaggattaagttatgagaatgataatacatattgagtatatgtattttctgttgcttcctaaggggcagagcagtagctgtgatagttgaytgagttaggagtaaggttgacatctttttataaaagttgagaaatttaacaaaagcatgcatctcattataaagaaattcactaaagagagtatctgtga

SEQ ID NO: 470115 - DNA, 201 bp, Homo sapiens
tttttgttagatatagaggcagaatatactgaattgccattctacatagcaatttagtgacttggcagtggtaaagttttattgcagttttttgcgctgcrgaatgagattgaaatttttctgaataataatgccctcaactattaagtcaaatacttaatagctttgaaagttggcttttcctgtagatttcataatatt

SEQ ID NO: 470116 - DNA, 201 bp, Homo sapiens
tttctgttgcttcctaaggggcagagcagtagctgtgatagttgactgagttaggagtaaggttgacatctttttataaaagttgagaaatttaacaaaakcatgcatctcattataaagaaattcactaaagagagtatctgtgaagaaggccaagattttcttcaggaaacacttttagggtgctctgtcataggtaaa

SEQ ID NO: 470117 - DNA, 201 bp, Homo sapiens
gtgccaattgagaatgtgacaacttctaatacagcttggtgccaactgctttcagttttggaaatgcatcaacagttttacccaccatagcttttgcatcrtgtaacaatttttgcttcaattgttaaacattattttgaaaactcaaggaacagtaaagtctgttttattgcccatatttttactatttgtttgttcttt

SEQ ID NO: 470118 - DNA, 201 bp, Homo sapiens
cagtagctgtgatagttgactgagttaggagtaaggttgacatctttttataaaagttgagaaatttaacaaaagcatgcatctcattataaagaaattcrctaaagagagtatctgtgaagaaggccaagattttcttcaggaaacacttttagggtgctctgtcataggtaaatggctggtcattgttgcaacattatt

SEQ ID NO: 470119 - DNA, 201 bp, Homo sapiens
ttttctctttatctttggttttcagcagtctgactatgatgtgcctaggtgtggttttctttgtattcatcctgcttgggggttgctgagcttcttgaaastgtaagttgatatttttcaccaaatttgtgaaaagcttgacttttatttcttattctttttctgtctcatttctctctcctcttcctctgtaactctaat

SEQ ID NO: 470120 - DNA, 201 bp, Homo sapiens
tcactaaagagagtatctgtgaagaaggccaagattttcttcaggaaacacttttagggtgctctgtcataggtaaatggctggtcattgttgcaacattrttttcatgatgatacaaggatacattaaccttgtctggaaattttaccctaaaaatccatctagtagatacaaccagatatacttcctgaataggaaaac

SEQ ID NO: 470121 - DNA, 201 bp, Homo sapiens
aaggccaagattttcttcaggaaacacttttagggtgctctgtcataggtaaatggctggtcattgttgcaacattattttcatgatgatacaaggatacrttaaccttgtctggaaattttaccctaaaaatccatctagtagatacaaccagatatacttcctgaataggaaaactgaatggcacaaagccaatcatgc

SEQ ID NO: 470122 - DNA, 201 bp, Homo sapiens
aatggctggtcattgttgcaacattattttcatgatgatacaaggatacattaaccttgtctggaaattttaccctaaaaatccatctagtagatacaacsagatatacttcctgaataggaaaactgaatggcacaaagccaatcatgcaagataagaggaaagaacattccagggagagggaacagaccactacacaga

SEQ ID NO: 470123 - DNA, 201 bp, Homo sapiens
ggatacattaaccttgtctggaaattttaccctaaaaatccatctagtagatacaaccagatatacttcctgaataggaaaactgaatggcacaaagccartcatgcaagataagaggaaagaacattccagggagagggaacagaccactacacagaccttgaggaatggatttggcatgattcatgaacaggcagcatg

SEQ ID NO: 470124 - DNA, 201 bp, Homo sapiens
gttgcttcctaaggggcagagcagtagctgtgatagttgactgagttaggagtaaggttgacatctttttataaaagttgagaaatttaacaaaagcatgyatctcattataaagaaattcactaaagagagtatctgtgaagaaggccaagattttcttcaggaaacacttttagggtgctctgtcataggtaaatggct

SEQ ID NO: 470125 - DNA, 201 bp, Homo sapiens
aaaaatccatctagtagatacaaccagatatacttcctgaataggaaaactgaatggcacaaagccaatcatgcaagataagaggaaagaacattccaggragagggaacagaccactacacagaccttgaggaatggatttggcatgattcatgaacaggcagcatgtcattttacttggagcatagtagcctactaggt

SEQ ID NO: 470126 - DNA, 201 bp, Homo sapiens
gagagggaacagaccactacacagaccttgaggaatggatttggcatgattcatgaacaggcagcatgtcattttacttggagcatagtagcctactaggrgggtagtagagacatcatcaaggcgaacaaaggctagatcatgtaggccttgtaagcaagggaaggagtttgggttctattcggtctgcaatgagaagtc

SEQ ID NO: 470127 - DNA, 201 bp, Homo sapiens
accttgaggaatggatttggcatgattcatgaacaggcagcatgtcattttacttggagcatagtagcctactaggtgggtagtagagacatcatcaaggygaacaaaggctagatcatgtaggccttgtaagcaagggaaggagtttgggttctattcggtctgcaatgagaagtctttgcaaggtttaaacatggaaat

SEQ ID NO: 470128 - DNA, 201 bp, Homo sapiens
ttgtattaaacctaaaatttgtgatgttttagactgtttcactaacgtgttttgataatgtctcagtacccttgggaaaacattataaagtagtgggcaaygatgaaacctactctgggtgtttttaggcaaattttttaacttctttgatgctagtgttctcatttataaaataggtgaaccaggatgagcccataggat

SEQ ID NO: 470129 - DNA, 201 bp, Homo sapiens
ttgataatgtctcagtacccttgggaaaacattataaagtagtgggcaatgatgaaacctactctgggtgtttttaggcaaattttttaacttctttgatkctagtgttctcatttataaaataggtgaaccaggatgagcccataggatagttgtgctgatgaggtgcaaggatgcatgccaggcacccagcactggctc

SEQ ID NO: 470130 - DNA, 201 bp, Homo sapiens
acccggccaacttttctttttttttttttttttaggagacagggtcttgctctgttttccaggttggtctcaattcctgggcccaagcagttctcccaccygggcctgccaaggtgctagtattataggcgtgagccactgcgcccagccctttatagtttttttcttttttttgagatgaagtttccctctgtcaccagg

SEQ ID NO: 470131 - DNA, 201 bp, Homo sapiens
acaatttctttgagctgctcagtgggtataatgtgttgaattttctgttagtggttgggaggtagaaatagatactttatctctattttagccatttccawaattatatatctcaatagtcttgtcaatgcatcattagttctatgactgaattaatgattacttttagtagtcacttaatttcttactgatgatgatgat

SEQ ID NO: 470132 - DNA, 201 bp, Homo sapiens
gcaccttactgtccataaccaatgaattagcttagctctactctattttgtctttgtgaaacttactttgacaagtattttatgaaaaatattatttttgrttatacatgacttatcacaacttgttataaaacaatttacatgaaacaataaaaagcatatactttagatgtaaactataattttgcttccaaggaacat

SEQ ID NO: 470133 - DNA, 201 bp, Homo sapiens
tataaaacaatttacatgaaacaataaaaagcatatactttagatgtaaactataattttgcttccaaggaacatgatcttgtagttattgacaatatgtyagaatccaatatgttgattgtttcttagccaggttttcctccatgacttgagtatttccttcatcacttcttgttttgttgttgctttaaaaagcacttt

SEQ ID NO: 470134 - DNA, 201 bp, Homo sapiens
cttggagcatagtagcctactaggtgggtagtagagacatcatcaaggcgaacaaaggctagatcatgtaggccttgtaagcaagggaaggagtttgggtyctattcggtctgcaatgagaagtctttgcaaggtttaaacatggaaatgctacatatcctaattcaccccctgttcctcaatgtatttactcatcattta

SEQ ID NO: 470135 - DNA, 201 bp, Homo sapiens
aggctagatcatgtaggccttgtaagcaagggaaggagtttgggttctattcggtctgcaatgagaagtctttgcaaggtttaaacatggaaatgctacayatcctaattcaccccctgttcctcaatgtatttactcatcatttagctttaattccttttacttcacttaagctttaactccagcctcttttctttggtt

SEQ ID NO: 470136 - DNA, 201 bp, Homo sapiens
gcaaggtttaaacatggaaatgctacatatcctaattcaccccctgttcctcaatgtatttactcatcatttagctttaattccttttacttcacttaagmtttaactccagcctcttttctttggttatctttgtatttcttgacattaagtcctgttgcttttcttttaccctaaattctgtcagtcctctgacctttc

SEQ ID NO: 470137 - DNA, 201 bp, Homo sapiens
ttaagtcctgttgcttttcttttaccctaaattctgtcagtcctctgacctttcttatctacctgccaatgatacggtctagcctctttggatgacatccrtgatttattttttcttcccagagattctcttttatagacaaatcactcagcacagtgtcctgccagtgatgaaaattggcagatgatagggtgtgatgga

SEQ ID NO: 470138 - DNA, 201 bp, Homo sapiens
gacctttcttatctacctgccaatgatacggtctagcctctttggatgacatccatgatttattttttcttcccagagattctcttttatagacaaatcastcagcacagtgtcctgccagtgatgaaaattggcagatgatagggtgtgatggaaattagaaagcaatgctgatttggtccttcttaaattcacactgta

SEQ ID NO: 470139 - DNA, 201 bp, Homo sapiens
atgatacggtctagcctctttggatgacatccatgatttattttttcttcccagagattctcttttatagacaaatcactcagcacagtgtcctgccagtratgaaaattggcagatgatagggtgtgatggaaattagaaagcaatgctgatttggtccttcttaaattcacactgtatgacagctattttgacttttgt

SEQ ID NO: 470140 - DNA, 201 bp, Homo sapiens
gacatccatgatttattttttcttcccagagattctcttttatagacaaatcactcagcacagtgtcctgccagtgatgaaaattggcagatgatagggtktgatggaaattagaaagcaatgctgatttggtccttcttaaattcacactgtatgacagctattttgacttttgttgctgttcaccaatgcttttattct

SEQ ID NO: 470141 - DNA, 201 bp, Homo sapiens
gattctcttttatagacaaatcactcagcacagtgtcctgccagtgatgaaaattggcagatgatagggtgtgatggaaattagaaagcaatgctgatttkgtccttcttaaattcacactgtatgacagctattttgacttttgttgctgttcaccaatgcttttattcttatgtgttgtctggattttcttaagtaata

SEQ ID NO: 470142 - DNA, 201 bp, Homo sapiens
acaaatcactcagcacagtgtcctgccagtgatgaaaattggcagatgatagggtgtgatggaaattagaaagcaatgctgatttggtccttcttaaattyacactgtatgacagctattttgacttttgttgctgttcaccaatgcttttattcttatgtgttgtctggattttcttaagtaatagtttcatcaggttta

SEQ ID NO: 470143 - DNA, 201 bp, Homo sapiens
cagtacccttgggaaaacattataaagtagtgggcaatgatgaaacctactctgggtgtttttaggcaaattttttaacttctttgatgctagtgttctcwtttataaaataggtgaaccaggatgagcccataggatagttgtgctgatgaggtgcaaggatgcatgccaggcacccagcactggctcttcccacacatg

SEQ ID NO: 470144 - DNA, 201 bp, Homo sapiens
atttggtccttcttaaattcacactgtatgacagctattttgacttttgttgctgttcaccaatgcttttattcttatgtgttgtctggattttcttaagyaatagtttcatcaggtttaaggatctgtgataagctctgttctaatttaagctcaatgtttttgtcttttttatttatctcttctctttttacggctgtc

SEQ ID NO: 470145 - DNA, 201 bp, Homo sapiens
tcagcctggcaatggaaatatgtctcctgcacagtcattccataaagaactgtttacaaaacagccacccagtacccctacgtctacatcttcagatgatrtgtttgtaaagccacaagctccacctcctcctccagccccatcccggattcccatccaggatagtctttctcaggctcagacttctcagccaccctcacc

SEQ ID NO: 470146 - DNA, 201 bp, Homo sapiens
aatagcaaatgcgtcagaaaagtaagcagcaagctaaaattgaagccacacagaaacttgaacaggtgaaaaatgagcagcagcagcagcaacaacagcartttggttctcagcatcttctggtgcagtctggttcagatacaccaagtagtgggatacagagtcccttgacacctcagcctggcaatggaaatatgtctc

SEQ ID NO: 470147 - DNA, 201 bp, Homo sapiens
atttatgttcttcttccacgacaaataatgacccctatgcaaaacctccagacacacctaggcctgtgatgacagatcaatttcccaaatccttgggcctmtcccggtctcctgtagtttcagaacaaactgcaaaaggccctatagcagctggaaccagtgatcactttactaaaccatctcctagggcagatgtgtttc

SEQ ID NO: 470148 - DNA, 201 bp, Homo sapiens
tggattttcttaagtaatagtttcatcaggtttaaggatctgtgataagctctgttctaatttaagctcaatgtttttgtcttttttatttatctcttctytttttacggctgtcttttaggaaatgaccttctctaaagatgatcattttgtttcctctcacttttctcctgccataagaaccttgctccctttacttca

SEQ ID NO: 470149 - DNA, 201 bp, Homo sapiens
taaggatctgtgataagctctgttctaatttaagctcaatgtttttgtcttttttatttatctcttctctttttacggctgtcttttaggaaatgaccttytctaaagatgatcattttgtttcctctcacttttctcctgccataagaaccttgctccctttacttcatttagcttcatcttatgccactgttggcattt

SEQ ID NO: 470150 - DNA, 201 bp, Homo sapiens
aggatctgtgataagctctgttctaatttaagctcaatgtttttgtcttttttatttatctcttctctttttacggctgtcttttaggaaatgaccttctytaaagatgatcattttgtttcctctcacttttctcctgccataagaaccttgctccctttacttcatttagcttcatcttatgccactgttggcatttca

SEQ ID NO: 470151 - DNA, 201 bp, Homo sapiens
ctaaagatgatcattttgtttcctctcacttttctcctgccataagaaccttgctccctttacttcatttagcttcatcttatgccactgttggcatttcrtgtctacttttgtgtatactcaaatactcatcactttcattgatcagtagtaaagtttgctgaggagtcaatttgattagtagtcaagagcctgatctta

SEQ ID NO: 470152 - DNA, 201 bp, Homo sapiens
aacactgcgctttcaataagataatgcatgtggaatgctgagcacagtgcctttaagacactgaaggggatatgagaacagttccatagcccttcattttwacttttgattaagagttgtttactaataactaactaggtgagttataaatggggaagtagggtcattgtgaagtggctatgaaacagcatagaggatata

SEQ ID NO: 470153 - DNA, 201 bp, Homo sapiens
acttttctcctgccataagaaccttgctccctttacttcatttagcttcatcttatgccactgttggcatttcatgtctacttttgtgtatactcaaataytcatcactttcattgatcagtagtaaagtttgctgaggagtcaatttgattagtagtcaagagcctgatcttagaatccaaatagacctggaatttactc

SEQ ID NO: 470154 - DNA, 201 bp, Homo sapiens
accttgctccctttacttcatttagcttcatcttatgccactgttggcatttcatgtctacttttgtgtatactcaaatactcatcactttcattgatcastagtaaagtttgctgaggagtcaatttgattagtagtcaagagcctgatcttagaatccaaatagacctggaatttactcctctgcccttttaaattatc

SEQ ID NO: 470155 - DNA, 201 bp, Homo sapiens
tttcaactgtttaaagaaaaatttcttagttgattattgctttaaacttagtgtctctggcttacagacatgtgtgtctaaatattcatatttaatttctrtcatgacaccaaagctatccagtagtatcgataatcttgtacatgacctccaaaaggttgtttcagtattcccacacatcttctccctgactgggagggt

SEQ ID NO: 470156 - DNA, 201 bp, Homo sapiens
tacttaatttttattggtttgacatagtattttctgagaaaaataattaaaatcttccactgttgttgatttaatttttttagtcttccagttttgttagwacaggttgagtttctcctatccaaaatgcttgggacaggccaggtgtggtggttcatgcctgtaattccatcactttaggtggccaaggcaggtggatca

SEQ ID NO: 470157 - DNA, 201 bp, Homo sapiens
caactgtttaaagaaaaatttcttagttgattattgctttaaacttagtgtctctggcttacagacatgtgtgtctaaatattcatatttaatttctgtcwtgacaccaaagctatccagtagtatcgataatcttgtacatgacctccaaaaggttgtttcagtattcccacacatcttctccctgactgggagggttgg

SEQ ID NO: 470158 - DNA, 201 bp, Homo sapiens
gaaaaatttcttagttgattattgctttaaacttagtgtctctggcttacagacatgtgtgtctaaatattcatatttaatttctgtcatgacaccaaagytatccagtagtatcgataatcttgtacatgacctccaaaaggttgtttcagtattcccacacatcttctccctgactgggagggttggaaccaacctcat

SEQ ID NO: 470159 - DNA, 201 bp, Homo sapiens
cttaatttttattggtttgacatagtattttctgagaaaaataattaaaatcttccactgttgttgatttaatttttttagtcttccagttttgttagtayaggttgagtttctcctatccaaaatgcttgggacaggccaggtgtggtggttcatgcctgtaattccatcactttaggtggccaaggcaggtggatcacc

SEQ ID NO: 470160 - DNA, 201 bp, Homo sapiens
ttgattattgctttaaacttagtgtctctggcttacagacatgtgtgtctaaatattcatatttaatttctgtcatgacaccaaagctatccagtagtatygataatcttgtacatgacctccaaaaggttgtttcagtattcccacacatcttctccctgactgggagggttggaaccaacctcatttctttgtgtagtg

SEQ ID NO: 470161 - DNA, 201 bp, Homo sapiens
tgtgtattcatggatcaagacttaaaacattaatgatttttgctgcttcatcagtgatattctcaatgatactctacattatttttactgtagttgtagtrccaattgagaatgtgacaacttctaatacagcttggtgccaactgctttcagttttggaaatgcatcaacagttttacccaccatagcttttgcatcgtg

SEQ ID NO: 470162 - DNA, 201 bp, Homo sapiens
tcctcaagaaaaactatggtgtaacaattattttactctttatttctcgttttgtcacatagataattaaaagatgtgtattcatggatcaagacttaaarcattaatgatttttgctgcttcatcagtgatattctcaatgatactctacattatttttactgtagttgtagtgccaattgagaatgtgacaacttctaa

SEQ ID NO: 470163 - DNA, 201 bp, Homo sapiens
atagccaaaagtcactctttaagtattataaaatactgaaaaaaatcctacttttaaattgcattaaaggttttgatttagaagtataagcatctcttctrtacttggggctttggttccaggacccccaggtataaccaaaatctgagaatacagaagtcaaatgttggccctatggagcttggcatacaagaaaagttg

SEQ ID NO: 470164 - DNA, 201 bp, Homo sapiens
acacaaactgacttgtttgttacacctgtaacaaatcagaggcattctgatccatatgctcatcctcctggaacaccaagacctggaatttctgtcccttmctctcagccaccagcaacaccaaggccaaggatttcagagggttttactaggtcctcaatgacaagaccagtcctcatgccaaatcaggatcctttcctg

SEQ ID NO: 470165 - DNA, 201 bp, Homo sapiens
agacctggaatttctgtcccttactctcagccaccagcaacaccaaggccaaggatttcagagggttttactaggtcctcaatgacaagaccagtcctcaygccaaatcaggatcctttcctgcaagcagcacaaaaccgaggaccagctttacctggcccgttggtaaggccacctgatacatgttcccagacacctagg

SEQ ID NO: 470166 - DNA, 201 bp, Homo sapiens
aagtgctcaaccagtgcttgagcaattgtgtcttgtgtccaacagaactcaacagaatcccatgcttgtctttatatgtgaattcagttccttttgagttrgtaagaaattatgcctgtgttggggtaattgaacttttaggatgagggaattgtctgccacaattattctatgagcttaatgtttccatgtctttttctt

SEQ ID NO: 470167 - DNA, 201 bp, Homo sapiens
tgggaggtgtgggaataggactgcactgaggctctagaaggccagcaggtggggcagactgaatggagggaggggactggcattcagtaactactggagartgggaagagtgaggtagactatccatctggtgaaggtggctgcttccttgaggtttgttactttctgtaatgttaattccctcaacttttaaaatttgat

SEQ ID NO: 470168 - DNA, 201 bp, Homo sapiens
ttttagacaagttatacattcaaatgatttaaaattggaaaataattaaaaggtaaacagtgaagtctctccctttcccctgccttcatgcccccagtttrcatctccagaaacctcagaggtttcttgtgtaaccttccagatgtgttttatgcatgtataaggaaatgtgtgtgtgtgtgtgtgtgtgtgtatatatat

SEQ ID NO: 470169 - DNA, 201 bp, Homo sapiens
ttttgcaccagatgtatgtattacatggatgtttttctttgactaatttattaccaatgatccatagtaatcaaagaacacagcaaggttatcagtaaggmattggtggaaatcatcatagtctaaaaagtgatttttgtgacaatgacagttgtcttgttgcagagcgaactttgttgtgtataacagtgctgtgcagta

SEQ ID NO: 470170 - DNA, 201 bp, Homo sapiens
atgtttttctttgactaatttattaccaatgatccatagtaatcaaagaacacagcaaggttatcagtaaggaattggtggaaatcatcatagtctaaaawgtgatttttgtgacaatgacagttgtcttgttgcagagcgaactttgttgtgtataacagtgctgtgcagtataaatacaatgtgagcaacataagtaat

SEQ ID NO: 470171 - DNA, 201 bp, Homo sapiens
aattggtggaaatcatcatagtctaaaaagtgatttttgtgacaatgacagttgtcttgttgcagagcgaactttgttgtgtataacagtgctgtgcagtrtaaatacaatgtgagcaacataagtaatttttctagtgggtatgttaaaaatttgagtaaaaggaaacattgggaataattgtagtaaattttatttaat

SEQ ID NO: 470172 - DNA, 201 bp, Homo sapiens
cccatgatgttgctgatcagccaaggcctggatcagaggggagcttctgtgcatcttcaaactctccaatgcactcccaaggccagcagttctctggtgtstcccaacttcctggacctgtgccaacttcaggagtaactgatacacagaatactgtaaatatggcccaagcagatacagagaaattgagacaggtaaaca

SEQ ID NO: 470173 - DNA, 201 bp, Homo sapiens
gttgcagagcgaactttgttgtgtataacagtgctgtgcagtataaatacaatgtgagcaacataagtaatttttctagtgggtatgttaaaaatttgagraaaaggaaacattgggaataattgtagtaaattttatttaattcagtaatccaaaatagtaatatctcaaattttgagatactttttctcctgttaagat

SEQ ID NO: 470174 - DNA, 201 bp, Homo sapiens
ttatgtcctttctatcaaaaatgaactaatttatgatgcttccattgttagattaatgatttattttaaatgcctatcacttaaagagccatttaaaagtkattttagcagtaagtccttcacttaaaatatgttcaataagacttgattcatgttaggcagttggggatacaaagttaaaaaagttaaggcccctgtcct

SEQ ID NO: 470175 - DNA, 201 bp, Homo sapiens
acttaaagagccatttaaaagtgattttagcagtaagtccttcacttaaaatatgttcaataagacttgattcatgttaggcagttggggatacaaagttwaaaaagttaaggcccctgtccttcaaggattcacagagttgtgctgtaattaattgattatgtaacagaagtttcttgtaagcatatgggtaaaagtaat

SEQ ID NO: 470176 - DNA, 201 bp, Homo sapiens
ttaaaagtgattttagcagtaagtccttcacttaaaatatgttcaataagacttgattcatgttaggcagttggggatacaaagttaaaaaagttaaggcycctgtccttcaaggattcacagagttgtgctgtaattaattgattatgtaacagaagtttcttgtaagcatatgggtaaaagtaatattcaacaactaaa

SEQ ID NO: 470177 - DNA, 201 bp, Homo sapiens
ttatgtttgcctggtatctttttacctcttttcccatcaacatttttgtccttgttttatatgtcatttgtgtttatacttccaacattttttgcacctattttttttttttttttttttttgagatggagtcttgctctgttgcccaggttggagggcagtggtgcgatctcggctcactgcaacctctacctccctggt

SEQ ID NO: 470178 - DNA, 201 bp, Homo sapiens
gatacaaagttaaaaaagttaaggcccctgtccttcaaggattcacagagttgtgctgtaattaattgattatgtaacagaagtttcttgtaagcatatgrgtaaaagtaatattcaacaactaaaggtatttgggtgtggtaataggtattcaggaaataatgtgcagagtttttttttgagacagggtctcactctgtc

SEQ ID NO: 470179 - DNA, 201 bp, Homo sapiens
tatgtttgcctggtatctttttacctcttttcccatcaacatttttgtccttgttttatatgtcatttgtgtttatacttccaacattttttgcacctattttttttttttttttttttttgagatggagtcttgctctgttgcccaggttggagggcagtggtgcgatctcggctcactgcaacctctacctccctggtt

SEQ ID NO: 470180 - DNA, 201 bp, Homo sapiens
tgataatgtctcagtacccttgggaaaacattataaagtagtgggcaatgatgaaacctactctgggtgtttttaggcaaattttttaacttctttgatgytagtgttctcatttataaaataggtgaaccaggatgagcccataggatagttgtgctgatgaggtgcaaggatgcatgccaggcacccagcactggctct

SEQ ID NO: 470181 - DNA, 201 bp, Homo sapiens
aaaaattcagtattgccacactttgccatattaaaaatgttttagattactatattatcctgaaactacatgtacacacacacccctaaaataagttttawggtatttcatatgcctgtacaggagaaaaaatagggaaagaatacaatcatcgtaagttcttattattacattatgctgagatttctaataacactgccc

SEQ ID NO: 470182 - DNA, 201 bp, Homo sapiens
catgccaggcacccagcactggctcttcccacacatggagtgctcagtaaccgtgagctattagaatacaagtgctcaaccagtgcttgagcaattgtgtyttgtgtccaacagaactcaacagaatcccatgcttgtctttatatgtgaattcagttccttttgagttagtaagaaattatgcctgtgttggggtaattg

SEQ ID NO: 470183 - DNA, 201 bp, Homo sapiens
gcaaaggagagtgacaagggactggatgccatttataaggatggggaagactgggatgaaaccggttaagggagaaattttaaacatggcaaacttaagargggttttgtgtgagaaaatggaaatgctaagaaggaagttgaaaatcctgctaatttggagatctttgattaaaactagaaataagaatatgggaagcat

SEQ ID NO: 470184 - DNA, 201 bp, Homo sapiens
gtgtggcttttctcaaaatactgttattccattacctatctcttaccccaagagtagtcacattcttatttctggttattttaattcctggtggtattttyatgtgattaatgagatagtactttttaatttgatgatattctagaaacctggtaagtactatgtaccttgtcttaagttttggttacttaattggtaaaa

SEQ ID NO: 470185 - DNA, 201 bp, Homo sapiens
tctgtgtattttgctttttataggtgtctactgcagatatttcatcaaataaggatgatgaagaaaactctatgcacaatacagttgtgttgttttctagyagtgacaagttcactttgaatcaggtttgaacttgacaatttactgtcttcctcattgaattcctccttgcacatttctgctttatctcatatacacaga

SEQ ID NO: 470186 - DNA, 201 bp, Homo sapiens
taacttcaggatatgtgtgtagtttgtggcagttttggccaaggagcagaaggaagattacttgcctgttctcagtgtggtcagtgttaccatccatactktgtcagtattaaggtaaacatccttaaattgagttaacaaatatgtattgaatttttatttggttttagtagtaacatgagctcccagttctcacaatta

SEQ ID NO: 470187 - DNA, 201 bp, Homo sapiens
cttagcaaaggttggaggtgtcttgagtgcactgtgtgtgaggcctgtgggaaggcaactgacccaggaagactcctgctgtgtgatgactgtgacataakttatcacacctactgcctagaccctccattgcagacagttcccaaaggaggctggaagtgcaaatggtactctagggtttgtttgccttgttagtctttc

SEQ ID NO: 470188 - DNA, 201 bp, Homo sapiens
atgtttgcctggtatctttttacctcttttcccatcaacatttttgtccttgttttatatgtcatttgtgtttatacttccaacattttttgcacctattttttttttttttttttttttgagatggagtcttgctctgttgcccaggttggagggcagtggtgcgatctcggctcactgcaacctctacctccctggttc

SEQ ID NO: 470189 - DNA, 201 bp, Homo sapiens
cctccatgacttgagtatttccttcatcacttcttgttttgttgttgctttaaaaagcacttttaactttagtgttcaaacatttattttaataaaatgastatagaaacagaaattataatcatatataagtatttaaatacactttaccttttctgaaaagaattacctggatttttttttttcgtttcagtgccttcc

SEQ ID NO: 470190 - DNA, 201 bp, Homo sapiens
ctgtccttcaaggattcacagagttgtgctgtaattaattgattatgtaacagaagtttcttgtaagcatatgggtaaaagtaatattcaacaactaaagrtatttgggtgtggtaataggtattcaggaaataatgtgcagagtttttttttgagacagggtctcactctgtcccccaggctggagtgcagtggcgcaaa

SEQ ID NO: 470191 - DNA, 201 bp, Homo sapiens
atgtaacagaagtttcttgtaagcatatgggtaaaagtaatattcaacaactaaaggtatttgggtgtggtaataggtattcaggaaataatgtgcagagtttttttttgagacagggtctcactctgtcccccaggctggagtgcagtggcgcaaactccagtcacagcagcctccacctcccgagttcaagcgattctc

SEQ ID NO: 470192 - DNA, 201 bp, Homo sapiens
cctgagtagctgggactacaggcatgtgccaccacaccctgctaattttgtatttttagtagagatggggtttcaccatgttggcccggctggtctcgagytcctgacctcaagtgatccatctgctttggcctcccagagtgctgggattacaggcgtgagtgtctgtgcccagccatgagcagagttttgaaggctggg

SEQ ID NO: 470193 - DNA, 201 bp, Homo sapiens
tccatctgctttggcctcccagagtgctgggattacaggcgtgagtgtctgtgcccagccatgagcagagttttgaaggctgggagcacagcagaaaaachaaatttcaagcagagggaacagaatgtgtaaaagcacacagacatgaatagcatgttatgtgaggtgcatggcagacaacccaccatgaccacgagatag

SEQ ID NO: 470194 - DNA, 201 bp, Homo sapiens
ggcgcatgcttgtaatcccagctacttgagaggctgagacaggaggatcacttgagtccaggaatttgaggccagcctgggcaacatagcaagatcccatwtctaaaaataaaaagccagtaacctttaaaaagccattaattaccacaaatcccagtgatttttgtttcttcccatttagcggcagaagttacgtgaaat

SEQ ID NO: 470195 - DNA, 201 bp, Homo sapiens
ggcctcccagagtgctgggattacaggcgtgagtgtctgtgcccagccatgagcagagttttgaaggctgggagcacagcagaaaaacaaaatttcaagcmgagggaacagaatgtgtaaaagcacacagacatgaatagcatgttatgtgaggtgcatggcagacaacccaccatgaccacgagatagtgagtggttctg

SEQ ID NO: 470196 - DNA, 201 bp, Homo sapiens
tgtaaatactttttaatggtgatagctttgcttttgtaagtcatagtatttggcaacattttgtatgtacagtttaattgaagacttttctttttttcaasttaactctaaatttaacataatacctatttgctttttttttttttttttttttttttttaaaagatttggatttccaggaggtagtcatggtaccatgcc

SEQ ID NO: 470197 - DNA, 201 bp, Homo sapiens
gaaaaacaaaatttcaagcagagggaacagaatgtgtaaaagcacacagacatgaatagcatgttatgtgaggtgcatggcagacaacccaccatgaccaygagatagtgagtggttctgagattcagttggaaagggagataagggcctttttgcctcatacttgaaaattctgattttcttttaggtgaaaaatgaggt

SEQ ID NO: 470198 - DNA, 201 bp, Homo sapiens
tagcatgttatgtgaggtgcatggcagacaacccaccatgaccacgagatagtgagtggttctgagattcagttggaaagggagataagggcctttttgcmtcatacttgaaaattctgattttcttttaggtgaaaaatgaggtattggtggagttttaatttatacagaggttaacaattagatttacatttttgaaag

SEQ ID NO: 470199 - DNA, 201 bp, Homo sapiens
aacccaccatgaccacgagatagtgagtggttctgagattcagttggaaagggagataagggcctttttgcctcatacttgaaaattctgattttcttttrggtgaaaaatgaggtattggtggagttttaatttatacagaggttaacaattagatttacatttttgaaagattgttctggatgtgcagaaaatgattta

SEQ ID NO: 470200 - DNA, 201 bp, Homo sapiens
agtggttctgagattcagttggaaagggagataagggcctttttgcctcatacttgaaaattctgattttcttttaggtgaaaaatgaggtattggtggakttttaatttatacagaggttaacaattagatttacatttttgaaagattgttctggatgtgcagaaaatgatttagacaggatgtcagaaccataagtag

SEQ ID NO: 470201 - DNA, 201 bp, Homo sapiens
agtatttttctgtgtctggcttactttatttagtatactttcctcccggttcatccatgttgtcacaaatggcagtgtctcctttcttaaagctaactatyccattgtataaagtcctcattgtcatcagtaagttcttagaaactgtggttaagagggggaaaaaagtatgacaaaactgatttttttttcattttgcat

SEQ ID NO: 470202 - DNA, 201 bp, Homo sapiens
gtgttagccagcatggtctcgatctcatgacctcgtgatctgcctgccgcctcggccccccaaagtgctgggattacaggcatgagcccctgcacctggcycaggaagaccattttttaaaaacatgcaacctttctgcctgtaatccaaggaaatttgacctattgttcatagtttttattgggtatcatgaagttaatt

SEQ ID NO: 470203 - DNA, 201 bp, Homo sapiens
agttaaggcccctgtccttcaaggattcacagagttgtgctgtaattaattgattatgtaacagaagtttcttgtaagcatatgggtaaaagtaatattcracaactaaaggtatttgggtgtggtaataggtattcaggaaataatgtgcagagtttttttttgagacagggtctcactctgtcccccaggctggagtgc

SEQ ID NO: 470204 - DNA, 201 bp, Homo sapiens
tttgtatgtacagtttaattgaagacttttctttttttcaacttaactctaaatttaacataatacctatttgcttttttttttttttttttttttttttwaaaagatttggatttccaggaggtagtcatggtaccatgccgagtcaagagcgcttccttgtgcctcctcagcaaatacagggatctggagtttctccac

SEQ ID NO: 470205 - DNA, 201 bp, Homo sapiens
ttatttatactccatttctcccaacctcttggaagtaactaacttcattgttttctgttttaaacctcctgttatttttcgtctaagaataagaagatatrttgctcttattttcagtgaaggtagcatgttgtgtatgttcttttgcatgttgcttttttcgtgtaataaaatctggaaatcacttccaggcaagttagg

SEQ ID NO: 470206 - DNA, 201 bp, Homo sapiens
ttagctttaattccttttacttcacttaagctttaactccagcctcttttctttggttatctttgtatttcttgacattaagtcctgttgcttttcttttrccctaaattctgtcagtcctctgacctttcttatctacctgccaatgatacggtctagcctctttggatgacatccatgatttattttttcttcccagag

SEQ ID NO: 470207 - DNA, 201 bp, Homo sapiens
tttaggtgaaaaatgaggtattggtggagttttaatttatacagaggttaacaattagatttacatttttgaaagattgttctggatgtgcagaaaatgawttagacaggatgtcagaaccataagtagagatgatttgatgcagaagatactgcagttagcgagacagagtattaggtaggtacaaaggtaattgcagtc

SEQ ID NO: 470208 - DNA, 201 bp, Homo sapiens
aatgaggtattggtggagttttaatttatacagaggttaacaattagatttacatttttgaaagattgttctggatgtgcagaaaatgatttagacaggaygtcagaaccataagtagagatgatttgatgcagaagatactgcagttagcgagacagagtattaggtaggtacaaaggtaattgcagtcttcgccattaa

SEQ ID NO: 470209 - DNA, 201 bp, Homo sapiens
tggtggagttttaatttatacagaggttaacaattagatttacatttttgaaagattgttctggatgtgcagaaaatgatttagacaggatgtcagaaccrtaagtagagatgatttgatgcagaagatactgcagttagcgagacagagtattaggtaggtacaaaggtaattgcagtcttcgccattaaaagtaatgtc

SEQ ID NO: 470210 - DNA, 201 bp, Homo sapiens
gttagcgagacagagtattaggtaggtacaaaggtaattgcagtcttcgccattaaaagtaatgtcaaaaactgcagttacttttgcaccaacctaatatratagactaaactataaacatacaaggaagaatgatgtgtaggaagtttaatacataagaattgggatctggctggatgtgttgggtcagggctgagttca

SEQ ID NO: 470211 - DNA, 201 bp, Homo sapiens
caacctaatatgatagactaaactataaacatacaaggaagaatgatgtgtaggaagtttaatacataagaattgggatctggctggatgtgttgggtcarggctgagttcagagtgaacagtgatactaaggtttctgcctttatctattcttgagaaaaatggatgatgtttcgggtttttaaaaaagtttcactttag

SEQ ID NO: 470212 - DNA, 201 bp, Homo sapiens
gaagaacagcctctacttctacaggatcttttggatcaagaaaggcaagaacagcagcagcaaagacagatgcaagccatgattcgtcagcgatcagaacygttcttccctaatattggtaggagttttcttgagtctcaacgtatattactatgggtattagagtggcatgcgatatgcttataagattttattattaga

SEQ ID NO: 470213 - DNA, 201 bp, Homo sapiens
aacctaatatgatagactaaactataaacatacaaggaagaatgatgtgtaggaagtttaatacataagaattgggatctggctggatgtgttgggtcagrgctgagttcagagtgaacagtgatactaaggtttctgcctttatctattcttgagaaaaatggatgatgtttcgggtttttaaaaaagtttcactttaga

SEQ ID NO: 470214 - DNA, 201 bp, Homo sapiens
tgtaggaagtttaatacataagaattgggatctggctggatgtgttgggtcagggctgagttcagagtgaacagtgatactaaggtttctgcctttatctrttcttgagaaaaatggatgatgtttcgggtttttaaaaaagtttcactttagagcagttgagattgagtgtttttagaacatctggctattgagatccag

SEQ ID NO: 470215 - DNA, 201 bp, Homo sapiens
ggaataaagcactgagtttttctattcctccttgaggagtttgtttgttttgttttgagacggagtctcactgtgtcacccaagatggagtgcagtggcgygatctcggctcacagcaacctccacctcctgggttcaagtgattctcctgcctcagcctcccgagtagctgggactacagacacgtgccaccatgcctgg

SEQ ID NO: 470216 - DNA, 201 bp, Homo sapiens
aaactccagcatttagaaagattgtataggtacaaaagccaacaaaggaggatgagatgaaagtaagggaaaactaaggagaaattaggagagagttgccrtgatagaaactaaggaaaggggcgttttaatgtgggagtggctagcaatgcaaatgctacaaagtgcaaaaagccaaagactaaaaagtaacaatcgggt

SEQ ID NO: 470217 - DNA, 201 bp, Homo sapiens
gtcacccaagatggagtgcagtggcgcgatctcggctcacagcaacctccacctcctgggttcaagtgattctcctgcctcagcctcccgagtagctgggwctacagacacgtgccaccatgcctggccaatttttgtatttttagtagaggtgcggggtttcaccatgttggccaggctggtctcaaactcctgacctca

SEQ ID NO: 470218 - DNA, 201 bp, Homo sapiens
tttagaaagattgtataggtacaaaagccaacaaaggaggatgagatgaaagtaagggaaaactaaggagaaattaggagagagttgccatgatagaaacwaaggaaaggggcgttttaatgtgggagtggctagcaatgcaaatgctacaaagtgcaaaaagccaaagactaaaaagtaacaatcgggtttcctatgggc

SEQ ID NO: 470219 - DNA, 201 bp, Homo sapiens
atgctacaaagtgcaaaaagccaaagactaaaaagtaacaatcgggtttcctatgggcattggcaacctcactaatgtagcttcagatgagtattaggtgytaagccagccttcatgaagtacgtcagaggtccagccagcgtccacattttgaagcctgtttttgtactgccctcaagcgaggaattatttttacatttt

SEQ ID NO: 470220 - DNA, 201 bp, Homo sapiens
ggatagagcatatatgtgtgtatatgctctatcacatatatatatatagatgtgttaatatgctgtgttttattttgacttgaattaggtaatgacagaatttttaaatttttaagtgatttctttaatgatacgtttcaaatatccagatttttttttttttaagactgattggatatttttccttttttctaaattttt

SEQ ID NO: 470221 - DNA, 201 bp, Homo sapiens
ttattcattttttactagagaaaagaacatggcaaacagtgaatctgtgtttcaggaagggtaacgtcgtttttcttttaatttcccttttgaagctctcrgggtgctaccaacatcttggaaatctggataatttgagtattactgagggaatattttcattctacatgctacaaatgtttaatcattttatttatctaa

SEQ ID NO: 470222 - DNA, 201 bp, Homo sapiens
aggtacattcctagggataaaataagtgcatgttacttggacaacatttttgctttctgtttgctaaataaaaatcccttttaaaaattcagtattgccamactttgccatattaaaaatgttttagattactatattatcctgaaactacatgtacacacacacccctaaaataagttttatggtatttcatatgcctgt

SEQ ID NO: 470223 - DNA, 201 bp, Homo sapiens
tagtgattacctgagctaggttagagatttgatgggtgagaaagaacacctaacggtaatcctggagggaaaaaaataaagtgtttgctggagagaatgarttggattgctggacttcaatgtgtgtggattcagtttgtgacttaaaaatgaaaccagtctattgcttgtgtggcttttctcaaaatactgttattccat

SEQ ID NO: 470224 - DNA, 201 bp, Homo sapiens
ttatgtccttcataacctaccccttcctccaagtaggttctaggatttagtttttgtcattggtatttttgaagaatagagttcttctcgatatacttgtktttttctttttttcaaacaaatttccccattttgtctttgatatccccttataattagatgagaggcatgcattattggccagaatactgcaaagtactg

SEQ ID NO: 470225 - DNA, 201 bp, Homo sapiens
gagaaagaacacctaacggtaatcctggagggaaaaaaataaagtgtttgctggagagaatgagttggattgctggacttcaatgtgtgtggattcagttwgtgacttaaaaatgaaaccagtctattgcttgtgtggcttttctcaaaatactgttattccattacctatctcttaccccaagagtagtcacattcttat

SEQ ID NO: 470226 - DNA, 201 bp, Homo sapiens
aatcctgctatcaacttcctaaacttacatcaatgtagtatgtttatctaatgtactagccatattccagttatgtcatttgatcttatgtccttcataayctaccccttcctccaagtaggttctaggatttagtttttgtcattggtatttttgaagaatagagttcttctcgatatacttgtttttttctttttttca

SEQ ID NO: 470227 - DNA, 201 bp, Homo sapiens
gaaggaagttgaaaatcctgctaatttggagatctttgattaaaactagaaataagaatatgggaagcatcaacttccaagatgccctcattgtagataayaccatttaggatctaggctcaagccctgggaaactccagggctttggaagtcaaatagaggaagaacacgtacaggagatgaagaaagattagcgaggaa

SEQ ID NO: 470228 - DNA, 201 bp, Homo sapiens
tcttaaaaaatcacaatcctgctatcaacttcctaaacttacatcaatgtagtatgtttatctaatgtactagccatattccagttatgtcatttgatctkatgtccttcataacctaccccttcctccaagtaggttctaggatttagtttttgtcattggtatttttgaagaatagagttcttctcgatatacttgttt

SEQ ID NO: 470229 - DNA, 201 bp, Homo sapiens
tcctggagggaaaaaaataaagtgtttgctggagagaatgagttggattgctggacttcaatgtgtgtggattcagtttgtgacttaaaaatgaaaccagkctattgcttgtgtggcttttctcaaaatactgttattccattacctatctcttaccccaagagtagtcacattcttatttctggttattttaattcctgg

SEQ ID NO: 470230 - DNA, 201 bp, Homo sapiens
caccgcaacctccgcctcccaagttcaagcaattctcctgcctcagccttctgaatagctgggattacaggcacgcaccacctcgcccggctaattctgtrtttttagtagagatggggtttctccatgttgaggctggtctcgaactcctgacctcaggtgatctgcctgccttggcctcccaaagtgctgggattacag

SEQ ID NO: 470231 - DNA, 201 bp, Homo sapiens
cagatgagtattaggtgctaagccagccttcatgaagtacgtcagaggtccagccagcgtccacattttgaagcctgtttttgtactgccctcaagcgagraattatttttacatttttaaaagagtgcaaataaaaacaaaaagtctgactttttgtcagagactgctatggctcacaaagcctaaaatatttactatct

SEQ ID NO: 470232 - DNA, 201 bp, Homo sapiens
aacttagtgtctctggcttacagacatgtgtgtctaaatattcatatttaatttctgtcatgacaccaaagctatccagtagtatcgataatcttgtacaygacctccaaaaggttgtttcagtattcccacacatcttctccctgactgggagggttggaaccaacctcatttctttgtgtagtgcttttaaaaattatt

SEQ ID NO: 470233 - DNA, 201 bp, Homo sapiens
agccagccttcatgaagtacgtcagaggtccagccagcgtccacattttgaagcctgtttttgtactgccctcaagcgaggaattatttttacatttttaraagagtgcaaataaaaacaaaaagtctgactttttgtcagagactgctatggctcacaaagcctaaaatatttactatctggcccttttcaggaaaagtt

SEQ ID NO: 470234 - DNA, 201 bp, Homo sapiens
ctgccctcaagcgaggaattatttttacatttttaaaagagtgcaaataaaaacaaaaagtctgactttttgtcagagactgctatggctcacaaagcctwaaatatttactatctggcccttttcaggaaaagtttgcagactccggtacaaataaaagaaatatatttttactctgtttcaagatgcttgactggaaaa

SEQ ID NO: 470235 - DNA, 201 bp, Homo sapiens
aggaattatttttacatttttaaaagagtgcaaataaaaacaaaaagtctgactttttgtcagagactgctatggctcacaaagcctaaaatatttactayctggcccttttcaggaaaagtttgcagactccggtacaaataaaagaaatatatttttactctgtttcaagatgcttgactggaaaagaaagaacgtgtg

SEQ ID NO: 470236 - DNA, 201 bp, Homo sapiens
agtccttttaccttattttttgacttgttgattcaacaagttgttacaattgaccactattaattgttcctatcaatttatcatatttttaaacaaatacyttgtggctgttatttagcaagtaggtcacgccagtgttaatatattgtgctttttaccagtataaaattgttctttattctatgtaatgtgttttttgtt

SEQ ID NO: 470237 - DNA, 201 bp, Homo sapiens
aattatttttacatttttaaaagagtgcaaataaaaacaaaaagtctgactttttgtcagagactgctatggctcacaaagcctaaaatatttactatctrgcccttttcaggaaaagtttgcagactccggtacaaataaaagaaatatatttttactctgtttcaagatgcttgactggaaaagaaagaacgtgtgagt

SEQ ID NO: 470238 - DNA, 201 bp, Homo sapiens
gtgcaaataaaaacaaaaagtctgactttttgtcagagactgctatggctcacaaagcctaaaatatttactatctggcccttttcaggaaaagtttgcaractccggtacaaataaaagaaatatatttttactctgtttcaagatgcttgactggaaaagaaagaacgtgtgagtcagagagaaattgataggattgac

SEQ ID NO: 470239 - DNA, 201 bp, Homo sapiens
ccaacagggatgtacaattaaaatggctcagcaacaaccctactttttattccccatgatgtagggattatatatttgataggtttttccagttttgtgtrtacatttacttttttccagaaggagaacttatggattgtgatggaaaatcagaatctagtcctgagcgggaagctgtgaatgatgaaactaagggagtgg

SEQ ID NO: 470240 - DNA, 201 bp, Homo sapiens
tactatctggcccttttcaggaaaagtttgcagactccggtacaaataaaagaaatatatttttactctgtttcaagatgcttgactggaaaagaaagaaygtgtgagtcagagagaaattgataggattgaccaaaccttcaaaatggaaaaaaggctgagtgtggtagctcacacctgtaatcccagcactttgggagg

SEQ ID NO: 470241 - DNA, 201 bp, Homo sapiens
cctgtgcacccagatttggaacaagtgccaccatctcaacaagagcaaggtcattctgtccattcatcttctatggtcatgaggactctgaaccatccacyaggtggtgaattttcagaagctcctttgtcaacatctgtaccgtctgaaacaacgtctgataatttacagataaccacccagccttctgatggtctagag

SEQ ID NO: 470242 - DNA, 201 bp, Homo sapiens
actatctggcccttttcaggaaaagtttgcagactccggtacaaataaaagaaatatatttttactctgtttcaagatgcttgactggaaaagaaagaacrtgtgagtcagagagaaattgataggattgaccaaaccttcaaaatggaaaaaaggctgagtgtggtagctcacacctgtaatcccagcactttgggaggt

SEQ ID NO: 470243 - DNA, 201 bp, Homo sapiens
aaaagaaatatatttttactctgtttcaagatgcttgactggaaaagaaagaacgtgtgagtcagagagaaattgataggattgaccaaaccttcaaaatygaaaaaaggctgagtgtggtagctcacacctgtaatcccagcactttgggaggttgaggcaggaggattgcttgagctcaggagtttgagaccagcctgg

SEQ ID NO: 470244 - DNA, 201 bp, Homo sapiens
aaaaaaagtagtagtttaccttgaaaaatgaaattaaacaattttaagtatatctaataatttaggtattaattacaagtaattcctagactattgtaggtttttttttttttttttgagacagggtctcgctctgtcacccaggccagattgcagtggtgcaagctcagctccctgcaatctctgcctcccaaattcaag

SEQ ID NO: 470245 - DNA, 201 bp, Homo sapiens
ttcccagagattctcttttatagacaaatcactcagcacagtgtcctgccagtgatgaaaattggcagatgatagggtgtgatggaaattagaaagcaatrctgatttggtccttcttaaattcacactgtatgacagctattttgacttttgttgctgttcaccaatgcttttattcttatgtgttgtctggattttctt

SEQ ID NO: 470246 - DNA, 201 bp, Homo sapiens
actctgtttcaagatgcttgactggaaaagaaagaacgtgtgagtcagagagaaattgataggattgaccaaaccttcaaaatggaaaaaaggctgagtgyggtagctcacacctgtaatcccagcactttgggaggttgaggcaggaggattgcttgagctcaggagtttgagaccagcctgggcaatgtggcgaaacac

SEQ ID NO: 470247 - DNA, 201 bp, Homo sapiens
ctcaattattctaggaatctatgctgaatatgcctctaacaatacaaattatgtattacttaatgttattaattatagtattatttaatttgcgaaatatyggaaacaaactaaatgcccacacagaggagaaggtttgaataaactgtgttacatccatatagccatataatggagtaccatgcagataaatcagaaact

SEQ ID NO: 470248 - DNA, 201 bp, Homo sapiens
taactagtttttaaattttttgtagaggctaggttctgctgtgttgtccaggctagtctcgatctcctgagcttaagcgatactcccacctcatcctcccraagtactgggattataggcatgtgccaccacgcctggcttttgttcattattcttcattatcaaataggcacaagatggaccagttagctagaactttgt

SEQ ID NO: 470249 - DNA, 201 bp, Homo sapiens
aaactccctggtctctgttggtgtagaagccaaaatcaggttagagaatgaatgcagctggattggatattagtgacaggaataaagcagtgaaatgactrtagagaaaattcaaggagtatgagtttaggatgaaaatctgggtgggattttatgatttagtagctaaatttgaagctgatacctctgtgtttagttggg

SEQ ID NO: 470250 - DNA, 201 bp, Homo sapiens
ctcccgaatatccgggaccacaggcatgcgccacctcgcctaactagtttttaaattttttgtagaggctaggttctgctgtgttgtccaggctagtctckatctcctgagcttaagcgatactcccacctcatcctcccgaagtactgggattataggcatgtgccaccacgcctggcttttgttcattattcttcatta

SEQ ID NO: 470251 - DNA, 201 bp, Homo sapiens
tgttcctattttgtggcaggaattactgctatctaggaagcagtcatagagtcctctttatttgttaaagaacacaagactgaaacaacaaaatctaaacmaaaagtaaaaccaaaactatcgctccctactgtttctttagcagatccaagttagaatcatgggcagagccagtaataataatagctagaggagaaaaga

SEQ ID NO: 470252 - DNA, 201 bp, Homo sapiens
gaagcataaccagcagtagactcttgtagcaggttaggtgagagatggtggtggccacgactgagctgctagtggtggaagtgacaagaagtagaaggatyggagacaaaacttgaagataaaaagtcttgaatttgctgatgatttgcattgatgaagtgttgggggagaggactgaaggagcaaaggagagtgacaagg

SEQ ID NO: 470253 - DNA, 201 bp, Homo sapiens
aaatatgttcaataagacttgattcatgttaggcagttggggatacaaagttaaaaaagttaaggcccctgtccttcaaggattcacagagttgtgctgtrattaattgattatgtaacagaagtttcttgtaagcatatgggtaaaagtaatattcaacaactaaaggtatttgggtgtggtaataggtattcaggaaat

SEQ ID NO: 470254 - DNA, 201 bp, Homo sapiens
ttatatgtgaattcagttccttttgagttagtaagaaattatgcctgtgttggggtaattgaacttttaggatgagggaattgtctgccacaattattctmtgagcttaatgtttccatgtctttttcttcattttggaagttgtggaaaaattataatgaaagagtatataaacgttttcctctgtattatagcatatct

SEQ ID NO: 470255 - DNA, 201 bp, Homo sapiens
tacattgaagtatgtagttttgtgtttttttctgtgagtctttaaccatttgtgtccctgttaacttacaattgatgagtttattttgtatttatttttargcagggtaaaaaatagtaatatgtctcataaataaaatatatgttcctattactagttttggtgggatttaaaaactttataataatcctcaatatagaa

SEQ ID NO: 470256 - DNA, 201 bp, Homo sapiens
ggctgaggcatgagaatcccttgaacctgggaggcggaggttacagtaagccgagatcgtgccattgcactctagcctaggtgacagagtgaaactctgtmtcaaaaaaaaaggaaaaaaaaaaggttcatatactttgtgatacttgttaaatacaggcatatttatatatattatctaaggttggtatgataggcttga

SEQ ID NO: 470257 - DNA, 201 bp, Homo sapiens
atactgtcttaaatcatagtgttattatgagggttaaatgaaaacaatgaatggaattcacataacattgtgccttgtatgtattaattgctttaaaaagygtagttattttacctcctatctaaggattaagttatgagaatgataatacatattgagtatatgtattttctgttgcttcctaaggggcagagcagtagc

SEQ ID NO: 470258 - DNA, 201 bp, Homo sapiens
aaaaaaaaggaaaaaaaaaaggttcatatactttgtgatacttgttaaatacaggcatatttatatatattatctaaggttggtatgataggcttgactgkaaaagaaagaacgtatgagtcagaatagtagataggaatgatcaaaccttcaaaaaatgaaaagattcatatactttgtgatacttgttatatacaggca

SEQ ID NO: 470259 - DNA, 201 bp, Homo sapiens
tagtagataggaatgatcaaaccttcaaaaaatgaaaagattcatatactttgtgatacttgttatatacaggcatattttttatacattatctaagattrgtatgattttagaatacattattttccttattttgcagtatgcataagtttaactgtatatttggcagggcagtttatccttatattttctgttttatat

SEQ ID NO: 470260 - DNA, 201 bp, Homo sapiens
aaaaaatgaaaagattcatatactttgtgatacttgttatatacaggcatattttttatacattatctaagattggtatgattttagaatacattattttycttattttgcagtatgcataagtttaactgtatatttggcagggcagtttatccttatattttctgttttatatggtaaaagaactgttagtacattttc

SEQ ID NO: 470261 - DNA, 201 bp, Homo sapiens
cttgttatatacaggcatattttttatacattatctaagattggtatgattttagaatacattattttccttattttgcagtatgcataagtttaactgtrtatttggcagggcagtttatccttatattttctgttttatatggtaaaagaactgttagtacattttcttttaatccacatttagggatggatgatgtcc

SEQ ID NO: 470262 - DNA, 201 bp, Homo sapiens
tatacaggcatattttttatacattatctaagattggtatgattttagaatacattattttccttattttgcagtatgcataagtttaactgtatatttgkcagggcagtttatccttatattttctgttttatatggtaaaagaactgttagtacattttcttttaatccacatttagggatggatgatgtccataatta

SEQ ID NO: 470263 - DNA, 201 bp, Homo sapiens
tatccttatattttctgttttatatggtaaaagaactgttagtacattttcttttaatccacatttagggatggatgatgtccataattatgtggattttratgcttttacaactagaaattaatatagatgaatatataattagtatattaagtaatgtgtttgtgtatgaatatgtagcttctgtctttaatgttcttc

SEQ ID NO: 470264 - DNA, 201 bp, Homo sapiens
aagaactgttagtacattttcttttaatccacatttagggatggatgatgtccataattatgtggattttaatgcttttacaactagaaattaatatagaygaatatataattagtatattaagtaatgtgtttgtgtatgaatatgtagcttctgtctttaatgttcttccacataaggcattttccagtaattaaaaaa

SEQ ID NO: 470265 - DNA, 201 bp, Homo sapiens
gtctttgtgaaacttactttgacaagtattttatgaaaaatattatttttggttatacatgacttatcacaacttgttataaaacaatttacatgaaacartaaaaagcatatactttagatgtaaactataattttgcttccaaggaacatgatcttgtagttattgacaatatgtcagaatccaatatgttgattgttt

SEQ ID NO: 470266 - DNA, 201 bp, Homo sapiens
cattttcttttaatccacatttagggatggatgatgtccataattatgtggattttaatgcttttacaactagaaattaatatagatgaatatataattartatattaagtaatgtgtttgtgtatgaatatgtagcttctgtctttaatgttcttccacataaggcattttccagtaattaaaaaaaagcccttatatga

SEQ ID NO: 470267 - DNA, 201 bp, Homo sapiens
ttctcatggagaagaaataccaaaattgtggcatatttcattgtctggttaataccttaaaatgacaaggctttttcccccatgacattggttgatggctstgccagtccttgaagtgagttaagtagtgtgatgcattttgaagagaaaaaaattaatttgaaaaagtattaactcaaaagttaaaatacttcattgact

SEQ ID NO: 470268 - DNA, 201 bp, Homo sapiens
agaactcaacagaatcccatgcttgtctttatatgtgaattcagttccttttgagttagtaagaaattatgcctgtgttggggtaattgaacttttaggakgagggaattgtctgccacaattattctatgagcttaatgtttccatgtctttttcttcattttggaagttgtggaaaaattataatgaaagagtatataa

SEQ ID NO: 470269 - DNA, 201 bp, Homo sapiens
tatagatgaatatataattagtatattaagtaatgtgtttgtgtatgaatatgtagcttctgtctttaatgttcttccacataaggcattttccagtaatyaaaaaaaagcccttatatgatttgaatagtctgtttatgcttaagaagcatcttagtctaattgatattaatgtttcttaattttgtctcttatctgatt

SEQ ID NO: 470270 - DNA, 201 bp, Homo sapiens
caagtagtagaaaaatgttgtgtttaactctgaaatatgctttgcctcatattagtatttctactctagctttctcttgactagcgtaagcatggtgtatrttattccattcttttattttaacctgtttgcatctttgtatttaacttgtgtttcttgaaggcgatagttttatttctctgataaaaacatataagaaga

SEQ ID NO: 470271 - DNA, 201 bp, Homo sapiens
aacggtaatcctggagggaaaaaaataaagtgtttgctggagagaatgagttggattgctggacttcaatgtgtgtggattcagtttgtgacttaaaaatkaaaccagtctattgcttgtgtggcttttctcaaaatactgttattccattacctatctcttaccccaagagtagtcacattcttatttctggttatttta

SEQ ID NO: 470272 - DNA, 201 bp, Homo sapiens
tcccgggttcaagcgattctcctgcctcagcctcccgcatagctgggattacaggtgcccgccaccacgcctggctaatttgttgtatttttagaagagamagggtttcactgtgttagccagcatggtctcgatctcatgacctcgtgatctgcctgccgcctcggccccccaaagtgctgggattacaggcatgagccc

SEQ ID NO: 470273 - DNA, 201 bp, Homo sapiens
acccaccatgaccacgagatagtgagtggttctgagattcagttggaaagggagataagggcctttttgcctcatacttgaaaattctgattttcttttargtgaaaaatgaggtattggtggagttttaatttatacagaggttaacaattagatttacatttttgaaagattgttctggatgtgcagaaaatgatttag

SEQ ID NO: 470274 - DNA, 201 bp, Homo sapiens
tatattaagtaatgtgtttgtgtatgaatatgtagcttctgtctttaatgttcttccacataaggcattttccagtaattaaaaaaaagcccttatatgayttgaatagtctgtttatgcttaagaagcatcttagtctaattgatattaatgtttcttaattttgtctcttatctgattttgtaatttcaaaatatattt

SEQ ID NO: 470275 - DNA, 201 bp, Homo sapiens
accaaaaccaaaccgacaactaatggtcactgaagaaagagtgattaaatgcttagattataatggtatttgcattttaatgttaccagctctctacagtktaacgtgtatgcatttatcgattgcttatgtttctccttgcattctttggcctactggttttggttgtttatagctatagaatatagaattccttatggt

SEQ ID NO: 470276 - DNA, 201 bp, Homo sapiens
ttaatgttcttccacataaggcattttccagtaattaaaaaaaagcccttatatgatttgaatagtctgtttatgcttaagaagcatcttagtctaattgrtattaatgtttcttaattttgtctcttatctgattttgtaatttcaaaatatatttaacattcaaagaaaatgtttatgttacactgcaaagcatttctt

SEQ ID NO: 470277 - DNA, 201 bp, Homo sapiens
tttcttaacttcaggatatgtgtgtagtttgtggcagttttggccaaggagcagaaggaagattacttgcctgttctcagtgtggtcagtgttaccatccrtactgtgtcagtattaaggtaaacatccttaaattgagttaacaaatatgtattgaatttttatttggttttagtagtaacatgagctcccagttctcac

SEQ ID NO: 470278 - DNA, 201 bp, Homo sapiens
tagtctgtttatgcttaagaagcatcttagtctaattgatattaatgtttcttaattttgtctcttatctgattttgtaatttcaaaatatatttaacatkcaaagaaaatgtttatgttacactgcaaagcatttcttaatttgtattttccttgtttggttctttccagtaagcatatattgagcattaattaggtatc

SEQ ID NO: 470279 - DNA, 201 bp, Homo sapiens
gggcttctagaagtacggcttggtgttccaccaaagacttcaggggatcctttgtagatttctggagctcttagtcgttattgcttcttcattttgagtastgtgtcctgcaaattccactgccttgccttccctaacctcagcgaggccattgattgtactctgctgaggttctccctccctgggcagcattctggaaaa

SEQ ID NO: 470280 - DNA, 201 bp, Homo sapiens
gtttcttaattttgtctcttatctgattttgtaatttcaaaatatatttaacattcaaagaaaatgtttatgttacactgcaaagcatttcttaatttgtrttttccttgtttggttctttccagtaagcatatattgagcattaattaggtatccagcattatcattggcattaggaatagaaaattaaagaagacctgc

SEQ ID NO: 470281 - DNA, 201 bp, Homo sapiens
tgtctcttatctgattttgtaatttcaaaatatatttaacattcaaagaaaatgtttatgttacactgcaaagcatttcttaatttgtattttccttgttyggttctttccagtaagcatatattgagcattaattaggtatccagcattatcattggcattaggaatagaaaattaaagaagacctgcttatggtctcaa

SEQ ID NO: 470282 - DNA, 201 bp, Homo sapiens
gtctcttatctgattttgtaatttcaaaatatatttaacattcaaagaaaatgtttatgttacactgcaaagcatttcttaatttgtattttccttgtttkgttctttccagtaagcatatattgagcattaattaggtatccagcattatcattggcattaggaatagaaaattaaagaagacctgcttatggtctcaag

SEQ ID NO: 470283 - DNA, 201 bp, Homo sapiens
cttttttccttccttctctcccttcgtccctccctccttcccttccttccttccttctttcctttttttctttccttcctttctttctctttctctctctytttttttttctttgaaagggtgtcactctgttgcccaggctggagtacagtgccatgctcacaactcactgcagtctcaacttcctgggctcaggcaatc

SEQ ID NO: 470284 - DNA, 201 bp, Homo sapiens
tccttgtttggttctttccagtaagcatatattgagcattaattaggtatccagcattatcattggcattaggaatagaaaattaaagaagacctgcttayggtctcaagtagatatagccacaaataattgcaaaactatacgattaaatttaatgtggttacatttagattaaataccctacagtgtttttattggtac

SEQ ID NO: 470285 - DNA, 201 bp, Homo sapiens
atgaacaggcagcatgtcattttacttggagcatagtagcctactaggtgggtagtagagacatcatcaaggcgaacaaaggctagatcatgtaggccttstaagcaagggaaggagtttgggttctattcggtctgcaatgagaagtctttgcaaggtttaaacatggaaatgctacatatcctaattcaccccctgttc

SEQ ID NO: 470286 - DNA, 201 bp, Homo sapiens
ggttctttccagtaagcatatattgagcattaattaggtatccagcattatcattggcattaggaatagaaaattaaagaagacctgcttatggtctcaaktagatatagccacaaataattgcaaaactatacgattaaatttaatgtggttacatttagattaaataccctacagtgtttttattggtacctctttctg

SEQ ID NO: 470287 - DNA, 201 bp, Homo sapiens
aagcatatattgagcattaattaggtatccagcattatcattggcattaggaatagaaaattaaagaagacctgcttatggtctcaagtagatatagccamaaataattgcaaaactatacgattaaatttaatgtggttacatttagattaaataccctacagtgtttttattggtacctctttctgattagatgacaat

SEQ ID NO: 470288 - DNA, 201 bp, Homo sapiens
ttttgaacatggctgaattttacttttctgtccacctgcccgccattcgtgctacccctccttcctttttccactctcatctttttcccattttccagtckgtaaatcctacctatccttttattttttaaattacaagatctcattctgttacttaggcaggagtgcggtggcacaatcatagttgactgcagcttcgaa

SEQ ID NO: 470289 - DNA, 201 bp, Homo sapiens
aggtgttttactcttaaaataagacattaaaaaaatacttctgttgtctcccctcatagaattggtaatctcttccttctccaccctcatcccctgctgtrattctatattgaaatttcattgtattttgtgccagatgtctttgtgtaaaaccaacttagttctgtgagaagagttgtacgtttttaatatttttgttct

SEQ ID NO: 470290 - DNA, 201 bp, Homo sapiens
aggatcacttgagcccaagagttctaggctgcagtgagctatgatcacaccactgcactccaacctgagtgacggagcaagttcttgtctcaaaaataaamgtaataacaataatgataaattttcctctaaatacaatggtgaatgaggtagaaatgttgagttcataagagaactgttgaatagtgaaggaaactgact

SEQ ID NO: 470291 - DNA, 201 bp, Homo sapiens
tgaaagcggtgtgatcacaaaactaaacttttggaagaaaacttcaaagaacataacacaagctgagagggagggagttcatggaatttataaatggaaakaatgtaataataaaacagatcaataaagtccttcttttgtttctctaaataagcttttaattttaagaatataacataatacaatagcaaatccagaatt

SEQ ID NO: 470292 - DNA, 201 bp, Homo sapiens
gcaaacttaaaatgtctattagcaaatttaatggagtgaatcaggctgtatcttatatcctcatgttctgccttaaataatggcaattatataaaatcctstcctgagaaatggaattggtttcatttccttgttttaaaagtgaaattaatttttagtgaaaattcttatgagctcagataattatataaaaatagcctt

SEQ ID NO: 470293 - DNA, 201 bp, Homo sapiens
tgttctgtataatagtatctaatgttggcaaaaattgaattttttgaagtatacagagtgttatgggttttggaatttgtggacacagatttagaagatcmccatttacaaataaaatattttacatctataagagctgcctagagcttctctgttaactcctcatattcaaatttgagctcttaaattgaggattgtctg

SEQ ID NO: 470294 - DNA, 201 bp, Homo sapiens
tacactttgtcccattttctactatcttatgggagaacaggctggtcccacctactccattatagttgaagcgtgtatccgtattagattataaaacatayctgtaacaactttggacatggtaccatggatggaatcctggatgacatcttatttgaaaaaacttttaaaactaaggctagactggttcaacggaagaaa

SEQ ID NO: 470295 - DNA, 201 bp, Homo sapiens
ttaggtatccagcattatcattggcattaggaatagaaaattaaagaagacctgcttatggtctcaagtagatatagccacaaataattgcaaaactataygattaaatttaatgtggttacatttagattaaataccctacagtgtttttattggtacctctttctgattagatgacaattcaatgtgaataacttcaaa

SEQ ID NO: 470296 - DNA, 201 bp, Homo sapiens
aaaattaaagaagacctgcttatggtctcaagtagatatagccacaaataattgcaaaactatacgattaaatttaatgtggttacatttagattaaatamcctacagtgtttttattggtacctctttctgattagatgacaattcaatgtgaataacttcaaatgtctgaaaggttcatgatgcaaatcctttcaaatg

SEQ ID NO: 470297 - DNA, 201 bp, Homo sapiens
aaattaaagaagacctgcttatggtctcaagtagatatagccacaaataattgcaaaactatacgattaaatttaatgtggttacatttagattaaatacmctacagtgtttttattggtacctctttctgattagatgacaattcaatgtgaataacttcaaatgtctgaaaggttcatgatgcaaatcctttcaaatga

SEQ ID NO: 470298 - DNA, 201 bp, Homo sapiens
aagtagatatagccacaaataattgcaaaactatacgattaaatttaatgtggttacatttagattaaataccctacagtgtttttattggtacctctttytgattagatgacaattcaatgtgaataacttcaaatgtctgaaaggttcatgatgcaaatcctttcaaatgattttactgtatagtcagaaaaaatttaa

SEQ ID NO: 470299 - DNA, 201 bp, Homo sapiens
gttcatgatgcaaatcctttcaaatgattttactgtatagtcagaaaaaatttaaattcttatacaacaatttcattgtttcactgttaattatagcgaasgaagatgcaaactgtgcagtgtgcgacagcccgggagacctcttagatcagttcttttgtactacttgtggtcagcactatcatggaatgtgcctggata

SEQ ID NO: 470300 - DNA, 201 bp, Homo sapiens
gattttactgtatagtcagaaaaaatttaaattcttatacaacaatttcattgtttcactgttaattatagcgaaggaagatgcaaactgtgcagtgtgcracagcccgggagacctcttagatcagttcttttgtactacttgtggtcagcactatcatggaatgtgcctggatatagcggttactccattaaaacgtgc

SEQ ID NO: 470301 - DNA, 201 bp, Homo sapiens
gaagatgcaaactgtgcagtgtgcgacagcccgggagacctcttagatcagttcttttgtactacttgtggtcagcactatcatggaatgtgcctggatayagcggttactccattaaaacgtgcaggttggcaatgtcctgagtgcaaagtgtgccagaactgcaagtaagttttcatttcaattcaaagctgtgtattg

SEQ ID NO: 470302 - DNA, 201 bp, Homo sapiens
cattaaaacgtgcaggttggcaatgtcctgagtgcaaagtgtgccagaactgcaagtaagttttcatttcaattcaaagctgtgtattgggtttaagaggsaccctattactaggtgctaaaggtttgtgtaatataatagaggttgttcatattttagctatattcattcagtgacttcatcatacttaaaaaaattact

SEQ ID NO: 470303 - DNA, 201 bp, Homo sapiens
gtgcaggttggcaatgtcctgagtgcaaagtgtgccagaactgcaagtaagttttcatttcaattcaaagctgtgtattgggtttaagagggaccctattrctaggtgctaaaggtttgtgtaatataatagaggttgttcatattttagctatattcattcagtgacttcatcatacttaaaaaaattactggatattat

SEQ ID NO: 470304 - DNA, 201 bp, Homo sapiens
gtctaaagagctaatttaaatttgccaacaatttaaaaaataagcgatattaacaatttaaaacaaacagaagaataaagtagtttttcttaaggggtacyggggaggagatttaataggatttaaacgtctaactacagaagtagaagaattagagttgagccaaaaaatcagtcatgtgtttgaatttccattccagga

SEQ ID NO: 470305 - DNA, 201 bp, Homo sapiens
caccagtacctccagttcttgtccttctccactgaattctttgccttctcattcttgcatgtctgttcttctacaataaaaattctgggttgtagcaacarcagcacatttattcagttgctcaatctaaaaagcaagtctgcttcagtttgctctcagtaatagattttattcccctttcttttcttagtgatttaattt

SEQ ID NO: 470306 - DNA, 201 bp, Homo sapiens
tttttaaagtgattttctaactccttatgtcttaatagagagtgtgacatttttataagcaagttaatagaaccaaaacgttgaagattgaaaatcagctrttttaggggggaaggagtaattcatttcactttaaaattgttttatctcttcagcagaggtacagttggccgtctgtatccatgagttctatatctgtgg

SEQ ID NO: 470307 - DNA, 201 bp, Homo sapiens
atctaaaaagcaagtctgcttcagtttgctctcagtaatagattttattcccctttcttttcttagtgatttaattttttaaatatagaagatattagtayactttcaaaactcaatactatatgaagttttactcagaattgtcactgcctcttgtttattatttatactccatttctcccaacctcttggaagtaacta

SEQ ID NO: 470308 - DNA, 201 bp, Homo sapiens
atataggaatctgaattttattcagccttttgtagttaatcatgctttagacctcagcaaacaacatgcaaacttttacaagaatgttgttgtagtgttaraatattttattacttaatggcagtgctactttctactgaaaactgtgttctaacagtgtataccttcagttacatgttagcaatcataaatcagtttgta

SEQ ID NO: 470309 - DNA, 201 bp, Homo sapiens
tttcagtgaaggtagcatgttgtgtatgttcttttgcatgttgcttttttcgtgtaataaaatctggaaatcacttccaggcaagttaggcaagttcaagrgatctcattctccttttaaacagctgcatagcactccattgtgtatctgtgctatgggttactcaaccaatggcctgtgctttggtatttcagtagttta

SEQ ID NO: 470310 - DNA, 201 bp, Homo sapiens
taactgctataaggaccccaaaataaaaggaataatcaaacatcactcaaagcttttagcacagtttttgataacagtcagtgtcagaaggagaagacaaytttgttcctaaaagttatattgtaaaataaatgtagcttatacatttttgaaagtgaaatctcaggattcatggtatctttacttctacttgccaaatta

SEQ ID NO: 470311 - DNA, 201 bp, Homo sapiens
ataaaatctggaaatcacttccaggcaagttaggcaagttcaagagatctcattctccttttaaacagctgcatagcactccattgtgtatctgtgctatsggttactcaaccaatggcctgtgctttggtatttcagtagtttacgatattttgcattataaatgattttacactccctagctttgtgcatgtgtgtttt

SEQ ID NO: 470312 - DNA, 201 bp, Homo sapiens
ctggaaatcacttccaggcaagttaggcaagttcaagagatctcattctccttttaaacagctgcatagcactccattgtgtatctgtgctatgggttacwcaaccaatggcctgtgctttggtatttcagtagtttacgatattttgcattataaatgattttacactccctagctttgtgcatgtgtgtttttgaattc

SEQ ID NO: 470313 - DNA, 201 bp, Homo sapiens
ggatgcatgcagtttgtcagaacttaaatactgaggaagaagtggaaaatgtagcagacattggttttgattgtagcatgtgcagaccctatatgcctgcrtctaatggtaagagaataatttaaactgtgagtctgcactcttgtaccactcacttgcaccttactgtccataaccaatgaattagcttagctctactct

SEQ ID NO: 470314 - DNA, 201 bp, Homo sapiens
tggaaatcacttccaggcaagttaggcaagttcaagagatctcattctccttttaaacagctgcatagcactccattgtgtatctgtgctatgggttactyaaccaatggcctgtgctttggtatttcagtagtttacgatattttgcattataaatgattttacactccctagctttgtgcatgtgtgtttttgaattct

SEQ ID NO: 470315 - DNA, 201 bp, Homo sapiens
ctcattctccttttaaacagctgcatagcactccattgtgtatctgtgctatgggttactcaaccaatggcctgtgctttggtatttcagtagtttacgayattttgcattataaatgattttacactccctagctttgtgcatgtgtgtttttgaattctcagggacaaatctgtagggtaaattcctagaagtaggatt

SEQ ID NO: 470316 - DNA, 201 bp, Homo sapiens
caaacagaagaataaagtagtttttcttaaggggtactggggaggagatttaataggatttaaacgtctaactacagaagtagaagaattagagttgagcyaaaaaatcagtcatgtgtttgaatttccattccaggaaggacaatttctactattattttaatgtacatctgcatctctctaaaagccaccttgagtaga

SEQ ID NO: 470317 - DNA, 201 bp, Homo sapiens
cattctccttttaaacagctgcatagcactccattgtgtatctgtgctatgggttactcaaccaatggcctgtgctttggtatttcagtagtttacgatawtttgcattataaatgattttacactccctagctttgtgcatgtgtgtttttgaattctcagggacaaatctgtagggtaaattcctagaagtaggattat

SEQ ID NO: 470318 - DNA, 201 bp, Homo sapiens
agaagaataaagtagtttttcttaaggggtactggggaggagatttaataggatttaaacgtctaactacagaagtagaagaattagagttgagccaaaamatcagtcatgtgtttgaatttccattccaggaaggacaatttctactattattttaatgtacatctgcatctctctaaaagccaccttgagtagatcctg

SEQ ID NO: 470319 - DNA, 201 bp, Homo sapiens
tgtgtttttgaattctcagggacaaatctgtagggtaaattcctagaagtaggattattgcctcaggagtgtacacatatgtagctttgttagatactgtragattccctttcttggggcttatggtactttgcattgccaccagagatgtgtgagagaacttttcttacgtctttgctaacaggatgacttgttcagctt

SEQ ID NO: 470320 - DNA, 201 bp, Homo sapiens
catctctctaaaagccaccttgagtagatcctggtcagcataattccaaaacgaaatatgtggcatttacaaatttgtaagggggttatattttcctatgktatttcatctcttggtcatttctccagtcttttctgtgatttccgcttgcacccccatgattctaatgagcatgataatttggggatgttaccagtatct

SEQ ID NO: 470321 - DNA, 201 bp, Homo sapiens
tccaaaacgaaatatgtggcatttacaaatttgtaagggggttatattttcctatggtatttcatctcttggtcatttctccagtcttttctgtgatttcygcttgcacccccatgattctaatgagcatgataatttggggatgttaccagtatcttcatttacaggctgagaatttttgttgtaaccagcaagaattat

SEQ ID NO: 470322 - DNA, 201 bp, Homo sapiens
attctcagggacaaatctgtagggtaaattcctagaagtaggattattgcctcaggagtgtacacatatgtagctttgttagatactgtcagattcccttkcttggggcttatggtactttgcattgccaccagagatgtgtgagagaacttttcttacgtctttgctaacaggatgacttgttcagcttttgaatgtttg

SEQ ID NO: 470323 - DNA, 201 bp, Homo sapiens
aaatatgtggcatttacaaatttgtaagggggttatattttcctatggtatttcatctcttggtcatttctccagtcttttctgtgatttccgcttgcacycccatgattctaatgagcatgataatttggggatgttaccagtatcttcatttacaggctgagaatttttgttgtaaccagcaagaattatgcccaactg

SEQ ID NO: 470324 - DNA, 201 bp, Homo sapiens
tgttaccagtatcttcatttacaggctgagaatttttgttgtaaccagcaagaattatgcccaactgccatgatcagtctgtttttattatttagtttgawaagaaataaacgtcagtatcttagagttacgtgacataaataggactatgtacctccatattttggtaaaaattagataaaatattcagtaaacatttat

SEQ ID NO: 470325 - DNA, 201 bp, Homo sapiens
atttttgttgtaaccagcaagaattatgcccaactgccatgatcagtctgtttttattatttagtttgataagaaataaacgtcagtatcttagagttacrtgacataaataggactatgtacctccatattttggtaaaaattagataaaatattcagtaaacatttattcgataccttatatctgcgctcagtttcttg

SEQ ID NO: 470326 - DNA, 201 bp, Homo sapiens
cagatgagcttctggagtattctctcttctcttacgtaaatagatccctgccttttgatcttttctacgaagaagctcatagtggattagctgagcattgmatttagttgcagtgcttctaactctttttattgggacatgaaaatagaaattccaggaagacttttttgagacagagtctcgccctgtcgcccaggctgg

SEQ ID NO: 470327 - DNA, 201 bp, Homo sapiens
taagaaataaacgtcagtatcttagagttacgtgacataaataggactatgtacctccatattttggtaaaaattagataaaatattcagtaaacatttaytcgataccttatatctgcgctcagtttcttgggaaggattaaaagaacttgaaggaagagtacttgtcctccaagatctttccacgtagctgaggagata

SEQ ID NO: 470328 - DNA, 201 bp, Homo sapiens
tatgtacctccatattttggtaaaaattagataaaatattcagtaaacatttattcgataccttatatctgcgctcagtttcttgggaaggattaaaagarcttgaaggaagagtacttgtcctccaagatctttccacgtagctgaggagataaaacgtgactttttatggagaggctgaactgaataataattggaggc

SEQ ID NO: 470329 - DNA, 201 bp, Homo sapiens
gcatgttttttggtagactgtggactatcttacaagtaaggccgtgtataggctaagcatttaagtttacacctatagtccatacttcctgagctgcagamccaaatatccaaatgcctgttcagcatttttctccttggatgtctcagaatggaattacaaagctcttactttgtcaaacttgtccagctcctaaacccc

SEQ ID NO: 470330 - DNA, 201 bp, Homo sapiens
gcgctcagtttcttgggaaggattaaaagaacttgaaggaagagtacttgtcctccaagatctttccacgtagctgaggagataaaacgtgactttttatrgagaggctgaactgaataataattggaggctaactgacccatcttcctgttgacatctatttatcccccagatttcattcagagattcctctctcagctc

SEQ ID NO: 470331 - DNA, 201 bp, Homo sapiens
tcatggcagaagttaatttttatgcttttaaaatgatactgtcttaaatcatagtgttattatgagggttaaatgaaaacaatgaatggaattcacataasattgtgccttgtatgtattaattgctttaaaaagggtagttattttacctcctatctaaggattaagttatgagaatgataatacatattgagtatatgt

SEQ ID NO: 470332 - DNA, 201 bp, Homo sapiens
tactgtcttaaatcatagtgttattatgagggttaaatgaaaacaatgaatggaattcacataacattgtgccttgtatgtattaattgctttaaaaaggrtagttattttacctcctatctaaggattaagttatgagaatgataatacatattgagtatatgtattttctgttgcttcctaaggggcagagcagtagct

SEQ ID NO: 470333 - DNA, 201 bp, Homo sapiens
tgtgctgtgccttccatgaggatcacacagactaccttctttcccccttaacgaaaatacaacaacatatgtgactgcccaagaaacacagtttttatctyggctggtcatgtaggtgtactctctgcctagcatgtgtgaaatttccagactcataaaaagaatagcaggataagccacattatttccatagtctagata

SEQ ID NO: 470334 - DNA, 201 bp, Homo sapiens
ctcagggacaaatctgtagggtaaattcctagaagtaggattattgcctcaggagtgtacacatatgtagctttgttagatactgtcagattccctttctkggggcttatggtactttgcattgccaccagagatgtgtgagagaacttttcttacgtctttgctaacaggatgacttgttcagcttttgaatgtttgtct

SEQ ID NO: 470335 - DNA, 201 bp, Homo sapiens
tctgtagggtaaattcctagaagtaggattattgcctcaggagtgtacacatatgtagctttgttagatactgtcagattccctttcttggggcttatggyactttgcattgccaccagagatgtgtgagagaacttttcttacgtctttgctaacaggatgacttgttcagcttttgaatgtttgtctgtcttctgggcg

SEQ ID NO: 470336 - DNA, 201 bp, Homo sapiens
agctttgttagatactgtcagattccctttcttggggcttatggtactttgcattgccaccagagatgtgtgagagaacttttcttacgtctttgctaacrggatgacttgttcagcttttgaatgtttgtctgtcttctgggcgaaaagtggtgtatcaatgtagttttaatttttgtttatcctgagtgaagttgatcg

SEQ ID NO: 470337 - DNA, 201 bp, Homo sapiens
tactttgcattgccaccagagatgtgtgagagaacttttcttacgtctttgctaacaggatgacttgttcagcttttgaatgtttgtctgtcttctgggckaaaagtggtgtatcaatgtagttttaatttttgtttatcctgagtgaagttgatcgttttttcatgtgtttaagggtcagttttaatttcttctcgtgaa

SEQ ID NO: 470338 - DNA, 201 bp, Homo sapiens
ctaacaggatgacttgttcagcttttgaatgtttgtctgtcttctgggcgaaaagtggtgtatcaatgtagttttaatttttgtttatcctgagtgaagtygatcgttttttcatgtgtttaagggtcagttttaatttcttctcgtgaattgtctgttcatgtgttttgcctgttattgaagattttggcattttcccct

SEQ ID NO: 470339 - DNA, 201 bp, Homo sapiens
aggatgacttgttcagcttttgaatgtttgtctgtcttctgggcgaaaagtggtgtatcaatgtagttttaatttttgtttatcctgagtgaagttgatcrttttttcatgtgtttaagggtcagttttaatttcttctcgtgaattgtctgttcatgtgttttgcctgttattgaagattttggcattttcccctaaatt

SEQ ID NO: 470340 - DNA, 201 bp, Homo sapiens
agcagcttgggaggctgaggtgggaggaccacttgagcccaggaggttgaggctgcagtgagccatgtttgtgctactctactccagcttgggtcacagastgagaccctgtttcaaaaaaaaaaaaaaaaaaccagataaattttagtcactgattggtaaatgaggctagcagtgtctttttactataacttaaaaatt

SEQ ID NO: 470341 - DNA, 201 bp, Homo sapiens
ggaagagtacttgtcctccaagatctttccacgtagctgaggagataaaacgtgactttttatggagaggctgaactgaataataattggaggctaactgrcccatcttcctgttgacatctatttatcccccagatttcattcagagattcctctctcagctcttcttgctttccctgttgtttcttttcccctcctctt

SEQ ID NO: 470342 - DNA, 201 bp, Homo sapiens
ggctgaggtgggaggaccacttgagcccaggaggttgaggctgcagtgagccatgtttgtgctactctactccagcttgggtcacagagtgagaccctgtwtcaaaaaaaaaaaaaaaaaaccagataaattttagtcactgattggtaaatgaggctagcagtgtctttttactataacttaaaaattaccttgatgaga

SEQ ID NO: 470343 - DNA, 201 bp, Homo sapiens
ctttccacgtagctgaggagataaaacgtgactttttatggagaggctgaactgaataataattggaggctaactgacccatcttcctgttgacatctatktatcccccagatttcattcagagattcctctctcagctcttcttgctttccctgttgtttcttttcccctcctcttgaatttaaaatcatagtatctgaa

SEQ ID NO: 470344 - DNA, 201 bp, Homo sapiens
gaataataattggaggctaactgacccatcttcctgttgacatctatttatcccccagatttcattcagagattcctctctcagctcttcttgctttcccygttgtttcttttcccctcctcttgaatttaaaatcatagtatctgaaagtgattatagtcaaaaatctcaacagagataaagctgtaggacaggggccca

SEQ ID NO: 470345 - DNA, 201 bp, Homo sapiens
tgcagtgagccatgtttgtgctactctactccagcttgggtcacagagtgagaccctgtttcaaaaaaaaaaaaaaaaaaccagataaattttagtcactkattggtaaatgaggctagcagtgtctttttactataacttaaaaattaccttgatgagattgagttaaaggtttaacatactggtatcctgatttaaaat

SEQ ID NO: 470346 - DNA, 201 bp, Homo sapiens
aataattggaggctaactgacccatcttcctgttgacatctatttatcccccagatttcattcagagattcctctctcagctcttcttgctttccctgttktttcttttcccctcctcttgaatttaaaatcatagtatctgaaagtgattatagtcaaaaatctcaacagagataaagctgtaggacaggggcccaatct

SEQ ID NO: 470347 - DNA, 201 bp, Homo sapiens
gtgagccatgtttgtgctactctactccagcttgggtcacagagtgagaccctgtttcaaaaaaaaaaaaaaaaaaccagataaattttagtcactgattkgtaaatgaggctagcagtgtctttttactataacttaaaaattaccttgatgagattgagttaaaggtttaacatactggtatcctgatttaaaatttac

SEQ ID NO: 470348 - DNA, 201 bp, Homo sapiens
tttctggttttatgacccccttcttatctaagtgtatgctctgtgccccgcatatacaaactagttcccataacatgtgtaatataatccctcctttcccrgggtttcccggcttcctgtccttccccttagctttctatcatcagtttttcctaggatttctggttcagcctatgtcaaagtgagagtcaccaacatagt

SEQ ID NO: 470349 - DNA, 201 bp, Homo sapiens
tggaggctaactgacccatcttcctgttgacatctatttatcccccagatttcattcagagattcctctctcagctcttcttgctttccctgttgtttctsttcccctcctcttgaatttaaaatcatagtatctgaaagtgattatagtcaaaaatctcaacagagataaagctgtaggacaggggcccaatctttgggg

SEQ ID NO: 470350 - DNA, 201 bp, Homo sapiens
ttaatgttattgcttttttctatctttttttgagtttactagtgatgtaaaagatttgagttatttgctgtgattatataaatactcttttgatgcataawtcagcagttaacatcatgttaatttgtggcattagtaattttactgatagcccttctgtgattctgatttttggtagtggtttttacctggtaagtagca

SEQ ID NO: 470351 - DNA, 201 bp, Homo sapiens
atcccccagatttcattcagagattcctctctcagctcttcttgctttccctgttgtttcttttcccctcctcttgaatttaaaatcatagtatctgaaartgattatagtcaaaaatctcaacagagataaagctgtaggacaggggcccaatctttgggggcagaagagtgtttagagaaagattttaggttttcaact

SEQ ID NO: 470352 - DNA, 201 bp, Homo sapiens
cagctcttcttgctttccctgttgtttcttttcccctcctcttgaatttaaaatcatagtatctgaaagtgattatagtcaaaaatctcaacagagataaygctgtaggacaggggcccaatctttgggggcagaagagtgtttagagaaagattttaggttttcaactataattcttaataattatgacaaggttcgtat

SEQ ID NO: 470353 - DNA, 201 bp, Homo sapiens
agctcttcttgctttccctgttgtttcttttcccctcctcttgaatttaaaatcatagtatctgaaagtgattatagtcaaaaatctcaacagagataaarctgtaggacaggggcccaatctttgggggcagaagagtgtttagagaaagattttaggttttcaactataattcttaataattatgacaaggttcgtatt

SEQ ID NO: 470354 - DNA, 201 bp, Homo sapiens
tgctttccctgttgtttcttttcccctcctcttgaatttaaaatcatagtatctgaaagtgattatagtcaaaaatctcaacagagataaagctgtaggamaggggcccaatctttgggggcagaagagtgtttagagaaagattttaggttttcaactataattcttaataattatgacaaggttcgtattttgaaataa

SEQ ID NO: 470355 - DNA, 201 bp, Homo sapiens
gagataaagctgtaggacaggggcccaatctttgggggcagaagagtgtttagagaaagattttaggttttcaactataattcttaataattatgacaagrttcgtattttgaaataattattcagcatttaattgcttaatagacattctaagcacttgaacccgcattacctttaattctcgcagtaatctttattatt

SEQ ID NO: 470356 - DNA, 201 bp, Homo sapiens
aaaaaaaaaaccagataaattttagtcactgattggtaaatgaggctagcagtgtctttttactataacttaaaaattaccttgatgagattgagttaaakgtttaacatactggtatcctgatttaaaatttaccagtgactatgtttctgatatctaagtttatagatttcctgagattagtcttttaatttatagaca

SEQ ID NO: 470357 - DNA, 201 bp, Homo sapiens
taaatgaggctagcagtgtctttttactataacttaaaaattaccttgatgagattgagttaaaggtttaacatactggtatcctgatttaaaatttaccrgtgactatgtttctgatatctaagtttatagatttcctgagattagtcttttaatttatagacagtgatgaagaacaaggattatatccaaagaatattt

SEQ ID NO: 470358 - DNA, 201 bp, Homo sapiens
tgaaatgagctcatttgtattagtgcagctcctgagtgcactggacgattagggtattgccactttattattttaattctgaatctcatgaagaaataggyagcctttggagaagataaaaaatttctgctgaataacagtataatctaactatgaaaaatcaaaacttttggaaatatttagaacaaatgtaagtctgta

SEQ ID NO: 470359 - DNA, 201 bp, Homo sapiens
ttaaaatttaccagtgactatgtttctgatatctaagtttatagatttcctgagattagtcttttaatttatagacagtgatgaagaacaaggattatatscaaagaatattttgggtaggttggcaggtatggttaagcaaaataaatattggtggttagtaaatcttttctgtctgtgcttttgagtctatagtaactt

SEQ ID NO: 470360 - DNA, 201 bp, Homo sapiens
ctttgttacatctgggtatctactattagaaaatgcctacacattctagatcactctttactttttaacttaggtacctcacataacatgattgatcctcrttttcttaactaaaaaatgagtatgagaacttttcctgtgtaattttcaatccatttggaaatccttaagttgtaaaacataatgttttcattaggtttt

SEQ ID NO: 470361 - DNA, 201 bp, Homo sapiens
tttgttacatctgggtatctactattagaaaatgcctacacattctagatcactctttactttttaacttaggtacctcacataacatgattgatcctcawtttcttaactaaaaaatgagtatgagaacttttcctgtgtaattttcaatccatttggaaatccttaagttgtaaaacataatgttttcattaggttttc

SEQ ID NO: 470362 - DNA, 201 bp, Homo sapiens
tctgggtatctactattagaaaatgcctacacattctagatcactctttactttttaacttaggtacctcacataacatgattgatcctcattttcttaastaaaaaatgagtatgagaacttttcctgtgtaattttcaatccatttggaaatccttaagttgtaaaacataatgttttcattaggttttctggtgtgtg

SEQ ID NO: 470363 - DNA, 201 bp, Homo sapiens
aaatatactaggtctgtcttacctttcggtgcttttatttgttcccttttgaacatggctgaattttacttttctgtccacctgcccgccattcgtgctayccctccttcctttttccactctcatctttttcccattttccagtctgtaaatcctacctatccttttattttttaaattacaagatctcattctgttact

SEQ ID NO: 470364 - DNA, 201 bp, Homo sapiens
gaaaatgcctacacattctagatcactctttactttttaacttaggtacctcacataacatgattgatcctcattttcttaactaaaaaatgagtatgagracttttcctgtgtaattttcaatccatttggaaatccttaagttgtaaaacataatgttttcattaggttttctggtgtgtggctgattctaatccataa

SEQ ID NO: 470365 - DNA, 201 bp, Homo sapiens
taaagctgtaggacaggggcccaatctttgggggcagaagagtgtttagagaaagattttaggttttcaactataattcttaataattatgacaaggttcrtattttgaaataattattcagcatttaattgcttaatagacattctaagcacttgaacccgcattacctttaattctcgcagtaatctttattattccca

SEQ ID NO: 470366 - DNA, 201 bp, Homo sapiens
gggcccaatctttgggggcagaagagtgtttagagaaagattttaggttttcaactataattcttaataattatgacaaggttcgtattttgaaataattwttcagcatttaattgcttaatagacattctaagcacttgaacccgcattacctttaattctcgcagtaatctttattattcccattttatacctggaact

SEQ ID NO: 470367 - DNA, 201 bp, Homo sapiens
cacattctagatcactctttactttttaacttaggtacctcacataacatgattgatcctcattttcttaactaaaaaatgagtatgagaacttttcctgygtaattttcaatccatttggaaatccttaagttgtaaaacataatgttttcattaggttttctggtgtgtggctgattctaatccataaatccttgtgta

SEQ ID NO: 470368 - DNA, 201 bp, Homo sapiens
ttagagaaagattttaggttttcaactataattcttaataattatgacaaggttcgtattttgaaataattattcagcatttaattgcttaatagacattmtaagcacttgaacccgcattacctttaattctcgcagtaatctttattattcccattttatacctggaactcagagagctttagtctaagttgtttagtg

SEQ ID NO: 470369 - DNA, 201 bp, Homo sapiens
aggtacctcacataacatgattgatcctcattttcttaactaaaaaatgagtatgagaacttttcctgtgtaattttcaatccatttggaaatccttaagytgtaaaacataatgttttcattaggttttctggtgtgtggctgattctaatccataaatccttgtgtactttggctttcattcacttaataattgtctgc

SEQ ID NO: 470370 - DNA, 201 bp, Homo sapiens
aactaaaaaatgagtatgagaacttttcctgtgtaattttcaatccatttggaaatccttaagttgtaaaacataatgttttcattaggttttctggtgtrtggctgattctaatccataaatccttgtgtactttggctttcattcacttaataattgtctgctttgatgaataccttctgatttaagttctagtgtagc

SEQ ID NO: 470371 - DNA, 201 bp, Homo sapiens
gtattttgaaataattattcagcatttaattgcttaatagacattctaagcacttgaacccgcattacctttaattctcgcagtaatctttattattcccsttttatacctggaactcagagagctttagtctaagttgtttagtgacacagctagaaaacagcagcctgaatacaaatagagatctgatgccaaatttga

SEQ ID NO: 470372 - DNA, 201 bp, Homo sapiens
acaattatttggagattcatctgtgctgttgcatttgttaacagtgtactcccttttcttgctgagtattaataaaactgtggatgcaccatggttgtagrcctgtgcacttttttttcttctttttttttctgagacaggttatcattctaattcctggctggagtgcagtggtgcgatcatagctaactctagcttcga

SEQ ID NO: 470373 - DNA, 201 bp, Homo sapiens
ttaattctcgcagtaatctttattattcccattttatacctggaactcagagagctttagtctaagttgtttagtgacacagctagaaaacagcagcctgratacaaatagagatctgatgccaaatttgatcctctttacgttatacgacagtgtcttttcaattcgctgtgccaagatttgttcctttccacacagtag

SEQ ID NO: 470374 - DNA, 201 bp, Homo sapiens
tggtctgtcacagaatgttgacttttcccaatctgttacatagggccgtgggtctggatttccaggaaagcggagacctcgaggtgcaggactgtcggggygaggtggccgaggcaggtcaaagctgaaaagtggaatcggagctgttgtattacctggggtgaggcttgcttcatgtatattttctctaatctaaatgtc

SEQ ID NO: 470375 - DNA, 201 bp, Homo sapiens
attattcccattttatacctggaactcagagagctttagtctaagttgtttagtgacacagctagaaaacagcagcctgaatacaaatagagatctgatgycaaatttgatcctctttacgttatacgacagtgtcttttcaattcgctgtgccaagatttgttcctttccacacagtagcacctatcagttatagcacct

SEQ ID NO: 470376 - DNA, 201 bp, Homo sapiens
cacttcttgttttgttgttgctttaaaaagcacttttaactttagtgttcaaacatttattttaataaaatgagtatagaaacagaaattataatcatatrtaagtatttaaatacactttaccttttctgaaaagaattacctggatttttttttttcgtttcagtgccttcctcagactgctgtgaatcttcacttgta

SEQ ID NO: 470377 - DNA, 201 bp, Homo sapiens
tggaactcagagagctttagtctaagttgtttagtgacacagctagaaaacagcagcctgaatacaaatagagatctgatgccaaatttgatcctctttaygttatacgacagtgtcttttcaattcgctgtgccaagatttgttcctttccacacagtagcacctatcagttatagcaccttcctctcaaaaattctatt

SEQ ID NO: 470378 - DNA, 201 bp, Homo sapiens
ggaactcagagagctttagtctaagttgtttagtgacacagctagaaaacagcagcctgaatacaaatagagatctgatgccaaatttgatcctctttacrttatacgacagtgtcttttcaattcgctgtgccaagatttgttcctttccacacagtagcacctatcagttatagcaccttcctctcaaaaattctattt

SEQ ID NO: 470379 - DNA, 201 bp, Homo sapiens
aagaagtagaaggattggagacaaaacttgaagataaaaagtcttgaatttgctgatgatttgcattgatgaagtgttgggggagaggactgaaggagcaraggagagtgacaagggactggatgccatttataaggatggggaagactgggatgaaaccggttaagggagaaattttaaacatggcaaacttaagagggg

SEQ ID NO: 470380 - DNA, 201 bp, Homo sapiens
aaaagcatgcatctcattataaagaaattcactaaagagagtatctgtgaagaaggccaagattttcttcaggaaacacttttagggtgctctgtcatagktaaatggctggtcattgttgcaacattattttcatgatgatacaaggatacattaaccttgtctggaaattttaccctaaaaatccatctagtagataca

SEQ ID NO: 470381 - DNA, 201 bp, Homo sapiens
tctgatgccaaatttgatcctctttacgttatacgacagtgtcttttcaattcgctgtgccaagatttgttcctttccacacagtagcacctatcagttayagcaccttcctctcaaaaattctattttaaaagtaaagatcagaggctattcatcttgccttaacccttcctcctttgcaggaatcctaaaatggctaga

SEQ ID NO: 470382 - DNA, 201 bp, Homo sapiens
agtgaaaaatataacttcgtattctgtgtattttgctttttataggtgtctactgcagatatttcatcaaataaggatgatgaagaaaactctatgcacamtacagttgtgttgttttctagcagtgacaagttcactttgaatcaggtttgaacttgacaatttactgtcttcctcattgaattcctccttgcacatttc

SEQ ID NO: 470383 - DNA, 201 bp, Homo sapiens
attcatcttgccttaacccttcctcctttgcaggaatcctaaaatggctagagcaagttaaccataggtgagcattgagtaaagatcaccatttaggaggkaatccttatggcagggttacctctgttactatctgcagagacaaaacagatactgaggtatttatgaactgtgcagttcccaggactgattattttcatg

SEQ ID NO: 470384 - DNA, 201 bp, Homo sapiens
ctttcctcaagcttcgcagcttactgatttccatactcgagaataacgtttgaagaaaaggatggtgtttttggaaaaccagcattgacaccactctatcwtccctacttatttaataccttttagtgccatgttaggatgacgcgtcatagcttggcactgcatgaactaaaaaccaaatatgcaaattgttcacttatt

SEQ ID NO: 470385 - DNA, 201 bp, Homo sapiens
agaacttttcctgtgtaattttcaatccatttggaaatccttaagttgtaaaacataatgttttcattaggttttctggtgtgtggctgattctaatccawaaatccttgtgtactttggctttcattcacttaataattgtctgctttgatgaataccttctgatttaagttctagtgtagccaaatgttttatatatct

SEQ ID NO: 470386 - DNA, 201 bp, Homo sapiens
ccatttggaaatccttaagttgtaaaacataatgttttcattaggttttctggtgtgtggctgattctaatccataaatccttgtgtactttggctttcaytcacttaataattgtctgctttgatgaataccttctgatttaagttctagtgtagccaaatgttttatatatctatagttagaaaatttaaaatttgttt

SEQ ID NO: 470387 - DNA, 201 bp, Homo sapiens
cttaagttgtaaaacataatgttttcattaggttttctggtgtgtggctgattctaatccataaatccttgtgtactttggctttcattcacttaataatygtctgctttgatgaataccttctgatttaagttctagtgtagccaaatgttttatatatctatagttagaaaatttaaaatttgtttgtacattgccata

SEQ ID NO: 470388 - DNA, 201 bp, Homo sapiens
ttcattcacttaataattgtctgctttgatgaataccttctgatttaagttctagtgtagccaaatgttttatatatctatagttagaaaatttaaaattkgtttgtacattgccataacaaatgttctgaattttgtagtatcatcccaacatacagtgaatactgaattggaaaaacagatttctaatgaagttgatag

SEQ ID NO: 470389 - DNA, 201 bp, Homo sapiens
ttctgatttaagttctagtgtagccaaatgttttatatatctatagttagaaaatttaaaatttgtttgtacattgccataacaaatgttctgaattttgyagtatcatcccaacatacagtgaatactgaattggaaaaacagatttctaatgaagttgatagtgaagacctgaaaatgtcttctgaagtgaagcatatt

SEQ ID NO: 470390 - DNA, 201 bp, Homo sapiens
aagttctagtgtagccaaatgttttatatatctatagttagaaaatttaaaatttgtttgtacattgccataacaaatgttctgaattttgtagtatcatsccaacatacagtgaatactgaattggaaaaacagatttctaatgaagttgatagtgaagacctgaaaatgtcttctgaagtgaagcatatttgtggcgaa

SEQ ID NO: 470391 - DNA, 201 bp, Homo sapiens
tcccaggactgattattttcatgattacttatgttacaaaacataagtttaaagataaggcatcattaatgctatcttattttttagacaatcgggagaaratagcaagatgctagtgtgtgatacgtgtgacaaagggtatcatactttttgtcttcaaccagttatgaaatcagtaccaaccaatggctggaaatgcaa

SEQ ID NO: 470392 - DNA, 201 bp, Homo sapiens
agtgtagccaaatgttttatatatctatagttagaaaatttaaaatttgtttgtacattgccataacaaatgttctgaattttgtagtatcatcccaacawacagtgaatactgaattggaaaaacagatttctaatgaagttgatagtgaagacctgaaaatgtcttctgaagtgaagcatatttgtggcgaagatcaaa

SEQ ID NO: 470393 - DNA, 201 bp, Homo sapiens
aatgctatcttattttttagacaatcgggagaagatagcaagatgctagtgtgtgatacgtgtgacaaagggtatcatactttttgtcttcaaccagttaygaaatcagtaccaaccaatggctggaaatgcaaagtaagttgtttatttatttatttttttaaatcctctctatgttttatatggagaccagacaaatcg

SEQ ID NO: 470394 - DNA, 201 bp, Homo sapiens
taaaatttgtttgtacattgccataacaaatgttctgaattttgtagtatcatcccaacatacagtgaatactgaattggaaaaacagatttctaatgaarttgatagtgaagacctgaaaatgtcttctgaagtgaagcatatttgtggcgaagatcaaattgaagataaaatggaagtgacagaaaacattgaagtcgt

SEQ ID NO: 470395 - DNA, 201 bp, Homo sapiens
agtgagtatcaccataaagcaaggcacacaaatattttggtttaccagtgcatgtaaatattatgtttatattctactgcagtctattaaatgttcagtarcgttatatttaaaaaaccaatgtgcatactttaatttaaaaatactttattgctaaaaaatgctactgatcatctgagctttcagtaaattgtaagattt

SEQ ID NO: 470396 - DNA, 201 bp, Homo sapiens
tggatttcaggtgtgtttggtgcagacactgtggagcaacatctgcaggtctaagatgtgaatggcagaacaattacacacagtgcgctccttgtgcaagyttatcttcctgtccagtctgctatcgaaactatagagaagaagatcttattctgcaatgtagacaatgtgataggtattgtgctattttttcatcttttt

SEQ ID NO: 470397 - DNA, 201 bp, Homo sapiens
gacaatcgggagaagatagcaagatgctagtgtgtgatacgtgtgacaaagggtatcatactttttgtcttcaaccagttatgaaatcagtaccaaccaayggctggaaatgcaaagtaagttgtttatttatttatttttttaaatcctctctatgttttatatggagaccagacaaatcggatacctattcaaatctgt

SEQ ID NO: 470398 - DNA, 201 bp, Homo sapiens
catcccaacatacagtgaatactgaattggaaaaacagatttctaatgaagttgatagtgaagacctgaaaatgtcttctgaagtgaagcatatttgtggygaagatcaaattgaagataaaatggaagtgacagaaaacattgaagtcgttacacaccagatcactgtgcagcaagaacaactgcagttgttagaggaac

SEQ ID NO: 470399 - DNA, 201 bp, Homo sapiens
tgagccaccgtacctggccgaaatgtatttcttaaacagtaagacttaaaaattgaaattactcattgatacgtgggctgcaggatagatgtatcgtactkgcaggcatgaaagtaacattcttctttctgaacatatccatcaaagccctcgaatgacctggtccattgttagtgagtgctaatattttgaaaggaatgt

SEQ ID NO: 470400 - DNA, 201 bp, Homo sapiens
atacgtgtgacaaagggtatcatactttttgtcttcaaccagttatgaaatcagtaccaaccaatggctggaaatgcaaagtaagttgtttatttatttamttttttaaatcctctctatgttttatatggagaccagacaaatcggatacctattcaaatctgtacatcatcaccatcagctttttaaaaacagctttat

SEQ ID NO: 470401 - DNA, 201 bp, Homo sapiens
tgaagttgatagtgaagacctgaaaatgtcttctgaagtgaagcatatttgtggcgaagatcaaattgaagataaaatggaagtgacagaaaacattgaartcgttacacaccagatcactgtgcagcaagaacaactgcagttgttagaggaacctgaaacagtggtatccagagaagaatcaaggcctccaaaattagt

SEQ ID NO: 470402 - DNA, 201 bp, Homo sapiens
aatggcagaacaattacacacagtgcgctccttgtgcaagcttatcttcctgtccagtctgctatcgaaactatagagaagaagatcttattctgcaatgwagacaatgtgataggtattgtgctattttttcatctttttaaagcttttctctttgaaatgtagcaaaaaaaaaaacaaatggaaaatagcttttcctta

SEQ ID NO: 470403 - DNA, 201 bp, Homo sapiens
tttgtcttcaaccagttatgaaatcagtaccaaccaatggctggaaatgcaaagtaagttgtttatttatttatttttttaaatcctctctatgttttatrtggagaccagacaaatcggatacctattcaaatctgtacatcatcaccatcagctttttaaaaacagctttattgacatataactgacatataataaact

SEQ ID NO: 470404 - DNA, 201 bp, Homo sapiens
acacacagtgcgctccttgtgcaagcttatcttcctgtccagtctgctatcgaaactatagagaagaagatcttattctgcaatgtagacaatgtgatagrtattgtgctattttttcatctttttaaagcttttctctttgaaatgtagcaaaaaaaaaaacaaatggaaaatagcttttccttaatcacaagttttagg

SEQ ID NO: 470405 - DNA, 201 bp, Homo sapiens
tttttttaaatcctctctatgttttatatggagaccagacaaatcggatacctattcaaatctgtacatcatcaccatcagctttttaaaaacagctttaytgacatataactgacatataataaactgtacactcttcaagataatgaacatagtcatcaccctcaaaagtttcctggtgcctcttggcttgctttgtgg

SEQ ID NO: 470406 - DNA, 201 bp, Homo sapiens
cgctccttgtgcaagcttatcttcctgtccagtctgctatcgaaactatagagaagaagatcttattctgcaatgtagacaatgtgataggtattgtgctrttttttcatctttttaaagcttttctctttgaaatgtagcaaaaaaaaaaacaaatggaaaatagcttttccttaatcacaagttttaggtacagaactt

SEQ ID NO: 470407 - DNA, 201 bp, Homo sapiens
gtacatcatcaccatcagctttttaaaaacagctttattgacatataactgacatataataaactgtacactcttcaagataatgaacatagtcatcaccrtcaaaagtttcctggtgcctcttggcttgctttgtggctgttcaaacccaaactctgtcttcctagtctgctttttcactatagattagtattcacttcc

SEQ ID NO: 470408 - DNA, 201 bp, Homo sapiens
gaaaaagagctgctgggtaactgtgctcagctgtggctacctgggaagtggggtctgagggctgaaggattgtgatgaactctggcctgcttcctcaggtwgttcagattccttctcttgctgaatgacttatcattggaaaggaaaaactctgctatttgactgatttgtatatttacactcttatcttcactcagttcc

SEQ ID NO: 470409 - DNA, 201 bp, Homo sapiens
ttttaaaaacagctttattgacatataactgacatataataaactgtacactcttcaagataatgaacatagtcatcaccctcaaaagtttcctggtgccwcttggcttgctttgtggctgttcaaacccaaactctgtcttcctagtctgctttttcactatagattagtattcacttcctagaatttttaataaaagct

SEQ ID NO: 470410 - DNA, 201 bp, Homo sapiens
gagggctgaaggattgtgatgaactctggcctgcttcctcaggtagttcagattccttctcttgctgaatgacttatcattggaaaggaaaaactctgctrtttgactgatttgtatatttacactcttatcttcactcagttcctctacttgcctttttatttttaatatgaagttgaatttgtaattcattttctttcc

SEQ ID NO: 470411 - DNA, 201 bp, Homo sapiens
tgctttgtggctgttcaaacccaaactctgtcttcctagtctgctttttcactatagattagtattcacttcctagaatttttaataaaagcttcatatastatatactcgtttttggtctggcttctttaactcagtgtaattattttgaaattcatccatattgctgcacagatcagtagtgattcttttttattactg

SEQ ID NO: 470412 - DNA, 201 bp, Homo sapiens
aaggattgtgatgaactctggcctgcttcctcaggtagttcagattccttctcttgctgaatgacttatcattggaaaggaaaaactctgctatttgactratttgtatatttacactcttatcttcactcagttcctctacttgcctttttatttttaatatgaagttgaatttgtaattcattttctttcctttcctaa

SEQ ID NO: 470413 - DNA, 201 bp, Homo sapiens
ctgttcaaacccaaactctgtcttcctagtctgctttttcactatagattagtattcacttcctagaatttttaataaaagcttcatatactatatactcrtttttggtctggcttctttaactcagtgtaattattttgaaattcatccatattgctgcacagatcagtagtgattcttttttattactgagtgctggag

SEQ ID NO: 470414 - DNA, 201 bp, Homo sapiens
ggaaaaaggacatttaagactataagtttaccttcggctgtagctttggctgaagccaaatttattgtatttgtaactttatgtatgtatataccttaccraatatctttatcttttttttaagttgtgctgaagtatgttaatttatgctttcatttcatttaatcagataatttaactaaggtaggttttttaaaataa

SEQ ID NO: 470415 - DNA, 201 bp, Homo sapiens
taccttaccgaatatctttatcttttttttaagttgtgctgaagtatgttaatttatgctttcatttcatttaatcagataatttaactaaggtaggtttyttaaaataaatgtgttgatacttgtagtgactttttaaaggtgtagcatttgtgtttattaatttcatttagttagatgaagtccttttaccttattttt

SEQ ID NO: 470416 - DNA, 201 bp, Homo sapiens
acagcaagataatcctagatatttatttgaccttggaatgccgttaggcatatatctacttaaaaattgatgtggctgggcatagtggctcacacctgtartcccagcactttgggaggctgaggcaggcacataacttgagctacaagttcgagaccagcctgggcaatgtgacaagaccctgtcttttcactaaaagta

SEQ ID NO: 470417 - DNA, 201 bp, Homo sapiens
actgcagttgttagaggaacctgaaacagtggtatccagagaagaatcaaggcctccaaaattagtcatggaatctgtcactcttccactagaaaccttaktgtccccacatgaggaaagtatttcattatgtcctgaggaacagttggttatagaaaggctacaaggagaaaaggaacagaaagaaaattctgaactttc

SEQ ID NO: 470418 - DNA, 201 bp, Homo sapiens
tagaggaacctgaaacagtggtatccagagaagaatcaaggcctccaaaattagtcatggaatctgtcactcttccactagaaaccttagtgtccccacakgaggaaagtatttcattatgtcctgaggaacagttggttatagaaaggctacaaggagaaaaggaacagaaagaaaattctgaactttctactggattga

SEQ ID NO: 470419 - DNA, 201 bp, Homo sapiens
tgaaacagtggtatccagagaagaatcaaggcctccaaaattagtcatggaatctgtcactcttccactagaaaccttagtgtccccacatgaggaaagtwtttcattatgtcctgaggaacagttggttatagaaaggctacaaggagaaaaggaacagaaagaaaattctgaactttctactggattgatggactctga

SEQ ID NO: 470420 - DNA, 201 bp, Homo sapiens
tttaggcctttttgagggtttaggaatcccttgaaattagatggagaattattgccttcatctatgccgtttcttatgaagggtttctgaatcttctaatwgattataaaaaatatctaacacattctgttctccttaaaccactttttcttaaagctctagatactagatatctagatattagatagcaccttctgccct

SEQ ID NO: 470421 - DNA, 201 bp, Homo sapiens
tccactagaaaccttagtgtccccacatgaggaaagtatttcattatgtcctgaggaacagttggttatagaaaggctacaaggagaaaaggaacagaaakaaaattctgaactttctactggattgatggactctgaaatgactcctacaattgagggttgtgtgaaagatgtttcataccaaggaggcaaatctataaa

SEQ ID NO: 470422 - DNA, 201 bp, Homo sapiens
atattgttgtactctttagaagttaagaagtgaacatatattattaatagtattattttatcagtagtacagtattcttgggactctggctactaattatytgttccattgcaagacaactttttacttaatttcccgattaccattcaacatcgctttccgtgagatatgtatacttcaagttagatgcattacctggag

SEQ ID NO: 470423 - DNA, 201 bp, Homo sapiens
gaaaccttagtgtccccacatgaggaaagtatttcattatgtcctgaggaacagttggttatagaaaggctacaaggagaaaaggaacagaaagaaaattmtgaactttctactggattgatggactctgaaatgactcctacaattgagggttgtgtgaaagatgtttcataccaaggaggcaaatctataaagttatca

SEQ ID NO: 470424 - DNA, 201 bp, Homo sapiens
taatttcccgattaccattcaacatcgctttccgtgagatatgtatacttcaagttagatgcattacctggagcacatacctgctagcactgccatttgcmgttttctgaatacctttgtgtttgccctaactagcttcctttctgtctttgaaatatttaatatatgatgataaaataattagcttccttatgtaatgtg

SEQ ID NO: 470425 - DNA, 201 bp, Homo sapiens
aaataattagcttccttatgtaatgtgctttgcttcctctctaatagttgttctcattcctttttatttccttcttagctgtatgaaagtttttctgttamtagagatagttaggagaaaagggcaaggtaggaggagcatgtgaggcttagggcttttaagtttgaagactcagtgttacaggttttaaaaggtagcagt

SEQ ID NO: 470426 - DNA, 201 bp, Homo sapiens
aggagaaaaggaacagaaagaaaattctgaactttctactggattgatggactctgaaatgactcctacaattgagggttgtgtgaaagatgtttcatacyaaggaggcaaatctataaagttatcatctgagacagagtcatcattttcatcatcagcagacataagcaaggcagatgtgtcttcctccccaacaccttc

SEQ ID NO: 470427 - DNA, 201 bp, Homo sapiens
gaactttctactggattgatggactctgaaatgactcctacaattgagggttgtgtgaaagatgtttcataccaaggaggcaaatctataaagttatcatytgagacagagtcatcattttcatcatcagcagacataagcaaggcagatgtgtcttcctccccaacaccttcttcagacttgccttcgcatgacatgctg

SEQ ID NO: 470428 - DNA, 201 bp, Homo sapiens
ttccttcttagctgtatgaaagtttttctgttaatagagatagttaggagaaaagggcaaggtaggaggagcatgtgaggcttagggcttttaagtttgawgactcagtgttacaggttttaaaaggtagcagttctcagtatattccattttttaaaaaaaatgtacaaatatggtctttttagatggatgcatgcagtt

SEQ ID NO: 470429 - DNA, 201 bp, Homo sapiens
cgaactccagacctgtgatctgcccgtctcggcctcccaaagtgctgggattacaggtgtgagccaccatgcccatcctctttttctttttaaaatacagrcagggtctcactatgttgcccaggctggtctcaaaatcctggggttaagcaatcctcctgccttgacctcccaaagcactggggttgcagtgtgagccac

SEQ ID NO: 470430 - DNA, 201 bp, Homo sapiens
gattgatggactctgaaatgactcctacaattgagggttgtgtgaaagatgtttcataccaaggaggcaaatctataaagttatcatctgagacagagtcrtcattttcatcatcagcagacataagcaaggcagatgtgtcttcctccccaacaccttcttcagacttgccttcgcatgacatgctgcataattaccctt

SEQ ID NO: 470431 - DNA, 201 bp, Homo sapiens
gggcaaggtaggaggagcatgtgaggcttagggcttttaagtttgaagactcagtgttacaggttttaaaaggtagcagttctcagtatattccatttttwaaaaaaaatgtacaaatatggtctttttagatggatgcatgcagtttgtcagaacttaaatactgaggaagaagtggaaaatgtagcagacattggtttt

SEQ ID NO: 470432 - DNA, 201 bp, Homo sapiens
atgtttcataccaaggaggcaaatctataaagttatcatctgagacagagtcatcattttcatcatcagcagacataagcaaggcagatgtgtcttcctcmccaacaccttcttcagacttgccttcgcatgacatgctgcataattacccttcagctcttagttcctctgctggaaacatcatgccaacaacttacatct

SEQ ID NO: 470433 - DNA, 201 bp, Homo sapiens
ggcaaggtaggaggagcatgtgaggcttagggcttttaagtttgaagactcagtgttacaggttttaaaaggtagcagttctcagtatattccattttttwaaaaaaatgtacaaatatggtctttttagatggatgcatgcagtttgtcagaacttaaatactgaggaagaagtggaaaatgtagcagacattggttttg

SEQ ID NO: 470434 - DNA, 201 bp, Homo sapiens
taaagttatcatctgagacagagtcatcattttcatcatcagcagacataagcaaggcagatgtgtcttcctccccaacaccttcttcagacttgccttcrcatgacatgctgcataattacccttcagctcttagttcctctgctggaaacatcatgccaacaacttacatctcagtcactccaaaaattggcatgggta

SEQ ID NO: 470435 - DNA, 201 bp, Homo sapiens
gcaaggtaggaggagcatgtgaggcttagggcttttaagtttgaagactcagtgttacaggttttaaaaggtagcagttctcagtatattccattttttawaaaaaatgtacaaatatggtctttttagatggatgcatgcagtttgtcagaacttaaatactgaggaagaagtggaaaatgtagcagacattggttttga

SEQ ID NO: 470436 - DNA, 201 bp, Homo sapiens
aaatgtacaaatatggtctttttagatggatgcatgcagtttgtcagaacttaaatactgaggaagaagtggaaaatgtagcagacattggttttgattgyagcatgtgcagaccctatatgcctgcgtctaatggtaagagaataatttaaactgtgagtctgcactcttgtaccactcacttgcaccttactgtccata

SEQ ID NO: 470437 - DNA, 201 bp, Homo sapiens
acaataaaaagcatatactttagatgtaaactataattttgcttccaaggaacatgatcttgtagttattgacaatatgtcagaatccaatatgttgattstttcttagccaggttttcctccatgacttgagtatttccttcatcacttcttgttttgttgttgctttaaaaagcacttttaactttagtgttcaaacat

SEQ ID NO: 470438 - DNA, 201 bp, Homo sapiens
tgatgagatggatatgagataaagaagaattaaaattgtcttctagatttgtggcttcagtagttgagtggacagaaatgtcatttacttagattagagaytgatcttagtggagaaacaggttttaaactagattgaaggccctctgattagttaaaccattcccctactgatggtcatttagttgatttccagttttat

SEQ ID NO: 470439 - DNA, 201 bp, Homo sapiens
ctttttgcacagtgctactactgttattagagctttatcatttcttgagttactaacttgttttaatgcagtacacccacataaatagctaagaaagaatwtgtgagaaataaagttttgaatccttgcttatctgtaaaagtcctcattagcccttacagttgactggtattattttattcaagtgcaattaagctgaaa

SEQ ID NO: 470440 - DNA, 201 bp, Homo sapiens
taagtgctctgagaagcaattgaaggtttgaaatagaatagtgacttgcttgatcacatttgtacttttgaaaagtttctctggctgctgtggggaaaggyttcagtagatgcagggtcggagaagcataaccagcagtagactcttgtagcaggttaggtgagagatggtggtggccacgactgagctgctagtggtgga

SEQ ID NO: 470441 - DNA, 201 bp, Homo sapiens
tggtgaacatttgggtccttcaaaattttgagctattacaaaaaatgccgatgagctcattaactaacttcctacctcacttggcttctgcccttcagggkgaggcgttcagagccgggttgggggcagtggggtagtggagatagcccttggaatccaaggtgcggtttagcttttaagcttagtcttcctgggctgctg

SEQ ID NO: 470442 - DNA, 201 bp, Homo sapiens
cagcagacataagcaaggcagatgtgtcttcctccccaacaccttcttcagacttgccttcgcatgacatgctgcataattacccttcagctcttagttcstctgctggaaacatcatgccaacaacttacatctcagtcactccaaaaattggcatgggtaaaccagctattactaagagaaaattttctcctggtagac

SEQ ID NO: 470443 - DNA, 201 bp, Homo sapiens
ccttcttcagacttgccttcgcatgacatgctgcataattacccttcagctcttagttcctctgctggaaacatcatgccaacaacttacatctcagtcaytccaaaaattggcatgggtaaaccagctattactaagagaaaattttctcctggtagacctcggtccaaacaggtagggtgattttaatgatattgacag

SEQ ID NO: 470444 - DNA, 201 bp, Homo sapiens
acttgctttagtttcattgatatattactgtgcttaattatcagttagcagaaaacacggcctagttagcgaacagatttcttttagaattaattcaatckcttaatttttaaaataattaataagcctagtatggtgattcatatgatattcttattaaacagtcattcttttgaatatttgtatttaatagcacctgat

SEQ ID NO: 470445 - DNA, 201 bp, Homo sapiens
ttcagacttgccttcgcatgacatgctgcataattacccttcagctcttagttcctctgctggaaacatcatgccaacaacttacatctcagtcactccaraaattggcatgggtaaaccagctattactaagagaaaattttctcctggtagacctcggtccaaacaggtagggtgattttaatgatattgacagaaaag

SEQ ID NO: 470446 - DNA, 201 bp, Homo sapiens
caaaaatgtttggatagtacaggaattgttctaaggaacaacagttttgtacatttaaaattaaatctgcaggatttgtacttatttattacttctccctrttagtaattatgttgatactctgatttttccagatgagcttctggagtattctctcttctcttacgtaaatagatccctgccttttgatcttttctacga

SEQ ID NO: 470447 - DNA, 201 bp, Homo sapiens
gacttgccttcgcatgacatgctgcataattacccttcagctcttagttcctctgctggaaacatcatgccaacaacttacatctcagtcactccaaaaaytggcatgggtaaaccagctattactaagagaaaattttctcctggtagacctcggtccaaacaggtagggtgattttaatgatattgacagaaaagatat

SEQ ID NO: 470448 - DNA, 201 bp, Homo sapiens
atgagcttctggagtattctctcttctcttacgtaaatagatccctgccttttgatcttttctacgaagaagctcatagtggattagctgagcattgcatwtagttgcagtgcttctaactctttttattgggacatgaaaatagaaattccaggaagacttttttgagacagagtctcgccctgtcgcccaggctggagt

SEQ ID NO: 470449 - DNA, 201 bp, Homo sapiens
tagttcctctgctggaaacatcatgccaacaacttacatctcagtcactccaaaaattggcatgggtaaaccagctattactaagagaaaattttctcctrgtagacctcggtccaaacaggtagggtgattttaatgatattgacagaaaagatattggaacaattctataaaatcagaaggtatatgtgtagctttggt

SEQ ID NO: 470450 - DNA, 201 bp, Homo sapiens
actccaaaaattggcatgggtaaaccagctattactaagagaaaattttctcctggtagacctcggtccaaacaggtagggtgattttaatgatattgacwgaaaagatattggaacaattctataaaatcagaaggtatatgtgtagctttggtgtggatggcaactttttctgtcttcagatagaacttcagtgtaatg

SEQ ID NO: 470451 - DNA, 201 bp, Homo sapiens
ctcgatctcatgacctcgtgatctgcctgccgcctcggccccccaaagtgctgggattacaggcatgagcccctgcacctggcccaggaagaccatttttwaaaaacatgcaacctttctgcctgtaatccaaggaaatttgacctattgttcatagtttttattgggtatcatgaagttaattattcatgcatttcatag

SEQ ID NO: 470452 - DNA, 201 bp, Homo sapiens
atattgacagaaaagatattggaacaattctataaaatcagaaggtatatgtgtagctttggtgtggatggcaactttttctgtcttcagatagaacttcwgtgtaatgttgattatgtgtttcagccattattttttaaatgctgttaatgaagaatgccatttattaaatttgaagtgatcttatttggaatttcaact

SEQ ID NO: 470453 - DNA, 201 bp, Homo sapiens
cccctgcacctggcccaggaagaccattttttaaaaacatgcaacctttctgcctgtaatccaaggaaatttgacctattgttcatagtttttattgggtrtcatgaagttaattattcatgcatttcatagatacgtaattgctttctagaactacagtcacattcccttgacatgggtattttggaacagtaatcagtc

SEQ ID NO: 470454 - DNA, 201 bp, Homo sapiens
attgacagaaaagatattggaacaattctataaaatcagaaggtatatgtgtagctttggtgtggatggcaactttttctgtcttcagatagaacttcagkgtaatgttgattatgtgtttcagccattattttttaaatgctgttaatgaagaatgccatttattaaatttgaagtgatcttatttggaatttcaactca

SEQ ID NO: 470455 - DNA, 201 bp, Homo sapiens
acatgcaacctttctgcctgtaatccaaggaaatttgacctattgttcatagtttttattgggtatcatgaagttaattattcatgcatttcatagatacrtaattgctttctagaactacagtcacattcccttgacatgggtattttggaacagtaatcagtcaaatttgaaatgaaagtttaaatttgtatccttggg

SEQ ID NO: 470456 - DNA, 201 bp, Homo sapiens
tgacagaaaagatattggaacaattctataaaatcagaaggtatatgtgtagctttggtgtggatggcaactttttctgtcttcagatagaacttcagtgkaatgttgattatgtgtttcagccattattttttaaatgctgttaatgaagaatgccatttattaaatttgaagtgatcttatttggaatttcaactcagt

SEQ ID NO: 470457 - DNA, 201 bp, Homo sapiens
cagttacagttccaagaagaaaacggtcaaaaccaaaattgaaattgaagattataaatcagaatagcgtggccgtccttcagacccctccagacatccartcagagcattcaagggatggtgaaatggatgatagtcgaggtaatactaatttattttccatgaaatatgtgtgcaagaattaaagcatataaagtaact

SEQ ID NO: 470458 - DNA, 201 bp, Homo sapiens
attggaacaattctataaaatcagaaggtatatgtgtagctttggtgtggatggcaactttttctgtcttcagatagaacttcagtgtaatgttgattatrtgtttcagccattattttttaaatgctgttaatgaagaatgccatttattaaatttgaagtgatcttatttggaatttcaactcagttgggccataaaga

SEQ ID NO: 470459 - DNA, 201 bp, Homo sapiens
gaatagcgtggccgtccttcagacccctccagacatccaatcagagcattcaagggatggtgaaatggatgatagtcgaggtaatactaatttattttccrtgaaatatgtgtgcaagaattaaagcatataaagtaacttttgaaatatgtgtatgatttaccaaagggtaaatcacactgacttagttaacccctgatg

SEQ ID NO: 470460 - DNA, 201 bp, Homo sapiens
gccgtccttcagacccctccagacatccaatcagagcattcaagggatggtgaaatggatgatagtcgaggtaatactaatttattttccatgaaatatgrgtgcaagaattaaagcatataaagtaacttttgaaatatgtgtatgatttaccaaagggtaaatcacactgacttagttaacccctgatgtgactgaccc

SEQ ID NO: 470461 - DNA, 201 bp, Homo sapiens
ccagacatccaatcagagcattcaagggatggtgaaatggatgatagtcgaggtaatactaatttattttccatgaaatatgtgtgcaagaattaaagcawataaagtaacttttgaaatatgtgtatgatttaccaaagggtaaatcacactgacttagttaacccctgatgtgactgacccttgccatttccaaatgag

SEQ ID NO: 470462 - DNA, 201 bp, Homo sapiens
aacagagccagactttgtctcaaaaatgaatgaatgagggaatgaatgaatatgtttatttcccgtcaccttgacaccttgactctggagctaagaggaarctgaaaaatttgttttagaaaattaagagttttgtatgcctatttaaaaacagttaaattttggtaggcccattcaatgaagatgtctcaatttaatttt

SEQ ID NO: 470463 - DNA, 201 bp, Homo sapiens
cactaatggtgtggtaagagagatgatggttcaccgggagcactaaggaaaggtctgctgttgagaaaatatgtaaggccatacctgaagggttagaaaaygccagacatggctggccgtggtggctcacgtctgtaatcccagcactttgggatgccaaggctggtggatcacaaggtcaggtgtttgagaccagcctga

SEQ ID NO: 470464 - DNA, 201 bp, Homo sapiens
agagatgatggttcaccgggagcactaaggaaaggtctgctgttgagaaaatatgtaaggccatacctgaagggttagaaaacgccagacatggctggccrtggtggctcacgtctgtaatcccagcactttgggatgccaaggctggtggatcacaaggtcaggtgtttgagaccagcctgaccaacatggtatcgctcc

SEQ ID NO: 470465 - DNA, 201 bp, Homo sapiens
tggtgtatattattccattcttttattttaacctgtttgcatctttgtatttaacttgtgtttcttgaaggcgatagttttatttctctgataaaaacatrtaagaagacaatcacattaaatgtatatggtctaaaacctctgctttttaattgggggtatttagaccatgtacatttaatgtgattgtcttcttatatg

SEQ ID NO: 470466 - DNA, 201 bp, Homo sapiens
atggttcaccgggagcactaaggaaaggtctgctgttgagaaaatatgtaaggccatacctgaagggttagaaaacgccagacatggctggccgtggtggmtcacgtctgtaatcccagcactttgggatgccaaggctggtggatcacaaggtcaggtgtttgagaccagcctgaccaacatggtatcgctcctaaaata

SEQ ID NO: 470467 - DNA, 201 bp, Homo sapiens
cccccacctgccaagatggggtcttactctgtcacccaagctagagtgcagtggtgtgatcataccttactgcagccttgacctgctaggctcaagtgatstacctcagcctcccaatagtggagaccacagttgtgcaccaccacacctggctactttgttttatttttttatatatggggtctcactatgttgtccagg

SEQ ID NO: 470468 - DNA, 201 bp, Homo sapiens
tcaccgggagcactaaggaaaggtctgctgttgagaaaatatgtaaggccatacctgaagggttagaaaacgccagacatggctggccgtggtggctcacrtctgtaatcccagcactttgggatgccaaggctggtggatcacaaggtcaggtgtttgagaccagcctgaccaacatggtatcgctcctaaaatacaaaa

SEQ ID NO: 470469 - DNA, 201 bp, Homo sapiens
agagtgcagtggtgtgatcataccttactgcagccttgacctgctaggctcaagtgatctacctcagcctcccaatagtggagaccacagttgtgcaccaycacacctggctactttgttttatttttttatatatggggtctcactatgttgtccaggctggtctcatactcctgagctcaagtgagtctcctgccttgg

SEQ ID NO: 470470 - DNA, 201 bp, Homo sapiens
tgagaccagcctgaccaacatggtatcgctcctaaaatacaaaaattagctgggcctggtggcgcatgcctgtaatcccagctactcaggagacttgaggmaggagaatcgcttgaacctgggaggtagaggttgctgtgagccgagatcgcaccaccgcactctagcctgggtgacagagcgagactccatctcaaaaag

SEQ ID NO: 470471 - DNA, 201 bp, Homo sapiens
tcgctcctaaaatacaaaaattagctgggcctggtggcgcatgcctgtaatcccagctactcaggagacttgaggcaggagaatcgcttgaacctgggagrtagaggttgctgtgagccgagatcgcaccaccgcactctagcctgggtgacagagcgagactccatctcaaaaagaaagaaagaaagaaaatgccagaca

SEQ ID NO: 470472 - DNA, 201 bp, Homo sapiens
ttgattatgtgtttcagccattattttttaaatgctgttaatgaagaatgccatttattaaatttgaagtgatcttatttggaatttcaactcagttgggycataaagatgcaacctattgataatagtttctaatagaaagaactttaaaaattcttttagttctgtgctgcagtaaatatagagcctaaaatacagtat

SEQ ID NO: 470473 - DNA, 201 bp, Homo sapiens
tgtgagccgagatcgcaccaccgcactctagcctgggtgacagagcgagactccatctcaaaaagaaagaaagaaagaaaatgccagacatttattgaggrgctggaatgatatagtgaagtgttctgagtcagtcgggctctgattgataaagagcttggcatgtttgaaggacagcaaggaagccagaatagctggagc

SEQ ID NO: 470474 - DNA, 201 bp, Homo sapiens
cagccattattttttaaatgctgttaatgaagaatgccatttattaaatttgaagtgatcttatttggaatttcaactcagttgggccataaagatgcaamctattgataatagtttctaatagaaagaactttaaaaattcttttagttctgtgctgcagtaaatatagagcctaaaatacagtatagttttgggtatac

SEQ ID NO: 470475 - DNA, 201 bp, Homo sapiens
attattttttaaatgctgttaatgaagaatgccatttattaaatttgaagtgatcttatttggaatttcaactcagttgggccataaagatgcaacctatkgataatagtttctaatagaaagaactttaaaaattcttttagttctgtgctgcagtaaatatagagcctaaaatacagtatagttttgggtatacagtaa

SEQ ID NO: 470476 - DNA, 201 bp, Homo sapiens
  misc_feature (1)...(201): n = A,T,C or G
cttgccttttcaggttctcttcctttcacacattttagaacagacctaccttacagaaatctcaaggagcaccatatctttgaagatcacaggtggggaantacagagggcttgactttagtttgctagataacgacacaaaccttctcagatactgtgagcttggataataccatgtttcagttaaggtagttgatgcat

SEQ ID NO: 470477 - DNA, 201 bp, Homo sapiens
ctctagcctgggtgacagagcgagactccatctcaaaaagaaagaaagaaagaaaatgccagacatttattgaggggctggaatgatatagtgaagtgttstgagtcagtcgggctctgattgataaagagcttggcatgtttgaaggacagcaaggaagccagaatagctggagcgtagcagcggggagacaaatgccac

SEQ ID NO: 470478 - DNA, 201 bp, Homo sapiens
  misc_feature (1)...(201): n = A,T,C or G
attttagaacagacctaccttacagaaatctcaaggagcaccatatctttgaagatcacaggtggggaactacagagggcttgactttagtttgctagatnacgacacaaaccttctcagatactgtgagcttggataataccatgtttcagttaaggtagttgatgcatacattctagaaatggaaaagctgtcatttaa

SEQ ID NO: 470479 - DNA, 201 bp, Homo sapiens
tagcctgggtgacagagcgagactccatctcaaaaagaaagaaagaaagaaaatgccagacatttattgaggggctggaatgatatagtgaagtgttctgwgtcagtcgggctctgattgataaagagcttggcatgtttgaaggacagcaaggaagccagaatagctggagcgtagcagcggggagacaaatgccacaag

SEQ ID NO: 470480 - DNA, 201 bp, Homo sapiens
taaagatgcaacctattgataatagtttctaatagaaagaactttaaaaattcttttagttctgtgctgcagtaaatatagagcctaaaatacagtatagktttgggtatacagtaactaacatctattatttccttctaatatatttatttattgatattattcattgtatatatttttaactggataaacatcaacatt

SEQ ID NO: 470481 - DNA, 201 bp, Homo sapiens
ctccatctcaaaaagaaagaaagaaagaaaatgccagacatttattgaggggctggaatgatatagtgaagtgttctgagtcagtcgggctctgattgatraagagcttggcatgtttgaaggacagcaaggaagccagaatagctggagcgtagcagcggggagacaaatgccacaaggttagttggagaaaggcattgg

SEQ ID NO: 470482 - DNA, 201 bp, Homo sapiens
caacctattgataatagtttctaatagaaagaactttaaaaattcttttagttctgtgctgcagtaaatatagagcctaaaatacagtatagttttgggtrtacagtaactaacatctattatttccttctaatatatttatttattgatattattcattgtatatatttttaactggataaacatcaacatttatgacag

SEQ ID NO: 470483 - DNA, 201 bp, Homo sapiens
  misc_feature (1)...(201): n = A,T,C or G
tttagaacagacctaccttacagaaatctcaaggagcaccatatctttgaagatcacaggtggggaactacagagggcttgactttagtttgctagataangacacaaaccttctcagatactgtgagcttggataataccatgtttcagttaaggtagttgatgcatacattctagaaatggaaaagctgtcatttaatg

SEQ ID NO: 470484 - DNA, 201 bp, Homo sapiens
tgctgcagtaaatatagagcctaaaatacagtatagttttgggtatacagtaactaacatctattatttccttctaatatatttatttattgatattattyattgtatatatttttaactggataaacatcaacatttatgacaggaattttccatgctggggaatttctcattttgatgtttttattaattgctaactct

SEQ ID NO: 470485 - DNA, 201 bp, Homo sapiens
ctgggattacagacgtgcaccaccacacccagctaatttttgtatttttagtagagacggggtttcaccatgttggccaggatggtctcgatctcctgacyttgtgatccgcttaccttggcctcccaaagtgctgggattacaggcgtgagccaccgtgcccagcctacattatttattatgattccagtttgcctcttt

SEQ ID NO: 470486 - DNA, 201 bp, Homo sapiens
ttagagtgcagtgacacgatcttggcttactacaacctctgcctcctgggttcatgcgaccctcctacctcagcctcctgagtagctgggaccatggatgygggccaccacgcctggctaatttttgtatttttttgtagagatggggttttgccatgttgcccagactggtctggaactcctgggctcaaaccatctgct

SEQ ID NO: 470487 - DNA, 201 bp, Homo sapiens
ttttgggtatacagtaactaacatctattatttccttctaatatatttatttattgatattattcattgtatatatttttaactggataaacatcaacatktatgacaggaattttccatgctggggaatttctcattttgatgtttttattaattgctaactcttgtgggatttcttttttcaagtaggacttatttcag

SEQ ID NO: 470488 - DNA, 201 bp, Homo sapiens
tgcagtgacacgatcttggcttactacaacctctgcctcctgggttcatgcgaccctcctacctcagcctcctgagtagctgggaccatggatgcgggccmccacgcctggctaatttttgtatttttttgtagagatggggttttgccatgttgcccagactggtctggaactcctgggctcaaaccatctgctctgctc

SEQ ID NO: 470489 - DNA, 201 bp, Homo sapiens
tgatgtttttattaattgctaactcttgtgggatttcttttttcaagtaggacttatttcagtagtttcatggaaaaaaatcttagaattgtactgttgaytttcagtaagtaaagataaatcttcctttgtctgctttacatcatgtacattctaccctttaagaatgagttccatttctttttaagtgagatttaagta

SEQ ID NO: 470490 - DNA, 201 bp, Homo sapiens
tgtagagatggggttttgccatgttgcccagactggtctggaactcctgggctcaaaccatctgctctgctcagcctgctgagttcttgagatagcaaaayattttaatagtaacccaaaatccaatatgagttaaagaggattactgttggtttgctcatttttggggcggttatttattttcaactgattcagaaatga

SEQ ID NO: 470491 - DNA, 201 bp, Homo sapiens
atgtttttattaattgctaactcttgtgggatttcttttttcaagtaggacttatttcagtagtttcatggaaaaaaatcttagaattgtactgttgattytcagtaagtaaagataaatcttcctttgtctgctttacatcatgtacattctaccctttaagaatgagttccatttctttttaagtgagatttaagtaaa

SEQ ID NO: 470492 - DNA, 201 bp, Homo sapiens
aggattactgttggtttgctcatttttggggcggttatttattttcaactgattcagaaatgaagtgataattatttgtttgattatattttatttcatayttttttgttttttttttttaaggggcagtgtcttgttacgttgcccaggctggtttccaactcctgggctcaagtgatccttctgcctcagcctctcaag

SEQ ID NO: 470493 - DNA, 201 bp, Homo sapiens
tgctaactcttgtgggatttcttttttcaagtaggacttatttcagtagtttcatggaaaaaaatcttagaattgtactgttgattttcagtaagtaaagrtaaatcttcctttgtctgctttacatcatgtacattctaccctttaagaatgagttccatttctttttaagtgagatttaagtaaaactgcatggcaaaa

SEQ ID NO: 470494 - DNA, 201 bp, Homo sapiens
ctggtgttgcgaggttgagggatggagatgaccctcaggtgctgcatgggcctggagcgggtttttcctggagctggagagggcatgatggcccgtgtgcrggagtggaaggcacagcattgtcattgctcttcttggaactgctttttctagtgaggaggtggagggcctgggaaaggagggtgatgtggccagaacccc

SEQ ID NO: 470495 - DNA, 201 bp, Homo sapiens
gaagtgataattatttgtttgattatattttatttcatagttttttgttttttttttttaaggggcagtgtcttgttacgttgcccaggctggtttccaaytcctgggctcaagtgatccttctgcctcagcctctcaagtagcaggtactataggcatgcgccactgcagctggctttgagacaatagaatttattgaat

SEQ ID NO: 470496 - DNA, 201 bp, Homo sapiens
gaatatctactgtatgtcagatgttggaaatcatatcagtgtacaaagcaggtagaattctctgcatagagtttatattttaatgttaggtaacccaactyttaaaaaaaatcagttaattataatgtgtttggcaagtcccatggtaaaaataaagtttgataagaattgcctggccaggcgcagtggctcatgcctgta

SEQ ID NO: 470497 - DNA, 201 bp, Homo sapiens
gcatagagtttatattttaatgttaggtaacccaactcttaaaaaaaatcagttaattataatgtgtttggcaagtcccatggtaaaaataaagtttgatragaattgcctggccaggcgcagtggctcatgcctgtaatctcagcactttgggaggccgaggtaggtagatcacttgtggtcaggagttcgagaccagac

SEQ ID NO: 470498 - DNA, 201 bp, Homo sapiens
gctggaatgatatagtgaagtgttctgagtcagtcgggctctgattgataaagagcttggcatgtttgaaggacagcaaggaagccagaatagctggagcrtagcagcggggagacaaatgccacaaggttagttggagaaaggcattgggaaaggtttgtcttttaagtgctctgagaagcaattgaaggtttgaaatag

SEQ ID NO: 470499 - DNA, 201 bp, Homo sapiens
gatatagtgaagtgttctgagtcagtcgggctctgattgataaagagcttggcatgtttgaaggacagcaaggaagccagaatagctggagcgtagcagcrgggagacaaatgccacaaggttagttggagaaaggcattgggaaaggtttgtcttttaagtgctctgagaagcaattgaaggtttgaaatagaatagtga

SEQ ID NO: 470500 - DNA, 201 bp, Homo sapiens
accaccacacccagctaatttttgtatttttagtagagacggggtttcaccatgttggccaggatggtctcgatctcctgaccttgtgatccgcttacctyggcctcccaaagtgctgggattacaggcgtgagccaccgtgcccagcctacattatttattatgattccagtttgcctctttttattacttttacctgtt

SEQ ID NO: 470501 - DNA, 201 bp, Homo sapiens
agtgttctgagtcagtcgggctctgattgataaagagcttggcatgtttgaaggacagcaaggaagccagaatagctggagcgtagcagcggggagacaartgccacaaggttagttggagaaaggcattgggaaaggtttgtcttttaagtgctctgagaagcaattgaaggtttgaaatagaatagtgacttgcttgat

SEQ ID NO: 470502 - DNA, 201 bp, Homo sapiens
ttgtatttttagtagagacggggtttcaccatgttggccaggatggtctcgatctcctgaccttgtgatccgcttaccttggcctcccaaagtgctgggawtacaggcgtgagccaccgtgcccagcctacattatttattatgattccagtttgcctctttttattacttttacctgtttttaaaaattatttttgtagt

SEQ ID NO: 470503 - DNA, 201 bp, Homo sapiens
gagtcagtcgggctctgattgataaagagcttggcatgtttgaaggacagcaaggaagccagaatagctggagcgtagcagcggggagacaaatgccacahggttagttggagaaaggcattgggaaaggtttgtcttttaagtgctctgagaagcaattgaaggtttgaaatagaatagtgacttgcttgatcacatttg

SEQ ID NO: 470504 - DNA, 201 bp, Homo sapiens
catgtctgcctctcggatctccttctagagtcttagttcttgttttttttttcagaatttgggcaactaacaaggctagaaaggaggccatctaaaaaagygattggtgttgaaaagttgctgctcctgtcctagcagcacaactcttcacgtcatagtaataggagtaatgacgatgatgagtgtggacaactaatgagc

SEQ ID NO: 470505 - DNA, 201 bp, Homo sapiens
atgttggccaggatggtctcgatctcctgaccttgtgatccgcttaccttggcctcccaaagtgctgggattacaggcgtgagccaccgtgcccagcctayattatttattatgattccagtttgcctctttttattacttttacctgtttttaaaaattatttttgtagttgctttaagattatagtgtacatttagaga

SEQ ID NO: 470506 - DNA, 201 bp, Homo sapiens
gtcagtcgggctctgattgataaagagcttggcatgtttgaaggacagcaaggaagccagaatagctggagcgtagcagcggggagacaaatgccacaagrttagttggagaaaggcattgggaaaggtttgtcttttaagtgctctgagaagcaattgaaggtttgaaatagaatagtgacttgcttgatcacatttgta

SEQ ID NO: 470507 - DNA, 201 bp, Homo sapiens
accttgtgatccgcttaccttggcctcccaaagtgctgggattacaggcgtgagccaccgtgcccagcctacattatttattatgattccagtttgcctcyttttattacttttacctgtttttaaaaattatttttgtagttgctttaagattatagtgtacatttagagaggtctaccttcaagtaatattgtacactt

SEQ ID NO: 470508 - DNA, 201 bp, Homo sapiens
cagtcgggctctgattgataaagagcttggcatgtttgaaggacagcaaggaagccagaatagctggagcgtagcagcggggagacaaatgccacaaggtdagttggagaaaggcattgggaaaggtttgtcttttaagtgctctgagaagcaattgaaggtttgaaatagaatagtgacttgcttgatcacatttgtact

SEQ ID NO: 470509 - DNA, 201 bp, Homo sapiens
aggacttatttcagtagtttcatggaaaaaaatcttagaattgtactgttgattttcagtaagtaaagataaatcttcctttgtctgctttacatcatgtrcattctaccctttaagaatgagttccatttctttttaagtgagatttaagtaaaactgcatggcaaaatgaagatactgtaggtacgaattatttattgt

SEQ ID NO: 470510 - DNA, 201 bp, Homo sapiens
ctttgtctgctttacatcatgtacattctaccctttaagaatgagttccatttctttttaagtgagatttaagtaaaactgcatggcaaaatgaagatacwgtaggtacgaattatttattgttttacaaaattgctgctttctgaagtgttttttaaaattgcaagataacaaatagtggagaagtgttaattcacaata

SEQ ID NO: 470511 - DNA, 201 bp, Homo sapiens
gggctctgattgataaagagcttggcatgtttgaaggacagcaaggaagccagaatagctggagcgtagcagcggggagacaaatgccacaaggttagttrgagaaaggcattgggaaaggtttgtcttttaagtgctctgagaagcaattgaaggtttgaaatagaatagtgacttgcttgatcacatttgtacttttga

SEQ ID NO: 470512 - DNA, 201 bp, Homo sapiens
ctgggaggcggaggttacagtgagctgagattgcaccactgcactccagcgtgggtgacagagcaagactctgtctccaaaaaaaaaaaaaggaattggargtacagatgggtgtttagggtccatatgaacagaaagcagtatttgagcacagattttaaagaggtgagtgagtgagccacttgattacctgagagaaga

SEQ ID NO: 470513 - DNA, 201 bp, Homo sapiens
gataaagagcttggcatgtttgaaggacagcaaggaagccagaatagctggagcgtagcagcggggagacaaatgccacaaggttagttggagaaaggcaytgggaaaggtttgtcttttaagtgctctgagaagcaattgaaggtttgaaatagaatagtgacttgcttgatcacatttgtacttttgaaaagtttctct

SEQ ID NO: 470514 - DNA, 201 bp, Homo sapiens
gctttacatcatgtacattctaccctttaagaatgagttccatttctttttaagtgagatttaagtaaaactgcatggcaaaatgaagatactgtaggtaygaattatttattgttttacaaaattgctgctttctgaagtgttttttaaaattgcaagataacaaatagtggagaagtgttaattcacaatagtaatttg

SEQ ID NO: 470515 - DNA, 201 bp, Homo sapiens
atgtttgaaggacagcaaggaagccagaatagctggagcgtagcagcggggagacaaatgccacaaggttagttggagaaaggcattgggaaaggtttgtmttttaagtgctctgagaagcaattgaaggtttgaaatagaatagtgacttgcttgatcacatttgtacttttgaaaagtttctctggctgctgtggggaa

SEQ ID NO: 470516 - DNA, 201 bp, Homo sapiens
ctttacatcatgtacattctaccctttaagaatgagttccatttctttttaagtgagatttaagtaaaactgcatggcaaaatgaagatactgtaggtacraattatttattgttttacaaaattgctgctttctgaagtgttttttaaaattgcaagataacaaatagtggagaagtgttaattcacaatagtaatttgg

SEQ ID NO: 470517 - DNA, 201 bp, Homo sapiens
actgggagaaacactttctgatgcttgtatgtaactgattttcagatacaattgaacaggtaatttgatttgggcagttggagtttgcaaagaagtagtcyatatacttaggaggaattgatcagatcagctttaacaagaatttccatttctgaggatgttaaaaaatgtctgaaaaaggtttccatagtctcttaaatt

SEQ ID NO: 470518 - DNA, 201 bp, Homo sapiens
ggcattgggaaaggtttgtcttttaagtgctctgagaagcaattgaaggtttgaaatagaatagtgacttgcttgatcacatttgtacttttgaaaagttyctctggctgctgtggggaaaggcttcagtagatgcagggtcggagaagcataaccagcagtagactcttgtagcaggttaggtgagagatggtggtggcc

SEQ ID NO: 470519 - DNA, 201 bp, Homo sapiens
gtcaggaggcagacttctttcaaaagaagggagggacatggttacacaatttcttagctatgttttcttctgtagttttagtaggaagcaagcatgaaaartattgccattctctggagttaagggaagtcagttattctatttaatagctgattaggctgggcatggtgatggtggctcatgcctgtaattctagcactt

SEQ ID NO: 470520 - DNA, 201 bp, Homo sapiens
taaaactgcatggcaaaatgaagatactgtaggtacgaattatttattgttttacaaaattgctgctttctgaagtgttttttaaaattgcaagataacamatagtggagaagtgttaattcacaatagtaatttggagttttaagtttcatgattgaaattgcttcaagttaagttttaagtttcatgatttaaatggat

SEQ ID NO: 470521 - DNA, 201 bp, Homo sapiens
ttccttcatttgctttcttttcctccctcgtgcactttgtgctattgctgccatgcatttgacttttatatatgttataaactctgtaatattttgctgtyttttattaaacatatatctcttagagatttaaataataaaaaatttaaaagatgtttgctcatatagttaccactgtggtgctctttattccttcgtatt

SEQ ID NO: 470522 - DNA, 201 bp, Homo sapiens
cttcaagtaatattgtacacttcatctataataaaagcattccttcatttgctttcttttcctccctcgtgcactttgtgctattgctgccatgcatttgrcttttatatatgttataaactctgtaatattttgctgtcttttattaaacatatatctcttagagatttaaataataaaaaatttaaaagatgtttgctc

SEQ ID NO: 470523 - DNA, 201 bp, Homo sapiens
caattgaacaggtaatttgatttgggcagttggagtttgcaaagaagtagtccatatacttaggaggaattgatcagatcagctttaacaagaatttccayttctgaggatgttaaaaaatgtctgaaaaaggtttccatagtctcttaaatttgggaagtgctccatttcacaaaatatgaaaggtttcttgataatagt

SEQ ID NO: 470524 - DNA, 201 bp, Homo sapiens
agttaagttttaagtttcatgatttaaatggattaaagtttggctttttataggaataatatattgattttaatcgtataatttttaaactgtaaggccargcttttaagaaaatcattttttaatgtgaaaattagtctcctctatatcaaacccagatatattttattctctaaagacaaggtacacgaaagggaaagt

SEQ ID NO: 470525 - DNA, 201 bp, Homo sapiens
gtacacttcatctataataaaagcattccttcatttgctttcttttcctccctcgtgcactttgtgctattgctgccatgcatttgacttttatatatgtyataaactctgtaatattttgctgtcttttattaaacatatatctcttagagatttaaataataaaaaatttaaaagatgtttgctcatatagttaccact

SEQ ID NO: 470526 - DNA, 201 bp, Homo sapiens
aaaaacaacacaaaagaccttggaaggttttccttgtgactaccacttgtaaacactgagaaatggtgatatgtttcaatttcatattttctcattgactygtatcagggtaaaagaaaatcagttgaaaaattacccttgcttttttaaaatttacgtgataaaatagcccatctgaatttactgaatttgtccttattt

SEQ ID NO: 470527 - DNA, 201 bp, Homo sapiens
gaataatatattgattttaatcgtataatttttaaactgtaaggccaagcttttaagaaaatcattttttaatgtgaaaattagtctcctctatatcaaamccagatatattttattctctaaagacaaggtacacgaaagggaaagtagttgtcagatgggatttagctgtttctgcatggcaaaagacgtgtgcagtaa

SEQ ID NO: 470528 - DNA, 201 bp, Homo sapiens
acacaaaagaccttggaaggttttccttgtgactaccacttgtaaacactgagaaatggtgatatgtttcaatttcatattttctcattgactcgtatcayggtaaaagaaaatcagttgaaaaattacccttgcttttttaaaatttacgtgataaaatagcccatctgaatttactgaatttgtccttatttttattga

SEQ ID NO: 470529 - DNA, 201 bp, Homo sapiens
gacaaggtacacgaaagggaaagtagttgtcagatgggatttagctgtttctgcatggcaaaagacgtgtgcagtaaaactaggccactctttatatatgmctttttctaagtattttccttgacagttatttctgctctaccatgaaaagtttttcttctcaaaccagttgtgctcctttctagtaagtttttttttgtt

SEQ ID NO: 470530 - DNA, 201 bp, Homo sapiens
cactgagaaatggtgatatgtttcaatttcatattttctcattgactcgtatcagggtaaaagaaaatcagttgaaaaattacccttgcttttttaaaatktacgtgataaaatagcccatctgaatttactgaatttgtccttatttttattgaatatgaaaaaagattgtttagtgtgttggatgttaaatgctaagac

SEQ ID NO: 470531 - DNA, 201 bp, Homo sapiens
gcctaggctggagtgcagtggcgtgatcctggctcactgtggctgccgccctccggattcaagcgattcgcctgactcagcctcccaaaaagctgggattacaggcgcatgccaccacacccagctaatttttgtgtttttagtagagatgggtgttcaccatgttggccaggctggtctcagactcctgacctcaggtga

SEQ ID NO: 470532 - DNA, 201 bp, Homo sapiens
aaagtagttgtcagatgggatttagctgtttctgcatggcaaaagacgtgtgcagtaaaactaggccactctttatatatgcctttttctaagtattttcyttgacagttatttctgctctaccatgaaaagtttttcttctcaaaccagttgtgctcctttctagtaagtttttttttgttttgttttgaatagttatat

SEQ ID NO: 470533 - DNA, 201 bp, Homo sapiens
tgagaaatggtgatatgtttcaatttcatattttctcattgactcgtatcagggtaaaagaaaatcagttgaaaaattacccttgcttttttaaaatttaygtgataaaatagcccatctgaatttactgaatttgtccttatttttattgaatatgaaaaaagattgtttagtgtgttggatgttaaatgctaagacaat

SEQ ID NO: 470534 - DNA, 201 bp, Homo sapiens
tcccgggtacaagtgattctccttccttagcctcctgagtagccaggattacaggcacccaccaccatgcccggctagtttttttttttttttttttttgkatttttagtagagacggggtttcaccatgttggccaggctggtctcgaactcctgacctcaggtgatccacctgcctcagcctcccaaaatgatgggatt

SEQ ID NO: 470535 - DNA, 201 bp, Homo sapiens
taggagtaatgacgatgatgagtgtggacaactaatgagcacttaactgtagtaccaggcactattctcagaattcattagtgtgacaaccctctaaggtwgggtctgttatccccattatacagatggggcagaaacggcagggagaagttaagtgacttgcttaaggtaataaatgtagtaagaagcagaggtgggatt

SEQ ID NO: 470536 - DNA, 201 bp, Homo sapiens
tgcatggcaaaagacgtgtgcagtaaaactaggccactctttatatatgcctttttctaagtattttccttgacagttatttctgctctaccatgaaaagwttttcttctcaaaccagttgtgctcctttctagtaagtttttttttgttttgttttgaatagttatataataattatgttgttctgactctgaaaagact

SEQ ID NO: 470537 - DNA, 201 bp, Homo sapiens
aaattacccttgcttttttaaaatttacgtgataaaatagcccatctgaatttactgaatttgtccttatttttattgaatatgaaaaaagattgtttagygtgttggatgttaaatgctaagacaattttagaatttaaggaattgaatatacagcattttcatgactagtccctcatgttcatttacgtgccaggatct

SEQ ID NO: 470538 - DNA, 201 bp, Homo sapiens
ttgcagtgagctgaaatcgtgccattgcactccagcctgggcgacagagtgagactctgtctcaaaaacaaaacaaaacaaaacaaaaaaaaactctgggkagtatattctttcagtatacatttatgcatttaaaaaaagaaaaaagcttaatacttcagaaatggtaaatcatttgacaaatgagaaaaccaaattctg

SEQ ID NO: 470539 - DNA, 201 bp, Homo sapiens
catatttaatttctgtcatgacaccaaagctatccagtagtatcgataatcttgtacatgacctccaaaaggttgtttcagtattcccacacatcttctcyctgactgggagggttggaaccaacctcatttctttgtgtagtgcttttaaaaattattgtgtttcacataaggcatattaagtgtttttgcaccagatgt

SEQ ID NO: 470540 - DNA, 201 bp, Homo sapiens
aatatgaaaaaagattgtttagtgtgttggatgttaaatgctaagacaattttagaatttaaggaattgaatatacagcattttcatgactagtccctcaygttcatttacgtgccaggatctcacatcctttgcagaaggaaaggtacattcctagggataaaataagtgcatgttacttggacaacatttttgctttct

SEQ ID NO: 470541 - DNA, 201 bp, Homo sapiens
gaaaaaagattgtttagtgtgttggatgttaaatgctaagacaattttagaatttaaggaattgaatatacagcattttcatgactagtccctcatgttcmtttacgtgccaggatctcacatcctttgcagaaggaaaggtacattcctagggataaaataagtgcatgttacttggacaacatttttgctttctgtttg

SEQ ID NO: 470542 - DNA, 201 bp, Homo sapiens
tttattgcagttttttgcgctgcggaatgagattgaaatttttctgaataataatgccctcaactattaagtcaaatacttaatagctttgaaagttggcytttcctgtagatttcataatattttgtaacaaattcacctaaaattacaaggcagaacagtgattataagtgaaccttatactgtggtaaggtcacttct

SEQ ID NO: 470543 - DNA, 201 bp, Homo sapiens
gtgctctgagaagcaattgaaggtttgaaatagaatagtgacttgcttgatcacatttgtacttttgaaaagtttctctggctgctgtggggaaaggcttsagtagatgcagggtcggagaagcataaccagcagtagactcttgtagcaggttaggtgagagatggtggtggccacgactgagctgctagtggtggaagt

SEQ ID NO: 470544 - DNA, 201 bp, Homo sapiens
aaaaaaaagtaaataattagaaaatttaaatagtgtaaactagaggcctctcctatcagtttgctagagctaccataacaaaataccacaaactgagtgaygtaagtgacagtattttttttttttttttttttgagacggagtctcactctgtcaccaggctgcacgatctctgctcactgcagtctcggcctcccaggt

SEQ ID NO: 470545 - DNA, 201 bp, Homo sapiens
aattttaaacatggcaaacttaagaggggttttgtgtgagaaaatggaaatgctaagaaggaagttgaaaatcctgctaatttggagatctttgattaaarctagaaataagaatatgggaagcatcaacttccaagatgccctcattgtagataataccatttaggatctaggctcaagccctgggaaactccagggctt

SEQ ID NO: 470546 - DNA, 201 bp, Homo sapiens
agtgacgtaagtgacagtattttttttttttttttttttgagacggagtctcactctgtcaccaggctgcacgatctctgctcactgcagtctcggcctcmcaggttcaagtgattctcctacctcagcctcccgagtagctgggacttccagtctccagaattgagaaatttaatttcttttaatttaaaaaaattaaga

SEQ ID NO: 470547 - DNA, 201 bp, Homo sapiens
taataaaagcattccttcatttgctttcttttcctccctcgtgcactttgtgctattgctgccatgcatttgacttttatatatgttataaactctgtaayattttgctgtcttttattaaacatatatctcttagagatttaaataataaaaaatttaaaagatgtttgctcatatagttaccactgtggtgctctttat

SEQ ID NO: 470548 - DNA, 201 bp, Homo sapiens
ttttaaacatggcaaacttaagaggggttttgtgtgagaaaatggaaatgctaagaaggaagttgaaaatcctgctaatttggagatctttgattaaaacyagaaataagaatatgggaagcatcaacttccaagatgccctcattgtagataataccatttaggatctaggctcaagccctgggaaactccagggctttg

SEQ ID NO: 470549 - DNA, 201 bp, Homo sapiens
aatgtatacccataatgaatgaaattaatgaaattatatatatttatatattcattataagaggttacaatttttttattttatttttatttatttatttwttttttttgaagaggttacattttttccccccagcctagaaagcttcactgcataacatgattatgtgggaatttcagagttggatcactttgcattact

SEQ ID NO: 470550 - DNA, 201 bp, Homo sapiens
gcttctctagcaacttttcttgtatatatgagtcagaaaggaaacctagggaattcatcctcttttgtttcttggctcctgaagccctaattggtctgccstctctctacattttgttgtcttcttttgtttgtcttatgtatcacggctaagggtttttaaagctgtatttagtggaaagaacagggaaaagtacatttt

SEQ ID NO: 470551 - DNA, 201 bp, Homo sapiens
gctgtcttttattaaacatatatctcttagagatttaaataataaaaaatttaaaagatgtttgctcatatagttaccactgtggtgctctttattccttmgtattgatccagattttcatctgacatcattttgtttctggagaatatcctttaacatttcttgcagtgaaagtctcctggtgatgaattatttcattat

SEQ ID NO: 470552 - DNA, 201 bp, Homo sapiens
ataagaatatgggaagcatcaacttccaagatgccctcattgtagataataccatttaggatctaggctcaagccctgggaaactccagggctttggaagycaaatagaggaagaacacgtacaggagatgaagaaagattagcgaggaaggcagtgaaatatccacaggtggactgctgccaaatccagcagaacagtat

SEQ ID NO: 470553 - DNA, 201 bp, Homo sapiens
aggtatacatcacaagttcagttttactccccagaggttatcactggaagctttttttgtatatttttctagatgtttttggtttgtagataagacgtgtwtgtatgtagaaaaaaatacagacataggcatatatattctttgaaaacaaatggaattaggccgggcgcggtggctcacgcctgtaatcccagcactttg

SEQ ID NO: 470554 - DNA, 201 bp, Homo sapiens
tttattaaacatatatctcttagagatttaaataataaaaaatttaaaagatgtttgctcatatagttaccactgtggtgctctttattccttcgtattgrtccagattttcatctgacatcattttgtttctggagaatatcctttaacatttcttgcagtgaaagtctcctggtgatgaattatttcattatttatgtt

SEQ ID NO: 470555 - DNA, 201 bp, Homo sapiens
gctttggaagtcaaatagaggaagaacacgtacaggagatgaagaaagattagcgaggaaggcagtgaaatatccacaggtggactgctgccaaatccagyagaacagtatgccagatgtcaggagcatgagtaaaatgagaaaagagaaatggcttttgacaacacttccttactaatagtagggaagaagacataggta

SEQ ID NO: 470556 - DNA, 201 bp, Homo sapiens
cgagatggcaccactgcactccagcctgggccacagagcgagactccgtctcaaaaaaaaaaaaaaaaaaatggaattatactataaatactgttttgtchcttttttttttggcatactagtatatgttatacatcttttcataggtatattgtgattaatgtaggtgcagttcagtaatgattgaaatgaagttttttc

SEQ ID NO: 470557 - DNA, 201 bp, Homo sapiens
aacatttcttgcagtgaaagtctcctggtgatgaattatttcattatttatgtttctggtgtgcctttatttcaccttcatttttgaaagatatttttgcyaggcatggaattctagttggccttttttcttctagaactttagagatgtactgctgtcttctcacttgcattgtttctcaaaagaaatctgatgttgttc

SEQ ID NO: 470558 - DNA, 201 bp, Homo sapiens
actccgtctcaaaaaaaaaaaaaaaaaaatggaattatactataaatactgttttgtcacttttttttttggcatactagtatatgttatacatcttttcwtaggtatattgtgattaatgtaggtgcagttcagtaatgattgaaatgaagttttttcattatattctatttttgaaaaattaccaataactacatatat

SEQ ID NO: 470559 - DNA, 201 bp, Homo sapiens
ttatatatgcctttttctaagtattttccttgacagttatttctgctctaccatgaaaagtttttcttctcaaaccagttgtgctcctttctagtaagttwttttttgttttgttttgaatagttatataataattatgttgttctgactctgaaaagactttaccaatggaaatttgaatctcaaatttacttttggttg

SEQ ID NO: 470560 - DNA, 201 bp, Homo sapiens
ctaatagtagggaagaagacataggtacagattcaagttgattggaaattatgaaagtgaggtaattgacctgcagtggttgctgctcagtgaaatcagcmtagtgattacctgagctaggttagagatttgatgggtgagaaagaacacctaacggtaatcctggagggaaaaaaataaagtgtttgctggagagaatga

SEQ ID NO: 470561 - DNA, 201 bp, Homo sapiens
ttgcactccagcctgggcgacagagcgagactctgtctcaaaacaacaacaaaaaactgagtaaccacactataatttatgtaaccatacagctgtctccmcttttcctcttctcaccctactgccttttgttactatgtgtaatgctctggctgacctttttgtagataaagcctttttcatattttggttatttttata

SEQ ID NO: 470562 - DNA, 201 bp, Homo sapiens
aaatactgttttgtcacttttttttttggcatactagtatatgttatacatcttttcataggtatattgtgattaatgtaggtgcagttcagtaatgattsaaatgaagttttttcattatattctatttttgaaaaattaccaataactacatatataactgaaatcacatcatgtaactgtcagtataaaggaatggct

SEQ ID NO: 470563 - DNA, 201 bp, Homo sapiens
tgattggaaattatgaaagtgaggtaattgacctgcagtggttgctgctcagtgaaatcagcatagtgattacctgagctaggttagagatttgatgggtragaaagaacacctaacggtaatcctggagggaaaaaaataaagtgtttgctggagagaatgagttggattgctggacttcaatgtgtgtggattcagttt

SEQ ID NO: 470564 - DNA, 201 bp, Homo sapiens
tctcaccctactgccttttgttactatgtgtaatgctctggctgacctttttgtagataaagcctttttcatattttggttatttttataggacagattaycataggcaggataattaggttaaaaaataagcatttggccgggcatggtggctcacgcctgtaatcccagcactttgggaggctgaggtgggtggatcat

SEQ ID NO: 470565 - DNA, 201 bp, Homo sapiens
catcttttcataggtatattgtgattaatgtaggtgcagttcagtaatgattgaaatgaagttttttcattatattctatttttgaaaaattaccaataastacatatataactgaaatcacatcatgtaactgtcagtataaaggaatggctcagataaaaccaaatagaagttgtatatttaatatttttaataatttt

SEQ ID NO: 470566 - DNA, 201 bp, Homo sapiens
agtattttccttgacagttatttctgctctaccatgaaaagtttttcttctcaaaccagttgtgctcctttctagtaagtttttttttgttttgttttgartagttatataataattatgttgttctgactctgaaaagactttaccaatggaaatttgaatctcaaatttacttttggttgatatatttacattctttaa

SEQ ID NO: 470567 - DNA, 201 bp, Homo sapiens
tttgaacaatttgattatgttatcccttaatgtaattttcttcatgtttcttgtgcttggggtttgctgagtttcttggatccgtgagttaataggtcttsttatggctagaacattttcagcagttgtttcttcaagtattttttttctcttcctcttttttctcctttggggactccagttacctgcatattattaggc

SEQ ID NO: 470568 - DNA, 201 bp, Homo sapiens
gttgctgctcagtgaaatcagcatagtgattacctgagctaggttagagatttgatgggtgagaaagaacacctaacggtaatcctggagggaaaaaaatwaagtgtttgctggagagaatgagttggattgctggacttcaatgtgtgtggattcagtttgtgacttaaaaatgaaaccagtctattgcttgtgtggctt

SEQ ID NO: 470569 - DNA, 201 bp, Homo sapiens
ttcttagtaaatacgaactttttaaaattttttccttcttatatttgatgccttagcaagcaataaatataaactctttttttgagataaatataaactcttttttttttttttttttttgagatgatgtctcactgtgtcacccaggctagagtgcagtggtgccatctcggctctccacaacctctgcctcccaggttc

SEQ ID NO: 470570 - DNA, 201 bp, Homo sapiens
aagtttttcttctcaaaccagttgtgctcctttctagtaagtttttttttgttttgttttgaatagttatataataattatgttgttctgactctgaaaakactttaccaatggaaatttgaatctcaaatttacttttggttgatatatttacattctttaaagatactgcttcatatgtattcctgttaaattttactt

SEQ ID NO: 470571 - DNA, 201 bp, Homo sapiens
tcttggatccgtgagttaataggtctttttatggctagaacattttcagcagttgtttcttcaagtattttttttctcttcctcttttttctcctttgggractccagttacctgcatattattaggctatttgaagttgcctgactgctcactgatgctttttaaaaatcactttttaagattttttttttctttttgta

SEQ ID NO: 470572 - DNA, 201 bp, Homo sapiens
attactatattatcctgaaactacatgtacacacacacccctaaaataagttttatggtatttcatatgcctgtacaggagaaaaaatagggaaagaatamaatcatcgtaagttcttattattacattatgctgagatttctaataacactgcccttttctgggtattttgtattaaacctaaaatttgtgatgttttag

SEQ ID NO: 470573 - DNA, 201 bp, Homo sapiens
tatggtatttcatatgcctgtacaggagaaaaaatagggaaagaatacaatcatcgtaagttcttattattacattatgctgagatttctaataacactgyccttttctgggtattttgtattaaacctaaaatttgtgatgttttagactgtttcactaacgtgttttgataatgtctcagtacccttgggaaaacatta

SEQ ID NO: 470574 - DNA, 201 bp, Homo sapiens
gattacctgagctaggttagagatttgatgggtgagaaagaacacctaacggtaatcctggagggaaaaaaataaagtgtttgctggagagaatgagttgrattgctggacttcaatgtgtgtggattcagtttgtgacttaaaaatgaaaccagtctattgcttgtgtggcttttctcaaaatactgttattccattacc

SEQ ID NO: 470575 - DNA, 201 bp, Homo sapiens
tcttagtaaatacgaactttttaaaattttttccttcttatatttgatgccttagcaagcaataaatataaactctttttttgagataaatataaactcttttttttttttttttttttgagatgatgtctcactgtgtcacccaggctagagtgcagtggtgccatctcggctctccacaacctctgcctcccaggttca

SEQ ID NO: 470576 - DNA, 201 bp, Homo sapiens
cataggtatattgtgattaatgtaggtgcagttcagtaatgattgaaatgaagttttttcattatattctatttttgaaaaattaccaataactacatatmtaactgaaatcacatcatgtaactgtcagtataaaggaatggctcagataaaaccaaatagaagttgtatatttaatatttttaataattttaatattta

SEQ ID NO: 470577 - DNA, 201 bp, Homo sapiens
atgttgttctgactctgaaaagactttaccaatggaaatttgaatctcaaatttacttttggttgatatatttacattctttaaagatactgcttcatatrtattcctgttaaattttacttatctctccttccttgtagacttttgtttcaattgagaaaccaggttcaatacattaggactctttttctgtagacttta

SEQ ID NO: 470578 - DNA, 201 bp, Homo sapiens
atattaaaaatgttttagattactatattatcctgaaactacatgtacacacacacccctaaaataagttttatggtatttcatatgcctgtacaggagaraaaatagggaaagaatacaatcatcgtaagttcttattattacattatgctgagatttctaataacactgcccttttctgggtattttgtattaaaccta

SEQ ID NO: 470579 - DNA, 201 bp, Homo sapiens
atgccaggcacccagcactggctcttcccacacatggagtgctcagtaaccgtgagctattagaatacaagtgctcaaccagtgcttgagcaattgtgtcytgtgtccaacagaactcaacagaatcccatgcttgtctttatatgtgaattcagttccttttgagttagtaagaaattatgcctgtgttggggtaattga

SEQ ID NO: 470580 - DNA, 201 bp, Homo sapiens
gagagaatgagttggattgctggacttcaatgtgtgtggattcagtttgtgacttaaaaatgaaaccagtctattgcttgtgtggcttttctcaaaatacygttattccattacctatctcttaccccaagagtagtcacattcttatttctggttattttaattcctggtggtatttttatgtgattaatgagatagtac

SEQ ID NO: 470581 - DNA, 201 bp, Homo sapiens
ttttcattatattctatttttgaaaaattaccaataactacatatataactgaaatcacatcatgtaactgtcagtataaaggaatggctcagataaaacyaaatagaagttgtatatttaatatttttaataattttaatatttaattaaaaagttaaaacttgtactacatggctgtttattagggtaaggaagtatga

SEQ ID NO: 470582 - DNA, 201 bp, Homo sapiens
aaagactttaccaatggaaatttgaatctcaaatttacttttggttgatatatttacattctttaaagatactgcttcatatgtattcctgttaaattttrcttatctctccttccttgtagacttttgtttcaattgagaaaccaggttcaatacattaggactctttttctgtagactttatgttccgaaatattgggg

SEQ ID NO: 470583 - DNA, 201 bp, Homo sapiens
cctcttttttctcctttggggactccagttacctgcatattattaggctatttgaagttgcctgactgctcactgatgctttttaaaaatcactttttaasattttttttttctttttgtactttagctagtgtctgttcttgtatcttcaagtttgctaatcttttcttctgcagtttctaatctgctttagttcatcca

SEQ ID NO: 470584 - DNA, 201 bp, Homo sapiens
gtcttctcacttgcattgtttctcaaaagaaatctgatgttgttcttatctttgttcttctataggtaacatgtctttttatacagctgctattaataatrtatccctgattttgaacaatttgattatgttatcccttaatgtaattttcttcatgtttcttgtgcttggggtttgctgagtttcttggatccgtgagtt

SEQ ID NO: 470585 - DNA, 201 bp, Homo sapiens
agggaattgtctgccacaattattctatgagcttaatgtttccatgtctttttcttcattttggaagttgtggaaaaattataatgaaagagtatataaaygttttcctctgtattatagcatatctgacagtttcctttattaaaaagtacaatacattagggagagacttgatgaatttaaaattaaagtttgaaaagt

SEQ ID NO: 470586 - DNA, 201 bp, Homo sapiens
cttagtaaatacgaactttttaaaattttttccttcttatatttgatgccttagcaagcaataaatataaactctttttttgagataaatataaactcttttttttttttttttttttgagatgatgtctcactgtgtcacccaggctagagtgcagtggtgccatctcggctctccacaacctctgcctcccaggttcaa

SEQ ID NO: 470587 - DNA, 201 bp, Homo sapiens
taccaatggaaatttgaatctcaaatttacttttggttgatatatttacattctttaaagatactgcttcatatgtattcctgttaaattttacttatctytccttccttgtagacttttgtttcaattgagaaaccaggttcaatacattaggactctttttctgtagactttatgttccgaaatattggggaggggggt

SEQ ID NO: 470588 - DNA, 201 bp, Homo sapiens
tcatcaaatcctatgaatttttgttagatatagaggcagaatatactgaattgccattctacatagcaatttagtgacttggcagtggtaaagttttattkcagttttttgcgctgcggaatgagattgaaatttttctgaataataatgccctcaactattaagtcaaatacttaatagctttgaaagttggcttttcct

SEQ ID NO: 470589 - DNA, 201 bp, Homo sapiens
tctctgtgtgtgtacacctaaaatctctttcagcaaattttcattacaatattattaactgtggttctcatgctgtgtattaatttgatctctagaattaytcgtcttacctaactgcagatttgtaccctccgacctacttctgcccatcccacccatcccctacctccagacccttgataaccaccattctactctcta

SEQ ID NO: 470590 - DNA, 201 bp, Homo sapiens
ttagtaaatacgaactttttaaaattttttccttcttatatttgatgccttagcaagcaataaatataaactctttttttgagataaatataaactcttttttttttttttttttttgagatgatgtctcactgtgtcacccaggctagagtgcagtggtgccatctcggctctccacaacctctgcctcccaggttcaag

SEQ ID NO: 470591 - DNA, 201 bp, Homo sapiens
ttacttttggttgatatatttacattctttaaagatactgcttcatatgtattcctgttaaattttacttatctctccttccttgtagacttttgtttcarttgagaaaccaggttcaatacattaggactctttttctgtagactttatgttccgaaatattggggaggggggtgtatttccaggcttattccatcttat

SEQ ID NO: 470592 - DNA, 201 bp, Homo sapiens
cagttttttgcgctgcggaatgagattgaaatttttctgaataataatgccctcaactattaagtcaaatacttaatagctttgaaagttggcttttcctrtagatttcataatattttgtaacaaattcacctaaaattacaaggcagaacagtgattataagtgaaccttatactgtggtaaggtcacttctacaagaa

SEQ ID NO: 470593 - DNA, 201 bp, Homo sapiens
agatttgtaccctccgacctacttctgcccatcccacccatcccctacctccagacccttgataaccaccattctactctctatacgttcagcttctcacyccgctgcctaccattctgcttattaagtgagatcatacagtatttttctgtgtctggcttactttatttagtatactttcctcccggttcatccatgttg

SEQ ID NO: 470594 - DNA, 201 bp, Homo sapiens
ttgtaatgtcattagcaatgtgtgataggtctagttttatcaaacctttgtcatgtatgatatattaaaatctttatcttaacaacagaaaaaaagtagtyctaagcttttacttacttgattagtaggactaatgaatattttgaatttctttttcttttttctttgagacctgagtcttacactgttgcccaggctgga

SEQ ID NO: 470595 - DNA, 201 bp, Homo sapiens
taaagatactgcttcatatgtattcctgttaaattttacttatctctccttccttgtagacttttgtttcaattgagaaaccaggttcaatacattaggaytctttttctgtagactttatgttccgaaatattggggaggggggtgtatttccaggcttattccatcttatatgagccatgtcctagtattttgctgagc

SEQ ID NO: 470596 - DNA, 201 bp, Homo sapiens
accctccgacctacttctgcccatcccacccatcccctacctccagacccttgataaccaccattctactctctatacgttcagcttctcaccccgctgcytaccattctgcttattaagtgagatcatacagtatttttctgtgtctggcttactttatttagtatactttcctcccggttcatccatgttgtcacaaat

SEQ ID NO: 470597 - DNA, 201 bp, Homo sapiens
aggttcaagcagttctcctgcctcagcctcccaagtagctgggattacaggcatccaccaccacgcccagctatttttttgtatttttagtagaaatgggktttcactatgttggccaggctggtctcgagcacctgatctcatgatccacccgcctcggcctcccaaagcgttgggattacaggcatgagccaccgcgtc

SEQ ID NO: 470598 - DNA, 201 bp, Homo sapiens
atctctccttccttgtagacttttgtttcaattgagaaaccaggttcaatacattaggactctttttctgtagactttatgttccgaaatattggggaggrgggtgtatttccaggcttattccatcttatatgagccatgtcctagtattttgctgagctgtctttgattcccaaatccgatgataatctttctattttt

SEQ ID NO: 470599 - DNA, 201 bp, Homo sapiens
gttgtcacaaatggcagtgtctcctttcttaaagctaactattccattgtataaagtcctcattgtcatcagtaagttcttagaaactgtggttaagaggsggaaaaaagtatgacaaaactgatttttttttcattttgcattatgccaaaattagattgaaggaaacagtgttacttgaggacctgctgtatgttcatt

SEQ ID NO: 470600 - DNA, 201 bp, Homo sapiens
gtaattatcttttgtgtagtgaaaagtcccattatttcttttagttcatttaagattttattcaattatttatagaagtagtaagataaatatttgtagataggtaaacaaagcattagaatttttgacttttagaaagtaaaatcatttgatttaatgtctatttttgttcattcctatttcctatctaattaatagaac

SEQ ID NO: 470601 - DNA, 201 bp, Homo sapiens
ctctaaggtggatattttcaaactttatggttttagaaccttaacactctttaaaattactggggactccatagtttttgtttatgaggattttaactatsgactgttcagcattttagaaattaaaactaggaacattttataacacaagactacagaagcacaacctgtacaatatcaatgtaatattatgatacaaca

SEQ ID NO: 470602 - DNA, 201 bp, Homo sapiens
taggactctttttctgtagactttatgttccgaaatattggggaggggggtgtatttccaggcttattccatcttatatgagccatgtcctagtattttgytgagctgtctttgattcccaaatccgatgataatctttctatttttctgcccctcttgttactacttcatcatttgctgctactcttgtaagtattttgt

SEQ ID NO: 470603 - DNA, 201 bp, Homo sapiens
ctattgatgacattaagggaggacttaatatatgtgtatacacacgtcacaatttctttatccattcatctgtccttgaatgggtaagtaaattgtccatyaggacacttagtttgtttccatatcttggctattgggagtaatgtcgccatgaatatgggagtgcagatgtctctctcagatgctgattttattaccttt

SEQ ID NO: 470604 - DNA, 201 bp, Homo sapiens
ggtggatcacctgaggtctagaatttgagatcggcctgaccaacatggtgaaacctcttccctactaaaaatacaaaaatgagccaggcatgatgccgggygcctgtaatcccagctaaaaaaaaaaaaagattttttccaaatacagtatttttattaaatcttattgagtagttttcacattggcaactctgtgtgttt

SEQ ID NO: 470605 - DNA, 201 bp, Homo sapiens
ttagtttgtttccatatcttggctattgggagtaatgtcgccatgaatatgggagtgcagatgtctctctcagatgctgattttattacctttgaatataygcccaacagaggcattgttggatcttatggtggtagtttttttttttttaaggaaactctatactgttttcaataatggctatactaatttacattccta

SEQ ID NO: 470606 - DNA, 201 bp, Homo sapiens
tccatatcttggctattgggagtaatgtcgccatgaatatgggagtgcagatgtctctctcagatgctgattttattacctttgaatatatgcccaacagrggcattgttggatcttatggtggtagtttttttttttttaaggaaactctatactgttttcaataatggctatactaatttacattcctatcaaccatgt

SEQ ID NO: 470607 - DNA, 201 bp, Homo sapiens
aacattttataacacaagactacagaagcacaacctgtacaatatcaatgtaatattatgatacaacatgtagcctctataaacaccactgtataattgtkaatgaattaaagtgaaaaaaggcaaattaaatcttagtattatttaaacttgttttaactttacagactcactggggttccctagaccacattttggtag

SEQ ID NO: 470608 - DNA, 201 bp, Homo sapiens
cctggtggtatttttatgtgattaatgagatagtactttttaatttgatgatattctagaaacctggtaagtactatgtaccttgtcttaagttttggttmcttaattggtaaaattatagcatgcaccattgaattacctaattcaaaatatattcttttattgtttgacatttgtcttgtttttctttaaaatgttatc

SEQ ID NO: 470609 - DNA, 201 bp, Homo sapiens
aaattaccaataactacatatataactgaaatcacatcatgtaactgtcagtataaaggaatggctcagataaaaccaaatagaagttgtatatttaatawttttaataattttaatatttaattaaaaagttaaaacttgtactacatggctgtttattagggtaaggaagtatgatctctttaatgtacatggtattta

SEQ ID NO: 470610 - DNA, 201 bp, Homo sapiens
gagaagcaattgaaggtttgaaatagaatagtgacttgcttgatcacatttgtacttttgaaaagtttctctggctgctgtggggaaaggcttcagtagaygcagggtcggagaagcataaccagcagtagactcttgtagcaggttaggtgagagatggtggtggccacgactgagctgctagtggtggaagtgacaaga

SEQ ID NO: 470611 - DNA, 201 bp, Homo sapiens
tttttatgtgattaatgagatagtactttttaatttgatgatattctagaaacctggtaagtactatgtaccttgtcttaagttttggttacttaattggyaaaattatagcatgcaccattgaattacctaattcaaaatatattcttttattgtttgacatttgtcttgtttttctttaaaatgttatctttgtggagt

SEQ ID NO: 470612 - DNA, 201 bp, Homo sapiens
tataactgaaatcacatcatgtaactgtcagtataaaggaatggctcagataaaaccaaatagaagttgtatatttaatatttttaataattttaatattwaattaaaaagttaaaacttgtactacatggctgtttattagggtaaggaagtatgatctctttaatgtacatggtatttaaaaaatatcttattctggtg

SEQ ID NO: 470613 - DNA, 201 bp, Homo sapiens
atcactttttaagattttttttttctttttgtactttagctagtgtctgttcttgtatcttcaagtttgctaatcttttcttctgcagtttctaatctgcyttagttcatccaatgtaattttcatctcaaatgtttttgtctttgaaagtttgattttggcttttcttgtttatctcccatgtctctatttaactttttg

SEQ ID NO: 470614 - DNA, 201 bp, Homo sapiens
aaacctggtaagtactatgtaccttgtcttaagttttggttacttaattggtaaaattatagcatgcaccattgaattacctaattcaaaatatattcttktattgtttgacatttgtcttgtttttctttaaaatgttatctttgtggagtaaacatttttctttatgctgtttagcatcttcatcagattagttcaggg

SEQ ID NO: 470615 - DNA, 201 bp, Homo sapiens
taactgaaatcacatcatgtaactgtcagtataaaggaatggctcagataaaaccaaatagaagttgtatatttaatatttttaataattttaatatttawttaaaaagttaaaacttgtactacatggctgtttattagggtaaggaagtatgatctctttaatgtacatggtatttaaaaaatatcttattctggtgtg

SEQ ID NO: 470616 - DNA, 201 bp, Homo sapiens
ttacctaattcaaaatatattcttttattgtttgacatttgtcttgtttttctttaaaatgttatctttgtggagtaaacatttttctttatgctgtttarcatcttcatcagattagttcagggtattgctgaatgtggttgtttggaagtaaaatgctttagttttagttatatagattttaataagatactactttct

SEQ ID NO: 470617 - DNA, 201 bp, Homo sapiens
taaaggaatggctcagataaaaccaaatagaagttgtatatttaatatttttaataattttaatatttaattaaaaagttaaaacttgtactacatggctrtttattagggtaaggaagtatgatctctttaatgtacatggtatttaaaaaatatcttattctggtgtgtcttcttgattgtaaaaccccacttaacatt

SEQ ID NO: 470618 - DNA, 201 bp, Homo sapiens
ttgtatatttaatatttttaataattttaatatttaattaaaaagttaaaacttgtactacatggctgtttattagggtaaggaagtatgatctctttaaygtacatggtatttaaaaaatatcttattctggtgtgtcttcttgattgtaaaaccccacttaacattttgggctcctatttatatctttttactttaaag

SEQ ID NO: 470619 - DNA, 201 bp, Homo sapiens
ttgtggagtaaacatttttctttatgctgtttagcatcttcatcagattagttcagggtattgctgaatgtggttgtttggaagtaaaatgctttagtttyagttatatagattttaataagatactactttctatataatttatcaggtactttaggcattttaatttgcaaatttaggacaatttgctttaacgtttct

SEQ ID NO: 470620 - DNA, 201 bp, Homo sapiens
taaaaagttaaaacttgtactacatggctgtttattagggtaaggaagtatgatctctttaatgtacatggtatttaaaaaatatcttattctggtgtgtyttcttgattgtaaaaccccacttaacattttgggctcctatttatatctttttactttaaagtaacactattctgtggttattcttatggcatattaaag

SEQ ID NO: 470621 - DNA, 201 bp, Homo sapiens
ctatataatttatcaggtactttaggcattttaatttgcaaatttaggacaatttgctttaacgtttcttcacttttgtccattggatgtaatttccataragtattcatttccctaagtaaaaaccaaaaccaaaccgacaactaatggtcactgaagaaagagtgattaaatgcttagattataatggtatttgcattt

SEQ ID NO: 470622 - DNA, 201 bp, Homo sapiens
atacaagcatgaactgtacagtcaactgccttgtagaggggctggtttttggttatgtcttaaatcttaactccttttaattattctgaattttagtgggwttcctatatcattgtagatttggaaagtattgagtaggagatgataatctataatcaggattctgagttggtaagattttatagatctgaaaaaagtaat

SEQ ID NO: 470623 - DNA, 201 bp, Homo sapiens
gaagtatgatctctttaatgtacatggtatttaaaaaatatcttattctggtgtgtcttcttgattgtaaaaccccacttaacattttgggctcctatttrtatctttttactttaaagtaacactattctgtggttattcttatggcatattaaagtgatattttaaggaatacttaacaaaattctatataaaatgtat

SEQ ID NO: 470624 - DNA, 201 bp, Homo sapiens
ggactctttttctgtagactttatgttccgaaatattggggaggggggtgtatttccaggcttattccatcttatatgagccatgtcctagtattttgctragctgtctttgattcccaaatccgatgataatctttctatttttctgcccctcttgttactacttcatcatttgctgctactcttgtaagtattttgtag

SEQ ID NO: 470625 - DNA, 201 bp, Homo sapiens
cttatgtttctccttgcattctttggcctactggttttggttgtttatagctatagaatatagaattccttatggttatccatttctccttttaagtagaktgatagttgttagaagaaaaataaccccccaatactttcttctagtgttaattcttaaagtgtgattgacttttatttactttttggtgcagtaattgca

SEQ ID NO: 470626 - DNA, 201 bp, Homo sapiens
gcatgaactgtacagtcaactgccttgtagaggggctggtttttggttatgtcttaaatcttaactccttttaattattctgaattttagtgggtttcctrtatcattgtagatttggaaagtattgagtaggagatgataatctataatcaggattctgagttggtaagattttatagatctgaaaaaagtaatttcttg

SEQ ID NO: 470627 - DNA, 201 bp, Homo sapiens
ggaggggggtgtatttccaggcttattccatcttatatgagccatgtcctagtattttgctgagctgtctttgattcccaaatccgatgataatctttctrtttttctgcccctcttgttactacttcatcatttgctgctactcttgtaagtattttgtaggctgtgttttccctccctccagctttttagttttccaat

SEQ ID NO: 470628 - DNA, 201 bp, Homo sapiens
accccccaatactttcttctagtgttaattcttaaagtgtgattgacttttatttactttttggtgcagtaattgcagttcatgagtcaatgttgatgtcmtataaaccttaatttttaatgtttcattgtagtgatgtctcaggcagaataaaatatttaatgtaaattgtagcagcaaacatttaagttatacttaaat

SEQ ID NO: 470629 - DNA, 201 bp, Homo sapiens
acttgacccttatttaccagcaccatcccccccaccacaatatttaaagtgtttaaatcatttattttgaaattcttatgtgatccaagaccactgtgcayttaagctagtttatttgtttattaaaacaaaagaagtagactgcagttacgttgtttctttttctgttgtttggtgtcaggagtagaatacatttggcca

SEQ ID NO: 470630 - DNA, 201 bp, Homo sapiens
gatctctttaatgtacatggtatttaaaaaatatcttattctggtgtgtcttcttgattgtaaaaccccacttaacattttgggctcctatttatatcttkttactttaaagtaacactattctgtggttattcttatggcatattaaagtgatattttaaggaatacttaacaaaattctatataaaatgtatctactct

SEQ ID NO: 470631 - DNA, 201 bp, Homo sapiens
ttatatgagccatgtcctagtattttgctgagctgtctttgattcccaaatccgatgataatctttctatttttctgcccctcttgttactacttcatcawttgctgctactcttgtaagtattttgtaggctgtgttttccctccctccagctttttagttttccaatcttggttttagttatctagcaaacagccttca

SEQ ID NO: 470632 - DNA, 201 bp, Homo sapiens
ccatgaatatgggagtgcagatgtctctctcagatgctgattttattacctttgaatatatgcccaacagaggcattgttggatcttatggtggtagtttktttttttttaaggaaactctatactgttttcaataatggctatactaatttacattcctatcaaccatgtacaaaggtttcgttttctacacatcctcac

SEQ ID NO: 470633 - DNA, 201 bp, Homo sapiens
tcattgtagtgatgtctcaggcagaataaaatatttaatgtaaattgtagcagcaaacatttaagttatacttaaatgtttaaatcactgttagtgattarcttattttgccttccttgaagcaatttgtcctaaatttccatacgtttgcatttgtttttgctgttctaaaattccttagttgctggctttgacctttta

SEQ ID NO: 470634 - DNA, 201 bp, Homo sapiens
atggtatttaaaaaatatcttattctggtgtgtcttcttgattgtaaaaccccacttaacattttgggctcctatttatatctttttactttaaagtaacmctattctgtggttattcttatggcatattaaagtgatattttaaggaatacttaacaaaattctatataaaatgtatctactctaagttagaaatcttgg

SEQ ID NO: 470635 - DNA, 201 bp, Homo sapiens
tatgagccatgtcctagtattttgctgagctgtctttgattcccaaatccgatgataatctttctatttttctgcccctcttgttactacttcatcatttkctgctactcttgtaagtattttgtaggctgtgttttccctccctccagctttttagttttccaatcttggttttagttatctagcaaacagccttcactt

SEQ ID NO: 470636 - DNA, 201 bp, Homo sapiens
atgatgttgagcatcttttcatataccatttgaccatttgtgtgactttggaaaaatggctattcaggtccttgcctattttaaaatccagttatttgggrtttttttgctactgagttgtgtgagttccttatatgttttggattttaaccccttatcagatgtgtggtttgccaatattttcccctaatccctgtgcta

SEQ ID NO: 470637 - DNA, 201 bp, Homo sapiens
tatacttaaatgtttaaatcactgttagtgattaacttattttgccttccttgaagcaatttgtcctaaatttccatacgtttgcatttgtttttgctgtyctaaaattccttagttgctggctttgaccttttatgttgctgagttttacacatctattttctcaactgccatatcctagggggcttggagtacccataa

SEQ ID NO: 470638 - DNA, 201 bp, Homo sapiens
ccagcaccatcccccccaccacaatatttaaagtgtttaaatcatttattttgaaattcttatgtgatccaagaccactgtgcatttaagctagtttattygtttattaaaacaaaagaagtagactgcagttacgttgtttctttttctgttgtttggtgtcaggagtagaatacatttggccagcttcatgagaggatt

SEQ ID NO: 470639 - DNA, 201 bp, Homo sapiens
tttaaaaaatatcttattctggtgtgtcttcttgattgtaaaaccccacttaacattttgggctcctatttatatctttttactttaaagtaacactattytgtggttattcttatggcatattaaagtgatattttaaggaatacttaacaaaattctatataaaatgtatctactctaagttagaaatcttggtgccct

SEQ ID NO: 470640 - DNA, 201 bp, Homo sapiens
gttttccaatcttggttttagttatctagcaaacagccttcacttgatgatgaacctgctaatatagtgctgttattagggagagtatgaattgaatagtwcaagatagatcttccattggtgaggcactgggaccataacttgcaggaaatattctacagttagcaggaatgtgtatatccgtatattagaaatactgaa

SEQ ID NO: 470641 - DNA, 201 bp, Homo sapiens
tgctactgagttgtgtgagttccttatatgttttggattttaaccccttatcagatgtgtggtttgccaatattttcccctaatccctgtgctaccttttyaccccggtgttttttttttttttttattgctatgcagaagcttatttgcttgatgtagtcccacttgcttatttttgcttttgctacctgagcttttggt

SEQ ID NO: 470642 - DNA, 201 bp, Homo sapiens
ttttgaaattcttatgtgatccaagaccactgtgcatttaagctagtttatttgtttattaaaacaaaagaagtagactgcagttacgttgtttctttttytgttgtttggtgtcaggagtagaatacatttggccagcttcatgagaggattagaaagttggagaaggaaaaatagaattgtttacggagccaggagaat

SEQ ID NO: 470643 - DNA, 201 bp, Homo sapiens
caaacagccttcacttgatgatgaacctgctaatatagtgctgttattagggagagtatgaattgaatagtacaagatagatcttccattggtgaggcacwgggaccataacttgcaggaaatattctacagttagcaggaatgtgtatatccgtatattagaaatactgaagttcagtattctgttacatgaatttcttt

SEQ ID NO: 470644 - DNA, 201 bp, Homo sapiens
tgagttccttatatgttttggattttaaccccttatcagatgtgtggtttgccaatattttcccctaatccctgtgctaccttttcaccccggtgtttttkttttttttttattgctatgcagaagcttatttgcttgatgtagtcccacttgcttatttttgcttttgctacctgagcttttggtgtgatatccaaaaaa

SEQ ID NO: 470645 - DNA, 201 bp, Homo sapiens
gaagtagactgcagttacgttgtttctttttctgttgtttggtgtcaggagtagaatacatttggccagcttcatgagaggattagaaagttggagaaggaaaaatagaattgtttacggagccaggagaataattgtctataattatagatgcttgttttgaggtttggaaaaggtggtttaaaaaacttttaagaaaaa

SEQ ID NO: 470646 - DNA, 201 bp, Homo sapiens
aggaaatattctacagttagcaggaatgtgtatatccgtatattagaaatactgaagttcagtattctgttacatgaatttctttggtattaggcatttcygtattatacttctgtttttatttactgtttcttctacatattcttcacgttggggattggctgtaaaataagctgcattttcctggctgtgattgtgatg

SEQ ID NO: 470647 - DNA, 201 bp, Homo sapiens
atcagatgtgtggtttgccaatattttcccctaatccctgtgctaccttttcaccccggtgttttttttttttttttattgctatgcagaagcttatttgyttgatgtagtcccacttgcttatttttgcttttgctacctgagcttttggtgtgatatccaaaaaatcattgtcaaggaggatatcaaggagtttttctc

SEQ ID NO: 470648 - DNA, 201 bp, Homo sapiens
tgccaactgctttcagttttggaaatgcatcaacagttttacccaccatagcttttgcatcgtgtaacaatttttgcttcaattgttaaacattattttgraaactcaaggaacagtaaagtctgttttattgcccatatttttactatttgtttgttctttcttccttcaggatgttctgagaatccttctttttatcat

SEQ ID NO: 470649 - DNA, 201 bp, Homo sapiens
ttttttttgagagggagtcttgctctgtcgcccaggctggagtgcagtggcaggatctcagctcactgcaacctccgcctcccgggttcaagccattctcytgcctcagcctcctgagtagctgggattacaggttcctgccacgatgcccggctaatttttggatttttagtagagatcgggtttcaccatgttggccag

SEQ ID NO: 470650 - DNA, 201 bp, Homo sapiens
tacagttagcaggaatgtgtatatccgtatattagaaatactgaagttcagtattctgttacatgaatttctttggtattaggcatttctgtattatactkctgtttttatttactgtttcttctacatattcttcacgttggggattggctgtaaaataagctgcattttcctggctgtgattgtgatgtaagcaagatt

SEQ ID NO: 470651 - DNA, 201 bp, Homo sapiens
tttttattgctatgcagaagcttatttgcttgatgtagtcccacttgcttatttttgcttttgctacctgagcttttggtgtgatatccaaaaaatcattktcaaggaggatatcaaggagtttttctcctatatttccttctaggagttttatggtttcaggtgttaggtatttaatctattttgagttgctttttatgt

SEQ ID NO: 470652 - DNA, 201 bp, Homo sapiens
ggagtgcagtggcaggatctcagctcactgcaacctccgcctcccgggttcaagccattctcctgcctcagcctcctgagtagctgggattacaggttccygccacgatgcccggctaatttttggatttttagtagagatcgggtttcaccatgttggccagactggtctcaaactcttgcctcaagtgatcagcctgcc

SEQ ID NO: 470653 - DNA, 201 bp, Homo sapiens
cagttagcaggaatgtgtatatccgtatattagaaatactgaagttcagtattctgttacatgaatttctttggtattaggcatttctgtattatacttcygtttttatttactgtttcttctacatattcttcacgttggggattggctgtaaaataagctgcattttcctggctgtgattgtgatgtaagcaagattct

SEQ ID NO: 470654 - DNA, 201 bp, Homo sapiens
cagaagcttatttgcttgatgtagtcccacttgcttatttttgcttttgctacctgagcttttggtgtgatatccaaaaaatcattgtcaaggaggatatyaaggagtttttctcctatatttccttctaggagttttatggtttcaggtgttaggtatttaatctattttgagttgctttttatgtatgatgtgtaagat

SEQ ID NO: 470655 - DNA, 201 bp, Homo sapiens
agccattctcctgcctcagcctcctgagtagctgggattacaggttcctgccacgatgcccggctaatttttggatttttagtagagatcgggtttcaccrtgttggccagactggtctcaaactcttgcctcaagtgatcagcctgccttggcctcctaaactgctgggattacaggcatgagccaccgctcttggccag

SEQ ID NO: 470656 - DNA, 201 bp, Homo sapiens
agttagcaggaatgtgtatatccgtatattagaaatactgaagttcagtattctgttacatgaatttctttggtattaggcatttctgtattatacttctktttttatttactgtttcttctacatattcttcacgttggggattggctgtaaaataagctgcattttcctggctgtgattgtgatgtaagcaagattctt

SEQ ID NO: 470657 - DNA, 201 bp, Homo sapiens
tctattttgagttgctttttatgtatgatgtgtaagataggcatcaggtccagtttcattcttttgcatatagatatctagttttcttaccactacttatygaagacaccatcttttccctattgtatcttattggacttgtcaaaaattagctcataatatatgcttgggtttatttttgggctctgtattcagttccat

SEQ ID NO: 470658 - DNA, 201 bp, Homo sapiens
cccggctaatttttggatttttagtagagatcgggtttcaccatgttggccagactggtctcaaactcttgcctcaagtgatcagcctgccttggcctccyaaactgctgggattacaggcatgagccaccgctcttggccaggttgcaacatcttcattagacttgtttaaatgagaattttcctttgttaaatggaaga

SEQ ID NO: 470659 - DNA, 201 bp, Homo sapiens
ccagtttcattcttttgcatatagatatctagttttcttaccactacttattgaagacaccatcttttccctattgtatcttattggacttgtcaaaaatyagctcataatatatgcttgggtttatttttgggctctgtattcagttccattgatccatgtgtctgtttttatgccagtaccatactgttttgttaacta

SEQ ID NO: 470660 - DNA, 201 bp, Homo sapiens
tattgaagacaccatcttttccctattgtatcttattggacttgtcaaaaattagctcataatatatgcttgggtttatttttgggctctgtattcagttscattgatccatgtgtctgtttttatgccagtaccatactgttttgttaactatcactttgtaatataacttgaaatcaggtagtgtgataccttctactt

SEQ ID NO: 470661 - DNA, 201 bp, Homo sapiens
gactttgcacttgatttgcatggtgttattggtagattccaagtctctccttgagagactaatcagtaaatgacaaattggtgataactgttaagctgggwgaggtgtctgaagaggaactacattaatgatttagttactttagtagtagcattagtactgttgcttcttttaaaggtcttagtcaatccagattctcat

SEQ ID NO: 470662 - DNA, 201 bp, Homo sapiens
cagtgccatttggagcatcaaagtggtaaataaaattgcatttacattcatatatcatttctgtctgatttgttttgccctactggatgttaagaattaartctttcttttctagattgagcttccaagaaacactttttaaatctaaaaattttaatgtaaagaaataatatgcttgcatttaaaaatcaagtatacatt

SEQ ID NO: 470663 - DNA, 201 bp, Homo sapiens
gctcctatttatatctttttactttaaagtaacactattctgtggttattcttatggcatattaaagtgatattttaaggaatacttaacaaaattctatrtaaaatgtatctactctaagttagaaatcttggtgcccttactggtcttgtgatcttggaagtcacttaagatcccgagctctgtattaagacagtgctg

SEQ ID NO: 470664 - DNA, 201 bp, Homo sapiens
ctgccagtccttgaagtgagttaagtagtgtgatgcattttgaagagaaaaaaattaatttgaaaaagtattaactcaaaagttaaaatacttcattgacyggagatgacagtttttcttcatattctatatttaatattctggaatatggctgtttaatttagactaatcaaggattttaaggaattctagattatactt

SEQ ID NO: 470665 - DNA, 201 bp, Homo sapiens
taacaaaattctatataaaatgtatctactctaagttagaaatcttggtgcccttactggtcttgtgatcttggaagtcacttaagatcccgagctctgtrttaagacagtgctggttcaagttctggatctaccattgagtaattgaccatgactttctttatacttcagtttcctcaactgttgaataggaataatggt

SEQ ID NO: 470666 - DNA, 201 bp, Homo sapiens
taatcactaacttaatttttcaaaaatcttttataccaatttaaaaacaaaacaaactcggccgggcgcagtggctcatgcctgtaatcccagcactttgrgaggctgagggggcagatcacttgaggtcaggagttcgaggccaacctggccaacatggtgaaaccctgtctctactaaaaatacaaagaaatttagccg

SEQ ID NO: 470667 - DNA, 201 bp, Homo sapiens
cttaagatcccgagctctgtattaagacagtgctggttcaagttctggatctaccattgagtaattgaccatgactttctttatacttcagtttcctcaaytgttgaataggaataatggttgttgtgatgagtccataaaaaatacagtcttactgactttatggtggccgaaatttcaagagtaacacagtaacagtta

SEQ ID NO: 470668 - DNA, 201 bp, Homo sapiens
tccataaaaaatacagtcttactgactttatggtggccgaaatttcaagagtaacacagtaacagttaagtcatactgggactcaggctaatcttttctcygttgccctaggcattgatgtccacctggcaaatgagggtgagaagcggtgagggattgcatgggaggtttggggacaaggcctgggagtagtacagaggc

SEQ ID NO: 470669 - DNA, 201 bp, Homo sapiens
gtgttgcgaggttgagggatggagatgaccctcaggtgctgcatgggcctggagcgggtttttcctggagctggagagggcatgatggcccgtgtgcgggmgtggaaggcacagcattgtcattgctcttcttggaactgctttttctagtgaggaggtggagggcctgggaaaggagggtgatgtggccagaaccccagg

SEQ ID NO: 470670 - DNA, 201 bp, Homo sapiens
cgcaccattgcactccagcctgggcaaagaagcgagactccatctcaaaaataaacaaacaaaaaaaacccccaaaaaactaacctgacgccatccatctrttgtgcaaagaagctgatgcacttctcaaaagggatctcaaggagagcagggtaagagaagacaggagtggcagtttgaaactgggagctggctgtattt

SEQ ID NO: 470671 - DNA, 201 bp, Homo sapiens
ctgactttatggtggccgaaatttcaagagtaacacagtaacagttaagtcatactgggactcaggctaatcttttctccgttgccctaggcattgatgtycacctggcaaatgagggtgagaagcggtgagggattgcatgggaggtttggggacaaggcctgggagtagtacagaggcatctttcacttttgcccacat

SEQ ID NO: 470672 - DNA, 201 bp, Homo sapiens
cattatgattttatttcacatattgggatttccattttaagtgaaagattcttaaacaatatcttttctagtttccaaatttatttatttatttatttatktattttcttgaaagggagtcttgctctgttgcccaggctatgcaatggtgcgatcttggctcactggaaccaccacctcctaggttcaagcgattctcct

SEQ ID NO: 470673 - DNA, 201 bp, Homo sapiens
atccatctgttgtgcaaagaagctgatgcacttctcaaaagggatctcaaggagagcagggtaagagaagacaggagtggcagtttgaaactgggagctgrctgtatttgttacatccaaagggaaaaaagccattcctcccgttccttttgttcatgtgtatctattttatgcttacagtatcaccataaatttttgact

SEQ ID NO: 470674 - DNA, 201 bp, Homo sapiens
ttaagtcatactgggactcaggctaatcttttctccgttgccctaggcattgatgtccacctggcaaatgagggtgagaagcggtgagggattgcatgggrggtttggggacaaggcctgggagtagtacagaggcatctttcacttttgcccacatttcattgtccagaccagtcatgtgaaagggaaactgggaaatgt

SEQ ID NO: 470675 - DNA, 201 bp, Homo sapiens
ccagcactttgggaggctgaggcaggcacataacttgagctacaagttcgagaccagcctgggcaatgtgacaagaccctgtcttttcactaaaagtaccaaaaaaaaaaaaaaaaaggcaggtgtggtggtgcacacctgtagtctcagctactcaagaggttgaggtgggagggatggcttgagcccaggatgcagagg

SEQ ID NO: 470676 - DNA, 201 bp, Homo sapiens
aaatttttgacttggaaaccattctgctaaatagggaataagttcatttcaaactatgataagggacatcagttgaagatatgacatattatttaacttawctgtgagggaaacatctaagtattttcctgagcatctggataattttaaatatacataattcatctacttagggaggtgccaggttttttcaaggagtaa

SEQ ID NO: 470677 - DNA, 201 bp, Homo sapiens
tcgggtttcaccatgttggccagactggtctcaaactcttgcctcaagtgatcagcctgccttggcctcctaaactgctgggattacaggcatgagccacygctcttggccaggttgcaacatcttcattagacttgtttaaatgagaattttcctttgttaaatggaagaaaataggctctgtttgggagagtgaggccc

SEQ ID NO: 470678 - DNA, 201 bp, Homo sapiens
tttttgacttggaaaccattctgctaaatagggaataagttcatttcaaactatgataagggacatcagttgaagatatgacatattatttaacttaactrtgagggaaacatctaagtattttcctgagcatctggataattttaaatatacataattcatctacttagggaggtgccaggttttttcaaggagtaatta

SEQ ID NO: 470679 - DNA, 201 bp, Homo sapiens
agtgatcagcctgccttggcctcctaaactgctgggattacaggcatgagccaccgctcttggccaggttgcaacatcttcattagacttgtttaaatgaraattttcctttgttaaatggaagaaaataggctctgtttgggagagtgaggcccaagtaggacatccttgatacacattgaagatctatttatttattta

SEQ ID NO: 470680 - DNA, 201 bp, Homo sapiens
taagtcatactgggactcaggctaatcttttctccgttgccctaggcattgatgtccacctggcaaatgagggtgagaagcggtgagggattgcatgggargtttggggacaaggcctgggagtagtacagaggcatctttcacttttgcccacatttcattgtccagaccagtcatgtgaaagggaaactgggaaatgta

SEQ ID NO: 470681 - DNA, 201 bp, Homo sapiens
acaatgacatagttacagtttgtcagtatgtgtgtgtgtgtgtgcgcgccacacatattgccctggcatcttatttatttctctcattaccagtgcatacycacctatcatgttaaaacaagaaaaggagaaaagtggactttatatgtaacactttagaggtatagtggaatgtatattattattaacaaattagatagc

SEQ ID NO: 470682 - DNA, 201 bp, Homo sapiens
ggacatcagttgaagatatgacatattatttaacttaactgtgagggaaacatctaagtattttcctgagcatctggataattttaaatatacataattcwtctacttagggaggtgccaggttttttcaaggagtaattaattagtacaaacaagggtgagggggcagggaacaccatactctggtacttaatgtctgaa

SEQ ID NO: 470683 - DNA, 201 bp, Homo sapiens
gattgcatgggaggtttggggacaaggcctgggagtagtacagaggcatctttcacttttgcccacatttcattgtccagaccagtcatgtgaaagggaarctgggaaatgtagtttagccatatgccaggaggaaaaggaaacgctttggtaaatagccagtttttgccaccagtgctaagcacagttcctggaagatgg

SEQ ID NO: 470684 - DNA, 201 bp, Homo sapiens
tttgtcagtatgtgtgtgtgtgtgtgcgcgccacacatattgccctggcatcttatttatttctctcattaccagtgcatacccacctatcatgttaaaayaagaaaaggagaaaagtggactttatatgtaacactttagaggtatagtggaatgtatattattattaacaaattagatagcaaagcattatatttatta

SEQ ID NO: 470685 - DNA, 201 bp, Homo sapiens
ttatttaacttaactgtgagggaaacatctaagtattttcctgagcatctggataattttaaatatacataattcatctacttagggaggtgccaggtttyttcaaggagtaattaattagtacaaacaagggtgagggggcagggaacaccatactctggtacttaatgtctgaaattatcagggaatttaacacatttt

SEQ ID NO: 470686 - DNA, 201 bp, Homo sapiens
atcccacctttttttaggtgcctgctttacgtcggatctactttctctactcgtgccttttcttccaccttcttccccctcctctttctcatagatggtgyggaggtgggagagagggagggagagggagatcaactgattattgtgtgttgagggggtggggggtcagagattctctgggccataaaagttgcacgaaat

SEQ ID NO: 470687 - DNA, 201 bp, Homo sapiens
ttgccaccagtgctaagcacagttcctggaagatggttttcaagtcattaagcaagtcacttttcacctctccaggtccgtgtttctttctgtaaagtggraagggggatgataatgaaaacttctatgaagcactgttttgggagaactatatgttataaccatcttaactcacttaattcttacaaaagtcctctgaag

SEQ ID NO: 470688 - DNA, 201 bp, Homo sapiens
gtatgtgtgtgtgtgtgtgcgcgccacacatattgccctggcatcttatttatttctctcattaccagtgcatacccacctatcatgttaaaacaagaaarggagaaaagtggactttatatgtaacactttagaggtatagtggaatgtatattattattaacaaattagatagcaaagcattatatttattatgctaga

SEQ ID NO: 470689 - DNA, 201 bp, Homo sapiens
ttattcagattatttaaagcaaagctttcacaaagccttttgtcagctttcctataatcctcaaataatttttcctggctggacgctttggcttactcctrtaatcctggcactttgggaggcagaagcaggaggatcacttgagcccaagagttctaggctgcagtgagctatgatcacaccactgcactccaacctgag

SEQ ID NO: 470690 - DNA, 201 bp, Homo sapiens
cttattaaagcattaagtatgacagcactagttatagagaattgtgtgtgtatgcacacatatacacacatatacatatatacacacaccatatatatatwttttttgagacttggtctcgctctgtcatccaggctgaagtgcaggagtgagatcttggctcactgcagcctcgaccttccaaccccagtgatccttcca

SEQ ID NO: 470691 - DNA, 201 bp, Homo sapiens
aaagtgggaagggggatgataatgaaaacttctatgaagcactgttttgggagaactatatgttataaccatcttaactcacttaattcttacaaaagtcytctgaagtaaagactactattgtccctttttttttttttttcttttttaacagctgaggaagctaaggctcagagtgagtcatggacacaggatttgaac

SEQ ID NO: 470692 - DNA, 201 bp, Homo sapiens
ctgtgctaaaagaatataatatatgtcagcattaccagacttggcacttctcacaatattcccagccaacaggaataaaactaaaaggtcagaaaaaaaawtagtaaattaaaacaaaattttatcacagcagaatttcttctcaaaaacaaaaaatggaaattaggctataattaaagtaagtttttcaatggcttattt

SEQ ID NO: 470693 - DNA, 201 bp, Homo sapiens
tcgctctgtcatccaggctgaagtgcaggagtgagatcttggctcactgcagcctcgaccttccaaccccagtgatccttccacctcagcctcccaagtasctggggccgtggggatgtgccatcaccaccagctaatttttttatcttttattttttgtagagacggcgtctctcgatgttgcccaggctgacctcgagc

SEQ ID NO: 470694 - DNA, 201 bp, Homo sapiens
ccaacaggaataaaactaaaaggtcagaaaaaaaaatagtaaattaaaacaaaattttatcacagcagaatttcttctcaaaaacaaaaaatggaaattargctataattaaagtaagtttttcaatggcttatttgttagccaagcaaggaaaaccattaccaacagtagttaattaaattatgttttattaaggtaaac

SEQ ID NO: 470695 - DNA, 201 bp, Homo sapiens
ctggggccgtggggatgtgccatcaccaccagctaatttttttatcttttattttttgtagagacggcgtctctcgatgttgcccaggctgacctcgagcycctgggttcaagtgatccacctacctcaacctcccaaaatgctgggattataggcgtgagtcactgggcccggctgagatgtatatattatatatacatc

SEQ ID NO: 470696 - DNA, 201 bp, Homo sapiens
tcagctcactgcaagctccgcctcctgggttcaagcgattctcctgcctcagcctcccaagaagctgggactacaggcgcccgccaccacacctggctaatttttttttttttttttttgtatttttagcagacatggggtttcactgtgtggtagccaggatggtctcgatctcctgacctcctgatgcacctgcctcgg

SEQ ID NO: 470697 - DNA, 201 bp, Homo sapiens
gctaatttttttttttttttttttgtatttttagcagacatggggtttcactgtgtggtagccaggatggtctcgatctcctgacctcctgatgcacctgyctcggcctcccaaaatgctgggattacaggcgtgagccactgcacctggcccacttaaccagcattttaacatatttcttctgaaaatctgattaccaga

SEQ ID NO: 470698 - DNA, 201 bp, Homo sapiens
tagtgtagaattaacttcattatgttcacagttaaattcatattagactgttacctattctaagatatttgatattaaccctcaagggacattggctacattttttttttttttttttttaacaaaaccttgtagtttatgttagtggtctccaaactttttggcaccagggactagttttgtggaagagagttttttcca

SEQ ID NO: 470699 - DNA, 201 bp, Homo sapiens
agtgtagaattaacttcattatgttcacagttaaattcatattagactgttacctattctaagatatttgatattaaccctcaagggacattggctacattttttttttttttttttttaacaaaaccttgtagtttatgttagtggtctccaaactttttggcaccagggactagttttgtggaagagagttttttccac

SEQ ID NO: 470700 - DNA, 201 bp, Homo sapiens
ctcgtgatctgcctgccgcctcggccccccaaagtgctgggattacaggcatgagcccctgcacctggcccaggaagaccattttttaaaaacatgcaacwtttctgcctgtaatccaaggaaatttgacctattgttcatagtttttattgggtatcatgaagttaattattcatgcatttcatagatacgtaattgctt

SEQ ID NO: 470701 - DNA, 201 bp, Homo sapiens
aacctttctgcctgtaatccaaggaaatttgacctattgttcatagtttttattgggtatcatgaagttaattattcatgcatttcatagatacgtaattrctttctagaactacagtcacattcccttgacatgggtattttggaacagtaatcagtcaaatttgaaatgaaagtttaaatttgtatccttgggattttg

SEQ ID NO: 470702 - DNA, 201 bp, Homo sapiens
ttatttttaatcctttttccttgttttttctttaaatagcacttacagcgatgtcgtttatttactaactccccctgagaaagtaagccctctgagggcargcactttgtttcagtcattactgagtgggcaatgcctgatacgtgatccatagacacagttctgtgggtagtgaaatactttttaaaataaatgagtgag

SEQ ID NO: 470703 - DNA, 201 bp, Homo sapiens
ctatgatcacaccactgcactccaacctgagtgacggagcaagttcttgtctcaaaaataaaagtaataacaataatgataaattttcctctaaatacaayggtgaatgaggtagaaatgttgagttcataagagaactgttgaatagtgaaggaaactgacttaattttaatgagaggaagaatactgttacacaacact

SEQ ID NO: 470704 - DNA, 201 bp, Homo sapiens
caggatttgaacccaggcagtcttttctgtagggtctgtgcttttatttatttttatttttattaattttttttttttgacggagtctcattctgtcgctygggctggagtgcagtggtatgatctcagctcactgcaacctcgcctctcaggttcaagcacttctcctgcctcagcctcccaagtagctggtattatagg

SEQ ID NO: 470705 - DNA, 201 bp, Homo sapiens
ggtagaaatgttgagttcataagagaactgttgaatagtgaaggaaactgacttaattttaatgagaggaagaatactgttacacaacactagcaaaaatraactttcacgctgatgtagcagtacagaatatgcttccaaccccgggacgctgcagccagacttgctagctaagtgaccttggacaagttacttaacctt

SEQ ID NO: 470706 - DNA, 201 bp, Homo sapiens
ccaggctggtcttgaactcctgacctcaggtgattcacccgcctcagcctcccaaagtgctgggattacaggcatgagccactgcacctggcctcaggcayaatgtgatattgtttataaatattagagaatgtagttctaaaaagtgaaggcttaagaaaaacctaataccaccatcatacttaaaaaaaaattgacagt

SEQ ID NO: 470707 - DNA, 201 bp, Homo sapiens
aaatggaaattaggctataattaaagtaagtttttcaatggcttatttgttagccaagcaaggaaaaccattaccaacagtagttaattaaattatgtttwattaaggtaaacaaagatgtgtccatagaaaataaactttaaaaaagactattagcctttcagcgagagtaattgctctaaaagttaaggacgttgggag

SEQ ID NO: 470708 - DNA, 201 bp, Homo sapiens
ccaaagtgctgggattacaggcatgagccactgcacctggcctcaggcataatgtgatattgtttataaatattagagaatgtagttctaaaaagtgaagrcttaagaaaaacctaataccaccatcatacttaaaaaaaaattgacagttaaatccataatatcatcatattctatgttcaggtaaacacgtctcaattt

SEQ ID NO: 470709 - DNA, 201 bp, Homo sapiens
tgacaggcctaaggtatgattctaaggttgtaagcattttatatttagatttttaagttgtggagtatacgtttaaagataaaaataataagccaggtctyttaatacttatctaaggaagtgtttgtgtaacatttaataaaatgttttatctcagtggcatttggatttaaaaattattttggtctgtcacagaatgtt

SEQ ID NO: 470710 - DNA, 201 bp, Homo sapiens
gcacctggcctcaggcataatgtgatattgtttataaatattagagaatgtagttctaaaaagtgaaggcttaagaaaaacctaataccaccatcatactyaaaaaaaaattgacagttaaatccataatatcatcatattctatgttcaggtaaacacgtctcaatttttaaaagtatttgaataaggcttacttattgc

SEQ ID NO: 470711 - DNA, 201 bp, Homo sapiens
taacatttaataaaatgttttatctcagtggcatttggatttaaaaattattttggtctgtcacagaatgttgacttttcccaatctgttacatagggccrtgggtctggatttccaggaaagcggagacctcgaggtgcaggactgtcggggcgaggtggccgaggcaggtcaaagctgaaaagtggaatcggagctgtt

SEQ ID NO: 470712 - DNA, 201 bp, Homo sapiens
gaaattaggctataattaaagtaagtttttcaatggcttatttgttagccaagcaaggaaaaccattaccaacagtagttaattaaattatgttttattawggtaaacaaagatgtgtccatagaaaataaactttaaaaaagactattagcctttcagcgagagtaattgctctaaaagttaaggacgttgggagtaata

SEQ ID NO: 470713 - DNA, 201 bp, Homo sapiens
taaaaagtgaaggcttaagaaaaacctaataccaccatcatacttaaaaaaaaattgacagttaaatccataatatcatcatattctatgttcaggtaaamacgtctcaatttttaaaagtatttgaataaggcttacttattgcgattaagtgtcttaatctgtaggataccaccttcctttttattctcacaatttatt

SEQ ID NO: 470714 - DNA, 201 bp, Homo sapiens
ttttatctcagtggcatttggatttaaaaattattttggtctgtcacagaatgttgacttttcccaatctgttacatagggccgtgggtctggatttccargaaagcggagacctcgaggtgcaggactgtcggggcgaggtggccgaggcaggtcaaagctgaaaagtggaatcggagctgttgtattacctggggtgag

SEQ ID NO: 470715 - DNA, 201 bp, Homo sapiens
gtaagtttttcaatggcttatttgttagccaagcaaggaaaaccattaccaacagtagttaattaaattatgttttattaaggtaaacaaagatgtgtccrtagaaaataaactttaaaaaagactattagcctttcagcgagagtaattgctctaaaagttaaggacgttgggagtaatatcaagtcattttggaaagaa

SEQ ID NO: 470716 - DNA, 201 bp, Homo sapiens
catagggccgtgggtctggatttccaggaaagcggagacctcgaggtgcaggactgtcggggcgaggtggccgaggcaggtcaaagctgaaaagtggaatyggagctgttgtattacctggggtgaggcttgcttcatgtatattttctctaatctaaatgtcagttaatgatgaaaatctcatagcaagttattttgatc

SEQ ID NO: 470717 - DNA, 201 bp, Homo sapiens
aaaccattaccaacagtagttaattaaattatgttttattaaggtaaacaaagatgtgtccatagaaaataaactttaaaaaagactattagcctttcagygagagtaattgctctaaaagttaaggacgttgggagtaatatcaagtcattttggaaagaagggtgaatgatttttcatggttttcttaggcttttgatg

SEQ ID NO: 470718 - DNA, 201 bp, Homo sapiens
cttgcttgtgcagttcacaatagggtttgtgcttctatgagaatctaatgccgctgctgatctagaggaggccgagctcaggttaatgctggcttgcctgycgctcacctgctgtgtggcctggttcccaacaggctaccgagtggtattggtctgcagctataggtggggggaaccctgagtacgataaactatcttcta

SEQ ID NO: 470719 - DNA, 201 bp, Homo sapiens
taagaaaaacctaataccaccatcatacttaaaaaaaaattgacagttaaatccataatatcatcatattctatgttcaggtaaacacgtctcaatttttwaaagtatttgaataaggcttacttattgcgattaagtgtcttaatctgtaggataccaccttcctttttattctcacaatttatttgttaaagaaatggg

SEQ ID NO: 470720 - DNA, 201 bp, Homo sapiens
ctggatttccaggaaagcggagacctcgaggtgcaggactgtcggggcgaggtggccgaggcaggtcaaagctgaaaagtggaatcggagctgttgtattrcctggggtgaggcttgcttcatgtatattttctctaatctaaatgtcagttaatgatgaaaatctcatagcaagttattttgatcttaagagtcatataa

SEQ ID NO: 470721 - DNA, 201 bp, Homo sapiens
aaccattaccaacagtagttaattaaattatgttttattaaggtaaacaaagatgtgtccatagaaaataaactttaaaaaagactattagcctttcagcragagtaattgctctaaaagttaaggacgttgggagtaatatcaagtcattttggaaagaagggtgaatgatttttcatggttttcttaggcttttgatgg

SEQ ID NO: 470722 - DNA, 201 bp, Homo sapiens
tcatcatattctatgttcaggtaaacacgtctcaatttttaaaagtatttgaataaggcttacttattgcgattaagtgtcttaatctgtaggataccacyttcctttttattctcacaatttatttgttaaagaaatgggttatttgccctgtagagttcctgtagtcaggattttgctgattcctgagattcaatacca

SEQ ID NO: 470723 - DNA, 201 bp, Homo sapiens
agagtaattgctctaaaagttaaggacgttgggagtaatatcaagtcattttggaaagaagggtgaatgatttttcatggttttcttaggcttttgatggwtgaataggtgttaccagtactgttcagttgttacatactccagaagttagtgctgagtttgaagtgatggaagaattagtgtttatgcatagtctatgtg

SEQ ID NO: 470724 - DNA, 201 bp, Homo sapiens
cagttcacaatagggtttgtgcttctatgagaatctaatgccgctgctgatctagaggaggccgagctcaggttaatgctggcttgcctgccgctcacctrctgtgtggcctggttcccaacaggctaccgagtggtattggtctgcagctataggtggggggaaccctgagtacgataaactatcttctagaataatttt

SEQ ID NO: 470725 - DNA, 201 bp, Homo sapiens
ggtaaacacgtctcaatttttaaaagtatttgaataaggcttacttattgcgattaagtgtcttaatctgtaggataccaccttcctttttattctcacamtttatttgttaaagaaatgggttatttgccctgtagagttcctgtagtcaggattttgctgattcctgagattcaataccaggtttatccccgatgtttc

SEQ ID NO: 470726 - DNA, 201 bp, Homo sapiens
tccaggaaagcggagacctcgaggtgcaggactgtcggggcgaggtggccgaggcaggtcaaagctgaaaagtggaatcggagctgttgtattacctgggktgaggcttgcttcatgtatattttctctaatctaaatgtcagttaatgatgaaaatctcatagcaagttattttgatcttaagagtcatataaataggtc

SEQ ID NO: 470727 - DNA, 201 bp, Homo sapiens
tttcttaggcttttgatggatgaataggtgttaccagtactgttcagttgttacatactccagaagttagtgctgagtttgaagtgatggaagaattagtrtttatgcatagtctatgtgaaacaactacaagagaaaatattttcagaaaagttgagcaaacactaacttagtacaacctgaagtggaatccgctaagat

SEQ ID NO: 470728 - DNA, 201 bp, Homo sapiens
ggaaagcggagacctcgaggtgcaggactgtcggggcgaggtggccgaggcaggtcaaagctgaaaagtggaatcggagctgttgtattacctggggtgakgcttgcttcatgtatattttctctaatctaaatgtcagttaatgatgaaaatctcatagcaagttattttgatcttaagagtcatataaataggtcaaaa

SEQ ID NO: 470729 - DNA, 201 bp, Homo sapiens
aatgctggcttgcctgccgctcacctgctgtgtggcctggttcccaacaggctaccgagtggtattggtctgcagctataggtggggggaaccctgagtaygataaactatcttctagaataatttttttaatatattgaagcagtagtgcctagtttataagtagacatatgtatagtataaactatatagtttatattc

SEQ ID NO: 470730 - DNA, 201 bp, Homo sapiens
gcttacttattgcgattaagtgtcttaatctgtaggataccaccttcctttttattctcacaatttatttgttaaagaaatgggttatttgccctgtagarttcctgtagtcaggattttgctgattcctgagattcaataccaggtttatccccgatgtttctctattttctgtatttccaaatgagtagttagaaccag

SEQ ID NO: 470731 - DNA, 201 bp, Homo sapiens
ttgtcgccctggctggagtgcagtggtgcgatcttggtttagtgcaacctctgcctcctggttcaagcgattctcctgactcagctcccccgagtatctgrgactacaggtgtgtgccaccacgcccggcttatttttgtatttttagtagaaatagggttttgccatgttggccagggtcttcttgaactcctggcttca

SEQ ID NO: 470732 - DNA, 201 bp, Homo sapiens
ggtgttaccagtactgttcagttgttacatactccagaagttagtgctgagtttgaagtgatggaagaattagtgtttatgcatagtctatgtgaaacaastacaagagaaaatattttcagaaaagttgagcaaacactaacttagtacaacctgaagtggaatccgctaagatgcgttacagttgatagtggcaaaaat

SEQ ID NO: 470733 - DNA, 201 bp, Homo sapiens
cggagctgttgtattacctggggtgaggcttgcttcatgtatattttctctaatctaaatgtcagttaatgatgaaaatctcatagcaagttattttgatyttaagagtcatataaataggtcaaaatgtttattttactgtcctactttgcttttttttttgagcctctggttatgttttcttgtatatttactttctca

SEQ ID NO: 470734 - DNA, 201 bp, Homo sapiens
ctaatagtatatgtttctgaataaatagttgctgcttctaatataaagtgtcatatttgttttaaaatcattgctcaagttgtatagttgttttgggcacrtattttcaacttctagaccaatacaaaatgtaaaataagtaaaagacgtgatatagttgtatcctttctaaacactgacctattttttttttttcctttg

SEQ ID NO: 470735 - DNA, 201 bp, Homo sapiens
tgtcttaatctgtaggataccaccttcctttttattctcacaatttatttgttaaagaaatgggttatttgccctgtagagttcctgtagtcaggattttkctgattcctgagattcaataccaggtttatccccgatgtttctctattttctgtatttccaaatgagtagttagaaccagaggcttggtcagagtcaggt

SEQ ID NO: 470736 - DNA, 201 bp, Homo sapiens
tactaaaaatacaaaaattagccaggtgtggtggcatgtgtctgtaatcctagctactcaggtggctgaggtgggagaactgcttgaacctgggaggtggrgtttccagtgagctgagatcatgccactgcactccagcctgggtgacagagcgagactccatctcaaaaaaaataaaatgaaatgaaaaaattaaaaaaa

SEQ ID NO: 470737 - DNA, 201 bp, Homo sapiens
tgttaccagtactgttcagttgttacatactccagaagttagtgctgagtttgaagtgatggaagaattagtgtttatgcatagtctatgtgaaacaactrcaagagaaaatattttcagaaaagttgagcaaacactaacttagtacaacctgaagtggaatccgctaagatgcgttacagttgatagtggcaaaaataa

SEQ ID NO: 470738 - DNA, 201 bp, Homo sapiens
cctttgctaccttttttttttttttgagacagagtctcgctgtgtcgcccaggctagagtgcagtggtgcgatgttggcttactgcagccttcgcccctckggttcaagtgagtctccggcctcagcctcccaagtagctgggattacaggcgtgtgccaccatgcctggttaagtttttgtatttttagtagagaccggt

SEQ ID NO: 470739 - DNA, 201 bp, Homo sapiens
accagtactgttcagttgttacatactccagaagttagtgctgagtttgaagtgatggaagaattagtgtttatgcatagtctatgtgaaacaactacaaragaaaatattttcagaaaagttgagcaaacactaacttagtacaacctgaagtggaatccgctaagatgcgttacagttgatagtggcaaaaataactgt

SEQ ID NO: 470740 - DNA, 201 bp, Homo sapiens
gctgtgtcgcccaggctagagtgcagtggtgcgatgttggcttactgcagccttcgcccctcgggttcaagtgagtctccggcctcagcctcccaagtagytgggattacaggcgtgtgccaccatgcctggttaagtttttgtatttttagtagagaccggttttatcatgttggccaggctggtttcgaactcctgacc

SEQ ID NO: 470741 - DNA, 201 bp, Homo sapiens
agtgcagtggtgcgatgttggcttactgcagccttcgcccctcgggttcaagtgagtctccggcctcagcctcccaagtagctgggattacaggcgtgtgycaccatgcctggttaagtttttgtatttttagtagagaccggttttatcatgttggccaggctggtttcgaactcctgacctcaagtgatctgcctgtct

SEQ ID NO: 470742 - DNA, 201 bp, Homo sapiens
cctcccaagtagctgggattacaggcgtgtgccaccatgcctggttaagtttttgtatttttagtagagaccggttttatcatgttggccaggctggtttygaactcctgacctcaagtgatctgcctgtcttggcctcccaaagtgataggattacaggcgtgagcctccgtgcccggcccctttgctacattttaatga

SEQ ID NO: 470743 - DNA, 201 bp, Homo sapiens
tatcatgttggccaggctggtttcgaactcctgacctcaagtgatctgcctgtcttggcctcccaaagtgataggattacaggcgtgagcctccgtgcccrgcccctttgctacattttaatgataatgaaaatgtaatccaagtgtcagattattcagtagcttcctgtcttttggtttgtgggaagtttgatacgttat

SEQ ID NO: 470744 - DNA, 201 bp, Homo sapiens
gtcttgaactcctgggctcaagtgatccacccaccttggcctgccagagtgctgggattataggcatacgccagctgcacccagcccatttttgatatctmaaatctttcatcatagtttagtcagccatatttttcctagaatttttttaaaaactattttgtcttgctatcaagctattactctgtagttttacataca

SEQ ID NO: 470745 - DNA, 201 bp, Homo sapiens
aaagtacaaaaattagctgggtgtggtggctcattcctgtagtcctagttactcaggaggctgagccaggagaattatttgaacatgggaggcggaggttktagtgagctgagatcacaccactgcactccagcctaggcaacagagcagagcaagactccatctcaaaaaaaaaaaaaaaaaaaaaaaaaaggccttgta

SEQ ID NO: 470746 - DNA, 201 bp, Homo sapiens
acctttctgcctgtaatccaaggaaatttgacctattgttcatagtttttattgggtatcatgaagttaattattcatgcatttcatagatacgtaattgytttctagaactacagtcacattcccttgacatgggtattttggaacagtaatcagtcaaatttgaaatgaaagtttaaatttgtatccttgggattttgt

SEQ ID NO: 470747 - DNA, 201 bp, Homo sapiens
atgtgaattcagttccttttgagttagtaagaaattatgcctgtgttggggtaattgaacttttaggatgagggaattgtctgccacaattattctatgarcttaatgtttccatgtctttttcttcattttggaagttgtggaaaaattataatgaaagagtatataaacgttttcctctgtattatagcatatctgaca

SEQ ID NO: 470748 - DNA, 201 bp, Homo sapiens
ccttacattaatttttttggtattttttctattgattctaagcatggaaatgtagatggagattttgttgatgtattttcaaattatgtatcaataatagkgaagcttacttgatttctttaaaatctggtcactatatctataaatatagtggacattaaatgtacagcataaggtaattatgtggactttaaaaaggcg

SEQ ID NO: 470749 - DNA, 201 bp, Homo sapiens
ctggtcactatatctataaatatagtggacattaaatgtacagcataaggtaattatgtggactttaaaaaggcgttaaaatatgtgccattttctattaytctgctcagtaggcttctaaaagcgtgtatgaacatgcccaacccagtattgggcctccgtaggtgctcaataaatgttagttgattgcctcttttctgc

SEQ ID NO: 470750 - DNA, 201 bp, Homo sapiens
atacatctgtttggagaaactcgttttatctgtgtaatgtttgtaagaccagaagttcttttactgttcttgaaataaaacttttaagaagctgagtattyttctgttagtttcaaatttggactaaaattacacccaggttttggactaaagagaaagcaaataatctgttctcatgttcttaaaagacatgatttaagt

SEQ ID NO: 470751 - DNA, 201 bp, Homo sapiens
tggacattaaatgtacagcataaggtaattatgtggactttaaaaaggcgttaaaatatgtgccattttctattattctgctcagtaggcttctaaaagcrtgtatgaacatgcccaacccagtattgggcctccgtaggtgctcaataaatgttagttgattgcctcttttctgcttctaggtacataagcaccatatta

SEQ ID NO: 470752 - DNA, 201 bp, Homo sapiens
tatctgtgtaatgtttgtaagaccagaagttcttttactgttcttgaaataaaacttttaagaagctgagtattcttctgttagtttcaaatttggactawaattacacccaggttttggactaaagagaaagcaaataatctgttctcatgttcttaaaagacatgatttaagtgtatccaactaacttgattcttactg

SEQ ID NO: 470753 - DNA, 201 bp, Homo sapiens
taaaaaggcgttaaaatatgtgccattttctattattctgctcagtaggcttctaaaagcgtgtatgaacatgcccaacccagtattgggcctccgtaggygctcaataaatgttagttgattgcctcttttctgcttctaggtacataagcaccatattaatttatatagtatatttgattatgttaggttaatgcataa

SEQ ID NO: 470754 - DNA, 201 bp, Homo sapiens
tcttgaaataaaacttttaagaagctgagtattcttctgttagtttcaaatttggactaaaattacacccaggttttggactaaagagaaagcaaataatmtgttctcatgttcttaaaagacatgatttaagtgtatccaactaacttgattcttactgtgtctgtgtttactcctactaaaatgaaagcttttaaattt

SEQ ID NO: 470755 - DNA, 201 bp, Homo sapiens
ggcttctaaaagcgtgtatgaacatgcccaacccagtattgggcctccgtaggtgctcaataaatgttagttgattgcctcttttctgcttctaggtacayaagcaccatattaatttatatagtatatttgattatgttaggttaatgcataaatcacatggattggttgtttcttttacagatcactaaagtggttctt

SEQ ID NO: 470756 - DNA, 201 bp, Homo sapiens
attcttctgttagtttcaaatttggactaaaattacacccaggttttggactaaagagaaagcaaataatctgttctcatgttcttaaaagacatgatttmagtgtatccaactaacttgattcttactgtgtctgtgtttactcctactaaaatgaaagcttttaaattttttcccactttttgaagtatttaactcttc

SEQ ID NO: 470757 - DNA, 201 bp, Homo sapiens
ttatgttaggttaatgcataaatcacatggattggttgtttcttttacagatcactaaagtggttcttagcaaaggttggaggtgtcttgagtgcactgtktgtgaggcctgtgggaaggcaactgacccaggaagactcctgctgtgtgatgactgtgacataagttatcacacctactgcctagaccctccattgcaga

SEQ ID NO: 470758 - DNA, 201 bp, Homo sapiens
ggagctgttgtattacctggggtgaggcttgcttcatgtatattttctctaatctaaatgtcagttaatgatgaaaatctcatagcaagttattttgatcwtaagagtcatataaataggtcaaaatgtttattttactgtcctactttgcttttttttttgagcctctggttatgttttcttgtatatttactttctcat

SEQ ID NO: 470759 - DNA, 201 bp, Homo sapiens
cacaatttatttgttaaagaaatgggttatttgccctgtagagttcctgtagtcaggattttgctgattcctgagattcaataccaggtttatccccgatrtttctctattttctgtatttccaaatgagtagttagaaccagaggcttggtcagagtcaggttcagtcttattttataagactgcttcttatattgtggt

SEQ ID NO: 470760 - DNA, 201 bp, Homo sapiens
ccaactaacttgattcttactgtgtctgtgtttactcctactaaaatgaaagcttttaaattttttcccactttttgaagtatttaactcttctgtaatadgcagtgttttcttattaactttaaagttgtgttaagcaaacgtgtttaaattaatatttcaatttcaaaaaccctaatttgaaacaataaattttatcat

SEQ ID NO: 470761 - DNA, 201 bp, Homo sapiens
  misc_feature (1)...(201): n = A,T,C or G
cacatggattggttgtttcttttacagatcactaaagtggttcttagcaaaggttggaggtgtcttgagtgcactgtgtgtgaggcctgtgggaaggcaantgacccaggaagactcctgctgtgtgatgactgtgacataagttatcacacctactgcctagaccctccattgcagacagttcccaaaggaggctggaag

SEQ ID NO: 470762 - DNA, 201 bp, Homo sapiens
tcctgagattcaataccaggtttatccccgatgtttctctattttctgtatttccaaatgagtagttagaaccagaggcttggtcagagtcaggttcagtyttattttataagactgcttcttatattgtggtgcattctttcatcaggaggcacaaaatatggttgtctctttttgtgacattagcaactgttggtgact

SEQ ID NO: 470763 - DNA, 201 bp, Homo sapiens
ttttaaattttttcccactttttgaagtatttaactcttctgtaataggcagtgttttcttattaactttaaagttgtgttaagcaaacgtgtttaaattmatatttcaatttcaaaaaccctaatttgaaacaataaattttatcattgtatacattatgagcttttaagaataaccaaaaaaatgggggtggatgtttt

SEQ ID NO: 470764 - DNA, 201 bp, Homo sapiens
gttgtattacctggggtgaggcttgcttcatgtatattttctctaatctaaatgtcagttaatgatgaaaatctcatagcaagttattttgatcttaagartcatataaataggtcaaaatgtttattttactgtcctactttgcttttttttttgagcctctggttatgttttcttgtatatttactttctcatcctttc

SEQ ID NO: 470765 - DNA, 201 bp, Homo sapiens
tataagactgcttcttatattgtggtgcattctttcatcaggaggcacaaaatatggttgtctctttttgtgacattagcaactgttggtgactaatgccyagatctgttgattcattaagagttgtaaaatgataatgttctagttgtgttactccttcattttattatctggaatactgttttataaaaagaaaagttt

SEQ ID NO: 470766 - DNA, 201 bp, Homo sapiens
acgtgtttaaattaatatttcaatttcaaaaaccctaatttgaaacaataaattttatcattgtatacattatgagcttttaagaataaccaaaaaaatgrgggtggatgttttatgtggaagttatgtgtatcccttttctgcttttggctaaggacagatatcttagaattagctttatggcgcattcatctatctgat

SEQ ID NO: 470767 - DNA, 201 bp, Homo sapiens
aagaattagtgtttatgcatagtctatgtgaaacaactacaagagaaaatattttcagaaaagttgagcaaacactaacttagtacaacctgaagtggaawccgctaagatgcgttacagttgatagtggcaaaaataactgtggagcagaaagacttgagttggacaaatttacaaagcttgttaaatgtcaggtgttta

SEQ ID NO: 470768 - DNA, 201 bp, Homo sapiens
taagagtcatataaataggtcaaaatgtttattttactgtcctactttgcttttttttttgagcctctggttatgttttcttgtatatttactttctcatyctttctcttttcttaccttcctctttgactccttatctttctatgccaaccctctctaaaaagtcagtatgtaatatagttgctcttttatttaaaaaat

SEQ ID NO: 470769 - DNA, 201 bp, Homo sapiens
aaagagctctggagttatccttgagctgcattttgaaggttgagtagcagtttgctattggaggaggtagaggttacttttcaggcagagggagcagcatktgcaaaggctctgagatgtgagagtttgttactgaagaaattcagtagggctggaagctcagtgagcttggtgcgagagagtcaagagatgaggctttag

SEQ ID NO: 470770 - DNA, 201 bp, Homo sapiens
caatttcaaaaaccctaatttgaaacaataaattttatcattgtatacattatgagcttttaagaataaccaaaaaaatgggggtggatgttttatgtggragttatgtgtatcccttttctgcttttggctaaggacagatatcttagaattagctttatggcgcattcatctatctgattatttcagttaatatcatct

SEQ ID NO: 470771 - DNA, 201 bp, Homo sapiens
aattagtgtttatgcatagtctatgtgaaacaactacaagagaaaatattttcagaaaagttgagcaaacactaacttagtacaacctgaagtggaatccrctaagatgcgttacagttgatagtggcaaaaataactgtggagcagaaagacttgagttggacaaatttacaaagcttgttaaatgtcaggtgtttaaag

SEQ ID NO: 470772 - DNA, 201 bp, Homo sapiens
tggttatgttttcttgtatatttactttctcatcctttctcttttcttaccttcctctttgactccttatctttctatgccaaccctctctaaaaagtcaktatgtaatatagttgctcttttatttaaaaaattttaagattgatagatatttgcttactatcatgttatgaggctttatttatatgtgtattgcaaata

SEQ ID NO: 470773 - DNA, 201 bp, Homo sapiens
ttttatcattgtatacattatgagcttttaagaataaccaaaaaaatgggggtggatgttttatgtggaagttatgtgtatcccttttctgcttttggctraggacagatatcttagaattagctttatggcgcattcatctatctgattatttcagttaatatcatcttaatataatacaggttacttgagaagaaaaca

SEQ ID NO: 470774 - DNA, 201 bp, Homo sapiens
ttatgcatagtctatgtgaaacaactacaagagaaaatattttcagaaaagttgagcaaacactaacttagtacaacctgaagtggaatccgctaagatgygttacagttgatagtggcaaaaataactgtggagcagaaagacttgagttggacaaatttacaaagcttgttaaatgtcaggtgtttaaagcctgattat

SEQ ID NO: 470775 - DNA, 201 bp, Homo sapiens
cctctctaaaaagtcagtatgtaatatagttgctcttttatttaaaaaattttaagattgatagatatttgcttactatcatgttatgaggctttatttayatgtgtattgcaaatatatttgctaactagcaaatattttatgtaataacttcgctattttattaaaattctgtttttaaaattctgaaatgtcatttta

SEQ ID NO: 470776 - DNA, 201 bp, Homo sapiens
ttgaaggttgagtagcagtttgctattggaggaggtagaggttacttttcaggcagagggagcagcatgtgcaaaggctctgagatgtgagagtttgttamtgaagaaattcagtagggctggaagctcagtgagcttggtgcgagagagtcaagagatgaggctttagaggtagtatgggttttaagtcattccaaggaa

SEQ ID NO: 470777 - DNA, 201 bp, Homo sapiens
attgtatacattatgagcttttaagaataaccaaaaaaatgggggtggatgttttatgtggaagttatgtgtatcccttttctgcttttggctaaggacasatatcttagaattagctttatggcgcattcatctatctgattatttcagttaatatcatcttaatataatacaggttacttgagaagaaaacaaactctt

SEQ ID NO: 470778 - DNA, 201 bp, Homo sapiens
tatgcatagtctatgtgaaacaactacaagagaaaatattttcagaaaagttgagcaaacactaacttagtacaacctgaagtggaatccgctaagatgcrttacagttgatagtggcaaaaataactgtggagcagaaagacttgagttggacaaatttacaaagcttgttaaatgtcaggtgtttaaagcctgattatt

SEQ ID NO: 470779 - DNA, 201 bp, Homo sapiens
aagattgatagatatttgcttactatcatgttatgaggctttatttatatgtgtattgcaaatatatttgctaactagcaaatattttatgtaataacttygctattttattaaaattctgtttttaaaattctgaaatgtcattttaagtataggagacaggtgaaattgttcaagtttactactaaaccaggaataagg

SEQ ID NO: 470780 - DNA, 201 bp, Homo sapiens
gcaaaggctctgagatgtgagagtttgttactgaagaaattcagtagggctggaagctcagtgagcttggtgcgagagagtcaagagatgaggctttagargtagtatgggttttaagtcattccaaggaatagttttgatttaactctgaaggccatggagagacattgaaaggttttatccaagtgaatgatgtaagga

SEQ ID NO: 470781 - DNA, 201 bp, Homo sapiens
agtctatgtgaaacaactacaagagaaaatattttcagaaaagttgagcaaacactaacttagtacaacctgaagtggaatccgctaagatgcgttacagwtgatagtggcaaaaataactgtggagcagaaagacttgagttggacaaatttacaaagcttgttaaatgtcaggtgtttaaagcctgattatttactgta

SEQ ID NO: 470782 - DNA, 201 bp, Homo sapiens
ttttatgtaataacttcgctattttattaaaattctgtttttaaaattctgaaatgtcattttaagtataggagacaggtgaaattgttcaagtttactamtaaaccaggaataaggaagcttagattcttgtccttttttcaaaaagaaaaattttaaaaccaggcttattgaggtacagttgatataagctatatttga

SEQ ID NO: 470783 - DNA, 201 bp, Homo sapiens
caaaggctctgagatgtgagagtttgttactgaagaaattcagtagggctggaagctcagtgagcttggtgcgagagagtcaagagatgaggctttagagrtagtatgggttttaagtcattccaaggaatagttttgatttaactctgaaggccatggagagacattgaaaggttttatccaagtgaatgatgtaaggaa

SEQ ID NO: 470784 - DNA, 201 bp, Homo sapiens
gcttgttaaatgtcaggtgtttaaagcctgattatttactgtattatttattagcaggtactttgcagaaaatatttaaatctgtcatgttttagtgaackattatataatagtgtcagcagtgattttgacttgcatttgtggacttcatcatcaaatcctatgaatttttgttagatatagaggcagaatatactgaat

SEQ ID NO: 470785 - DNA, 201 bp, Homo sapiens
tgtaataacttcgctattttattaaaattctgtttttaaaattctgaaatgtcattttaagtataggagacaggtgaaattgttcaagtttactactaaascaggaataaggaagcttagattcttgtccttttttcaaaaagaaaaattttaaaaccaggcttattgaggtacagttgatataagctatatttgacatgt

SEQ ID NO: 470786 - DNA, 201 bp, Homo sapiens
ctcttggggcagcactgaggagagtgactcatgatgccccttttctgaactgcttatacagatttctcattcttggcattactcctgattcctccttcatytacatgcacacgcgcctacacacacgcacacacacacagacacacatgtctgcctctcggatctccttctagagtcttagttcttgttttttttttcaga

SEQ ID NO: 470787 - DNA, 201 bp, Homo sapiens
atcctggcattctgattatattcaataggattgttctcagtttttattttcattcatagtttttgacaatgtttgttggaattctgagtcaggtacttccttttttttatttttggttaagaccgactttttgatagtttttagtagtttaattataaaaccatttaggctttgattacttcaatttttttttttttttga

SEQ ID NO: 470788 - DNA, 201 bp, Homo sapiens
attatttattagcaggtactttgcagaaaatatttaaatctgtcatgttttagtgaactattatataatagtgtcagcagtgattttgacttgcatttgtrgacttcatcatcaaatcctatgaatttttgttagatatagaggcagaatatactgaattgccattctacatagcaatttagtgacttggcagtggtaaag

SEQ ID NO: 470789 - DNA, 201 bp, Homo sapiens
tattttattaaaattctgtttttaaaattctgaaatgtcattttaagtataggagacaggtgaaattgttcaagtttactactaaaccaggaataaggaarcttagattcttgtccttttttcaaaaagaaaaattttaaaaccaggcttattgaggtacagttgatataagctatatttgacatgtacaattccataagc

SEQ ID NO: 470790 - DNA, 201 bp, Homo sapiens
tgatgccccttttctgaactgcttatacagatttctcattcttggcattactcctgattcctccttcatctacatgcacacgcgcctacacacacgcacasacacacagacacacatgtctgcctctcggatctccttctagagtcttagttcttgttttttttttcagaatttgggcaactaacaaggctagaaaggagg

SEQ ID NO: 470791 - DNA, 201 bp, Homo sapiens
ttttatgtgtaatatcttgttgctcttatgtgttattaatttttcttttactcatttctataccgtatttagtacaattcaaagaatttaaaggcattagttttttttttttttttcaattgctttctgtcaggaatttcaccttgctgtgactcttacctttattttactttcctgaagtgtttataaattaaattttat

SEQ ID NO: 470792 - DNA, 201 bp, Homo sapiens
tattagcaggtactttgcagaaaatatttaaatctgtcatgttttagtgaactattatataatagtgtcagcagtgattttgacttgcatttgtggacttyatcatcaaatcctatgaatttttgttagatatagaggcagaatatactgaattgccattctacatagcaatttagtgacttggcagtggtaaagttttat

SEQ ID NO: 470793 - DNA, 201 bp, Homo sapiens
attttattaaaattctgtttttaaaattctgaaatgtcattttaagtataggagacaggtgaaattgttcaagtttactactaaaccaggaataaggaagsttagattcttgtccttttttcaaaaagaaaaattttaaaaccaggcttattgaggtacagttgatataagctatatttgacatgtacaattccataagct

SEQ ID NO: 470794 - DNA, 201 bp, Homo sapiens
gatgccccttttctgaactgcttatacagatttctcattcttggcattactcctgattcctccttcatctacatgcacacgcgcctacacacacgcacacscacacagacacacatgtctgcctctcggatctccttctagagtcttagttcttgttttttttttcagaatttgggcaactaacaaggctagaaaggaggc

SEQ ID NO: 470795 - DNA, 201 bp, Homo sapiens
aatagtgtcagcagtgattttgacttgcatttgtggacttcatcatcaaatcctatgaatttttgttagatatagaggcagaatatactgaattgccattmtacatagcaatttagtgacttggcagtggtaaagttttattgcagttttttgcgctgcggaatgagattgaaatttttctgaataataatgccctcaact

SEQ ID NO: 470796 - DNA, 201 bp, Homo sapiens
tttgtttgtttgtttgtttgtttttaagacaagagtcttgctctgttgcctgggctggagtgcagtggcgtgatctcagctcactgcaagctctgcctccyggattcacaggttcatgccattctcctgcgtcagcctccttaatagctgagactacaggcgcccgccaccacacccagctaattttttgtatctttagta

SEQ ID NO: 470797 - DNA, 201 bp, Homo sapiens
tgtcagcagtgattttgacttgcatttgtggacttcatcatcaaatcctatgaatttttgttagatatagaggcagaatatactgaattgccattctacakagcaatttagtgacttggcagtggtaaagttttattgcagttttttgcgctgcggaatgagattgaaatttttctgaataataatgccctcaactattaa

SEQ ID NO: 470798 - DNA, 201 bp, Homo sapiens
ggaaagtccattgtccacttcttttagggaacatagtgaacatagggcaaggagaacagtgaaagaaagaataactgttataaccactaaacctgcaaatmcagacagagtttgttccataaatttctagttcatttaaaagcacattcaagtttgctgcaaggttttaacatatgtatgtctcaagaccccagggtttat

SEQ ID NO: 470799 - DNA, 201 bp, Homo sapiens
actgaatagactgtagaaaatagattgaaaagcttagcttgtgctttagacataatttaaaagcacaagtatctatagttatcgcttaaagcagttgaatraagctacttttctccttctctgacttacatttcatttttactagtgaacagctctgcgctttttgttactgtggggaaaaaagttccttaggacaaggag

SEQ ID NO: 470800 - DNA, 201 bp, Homo sapiens
tactctgactcaccattaacccaattaatccaacaaactatccttttcacaaatttttcttgttattttttaaaaagtttatattaattgtatatgaaagyggtgtgatcacaaaactaaacttttggaagaaaacttcaaagaacataacacaagctgagagggagggagttcatggaatttataaatggaaataatgta

SEQ ID NO: 470801 - DNA, 201 bp, Homo sapiens
aaaatcaacttgagtgaagtgctagttacttgaagagaagagaaactttttttttcttgagaatcacataatcaggtctttgcaaacttgttttcattaaytataattagctaattataattcagttagttataattaaacatttttctcctagtgttcaagttgtcatagtttggctcatgggagccccttgtcagctgg

SEQ ID NO: 470802 - DNA, 201 bp, Homo sapiens
acaaattcccagtagatgtactttcccctggttgtgggtctttgggcttctagaagtacggcttggtgttccaccaaagacttcaggggatcctttgtagrtttctggagctcttagtcgttattgcttcttcattttgagtactgtgtcctgcaaattccactgccttgccttccctaacctcagcgaggccattgattg

SEQ ID NO: 470803 - DNA, 201 bp, Homo sapiens
caacaacttacatctcagtcactccaaaaattggcatgggtaaaccagctattactaagagaaaattttctcctggtagacctcggtccaaacaggtaggktgattttaatgatattgacagaaaagatattggaacaattctataaaatcagaaggtatatgtgtagctttggtgtggatggcaactttttctgtcttca

SEQ ID NO: 470804 - DNA, 201 bp, Homo sapiens
ttcctccacatccttttctgtttttttcttttctcttttcttttctttctttatggagtcttgctctgtattcccaggctggagtgcaatggtgtgatctyggcccactgcagtctccgcctcccggtttcaagtgattctcccgtctcagcctcccgagtagctggtattacaggcatgcaccaccacacctggctattt

SEQ ID NO: 470805 - DNA, 201 bp, Homo sapiens
tggtagacctcggtccaaacaggtagggtgattttaatgatattgacagaaaagatattggaacaattctataaaatcagaaggtatatgtgtagctttgktgtggatggcaactttttctgtcttcagatagaacttcagtgtaatgttgattatgtgtttcagccattattttttaaatgctgttaatgaagaatgcca

SEQ ID NO: 470806 - DNA, 201 bp, Homo sapiens
ttctgtcttcagatagaacttcagtgtaatgttgattatgtgtttcagccattattttttaaatgctgttaatgaagaatgccatttattaaatttgaagkgatcttatttggaatttcaactcagttgggccataaagatgcaacctattgataatagtttctaatagaaagaactttaaaaattcttttagttctgtgc

SEQ ID NO: 470807 - DNA, 201 bp, Homo sapiens
gtggggaaaggcttcagtagatgcagggtcggagaagcataaccagcagtagactcttgtagcaggttaggtgagagatggtggtggccacgactgagctrctagtggtggaagtgacaagaagtagaaggattggagacaaaacttgaagataaaaagtcttgaatttgctgatgatttgcattgatgaagtgttggggg

SEQ ID NO: 470808 - DNA, 201 bp, Homo sapiens
gtggtatttttatgtgattaatgagatagtactttttaatttgatgatattctagaaacctggtaagtactatgtaccttgtcttaagttttggttacttrattggtaaaattatagcatgcaccattgaattacctaattcaaaatatattcttttattgtttgacatttgtcttgtttttctttaaaatgttatctttg

SEQ ID NO: 470809 - DNA, 201 bp, Homo sapiens
tttgatgatattctagaaacctggtaagtactatgtaccttgtcttaagttttggttacttaattggtaaaattatagcatgcaccattgaattacctaaktcaaaatatattcttttattgtttgacatttgtcttgtttttctttaaaatgttatctttgtggagtaaacatttttctttatgctgtttagcatcttca

SEQ ID NO: 470810 - DNA, 201 bp, Homo sapiens
actttaggcattttaatttgcaaatttaggacaatttgctttaacgtttcttcacttttgtccattggatgtaatttccataaagtattcatttccctaartaaaaaccaaaaccaaaccgacaactaatggtcactgaagaaagagtgattaaatgcttagattataatggtatttgcattttaatgttaccagctctct

SEQ ID NO: 470811 - DNA, 201 bp, Homo sapiens
agaataaccaaaaaaatgggggtggatgttttatgtggaagttatgtgtatcccttttctgcttttggctaaggacagatatcttagaattagctttatgrcgcattcatctatctgattatttcagttaatatcatcttaatataatacaggttacttgagaagaaaacaaactcttaacccactattggagagatacca

SEQ ID NO: 470812 - DNA, 201 bp, Homo sapiens
gaataaccaaaaaaatgggggtggatgttttatgtggaagttatgtgtatcccttttctgcttttggctaaggacagatatcttagaattagctttatggygcattcatctatctgattatttcagttaatatcatcttaatataatacaggttacttgagaagaaaacaaactcttaacccactattggagagataccag

SEQ ID NO: 470813 - DNA, 201 bp, Homo sapiens
aataaccaaaaaaatgggggtggatgttttatgtggaagttatgtgtatcccttttctgcttttggctaaggacagatatcttagaattagctttatggcrcattcatctatctgattatttcagttaatatcatcttaatataatacaggttacttgagaagaaaacaaactcttaacccactattggagagataccagg

SEQ ID NO: 470814 - DNA, 201 bp, Homo sapiens
tagaattagctttatggcgcattcatctatctgattatttcagttaatatcatcttaatataatacaggttacttgagaagaaaacaaactcttaacccastattggagagataccaggtaggatactaaccttgatatagaatttcatgtgagaaagaaaaaggaaaatattttccattaaaagttgagtttttatctaa

SEQ ID NO: 470815 - DNA, 201 bp, Homo sapiens
gatgagtgtggacaactaatgagcacttaactgtagtaccaggcactattctcagaattcattagtgtgacaaccctctaaggtagggtctgttatccccrttatacagatggggcagaaacggcagggagaagttaagtgacttgcttaaggtaataaatgtagtaagaagcagaggtgggattgaacctaaacagtctg

SEQ ID NO: 470816 - DNA, 201 bp, Homo sapiens
atggcgcattcatctatctgattatttcagttaatatcatcttaatataatacaggttacttgagaagaaaacaaactcttaacccactattggagagatrccaggtaggatactaaccttgatatagaatttcatgtgagaaagaaaaaggaaaatattttccattaaaagttgagtttttatctaaaattctcttaatt

SEQ ID NO: 470817 - DNA, 201 bp, Homo sapiens
attctgtttttaaaattctgaaatgtcattttaagtataggagacaggtgaaattgttcaagtttactactaaaccaggaataaggaagcttagattcttrtccttttttcaaaaagaaaaattttaaaaccaggcttattgaggtacagttgatataagctatatttgacatgtacaattccataagctttgatatatat

SEQ ID NO: 470818 - DNA, 201 bp, Homo sapiens
attagtgtgacaaccctctaaggtagggtctgttatccccattatacagatggggcagaaacggcagggagaagttaagtgacttgcttaaggtaataaaygtagtaagaagcagaggtgggattgaacctaaacagtctgcatctagagttcatgctcataacattctatttattgcctttctggttttatgaccccctt

SEQ ID NO: 470819 - DNA, 201 bp, Homo sapiens
agttaatatcatcttaatataatacaggttacttgagaagaaaacaaactcttaacccactattggagagataccaggtaggatactaaccttgatatagratttcatgtgagaaagaaaaaggaaaatattttccattaaaagttgagtttttatctaaaattctcttaattttctagaaaaaacttaatttttctaaaa

SEQ ID NO: 470820 - DNA, 201 bp, Homo sapiens
ttcttgtccttttttcaaaaagaaaaattttaaaaccaggcttattgaggtacagttgatataagctatatttgacatgtacaattccataagctttgatytatatatatatatacacccttgaaaacgataccacaatcatgatagtgaatatattcatctcccaaagcttcttcatgcccctctgtaattttctgcatt

SEQ ID NO: 470821 - DNA, 201 bp, Homo sapiens
ggtagggtctgttatccccattatacagatggggcagaaacggcagggagaagttaagtgacttgcttaaggtaataaatgtagtaagaagcagaggtggrattgaacctaaacagtctgcatctagagttcatgctcataacattctatttattgcctttctggttttatgacccccttcttatctaagtgtatgctctg

SEQ ID NO: 470822 - DNA, 201 bp, Homo sapiens
gataccaggtaggatactaaccttgatatagaatttcatgtgagaaagaaaaaggaaaatattttccattaaaagttgagtttttatctaaaattctcttrattttctagaaaaaacttaatttttctaaaaatatgttgaagaattatatataaaattcactttgctatatatatagcaagtgaataataggtacacatt

SEQ ID NO: 470823 - DNA, 201 bp, Homo sapiens
ttgtggacttcatcatcaaatcctatgaatttttgttagatatagaggcagaatatactgaattgccattctacatagcaatttagtgacttggcagtggkaaagttttattgcagttttttgcgctgcggaatgagattgaaatttttctgaataataatgccctcaactattaagtcaaatacttaatagctttgaaag

SEQ ID NO: 470824 - DNA, 201 bp, Homo sapiens
ttttaaaaccaggcttattgaggtacagttgatataagctatatttgacatgtacaattccataagctttgatatatatatatatatacacccttgaaaaygataccacaatcatgatagtgaatatattcatctcccaaagcttcttcatgcccctctgtaattttctgcattccccctgccatccgtccttgtccccaa

SEQ ID NO: 470825 - DNA, 201 bp, Homo sapiens
tccattcagcctcctgttggttactattcctaactccccaaagacatgcactatcatctagtaacaacataggtgagtcttgcctatgtttgtactttgtrtaattggctttgtactttgtataattggctactaagtactgttttctgtcatctttcatgtatatatttgtgagataaatccaaattgttccttccagtc

SEQ ID NO: 470826 - DNA, 201 bp, Homo sapiens
atgaatttttgttagatatagaggcagaatatactgaattgccattctacatagcaatttagtgacttggcagtggtaaagttttattgcagttttttgcrctgcggaatgagattgaaatttttctgaataataatgccctcaactattaagtcaaatacttaatagctttgaaagttggcttttcctgtagatttcata

SEQ ID NO: 470827 - DNA, 201 bp, Homo sapiens
ttgaggtacagttgatataagctatatttgacatgtacaattccataagctttgatatatatatatatatacacccttgaaaacgataccacaatcatgayagtgaatatattcatctcccaaagcttcttcatgcccctctgtaattttctgcattccccctgccatccgtccttgtccccaagattagtttgcattttc

SEQ ID NO: 470828 - DNA, 201 bp, Homo sapiens
agttcatgctcataacattctatttattgcctttctggttttatgacccccttcttatctaagtgtatgctctgtgccccgcatatacaaactagttcccrtaacatgtgtaatataatccctcctttcccagggtttcccggcttcctgtccttccccttagctttctatcatcagtttttcctaggatttctggttcag

SEQ ID NO: 470829 - DNA, 201 bp, Homo sapiens
gttactattcctaactccccaaagacatgcactatcatctagtaacaacataggtgagtcttgcctatgtttgtactttgtgtaattggctttgtactttrtataattggctactaagtactgttttctgtcatctttcatgtatatatttgtgagataaatccaaattgttccttccagtcgtttatttttctcattgat

SEQ ID NO: 470830 - DNA, 201 bp, Homo sapiens
agaggcagaatatactgaattgccattctacatagcaatttagtgacttggcagtggtaaagttttattgcagttttttgcgctgcggaatgagattgaartttttctgaataataatgccctcaactattaagtcaaatacttaatagctttgaaagttggcttttcctgtagatttcataatattttgtaacaaattca

SEQ ID NO: 470831 - DNA, 201 bp, Homo sapiens
ttttctagagttgtatataagtggaatcatacagaactgtacactttttggactgatttatttcagcacaattatttggagattcatctgtgctgttgcayttgttaacagtgtactcccttttcttgctgagtattaataaaactgtggatgcaccatggttgtagacctgtgcacttttttttcttctttttttttctg

SEQ ID NO: 470832 - DNA, 201 bp, Homo sapiens
tatgacccccttcttatctaagtgtatgctctgtgccccgcatatacaaactagttcccataacatgtgtaatataatccctcctttcccagggtttcccrgcttcctgtccttccccttagctttctatcatcagtttttcctaggatttctggttcagcctatgtcaaagtgagagtcaccaacatagttgatgataaa

SEQ ID NO: 470833 - DNA, 201 bp, Homo sapiens
aggtgagtcttgcctatgtttgtactttgtgtaattggctttgtactttgtataattggctactaagtactgttttctgtcatctttcatgtatatatttrtgagataaatccaaattgttccttccagtcgtttatttttctcattgatgtatagtattctgttgttaagagtactataatttatttattttaccgttgg

SEQ ID NO: 470834 - DNA, 201 bp, Homo sapiens
tacttaatagctttgaaagttggcttttcctgtagatttcataatattttgtaacaaattcacctaaaattacaaggcagaacagtgattataagtgaacyttatactgtggtaaggtcacttctacaagaataatgaatcatgaaaatcaagagaaagaacaaatagtaggaaaatgtcttccaattccttttagccctt

SEQ ID NO: 470835 - DNA, 201 bp, Homo sapiens
gttgtatataagtggaatcatacagaactgtacactttttggactgatttatttcagcacaattatttggagattcatctgtgctgttgcatttgttaacmgtgtactcccttttcttgctgagtattaataaaactgtggatgcaccatggttgtagacctgtgcacttttttttcttctttttttttctgagacaggtt

SEQ ID NO: 470836 - DNA, 201 bp, Homo sapiens
aacatgtgtaatataatccctcctttcccagggtttcccggcttcctgtccttccccttagctttctatcatcagtttttcctaggatttctggttcagcstatgtcaaagtgagagtcaccaacatagttgatgataaatactgtttgattacaggaatgtaggaagatgtgcaagcattctactaaaaatgcttttccc

SEQ ID NO: 470837 - DNA, 201 bp, Homo sapiens
cagaacagtgattataagtgaaccttatactgtggtaaggtcacttctacaagaataatgaatcatgaaaatcaagagaaagaacaaatagtaggaaaatrtcttccaattccttttagcccttcatatttctacctgaactcataagcttttaaaaagataattatttttatttatatttaaaaagataatataggataa

SEQ ID NO: 470838 - DNA, 201 bp, Homo sapiens
cagaactgtacactttttggactgatttatttcagcacaattatttggagattcatctgtgctgttgcatttgttaacagtgtactcccttttcttgctgwgtattaataaaactgtggatgcaccatggttgtagacctgtgcacttttttttcttctttttttttctgagacaggttatcattctaattcctggctgga

SEQ ID NO: 470839 - DNA, 201 bp, Homo sapiens
agggtttcccggcttcctgtccttccccttagctttctatcatcagtttttcctaggatttctggttcagcctatgtcaaagtgagagtcaccaacatagktgatgataaatactgtttgattacaggaatgtaggaagatgtgcaagcattctactaaaaatgcttttcccacagataatgtaaactaaggttgcttagg

SEQ ID NO: 470840 - DNA, 201 bp, Homo sapiens
gaatcatgaaaatcaagagaaagaacaaatagtaggaaaatgtcttccaattccttttagcccttcatatttctacctgaactcataagcttttaaaaagrtaattatttttatttatatttaaaaagataatataggataatatttttgtaaaagagttcttgagatacagcactgaatgtaaaggaaaatattggagca

SEQ ID NO: 470841 - DNA, 201 bp, Homo sapiens
gtgtactcccttttcttgctgagtattaataaaactgtggatgcaccatggttgtagacctgtgcacttttttttcttctttttttttctgagacaggttmtcattctaattcctggctggagtgcagtggtgcgatcatagctaactctagcttcgacctcccacctccgtctcccaagtagctgggcccataggtgtgt

SEQ ID NO: 470842 - DNA, 201 bp, Homo sapiens
ggttcagcctatgtcaaagtgagagtcaccaacatagttgatgataaatactgtttgattacaggaatgtaggaagatgtgcaagcattctactaaaaatkcttttcccacagataatgtaaactaaggttgcttaggttttgtaagactgccattcaactataaataggccttatgtatgtttactaaatcagaaaaaat

SEQ ID NO: 470843 - DNA, 201 bp, Homo sapiens
ctgaggcacaaaaatcacttgaatccaggaggtggaggttgcagtgagctgagatcgtgccattgcactccagcctgggcgacagagcaagactctgtctyaaaacaaacaaacaaacaaacacaacctattataacaatttctgtcttttaattggtatatttagaccattgttactcaaagtgattcttctttattttt

SEQ ID NO: 470844 - DNA, 201 bp, Homo sapiens
cttcagagtgaagaaaatattggaagttaggcttgttaattgctctgcatggttcataattactctttcttattaactatttaaggaacatgagaccaggragttaaatacctgggtatatgcagatatatatctagaattggtaccaaagtaaatacaggcataccttggagatactgtaggttccattatagactacca

SEQ ID NO: 470845 - DNA, 201 bp, Homo sapiens
aactcataagcttttaaaaagataattatttttatttatatttaaaaagataatataggataatatttttgtaaaagagttcttgagatacagcactgaaygtaaaggaaaatattggagcattcaactacatttgagaaataacttctgtttattaaaagatactataagaatgaaagcacaagccctaatgaatattct

SEQ ID NO: 470846 - DNA, 201 bp, Homo sapiens
tcttgctgagtattaataaaactgtggatgcaccatggttgtagacctgtgcacttttttttcttctttttttttctgagacaggttatcattctaattcstggctggagtgcagtggtgcgatcatagctaactctagcttcgacctcccacctccgtctcccaagtagctgggcccataggtgtgtgccaccacaccca

SEQ ID NO: 470847 - DNA, 201 bp, Homo sapiens
catagttgatgataaatactgtttgattacaggaatgtaggaagatgtgcaagcattctactaaaaatgcttttcccacagataatgtaaactaaggttgyttaggttttgtaagactgccattcaactataaataggccttatgtatgtttactaaatcagaaaaaatttaatgtagctaaattttaaataatcaacaac

SEQ ID NO: 470848 - DNA, 201 bp, Homo sapiens
actcataagcttttaaaaagataattatttttatttatatttaaaaagataatataggataatatttttgtaaaagagttcttgagatacagcactgaatrtaaaggaaaatattggagcattcaactacatttgagaaataacttctgtttattaaaagatactataagaatgaaagcacaagccctaatgaatattctt

SEQ ID NO: 470849 - DNA, 201 bp, Homo sapiens
cccaagtagctgggcccataggtgtgtgccaccacacccaactccttttttaaaatttttgatagagacagcatctcactatgttgtccaggctggtctcsaacttctgagctcaagcagttttcccaccttggcttcccaaagtgctgggattacaggcgtgagtcaccatgccccagcctgtagtcttacattcttgta

SEQ ID NO: 470850 - DNA, 201 bp, Homo sapiens
gttgatgataaatactgtttgattacaggaatgtaggaagatgtgcaagcattctactaaaaatgcttttcccacagataatgtaaactaaggttgcttargttttgtaagactgccattcaactataaataggccttatgtatgtttactaaatcagaaaaaatttaatgtagctaaattttaaataatcaacaacagaa

SEQ ID NO: 470851 - DNA, 201 bp, Homo sapiens
gggcgacagagcaagactctgtctcaaaacaaacaaacaaacaaacacaacctattataacaatttctgtcttttaattggtatatttagaccattgttaytcaaagtgattcttctttatttttagagacagaatctcactgtatcacccaggttggagtgcagtggtgccatcatatttcactgtaaccttgaactctt

SEQ ID NO: 470852 - DNA, 201 bp, Homo sapiens
taatatttttgtaaaagagttcttgagatacagcactgaatgtaaaggaaaatattggagcattcaactacatttgagaaataacttctgtttattaaaakatactataagaatgaaagcacaagccctaatgaatattcttgtttgatactaaaccaaagcttgagaagtggtagtttcgcaagtttttcaagtggtttg

SEQ ID NO: 470853 - DNA, 201 bp, Homo sapiens
cttgaacttctgggcttaagtgatcctcctgcttcccaaagtgctgggattacaggcttgagccaccacgccaggtcaatgattaggttccttagtatagtttaccactgtacatgtgccacctagtggatggagattatccgtagatagtggctacagatgaaatcgccttgcctgtccttatcccagggttgcagttgt

SEQ ID NO: 470854 - DNA, 201 bp, Homo sapiens
caggcatgagccaccgtacctggccgaaatgtatttcttaaacagtaagacttaaaaattgaaattactcattgatacgtgggctgcaggatagatgtatygtactggcaggcatgaaagtaacattcttctttctgaacatatccatcaaagccctcgaatgacctggtccattgttagtgagtgctaatattttgaaag

SEQ ID NO: 470855 - DNA, 201 bp, Homo sapiens
tttttgtaaaagagttcttgagatacagcactgaatgtaaaggaaaatattggagcattcaactacatttgagaaataacttctgtttattaaaagatacyataagaatgaaagcacaagccctaatgaatattcttgtttgatactaaaccaaagcttgagaagtggtagtttcgcaagtttttcaagtggtttggtgca

SEQ ID NO: 470856 - DNA, 201 bp, Homo sapiens
tatactccacaaggaaatcttttctagtactgccataccatgtaatataaatactaacctcagtttcagtaacaggttgtgaaccatgagtgatttttatrcctttctcccctgcccttcaaacatcactgtattatatcattgtcagtaaaatgtcagtatagtaagcaaatcaacattatctccttcagaattctttgt

SEQ ID NO: 470857 - DNA, 201 bp, Homo sapiens
  misc_feature (1)...(201): n = A,T,C or G
tgctttttaaaaatgtggttacttcaacttttgtaatcttttcattgaaaacatttggttattctgctaacctttgactattctctttaaaaatgtcctanattcattccatattttaaagttttctaataaacctgagttcccacttgttttttttccttccagcttttattttaggttcaggggttacatgcacagatt

SEQ ID NO: 470858 - DNA, 201 bp, Homo sapiens
ggaaatcttttctagtactgccataccatgtaatataaatactaacctcagtttcagtaacaggttgtgaaccatgagtgatttttatacctttctccccygcccttcaaacatcactgtattatatcattgtcagtaaaatgtcagtatagtaagcaaatcaacattatctccttcagaattctttgttgataactacac

SEQ ID NO: 470859 - DNA, 201 bp, Homo sapiens
atttgagaataagaaggtcttgacaagcctggcttaagcagttatgagtggatgtgggtgtagagaccagactgtagtgttttgaagagtgaatataagcrgagaaacttgagagtttggttataaaagggaccacaggtatctgtgaagaaaacttagtaggaatgaagataaatatttttaaaattctgccactgaaca

SEQ ID NO: 470860 - DNA, 201 bp, Homo sapiens
ggcatgatctccgcttactgcaacctccgcctcctgagatcaagcggttctcctgtcttagcctcccaagtagctgggattacaggcgcgctaccatgccyggctaattttttgttgttgttgtttgtttttttttgagatgagtcttgctctgtcgcccaggctggagtgtaatggcgtgatctcggctcactgcaaact

SEQ ID NO: 470861 - DNA, 201 bp, Homo sapiens
tttatgtagagatggagtcttactgtgttgcccaggctggttttgaatatctgggctcaagcagtcctccagccttggcctcccgaagtgctgggattatwggcatgagccaccactccccatcctcccgcttttcaaggctgaatagtattccattgtttatatataccatgttttctttatccattcatctattgatgg

SEQ ID NO: 470862 - DNA, 201 bp, Homo sapiens
atctttcatgtatatatttgtgagataaatccaaattgttccttccagtcgtttatttttctcattgatgtatagtattctgttgttaagagtactataawttatttattttaccgttgggcattttgaggactttcaatttgaggtcattatgaattgtgttctatgaacattgcagtacatttcttttggttgacactg

SEQ ID NO: 470863 - DNA, 201 bp, Homo sapiens
gttccttccagtcgtttatttttctcattgatgtatagtattctgttgttaagagtactataatttatttattttaccgttgggcattttgaggactttcratttgaggtcattatgaattgtgttctatgaacattgcagtacatttcttttggttgacactgagagtattttatggattctaaccccaaagtggctact

SEQ ID NO: 470864 - DNA, 201 bp, Homo sapiens
gttggccaggttggtctcgaactcctggtctcaagtgatccgcctgccttggcctcccaaagtgctgggattacatgcacgagccaccgtgcctgtccatrtgttattttcttacaacctaaataaaaaccattacgtaaacaagacaaagtacttagtacatttccatagtcgatgaatttgtctttattacttgtatat

SEQ ID NO: 470865 - DNA, 201 bp, Homo sapiens
ctgtccatatgttattttcttacaacctaaataaaaaccattacgtaaacaagacaaagtacttagtacatttccatagtcgatgaatttgtctttattayttgtatataactaattatgaactccttgagttcagttcctttcatttcctgactcattgggcttgaacaaggatatttaacctctctgcttcatttgtaa

SEQ ID NO: 470866 - DNA, 201 bp, Homo sapiens
tgtttgattacaggaatgtaggaagatgtgcaagcattctactaaaaatgcttttcccacagataatgtaaactaaggttgcttaggttttgtaagactgscattcaactataaataggccttatgtatgtttactaaatcagaaaaaatttaatgtagctaaattttaaataatcaacaacagaaaataaaaatattttg

SEQ ID NO: 470867 - DNA, 201 bp, Homo sapiens
ttgaaggtttgaaatagaatagtgacttgcttgatcacatttgtacttttgaaaagtttctctggctgctgtggggaaaggcttcagtagatgcagggtcrgagaagcataaccagcagtagactcttgtagcaggttaggtgagagatggtggtggccacgactgagctgctagtggtggaagtgacaagaagtagaagg

SEQ ID NO: 470868 - DNA, 201 bp, Homo sapiens
ctcattgggcttgaacaaggatatttaacctctctgcttcatttgtaaaatgaaaaatagtaatatctacctgaaatggtggtggttagatgggaataaartaatttctttttttttttgtttttgtttttgagatggagtctcactctgttgcccaggctggagtgcagtggcgcgatcttggctcactgcaacctctac

SEQ ID NO: 470869 - DNA, 201 bp, Homo sapiens
gatagagacagcatctcactatgttgtccaggctggtctcaaacttctgagctcaagcagttttcccaccttggcttcccaaagtgctgggattacaggcrtgagtcaccatgccccagcctgtagtcttacattcttgtaatgtcttcgtctggttttggtatcagcataactacagcttcatagaatgaatcaggaagt

SEQ ID NO: 470870 - DNA, 201 bp, Homo sapiens
atgcttttcccacagataatgtaaactaaggttgcttaggttttgtaagactgccattcaactataaataggccttatgtatgtttactaaatcagaaaamatttaatgtagctaaattttaaataatcaacaacagaaaataaaaatattttgccccaccatcttaaggttacaagacttagaggtatattttatttaca

SEQ ID NO: 470871 - DNA, 201 bp, Homo sapiens
atattatataatattaattaagcaactatcgaacatcattcaggttttgtggtagctctggtttataaaaacagatacagtgcctgttttcatagagcatrtagtcaaattggggctgtggtctcctgtgaatggcacatacagaacaggggttcttaactttttcagtgccatagtcccctttggtactatgatgtaatc

SEQ ID NO: 470872 - DNA, 201 bp, Homo sapiens
agtaatatctacctgaaatggtggtggttagatgggaataaagtaatttctttttttttttgtttttgtttttgagatggagtctcactctgttgcccagrctggagtgcagtggcgcgatcttggctcactgcaacctctacctcctgggttcaactgattctcctgcctcagccttccaagtagctgggattacaggcg

SEQ ID NO: 470873 - DNA, 201 bp, Homo sapiens
tagagacagcatctcactatgttgtccaggctggtctcaaacttctgagctcaagcagttttcccaccttggcttcccaaagtgctgggattacaggcgtsagtcaccatgccccagcctgtagtcttacattcttgtaatgtcttcgtctggttttggtatcagcataactacagcttcatagaatgaatcaggaagtat

SEQ ID NO: 470874 - DNA, 201 bp, Homo sapiens
aactagtcgataatgaatgtcagtgtttacttgcatagttagtaaatatgagttcattttaaatatattatttttctctgtgctttttataaatctttgtrtctatatatgagatttatctgcttgctttatattatataatattaattaagcaactatcgaacatcattcaggttttgtggtagctctggtttataaaaa

SEQ ID NO: 470875 - DNA, 201 bp, Homo sapiens
gtggttagatgggaataaagtaatttctttttttttttgtttttgtttttgagatggagtctcactctgttgcccaggctggagtgcagtggcgcgatctsggctcactgcaacctctacctcctgggttcaactgattctcctgcctcagccttccaagtagctgggattacaggcgcctgccaccaggcccagctaatt

SEQ ID NO: 470876 - DNA, 201 bp, Homo sapiens
tggagcattcaactacatttgagaaataacttctgtttattaaaagatactataagaatgaaagcacaagccctaatgaatattcttgtttgatactaaamcaaagcttgagaagtggtagtttcgcaagtttttcaagtggtttggtgcaatctgaagactgcaatcccatcaatgaactttatatctttaccctttaaa

SEQ ID NO: 470877 - DNA, 201 bp, Homo sapiens
agcatctcactatgttgtccaggctggtctcaaacttctgagctcaagcagttttcccaccttggcttcccaaagtgctgggattacaggcgtgagtcacmatgccccagcctgtagtcttacattcttgtaatgtcttcgtctggttttggtatcagcataactacagcttcatagaatgaatcaggaagtatattctcc

SEQ ID NO: 470878 - DNA, 201 bp, Homo sapiens
attcaactataaataggccttatgtatgtttactaaatcagaaaaaatttaatgtagctaaattttaaataatcaacaacagaaaataaaaatattttgcyccaccatcttaaggttacaagacttagaggtatattttatttacatgcatgcatacacacacacacacacaaattatatatagatgtgtggaaaatatag

SEQ ID NO: 470879 - DNA, 201 bp, Homo sapiens
acctcaggtgatccacctacctctgccttccaaagtgttgggattacatgcgtgagccactgtgcctggcgtagatgggaataaagtaattcttataaagwacttggcttagctgctggcaaataataatgcttactgattcttgcatattacccatagtttattggctaacttatgtcttccttaaattatgaaattcta

SEQ ID NO: 470880 - DNA, 201 bp, Homo sapiens
aatgaatattcttgtttgatactaaaccaaagcttgagaagtggtagtttcgcaagtttttcaagtggtttggtgcaatctgaagactgcaatcccatcartgaactttatatctttaccctttaaaattataatttatgggccgggcgcagtggtttacgcctgtaatcccagcacttcgggaggctgaagcgggtggat

SEQ ID NO: 470881 - DNA, 201 bp, Homo sapiens
atctcactatgttgtccaggctggtctcaaacttctgagctcaagcagttttcccaccttggcttcccaaagtgctgggattacaggcgtgagtcaccatkccccagcctgtagtcttacattcttgtaatgtcttcgtctggttttggtatcagcataactacagcttcatagaatgaatcaggaagtatattctcctct

SEQ ID NO: 470882 - DNA, 201 bp, Homo sapiens
ctataaataggccttatgtatgtttactaaatcagaaaaaatttaatgtagctaaattttaaataatcaacaacagaaaataaaaatattttgccccaccrtcttaaggttacaagacttagaggtatattttatttacatgcatgcatacacacacacacacacaaattatatatagatgtgtggaaaatatagaaaagt

SEQ ID NO: 470883 - DNA, 201 bp, Homo sapiens
gtcttccttaaattatgaaattctataaactatccttgtctattttaaaattatactcatttttataacttacatgctttatttgtatatatccaggataytagatatttgtaattcaaattggaggttattttttgtcacttgattttttttctgtaatgtgtgttctcaccacatagaagtttttacatttctatgtag

SEQ ID NO: 470884 - DNA, 201 bp, Homo sapiens
gggtgacagagtgagactccatctcagacaaaaaaaaaaaaaaaaaaaaaaaaaaaaaatatatatatatatatatatatatatatatatatatacacatmcacacacacacacacacacacacacacacacatatatatataaaatttattagactaccttgcaatttcaggggatcttttacccatatatgattttata

SEQ ID NO: 470885 - DNA, 201 bp, Homo sapiens
gcctgccaccacgcctggctaatttttttttgtatttttagtagagacagtttttcaccatgttggccaggctggtctcgaactcctgatccacctgcctyggcctcccaaagtgttggaattacaggcgtgagccaccatgcccaggctggagtgcagtggcgtgatctctgctcactacagcctccacctcccaggttc

SEQ ID NO: 470886 - DNA, 201 bp, Homo sapiens
aaataaaaatattttgccccaccatcttaaggttacaagacttagaggtatattttatttacatgcatgcatacacacacacacacacaaattatatatasatgtgtggaaaatatagaaaagtagaaaaatgtatacaaatatttgaaatacattatgtggaatcatgtttgtatttttcttagcttaggaaagaaagcc

SEQ ID NO: 470887 - DNA, 201 bp, Homo sapiens
attatgaaattctataaactatccttgtctattttaaaattatactcatttttataacttacatgctttatttgtatatatccaggatactagatatttgyaattcaaattggaggttattttttgtcacttgattttttttctgtaatgtgtgttctcaccacatagaagtttttacatttctatgtagtcagatttatt

SEQ ID NO: 470888 - DNA, 201 bp, Homo sapiens
cagatattccaactattgatacggttgtttttgtttgtttgtttgtttgttttgttttgtttgttttgagacagaatctcactctgttgcccaggctggartgcagtggtgcgatctcagctcacttctgtctcctgggttcaagtgatgctcatgcctcagcctcctgagtagctgggactataggcatgcaccgccagg

SEQ ID NO: 470889 - DNA, 201 bp, Homo sapiens
taatttttttttgtatttttagtagagacagtttttcaccatgttggccaggctggtctcgaactcctgatccacctgcctcggcctcccaaagtgttggrattacaggcgtgagccaccatgcccaggctggagtgcagtggcgtgatctctgctcactacagcctccacctcccaggttcaagcaattctcctgcctca

SEQ ID NO: 470890 - DNA, 201 bp, Homo sapiens
gaggtatattttatttacatgcatgcatacacacacacacacacaaattatatatagatgtgtggaaaatatagaaaagtagaaaaatgtatacaaatatktgaaatacattatgtggaatcatgtttgtatttttcttagcttaggaaagaaagccattaaaagagttacatgtcaataaccatgatactataggatttt

SEQ ID NO: 470891 - DNA, 201 bp, Homo sapiens
tatacattatgagcttttaagaataaccaaaaaaatgggggtggatgttttatgtggaagttatgtgtatcccttttctgcttttggctaaggacagataycttagaattagctttatggcgcattcatctatctgattatttcagttaatatcatcttaatataatacaggttacttgagaagaaaacaaactcttaacc

SEQ ID NO: 470892 - DNA, 201 bp, Homo sapiens
ttttgtttgtttgtttgtttgttttgttttgtttgttttgagacagaatctcactctgttgcccaggctggaatgcagtggtgcgatctcagctcacttcsgtctcctgggttcaagtgatgctcatgcctcagcctcctgagtagctgggactataggcatgcaccgccaggcccagctaattttcatatttttagtaga

SEQ ID NO: 470893 - DNA, 201 bp, Homo sapiens
ttgtatttttagtagagacagtttttcaccatgttggccaggctggtctcgaactcctgatccacctgcctcggcctcccaaagtgttggaattacaggcrtgagccaccatgcccaggctggagtgcagtggcgtgatctctgctcactacagcctccacctcccaggttcaagcaattctcctgcctcagccttctgag

SEQ ID NO: 470894 - DNA, 201 bp, Homo sapiens
tgacccccttcttatctaagtgtatgctctgtgccccgcatatacaaactagttcccataacatgtgtaatataatccctcctttcccagggtttcccggyttcctgtccttccccttagctttctatcatcagtttttcctaggatttctggttcagcctatgtcaaagtgagagtcaccaacatagttgatgataaata

SEQ ID NO: 470895 - DNA, 201 bp, Homo sapiens
caataaccatgatactataggattttagtagttgcagagtattacattacttaaataaatgattcatggaatagtctttttttattggacaaggaattttmccctccacctcaatctttgagagttagaaacaatgcagagatgagtgtctttatagttaaacctttgtacattttataatttactcatgataaattttca

SEQ ID NO: 470896 - DNA, 201 bp, Homo sapiens
aggactcccattttttctgtatccttggcaatacttatctttcatctttttaatagtagccatttgttaggtgttagccaatagccaggtgttacgtgatrtatacttgttttaattttcatttccctaatgagtagtgatgctgaacattttctcatgtacctgttggccatttgtatgtgttcttttgagaaatgtctg

SEQ ID NO: 470897 - DNA, 201 bp, Homo sapiens
tgagccaccttgcctagtcctacacatttttaataaataacaaaattcacatttgttataatccactgatctcatcagaaaagtctttaagtattggaatyagttaagcttacattgttggatataagtttttcaaatcttcttattgtccactcatgttctaagttgttttccttgaagtgacaggctcactttattcct

SEQ ID NO: 470898 - DNA, 201 bp, Homo sapiens
gctggagtgcagtggcgtgatctctgctcactacagcctccacctcccaggttcaagcaattctcctgcctcagccttctgagtagctgggattactggcrcgcaccaacatgcctggctaatttttgtgttttgggtacagatggggttttgccatgttggccaggctggtctcgaactcctggcctcagatgatccgtc

SEQ ID NO: 470899 - DNA, 201 bp, Homo sapiens
cattacttaaataaatgattcatggaatagtctttttttattggacaaggaattttcccctccacctcaatctttgagagttagaaacaatgcagagatgmgtgtctttatagttaaacctttgtacattttataatttactcatgataaattttcaagttgaattcctaggccaaagagtatacagattttaaagacttt

SEQ ID NO: 470900 - DNA, 201 bp, Homo sapiens
ggtgttcactaccacccctggcttattttcgtatttttagtagagacggggtttcaccatgttgcccaggctggtttcagactctgggctcaagcagtctrcctgcctcagcctacccaagtgctggcattacaagtgtgaaccaccatgcctgtccagatgtatggtttttttttttttggtgccagtaccatactattt

SEQ ID NO: 470901 - DNA, 201 bp, Homo sapiens
tataagtttttcaaatcttcttattgtccactcatgttctaagttgttttccttgaagtgacaggctcactttattccttttttcaagaaatatgttagawaatcaagttttaataattgtggtttgttatttgttcttacatgtaaaaccggtgttccatgaaaaaagcatttatttcagtttataaatcacatgatcac

SEQ ID NO: 470902 - DNA, 201 bp, Homo sapiens
ctggagtgcagtggcgtgatctctgctcactacagcctccacctcccaggttcaagcaattctcctgcctcagccttctgagtagctgggattactggcgygcaccaacatgcctggctaatttttgtgttttgggtacagatggggttttgccatgttggccaggctggtctcgaactcctggcctcagatgatccgtct

SEQ ID NO: 470903 - DNA, 201 bp, Homo sapiens
ttcatggaatagtctttttttattggacaaggaattttcccctccacctcaatctttgagagttagaaacaatgcagagatgagtgtctttatagttaaamctttgtacattttataatttactcatgataaattttcaagttgaattcctaggccaaagagtatacagattttaaagactttcaatgttggcagatatca

SEQ ID NO: 470904 - DNA, 201 bp, Homo sapiens
aggctggtttcagactctgggctcaagcagtctgcctgcctcagcctacccaagtgctggcattacaagtgtgaaccaccatgcctgtccagatgtatggtttttttttttttggtgccagtaccatactattttgattacaatcattttgtaatgttttgaaatcagacagggtgatgcatccagcattgttctttttgc

SEQ ID NO: 470905 - DNA, 201 bp, Homo sapiens
cttgaagtgacaggctcactttattccttttttcaagaaatatgttagataatcaagttttaataattgtggtttgttatttgttcttacatgtaaaaccrgtgttccatgaaaaaagcatttatttcagtttataaatcacatgatcacaaattctttcctcaagaaaaactatggtgtaacaattattttactctttat

SEQ ID NO: 470906 - DNA, 201 bp, Homo sapiens
ttcaagcaattctcctgcctcagccttctgagtagctgggattactggcgcgcaccaacatgcctggctaatttttgtgttttgggtacagatggggtttygccatgttggccaggctggtctcgaactcctggcctcagatgatccgtctcccaaagtgctgggattacgggatgagccaccagtgcccagcctgtggga

SEQ ID NO: 470907 - DNA, 201 bp, Homo sapiens
ctttttttattggacaaggaattttcccctccacctcaatctttgagagttagaaacaatgcagagatgagtgtctttatagttaaacctttgtacatttyataatttactcatgataaattttcaagttgaattcctaggccaaagagtatacagattttaaagactttcaatgttggcagatatcactttaggataatt

SEQ ID NO: 470908 - DNA, 201 bp, Homo sapiens
tggagatgcttaaccatctctttcagattcgagattcattttgagaccagattcatgttggtctgagtatatggttatgatcgatatctattatactattyatcattttgttagtgtgtaacatctttttcatctctaatgtcatgttttctttttgacataactttcattttgtctgataaaattattgccactcaaact

SEQ ID NO: 470909 - DNA, 201 bp, Homo sapiens
caggctcactttattccttttttcaagaaatatgttagataatcaagttttaataattgtggtttgttatttgttcttacatgtaaaaccggtgttccatkaaaaaagcatttatttcagtttataaatcacatgatcacaaattctttcctcaagaaaaactatggtgtaacaattattttactctttatttctcgtttt

SEQ ID NO: 470910 - DNA, 201 bp, Homo sapiens
ttctacagccagaccaaaagctagaaatttcccttgacctcgtattaaaaaaaagtcaacaataaattactctgaggtgtttgacctcccttacttcatayaaccttttctaattctttaataatttaagtacttctctaaaagtattttcatttttgatctgttgtctggcaaaatttctgaggtcttctaagccagaga

SEQ ID NO: 470911 - DNA, 201 bp, Homo sapiens
ttgttatttgttcttacatgtaaaaccggtgttccatgaaaaaagcatttatttcagtttataaatcacatgatcacaaattctttcctcaagaaaaactrtggtgtaacaattattttactctttatttctcgttttgtcacatagataattaaaagatgtgtattcatggatcaagacttaaaacattaatgatttttg

SEQ ID NO: 470912 - DNA, 201 bp, Homo sapiens
aaagaagaaattttctttttcaacttgacttgatttttttttttgaaattacactacatttaatttgtgtatgtctcggtaccagcagacaacatagtttmtcatgaacttgaaataggtaatttattacaaaaacaaagctaattttgataaaagtaattagttgagagtccaatatgatttaaacctaagttttaaaaa

SEQ ID NO: 470913 - DNA, 201 bp, Homo sapiens
ttgggtaaatacctaggactggaatttctgacttgttggaaatatattcttaactttggaaaacagtttcacagtttcttaagtgtctgtatacttctccrtttctagagatctgagagttccatttgctgtacattgttgccagcactggatattgccactgtttctaaattttagccatctggttggcatttagtgata

SEQ ID NO: 470914 - DNA, 201 bp, Homo sapiens
tcatttatttagcaatgtttattgaacagcagagggtttaattttgatgacattggtcatttgttaattttttggaagttgaaaaaattatgctgtttatrctttattaaaaaatctttgcttgccccagtgttagttgtaggtttaaaaaatccatttatggttaaattacacatatgataaaagaatttgagataagat

SEQ ID NO: 470915 - DNA, 201 bp, Homo sapiens
agggcgcgatcttgactcagtgcaagctccgcctcctgggttcacgccattcttctgcctcagcctcccgagtagctgggattacaggtgccagccactaygcccagctaatttttttgtgtttttagtagagacggggtttcaccatgttggtcaggctggtcttgaattgctgacctcgtgatctgtctaccttggcct

SEQ ID NO: 470916 - DNA, 201 bp, Homo sapiens
ggacaatttgctttaacgtttcttcacttttgtccattggatgtaatttccataaagtattcatttccctaagtaaaaaccaaaaccaaaccgacaactartggtcactgaagaaagagtgattaaatgcttagattataatggtatttgcattttaatgttaccagctctctacagtttaacgtgtatgcatttatcgat

SEQ ID NO: 470917 - DNA, 201 bp, Homo sapiens
gtttagcatcttcatcagattagttcagggtattgctgaatgtggttgtttggaagtaaaatgctttagttttagttatatagattttaataagatactamtttctatataatttatcaggtactttaggcattttaatttgcaaatttaggacaatttgctttaacgtttcttcacttttgtccattggatgtaatttcc

SEQ ID NO: 470918 - DNA, 201 bp, Homo sapiens
gagtgacaagggactggatgccatttataaggatggggaagactgggatgaaaccggttaagggagaaattttaaacatggcaaacttaagaggggttttrtgtgagaaaatggaaatgctaagaaggaagttgaaaatcctgctaatttggagatctttgattaaaactagaaataagaatatgggaagcatcaacttcc

SEQ ID NO: 470919 - DNA, 201 bp, Homo sapiens
cgactgagctgctagtggtggaagtgacaagaagtagaaggattggagacaaaacttgaagataaaaagtcttgaatttgctgatgatttgcattgatgargtgttgggggagaggactgaaggagcaaaggagagtgacaagggactggatgccatttataaggatggggaagactgggatgaaaccggttaagggagaa

SEQ ID NO: 470920 - DNA, 201 bp, Homo sapiens
tgagttatgtatcaaaatcttagattatcttctggtctaattatttgttaatttttagctgttgcttatgtaatgactattggttcttatttagtggtggytttcagatgttagtatttaattgacatagacaagataggggtcttttgctttgtcagtacacttgatgagacaggtggaattggagttccaaagccatac

SEQ ID NO: 470921 - DNA, 201 bp, Homo sapiens
aaactatccttgtctattttaaaattatactcatttttataacttacatgctttatttgtatatatccaggatactagatatttgtaattcaaattggagrttattttttgtcacttgattttttttctgtaatgtgtgttctcaccacatagaagtttttacatttctatgtagtcagatttattcatgtttttatttat

SEQ ID NO: 470922 - DNA, 201 bp, Homo sapiens
ttgtatatatccaggatactagatatttgtaattcaaattggaggttattttttgtcacttgattttttttctgtaatgtgtgttctcaccacatagaagyttttacatttctatgtagtcagatttattcatgtttttatttatggttatgttaaagattatagctattagggacctatttcttcagggtttataattta

SEQ ID NO: 470923 - DNA, 201 bp, Homo sapiens
tgtaatgtgtgttctcaccacatagaagtttttacatttctatgtagtcagatttattcatgtttttatttatggttatgttaaagattatagctattagrgacctatttcttcagggtttataatttatgtatgttgttacaaatagagagattactttttctttgacccaataggtagagggcacttttgtggactcag

SEQ ID NO: 470924 - DNA, 201 bp, Homo sapiens
tttttacatttctatgtagtcagatttattcatgtttttatttatggttatgttaaagattatagctattagggacctatttcttcagggtttataatttrtgtatgttgttacaaatagagagattactttttctttgacccaataggtagagggcacttttgtggactcagaaagcttgcctctcctatttttttagga

SEQ ID NO: 470925 - DNA, 201 bp, Homo sapiens
ggacaaggaattttcccctccacctcaatctttgagagttagaaacaatgcagagatgagtgtctttatagttaaacctttgtacattttataatttactyatgataaattttcaagttgaattcctaggccaaagagtatacagattttaaagactttcaatgttggcagatatcactttaggataattataccaattta

SEQ ID NO: 470926 - DNA, 201 bp, Homo sapiens
ttcatgtttttatttatggttatgttaaagattatagctattagggacctatttcttcagggtttataatttatgtatgttgttacaaatagagagattaytttttctttgacccaataggtagagggcacttttgtggactcagaaagcttgcctctcctatttttttaggaaaatatctgagattctgcctcctcattt

SEQ ID NO: 470927 - DNA, 201 bp, Homo sapiens
gattacgggatgagccaccagtgcccagcctgtgggacagtttttaacaacaaattttatttctttaataggtacctatttaggttatctgtctctccttkcataaatttgcatctttcaagaaatttgttcattttgtctatcttgacaaattaaaggaatggagttgatcataatgtttcttattattttaatacctgt

SEQ ID NO: 470928 - DNA, 201 bp, Homo sapiens
attatagctattagggacctatttcttcagggtttataatttatgtatgttgttacaaatagagagattactttttctttgacccaataggtagagggcayttttgtggactcagaaagcttgcctctcctatttttttaggaaaatatctgagattctgcctcctcatttccaagccagagtttaaaatatttacatttt

SEQ ID NO: 470929 - DNA, 201 bp, Homo sapiens
gccaccagtgcccagcctgtgggacagtttttaacaacaaattttatttctttaataggtacctatttaggttatctgtctctccttgcataaatttgcayctttcaagaaatttgttcattttgtctatcttgacaaattaaaggaatggagttgatcataatgtttcttattattttaatacctgtagaatctgtaatg

SEQ ID NO: 470930 - DNA, 201 bp, Homo sapiens
tagaaacaatgcagagatgagtgtctttatagttaaacctttgtacattttataatttactcatgataaattttcaagttgaattcctaggccaaagagtrtacagattttaaagactttcaatgttggcagatatcactttaggataattataccaatttatactcttaccagtaatatatgagtgtatatatttaccta

SEQ ID NO: 470931 - DNA, 201 bp, Homo sapiens
ctatttcttcagggtttataatttatgtatgttgttacaaatagagagattactttttctttgacccaataggtagagggcacttttgtggactcagaaakcttgcctctcctatttttttaggaaaatatctgagattctgcctcctcatttccaagccagagtttaaaatatttacatttttacttcatagtgttaaga

SEQ ID NO: 470932 - DNA, 201 bp, Homo sapiens
ggattacaggcatgagcccctgcacctggcccaggaagaccattttttaaaaacatgcaacctttctgcctgtaatccaaggaaatttgacctattgttcytagtttttattgggtatcatgaagttaattattcatgcatttcatagatacgtaattgctttctagaactacagtcacattcccttgacatgggtatttt

SEQ ID NO: 470933 - DNA, 201 bp, Homo sapiens
ttgttcttacatgtaaaaccggtgttccatgaaaaaagcatttatttcagtttataaatcacatgatcacaaattctttcctcaagaaaaactatggtgtracaattattttactctttatttctcgttttgtcacatagataattaaaagatgtgtattcatggatcaagacttaaaacattaatgatttttgctgcttc

SEQ ID NO: 470934 - DNA, 201 bp, Homo sapiens
acagtttttaacaacaaattttatttctttaataggtacctatttaggttatctgtctctccttgcataaatttgcatctttcaagaaatttgttcatttygtctatcttgacaaattaaaggaatggagttgatcataatgtttcttattattttaatacctgtagaatctgtaatgatttcaccttcctcattcttgat

SEQ ID NO: 470935 - DNA, 201 bp, Homo sapiens
gagatgagtgtctttatagttaaacctttgtacattttataatttactcatgataaattttcaagttgaattcctaggccaaagagtatacagattttaargactttcaatgttggcagatatcactttaggataattataccaatttatactcttaccagtaatatatgagtgtatatatttacctattccttgccagtt

SEQ ID NO: 470936 - DNA, 201 bp, Homo sapiens
tttatgtatgttgttacaaatagagagattactttttctttgacccaataggtagagggcacttttgtggactcagaaagcttgcctctcctatttttttwggaaaatatctgagattctgcctcctcatttccaagccagagtttaaaatatttacatttttacttcatagtgttaagacattgtgtaatgtaagtataa

SEQ ID NO: 470937 - DNA, 201 bp, Homo sapiens
taaaaccggtgttccatgaaaaaagcatttatttcagtttataaatcacatgatcacaaattctttcctcaagaaaaactatggtgtaacaattattttaytctttatttctcgttttgtcacatagataattaaaagatgtgtattcatggatcaagacttaaaacattaatgatttttgctgcttcatcagtgatattc

SEQ ID NO: 470938 - DNA, 201 bp, Homo sapiens
aaggaatggagttgatcataatgtttcttattattttaatacctgtagaatctgtaatgatttcaccttcctcattcttgatactaataatttgcatcttstcttatttttttcctgatcagtctggctagagatttatcaatcttattgaccttcttgagtcagcctttgttttcatggacttttgtctattttctttcc

SEQ ID NO: 470939 - DNA, 201 bp, Homo sapiens
atgataaattttcaagttgaattcctaggccaaagagtatacagattttaaagactttcaatgttggcagatatcactttaggataattataccaatttayactcttaccagtaatatatgagtgtatatatttacctattccttgccagttctggaaattgtgaatttaacagaatcttccaaaaagcattgaaaattgg

SEQ ID NO: 470940 - DNA, 201 bp, Homo sapiens
caaatagagagattactttttctttgacccaataggtagagggcacttttgtggactcagaaagcttgcctctcctatttttttaggaaaatatctgagawtctgcctcctcatttccaagccagagtttaaaatatttacatttttacttcatagtgttaagacattgtgtaatgtaagtataatgtttaaaaaaaaatc

SEQ ID NO: 470941 - DNA, 201 bp, Homo sapiens
ccggtgttccatgaaaaaagcatttatttcagtttataaatcacatgatcacaaattctttcctcaagaaaaactatggtgtaacaattattttactcttyatttctcgttttgtcacatagataattaaaagatgtgtattcatggatcaagacttaaaacattaatgatttttgctgcttcatcagtgatattctcaat

SEQ ID NO: 470942 - DNA, 201 bp, Homo sapiens
ggagttgatcataatgtttcttattattttaatacctgtagaatctgtaatgatttcaccttcctcattcttgatactaataatttgcatcttgtcttatwtttttcctgatcagtctggctagagatttatcaatcttattgaccttcttgagtcagcctttgttttcatggacttttgtctattttctttcccctttct

SEQ ID NO: 470943 - DNA, 201 bp, Homo sapiens
ttttcaagttgaattcctaggccaaagagtatacagattttaaagactttcaatgttggcagatatcactttaggataattataccaatttatactcttamcagtaatatatgagtgtatatatttacctattccttgccagttctggaaattgtgaatttaacagaatcttccaaaaagcattgaaaattggcctgggaa

SEQ ID NO: 470944 - DNA, 201 bp, Homo sapiens
agattactttttctttgacccaataggtagagggcacttttgtggactcagaaagcttgcctctcctatttttttaggaaaatatctgagattctgcctcytcatttccaagccagagtttaaaatatttacatttttacttcatagtgttaagacattgtgtaatgtaagtataatgtttaaaaaaaaatcttaaaaatg

SEQ ID NO: 470945 - DNA, 201 bp, Homo sapiens
ccatgaaaaaagcatttatttcagtttataaatcacatgatcacaaattctttcctcaagaaaaactatggtgtaacaattattttactctttatttctcrttttgtcacatagataattaaaagatgtgtattcatggatcaagacttaaaacattaatgatttttgctgcttcatcagtgatattctcaatgatactct

SEQ ID NO: 470946 - DNA, 201 bp, Homo sapiens
cttattattttaatacctgtagaatctgtaatgatttcaccttcctcattcttgatactaataatttgcatcttgtcttatttttttcctgatcagtctgkctagagatttatcaatcttattgaccttcttgagtcagcctttgttttcatggacttttgtctattttctttcccctttctgttttattgatttttatta

SEQ ID NO: 470947 - DNA, 201 bp, Homo sapiens
tgttggcagatatcactttaggataattataccaatttatactcttaccagtaatatatgagtgtatatatttacctattccttgccagttctggaaattrtgaatttaacagaatcttccaaaaagcattgaaaattggcctgggaatgtaaatatccttttcttccccattcagcttactaatgaatctatcataatct

SEQ ID NO: 470948 - DNA, 201 bp, Homo sapiens
tgtattcatggatcaagacttaaaacattaatgatttttgctgcttcatcagtgatattctcaatgatactctacattatttttactgtagttgtagtgcyaattgagaatgtgacaacttctaatacagcttggtgccaactgctttcagttttggaaatgcatcaacagttttacccaccatagcttttgcatcgtgta

SEQ ID NO: 470949 - DNA, 201 bp, Homo sapiens
atacctgtagaatctgtaatgatttcaccttcctcattcttgatactaataatttgcatcttgtcttatttttttcctgatcagtctggctagagatttaycaatcttattgaccttcttgagtcagcctttgttttcatggacttttgtctattttctttcccctttctgttttattgatttttattatcatctttattt

SEQ ID NO: 470950 - DNA, 201 bp, Homo sapiens
actcttaccagtaatatatgagtgtatatatttacctattccttgccagttctggaaattgtgaatttaacagaatcttccaaaaagcattgaaaattggyctgggaatgtaaatatccttttcttccccattcagcttactaatgaatctatcataatctcagctgtctgaatctaaaagagaaccagtaaaattgagat

SEQ ID NO: 470951 - DNA, 201 bp, Homo sapiens
ctgcttcatcagtgatattctcaatgatactctacattatttttactgtagttgtagtgccaattgagaatgtgacaacttctaatacagcttggtgccarctgctttcagttttggaaatgcatcaacagttttacccaccatagcttttgcatcgtgtaacaatttttgcttcaattgttaaacattattttgaaaact

SEQ ID NO: 470952 - DNA, 201 bp, Homo sapiens
cctgtagaatctgtaatgatttcaccttcctcattcttgatactaataatttgcatcttgtcttatttttttcctgatcagtctggctagagatttatcartcttattgaccttcttgagtcagcctttgttttcatggacttttgtctattttctttcccctttctgttttattgatttttattatcatctttatttttt

SEQ ID NO: 470953 - DNA, 201 bp, Homo sapiens
cttaccagtaatatatgagtgtatatatttacctattccttgccagttctggaaattgtgaatttaacagaatcttccaaaaagcattgaaaattggcctrggaatgtaaatatccttttcttccccattcagcttactaatgaatctatcataatctcagctgtctgaatctaaaagagaaccagtaaaattgagatgac

SEQ ID NO: 470954 - DNA, 201 bp, Homo sapiens
tacattatttttactgtagttgtagtgccaattgagaatgtgacaacttctaatacagcttggtgccaactgctttcagttttggaaatgcatcaacagtwttacccaccatagcttttgcatcgtgtaacaatttttgcttcaattgttaaacattattttgaaaactcaaggaacagtaaagtctgttttattgcccat

SEQ ID NO: 470955 - DNA, 201 bp, Homo sapiens
tcttatttttttcctgatcagtctggctagagatttatcaatcttattgaccttcttgagtcagcctttgttttcatggacttttgtctattttctttccyctttctgttttattgatttttattatcatctttattttttcctatcttctcactttgagtttaatttgatcttctttttttgtttactcttacgtgtccc

SEQ ID NO: 470956 - DNA, 201 bp, Homo sapiens
taatatatgagtgtatatatttacctattccttgccagttctggaaattgtgaatttaacagaatcttccaaaaagcattgaaaattggcctgggaatgtraatatccttttcttccccattcagcttactaatgaatctatcataatctcagctgtctgaatctaaaagagaaccagtaaaattgagatgacaagtttat

SEQ ID NO: 470957 - DNA, 201 bp, Homo sapiens
acaacttctaatacagcttggtgccaactgctttcagttttggaaatgcatcaacagttttacccaccatagcttttgcatcgtgtaacaatttttgcttyaattgttaaacattattttgaaaactcaaggaacagtaaagtctgttttattgcccatatttttactatttgtttgttctttcttccttcaggatgttct

SEQ ID NO: 470958 - DNA, 201 bp, Homo sapiens
gctagagatttatcaatcttattgaccttcttgagtcagcctttgttttcatggacttttgtctattttctttcccctttctgttttattgatttttattmtcatctttattttttcctatcttctcactttgagtttaatttgatcttctttttttgtttactcttacgtgtccctgcttggaagggacacttgtgaagt

SEQ ID NO: 470959 - DNA, 201 bp, Homo sapiens
tgtatatatttacctattccttgccagttctggaaattgtgaatttaacagaatcttccaaaaagcattgaaaattggcctgggaatgtaaatatcctttycttccccattcagcttactaatgaatctatcataatctcagctgtctgaatctaaaagagaaccagtaaaattgagatgacaagtttattgcaaaataaa

SEQ ID NO: 470960 - DNA, 201 bp, Homo sapiens
tacccaccatagcttttgcatcgtgtaacaatttttgcttcaattgttaaacattattttgaaaactcaaggaacagtaaagtctgttttattgcccatakttttactatttgtttgttctttcttccttcaggatgttctgagaatccttctttttatcattctcctttctggttcaataacttttctcactattctttt

SEQ ID NO: 470961 - DNA, 201 bp, Homo sapiens
tgagaaggattcactcatcacactgttgtatacttcgtagctattacttctttaatccccaaggacttgtttaacaaagtgttcttcagtttctacttccyagttcctttgtggaactggtaaaaatttaaaatatcttaacataatattttatttcaaatgataaacagtaaggtaaaatgtggtttttcttggacaact

SEQ ID NO: 470962 - DNA, 201 bp, Homo sapiens
tttactatttgtttgttctttcttccttcaggatgttctgagaatccttctttttatcattctcctttctggttcaataacttttctcactattcttttgstgtagttttgtctcatgactaatttttagttctcattcatctcacaatttcttgatttccctttcattactaatggatgtttttgctggatatagaattc

SEQ ID NO: 470963 - DNA, 201 bp, Homo sapiens
tagttcctttgtggaactggtaaaaatttaaaatatcttaacataatattttatttcaaatgataaacagtaaggtaaaatgtggtttttcttggacaacwtatggtagaatgatgtctagaatatttagttatgtcatttaatactttttttctttacaatttaaaaaaaaatttattttattttagattcagggggtac

SEQ ID NO: 470964 - DNA, 201 bp, Homo sapiens
ttctgcctcctcatttccaagccagagtttaaaatatttacatttttacttcatagtgttaagacattgtgtaatgtaagtataatgtttaaaaaaaaatyttaaaaatgtaatagtgatttggcagagaccaaagcatggagggccttgaaatgctgctctgtttgttatctgttacaataaagcaattaccataaactt

SEQ ID NO: 470965 - DNA, 201 bp, Homo sapiens
tcctcatttccaagccagagtttaaaatatttacatttttacttcatagtgttaagacattgtgtaatgtaagtataatgtttaaaaaaaaatcttaaaamtgtaatagtgatttggcagagaccaaagcatggagggccttgaaatgctgctctgtttgttatctgttacaataaagcaattaccataaacttaatatct

SEQ ID NO: 470966 - DNA, 201 bp, Homo sapiens
tacatttttacttcatagtgttaagacattgtgtaatgtaagtataatgtttaaaaaaaaatcttaaaaatgtaatagtgatttggcagagaccaaagcakggagggccttgaaatgctgctctgtttgttatctgttacaataaagcaattaccataaacttaatatcttaaaacagcatccatttacttaggtcagaac

SEQ ID NO: 470967 - DNA, 201 bp, Homo sapiens
gtgttaagacattgtgtaatgtaagtataatgtttaaaaaaaaatcttaaaaatgtaatagtgatttggcagagaccaaagcatggagggccttgaaatgytgctctgtttgttatctgttacaataaagcaattaccataaacttaatatcttaaaacagcatccatttacttaggtcagaactcagggtaggctcacct

SEQ ID NO: 470968 - DNA, 201 bp, Homo sapiens
ttgtgtaatgtaagtataatgtttaaaaaaaaatcttaaaaatgtaatagtgatttggcagagaccaaagcatggagggccttgaaatgctgctctgtttrttatctgttacaataaagcaattaccataaacttaatatcttaaaacagcatccatttacttaggtcagaactcagggtaggctcacctgtgctctctgt

SEQ ID NO: 470969 - DNA, 201 bp, Homo sapiens
tatatttacctattccttgccagttctggaaattgtgaatttaacagaatcttccaaaaagcattgaaaattggcctgggaatgtaaatatccttttcttycccattcagcttactaatgaatctatcataatctcagctgtctgaatctaaaagagaaccagtaaaattgagatgacaagtttattgcaaaataaatgac

SEQ ID NO: 470970 - DNA, 201 bp, Homo sapiens
ggcattagtaattttactgatagcccttctgtgattctgatttttggtagtggtttttacctggtaagtagcattttatcagttggcaggtactggaaatmtgctttatcacttcttttttaagaaaagtggaaaacacaaacagtttgttcaccaaagttatgtttcaaggattccattcaaccagaatctggttcacct

SEQ ID NO: 470971 - DNA, 201 bp, Homo sapiens
ttaaaaaaaaatcttaaaaatgtaatagtgatttggcagagaccaaagcatggagggccttgaaatgctgctctgtttgttatctgttacaataaagcaaytaccataaacttaatatcttaaaacagcatccatttacttaggtcagaactcagggtaggctcacctgtgctctctgtttaaggtctcacaagattcaaa

SEQ ID NO: 470972 - DNA, 201 bp, Homo sapiens
aacagaatcttccaaaaagcattgaaaattggcctgggaatgtaaatatccttttcttccccattcagcttactaatgaatctatcataatctcagctgtstgaatctaaaagagaaccagtaaaattgagatgacaagtttattgcaaaataaatgacctgaaagccacaggcattgggtggggtgggggaagggcaggt

SEQ ID NO: 470973 - DNA, 201 bp, Homo sapiens
atccgcctgccttggccttccaaagtgctgggattacaggcatgagccaccgcaccctgctgagctcaccattttcttactgcctattggcttgggtcacyctcagttcctagaggccactctttggtttttcctcgtggctctttttatcttcaaagatagcaacagtgtattgaaatgttcccttgctatgaatttccc

SEQ ID NO: 470974 - DNA, 201 bp, Homo sapiens
gaatcttccaaaaagcattgaaaattggcctgggaatgtaaatatccttttcttccccattcagcttactaatgaatctatcataatctcagctgtctgartctaaaagagaaccagtaaaattgagatgacaagtttattgcaaaataaatgacctgaaagccacaggcattgggtggggtgggggaagggcaggtaatg

SEQ ID NO: 470975 - DNA, 201 bp, Homo sapiens
tccgcctgccttggccttccaaagtgctgggattacaggcatgagccaccgcaccctgctgagctcaccattttcttactgcctattggcttgggtcactytcagttcctagaggccactctttggtttttcctcgtggctctttttatcttcaaagatagcaacagtgtattgaaatgttcccttgctatgaatttccct

SEQ ID NO: 470976 - DNA, 201 bp, Homo sapiens
tgggaatgtaaatatccttttcttccccattcagcttactaatgaatctatcataatctcagctgtctgaatctaaaagagaaccagtaaaattgagatgrcaagtttattgcaaaataaatgacctgaaagccacaggcattgggtggggtgggggaagggcaggtaatggtgactgaggtgactctgtgtttgggtttt

SEQ ID NO: 470977 - DNA, 201 bp, Homo sapiens
ccgcctgccttggccttccaaagtgctgggattacaggcatgagccaccgcaccctgctgagctcaccattttcttactgcctattggcttgggtcactcycagttcctagaggccactctttggtttttcctcgtggctctttttatcttcaaagatagcaacagtgtattgaaatgttcccttgctatgaatttccctt

SEQ ID NO: 470978 - DNA, 201 bp, Homo sapiens
agcttactaatgaatctatcataatctcagctgtctgaatctaaaagagaaccagtaaaattgagatgacaagtttattgcaaaataaatgacctgaaagycacaggcattgggtggggtgggggaagggcaggtaatggtgactgaggtgactctgtgtttgggtttttgaaaagatggtagatttgaaggataaggagt

SEQ ID NO: 470979 - DNA, 201 bp, Homo sapiens
aagtgctgggattacaggcatgagccaccgcaccctgctgagctcaccattttcttactgcctattggcttgggtcactctcagttcctagaggccactcyttggtttttcctcgtggctctttttatcttcaaagatagcaacagtgtattgaaatgttcccttgctatgaatttcccttttgctactagctggagaaaa

SEQ ID NO: 470980 - DNA, 201 bp, Homo sapiens
taatgaatctatcataatctcagctgtctgaatctaaaagagaaccagtaaaattgagatgacaagtttattgcaaaataaatgacctgaaagccacaggsattgggtggggtgggggaagggcaggtaatggtgactgaggtgactctgtgtttgggtttttgaaaagatggtagatttgaaggataaggagttcagaga

SEQ ID NO: 470981 - DNA, 201 bp, Homo sapiens
tatcataatctcagctgtctgaatctaaaagagaaccagtaaaattgagatgacaagtttattgcaaaataaatgacctgaaagccacaggcattgggtgvggtgggggaagggcaggtaatggtgactgaggtgactctgtgtttgggtttttgaaaagatggtagatttgaaggataaggagttcagagaagtagaaag

SEQ ID NO: 470982 - DNA, 201 bp, Homo sapiens
cagtaaaattgagatgacaagtttattgcaaaataaatgacctgaaagccacaggcattgggtggggtgggggaagggcaggtaatggtgactgaggtgaytctgtgtttgggtttttgaaaagatggtagatttgaaggataaggagttcagagaagtagaaaggcaaataggggccgttataaataaggacagtggcat

SEQ ID NO: 470983 - DNA, 201 bp, Homo sapiens
acaagtttattgcaaaataaatgacctgaaagccacaggcattgggtggggtgggggaagggcaggtaatggtgactgaggtgactctgtgtttgggtttytgaaaagatggtagatttgaaggataaggagttcagagaagtagaaaggcaaataggggccgttataaataaggacagtggcatgagccaacagggttat

SEQ ID NO: 470984 - DNA, 201 bp, Homo sapiens
attagccacacctatttaattgaataatacacatattctatgatagataccagtaatcagaaaaattttcacatacacattaaatcatttcccccattatrttcgtatgtagcttcctgaattacagtaactgagtaactaagaaaataaaattgagacttttcggggggatttggatttcaggtgtgtttggtgcagaca

SEQ ID NO: 470985 - DNA, 201 bp, Homo sapiens
aaagccacaggcattgggtggggtgggggaagggcaggtaatggtgactgaggtgactctgtgtttgggtttttgaaaagatggtagatttgaaggataakgagttcagagaagtagaaaggcaaataggggccgttataaataaggacagtggcatgagccaacagggttatctctcatgtttatagaacatggctagat

SEQ ID NO: 470986 - DNA, 201 bp, Homo sapiens
agtgtattgaaatgttcccttgctatgaatttcccttttgctactagctggagaaaactccgctttcaaagaggttatttgattagattaggcaaatctcycttttgattaattcaaaggcagttgattggtggctttaatcacatctgcagaattcctttgccatataatatattaatggcattatccttgccatgatat

SEQ ID NO: 470987 - DNA, 201 bp, Homo sapiens
gttcccttgctatgaatttcccttttgctactagctggagaaaactccgctttcaaagaggttatttgattagattaggcaaatctcccttttgattaatkcaaaggcagttgattggtggctttaatcacatctgcagaattcctttgccatataatatattaatggcattatccttgccatgatatttcatcatattta

SEQ ID NO: 470988 - DNA, 201 bp, Homo sapiens
tttcccttttgctactagctggagaaaactccgctttcaaagaggttatttgattagattaggcaaatctcccttttgattaattcaaaggcagttgattrgtggctttaatcacatctgcagaattcctttgccatataatatattaatggcattatccttgccatgatatttcatcatatttacagcctctgtattagg

SEQ ID NO: 470989 - DNA, 201 bp, Homo sapiens
ttgctactagctggagaaaactccgctttcaaagaggttatttgattagattaggcaaatctcccttttgattaattcaaaggcagttgattggtggcttyaatcacatctgcagaattcctttgccatataatatattaatggcattatccttgccatgatatttcatcatatttacagcctctgtattagggtaggaaa

SEQ ID NO: 470990 - DNA, 201 bp, Homo sapiens
ttgccatataatatattaatggcattatccttgccatgatatttcatcatatttacagcctctgtattagggtaggaaatttggtggggtcggtggtatgygggcattttagaatactgcctaccacacattctgtattgaggggtttgcgtgtgattcagaatatatttgtattccttcagaaagattactgtggcagca

SEQ ID NO: 470991 - DNA, 201 bp, Homo sapiens
aagggcaggtaatggtgactgaggtgactctgtgtttgggtttttgaaaagatggtagatttgaaggataaggagttcagagaagtagaaaggcaaatagkggccgttataaataaggacagtggcatgagccaacagggttatctctcatgtttatagaacatggctagatctggtttccctataagttgatttcttact

SEQ ID NO: 470992 - DNA, 201 bp, Homo sapiens
ggtatgcgggcattttagaatactgcctaccacacattctgtattgaggggtttgcgtgtgattcagaatatatttgtattccttcagaaagattactgtrgcagcagggaggagaatgtggcagaaaggaaaggtactggcaggagaaaaatcccactcttagcagtctccattttgattttgtaatgtcgtttgatgtt

SEQ ID NO: 470993 - DNA, 201 bp, Homo sapiens
aaggagttcagagaagtagaaaggcaaataggggccgttataaataaggacagtggcatgagccaacagggttatctctcatgtttatagaacatggctasatctggtttccctataagttgatttcttactgttattctgagttgaatgcgtatcttttgtctcaatgaagcctgaatggcttttgatgtctctgatctg

SEQ ID NO: 470994 - DNA, 201 bp, Homo sapiens
tatgcgggcattttagaatactgcctaccacacattctgtattgaggggtttgcgtgtgattcagaatatatttgtattccttcagaaagattactgtggmagcagggaggagaatgtggcagaaaggaaaggtactggcaggagaaaaatcccactcttagcagtctccattttgattttgtaatgtcgtttgatgttat

SEQ ID NO: 470995 - DNA, 201 bp, Homo sapiens
ggcatgagccaacagggttatctctcatgtttatagaacatggctagatctggtttccctataagttgatttcttactgttattctgagttgaatgcgtaycttttgtctcaatgaagcctgaatggcttttgatgtctctgatctggaaaggttgtttatgtatctcagaataagtcattttgctaaaaaaggctactcc

SEQ ID NO: 470996 - DNA, 201 bp, Homo sapiens
cagaaagattactgtggcagcagggaggagaatgtggcagaaaggaaaggtactggcaggagaaaaatcccactcttagcagtctccattttgattttgtratgtcgtttgatgttattttttttagcagatgtttcaatcagaaatgtgtgtttaatagtatgccaactagaatgattagcctggaccagaacaagagtt

SEQ ID NO: 470997 - DNA, 201 bp, Homo sapiens
cagggttatctctcatgtttatagaacatggctagatctggtttccctataagttgatttcttactgttattctgagttgaatgcgtatcttttgtctcartgaagcctgaatggcttttgatgtctctgatctggaaaggttgtttatgtatctcagaataagtcattttgctaaaaaaggctactcctgagggagagca

SEQ ID NO: 470998 - DNA, 201 bp, Homo sapiens
aggtactggcaggagaaaaatcccactcttagcagtctccattttgattttgtaatgtcgtttgatgttattttttttagcagatgtttcaatcagaaatrtgtgtttaatagtatgccaactagaatgattagcctggaccagaacaagagttatgagtcagtcaatgaactgttcattacttcaggtcaattcatatac

SEQ ID NO: 470999 - DNA, 201 bp, Homo sapiens
atgtttatagaacatggctagatctggtttccctataagttgatttcttactgttattctgagttgaatgcgtatcttttgtctcaatgaagcctgaatgkcttttgatgtctctgatctggaaaggttgtttatgtatctcagaataagtcattttgctaaaaaaggctactcctgagggagagcagtggaaaaaagagt

SEQ ID NO: 471000 - DNA, 201 bp, Homo sapiens
attacttcaggtcaattcatatacagaataatttcatagattaggttttatttcagtcagctttatttcattttctaaagtgaacagttgtttaaacctcrgatctcattaacagcattttaataaacacagtattagggtgggtttacttccctagattgtgaatctcatggattatatgttgattcttattggcttaat

SEQ ID NO: 471001 - DNA, 201 bp, Homo sapiens
tccctataagttgatttcttactgttattctgagttgaatgcgtatcttttgtctcaatgaagcctgaatggcttttgatgtctctgatctggaaaggttrtttatgtatctcagaataagtcattttgctaaaaaaggctactcctgagggagagcagtggaaaaaagagttggaaaagtggattgtagctagttgaaaa

SEQ ID NO: 471002 - DNA, 201 bp, Homo sapiens
caatgaagcctgaatggcttttgatgtctctgatctggaaaggttgtttatgtatctcagaataagtcattttgctaaaaaaggctactcctgagggagarcagtggaaaaaagagttggaaaagtggattgtagctagttgaaaaaaggatttgaatgtcaagctttaggaattaggttcttatttggtatgttacgggc

SEQ ID NO: 471003 - DNA, 201 bp, Homo sapiens
cttttgatgtctctgatctggaaaggttgtttatgtatctcagaataagtcattttgctaaaaaaggctactcctgagggagagcagtggaaaaaagagtwggaaaagtggattgtagctagttgaaaaaaggatttgaatgtcaagctttaggaattaggttcttatttggtatgttacgggcaaccatatggacttttg

SEQ ID NO: 471004 - DNA, 201 bp, Homo sapiens
taaaaaaggctactcctgagggagagcagtggaaaaaagagttggaaaagtggattgtagctagttgaaaaaaggatttgaatgtcaagctttaggaattwggttcttatttggtatgttacgggcaaccatatggacttttgagcaggtgaaaaatacagtattaatgggtagggatagcttgggagggaaggagacatg

SEQ ID NO: 471005 - DNA, 201 bp, Homo sapiens
gtggaaaaaagagttggaaaagtggattgtagctagttgaaaaaaggatttgaatgtcaagctttaggaattaggttcttatttggtatgttacgggcaaycatatggacttttgagcaggtgaaaaatacagtattaatgggtagggatagcttgggagggaaggagacatggacattgagcttcagaaaaaccagttag

SEQ ID NO: 471006 - DNA, 201 bp, Homo sapiens
gctgggattataggcatacgccagctgcacccagcccatttttgatatctcaaatctttcatcatagtttagtcagccatatttttcctagaatttttttwaaaactattttgtcttgctatcaagctattactctgtagttttacatacattctttattttaactaaactgttatgagcaataatttgtgataacttttt

SEQ ID NO: 471007 - DNA, 201 bp, Homo sapiens
ctcaagtgatccacccaccttggcctgccagagtgctgggattataggcatacgccagctgcacccagcccatttttgatatctcaaatctttcatcatartttagtcagccatatttttcctagaatttttttaaaaactattttgtcttgctatcaagctattactctgtagttttacatacattctttattttaacta

SEQ ID NO: 471008 - DNA, 201 bp, Homo sapiens
gttttcctctgtattatagcatatctgacagtttcctttattaaaaagtacaatacattagggagagacttgatgaatttaaaattaaagtttgaaaagtrttattgactataagtgatcttcagctgtgcagttttcaacttgaggttgtcagaatgtaatattacacattatattacacacatctacagaatccaaact

SEQ ID NO: 471009 - DNA, 201 bp, Homo sapiens
tcagattttcctggttcttagtatggtataacatgttatatttggttgaatcctttgcattttaagtgttgtgttatgaagctctgcattttatttaaatmcccccttttagtaggatttatctgaaactttgcttttggggtggaggtggggcacagccttgttactactcccaggtgtatgtgaagattccagttcctt

SEQ ID NO: 471010 - DNA, 201 bp, Homo sapiens
ggaattcatcctcttttgtttcttggctcctgaagccctaattggtctgccctctctctacattttgttgtcttcttttgtttgtcttatgtatcacggcyaagggtttttaaagctgtatttagtggaaagaacagggaaaagtacattttctgcattttgtctggaagtggaagtctgcattcatttttgctgtttttc

SEQ ID NO: 471011 - DNA, 201 bp, Homo sapiens
atgagccaccatgcccggccaagagctgtttactttatccctcctccccaaatgttaattagcttcgtaattgttacttatgtattatatattacttattrtattattaatattttaacttgcttgatttcttttatgtgtagtgtataagagtgttgacatttgagaagttccctgtggaaatccattctttgatattgt

SEQ ID NO: 471012 - DNA, 201 bp, Homo sapiens
tctcatggattatatgttgattcttattggcttaatttttgaattgggcattatttattttaattctttagtcttatagttttgcatgtttgaagctataygttttcctctgaagaccacatttgccacgtctcagagatttttttgatgtttcttaatcatttaaaaataatacatgatttttcttcttgattgaaactc

SEQ ID NO: 471013 - DNA, 201 bp, Homo sapiens
ttttgaattgggcattatttattttaattctttagtcttatagttttgcatgtttgaagctatatgttttcctctgaagaccacatttgccacgtctcagwgatttttttgatgtttcttaatcatttaaaaataatacatgatttttcttcttgattgaaactctgccgttatatagaaaggacttttaaattttgccag

SEQ ID NO: 471014 - DNA, 201 bp, Homo sapiens
ttttttgatgtttcttaatcatttaaaaataatacatgatttttcttcttgattgaaactctgccgttatatagaaaggacttttaaattttgccagtggrtagatttgggactttatccttatattgtgaatttctaatttttattgtattaggtctagggacacatctgcttttactgaatataacctaggaaatacct

SEQ ID NO: 471015 - DNA, 201 bp, Homo sapiens
tcatttaaaaataatacatgatttttcttcttgattgaaactctgccgttatatagaaaggacttttaaattttgccagtggatagatttgggactttatscttatattgtgaatttctaatttttattgtattaggtctagggacacatctgcttttactgaatataacctaggaaatacctgctttttaaaatatgtgg

SEQ ID NO: 471016 - DNA, 201 bp, Homo sapiens
tgcttttactgaatataacctaggaaatacctgctttttaaaatatgtggacatttctttacgaccatacatgtggatttttttttgaaaattctatgtayatttgaatagaatgttttctctatttttggaatacagagatctgtgtgtattttatgtgtctgtttgaatcaaacccgatcattgttattatttatttca

SEQ ID NO: 471017 - DNA, 201 bp, Homo sapiens
tgtggacatttctttacgaccatacatgtggatttttttttgaaaattctatgtatatttgaatagaatgttttctctatttttggaatacagagatctgygtgtattttatgtgtctgtttgaatcaaacccgatcattgttattatttatttcatatctacttaatatcctgatttgagagctatgttaaagtctaatc

SEQ ID NO: 471018 - DNA, 201 bp, Homo sapiens
gatttttttttgaaaattctatgtatatttgaatagaatgttttctctatttttggaatacagagatctgtgtgtattttatgtgtctgtttgaatcaaamccgatcattgttattatttatttcatatctacttaatatcctgatttgagagctatgttaaagtctaatctatgcatgttatttctactcagctttactt

SEQ ID NO: 471019 - DNA, 201 bp, Homo sapiens
tctctatttttggaatacagagatctgtgtgtattttatgtgtctgtttgaatcaaacccgatcattgttattatttatttcatatctacttaatatcctsatttgagagctatgttaaagtctaatctatgcatgttatttctactcagctttactttttatatgtgacatatatttattaggtgtataaactttaatga

SEQ ID NO: 471020 - DNA, 201 bp, Homo sapiens
ctactcagctttactttttatatgtgacatatatttattaggtgtataaactttaatgactatggcttcttttggaatttacactgtaacataaaacttakgttattatgaaatattatctttgacttgttcactgctttttagtttaaattctatttctttgcaattattgctatacctgcattttttggttagcgtttg

SEQ ID NO: 471021 - DNA, 201 bp, Homo sapiens
aatgactatggcttcttttggaatttacactgtaacataaaacttaggttattatgaaatattatctttgacttgttcactgctttttagtttaaattctrtttctttgcaattattgctatacctgcattttttggttagcgtttgtgttttttcccctcaagtctgtttttgaattgtgtatgtcactgtgcattgtgc

SEQ ID NO: 471022 - DNA, 201 bp, Homo sapiens
agtattctctcttctcttacgtaaatagatccctgccttttgatcttttctacgaagaagctcatagtggattagctgagcattgcatttagttgcagtgyttctaactctttttattgggacatgaaaatagaaattccaggaagacttttttgagacagagtctcgccctgtcgcccaggctggagtgcagtggcacga

SEQ ID NO: 471023 - DNA, 201 bp, Homo sapiens
gtcttgtgtccaacagaactcaacagaatcccatgcttgtctttatatgtgaattcagttccttttgagttagtaagaaattatgcctgtgttggggtaaytgaacttttaggatgagggaattgtctgccacaattattctatgagcttaatgtttccatgtctttttcttcattttggaagttgtggaaaaattataat

SEQ ID NO: 471024 - DNA, 201 bp, Homo sapiens
aaatgttatctttgtggagtaaacatttttctttatgctgtttagcatcttcatcagattagttcagggtattgctgaatgtggttgtttggaagtaaaaygctttagttttagttatatagattttaataagatactactttctatataatttatcaggtactttaggcattttaatttgcaaatttaggacaatttgct

SEQ ID NO: 471025 - DNA, 201 bp, Homo sapiens
ttatcgcaaggacagcaccaagccatgagggatttgcccccatgacccaaacacctcccataaggccccacctccaacattggggattacatttcaacatraaattttggcggggacaaatatccaaagtatttcatttatttcatattatatatgtgtacacacacacacatacataaatgaagtctgtagtaatatgta

SEQ ID NO: 471026 - DNA, 201 bp, Homo sapiens
acacacacacacatacataaatgaagtctgtagtaatatgtaaaatatgtatatgtgttatgtagtatattttgcatgttttgaaagttgctatcttttaytagagaatttaacctatttacatttgttatccatggacttgaatgttagcttaacagacattaaaattttggttttaaataattttttataggcctagaa

SEQ ID NO: 471027 - DNA, 201 bp, Homo sapiens
tgtaaaatatgtatatgtgttatgtagtatattttgcatgttttgaaagttgctatcttttactagagaatttaacctatttacatttgttatccatggayttgaatgttagcttaacagacattaaaattttggttttaaataattttttataggcctagaaaaataatgattttttttgggtttctttttaattcagta

SEQ ID NO: 471028 - DNA, 201 bp, Homo sapiens
ttaacctatttacatttgttatccatggacttgaatgttagcttaacagacattaaaattttggttttaaataattttttataggcctagaaaaataatgrttttttttgggtttctttttaattcagtattgataatgagaactgatgcccgattcttctttttttgtaatgatctgttttcttttttatgtggctccaa

SEQ ID NO: 471029 - DNA, 201 bp, Homo sapiens
tattattaatattttaacttgcttgatttcttttatgtgtagtgtataagagtgttgacatttgagaagttccctgtggaaatccattctttgatattgtytacgattttacaagtactttttacttggtttaggaagatacattccagactgtgtatatatagtaaacattttcttttaatgccgagtgctcttcattag

SEQ ID NO: 471030 - DNA, 201 bp, Homo sapiens
atatttttcattgcagatatgattaagagaacatattggtgtttctaaaatgagaaagacattgagaagctggtcaatttaaattactttctgttattatrtacttacctctcattatattttatctgccaagattatttttagtgtaaaaggcttctgcaaaacttgccatatggtatcaaaataagcgattttagattt

SEQ ID NO: 471031 - DNA, 201 bp, Homo sapiens
gccaagattatttttagtgtaaaaggcttctgcaaaacttgccatatggtatcaaaataagcgattttagattttaacaatttagcagaaattagttatgytaatgagttgttataaacatttttcaacagattgattgtacttttcctttcgacatttacgtggtctttctattcagacatttagactaccgaggtgttg

SEQ ID NO: 471032 - DNA, 201 bp, Homo sapiens
gtaaaaggcttctgcaaaacttgccatatggtatcaaaataagcgattttagattttaacaatttagcagaaattagttatgttaatgagttgttataaayatttttcaacagattgattgtacttttcctttcgacatttacgtggtctttctattcagacatttagactaccgaggtgttgtatttgtagttaattctg

SEQ ID NO: 471033 - DNA, 201 bp, Homo sapiens
gcgattttagattttaacaatttagcagaaattagttatgttaatgagttgttataaacatttttcaacagattgattgtacttttcctttcgacatttaygtggtctttctattcagacatttagactaccgaggtgttgtatttgtagttaattctgggttctgttaatgcactaaacatatttagataccttgggagt

SEQ ID NO: 471034 - DNA, 201 bp, Homo sapiens
tttaacaatttagcagaaattagttatgttaatgagttgttataaacatttttcaacagattgattgtacttttcctttcgacatttacgtggtctttctsttcagacatttagactaccgaggtgttgtatttgtagttaattctgggttctgttaatgcactaaacatatttagataccttgggagttataaaaaatta

SEQ ID NO: 471035 - DNA, 201 bp, Homo sapiens
ctgtgcagaagttcccgctttgtgcagaacattccaaacactggagatagggatgatgcagataaatactaaactcctttaatgtgtatatcagaatatayagaatatgttacggtgacaaaggatcccaattcttagtggcatcagtcacaaaggttcatttcttgctcatgctatgtgttcatcacagatcggtgtggg

SEQ ID NO: 471036 - DNA, 201 bp, Homo sapiens
gcatttatgggagccaggcaggggtagggtatggggttgaaatgtatttcctatggataagcacaggactactttatatcacttaatccaagacccttttrctggtgaggaatccagcatttaaatttatgtatgtatatgataaagctagaatttttccagatctgagactcaaagctctttgtgttttcgtttatactc

SEQ ID NO: 471037 - DNA, 201 bp, Homo sapiens
aaaatacctaacttgattggatttgtggtactcagtagctataatgaccattttaaccccaatatgagaaggattcactcatcacactgttgtatacttcrtagctattacttctttaatccccaaggacttgtttaacaaagtgttcttcagtttctacttcctagttcctttgtggaactggtaaaaatttaaaatatc

SEQ ID NO: 471038 - DNA, 201 bp, Homo sapiens
gtcaagctttaggaattaggttcttatttggtatgttacgggcaaccatatggacttttgagcaggtgaaaaatacagtattaatgggtagggatagcttrggagggaaggagacatggacattgagcttcagaaaaaccagttagtaaaatatttcagatgatacattggtaatagaaaaggatccgttgaaatgtgagg

SEQ ID NO: 471039 - DNA, 201 bp, Homo sapiens
tatatttcatttcatttgattccttataaatttgtaaggaagatagagcttgtattatttcagtgaagttgaaaatagagtacagaaaaattaagatacakcacccccaaaactgagaacttctgacataatacactgttggaaatacttacttcagagtgaagaaaatattggaagttaggcttgttaattgctctgcat

SEQ ID NO: 471040 - DNA, 201 bp, Homo sapiens
gttgttataaacatttttcaacagattgattgtacttttcctttcgacatttacgtggtctttctattcagacatttagactaccgaggtgttgtatttgyagttaattctgggttctgttaatgcactaaacatatttagataccttgggagttataaaaaattacctgttttgtaaaagctggttattacactttatca

SEQ ID NO: 471041 - DNA, 201 bp, Homo sapiens
aggttatcattctaattcctggctggagtgcagtggtgcgatcatagctaactctagcttcgacctcccacctccgtctcccaagtagctgggcccatagstgtgtgccaccacacccaactccttttttaaaatttttgatagagacagcatctcactatgttgtccaggctggtctcaaacttctgagctcaagcagtt

SEQ ID NO: 471042 - DNA, 201 bp, Homo sapiens
gccttcaacttgcctccatattttattgccagctgttacctagctatgataatcgtgagggaagcaagtacaggatgtgtgtacattattacattagcttsttcgtgatacaaagttaggacttatttattatgccacttgcgttgtaatacagtggcaagtataaaatgcccttattctgtattaactgaaatttgtaga

SEQ ID NO: 471043 - DNA, 201 bp, Homo sapiens
atttagataccttgggagttataaaaaattacctgttttgtaaaagctggttattacactttatcaatgaagaaaaatatttattttctgtgtttctaatrcattaatacccttgagtgccaaaatagcactgaaatgttattctgtatacttataatattatataaaattaaagtgtcacaacagtaattactgtttatg

SEQ ID NO: 471044 - DNA, 201 bp, Homo sapiens
acctgagaaatgaaaattaatcttctttgctaaatctcatagagatattttaagttgctaatgttacttagatgttcattaacttagtgagttacattaartagagaagatgccttttttttttttttctggacgaagtcttgctctgtagcccaggctgtagtgcagtggtatgatctcggctcaccgcaacctctgcct

SEQ ID NO: 471045 - DNA, 201 bp, Homo sapiens
cttgggagttataaaaaattacctgttttgtaaaagctggttattacactttatcaatgaagaaaaatatttattttctgtgtttctaatgcattaatacycttgagtgccaaaatagcactgaaatgttattctgtatacttataatattatataaaattaaagtgtcacaacagtaattactgtttatgagttatttag

SEQ ID NO: 471046 - DNA, 201 bp, Homo sapiens
tacctgttaggaggttgttgtttaacctgacctgaaattcccatgaataagaacctgttttttttctttttttttttttttgacagagtcttgctctgcckcccaggctggagtgcagtggtgcgatcttggctcgctgcaacttccgcctcccaggttcaagtgattctcctgtctcagcctcccaagtagctggagtag

SEQ ID NO: 471047 - DNA, 201 bp, Homo sapiens
tctcgatctcctgacctcgtgatccacccgccttggccttccaaagtgccgggattacaggtgtgagccacccggcccagccaaatttttgtatctctttsttttcttctttctgattcagccctcaggagtcacttagctttgttatgttgattcagtgcagtagactgatgacagtgaggaagagtttgatagtatgtg

SEQ ID NO: 471048 - DNA, 201 bp, Homo sapiens
ggactgcaggcacgtactaccatgcctgactaatttttgtatttttagtagagacggggtttcaccctgttagccaggatggtctcaatctcttgacctcrtgatctgcctgcctgggcctcccaaagtgctgggattacagacatgaaacaccgcacctggcccagggaatttctaatatttgagaagatgttattttta

SEQ ID NO: 471049 - DNA, 201 bp, Homo sapiens
tgatccacccgccttggccttccaaagtgccgggattacaggtgtgagccacccggcccagccaaatttttgtatctctttcttttcttctttctgattcrgccctcaggagtcacttagctttgttatgttgattcagtgcagtagactgatgacagtgaggaagagtttgatagtatgtgatatacagatttacacata

SEQ ID NO: 471050 - DNA, 201 bp, Homo sapiens
gatgggtgtggtggctgatatatgtaatcccagcacttttgggagactgagtcaggaggatcacttaatcctcatttaaaaggagtttgagaccagcctgrgcaacaaagtgaggccttgtctctacaaaaaaattagctgggtgtggtggtaggcacctgtagtcccaactactctggagactgagctgagagaagattg

SEQ ID NO: 471051 - DNA, 201 bp, Homo sapiens
caggtgtgagccacccggcccagccaaatttttgtatctctttcttttcttctttctgattcagccctcaggagtcacttagctttgttatgttgattcartgcagtagactgatgacagtgaggaagagtttgatagtatgtgatatacagatttacacataaaacattgaaaacaattataattttaactactgtagtc

SEQ ID NO: 471052 - DNA, 201 bp, Homo sapiens
tgagccacccggcccagccaaatttttgtatctctttcttttcttctttctgattcagccctcaggagtcacttagctttgttatgttgattcagtgcagkagactgatgacagtgaggaagagtttgatagtatgtgatatacagatttacacataaaacattgaaaacaattataattttaactactgtagtccctggt

SEQ ID NO: 471053 - DNA, 201 bp, Homo sapiens
ccagccaaatttttgtatctctttcttttcttctttctgattcagccctcaggagtcacttagctttgttatgttgattcagtgcagtagactgatgacartgaggaagagtttgatagtatgtgatatacagatttacacataaaacattgaaaacaattataattttaactactgtagtccctggttaattagcagaat

SEQ ID NO: 471054 - DNA, 201 bp, Homo sapiens
  misc_feature (1)...(201): n = A,T,C or G
ttgattcagtgcagtagactgatgacagtgaggaagagtttgatagtatgtgatatacagatttacacataaaacattgaaaacaattataattttaactnctgtagtccctggttaattagcagaatataaagtcagtgtagtaacatgtgaagatatccacagtaatgttagcagggtccaactgtctgtgttacatga

SEQ ID NO: 471055 - DNA, 201 bp, Homo sapiens
gtttgatagtatgtgatatacagatttacacataaaacattgaaaacaattataattttaactactgtagtccctggttaattagcagaatataaagtcartgtagtaacatgtgaagatatccacagtaatgttagcagggtccaactgtctgtgttacatgaggctccagttatctcagctaagctgtttatgagccac

SEQ ID NO: 471056 - DNA, 201 bp, Homo sapiens
aaggaagatagagcttgtattatttcagtgaagttgaaaatagagtacagaaaaattaagatacagcacccccaaaactgagaacttctgacataatacamtgttggaaatacttacttcagagtgaagaaaatattggaagttaggcttgttaattgctctgcatggttcataattactctttcttattaactatttaag

SEQ ID NO: 471057 - DNA, 201 bp, Homo sapiens
taccagtgcatgtaaatattatgtttatattctactgcagtctattaaatgttcagtagcgttatatttaaaaaaccaatgtgcatactttaatttaaaartactttattgctaaaaaatgctactgatcatctgagctttcagtaaattgtaagattttttgctgatagaggatgttggtggctgctgactgatcccagc

SEQ ID NO: 471058 - DNA, 201 bp, Homo sapiens
tactcattgatacgtgggctgcaggatagatgtatcgtactggcaggcatgaaagtaacattcttctttctgaacatatccatcaaagccctcgaatgacmtggtccattgttagtgagtgctaatattttgaaaggaatgttttttccttagcagtaggtcttgacagtggactgaaaatattcagtaagccaacctcta

SEQ ID NO: 471059 - DNA, 201 bp, Homo sapiens
caacatatttcagaaatcattgtcctttaaagggtattaatgtgatttattgggtttattgttgtttgtagatgtctaaaatgaaagagcagaagttgctrtatcagagaacgccgtcgtggaagagagtttaagaactgtctggggtttgatgtctttgtgtcagttctttaactgtaagattctaattggggagaatca

SEQ ID NO: 471060 - DNA, 201 bp, Homo sapiens
cgtactggcaggcatgaaagtaacattcttctttctgaacatatccatcaaagccctcgaatgacctggtccattgttagtgagtgctaatattttgaaakgaatgttttttccttagcagtaggtcttgacagtggactgaaaatattcagtaagccaacctctaaacagatgtgctgtcatccaggagactgttgttcc

SEQ ID NO: 471061 - DNA, 201 bp, Homo sapiens
tttttgtagttttagtagagacggggtttcgccatgttggctaggatggtctcaatctcttgacctcgtgatccacccgcctcagcctcccaaagtgctgrcattacaagcgtgagccactgtgcccggccagctctttatagtttaagaggaaggataaaccttaagagatcacaaccatatatttgtgtcaggggtcca

SEQ ID NO: 471062 - DNA, 201 bp, Homo sapiens
gggggaagttttttgaagatgggagaaagaggacaacttttatatatttcatttcatttgattccttataaatttgtaaggaagatagagcttgtattatktcagtgaagttgaaaatagagtacagaaaaattaagatacagcacccccaaaactgagaacttctgacataatacactgttggaaatacttacttcagag

SEQ ID NO: 471063 - DNA, 201 bp, Homo sapiens
agctatagagctatattagttaagaaggtatttttaaagtaaaatttgtaggtttttagcttagtctccatttaaaatatgttctgttttcttaacttcargatatgtgtgtagtttgtggcagttttggccaaggagcagaaggaagattacttgcctgttctcagtgtggtcagtgttaccatccatactgtgtcagta

SEQ ID NO: 471064 - DNA, 201 bp, Homo sapiens
caggttatcattctaattcctggctggagtgcagtggtgcgatcatagctaactctagcttcgacctcccacctccgtctcccaagtagctgggcccatargtgtgtgccaccacacccaactccttttttaaaatttttgatagagacagcatctcactatgttgtccaggctggtctcaaacttctgagctcaagcagt

SEQ ID NO: 471065 - DNA, 201 bp, Homo sapiens
actactgtagtccctggttaattagcagaatataaagtcagtgtagtaacatgtgaagatatccacagtaatgttagcagggtccaactgtctgtgttacrtgaggctccagttatctcagctaagctgtttatgagccacactcacaaaaaagatcaccaaaagttaagtctttttggtatatgtataggaacacctttc

SEQ ID NO: 471066 - DNA, 201 bp, Homo sapiens
  misc_feature (1)...(201): n = A,T,C or G
ttacatgaggctccagttatctcagctaagctgtttatgagccacactcacaaaaaagatcaccaaaagttaagtctttttggtatatgtataggaacacntttctattagggcctgtttcaagcagcatttttggtgctttggatacaaagatagtatggtgcctcaattgaaggatcttggactaggatgaggaaaaga

SEQ ID NO: 471067 - DNA, 201 bp, Homo sapiens
tcaccaaaagttaagtctttttggtatatgtataggaacacctttctattagggcctgtttcaagcagcatttttggtgctttggatacaaagatagtatrgtgcctcaattgaaggatcttggactaggatgaggaaaagataaactgatcatgtaatggcataagcaagtaagtaccatgtaatggtgtaaacaaaaat

SEQ ID NO: 471068 - DNA, 201 bp, Homo sapiens
ttaagtctttttggtatatgtataggaacacctttctattagggcctgtttcaagcagcatttttggtgctttggatacaaagatagtatggtgcctcaaytgaaggatcttggactaggatgaggaaaagataaactgatcatgtaatggcataagcaagtaagtaccatgtaatggtgtaaacaaaaatttatgttaga

SEQ ID NO: 471069 - DNA, 201 bp, Homo sapiens
gtattatttattagcaggtactttgcagaaaatatttaaatctgtcatgttttagtgaactattatataatagtgtcagcagtgattttgacttgcatttrtggacttcatcatcaaatcctatgaatttttgttagatatagaggcagaatatactgaattgccattctacatagcaatttagtgacttggcagtggtaa

SEQ ID NO: 471070 - DNA, 201 bp, Homo sapiens
tgctttggatacaaagatagtatggtgcctcaattgaaggatcttggactaggatgaggaaaagataaactgatcatgtaatggcataagcaagtaagtaycatgtaatggtgtaaacaaaaatttatgttagatagtcatttcccacagagagatgtcatactgtatagtacagggcccatcaaactctcttcaaagaaa

SEQ ID NO: 471071 - DNA, 201 bp, Homo sapiens
tttttgacaaaagacagcagaattttcttggagttttacgtatgtgtgtgcctgttggtgtttctgagttgtctgcttctctagcaacttttcttgtatayatgagtcagaaaggaaacctagggaattcatcctcttttgtttcttggctcctgaagccctaattggtctgccctctctctacattttgttgtcttcttt

SEQ ID NO: 471072 - DNA, 201 bp, Homo sapiens
aactgatcatgtaatggcataagcaagtaagtaccatgtaatggtgtaaacaaaaatttatgttagatagtcatttcccacagagagatgtcatactgtayagtacagggcccatcaaactctcttcaaagaaaatgatgctcaaagtggacttgggagaatgaggaagagtttgtgaatcattctaagggaaaactgaat

SEQ ID NO: 471073 - DNA, 201 bp, Homo sapiens
taatatattaatggcattatccttgccatgatatttcatcatatttacagcctctgtattagggtaggaaatttggtggggtcggtggtatgcgggcattwtagaatactgcctaccacacattctgtattgaggggtttgcgtgtgattcagaatatatttgtattccttcagaaagattactgtggcagcagggaggag

SEQ ID NO: 471074 - DNA, 201 bp, Homo sapiens
aatggtgtaaacaaaaatttatgttagatagtcatttcccacagagagatgtcatactgtatagtacagggcccatcaaactctcttcaaagaaaatgatrctcaaagtggacttgggagaatgaggaagagtttgtgaatcattctaagggaaaactgaataagtaaatgcaacattttacataatttcttctgacttct

SEQ ID NO: 471075 - DNA, 201 bp, Homo sapiens
aatcattctaagggaaaactgaataagtaaatgcaacattttacataatttcttctgacttcttatgtgttcacttgccctagactgcccctcttgtttgrggcttatttctgtgcgttttaccacttgcaagataatggaggcaggttgaaatgggaaagataccagatgactaattttttttcgcccacatttccatct

SEQ ID NO: 471076 - DNA, 201 bp, Homo sapiens
aaactgaataagtaaatgcaacattttacataatttcttctgacttcttatgtgttcacttgccctagactgcccctcttgtttggggcttatttctgtgygttttaccacttgcaagataatggaggcaggttgaaatgggaaagataccagatgactaattttttttcgcccacatttccatcttttgttaagaaattt

SEQ ID NO: 471077 - DNA, 201 bp, Homo sapiens
aactgaataagtaaatgcaacattttacataatttcttctgacttcttatgtgttcacttgccctagactgcccctcttgtttggggcttatttctgtgcrttttaccacttgcaagataatggaggcaggttgaaatgggaaagataccagatgactaattttttttcgcccacatttccatcttttgttaagaaatttg

SEQ ID NO: 471078 - DNA, 201 bp, Homo sapiens
tttatttagttctgccttctttcccctttccccctgtgaagtttgaagtgatgctattttgactgcttgacttgttatgtaacattaacaaatttctaatrttgaatcatcctggcattctgattatattcaataggattgttctcagtttttattttcattcatagtttttgacaatgtttgttggaattctgagtcagg

SEQ ID NO: 471079 - DNA, 201 bp, Homo sapiens
gaaggaagattacttgcctgttctcagtgtggtcagtgttaccatccatactgtgtcagtattaaggtaaacatccttaaattgagttaacaaatatgtaytgaatttttatttggttttagtagtaacatgagctcccagttctcacaattaagtattatgattattaaacatatgtgacagtatttaaatacttaaaat

SEQ ID NO: 471080 - DNA, 201 bp, Homo sapiens
tactcccttttcttgctgagtattaataaaactgtggatgcaccatggttgtagacctgtgcacttttttttcttctttttttttctgagacaggttatcrttctaattcctggctggagtgcagtggtgcgatcatagctaactctagcttcgacctcccacctccgtctcccaagtagctgggcccataggtgtgtgcc

SEQ ID NO: 471081 - DNA, 201 bp, Homo sapiens
ctctacagtttaacgtgtatgcatttatcgattgcttatgtttctccttgcattctttggcctactggttttggttgtttatagctatagaatatagaatyccttatggttatccatttctccttttaagtagagtgatagttgttagaagaaaaataaccccccaatactttcttctagtgttaattcttaaagtgtgat

SEQ ID NO: 471082 - DNA, 201 bp, Homo sapiens
taggtcactcaataattggctatccatgtaaaaaatataggtagattgatgctcatgccacatggaaaaataaccttgaggtagattaataagcaatgccrttgttatttatttatcctgggctatactaccactaccactgttattttcattagacaggacagagtgaatgtacactgagaaagccagcatactgtaaat

SEQ ID NO: 471083 - DNA, 201 bp, Homo sapiens
attctatatttaatattctggaatatggctgtttaatttagactaatcaaggattttaaggaattctagattatactttattttctttcatgactggaagwactattgttttttaacctccctacctccccctgatatcatccaagatattgaggtataaatatacctcatttgacagtttgataatatagaccaccaatt

SEQ ID NO: 471084 - DNA, 201 bp, Homo sapiens
aagtgcaaggtgtcggtacagcaagataatcctagatatttatttgaccttggaatgccgttaggcatatatctacttaaaaattgatgtggctgggcatrgtggctcacacctgtaatcccagcactttgggaggctgaggcaggcacataacttgagctacaagttcgagaccagcctgggcaatgtgacaagaccctg

SEQ ID NO: 471085 - DNA, 201 bp, Homo sapiens
ggtacatgcatgattaaaagtgaagaactaaagatggagactggatagatagtatttttattttttaaaaaaggaattaagtagttgattagaaagctttstgtatgtggtggtgcttgtcgatttgtaagtttagtggggtgatttgtgctgaccatttggtgaaccctctggtttccgtatctttagatgttcttcttg

SEQ ID NO: 471086 - DNA, 201 bp, Homo sapiens
gagtggtcttgaactcctgggctcaagtgatccacccaccttggcctgccagagtgctgggattataggcatacgccagctgcacccagcccatttttgayatctcaaatctttcatcatagtttagtcagccatatttttcctagaatttttttaaaaactattttgtcttgctatcaagctattactctgtagttttac

SEQ ID NO: 471087 - DNA, 201 bp, Homo sapiens
gccacctccacttgcttcctcctccttccctccgctgctctttccccacggcccagaatttagctgctctgacagccacttttgagaccagctggctttgyagtcacttcagagagctggagcggctgcccactgggccctgactgggagtcccctgccagctcctgatcaggcgctgcgccctggtggcagtgatgactg

SEQ ID NO: 471088 - DNA, 201 bp, Homo sapiens
ttgcagtgagccaagacagtgccagtgcactccagcctcggtgacagcgcaaggctccgtctcaataattaaaaaaaaaaaaaaaaaaaaaaggccgggcrcagtggctcaagcctgtaatcccagcactttgggaggctgaggcgggcagatcacctgaggtcaggagttttgagatcagccttggcaacacggtgaaac

SEQ ID NO: 471089 - DNA, 201 bp, Homo sapiens
gcagggattggggagggagttgtgggatcagagcttgtaatgaagaccttcctttatccagagttatgtttaccgaggacctgaagctgcctgcaagcttygatgcacgggaacaatggccacagtgtcccaccatcaaagagatcagagaccagggctcctgtggctcctgctgggtaaggccctgctggctggcgggga

SEQ ID NO: 471090 - DNA, 201 bp, Homo sapiens
agctctgaaaatctgaggaacattgtaggaaaggtttgttaagcatctcttaagtgccatgatgagcataacagccggccgtggtggctcacgcctgtaakcccagcactttgggaggccaaggtgggaggatgacaaggtcaggagttcaagaccagcctggccaacatgctgaaacctcacctctactaaaaatacaaa

SEQ ID NO: 471091 - DNA, 201 bp, Homo sapiens
cagatgctagatcaaataagctctgaaaatctgaggaacattgtaggaaaggtttgttaagcatctcttaagtgccatgatgagcataacagccggccgtsgtggctcacgcctgtaatcccagcactttgggaggccaaggtgggaggatgacaaggtcaggagttcaagaccagcctggccaacatgctgaaacctcac

SEQ ID NO: 471092 - DNA, 201 bp, Homo sapiens
taagtgcctggtaagcttgcccttgcttaagaactcaaaacatagctgtgctctatttttttgttgttgttgtgactgacagagtgagattccgtctcccrggctggagtgcagtggcgccttctcagctcactgcaacctgcagcctcctagattcaagcgattctcctgcttcagccttccgagtagctgggatgacag

SEQ ID NO: 471093 - DNA, 201 bp, Homo sapiens
gaaaccaagtggtcaggagttgtttctgacccactgatctctactaccacaaggaaaatagtttaggagaaaccagcttttactgtttttgaaaaattacagcttcaccctgtcaagttaacaaggaatgcctgtgccaataaaaggtttctccaacttgaagtctactctgatgggatctcagatcctttgtcactgcct

SEQ ID NO: 471094 - DNA, 201 bp, Homo sapiens
gactggctgaccgtggcgtgccacgaggcacggtcactgccctccccaaccccgagctcggttcattttccaggatacaattcctacagcgtctccaatarcgagaaggacatcatggccgagatctacaaaaacggccccgtggagggagctttctctgtgtattcggacttcctgctctacaagtcaggtgcgtgctga

SEQ ID NO: 471095 - DNA, 201 bp, Homo sapiens
ggaaaccaagtggtcaggagttgtttctgacccactgatctctactaccacaaggaaaatagtttaggagaaaccagcttttactgtttttgaaaaattacagcttcaccctgtcaagttaacaaggaatgcctgtgccaataaaaggtttctccaacttgaagtctactctgatgggatctcagatcctttgtcactgcc

SEQ ID NO: 471096 - DNA, 201 bp, Homo sapiens
aaagtgaaactccgcctccaggaaaaaaaaaaaaaaaaaccacacacacacatacaaactaatactacacattttgcagatttcagaaatgaaccgagttyccaggcagaggttcacggtggtgcttctcttgctttaaaagctgagttgggcagatgttgaggcaggagagtggggcaagtggctcatgacgcctctaat

SEQ ID NO: 471097 - DNA, 201 bp, Homo sapiens
gctggagtgcagtggtgggatattggctcactgcaacctctgcctcctgggttcaagcaattctcctgcctcagtctccccagtagctaagactacaggcrtgtgccaccacgcccagctaatttttgtatttttagtagagatggggttttgccatgttggacagcctggtctcaaacgcctcacctgttgatctgcctt

SEQ ID NO: 471098 - DNA, 201 bp, Homo sapiens
cttctccgtgggggctgtaggttgactccgctttctcccgggtcccatcagggtgcagaccgtactccatccctccctgtgagcaccacgtcaacggctcycggcccccatgcacgggggagggagatacccccaagtgtagcaagatctgtgagcctggctacagcccgacctacaaacaggacaagcactacggtaagg

SEQ ID NO: 471099 - DNA, 201 bp, Homo sapiens
agcttcgatgcacgggaacaatggccacagtgtcccaccatcaaagagatcagagaccagggctcctgtggctcctgctgggtaaggccctgctggctggyggggaagcgctggagagaaagtgggagcaacactggagagtcttgggggattcggggtggggacaactctgacaaggcaagttatagaaactttctgagt

SEQ ID NO: 471100 - DNA, 201 bp, Homo sapiens
tggactgttgaaaaatggccctgaccctgagtcatgtcggctctggaccacgcctccctcctttgtcccataccccacgtgtgtgcatgagtgtgtgtgcwtgtgtatgaatatatggttgtgtgcacgtggaggtgtgtgggggagtaagtgagcttcggaagtgttcaaaaccagctagcccctgtgacgcccgccgtg

SEQ ID NO: 471101 - DNA, 201 bp, Homo sapiens
tcccaggtcggtctgtgcacactgactccaggaatgggaagccagccctcactgtggcccacagaacattgtcctggactgttgaaaaatggccctgaccytgagtcatgtcggctctggaccacgcctccctcctttgtcccataccccacgtgtgtgcatgagtgtgtgtgcttgtgtatgaatatatggttgtgtgca

SEQ ID NO: 471102 - DNA, 201 bp, Homo sapiens
cctgctggtgttggccaatgcccggagcaggccctctttccatcccctgtcggatgagctggtcaactatgtcaacaaacggaataccacgtggcaggtargctgtggggctgcgtcctatgtatgtcccctcccaggtcggtctgtgcacactgactccaggaatgggaagccagccctcactgtggcccacagaacatt

SEQ ID NO: 471103 - DNA, 201 bp, Homo sapiens
ctctctctgggctctggccgcctggcccccggggacccacacgaggtcatggcgtgctgcgggcagtggggcggggatcccatagacacctcagctccttagagttctccgcctgggccaggacgagcatgggggtccccactgatgcccgagacggtgcccctgtgtgtgtgagccctcgacccacataacagagaggtg

SEQ ID NO: 471104 - DNA, 201 bp, Homo sapiens
ttctctgttctacccaccgcacagccttaaaccctggacctacggccaggctgtgagctcctcctaagtgccaggcagtcaggagttcccttttgctgtgrgggcagactctgagcagcttcagagccaacgcctgcaacagttcccacagcatcgcgccagatcctgtgatgggaagggtgaccgggcagggggcttgcc

SEQ ID NO: 471105 - DNA, 201 bp, Homo sapiens
tggactcggtctcgtccagcacagccccttggctctctctctgggctctggccgcctggcccccggggacccacacgaggtcatggcgtgctgcgggcagkggggcggggatcccatagacacctcagctccttagagttctccgcctgggccaggacgagcatgggggtccccactgatgcccgagacggtgcccctgtg

SEQ ID NO: 471106 - DNA, 201 bp, Homo sapiens
agccaacgcctgcaacagttcccacagcatcgcgccagatcctgtgatgggaagggtgaccgggcagggggcttgcccgtggaggtgtgccccacggctcyagaagccttgtggtgttgaggactgtgctagtgggcccacagcaggagtggccagggatgagtgacttaaggtcttttaaggatgagtctgactatattg

SEQ ID NO: 471107 - DNA, 201 bp, Homo sapiens
gaaggccctggactcggtctcgtccagcacagccccttggctctctctctgggctctggccgcctggcccccggggacccacacgaggtcatggcgtgctkcgggcagtggggcggggatcccatagacacctcagctccttagagttctccgcctgggccaggacgagcatgggggtccccactgatgcccgagacggtg

SEQ ID NO: 471108 - DNA, 201 bp, Homo sapiens
actttctggccagatggattgtttgagcaattaaccatcatggctttatttgcctttataaactgggggttgagacagaggggctgctgagaggtgctagycaggtgtacaggcctctggcaggacctgcctggcgtccatgctgcaggcacgaggcttgccttgccccaggtctgcctcgcccagctggggcttctccgt

SEQ ID NO: 471109 - DNA, 201 bp, Homo sapiens
gtgtcagtgagctgtcttaattttgtcatttaattgtggtaaaatacacgtaacagaaatgtaataatcttagcaatcttcttttgttttctttttctttytttttttttttttttttttttggagatggagtcttgctctgtcacccaggctggagtgcagtggtgggatattggctcactgcaacctctgcctcctggg

SEQ ID NO: 471110 - DNA, 201 bp, Homo sapiens
atggtgaaaccctgtctttactaaaaatacaaaaattagccgggtgtggtggtgcatgcctgtaatcccacctactcaggaggctgaggcacgagaatcgmttgaactcaggaggcagaggttgcagtgggcagagatctcgccactgcactccagcctggatgacacagtgaaattctgtccactcccaccctcccgtcc

SEQ ID NO: 471111 - DNA, 201 bp, Homo sapiens
catttagtcagtggcagagccagatccaaatgcaggtctcctgactccaagtgcagggctcattttatcgtccggttgcagcacgctggcggccccttgagccccaacctggataccataggggaggagcagagaagccaggaacaccacagccctgggccaaggtgcggggctgaaagaacttcccagcgctcagcctgg

SEQ ID NO: 471112 - DNA, 201 bp, Homo sapiens
ttctggtggcctctatgaatcccatgtaggtaagtgtgtccccttggccactttctggccagatggattgtttgagcaattaaccatcatggctttatttrcctttataaactgggggttgagacagaggggctgctgagaggtgctagccaggtgtacaggcctctggcaggacctgcctggcgtccatgctgcaggcac

SEQ ID NO: 471113 - DNA, 201 bp, Homo sapiens
actcctgacctcgtgatccgcctgcctcagcctcccaaagtgctgggattacatgcgtgagccattgtgtccggcctttttttttttttttttttttttttgagacagagtctcgctctgttgcccaggctggagtgcagtggtgtgacctcagcttactgcaacctccgcttcctggattcaagtgattctcctgcctca

SEQ ID NO: 471114 - DNA, 201 bp, Homo sapiens
tactcgtgcaaaaatttaaaaaattgcaacctctggcataaatgggttgagtgacacttttcctgtttttattgttggtcagtgatggcatatttgctggktttttttgttttttttttgaaacggagtctcactgtgtcgccaggctggagtgcagtggtgtaatctcggctcactgtaacctccgcctcccgggttcaa

SEQ ID NO: 471115 - DNA, 201 bp, Homo sapiens
gacacactccctctatcgctcaggctggagtgcagtggtgcgatctcggttcactgccacctccgcctctcatgttgaagcaattctcctgtctcagcctscctcccaagtagctgggattgccagtgcccatcaccacacctggcttttttttttttttttgtatttttagtagagacgggctttcaccatgttagccag

SEQ ID NO: 471116 - DNA, 201 bp, Homo sapiens
aattagctgggcatggtggcacatgcctgtaatcccagctacttgggaggctgaggcaggagaatcgcttgaacccgggaggcggaggttgcagtgagccragacagtgccagtgcactccagcctcggtgacagcgcaaggctccgtctcaataattaaaaaaaaaaaaaaaaaaaaaaggccgggcgcagtggctcaag

SEQ ID NO: 471117 - DNA, 201 bp, Homo sapiens
ccaccgcagcgtaagtgaccttggcggggacggtgctacccggccgccgagacgggttcctctgcgccctcagtcgggcccaggcgcggccccgcggcgtmcctgggggccggcggggagccgggaccctcgggactgtccctgacgggcgggctggggtgggagtccgcgcgctccgaagcgtcggcgagaaaagcagaa

SEQ ID NO: 471118 - DNA, 201 bp, Homo sapiens
gagccagtggaacagcgggagacctgtgctagttttacagattgcctccttatgacgcggctcaaaaggaaaccaagtggtcaggagttgtttctgacccmctgatctctactaccacaaggaaaatagtttaggagaaaccagcttttactgtttttgaaaaattacagcttcaccctgtcaagttaacaaggaatgcct

SEQ ID NO: 471119 - DNA, 201 bp, Homo sapiens
ttttctgttgctcttggttggattgggaagtgaattgaagggaggtcacgtttcaggggtgccttgggatgtctgtcagtgattttcttttctttcttaawttctttttctttcttttttttttttttttgagacacactccctctatcgctcaggctggagtgcagtggtgcgatctcggttcactgccacctccgcctc

SEQ ID NO: 471120 - DNA, 201 bp, Homo sapiens
agcctcatctccgcagccggaagcagagcccttggctgactggaaaaaccagagaggccccgggagtgggtggatggccagcccagccccacctctcagcstcaacctccaccagcccacaccgagcttgtttgtctgtgtcctgtcgaaactaggactcctggattgtaacttttcttacatttccctgtcccctgggtc

SEQ ID NO: 471121 - DNA, 201 bp, Homo sapiens
aattttcttaaatctggtaatgagttgtggttgtgtagagtaacataccgtcctttcgagatatggactgaaacattgagagggaggagttacaggtatgycgattcttcttttctctctctcctttttttttttgaggtggagtctgactctctcacccaggctggagtgcagtggcaagatctcagctcactgcaacct

SEQ ID NO: 471122 - DNA, 201 bp, Homo sapiens
acaaaacaattctgtgttgcatgtggtactttttgtgtgtgaggagtccagtgtgaagattcagacttcaggcagccacttgtacaagcactgtcctgttkcctctctggcctcacctaggtaacgctgattcctccacggaggatgtgcttctgagtggtccgttgggtgctgtgctgatgagcatcacccagcatttta

SEQ ID NO: 471123 - DNA, 201 bp, Homo sapiens
gggatcaaattccactctgtgtttagacatttttttctttctttttttttttgagacagagtttcactctgtcacccaggctggaatgccgtggcacaatytcagctcactgcaaccttacctcccaggttcaagcaatgttcctgcctcagcctccggagtagctgggattagaggcatgcaccaccatgcctggctaat

SEQ ID NO: 471124 - DNA, 201 bp, Homo sapiens
ggccaaaatggtgaaaccctgtctttactaaaaatatgaaaattagctgggcatgatggcacatgcctgtaatcccgctgctcgggaagctgaggtaggaraatagcttgaacccaggaggcagaggttgcagtgagccgagatcatgccattgcactccagcctgggggacagagtaagactccgtctcaaaaaaacaaa

SEQ ID NO: 471125 - DNA, 201 bp, Homo sapiens
cagggtttcaccaccttagtcaggctggtctctaactcctgacctcaggtgatccaaccgcctcggctacaggcatgcgccaccgtgccccaccaactaaytgcttttttaatggttgcttcatattctatttaaccacttaccgtaatttaacagttactctgttattggatacttgattcatttccaggacatgcagat

SEQ ID NO: 471126 - DNA, 201 bp, Homo sapiens
caaaactgaaataataggaacatactcacttttttttttttcttaaaagtaagggtatgttgtgaaaaaaagtctccccaccgtagtgaccgactgccgtrcatcttccttggcattttgcatgtagtggcaggagtgttcctacatgtgtagattgctgagagggtcagatgcttatggtcctcagtcacccacagcttg

SEQ ID NO: 471127 - DNA, 201 bp, Homo sapiens
agatgctggtgcttttttttggtttttgagagagtctcactctgtcacccaggctggagtgcagtggcacgatcttggctcactgcaaactctgtctcccrggttcaagcgattctcatgccacagcctcctgagtagctggggccacaggcttgcaccaccgtgcacggctaatatttgtatttttagtagagactgggt

SEQ ID NO: 471128 - DNA, 201 bp, Homo sapiens
agaccaaggtctagagatgacatctgctcgcagctgttcttccaccagcccgcatcctggaaaggggtcttgtggcacacaagagttcacatccttccctsgtgaaataaggactttgtgttcatcatctcttgtaagaagcagagcagaaagcacagaattaagaaataaaagggaagtgggtgcctatataaagggaag

SEQ ID NO: 471129 - DNA, 201 bp, Homo sapiens
cctgccaccatgcctggctatttttttgtatttttagtagaaacggggtttcaccgtgttatccaggatggtctcgatctcctgacctcgtgattcgcccrcctcagcctcccaaagtactgggattacaggcgtgagccagcatgcccggcccagagctaggcctttctgtggctggccttcgcgtcagcctcaactacc

SEQ ID NO: 471130 - DNA, 201 bp, Homo sapiens
attctgccctaagagcccggagggccgggctgtctcatgaccctctgacgtgctgacctggactctggcagaatgtgcacacacacagtcacacagcttcstggcttgcgcaagtcccaggagggcggtgccagccacaggcttttcccattcgagggttggaagcgtatcatcaaaccacatcagagtgctgggggccac

SEQ ID NO: 471131 - DNA, 201 bp, Homo sapiens
gtcactatcctgcccaggctggtcttaatctcctgggttcagtcaatcttcccaccttggcctcccgaagtgtcagaattatagatgtgagccactgtgcycagcccagaactgatgttttctaaatgctgggtgctgagaaggatgtgtggctggcagtcttgactgtgttatctgtctttaccaggccagtaacttctt

SEQ ID NO: 471132 - DNA, 201 bp, Homo sapiens
acccacttatgcctagtgttccattattagaacgctaagcatgtgggagtttttacatcatactgctcaaggtcatcgccaaggtctgatgtttttactcrtgcaaaaatttaaaaaattgcaacctctggcataaatgggttgagtgacacttttcctgtttttattgttggtcagtgatggcatatttgctggtttttt

SEQ ID NO: 471133 - DNA, 201 bp, Homo sapiens
ggaattccacgcaccgatcagtactgggaaaagatctaatctgccgtgggcctgtcgtgccagtcctgggggcgagatcggggtagaaatgcattttattytttaagttcacgtaagatacaagtttcagacagggtctgaaggactggattggccaaacatcagacctgtcttccaaggagaccaagtcctggctacatc

SEQ ID NO: 471134 - DNA, 201 bp, Homo sapiens
gtgatgggaagggtgaccgggcagggggcttgcccgtggaggtgtgccccacggctccagaagccttgtggtgttgaggactgtgctagtgggcccacagyaggagtggccagggatgagtgacttaaggtcttttaaggatgagtctgactatattggttgacccttgtcacactttaaaagcaccttactttttattcc

SEQ ID NO: 471135 - DNA, 201 bp, Homo sapiens
gggagtacctgctgccccagctgactgtggccccctccgtgatccatccatctccagggagcaagacagagacgcaggaatggaaagcggagttcctaacrggatgaaagttcccccatcagttcccccagtacctccaagcaagtagctttccacatttgtcacagaaatcagaggagagatggtgttgggagccctttg

SEQ ID NO: 471136 - DNA, 201 bp, Homo sapiens
gtgtttagacatttttttctttctttttttttttgagacagagtttcactctgtcacccaggctggaatgccgtggcacaatctcagctcactgcaacctyacctcccaggttcaagcaatgttcctgcctcagcctccggagtagctgggattagaggcatgcaccaccatgcctggctaatttttgtatttttagtaga

SEQ ID NO: 471137 - DNA, 201 bp, Homo sapiens
ccaaagtgttgggattacaggtgtgagtcactgtgcccagccatgtgtttagacttttaactaatctcttttttagtttcaagccttatcgtccgcctctrtagaccactcctgtgcctgtttcctgatccttccaagggccattgtattccctgtctgctgcccctcttttggattcttctgcacatttttttgttcatg

SEQ ID NO: 471138 - DNA, 201 bp, Homo sapiens
attgtttgattaatgacagggtcttgctttgtctcccaggctggtgtgcagtggtgcgaccacggctcacggcagcctcagccacccagatgtaagcgatytggttcccacctcagcctcccgagtagtaagtagctgggaccacaggcggtgcccaggttttttttttttttttttttttttttcgtttgtagagacagg

SEQ ID NO: 471139 - DNA, 201 bp, Homo sapiens
gtgttaagtgcccagtgtgtttatctactgagggacagttatgttatttcgtgttcactattatcccatgctacaataaatatcctgtgtctcccagatasttagaagagtttctgcagggcacatgtgggagagtttgtttctgggtcatgaggtgtgttcatcttccatcttgctagatgctggcaaagggttctccag

SEQ ID NO: 471140 - DNA, 201 bp, Homo sapiens
aaagttcccccatcagttcccccagtacctccaagcaagtagctttccacatttgtcacagaaatcagaggagagatggtgttgggagccctttggagaaygccagtctcccaggccccctgcatctatcgagtttgcaatgtcacaacctctctgatcttgtgctcagcatgattctttaatagaagttttattttttcg

SEQ ID NO: 471141 - DNA, 201 bp, Homo sapiens
gagacctgtgctagttttacagattgcctccttatgacgcggctcaaaaggaaaccaagtggtcaggagttgtttctgacccactgatctctactaccacwaggaaaatagtttaggagaaaccagcttttactgtttttgaaaaattacagcttcaccctgtcaagttaacaaggaatgcctgtgccaataaaaggtttc

SEQ ID NO: 471142 - DNA, 201 bp, Homo sapiens
ccttaatttaatcataagccaagaatctactaaacacagttccattaggggcaaagacgtaacacatcagaggccacagcaaggctgtgattcatactcaraaaggaaaggtctctgggtcacaacagagcatagttgaggtcagcacactcccacccagtgcagggctgctccagcattgaggtgtgtctggcaggttga

SEQ ID NO: 471143 - DNA, 201 bp, Homo sapiens
ctcctgtgacttagccgcacctcctctcctttgactttcattccacctccttccaggatcgcaaggtccctatttgtcctggaaacggcttcaaggtagtytagggtgccgtttgccgggggaggaaggtgctctggttgatagagtcgcctggccgcacactctttttggcacataacaacgttctacagagccggggtg

SEQ ID NO: 471144 - DNA, 201 bp, Homo sapiens
gtttgcagtgagccatgatcgtgccactgcactccagcctgggcaacagagtgagatcctgtcttaaaacaaacaaaaaaaacaaacttgttttcatttaractcttcctggcgttggggacctattggaataggtttagtgtgaactgagagctagaagtgttagaggagagagggagggaacagagcccgctggagcga

SEQ ID NO: 471145 - DNA, 201 bp, Homo sapiens
gtggatctaggatccggcttccaacatgtggcagctctgggcctccctctgctgcctgctggtgttggccaatgcccggagcaggccctctttccatcccstgtcggatgagctggtcaactatgtcaacaaacggaataccacgtggcaggtaggctgtggggctgcgtcctatgtatgtcccctcccaggtcggtctgt

SEQ ID NO: 471146 - DNA, 201 bp, Homo sapiens
ccctggcacagctctcctgggtgttggctcaggacagccctgtttccaactggttaggcggtgaggggtggtggccctttggttccaggttgaaactgccyatgtggtgctgatttagcagactggggaggctctttttgtaggcaggttcttttctttccccagctgctggacctgggagttggaagagaagttgcaccc

SEQ ID NO: 471147 - DNA, 201 bp, Homo sapiens
ggggccggcggggagccgggaccctcgggactgtccctgacgggcgggctggggtgggagtccgcgcgctccgaagcgtcggcgagaaaagcagaaaacarctccgcccgccagccctctgccctccgctcccctccccgggctgtgcgccggaccccggccctcggagcggggacgcggccaggaccgccgagggaggcg

SEQ ID NO: 471148 - DNA, 201 bp, Homo sapiens
cctcggactgagaaccaagaatgaggagtgagccatgttgagggctggagagggtctctgattgtcagcaaatgggagcagatcaggggagacacccactytgcccgtgtgtcactctgggctgttccccagtgccccccaacccttgggcccttgaattgggtagggcctctggttttccctgggttgggcttcgtgtgt

SEQ ID NO: 471149 - DNA, 201 bp, Homo sapiens
ttgcctccttatgacgcggctcaaaaggaaaccaagtggtcaggagttgtttctgacccactgatctctactaccacaaggaaaatagtttaggagaaacsagcttttactgtttttgaaaaattacagcttcaccctgtcaagttaacaaggaatgcctgtgccaataaaaggtttctccaacttgaagtctactctgat

SEQ ID NO: 471150 - DNA, 201 bp, Homo sapiens
caaatgggagcagatcaggggagacacccactttgcccgtgtgtcactctgggctgttccccagtgccccccaacccttgggcccttgaattgggtagggyctctggttttccctgggttgggcttcgtgtgtgggcagcgtgcccatccaccgccatcccgggagacccttcagtcagtgggtgactctcttccaggccg

SEQ ID NO: 471151 - DNA, 201 bp, Homo sapiens
gtgtgtgggcagcgtgcccatccaccgccatcccgggagacccttcagtcagtgggtgactctcttccaggccgggcacaacttctacaacgtggacatgrgctacttgaagaggctatgtggtaccttcctgggtgggcccaagccaccccagaggtgagtgcctgctcctctgcaccgctgtaatgtgagtggcaggcg

SEQ ID NO: 471152 - DNA, 201 bp, Homo sapiens
ggcgtccatgctgcaggcacgaggcttgccttgccccaggtctgcctcgcccagctggggcttctccgtgggggctgtaggttgactccgctttctcccgsgtcccatcagggtgcagaccgtactccatccctccctgtgagcaccacgtcaacggctcccggcccccatgcacgggggagggagatacccccaagtgta

SEQ ID NO: 471153 - DNA, 201 bp, Homo sapiens
ggaagtgggagagtgaaggcctctctggcgtccgcagggctcatgctgcccagggctgccgacaccgcttgaggtacagtacttgtttcttttcatttttrtattactttctttttttattttattttttccttctcaagttattagtagagaagatgctggtgcttttttttggtttttgagagagtctcactctgtcac

SEQ ID NO: 471154 - DNA, 201 bp, Homo sapiens
caaactggaagggaccaaagccctccttttacaagggagtggcgtgtcctggagtcttgaggtatcctggcctcttccggggcctcgtgctcattgctccsttctcccatttctgagcttccagccccagccctgtccttagttcttcaggggagccttccttgagctcccctggcagggcaagtccccttagatgcagtc

SEQ ID NO: 471155 - DNA, 201 bp, Homo sapiens
gtgaaggcctctctggcgtccgcagggctcatgctgcccagggctgccgacaccgcttgaggtacagtacttgtttcttttcatttttgtattactttctytttttattttattttttccttctcaagttattagtagagaagatgctggtgcttttttttggtttttgagagagtctcactctgtcacccaggctggagt

SEQ ID NO: 471156 - DNA, 201 bp, Homo sapiens
cgtgctgatggctgatggcaatagagggtgggggtcgggaggggagcctgggtgccaggatggttcatgttgaccaatagggctggattgggcaggcaggkgaggggctggggaagagggctgtgtggggccttccatataggctcactcctctgtggaccagcctggcacctgactgtctttgtccaggtgttgtgccaa

SEQ ID NO: 471157 - DNA, 201 bp, Homo sapiens
gaggctgaggctagagaatcgcatgaacccgggaggcagaggttgcggtgagctgagatgatgccacttcccacgtgaggatggggtagttaagttgcacracactgccttctgcacaatggggatgatatgagaaatgatgagaggatcctgggcagaggttgaggcaggagagcagggcaagaaacactatctggactg

SEQ ID NO: 471158 - DNA, 201 bp, Homo sapiens
gctggcggggaagcgctggagagaaagtgggagcaacactggagagtcttgggggattcggggtggggacaactctgacaaggcaagttatagaaactttytgagtcccagtttccatcagtacaaaaatcacaatccctctggccatgaatgatggcgaggattaggtggagtggcgggcagagcatccagcagattgca

SEQ ID NO: 471159 - DNA, 201 bp, Homo sapiens
gctgctgagaggtgctagccaggtgtacaggcctctggcaggacctgcctggcgtccatgctgcaggcacgaggcttgccttgccccaggtctgcctcgcscagctggggcttctccgtgggggctgtaggttgactccgctttctcccgggtcccatcagggtgcagaccgtactccatccctccctgtgagcaccacgt

SEQ ID NO: 471160 - DNA, 201 bp, Homo sapiens
actgatgcccgagacggtgcccctgtgtgtgtgagccctcgacccacataacagagaggtgtcctgatgccctctgtcctctccaggtggatctaggatcyggcttccaacatgtggcagctctgggcctccctctgctgcctgctggtgttggccaatgcccggagcaggccctctttccatcccctgtcggatgagctg

SEQ ID NO: 471161 - DNA, 201 bp, Homo sapiens
ctggggaagagggctgtgtggggccttccatataggctcactcctctgtggaccagcctggcacctgactgtctttgtccaggtgttgtgccaacacacasaattccagaggcctctcccagagcctctgggctagttccttcccatccattggagtccagctcatacatgttctctgtgggaacgcccccctccctggtg

SEQ ID NO: 471162 - DNA, 201 bp, Homo sapiens
ttcccatcagctagcattagctgccaccagtcctcccttctcctccctcacctcttcagggtgtacctggagcagctattaaaactctttaagccgtgtarcgcttttgacaaacccttacttacatggaatcccagtataaagaacagatgaatcagtcatctagcattaaatgttttatcaattagaatgtattagaaa

SEQ ID NO: 471163 - DNA, 201 bp, Homo sapiens
cccatcagctagcattagctgccaccagtcctcccttctcctccctcacctcttcagggtgtacctggagcagctattaaaactctttaagccgtgtaacrcttttgacaaacccttacttacatggaatcccagtataaagaacagatgaatcagtcatctagcattaaatgttttatcaattagaatgtattagaaatt

SEQ ID NO: 471164 - DNA, 201 bp, Homo sapiens
gtataaagaacagatgaatcagtcatctagcattaaatgttttatcaattagaatgtattagaaattctatttttaaagccaacaagcacattttgtaggmatctatttcaatatttactcaacaactttgagtgtgttgggccttcaaaaatatatttaattccccagtattgtgggaccccccctggagcctcctggtg

SEQ ID NO: 471165 - DNA, 201 bp, Homo sapiens
ctagcattaaatgttttatcaattagaatgtattagaaattctatttttaaagccaacaagcacattttgtaggaatctatttcaatatttactcaacaamtttgagtgtgttgggccttcaaaaatatatttaattccccagtattgtgggaccccccctggagcctcctggtggagcagcaggttccctctggaagctg

SEQ ID NO: 471166 - DNA, 201 bp, Homo sapiens
ctatttcaatatttactcaacaactttgagtgtgttgggccttcaaaaatatatttaattccccagtattgtgggaccccccctggagcctcctggtggarcagcaggttccctctggaagctgtttctccttcccggagcatgaccagctgagtgtggggggtgctgtggggcgtgggacagtggcccggtctcggtctc

SEQ ID NO: 471167 - DNA, 201 bp, Homo sapiens
aagtggtcaggagttgtttctgacccactgatctctactaccacaaggaaaatagtttaggagaaaccagcttttactgtttttgaaaaattacagcttcmccctgtcaagttaacaaggaatgcctgtgccaataaaaggtttctccaacttgaagtctactctgatgggatctcagatcctttgtcactgcctatagac

SEQ ID NO: 471168 - DNA, 201 bp, Homo sapiens
cagggtctgaaggactggattggccaaacatcagacctgtcttccaaggagaccaagtcctggctacatcccagcctgtggttacagtgcagacaggccaygtgagccaccgctgccagcacagagcgtccttccccctgtagactagtgccgtagggagtacctgctgccccagctgactgtggccccctccgtgatcca

SEQ ID NO: 471169 - DNA, 201 bp, Homo sapiens
tgctgccccagctgactgtggccccctccgtgatccatccatctccagggagcaagacagagacgcaggaatggaaagcggagttcctaacaggatgaaasttcccccatcagttcccccagtacctccaagcaagtagctttccacatttgtcacagaaatcagaggagagatggtgttgggagccctttggagaacgcc

SEQ ID NO: 471170 - DNA, 201 bp, Homo sapiens
cttgctgcagctgggggtgggtccacgagtggcctcgggcacttgggtagcacacagtggtctggagagctggtggtgcttctctcagaggttttcattasaggctgtcttttcagctgtaatggtggctatcctgctgaagcttggaacttctggacaagaaaaggcctggtttctggtggcctctatgaatcccatgta

SEQ ID NO: 471171 - DNA, 201 bp, Homo sapiens
tgggggtccccactgatgcccgagacggtgcccctgtgtgtgtgagccctcgacccacataacagagaggtgtcctgatgccctctgtcctctccaggtgratctaggatccggcttccaacatgtggcagctctgggcctccctctgctgcctgctggtgttggccaatgcccggagcaggccctctttccatcccctgt

SEQ ID NO: 471172 - DNA, 201 bp, Homo sapiens
ggtttagtgctgagagaccctgggccccagcttctcagtggaggggactttgaggacttcctgggactgctgcgagtcagaagtgtttcggggagactccragagtctggcaggcagggcctggcaaggctgctgcttcctgggaggtgcctgaaccaaggctggcccggcagagctgtctgaggggtggcatcccagcaa

SEQ ID NO: 471173 - DNA, 201 bp, Homo sapiens
gtcggcggaggacctgctcacctgctgtggcagcatgtgtggggacgggtgagtcaggctgtgcttccacagcgggtttagtgctgagagaccctgggccscagcttctcagtggaggggactttgaggacttcctgggactgctgcgagtcagaagtgtttcggggagactccgagagtctggcaggcagggcctggcaa

SEQ ID NO: 471174 - DNA, 201 bp, Homo sapiens
ctccctgctcccaaactgagttgattcattccatgcgcactgtctccctcacctccatcgtatacgcacctgcagctccttgcctgcttctagcatggagscagcggggatgtgctggtgagtgacaaggaattgtggggcatgtcgacatcagcttaaggctttgttagaaacacctgccttgcagtgtttgtgactggg

SEQ ID NO: 471175 - DNA, 201 bp, Homo sapiens
caagccttatcgtccgcctctgtagaccactcctgtgcctgtttcctgatccttccaagggccattgtattccctgtctgctgcccctcttttggattctyctgcacatttttttgttcatgcattcattcatttattgtttgattaatgacagggtcttgctttgtctcccaggctggtgtgcagtggtgcgaccacggc

SEQ ID NO: 471176 - DNA, 201 bp, Homo sapiens
tccagtttcaagtagaatatattcataacctcaataaagttctccctgctcccaaactgagttgattcattccatgcgcactgtctccctcacctccatcrtatacgcacctgcagctccttgcctgcttctagcatggagccagcggggatgtgctggtgagtgacaaggaattgtggggcatgtcgacatcagcttaag

SEQ ID NO: 471177 - DNA, 201 bp, Homo sapiens
tgcactccagcctgggggacaagagtgaatctgtgtctcaccaaaaaaaaaaagaaaaagaaagatgcttaacaaaggttaccataagccacaaattcatraccacttatccttccagtttcaagtagaatatattcataacctcaataaagttctccctgctcccaaactgagttgattcattccatgcgcactgtctcc

SEQ ID NO: 471178 - DNA, 201 bp, Homo sapiens
tggtgtcttggtgatctcacataaccaagatgctaccccgtggggaaccacatccccctggatgccctccagccttggtttgggctggagtcagggcctgkatacagtattttgaatttgtatgccactggtttgcattgctggtcaggaactctagtgctttgcatagccctggtttagaaacatgttatagcagttctt

SEQ ID NO: 471179 - DNA, 201 bp, Homo sapiens
caaagtgttgggattacaggtgtgagccactgggccctgcctgtactttttatcagccacaaatccagcaacaagctgaggattcagctcataaaacaggyttggtgtcttggtgatctcacataaccaagatgctaccccgtggggaaccacatccccctggatgccctccagccttggtttgggctggagtcagggcct

SEQ ID NO: 471180 - DNA, 201 bp, Homo sapiens
tggccaggctagtttcaaactcccggcctcaggtggtctgcctgcctcagcctcccaaagtgttgggattacaggtgtgagccactgggccctgcctgtaytttttatcagccacaaatccagcaacaagctgaggattcagctcataaaacaggtttggtgtcttggtgatctcacataaccaagatgctaccccgtggg

SEQ ID NO: 471181 - DNA, 201 bp, Homo sapiens
aagtacatacaggatttcaccatgttggccaggctagtttcaaactcccggcctcaggtggtctgcctgcctcagcctcccaaagtgttgggattacaggygtgagccactgggccctgcctgtactttttatcagccacaaatccagcaacaagctgaggattcagctcataaaacaggtttggtgtcttggtgatctca

SEQ ID NO: 471182 - DNA, 201 bp, Homo sapiens
aagatctaatctgccgtgggcctgtcgtgccagtcctgggggcgagatcggggtagaaatgcattttattctttaagttcacgtaagatacaagtttcagrcagggtctgaaggactggattggccaaacatcagacctgtcttccaaggagaccaagtcctggctacatcccagcctgtggttacagtgcagacaggcca

SEQ ID NO: 471183 - DNA, 201 bp, Homo sapiens
tagctgggatgacaggcactcaccaatatgcctgggtaatttttgtatttttaagtacatacaggatttcaccatgttggccaggctagtttcaaactccyggcctcaggtggtctgcctgcctcagcctcccaaagtgttgggattacaggtgtgagccactgggccctgcctgtactttttatcagccacaaatccagc

SEQ ID NO: 471184 - DNA, 201 bp, Homo sapiens
gtttcagacagggtctgaaggactggattggccaaacatcagacctgtcttccaaggagaccaagtcctggctacatcccagcctgtggttacagtgcagrcaggccatgtgagccaccgctgccagcacagagcgtccttccccctgtagactagtgccgtagggagtacctgctgccccagctgactgtggccccctcc

SEQ ID NO: 471185 - DNA, 201 bp, Homo sapiens
tacctgctgccccagctgactgtggccccctccgtgatccatccatctccagggagcaagacagagacgcaggaatggaaagcggagttcctaacaggatraaagttcccccatcagttcccccagtacctccaagcaagtagctttccacatttgtcacagaaatcagaggagagatggtgttgggagccctttggagaa

SEQ ID NO: 471186 - DNA, 201 bp, Homo sapiens
gctgcgggcagtggggcggggatcccatagacacctcagctccttagagttctccgcctgggccaggacgagcatgggggtccccactgatgcccgagacrgtgcccctgtgtgtgtgagccctcgacccacataacagagaggtgtcctgatgccctctgtcctctccaggtggatctaggatccggcttccaacatgtg

SEQ ID NO: 471187 - DNA, 201 bp, Homo sapiens
gaaagcggagttcctaacaggatgaaagttcccccatcagttcccccagtacctccaagcaagtagctttccacatttgtcacagaaatcagaggagagayggtgttgggagccctttggagaacgccagtctcccaggccccctgcatctatcgagtttgcaatgtcacaacctctctgatcttgtgctcagcatgattc

SEQ ID NO: 471188 - DNA, 201 bp, Homo sapiens
cagaaatcagaggagagatggtgttgggagccctttggagaacgccagtctcccaggccccctgcatctatcgagtttgcaatgtcacaacctctctgatsttgtgctcagcatgattctttaatagaagttttattttttcgtgcactctgctaatcatgtgggtgagccagtggaacagcgggagacctgtgctagttt

SEQ ID NO: 471189 - DNA, 201 bp, Homo sapiens
ccacaaggaaaatagtttaggagaaaccagcttttactgtttttgaaaaattacagcttcaccctgtcaagttaacaaggaatgcctgtgccaataaaagktttctccaacttgaagtctactctgatgggatctcagatcctttgtcactgcctatagacttgtagctgctgtctctctttgtccctgcagagaatcacg

SEQ ID NO: 471190 - DNA, 201 bp, Homo sapiens
ctggcaaggctgctgcttcctgggaggtgcctgaaccaaggctggcccggcagagctgtctgaggggtggcatcccagcaaaacagtcagtttcagaaaawgtggtggaatgtctggcccctggtctggtttgtgtcatcgcatgttcctttttcctgcttggggaaccagtttggggcgtttccttatgtgtagttagcg

SEQ ID NO: 471191 - DNA, 201 bp, Homo sapiens
ggagcctcctggtggagcagcaggttccctctggaagctgtttctccttcccggagcatgaccagctgagtgtggggggtgctgtggggcgtgggacagtsgcccggtctcggtctcagccagttcttcccttttcaggagtgtaccaacacgtcaccggagagatgatgggtggccatgccatccgcatcctgggctggg

SEQ ID NO: 471192 - DNA, 201 bp, Homo sapiens
tcggctttctctgttctacccaccgcacagccttaaaccctggacctacggccaggctgtgagctcctcctaagtgccaggcagtcaggagttcccttttrctgtgagggcagactctgagcagcttcagagccaacgcctgcaacagttcccacagcatcgcgccagatcctgtgatgggaagggtgaccgggcaggggg

SEQ ID NO: 471193 - DNA, 201 bp, Homo sapiens
aactgtttcatatcactcacttgggaaagtgtctcaagctgttctacaaatccatgcaaaggccgtttaaaaatagcagcgaaggccctggactcggtctygtccagcacagccccttggctctctctctgggctctggccgcctggcccccggggacccacacgaggtcatggcgtgctgcgggcagtggggcggggatc

SEQ ID NO: 471194 - DNA, 201 bp, Homo sapiens
gcaaaatgctgggattacaggcgtgagccaccgtgcccagcaactattttcaagtgtacagttctgtagcattaagtacattcacagtgttgctcagccaycaccaccatctgtcccccgaactctttttcagctcgcaagacagaaactctgtccccattaacaccaatattgtagcccctggtaagccccactctactt

SEQ ID NO: 471195 - DNA, 201 bp, Homo sapiens
ctgtgctagttttacagattgcctccttatgacgcggctcaaaaggaaaccaagtggtcaggagttgtttctgacccactgatctctactaccacaaggaraatagtttaggagaaaccagcttttactgtttttgaaaaattacagcttcaccctgtcaagttaacaaggaatgcctgtgccaataaaaggtttctccaa

SEQ ID NO: 471196 - DNA, 201 bp, Homo sapiens
ccagcctgggcaacaaaagtgaaactccgcctccaggaaaaaaaaaaaaaaaaaccacacacacacatacaaactaatactacacattttgcagatttcaraaatgaaccgagttcccaggcagaggttcacggtggtgcttctcttgctttaaaagctgagttgggcagatgttgaggcaggagagtggggcaagtggct

SEQ ID NO: 471197 - DNA, 201 bp, Homo sapiens
agcgtggaggtgtcggcggaggacctgctcacctgctgtggcagcatgtgtggggacgggtgagtcaggctgtgcttccacagcgggtttagtgctgagasaccctgggccccagcttctcagtggaggggactttgaggacttcctgggactgctgcgagtcagaagtgtttcggggagactccgagagtctggcaggca

SEQ ID NO: 471198 - DNA, 201 bp, Homo sapiens
ttctttaatagaagttttattttttcgtgcactctgctaatcatgtgggtgagccagtggaacagcgggagacctgtgctagttttacagattgcctcctwatgacgcggctcaaaaggaaaccaagtggtcaggagttgtttctgacccactgatctctactaccacaaggaaaatagtttaggagaaaccagcttttac

SEQ ID NO: 471199 - DNA, 201 bp, Homo sapiens
tccttccccctgtagactagtgccgtagggagtacctgctgccccagctgactgtggccccctccgtgatccatccatctccagggagcaagacagagacscaggaatggaaagcggagttcctaacaggatgaaagttcccccatcagttcccccagtacctccaagcaagtagctttccacatttgtcacagaaatcag

SEQ ID NO: 471200 - DNA, 201 bp, Homo sapiens
catcccagcctgtggttacagtgcagacaggccatgtgagccaccgctgccagcacagagcgtccttccccctgtagactagtgccgtagggagtacctgytgccccagctgactgtggccccctccgtgatccatccatctccagggagcaagacagagacgcaggaatggaaagcggagttcctaacaggatgaaagtt

SEQ ID NO: 471201 - DNA, 201 bp, Homo sapiens
gcccggacatggcagcctcacccggtggggctcgttcctgcaggccttcggggctgtggaagccatctctgaccggatctgcatccacaccaatgcgcacrtcagcgtggaggtgtcggcggaggacctgctcacctgctgtggcagcatgtgtggggacgggtgagtcaggctgtgcttccacagcgggtttagtgctga

SEQ ID NO: 471202 - DNA, 201 bp, Homo sapiens
aatcgaatcagaagtggtggctggaattccacgcaccgatcagtactgggaaaagatctaatctgccgtgggcctgtcgtgccagtcctgggggcgagatsggggtagaaatgcattttattctttaagttcacgtaagatacaagtttcagacagggtctgaaggactggattggccaaacatcagacctgtcttccaag

SEQ ID NO: 471203 - DNA, 201 bp, Homo sapiens
atcctgtgatgggaagggtgaccgggcagggggcttgcccgtggaggtgtgccccacggctccagaagccttgtggtgttgaggactgtgctagtgggccmacagcaggagtggccagggatgagtgacttaaggtcttttaaggatgagtctgactatattggttgacccttgtcacactttaaaagcaccttacttttt

SEQ ID NO: 471204 - DNA, 201 bp, Homo sapiens
gccaagaacagtgaattgtgagccacaccccgtggccatctcggctttctctgttctacccaccgcacagccttaaaccctggacctacggccaggctgtsagctcctcctaagtgccaggcagtcaggagttcccttttgctgtgagggcagactctgagcagcttcagagccaacgcctgcaacagttcccacagcatc

SEQ ID NO: 471205 - DNA, 201 bp, Homo sapiens
cttaacttctcgctgccccagccatgttttcaaccatggcatccctcccccaattagttccctgtcatcctcgtcaaccttctctgtaagtgcctggtaarcttgcccttgcttaagaactcaaaacatagctgtgctctatttttttgttgttgttgtgactgacagagtgagattccgtctcccaggctggagtgcagt

SEQ ID NO: 471206 - DNA, 201 bp, Homo sapiens
cagctagcattagctgccaccagtcctcccttctcctccctcacctcttcagggtgtacctggagcagctattaaaactctttaagccgtgtaacgctttygacaaacccttacttacatggaatcccagtataaagaacagatgaatcagtcatctagcattaaatgttttatcaattagaatgtattagaaattctatt

SEQ ID NO: 471207 - DNA, 201 bp, Homo sapiens
gttcttggtatagagcaaactagaagaaccagcaatcattccactgtcctgccaaggtacacctcagtactccccttcccaactgaagtggtatgaggctrgctctttccaaaagcattcaagtttggcttctgatgtgactcagaatttaggaaccagatgctagatcaaataagctctgaaaatctgaggaacattgta

SEQ ID NO: 471208 - DNA, 201 bp, Homo sapiens
caacaaaagtgaaactccgcctccaggaaaaaaaaaaaaaaaaaccacacacacacatacaaactaatactacacattttgcagatttcagaaatgaaccsagttcccaggcagaggttcacggtggtgcttctcttgctttaaaagctgagttgggcagatgttgaggcaggagagtggggcaagtggctcatgacgcct

SEQ ID NO: 471209 - DNA, 201 bp, Homo sapiens
agcctggcacctgactgtctttgtccaggtgttgtgccaacacacagaattccagaggcctctcccagagcctctgggctagttccttcccatccattggmgtccagctcatacatgttctctgtgggaacgcccccctccctggtggctggccacgcctgccctcgccttcctggctttgcattgctttaccagcatgtt

SEQ ID NO: 471210 - DNA, 201 bp, Homo sapiens
ccagcctggcacctgactgtctttgtccaggtgttgtgccaacacacagaattccagaggcctctcccagagcctctgggctagttccttcccatccattrgagtccagctcatacatgttctctgtgggaacgcccccctccctggtggctggccacgcctgccctcgccttcctggctttgcattgctttaccagcatg

SEQ ID NO: 471211 - DNA, 201 bp, Homo sapiens
agatcaaataagctctgaaaatctgaggaacattgtaggaaaggtttgttaagcatctcttaagtgccatgatgagcataacagccggccgtggtggctcrcgcctgtaatcccagcactttgggaggccaaggtgggaggatgacaaggtcaggagttcaagaccagcctggccaacatgctgaaacctcacctctacta

SEQ ID NO: 471212 - DNA, 201 bp, Homo sapiens
tgatcataactttgtcacctcagttcaatagtttctcctggattcttgtccaagtgagatgacaggtggacgtaacaatgccttttcagtctttacctagmctctccagagaatcactccagaatagaaattagagtataggtaggcagtccaacctctgcatttaaaaaaaaaaattttgagatgggagtctctctctgt

SEQ ID NO: 471213 - DNA, 201 bp, Homo sapiens
aaaagctttcagaactttccagaatattgactaaattgtcttgtttacaaccaacaacgacaacaaaaaataactgctgagggccttcgtagtgtctgctrtttcaagtgtacagtagtcattttgtctgcaggatgtggggttgctgtggctgaccttgtacaatattccactcataggtgtcttcaggcctatggagag

SEQ ID NO: 471214 - DNA, 201 bp, Homo sapiens
ggtttctccaacttgaagtctactctgatgggatctcagatcctttgtcactgcctatagacttgtagctgctgtctctctttgtccctgcagagaatcaygtcctggaactgcatgttcttgcgactcttgggacttcatcttaacttctcgctgccccagccatgttttcaaccatggcatccctcccccaattagttc

SEQ ID NO: 471215 - DNA, 201 bp, Homo sapiens
aggaaaaaaaaaaaaaaaaaccacacacacacatacaaactaatactacacattttgcagatttcagaaatgaaccgagttcccaggcagaggttcacggkggtgcttctcttgctttaaaagctgagttgggcagatgttgaggcaggagagtggggcaagtggctcatgacgcctctaatcccagcactttgggaggcc

SEQ ID NO: 471216 - DNA, 201 bp, Homo sapiens
ccttgagctcccctggcagggcaagtccccttagatgcagtcttcccctggaggccaccagaaatcagtgactggctgaccgtggcgtgccacgaggcackgtcactgccctccccaaccccgagctcggttcattttccaggatacaattcctacagcgtctccaatagcgagaaggacatcatggccgagatctacaaa

SEQ ID NO: 471217 - DNA, 201 bp, Homo sapiens
aactcagcctcagcccttccaaactggaagggaccaaagccctccttttacaagggagtggcgtgtcctggagtcttgaggtatcctggcctcttccgggrcctcgtgctcattgctcccttctcccatttctgagcttccagccccagccctgtccttagttcttcaggggagccttccttgagctcccctggcagggca

SEQ ID NO: 471218 - DNA, 201 bp, Homo sapiens
aagatctgtgagcctggctacagcccgacctacaaacaggacaagcactacggtaaggggcctggggcctggccacggcgcacgtggaggctggggagctrctgcatccctcctcacgctgcagcgaagaggtcagggctgaggagccttggggtcccggaactctaggatagaggagggggagtgatgccctcttgccag

SEQ ID NO: 471219 - DNA, 201 bp, Homo sapiens
atggattgtttgagcaattaaccatcatggctttatttgcctttataaactgggggttgagacagaggggctgctgagaggtgctagccaggtgtacaggmctctggcaggacctgcctggcgtccatgctgcaggcacgaggcttgccttgccccaggtctgcctcgcccagctggggcttctccgtgggggctgtaggt

SEQ ID NO: 471220 - DNA, 201 bp, Homo sapiens
ggccagatggattgtttgagcaattaaccatcatggctttatttgcctttataaactgggggttgagacagaggggctgctgagaggtgctagccaggtgyacaggcctctggcaggacctgcctggcgtccatgctgcaggcacgaggcttgccttgccccaggtctgcctcgcccagctggggcttctccgtgggggct

SEQ ID NO: 471221 - DNA, 201 bp, Homo sapiens
ggcctggggcctggccacggcgcacgtggaggctggggagctgctgcatccctcctcacgctgcagcgaagaggtcagggctgaggagccttggggtcccrgaactctaggatagaggagggggagtgatgccctcttgccaggagaagcagcacactctccactttctgcctgttccaccctgaactcagcctcagccct

SEQ ID NO: 471222 - DNA, 201 bp, Homo sapiens
tcagttgagaatcagtgttctacccggaagggcactcgtagcctggtctggtatggacatgaacaggagagcctcctgtcttctcccggatctttgtgggyaggggtggggctggcggttattccctgcaagctgtgcttatctagggagcgtcccttggagggtttggggtctgggaggtctgctcgcaccacttgctgc

SEQ ID NO: 471223 - DNA, 201 bp, Homo sapiens
aaaacagtcagtttcagaaaatgtggtggaatgtctggcccctggtctggtttgtgtcatcgcatgttcctttttcctgcttggggaaccagtttggggcrtttccttatgtgtagttagcggggatggctccaccttaacaacaaggtggtggcacagaactttctgctccagctgcctgcagcctcgccttggttccgc

SEQ ID NO: 471224 - DNA, 201 bp, Homo sapiens
gggagatacccccaagtgtagcaagatctgtgagcctggctacagcccgacctacaaacaggacaagcactacggtaaggggcctggggcctggccacggygcacgtggaggctggggagctgctgcatccctcctcacgctgcagcgaagaggtcagggctgaggagccttggggtcccggaactctaggatagaggagg

SEQ ID NO: 471225 - DNA, 201 bp, Homo sapiens
tcctgcaggccttcggggctgtggaagccatctctgaccggatctgcatccacaccaatgcgcacgtcagcgtggaggtgtcggcggaggacctgctcacvtgctgtggcagcatgtgtggggacgggtgagtcaggctgtgcttccacagcgggtttagtgctgagagaccctgggccccagcttctcagtggaggggac

SEQ ID NO: 471226 - DNA, 201 bp, Homo sapiens
gcctctaatcccagcactttgggaggccgaggtgggcaaatcacttgaacccgggagttcaagaccagtctggccaacatagcaagaccccatttctaccraagaaaataaaagctgagtttgagccccaggagcgtcccctggtgttgagagatcagttgcctacaaggtctgaggtgcccctgtggccctttgagggga

SEQ ID NO: 471227 - DNA, 201 bp, Homo sapiens
agtggggcaagtggctcatgacgcctctaatcccagcactttgggaggccgaggtgggcaaatcacttgaacccgggagttcaagaccagtctggccaacrtagcaagaccccatttctaccaaagaaaataaaagctgagtttgagccccaggagcgtcccctggtgttgagagatcagttgcctacaaggtctgaggtg

SEQ ID NO: 471228 - DNA, 201 bp, Homo sapiens
atgaagatgtttaaacagatcaaacatgttataaccgcaagtggggttgtccctcggggctcatttctttggttggattcagttttcgttggagatgaccyccgtatggaggtggtcaggaagggaattctgacccaaagaacaaacccagcccaaccccatgttcacccagagccaggtggtgggggtagagcgagggcc

SEQ ID NO: 471229 - DNA, 201 bp, Homo sapiens
ccctgactggggaactggccctttaaagccaaccaagggctggcttttggggggaaacatcctagatttctgccatctacttacaagcctgggccagggagggggggccactcagcccccgacaggggcattggaagggcaggtggagccagtggcattgattgcagtaacctgatcccgtgagggaggcggccacagcgg

SEQ ID NO: 471230 - DNA, 201 bp, Homo sapiens
cgccctgcccctgccccaacccccaccgaagagccctgagctcaggctgagcccagccacctcccaaggactttccagtgaggaaatggcaacacgtggargtgaagtccctgttctcagctccgtcatctgcggggcttctgggtggctcctgccactgacctcaccggcatgctggcctgtggcaggcctaggacctca

SEQ ID NO: 471231 - DNA, 201 bp, Homo sapiens
ggagcacgcccaatcccaggccctggggctgcttcctggcgctcagctttgcccctcggtttcccccgcagctctggagaactatctccggaccccagtgygggtggcctggagggagggtggcgcggcagggtgagcctgaggagcagcttccaagcttggtagctgttgggccatgtcttcaactgacatcttactggg

SEQ ID NO: 471232 - DNA, 201 bp, Homo sapiens
caccgaagagccctgagctcaggctgagcccagccacctcccaaggactttccagtgaggaaatggcaacacgtggaggtgaagtccctgttctcagctcygtcatctgcggggcttctgggtggctcctgccactgacctcaccggcatgctggcctgtggcaggcctaggacctcaggcggggaggaggagctgccgca

SEQ ID NO: 471233 - DNA, 201 bp, Homo sapiens
gctctgctctaagggcccaaacactggcctgcccttagctgtggctctggtgcctcctgcttccataggccctgccttcctgggtcctgaaggctcaagcyctggctgcagaaggaggcagcccagatcaaacccagtttggatgcagcctgggcccacagaagcctctctgatgaggtcggggggctgagcctatggcag

SEQ ID NO: 471234 - DNA, 201 bp, Homo sapiens
tcacccctgaagacaggtaagtcagggccctcttccttacctggacctccgcctgccctgactcagtccccactacagagagcaaaccctacagtctccaragggctgagtagaggtgaactgcccacccacatccctgcacgagcccatccaggggctgagatcagtggtggcatgagtgagttgactggccccagagcc

SEQ ID NO: 471235 - DNA, 201 bp, Homo sapiens
aggtagtgttccctccctggcctgtgcccccagccaccacatctgtctgccccaacttgctgctaggtgaacgtgtactccagatctcagccagccaggtsgggggctgagtggaagtgattttaggtccttttcacgatcaagcaaagtgaggcccggccaagttgggcagccagggattgtggcagcctctgtgggctc

SEQ ID NO: 471236 - DNA, 201 bp, Homo sapiens
catgctggcctgtggcaggcctaggacctcaggcggggaggaggagctgccgcaaggccctgtcccagcagaagagggaggcttcctgactgacacaggcyagccccatcttggtcctgtcaccctggccccaactattaaagtgccatttcctgtctggactgcagtggatgtatctgcatgggcccctcccgtccccgt

SEQ ID NO: 471237 - DNA, 201 bp, Homo sapiens
ccctggcctgtgcccccagccaccacatctgtctgccccaacttgctgctaggtgaacgtgtactccagatctcagccagccaggtggggggctgagtggwagtgattttaggtccttttcacgatcaagcaaagtgaggcccggccaagttgggcagccagggattgtggcagcctctgtgggctctgccattccccgtg

SEQ ID NO: 471238 - DNA, 201 bp, Homo sapiens
ggccagggccagagccaaggccagagccagggcccgggcagcggggacacgtaccggcccaagcggcccaccacgctcaacctctttccgcaggtgccgckgtctcaggtgaggcgccaacgtggggggcggcgccctgggccgccgcggagatgtgagggggagcgcagaggggctgcagcgggaaggggcacccacggg

SEQ ID NO: 471239 - DNA, 201 bp, Homo sapiens
ttgaacccaggtggcagaggctgcggtgagccaagatcatgtcattgctctccagcctgggtgacagagcgaaaggccgtctcaaaaaaaaaaaaaaaaatatatatatatatatatatatgtgcagaggtcactggcagagcaggggcatttcagggcacctctgggtcagcggtcctgcagctctcccatgccatctga

SEQ ID NO: 471240 - DNA, 201 bp, Homo sapiens
cggccagggccagagccaaggccagagccagggcccgggcagcggggacacgtaccggcccaagcggcccaccacgctcaacctctttccgcaggtgccgyggtctcaggtgaggcgccaacgtggggggcggcgccctgggccgccgcggagatgtgagggggagcgcagaggggctgcagcgggaaggggcacccacgg

SEQ ID NO: 471241 - DNA, 201 bp, Homo sapiens
gcttggggagcaggtctctggcagagaaggatgtccgttccaggagcacacggccctgccccatcctgggccttacctcccctgccagggctcgggcgctstggctcctgccttgatgaagcccgtgtcctgccttgatgaagcctgtgccacctgcaagtgcccgccctgcccctgccccaacccccaccgaagagccct

SEQ ID NO: 471242 - DNA, 201 bp, Homo sapiens
ttcagcatttgtcaagtacctattaggcaccacacatgttgatcaaaacagatatgatcccacccatatggattaactgactccaaggggaggccaccgcrggccgcataacccaaaggtaaaattacagtgatacggaaccacagccaggagggactccgagagcccatagcagggcggtttggcttggtcccagaggtc

SEQ ID NO: 471243 - DNA, 201 bp, Homo sapiens
cagggcttggggagcaggtctctggcagagaaggatgtccgttccaggagcacacggccctgccccatcctgggccttacctcccctgccagggctcgggygctgtggctcctgccttgatgaagcccgtgtcctgccttgatgaagcctgtgccacctgcaagtgcccgccctgcccctgccccaacccccaccgaagag

SEQ ID NO: 471244 - DNA, 201 bp, Homo sapiens
acaggatgtggcactgcttgaggaggggcacctgccaccgccagaggacaaggaagtgggggccgctggcccagggtaggggagggtggggcaatggggasaggcaaatgcagtttattgtaatatatgggattagattcatctatggagggcagagtgggctgcctggggattgggagggacagggcttggggagcaggt

SEQ ID NO: 471245 - DNA, 201 bp, Homo sapiens
taacgatagctgatgagctaaaacacaaaaacatctcataatgtttcaaaaaagtttatgaatttgtgttgggccacattcagagccgtcctggggctcaygcacccatgggccatgggttagacaagcttgttctaggaggatcacctggctgctgggtagagagcggccaggggactagccatcctgctggtaagaagg

SEQ ID NO: 471246 - DNA, 201 bp, Homo sapiens
gggctgcctggggattgggagggacagggcttggggagcaggtctctggcagagaaggatgtccgttccaggagcacacggccctgccccatcctgggccwtacctcccctgccagggctcgggcgctgtggctcctgccttgatgaagcccgtgtcctgccttgatgaagcctgtgccacctgcaagtgcccgccctgcc

SEQ ID NO: 471247 - DNA, 201 bp, Homo sapiens
ctgggaggtggggcggctggggctgcggggaaaggcttggtccctttcccaggatcctgtgaatggcttttggcagcccggctcaggaacgtgagggcttrggagagagctcccaggggagggagcctccgtggagtggagggagccctgtgtgggcattgtggggaggggtcccagggctgagaatgtagaatgggcagc

SEQ ID NO: 471248 - DNA, 201 bp, Homo sapiens
gcttgtggggcattgtggccaggacccaaggtcaatcagctggcatccttacctcctcaccacagcacagccaggaacacaaaggcccaagaatgacatcygaacagccaatgcctggctcagatttggccttgctcagctaaagcctcagcactttaccacttaacctttgctttacatacacttctaactcagcctact

SEQ ID NO: 471249 - DNA, 201 bp, Homo sapiens
gtgcccgccctgcccctgccccaacccccaccgaagagccctgagctcaggctgagcccagccacctcccaaggactttccagtgaggaaatggcaacacrtggaggtgaagtccctgttctcagctccgtcatctgcggggcttctgggtggctcctgccactgacctcaccggcatgctggcctgtggcaggcctagga

SEQ ID NO: 471250 - DNA, 201 bp, Homo sapiens
agaggaaccagagggaaatggggaacccacttagggttgagcggccagtcaacaggtgtcctgagaactcactgggagccagcttcgttctcagcacttaragggctgcaaagaggcaggctggatccctggaccacacgtgccctctgtcacaagagaggcttgtggggcattgtggccaggacccaaggtcaatcagct

SEQ ID NO: 471251 - DNA, 201 bp, Homo sapiens
cttgggctggatttgagcattttccaagtaaccctcagtacctgggactgggggtctgactgtgtctccagagagctcctgcttctcttctcccctgcctsctccccctcttgccaccacacacattggccatcaccacctttgttaaggctgataagagcatctccctgagggttggccagcttccctgagcaaggcgga

SEQ ID NO: 471252 - DNA, 201 bp, Homo sapiens
ggcagagccaaaatgcgaagtgttctgggaggcgaccccaggccccatctggttaggactgaggcttctacctgccccgctaaacctggatcagagctgcgaccccccatccagccacaccacctcacctgcaggtgctgagtccttcgggctgttctcctgcatcatcaacggggaggagcaggagcagacccaccgggc

SEQ ID NO: 471253 - DNA, 201 bp, Homo sapiens
gggctggatttgagcattttccaagtaaccctcagtacctgggactgggggtctgactgtgtctccagagagctcctgcttctcttctcccctgcctcctscccctcttgccaccacacacattggccatcaccacctttgttaaggctgataagagcatctccctgagggttggccagcttccctgagcaaggcggaggg

SEQ ID NO: 471254 - DNA, 201 bp, Homo sapiens
ggactttccagtgaggaaatggcaacacgtggaggtgaagtccctgttctcagctccgtcatctgcggggcttctgggtggctcctgccactgacctcacyggcatgctggcctgtggcaggcctaggacctcaggcggggaggaggagctgccgcaaggccctgtcccagcagaagagggaggcttcctgactgacacag

SEQ ID NO: 471255 - DNA, 201 bp, Homo sapiens
agtgaggaaatggcaacacgtggaggtgaagtccctgttctcagctccgtcatctgcggggcttctgggtggctcctgccactgacctcaccggcatgctrgcctgtggcaggcctaggacctcaggcggggaggaggagctgccgcaaggccctgtcccagcagaagagggaggcttcctgactgacacaggccagcccc

SEQ ID NO: 471256 - DNA, 201 bp, Homo sapiens
gcggggcttctgggtggctcctgccactgacctcaccggcatgctggcctgtggcaggcctaggacctcaggcggggaggaggagctgccgcaaggccctrtcccagcagaagagggaggcttcctgactgacacaggccagccccatcttggtcctgtcaccctggccccaactattaaagtgccatttcctgtctggac

SEQ ID NO: 471257 - DNA, 201 bp, Homo sapiens
tcaggccagtgccaggacagctggctgctgacaggatgtggcactgcttgaggaggggcacctgccaccgccagaggacaaggaagtgggggccgctggcycagggtaggggagggtggggcaatggggagaggcaaatgcagtttattgtaatatatgggattagattcatctatggagggcagagtgggctgcctgggg

SEQ ID NO: 471258 - DNA, 201 bp, Homo sapiens
gggcttctgggtggctcctgccactgacctcaccggcatgctggcctgtggcaggcctaggacctcaggcggggaggaggagctgccgcaaggccctgtcycagcagaagagggaggcttcctgactgacacaggccagccccatcttggtcctgtcaccctggccccaactattaaagtgccatttcctgtctggactgc

SEQ ID NO: 471259 - DNA, 201 bp, Homo sapiens
tgggtggctcctgccactgacctcaccggcatgctggcctgtggcaggcctaggacctcaggcggggaggaggagctgccgcaaggccctgtcccagcagragagggaggcttcctgactgacacaggccagccccatcttggtcctgtcaccctggccccaactattaaagtgccatttcctgtctggactgcagtggat

SEQ ID NO: 471260 - DNA, 201 bp, Homo sapiens
tgaagataggcgtcaaggccgatgactcccaggaggccaaggtgacttcttccaacccagccccttccttccatggccccaagctctcccccaagacttgygatgaagaggccatctcctgtcaccctcactgcaggccaggtgaccgccctcttgcttcttttctccctcctgtaggggaataaatgtagccactttttc

SEQ ID NO: 471261 - DNA, 201 bp, Homo sapiens
aaagcacagttggcaggatcgggtgtctcgatcatcctcacccctgaagacaggtaagtcagggccctcttccttacctggacctccgcctgccctgactsagtccccactacagagagcaaaccctacagtctccaaagggctgagtagaggtgaactgcccacccacatccctgcacgagcccatccaggggctgagat

SEQ ID NO: 471262 - DNA, 201 bp, Homo sapiens
ctgtcaagtacacgctggtggtagatgagcatgcacagctggagctggtgagcctgcggccgtgcttcggagactacagtgacgagagtgactctgccacygtctatgacaactgtgcctccgtctcctcgccctatgagtcggccatcggagaggaatatgaggaggccccgcggccccagccccctgcctgcctctccg

SEQ ID NO: 471263 - DNA, 201 bp, Homo sapiens
ttgagggttccaagtggggcgggagggatgatggcatttctggcagttttgcctgatagtggcaggtggagtgggatggtgcaggcatagggagactgagrcagacaggccagtggggacatctgggagggcagaggcaggagctggactagggcttggcagtgaggaagcggagccatgtgtgaggagacacagatgtgt

SEQ ID NO: 471264 - DNA, 201 bp, Homo sapiens
cagtatagggtcatcaatcagggtgctggatacaggccccatccacctttggagcagccagggggtgggaagtgggtgtttctgagggagggctggccctrtctgctgcacacactactgtacatccaggcagatggtgacatcagccacatgcaagggctgggagggcttcctggaagaatgagcttaactgagcactct

SEQ ID NO: 471265 - DNA, 201 bp, Homo sapiens
tgtccagtgggagaccagagggcggtgggcagggtgtgaaaatcatgtgggaacctgctgaatttgagactggggatcattggaggacccaattggaggawtcatacagtcagtcggttttgggtctggagctcagaggagaggatagggctggggccaaagaccctgggagtctgagtttggagggatggccactgaagc

SEQ ID NO: 471266 - DNA, 201 bp, Homo sapiens
atcctgttcctcccttgccagtggcgatctgagccatctgtgtgtcccctggcttctaggagagcattccagcagttctacaagcagtttgtggagtacayctgccccacagaagatatctacctggagtagctgtgcagccccgccctctgcgtcccccagccctcaggccagtgccaggacagctggctgctgacagga

SEQ ID NO: 471267 - DNA, 201 bp, Homo sapiens
tccacggcagggcggccgcacccctccatcagtgaagaggaagagggcttcgactgcctgtcgtccccagagcgggctgagcccccaggcggagggtggcrggggagcctgggggagccgccgccacctccacgggcctctctgagctcggacaccagcgccctgtcctatgactctgtcaagtacacgctggtggtagat

SEQ ID NO: 471268 - DNA, 201 bp, Homo sapiens
cccccagacgctgcagagcccacctccgccttcctgccgcccactgagagccggatgtcagtcagctccgatccagaccctgccgcctacccctccacggyagggcggccgcacccctccatcagtgaagaggaagagggcttcgactgcctgtcgtccccagagcgggctgagcccccaggcggagggtggcgggggagc

SEQ ID NO: 471269 - DNA, 201 bp, Homo sapiens
cgctgtggctcctgccttgatgaagcccgtgtcctgccttgatgaagcctgtgccacctgcaagtgcccgccctgcccctgccccaacccccaccgaagarccctgagctcaggctgagcccagccacctcccaaggactttccagtgaggaaatggcaacacgtggaggtgaagtccctgttctcagctccgtcatctgc

SEQ ID NO: 471270 - DNA, 201 bp, Homo sapiens
acctcccaaggactttccagtgaggaaatggcaacacgtggaggtgaagtccctgttctcagctccgtcatctgcggggcttctgggtggctcctgccacygacctcaccggcatgctggcctgtggcaggcctaggacctcaggcggggaggaggagctgccgcaaggccctgtcccagcagaagagggaggcttcctga

SEQ ID NO: 471271 - DNA, 201 bp, Homo sapiens
ctggttggaggatcaatgggagcgctggtaggggctaccggggctggcgggggtggagaccgagttggggtgagctccatcgagctcagggtctctgatctgaatgaggcgagtggcagggagtctgggcctcctaggttcccctgggggctaagccaccatctctcctgggtgaccttgaactagtgggtttcccttgct

SEQ ID NO: 471272 - DNA, 201 bp, Homo sapiens
cgccatcgaggtcaccaaggagcccgagcacatggcaggtagtgttccctccctggcctgtgcccccagccaccacatctgtctgccccaacttgctgctrggtgaacgtgtactccagatctcagccagccaggtggggggctgagtggaagtgattttaggtccttttcacgatcaagcaaagtgaggcccggccaagt

SEQ ID NO: 471273 - DNA, 201 bp, Homo sapiens
cacagcatgaggctggagtcctttctggaataggctgaaactacccacactgacaccagattttccttcgcttgttccctgggctcaaggggcatgagtcttcctgagctggggcgtggggcactcctctgaggctgctgccggcgcctcgggtcttgctactgcagggattgcactgggagctcccctactccaggctgc

SEQ ID NO: 471274 - DNA, 201 bp, Homo sapiens
ccctgagctcaggctgagcccagccacctcccaaggactttccagtgaggaaatggcaacacgtggaggtgaagtccctgttctcagctccgtcatctgcrgggcttctgggtggctcctgccactgacctcaccggcatgctggcctgtggcaggcctaggacctcaggcggggaggaggagctgccgcaaggccctgtc

SEQ ID NO: 471275 - DNA, 201 bp, Homo sapiens
gccaaggagagttgaatagggttgggggagctggctgtggccctttgtcttccaggcccatcgggagcggtgcaggcaaggagctcctgggaggtggggcrgctggggctgcggggaaaggcttggtccctttcccaggatcctgtgaatggcttttggcagcccggctcaggaacgtgagggcttgggagagagctccca

SEQ ID NO: 471276 - DNA, 201 bp, Homo sapiens
aagtccggactggtagccgttgcatgttcacgaggctgttccctccgccattcctggtcctaggctgggaggtctgcgctggaattggaggagggggctcsgaggcctccttctccccaacctccgggctgcggcagggtctggggtcggggttgcgatcccggagcgggcaggcaggctgcatcttagcctgtgaataga

SEQ ID NO: 471277 - DNA, 201 bp, Homo sapiens
cggccctgccccatcctgggccttacctcccctgccagggctcgggcgctgtggctcctgccttgatgaagcccgtgtcctgccttgatgaagcctgtgcyacctgcaagtgcccgccctgcccctgccccaacccccaccgaagagccctgagctcaggctgagcccagccacctcccaaggactttccagtgaggaaat

SEQ ID NO: 471278 - DNA, 201 bp, Homo sapiens
tcccctgccagggctcgggcgctgtggctcctgccttgatgaagcccgtgtcctgccttgatgaagcctgtgccacctgcaagtgcccgccctgcccctgycccaacccccaccgaagagccctgagctcaggctgagcccagccacctcccaaggactttccagtgaggaaatggcaacacgtggaggtgaagtccctgt

SEQ ID NO: 471279 - DNA, 201 bp, Homo sapiens
aagactccaccaaagccctggcagagtccgtggggtacgtgtacaccctgctgagcacccagcccgagggagcacgcccaatcccaggccctggggctgcytcctggcgctcagctttgcccctcggtttcccccgcagctctggagaactatctccggaccccagtgcgggtggcctggagggagggtggcgcggcaggg

SEQ ID NO: 471280 - DNA, 201 bp, Homo sapiens
ccgaccaccggtttgcctgccacgtctttgtgtctgaagactccaccaaagccctggcagagtccgtggggtacgtgtacaccctgctgagcacccagccygagggagcacgcccaatcccaggccctggggctgcttcctggcgctcagctttgcccctcggtttcccccgcagctctggagaactatctccggacccca

SEQ ID NO: 471281 - DNA, 201 bp, Homo sapiens
ccagggctcgggcgctgtggctcctgccttgatgaagcccgtgtcctgccttgatgaagcctgtgccacctgcaagtgcccgccctgcccctgccccaacmcccaccgaagagccctgagctcaggctgagcccagccacctcccaaggactttccagtgaggaaatggcaacacgtggaggtgaagtccctgttctcagc

SEQ ID NO: 471282 - DNA, 201 bp, Homo sapiens
gatatcatccaaagaacaacaagtaagtgggggtgggatggcagtggaggaggcacgggtggtctgcagccttgaggtgggtgggtgtgggccgagccccygtcccagcacagacagacctgtccctgcaggtactttgggttcatcaccaagcaccccgccgaccaccggtttgcctgccacgtctttgtgtctgaagac

SEQ ID NO: 471283 - DNA, 201 bp, Homo sapiens
ggaccccagtgcgggtggcctggagggagggtggcgcggcagggtgagcctgaggagcagcttccaagcttggtagctgttgggccatgtcttcaactgayatcttactgggaaacgcgatggcaattctgtagagaacagagccaagtggccccagccagaggaaccagagctgcacttgggccccaaggctccagcggg

SEQ ID NO: 471284 - DNA, 201 bp, Homo sapiens
ctggagcaagaaagaggaaaaacaggaatacctgtgagaggaacccaagtacatgcagtgcacagaagagcaagtcacttgacttgctggcggccaccccrttaatctgcagcagagcctggacttcagtctgcatctgtgaaacccagcgcatgggtgcgttggtcaccaccgcacagcctccccgtcagacacccacgt

SEQ ID NO: 471285 - DNA, 201 bp, Homo sapiens; identical to SEQ ID NO: 54638

SEQ ID NO: 471286 - DNA, 201 bp, Homo sapiens
agtataagggccaccaccacctcggaatgcaggacagcgcacaccagggcagggtgggccttggtgaccgcatagctcacacatgtgaaggagaccaaggygaggatccccactgcccccacacaactccaactcaggagatcactgggcaacacggggggctgcagcacaaagaggcctggcacagagcccagcagcccc

SEQ ID NO: 471287 - DNA, 201 bp, Homo sapiens
gccactgttgggaggcaggagggaaagtgcagagaacgatagaccagaagccccagggacagcgccagtcctcccacgaaagcctgcccatagcccagggyggtgtagacacccgtgatcccctcctgtagtgtccagagtccaggtcccacaatgatgattagtcctaggatgctgcccaacagtccacaccagtcgtag

SEQ ID NO: 471288 - DNA, 201 bp, Homo sapiens
atgagaaagggggcccacgaagccagcaggcaggcccccacccagcagggccaccagcaggccattggtggcatcagagggctggcagcactggtgccagyggaggctgggtggagcggagggcggcgatgggtgtgtggagtcaggcgggttcaagtaggggtgactgccagcctgttagggagaaaggagctcagggta

SEQ ID NO: 471289 - DNA, 201 bp, Homo sapiens
gcaatagggaggtggaagaggcatcgacagatgagcagctccagcgagggcaggttggaagcctggtaagccatatgagaaagggggcccacgaagccagyaggcaggcccccacccagcagggccaccagcaggccattggtggcatcagagggctggcagcactggtgccagcggaggctgggtggagcggagggcggc

SEQ ID NO: 471290 - DNA, 201 bp, Homo sapiens
tttgatttgtagagaaccttagtttacaaagatcttttttatattaacttgtttcattacattaggtacgaagcatttttttatagcttagatgatttccrtatatccaaagaatagaaatgtgtggaaaatggtatatgtggaatcagatctcatgtttatgatttttgaacgggtaatcaaatcaactaatattttact

SEQ ID NO: 471291 - DNA, 201 bp, Homo sapiens
tcacattttgaaagtgtcggttcatattgcccccttttctgaaggttcctgtgagacaaatagaaggaacttgggaagtaagcaagtgttttttgcctctktttcctgcaggtcccagtagggatggcacaatcagcgaggacaccatccgagcctctctcatctctgcggtcagtgacaaactgagatggcggatgaagg

SEQ ID NO: 471292 - DNA, 201 bp, Homo sapiens
tactctagttacatttccgctgctatgagggtgactctcatataactgggaccaagcaagagcatttagccatttaagagtaaatgcagtgtcattaatamaatttccatagagctttacttgaataaacacttgcagctccaagactataaattcatcaactggtaaaacaaccatatgtcaaacttaacttcctgaatg

SEQ ID NO: 471293 - DNA, 201 bp, Homo sapiens
cagtttcacatacaagatccctgaaaaatagtgggtatggatgggcaccaggtgagccaccatgaagtttctctaccacaaccaccacccctgcccctggyaaaaaaagaggaagttaaaaggctttggtgattccttactccagtctcagcagtggtgaaagttctcttttgaaggttgacttattttaaaaagctatat

SEQ ID NO: 471294 - DNA, 201 bp, Homo sapiens
ggggaaataggaatgggggggatgcggatatatgtataaattgtatctagactaaacctctgttcctttaaccattcttcaatttaaaaataataaaaatrgagtaactgaagtttctatttctttttcaggtaatacatacaatattccaatatgcctatggctactggacacatacccatataatccccctatctgttt

SEQ ID NO: 471295 - DNA, 201 bp, Homo sapiens
tgaaagaaattgtttatatttggctatgaacttttctttttttcattttaatactggctaaggaggctgaggccaggagaccatttgagtccaggagttcragtccagcccggacaacttagaccccatttctaaaaaaaaaaaaagctgggcatggtagtgcacgcctgtagtcccagctacacggaaggctgaggtggg

SEQ ID NO: 471296 - DNA, 201 bp, Homo sapiens; identical to SEQ ID NO: 122685

SEQ ID NO: 471297 - DNA, 201 bp, Homo sapiens
agggcgcgcccaccgctcccttccgcgccctgtcgagtccgtcccggcccagccaagcaagcttcccagacgggccggaagccccggtgcagtccttagcsacctcctcagaaccccgccccgaggcgcctgtcgcctggtgcgggaatccccgtacgggagctgggagggtgggggacggcgacagtcaacaaaggcgtg

SEQ ID NO: 471298 - DNA, 201 bp, Homo sapiens
atgcaaaaagcaagaaagactgccggtctcagtgacctctactgacttctctgataccagctggaggttgagctcttcttaaagtattcttctcttccttwtatcagtaggtgcccagaataagttattgcagtttatcattcaagtgtaaaatattttgaatcaataatatattttctgttttcttttggtaaagactgg

SEQ ID NO: 471299 - DNA, 201 bp, Homo sapiens
agatccatgaaaccttagtaagcccaacttctcatttagcaaaaaaggcataaaatccatcttaagttgaaatttagtattattctacagcatataaagtraattaacatggggatataccaaatagaaatctaaattttgaaatatttgaaattgaagcatttgagtaacttatctgtgaaaggtccaaggagatgctct

SEQ ID NO: 471300 - DNA, 201 bp, Homo sapiens
caattggacatctagctcttagctttcttctctttcgtacagccaattcatgattttaccttgtgtggagtggtgggagcatggagagagtgttgcttctsccctaattggaatatattatctctgttatctctattttcttgaataattcttactgatacttaaaaatcactctgaataattgtgagttggttgtactta

SEQ ID NO: 471301 - DNA, 201 bp, Homo sapiens
aatcagctgtgctaattggccaacatagttataaaagaaatatcaaaagatttattagatataataaagaagttactctctaagaagttaaccttggaccraagaaggccagaattaccttcctctaaatttgaaattgaacttgctcttaggtaatagacttcttgagaactttaaaagctgaccaggttgacctgtttg

SEQ ID NO: 471302 - DNA, 201 bp, Homo sapiens
taagcctactagttcaatgactattaaaacaggaaagcatgttgatgcaaatgggaagatatatcttccttatctacatgaatggaaacacgtaagtattmatagtgttctgtgaattagttatgttttatatattttgctcactagcatctgctttcttttagcactcaaggaggattcgaggtaggatagataagttca

SEQ ID NO: 471303 - DNA, 201 bp, Homo sapiens
tttattaatgcactttctatcctctgtaaactttttgtgctgaatgttgggactgctaaataaaatttgttgcataatttttctctcctttattggacttkaggaaagatccatgaaaccttagtaagcccaacttctcatttagcaaaaaaggcataaaatccatcttaagttgaaatttagtattattctacagcatat

SEQ ID NO: 471304 - DNA, 201 bp, Homo sapiens
tcttgaagtctttaaaccaacaaaatcagctgtgctaattggccaacatagttataaaagaaatatcaaaagatttattagatataataaagaagttactytctaagaagttaaccttggaccgaagaaggccagaattaccttcctctaaatttgaaattgaacttgctcttaggtaatagacttcttgagaactttaaa

SEQ ID NO: 471305 - DNA, 201 bp, Homo sapiens
ctgccggtctcagtgacctctactgacttctctgataccagctggaggttgagctcttcttaaagtattcttctcttccttttatcagtaggtgcccagartaagttattgcagtttatcattcaagtgtaaaatattttgaatcaataatatattttctgttttcttttggtaaagactggcttttattaatgcactttc

SEQ ID NO: 471306 - DNA, 201 bp, Homo sapiens
tgggcctctatgcattgaatcctcttcatagactgaggaaagttactctcctatggcaggtgcccatttgttgggaagaaaaacctcttatgattttctaygtaaaggaaccttctgctggaaagtatcttgtctgatggcttagtttgcagtatcatttgtcgctgacaggtgacaagcttgttactgtcactgaaagtg

SEQ ID NO: 471307 - DNA, 201 bp, Homo sapiens
ataaaaacatagaacttttgaaaaagaaggatgaagaactcagttctgctctggaaaaaatggaaaatcagtctgaaaacaatgatatcgatgaagttatyattcccacagctcccttatacaaacagatcctgaatctgtatgcagaagaaaacgctattgaagacactatcttttacttgggagaagccttgagaaggg

SEQ ID NO: 471308 - DNA, 201 bp, Homo sapiens
aagcaaatacagaactaagctgttaaatcatttgagattgagatttttttatttttccttatttttactgctgttaatggcagacagccagtatataaaaygtagaaagagtatcctctgaatgtgcttattagaaatattagtcaataaattaaatattctttaatagacttctgccataatgcatagagaagcatcttt

SEQ ID NO: 471309 - DNA, 201 bp, Homo sapiens
ctattttatgcctgggcctaaatcaaagccattctaaactattcaaacttttctcccctcccagcatgtacgtcttctgtcccgtaaacagttccagctgrgggcactaatgcaaaaagcaagaaagactgccggtctcagtgacctctactgacttctctgataccagctggaggttgagctcttcttaaagtattcttc

SEQ ID NO: 471310 - DNA, 201 bp, Homo sapiens
ctcaagctggattacaaaatggaggggaaagtactggaatagacctagaatttttaaaattatgcatgctgcaaaatagccttatttgatcctcctgcctyggcctcccaaagtgctgggattacaggtgtaagccaccacccctggccagtgctcaataggtatttgagagaaaatcttagtaacttatgaaaaaatagg

SEQ ID NO: 471311 - DNA, 201 bp, Homo sapiens
cactgtggcgcatacctgtagtcccagctacttggaaggctgagatgggaggattgcttgagcctgggaggtggaggttgcagtgaactgagatcacaccmccgcactccagcctgggtgacagccacatgctgtctcaaaaaaaaaaaaaaaaaaaaaaaaaaggaaggggccaggtgcagtggttcatacctgtaatac

SEQ ID NO: 471312 - DNA, 201 bp, Homo sapiens
ttatgtaataactcatactttaaaaataataaatgcatcaaattctatcctaaacatatgaagacaatttaagattcagaatcctgtagtggatctctgtraaggacataatttctaatttgtcttttttgtaaatccatattttttatggcagatttaagtactcaaatagtagaaattagacactttaaaaagatatga

SEQ ID NO: 471313 - DNA, 201 bp, Homo sapiens
ctcaatactgggttaggctcaggaataagcaacacagaatcagttcctgactgttgaagaatttataatctggtgaatatgatcacacagaaaagcagaartgcaaataaaaatatgggaaatacaacaacatatatttaagggactaatctcaaccttctaacagagttcaggctcacaacttctaaggtactgaaaatg

SEQ ID NO: 471314 - DNA, 201 bp, Homo sapiens
aacacttacttttatctaataaaaagaaatgtcacactagaccaggacaaaggtctacaaagataggctctttccccaatctccccactcttcagcagcaragaacagacttcaggaagagaggtgcttcccacgagatcaaacccaaaaccagagtgcctcaaaaatgttctttacccccctattttatgttgagttaat

SEQ ID NO: 471315 - DNA, 201 bp, Homo sapiens
ttaaggccttttctgtaaaaattaaaatgcactcaaagaataaaaaacagcaaggtcaaatcaaggttttatctagtgttaggaacatttagattactctstgtgtgtgtgtgtatatatatacacttttatttttacattgtagagatagcatgtaaatgaacataggtattaagccatagagaagaattactatgcacc

SEQ ID NO: 471316 - DNA, 201 bp, Homo sapiens
gtccacagtcacattttctcagtatatcaatggtcacgatttgggctgttattctgttactgaggccatgagaaagaatgaatttggttatttatccttgttttttttgttgttgttgtttttgagacagactcgctctgtcgccaaggctggagtgcagtggcgcgatcttggctcactgcaacctccacctctcaggtt

SEQ ID NO: 471317 - DNA, 201 bp, Homo sapiens
ccacccgtgctggcctcccggattacagatgtgagtcactgcactaggctcccttgttctttttgaaacttagcagtttcactctgtagatttattttatwttattttattttattttattttattttattttattttattttattttattttatttttgagacagagtttcgctctgccacccaggctggagtgcagtgg

SEQ ID NO: 471318 - DNA, 201 bp, Homo sapiens
tctcccagtggagtcataggcagtgctgacttttcccagtaacagtatgtatcattatgcatggagtattacccaccaaggtagctcacctgagccttggrtctagagtttttatcaggacttggtcatatagacaccattgactgcctgtgaggctgacctttagtctccagctcctccagaggttgagctgttacctat

SEQ ID NO: 471319 - DNA, 201 bp, Homo sapiens
cccttttctactgcagtgtgttcactttgttaccaatttgcaacttgtgcttcaataatggaatctattttcattgttaacactgagctaaagaaaagccrtgtgttttatgaatgaccttatctgtttcctggataatacctttaagaataatcttctgagtcaggcatggtggtgtaggcatatagtcccaactacttg

SEQ ID NO: 471320 - DNA, 201 bp, Homo sapiens
gcctcccgggttccagcgattctcctgtctcagcctcccaagtagctgggactacaggcacgcaccaccacgcccagctaatttttgtatttttagtagasatgggttttcaccatgttgatctcgatctctggacctcatgatccacccgccttggcctcccaaagtgctggaattgcaggtgtgagccactgcgcccgg

SEQ ID NO: 471321 - DNA, 201 bp, Homo sapiens
tttgtttacagtggagcctatgtttggcatttggtcttagattgggaggggtataatatttagaccattttgtttgcaccttgtattagttcgttttcacrctgctgataaagacatatccgagacttgagagaaaaagaggtttaattggacttacagttccacatggctggggagacctcagaatcatggtgggaggca

SEQ ID NO: 471322 - DNA, 201 bp, Homo sapiens
ttttctttttttcattttaatactggctaaggaggctgaggccaggagaccatttgagtccaggagttcaagtccagcccggacaacttagaccccatttytaaaaaaaaaaaaagctgggcatggtagtgcacgcctgtagtcccagctacacgggatgctgaggcaggagaatcgcttgaacccaggaggtggaggttg

SEQ ID NO: 471323 - DNA, 201 bp, Homo sapiens
aaaaaaaaaaaaaaaaggaaggggccaggtgcagtggttcatacctgtaataccaacactttggaaggctgagttgagaggatcacttccaggagtttgaraacagcttgggcaacatagtgagatcctgtctctatgaaaaatttaaaaattatccaggtgtgatggtgcatgcctgtagtcccagctacttgggaggcg

SEQ ID NO: 471324 - DNA, 201 bp, Homo sapiens
tcatcagcacagagaaccatgccctaaaaaagccttaaagagtccaattgagacaaacaaatggaaagacatttcatgcccatgaagaattaatattgtaraaatgactatattacccaaagcagtctgtagattcagtgcagtctgtgtcgaaataccaatgtcagtttccatagaaatagaaaaagctatcataaaatg

SEQ ID NO: 471325 - DNA, 201 bp, Homo sapiens
gccactgtgcccagccaaaaggcacttcttacatggtggtggcaagaggaaatgaggaggaagcaaaagctggaacccctgataaacccatcagatcttgygagacttactatcacgagaatagaaagaccggctcccatgattcaattaccacccctgcgtgccatccctccccaccccctgctacacacacacacacac

SEQ ID NO: 471326 - DNA, 201 bp, Homo sapiens
aagaaaacgctattgaagacactatcttttacttgggagaagccttgagaaggggcgtgatagacctggatgtcttcctgaaggtatttcttcattttacrttccaagattttttaacttgggttgtagaggcactgaccttgcaaaccacaaaccaagagagtttctttgtagtatggattaagattctttatcttccca

SEQ ID NO: 471327 - DNA, 201 bp, Homo sapiens
ctttgtttacagtggagcctatgtttggcatttggtcttagattgggaggggtataatatttagaccattttgtttgcaccttgtattagttcgttttcaygctgctgataaagacatatccgagacttgagagaaaaagaggtttaattggacttacagttccacatggctggggagacctcagaatcatggtgggaggc

SEQ ID NO: 471328 - DNA, 201 bp, Homo sapiens
agagataagactaggtctaatcttggtgtttgtaacttcctcaggtgaactgtgacctttataggccaagcgactgctgcctcggcttggttcttattttragggttaatgactttggctggaaagtcttggcaaggacttatttggtggtattatggtagcatttgcctgaacatattctataaagagaaacagaatgta

SEQ ID NO: 471329 - DNA, 201 bp, Homo sapiens
acagttgtctgaaatgttcttccttcttcagagatagacctgttttttgttttttattatgaaagaaaaataatcctcatatgttctcggtctagtttctraatagatggtcagtaagctactgtgtgggattacttgggctccatagtttgctgtgtagcacagatgccagacctaggaccattatgtgggcctgagcaa

SEQ ID NO: 471330 - DNA, 201 bp, Homo sapiens
aaaagaggaagttaaaaggctttggtgattccttactccagtctcagcagtggtgaaagttctcttttgaaggttgacttattttaaaaagctatatagaygattgtagttgatttatagctctgaatcctaggctttaggcctttaacatatacacagtttgacctttcagtagttgcagtttaataatagtaaaattga

SEQ ID NO: 471331 - DNA, 201 bp, Homo sapiens
cactaatttttgtattttgtatgttagccaggctggtcaatctcctaacctcaggtgatccacctgcctcggcctcccaaagtgctgggattacaggcatragccacctcacccagcctggattttaattttatggtgtaatctgaattaagaaagatttaaaatttaccagatgttcaaaaatattagtatatagtatgg

SEQ ID NO: 471332 - DNA, 201 bp, Homo sapiens
ttgagaggatcacttccaggagtttgagaacagcttgggcaacatagtgagatcctgtctctatgaaaaatttaaaaattatccaggtgtgatggtgcatkcctgtagtcccagctacttgggaggcggtggtgggagtatcacttgagtccaggaggttgaggctgaagtgagccatgatcataccactgcactgtagcc

SEQ ID NO: 471333 - DNA, 201 bp, Homo sapiens
tgcagtgtcattaatacaatttccatagagctttacttgaataaacacttgcagctccaagactataaattcatcaactggtaaaacaaccatatgtcaarcttaacttcctgaatggggttcttcaaaatactataaggttgggtcatcttaaatgttaaatgttttttgttcttgtctttagtggttacccaggctgtc

SEQ ID NO: 471334 - DNA, 201 bp, Homo sapiens
tgccacctccattttttatctgttaattttcttagagttatataactttagaccagttttcccacatcaaagtatcaggctgccctttcaagccctcttgwatgaaagttgtctcaagcttaatgctgttgtacagaggaaaatctagtaagcgaagtttggctactgctgtctcttgggtcatggagaacatggttttag

SEQ ID NO: 471335 - DNA, 201 bp, Homo sapiens
tgggaggtggaggttgcagtgaactgagatcacaccaccgcactccagcctgggtgacagccacatgctgtctcaaaaaaaaaaaaaaaaaaaaaaaaaargaaggggccaggtgcagtggttcatacctgtaataccaacactttggaaggctgagttgagaggatcacttccaggagtttgagaacagcttgggcaaca

SEQ ID NO: 471336 - DNA, 201 bp, Homo sapiens
taagcaagtgttttttgcctctgtttcctgcaggtcccagtagggatggcacaatcagcgaggacaccatccgagcctctctcatctctgcggtcagtgayaaactgagatggcggatgaaggaggaaatggatcgtgcccaggcagagctcaatgccttgaaacgaacagaagaagacctgaaaaagggtcaccagaaac

SEQ ID NO: 471337 - DNA, 201 bp, Homo sapiens
atgagtttggtacgaatgttatcaaaagaggaaaaaaactatttaaagacaagtgttttcgggttaaatatccccaaaggttaccaataagccacaggtamaaattaaatagtatcattttcccacagactgagaaatcggaaaagttctctcacaaattacttgttgcttctgatgctgttggattgtccttagaaatac

SEQ ID NO: 471338 - DNA, 201 bp, Homo sapiens
accaatttaatctgttgtcaccaagcggtttacagcttaaggccttttctgtaaaaattaaaatgcactcaaagaataaaaaacagcaaggtcaaatcaakgttttatctagtgttaggaacatttagattactctctgtgtgtgtgtgtatatatatacacttttatttttacattgtagagatagcatgtaaatgaaca

SEQ ID NO: 471339 - DNA, 201 bp, Homo sapiens
taataatattgtgactgttgctcatattcatccctaaatttgtaccagtatacttataatacattgtacagtggcaataaaataaatttttgttagttctktggagtcaaatgaagaacaaaactctatgaattttgcaatatgctgctttaactagtgctatttttatatacttgaagcaagaaccttgctgcacatcat

SEQ ID NO: 471340 - DNA, 201 bp, Homo sapiens
tcatggtttttggcctgagcacctggaaggatatgtatgtatacacatatggaagacactggagaagtaaatttggggagaagatgaggagttcagttttkgtcatgttcaatttgacatttattagatatccaagggaaatgtcaaattggtaattgtatatatgttttctggagttcagagaagaggttaagattggaa

SEQ ID NO: 471341 - DNA, 201 bp, Homo sapiens
tgtgtgtgtatatatatacacttttatttttacattgtagagatagcatgtaaatgaacataggtattaagccatagagaagaattactatgcacctgatgaaaagaatcaggatttgtgtaacacagtaaacacattcttgtggaccagatggcaattacgtatacatacaaggcaagtactgagaagtaccaaaaacat

SEQ ID NO: 471342 - DNA, 201 bp, Homo sapiens
gtgtgtgtatatatatacacttttatttttacattgtagagatagcatgtaaatgaacataggtattaagccatagagaagaattactatgcacctgatgaaaagaatcaggatttgtgtaacacagtaaacacattcttgtggaccagatggcaattacgtatacatacaaggcaagtactgagaagtaccaaaaacatc

SEQ ID NO: 471343 - DNA, 201 bp, Homo sapiens
tgtgtgtatatatatacacttttatttttacattgtagagatagcatgtaaatgaacataggtattaagccatagagaagaattactatgcacctgatgaaaagaatcaggatttgtgtaacacagtaaacacattcttgtggaccagatggcaattacgtatacatacaaggcaagtactgagaagtaccaaaaacatct

SEQ ID NO: 471344 - DNA, 201 bp, Homo sapiens
gtgtgtatatatatacacttttatttttacattgtagagatagcatgtaaatgaacataggtattaagccatagagaagaattactatgcacctgatgaaaagaatcaggatttgtgtaacacagtaaacacattcttgtggaccagatggcaattacgtatacatacaaggcaagtactgagaagtaccaaaaacatctt

SEQ ID NO: 471345 - DNA, 201 bp, Homo sapiens
tgtgtatatatatacacttttatttttacattgtagagatagcatgtaaatgaacataggtattaagccatagagaagaattactatgcacctgatgaaaagaatcaggatttgtgtaacacagtaaacacattcttgtggaccagatggcaattacgtatacatacaaggcaagtactgagaagtaccaaaaacatcttt

SEQ ID NO: 471346 - DNA, 201 bp, Homo sapiens
ggtctccctatgttgcccaggctggtctcatactcctgggctcaagtgatcctcccacacctcagcagagatggggtctccctatgttgcccaggctggtstcatactcctgggctcaagtgatcctaccacctcagcttcccaaagtgctgggattataggcatgagccaccatgccctgccacagtggttaaacatttg

SEQ ID NO: 471347 - DNA, 201 bp, Homo sapiens
tgaggcacgagaatcacttgaacccaggaggcggaggttgcagtgagccaagtttgcgccactgcactccagcctgagcaacagagcaaaaccctctctcaaaaaaaaaaaaaaaaacttctaaagtttagttttacaattctaccactacatggacaaaattatgcacttaggtaagataaattaatatttaacataaat

SEQ ID NO: 471348 - DNA, 201 bp, Homo sapiens
gtgaactgagatcacaccaccgcactccagcctgggtgacagccacatgctgtctcaaaaaaaaaaaaaaaaaaaaaaaaaaggaaggggccaggtgcagkggttcatacctgtaataccaacactttggaaggctgagttgagaggatcacttccaggagtttgagaacagcttgggcaacatagtgagatcctgtctct

SEQ ID NO: 471349 - DNA, 201 bp, Homo sapiens
agaacagcttgggcaacatagtgagatcctgtctctatgaaaaatttaaaaattatccaggtgtgatggtgcatgcctgtagtcccagctacttgggaggyggtggtgggagtatcacttgagtccaggaggttgaggctgaagtgagccatgatcataccactgcactgtagcctgagcgacagagtgagaccctatctc

SEQ ID NO: 471350 - DNA, 201 bp, Homo sapiens
acgatctcggctcactgcaacctctgcctcctgggttcaagcgattctcctgcctcagcctcctgagtagctgggattataggtgcgcaccaccacgcccrgataatttttgtatttttagtagagatggggtttcactgtgttggccaggctggtctcgaactcctgacctcgtgatccgcctgcctcggcctcccaaaa

SEQ ID NO: 471351 - DNA, 201 bp, Homo sapiens
cggtgtccacccttgcccgcaggacggcggcccggaagtgacgtagtggaagcggaagtggtgtagtggtgccgacttcctgttgtttgaggccgggttgsgggtgtgcgattgtgtgggacggtctggggcagcccagcagcggctgaccctctgcctgcggggaagggagtcgccaggcggccgtcatggcggtgtcgg

SEQ ID NO: 471352 - DNA, 201 bp, Homo sapiens
agctcaagaaaatggtgtccaaggtgaggctgcgacgcgctcgcctcccagggcgcgcccaccgctcccttccgcgccctgtcgagtccgtcccggcccarccaagcaagcttcccagacgggccggaagccccggtgcagtccttagcgacctcctcagaaccccgccccgaggcgcctgtcgcctggtgcgggaatccc

SEQ ID NO: 471353 - DNA, 201 bp, Homo sapiens
gcatcctatccgccataccaggcaacggggccaccaaatagtaagtagaattgagattttactttaaaactcatataaacaaaagagaacagaaacctttktaaaaaaataaagaaaaataatgacttctttgctttttagtttatcaagctagtggattttttggaagtattctgaggccccacatctgcatgtacagat

SEQ ID NO: 471354 - DNA, 201 bp, Homo sapiens
gggattttctaagagtaactacttttaagtgtatgcttcttataacgcgtatttatttgctttgagcttaatttatgatcttcacggctcaagactagtgttttttttttcaatttttaaaaaagcagttaagcattttgtattttaaagccatgatttatttatataattacttcaaacgtggcacctcacaccagagtg

SEQ ID NO: 471355 - DNA, 201 bp, Homo sapiens
tagtattattctacagcatataaagtgaattaacatggggatataccaaatagaaatctaaattttgaaatatttgaaattgaagcatttgagtaacttayctgtgaaaggtccaaggagatgctctcctaccaaccctactaaatttgtttcctttctaggcctcactgaaccataagtgttttcatcaaaaaggagcag

SEQ ID NO: 471356 - DNA, 201 bp, Homo sapiens
gctggtctcaaactcctggcttcaagcagtccacccaccttggcctcccaaagtgctgggattacaggtgtgaaccacctcacttggctagaatctacctrtaatttcagagttcataatatctttaataaaaattaattttaagaacacgtatttccaagatatcattgatgtcttttaatggcctttaataatattgtg

SEQ ID NO: 471357 - DNA, 201 bp, Homo sapiens
actttgtctagcacagcttaattagtggttggtagatatttcttttgttgttttttgttgtcattgttgttgttgggttttgtttttgtttttttgaaacrgggtctcactctaacccaggctggagtgcagtggcgcagtcatactgcagcctcaaccttcctggctcaggtgatcctcccgctgcagcctcctgagtag

SEQ ID NO: 471358 - DNA, 201 bp, Homo sapiens
gtggtgtgtgcctgtgaccccagctactcaggaggctaaggtgaaaggatcacttgagcctgggaattcgaggctgcagtgagccatgattgcatcactgycctccagcctggacaacagagcaagatctgtctccaaaaaagaaaagaaaagatgagatactctgaattttcccaccttaagagatatgttgaattcctg

SEQ ID NO: 471359 - DNA, 201 bp, Homo sapiens
tttaggcaatcaagacatgtatggccaagattctgtagagaagaaaacagcaaagagatgaggtagttctgccaataacttttcccccagggtacttactrattcctttttttttttttggagacagagttttactctgttgcccaggctggagggcagtggcacaatctcagctcacttacaacctccacctcccaggtc

SEQ ID NO: 471360 - DNA, 201 bp, Homo sapiens
accaccacgcccagataatttttgtatttttagtagagatggggtttcactgtgttggccaggctggtctcgaactcctgacctcgtgatccgcctgcctyggcctcccaaaatgctaggattacaagtgtaagccaccacgcctggccggaaattttgtaatcatgaaaataacctctagatccaactaactcacagaaa

SEQ ID NO: 471361 - DNA, 201 bp, Homo sapiens
ataactagaaaagcaagagaaaatacaaacaacacctgttggaaggctttggaaagctgtttaggcaatcaagacatgtatggccaagattctgtagagargaaaacagcaaagagatgaggtagttctgccaataacttttcccccagggtacttactgattcctttttttttttttggagacagagttttactctgttg

SEQ ID NO: 471362 - DNA, 201 bp, Homo sapiens
tgaggtagttatggaattcaaatctgattactcaaagcatttctgtcaagaataatagtagggaacttctgtttatgtgtctgatagtgtaactgtgacakattaatgttcctatgaaaaataactagaaaagcaagagaaaatacaaacaacacctgttggaaggctttggaaagctgtttaggcaatcaagacatgtat

SEQ ID NO: 471363 - DNA, 201 bp, Homo sapiens
caactacttgggaggccgaggcaggaggatcgcctgagcgtaggagtttaaggctgcagtgccctgtggttgcacctgtgaaataaccgcactccagcctrgacaacgtagggagacctcatctccaaaaaaaaaaaaaaatagaatgatgttctgtagagattgcctttcacttgaggagtactgaatttcctggcttgg

SEQ ID NO: 471364 - DNA, 201 bp, Homo sapiens
taacataatttcttcaaccctgtctccttgaaaataatatgccagggccgagggaaaacccatgctgctgcttgtccattgtgagtcccttagctctgaargcaaggaactgaattttgtagctgagactttctaaatttcatttgcttccaaggctttgaaaacattaggaaactggtgaagagaggtgggaagcaacag

SEQ ID NO: 471365 - DNA, 201 bp, Homo sapiens
cctcacattttgaaagtgtcggttcatattgcccccttttctgaaggttcctgtgagacaaatagaaggaacttgggaagtaagcaagtgttttttgcctytgtttcctgcaggtcccagtagggatggcacaatcagcgaggacaccatccgagcctctctcatctctgcggtcagtgacaaactgagatggcggatgaa

SEQ ID NO: 471366 - DNA, 201 bp, Homo sapiens
ggtggaaggattgcttgagtccaggaggcagtccaggaggcagaggttgcagtgagccgagatcgggccactgcactccagcctgggcaacagagcaagamcctgtctcaaaaaaataaaaaacaaaacctctaacatagaactatgcaaatttaaacctaggaggggatgttaaagataatttagtccatttcccaaagt

SEQ ID NO: 471367 - DNA, 201 bp, Homo sapiens
aggtactggtaattcctttggattagaaatttgtttttatcttattaaattctgttgactctagtgcccaagagtagagtatcttgcttaagtttgaaatrcgaaatatttggccgggtgtggtagctgtaaccccagcactttgggaggccgaggtgggggtggatcacctgatgtcagaagttcaagaccagcttggcc

SEQ ID NO: 471368 - DNA, 201 bp, Homo sapiens
aatagtgattattttagtgtgataatagtattatgggttttttaggttctttcaggctttcattaatgttaacaattagtggaagagattttaagaaaattcatccagctgtaaaatatatgcattggttttaaactaaattcttatgcgattttgcttttcagtacaaatacagagacctaactgtacgtgaaactgtca

SEQ ID NO: 471369 - DNA, 201 bp, Homo sapiens
atagtgattattttagtgtgataatagtattatgggttttttaggttctttcaggctttcattaatgttaacaattagtggaagagattttaagaaaattcatccagctgtaaaatatatgcattggttttaaactaaattcttatgcgattttgcttttcagtacaaatacagagacctaactgtacgtgaaactgtcaa

SEQ ID NO: 471370 - DNA, 201 bp, Homo sapiens
tagtgattattttagtgtgataatagtattatgggttttttaggttctttcaggctttcattaatgttaacaattagtggaagagattttaagaaaattcatccagctgtaaaatatatgcattggttttaaactaaattcttatgcgattttgcttttcagtacaaatacagagacctaactgtacgtgaaactgtcaat

SEQ ID NO: 471371 - DNA, 201 bp, Homo sapiens
gtgattattttagtgtgataatagtattatgggttttttaggttctttcaggctttcattaatgttaacaattagtggaagagattttaagaaaattcatccagctgtaaaatatatgcattggttttaaactaaattcttatgcgattttgcttttcagtacaaatacagagacctaactgtacgtgaaactgtcaatgt

SEQ ID NO: 471372 - DNA, 201 bp, Homo sapiens
attctttaatgcatttttaaaacaaagatttttaaaaaatcaatgacaagtgttattttaaccataaaatagaaggaagcaaagagcattgaatagtaggraaaaattatttttttaatagagacagggtcttgctgtgctgcccaggctgatctaactcctggcctcaagcaatcctcctgccccagcctctcaaagtgc

SEQ ID NO: 471373 - DNA, 201 bp, Homo sapiens
ggaacagccgcgctctgggcagtgccggggttatttttaaagctcccggcttccttctaggcctgcctctcccgcgtcttattccttctaatctctccccygccccttgtcttgcgcctgccttcctaacagccttcagttccccttctcccgtcagaccttcctgacctcccacctggttctctaggggcagggtggaca

SEQ ID NO: 471374 - DNA, 201 bp, Homo sapiens
aggcccctggctgctgctcggggtggcactggtgttgctggctcagctcttggtgcatgtttcagatatgtgtgtacacttctgactggtgatcagggccyggcccacggccctgagcggctgcagcctgctttgggacgatggtcaggtcccatgttgtccctgctgcctccctctggagtggccacttggccaaagcgc

SEQ ID NO: 471375 - DNA, 201 bp, Homo sapiens
cccggcccacggccctgagcggctgcagcctgctttgggacgatggtcaggtcccatgttgtccctgctgcctccctctggagtggccacttggccaaagygcccatccacatctggaaagtcggagccgcagcctgctgcaccgtttccgctctgggatcttgtgagttacttttttaggctgtggtttggtgaaaggaa

SEQ ID NO: 471376 - DNA, 201 bp, Homo sapiens; identical to SEQ ID NO: 218177

SEQ ID NO: 471377 - DNA, 201 bp, Homo sapiens
aagagctgcagagtatttataaaactgtcttttagaaaaaaaacaagcaagaagaccatttgaccatatgaatggaaaagggaagaaagtataatagaaaytttgctagttaaaaaaaaaagaaaaaaaaagaaaaaaaatccctttcttgtaaacttacggacacctctttgtggctgttggagtttagtttttatatac

SEQ ID NO: 471378 - DNA, 201 bp, Homo sapiens
gtgagggtgggtccagtgtgccctgcgatgggtcccgtgtcactgtttacatgacctatttgtgtggttatatagccctttatttaaaagagagaagttcsttttacaaagttattaaattaattatatgtttaaaagttaaagaaaaaagagctgcagagtatttataaaactgtcttttagaaaaaaaacaagcaagaa

SEQ ID NO: 471379 - DNA, 201 bp, Homo sapiens
gctgcccgcgccgtgggctgcaggtctcgccgcccgcttgatccctgaggtgtttccatgctgcgggtggtgcttccaggcagagtgggtgggggcccacygggcaccgccctttcttccttgtccctgcctcactctgagagccttgggggtctccaccagtgcagacaagggctacagtctccagggccgggtcttgtc

SEQ ID NO: 471380 - DNA, 201 bp, Homo sapiens
tctcgacatgcaggcagcgtctatcccagactaccggggccctaatggagtgtggacactgcttcagaaagggagaagcgttaggtaagcgggccaggcayggcctcccacataggctgggcagcggcagcacgggcctgagctccagctctcctcaccttgccttcctttctgcctggcagtgctgccgacctgagcgag

SEQ ID NO: 471381 - DNA, 201 bp, Homo sapiens
atcctagtcacaggggaggcttataggacatctctggggaccttctgctgaacaccctcaaccaatggggtgtagtggttgatctgcctaggtccccaggracctgaaatgtcatgacccaagagagcatggatctggggcagagtggcccttgccaaaccccgagccacttcccaaccttgccgggacggtgcaacctct

SEQ ID NO: 471382 - DNA, 201 bp, Homo sapiens
ggtggaccaccagcctgggcgcagtggtgctgggggcgtgcagctgggcccaggggctgtgcactcaggcctgacccgttgcactgaacaagaccaaatckctggttgtgcgcttaacgtgagggtgggtccagtgtgccctgcgatgggtcccgtgtcactgtttacatgacctatttgtgtggttatatagccctttat

SEQ ID NO: 471383 - DNA, 201 bp, Homo sapiens
gcggcgaccgaggctgccagcagagcagacaccatcctgtgtctagggtccagcctgaaggtacgtgccgatgacacaatgagtgaaccgagcccctgccygcccgagggtgtccagctctgcggcccagcactgtacagacttgtcccttgtgtgtgtgcggtgtctgtctgtctgcttccacaggttctaaagaagtac

SEQ ID NO: 471384 - DNA, 201 bp, Homo sapiens; identical to SEQ ID NO: 218186

SEQ ID NO: 471385 - DNA, 201 bp, Homo sapiens
acctatttgtgtggttatatagccctttatttaaaagagagaagttccttttacaaagttattaaattaattatatgtttaaaagttaaagaaaaaagagytgcagagtatttataaaactgtcttttagaaaaaaaacaagcaagaagaccatttgaccatatgaatggaaaagggaagaaagtataatagaaactttgc

SEQ ID NO: 471386 - DNA, 201 bp, Homo sapiens
tttatccaatagtttggcctggtgtgcccacaggatgggaacagggaggcaccatcaacacttgtcatgttaatgagcttttctttgctcgaggtgttcakagacaagtcctgtgtctacctgcgtcagcctgaaaatggaaatattggctgttgactcttgtcatttagtgacttcatccccctcccctcagtctgatct

SEQ ID NO: 471387 - DNA, 201 bp, Homo sapiens
gccggcctggggcccctcgtcccaggcaaggtggccgccaccagcgtcatcacaatagtaaagtccaagacggatgcccgatcgtagggacgcgcgtctgmccaggcgggtctttgcggggccactaggcacatggcgaatttggctgccctgtccctctgtttccttctcttctctttcctccctctcttccccaccctt

SEQ ID NO: 471388 - DNA, 201 bp, Homo sapiens
gagtcttgagcctggtgaggatgtgtgcatccgcctggccacacttcagctcccctgatgagagtaagaagccccccagcccataatttcctgaagtgatmctagctcctctggaggagtctcccatctgtctgcatcaaacctggaaagtgggggatggagcatgaggcgggggtccatgcccaagggtctggtgggagc

SEQ ID NO: 471389 - DNA, 201 bp, Homo sapiens
ggcaggggctgcacaaaacgcacaaaaaggaagaaagtgacgtaatcacgtgctcgatgaagaacagttggcactttgcagatggccagtgtcacggtgarggctgggttgcccccacgggtctagggagaacgaactctttggggatgacattttcaccgtgacatttttagccatttgtccttgaggaagccccttgca

SEQ ID NO: 471390 - DNA, 201 bp, Homo sapiens
gaggtgggcggatcatgaggtcagtagttcaagaacaacctggccaacacggtgaaaccctgtctctactaaaaatacaaaaattagtcgggcatggtggygggcacctgcaatcccagctactcgagaggctgaggcaggagaatcacttgaaactggaaggcggaggttgcagtgagccgagatcatgccactgcattc

SEQ ID NO: 471391 - DNA, 201 bp, Homo sapiens
aaactgtcttttagaaaaaaaacaagcaagaagaccatttgaccatatgaatggaaaagggaagaaagtataatagaaactttgctagttaaaaaaaaaaraaaaaaaaagaaaaaaaatccctttcttgtaaacttacggacacctctttgtggctgttggagtttagtttttatatacacagagttatcagacattatt

SEQ ID NO: 471392 - DNA, 201 bp, Homo sapiens
ctttcctccctctcttccccacccttctctcttccctgcaaagcacaacctgtaccccaggggcgccgggctgagcccctttgatctcgtcattgtcgtcrtgtgttttgtatgttgggattggtcagttcggcggtgacgtggggtcgccccaaccccttttgtaccagggccatgcaggcttggagtccagagttggtg

SEQ ID NO: 471393 - DNA, 201 bp, Homo sapiens
tggtcaggtcccatgttgtccctgctgcctccctctggagtggccacttggccaaagcgcccatccacatctggaaagtcggagccgcagcctgctgcacygtttccgctctgggatcttgtgagttacttttttaggctgtggtttggtgaaaggaaccaacacattaacgatttttcccccagaagccactgaataatt

SEQ ID NO: 471394 - DNA, 201 bp, Homo sapiens
gggagctgaaccagcacctgcggggcctgtccaaggaggagatcgtccagctgaagcagcgccggcgcacgctcaagaaccgcggctacgctgccagctgycgcgtgaagcgggtgacgcagaaggaggagctggagaagcagaaggcggagctgcagcaggaggtggagaagctggcctcagagaacgccagcatgaagc

SEQ ID NO: 471395 - DNA, 201 bp, Homo sapiens
tgggtctataactaatgtcctagtattatcagttgagaaaagcttgtggttgcatgatgggtataaaatgatctcatgcctcttttcctttctctgccatygtggtgtgttcttgactccaccctcaccatgtcttctcacaagactttcaggattaagtgattcctgcccaagaaacaaaagcaaaatcgtcccattccc

SEQ ID NO: 471396 - DNA, 201 bp, Homo sapiens
tcacccctatctggagagttcgacgtgttttcctctccgaatctgttatgaacgcattggttggctgggttcagtaataaatatgtgaggcctttcatttaaaaaaaaaaagtctcatttctgtaattacaatacttcacccaaacaaacaaacaaaaataactagtacatgaacatgaagaacaatatagatgagaagaa

SEQ ID NO: 471397 - DNA, 201 bp, Homo sapiens
tgctttcacattcccagacacaatgccacagccacgtacaactagaaaatgcatttactgctggaagctttgcagagaaagtgttctcctctctgaattgytgtacgcaatccctgaagatgaagctgccacaaggttaactgtagcttcactgctggaaagccctgcctagggcatatgtgccctcagagaaaaagcact

SEQ ID NO: 471398 - DNA, 201 bp, Homo sapiens
catcttcccaccttcaggatattgggggtgtacatttttgaagtagatctgaaaagcaaggcagcactgctttcacattcccagacacaatgccacagccmcgtacaactagaaaatgcatttactgctggaagctttgcagagaaagtgttctcctctctgaattgctgtacgcaatccctgaagatgaagctgccacaa

SEQ ID NO: 471399 - DNA, 201 bp, Homo sapiens
accttcaggatattgggggtgtacatttttgaagtagatctgaaaagcaaggcagcactgctttcacattcccagacacaatgccacagccacgtacaackagaaaatgcatttactgctggaagctttgcagagaaagtgttctcctctctgaattgctgtacgcaatccctgaagatgaagctgccacaaggttaactg

SEQ ID NO: 471400 - DNA, 201 bp, Homo sapiens
cttgagagaggcccccaggaagaaatcaatgatctctgattcctgaaacaaacaagaaaattgtagggagagcattaaaaaaaaacttaataccattacgmtattcaagaaccaaagtcacggccgggggcggtggctcaagcctgtaatcccagcactttgggagactgaggtgggcggatcacaaggtcaggagtccga

SEQ ID NO: 471401 - DNA, 201 bp, Homo sapiens; identical to SEQ ID NO: 409131

SEQ ID NO: 471402 - DNA, 201 bp, Homo sapiens; identical to SEQ ID NO: 409116

SEQ ID NO: 471403 - DNA, 201 bp, Homo sapiens; identical to SEQ ID NO: 409134

SEQ ID NO: 471404 - DNA, 201 bp, Homo sapiens
gtcacggccgggggcggtggctcaagcctgtaatcccagcactttgggagactgaggtgggcggatcacaaggtcaggagtccgataccagcctggccacrtggtgaaaccccacctctattaaagacacaaaaaattagccgggcatggtggagtgcgcctgtaaccccagctattcaggaggctgaggcaggagaatcg

SEQ ID NO: 471405 - DNA, 201 bp, Homo sapiens
gggcggtggctcaagcctgtaatcccagcactttgggagactgaggtgggcggatcacaaggtcaggagtccgataccagcctggccacatggtgaaaccscacctctattaaagacacaaaaaattagccgggcatggtggagtgcgcctgtaaccccagctattcaggaggctgaggcaggagaatcgcttgaacctgg

SEQ ID NO: 471406 - DNA, 201 bp, Homo sapiens
ctatgacagtttgctaacccttacagtgtcctcccacaacctgaacttcatcatcctctcggatggcatgaaccaagcgctgcttctctttcagttctttsgaaatgaattcgctgcgaatgtgggaagatgcgctgaaatgccttttgtggctctggcttcgctcaggtatccatccaacctctaagtggaatcctctcc

SEQ ID NO: 471407 - DNA, 201 bp, Homo sapiens
tccttgagagaggcccccaggaagaaatcaatgatctctgattcctgaaacaaacaagaaaattgtagggagagcattaaaaaaaaacttaataccattaygatattcaagaaccaaagtcacggccgggggcggtggctcaagcctgtaatcccagcactttgggagactgaggtgggcggatcacaaggtcaggagtcc

SEQ ID NO: 471408 - DNA, 201 bp, Homo sapiens
aaatgtgtccacagggagacccaccatggagcacagatgccccatccccaaagccaggaggacgtgcgaatcctggtgacaaggtccttgggtgaagagayagccgcctgtcctgctcgctgccactgctcctgccactgctcccaccaacatagggaggatgtgcgtccggggccactcttccatcggaggagatgggct

SEQ ID NO: 471409 - DNA, 201 bp, Homo sapiens
ttttttttcctaaacagagactgggaggagccgggcacggtggcgcacgactgtattcccagcactttgggaggctgaggcgggcagatcacctgaggtcrggagttcaagaccggcctggccaacatggagaaatccagtctctactaaaaatgcaaaattagccgggtgtgatgccgcgtgccgtaatcccagctactc

SEQ ID NO: 471410 - DNA, 201 bp, Homo sapiens; identical to SEQ ID NO: 402751

SEQ ID NO: 471411 - DNA, 201 bp, Homo sapiens
gcagggcctccggaggggcccgctggcaggccttctgaatcttgtgctgaacaaaatcctccaaggcggtgaactctgcctggcagcggccgcatctgtgyacatcgtcctcatctgcaacgagcctgctgtcagcagggcctgggaaggcggaggctgggcagccagggctccgtctggcttttcctccagccctagaac

SEQ ID NO: 471412 - DNA, 201 bp, Homo sapiens
ggtcttgtggcacagcgcacacacatagcggccatccttgttcaccagtagcttcacctgggcctgctcaccctcccctgcgagccccagcccctgctggygggggctgcccggggcctcggccatctcaccgtctcccagctccgcctcagcagccacgatgacctctttgatgtgcccaccacctaggagaagcatctg

SEQ ID NO: 471413 - DNA, 201 bp, Homo sapiens; identical to SEQ ID NO: 402752

SEQ ID NO: 471414 - DNA, 201 bp, Homo sapiens
aaatcttgccagcaccctgtggaaatggagagaactattcccatcctaggaaaatgacctgaagttcaaggtcaccaaacggctgagtgtcagggacagtrcctgtttacacaaagggataggagctgtttcttctgcttccataaaagcctgccagctctgaccattcaccttcagtccctcggcaggatcaaacccagg

SEQ ID NO: 471415 - DNA, 201 bp, Homo sapiens
gcagcaggagctggctccagggcaccctcctccccagcagcgcgctcaaggacgatgccggagttctgcatggcctggtgcagcaggttctcacggctgcsctcgctggagcaggggagctcctgggagacggggggctgcaggggaggcagagagaggaggctggccaggcagcctggcatccagcacccaccccatggg

SEQ ID NO: 471416 - DNA, 201 bp, Homo sapiens
tccgtctggcttttcctccagccctagaacagattcccccaggaggccatcagaagcagagctacttccccaggctgctgagaacacactcgggcccaaamcaaggtcatcccaaggtacagcccctatcctctgcaggtctgcaggggccagacccaccctcaggaggtcagcacccagcagagggtggccctgacagca

SEQ ID NO: 471417 - DNA, 201 bp, Homo sapiens
cacttgtaatctcagcactttaaggggccaaggtgggaggatagcttgagcccaggagttcaagacgagcctggtcaacatagcaagacccatctctaccaaaaaaaaaaaaaaaaaagtttttaaaacattgttaaacatttaggctgggtgtggtggctcacacctgtaatcccaacactttgggaggctgagacaggt

SEQ ID NO: 471418 - DNA, 201 bp, Homo sapiens
cggggggctgcaggggaggcagagagaggaggctggccaggcagcctggcatccagcacccaccccatggggcagacgcacgccaggagccttgtgcaaaycctcagacccccatggcgctcccactggccctgctctccctgtgggaagcccagccctcgcctgcctggctcagacccctggagccagtgcccagaacaa

SEQ ID NO: 471419 - DNA, 201 bp, Homo sapiens
aggtgtgtcctgaagtgcacctgctgtgcgttctgtggagacacctgtcagtgccagcctggccttggccacaacagactacagctctcccctcccgcctstggcccaagggaggggctgggtcaagactgagcatggtggaggcagggaagggggtgcacctgggccacggccagggagcaggatggggggatcaggcgc

SEQ ID NO: 471420 - DNA, 201 bp, Homo sapiens
caggataagggcttgttacattactggcagaagccgccgccccattctgtaggggaaatagaggttcacagaggtagggtcacctacccaggatcaaagarctagaaagcggcaagtgtgggactggaaggggccacaggctggctgcagtgcaccagccctcttgcactaggctctgctgcctccctacggacaggccca

SEQ ID NO: 471421 - DNA, 201 bp, Homo sapiens
gacttgtggtgctcaggcctgggtccacgtccttgggacggctggggtgggggctctcctcttccccaacacgaccaccggtcccagtccaatcccttcayccccgggccagggtcagcgccgtcactctcacacctctggccacgtgggctggacctggagcacagggcgcctgcagggagggagcagcaactctggcag

SEQ ID NO: 471422 - DNA, 201 bp, Homo sapiens
cccaggccctggctgcctctgaatgcccccctgcacaagcatctgtccccgatgagagcttgcccatccagacctcgcaacagcccctcccacagcacatyagggagagagacatcttcacttaaaaagtagccatcaaagagtcctggcattgcacgctcataaaagccccatgaggaccagtgtagcaatcaccactcc

SEQ ID NO: 471423 - DNA, 201 bp, Homo sapiens
ccgcacccccaaccccagcagcccctagctccctcaacctgcccaggccctggctgcctctgaatgcccccctgcacaagcatctgtccccgatgagagcytgcccatccagacctcgcaacagcccctcccacagcacattagggagagagacatcttcacttaaaaagtagccatcaaagagtcctggcattgcacgct

SEQ ID NO: 471424 - DNA, 201 bp, Homo sapiens
cagagactgggaggagccgggcacggtggcgcacgactgtattcccagcactttgggaggctgaggcgggcagatcacctgaggtcgggagttcaagaccrgcctggccaacatggagaaatccagtctctactaaaaatgcaaaattagccgggtgtgatgccgcgtgccgtaatcccagctactcaggaggccgagtca

SEQ ID NO: 471425 - DNA, 201 bp, Homo sapiens
cctggactaagcccaccgggcctgctgactggccaagggcacacacagagtacccaggatgcccgcaaaggggaaaatcccaggggtgccagagtggcagrggtgccaagaggggctgctgaagcacagggaggggtgctgagcctagggctggaggctgctagagtttaggtgggtggaaaggggcctggctggccagag

SEQ ID NO: 471426 - DNA, 201 bp, Homo sapiens
gaggtgggttccaactgcccacacagctgaccgcacccctgcacccgcaaagacaggacctggcacgccccagcccttggccaccagcaggcaggaccctstgccatctccactagaggccaacaggagagctagcagccctggactaagcccaccgggcctgctgactggccaagggcacacacagagtacccaggatgc

SEQ ID NO: 471427 - DNA, 201 bp, Homo sapiens
taaagcaacaagaaactcttatgtacactgtccgtcttggggcgcctccatcctgtgccatcttctctaccaggccaggcaggcatgggtggggcgctcaragtcctctgccctgtccctgcccggccaggaccccgcagacctcatgctagacgatgaccgtctgcacctccagctggccctccggcgaggcgatgacca

SEQ ID NO: 471428 - DNA, 201 bp, Homo sapiens
tggtgactcagaaacaattaagagcctctcctgcccgagcccttacacgctcgatgccccaggagtgatcttccaaaggacagaggcctctgatggggagracctgggggaacatggctgctgcgaggccagaggagacgcgaactttttccgcgaagcggcaggagggcctggaggtgggttccaactgcccacacagct

SEQ ID NO: 471429 - DNA, 201 bp, Homo sapiens; identical to SEQ ID NO: 402771

SEQ ID NO: 471430 - DNA, 201 bp, Homo sapiens
gggccttgaggatgctgccctgtgggggagggcgtggcagctcagggccctcctgggggaacaggagggggcctgccacccacacactggctccccgcacrccggctcaccgtcttgaaggtcttgtggcacagcgcacacacatagcggccatccttgttcaccagtagcttcacctgggcctgctcaccctcccctgcg

SEQ ID NO: 471431 - DNA, 201 bp, Homo sapiens
tgaaacacgacaaaagcgtggtgactcagaaacaattaagagcctctcctgcccgagcccttacacgctcgatgccccaggagtgatcttccaaaggacaraggcctctgatggggaggacctgggggaacatggctgctgcgaggccagaggagacgcgaactttttccgcgaagcggcaggagggcctggaggtgggtt

SEQ ID NO: 471432 - DNA, 201 bp, Homo sapiens; identical to SEQ ID NO: 402774

SEQ ID NO: 471433 - DNA, 201 bp, Homo sapiens; identical to SEQ ID NO: 402797

SEQ ID NO: 471434 - DNA, 201 bp, Homo sapiens
tgcacaggtccatcctgaagcgcggccacctcccccacctgtcaggtgaacccgggaggggatgggggagtgggtgagggctcacctcctggcccagcaaygctgtggtggcaggggtggcaggcagggcctccggaggggcccgctggcaggccttctgaatcttgtgctgaacaaaatcctccaaggcggtgaactctg

SEQ ID NO: 471435 - DNA, 201 bp, Homo sapiens
tgacttgtggtgctcaggcctgggtccacgtccttgggacggctggggtgggggctctcctcttccccaacacgaccaccggtcccagtccaatcccttcmcccccgggccagggtcagcgccgtcactctcacacctctggccacgtgggctggacctggagcacagggcgcctgcagggagggagcagcaactctggca

SEQ ID NO: 471436 - DNA, 201 bp, Homo sapiens
cgcctgccaccacggccagctaattttttgtatttttagtaagacagggtttcacctgttagccagggtggtctcgatctcctgacctcgggatccgcccrtctcagcctcccaaagtgctgggattacaggcgcgagccattgcgcccagccttttttttttttttttttttttcctaaacagagactgggaggagccgg

SEQ ID NO: 471437 - DNA, 201 bp, Homo sapiens; identical to SEQ ID NO: 205306

SEQ ID NO: 471438 - DNA, 201 bp, Homo sapiens
gagatattgaactatctgaaattgaccagtaatcaaagttccaatcatctgaatgcttttccttgaggtagaatgtgagtctcagaaatgactgcattacstgcccttttttgcaccttttctgtctttttattttgcagaacaacaacaacaacaaaattgtgccttagctgtatttttttgtctaggggagtttgtttc

SEQ ID NO: 471439 - DNA, 201 bp, Homo sapiens
aattcaaatggcacacgctgaaatatgtagatattttgctatttatttaaaggagtattttaagagatattgaactatctgaaattgaccagtaatcaaasttccaatcatctgaatgcttttccttgaggtagaatgtgagtctcagaaatgactgcattacgtgcccttttttgcaccttttctgtctttttattttgc

SEQ ID NO: 471440 - DNA, 201 bp, Homo sapiens; identical to SEQ ID NO: 205123

SEQ ID NO: 471441 - DNA, 201 bp, Homo sapiens
atgtggtgatatagtttttaaaaataactattttgttatagatcataatatgcataaaactgtacagaaatattttgtaatgtgttgattttaaaaaaagaatctgtaaataaagttttaaaaaaagaattcaaatggcacacgctgaaatatgtagatattttgctatttatttaaaggagtattttaagagatattgaa

SEQ ID NO: 471442 - DNA, 201 bp, Homo sapiens
catgtggtgatatagtttttaaaaataactattttgttatagatcataatatgcataaaactgtacagaaatattttgtaatgtgttgattttaaaaaaagaatctgtaaataaagttttaaaaaaagaattcaaatggcacacgctgaaatatgtagatattttgctatttatttaaaggagtattttaagagatattga

SEQ ID NO: 471443 - DNA, 201 bp, Homo sapiens
taaaaaaaaaaaaaaaaaaaaggaaaagaaagaaaattgcggttcctcacaggcatggagactaccagccacatctttgccacttattttctggcattggmggtaaaccaagctgtgtgtactggcagttcttgttagaactgcccaaagctgggccctgcagctgctgactcatggggtctgggttggggccccaaatct

SEQ ID NO: 471444 - DNA, 201 bp, Homo sapiens
atctgtaaccaagctgtgcctcagttgtctccattcaggccctgggggtgagcccagcctttggcctgtggccccaatcccgctgctggggctcctccccsctgtgcccttcccctccccggtgcggcttcagtgcagccaggctctccttggtacccaggccagacagagtgatctgactttaactctctacagacagac

SEQ ID NO: 471445 - DNA, 201 bp, Homo sapiens
gtggtagtgcatgcctgtagtcccagctacttgggaggctgaagtgggaggatggcctgagctcaaggagatgcaggctgcagtgggctgtgattgtgccmctgcactccagcctgggcaccaatgtgagaacctgtcttggaaaaaaaaaaaaagaaacatgttttagtagaagttttatttgaaaaagaaaaataagca

SEQ ID NO: 471446 - DNA, 201 bp, Homo sapiens
gtgaggtgagctttcctgggaggtggcagttgacaggggtgcctttgggtgcagtctgcctactctgggacactgagggtcctggaggtctgggggaaagstgggtgtgagcacaggacttgctgccagggctgcccgatctggctcttgctcgggagaggccacagagaggaagacggggcgggtgggagccccggggcc

SEQ ID NO: 471447 - DNA, 201 bp, Homo sapiens
aagcatccctggggctgcggagaaggtaaatgccacagcagagcgcctgcctggggagcccccactccttgcccctcagccctctcacagaagccacatgsggaaagcctcagaggtggcgagtctctgaggcctacaaaacacaggaatgcggagtccaggaaaagcagttgccaatagggagctgatgtgggggtggct

SEQ ID NO: 471448 - DNA, 201 bp, Homo sapiens
agtatttggaaagtttgtttgttttttttttcattgcaaagagaaaatgcaatagacatgagcatagaggaaaattaaaggtattacaaggaaatactgcstgtaattctctgataatcaatttgaaaacctaatggttttctaaaatttgcaagttattggccaggtgtggtggctcacgcctgtaatcccagcactttg

SEQ ID NO: 471449 - DNA, 201 bp, Homo sapiens
cactgcccttgacaaggaggtatgcccggcactgccacccccaacagctggggcctgcaaactcctttatttggagcccgtttgggatgtagattcctacygtgatgtttctagaatgagagtgggatgggtcctgctgtgtggagcacacgtggactcgggacagggattgtgcatgtagcacgcgtggactcggggaga

SEQ ID NO: 471450 - DNA, 201 bp, Homo sapiens
ccaactgaaagatgatttgctcagtctcttctgaacctcgtgtgaagtgacatttaatggtagcatccgtaaagtgtaatcacatttgatcaattttcttytgagttgcctgtgaggaagggcagtgaagccattcccactgggagcccgaagcccacgccaggatgggttggtagcagctcggagccttgcccgccttgg

SEQ ID NO: 471451 - DNA, 201 bp, Homo sapiens
ccacattcagtaaagtctttcctttaaatgccagtgttatgagttattaatcattctttttttaaacaaatagtgcaaatgaagatgatgaagtcttcttyggaccctttggacataaagaaagatgtattgctgccagcttggaattaaataatccggttcccgaacagcctccgttgcccacatctgagagtccctttg

SEQ ID NO: 471452 - DNA, 201 bp, Homo sapiens
gagtgaaatttcacagtacctttatttaattccaagccatagagcctggtaatatttttctctttatcagctgtggcactaaaataacagtggattttttycctctagacattcttcttttggccgatgaaaaatttgacttcgatctttcattgtcttcttcgaggtaaacaaatgagttttcttcccttgccttgggca

SEQ ID NO: 471453 - DNA, 201 bp, Homo sapiens
tcctgcctcagcctccccagtagctgggattacaggtgcacaccaccacgctcggctaatttttttattctttatttttggtagagatgggattttgccaygttggccaggctgatctcgaactcctgaccacaaatcatctgcctgcctcagcctcccaaagtgctgggattacaggtgtgagccaccttgcccggcctt

SEQ ID NO: 471454 - DNA, 201 bp, Homo sapiens
gaaaacctaatggttttctaaaatttgcaagttattggccaggtgtggtggctcacgcctgtaatcccagcactttgggaggccgaggcaggcagactgcytgagctcaggagtttgagatcaacctgggtaacatggcaaaaccccatctctacaaaaaatacaaaaataagctaggtgtggtggcgtgcactgtagtcc

SEQ ID NO: 471455 - DNA, 201 bp, Homo sapiens
gccgccttctctgtcctcactgggttaggggtgaacaagtttcttttatgctgatttatttatttatttattttgagatggagactcgctctgtcacctargctggagtgcagtggcgcgatcttggctcactgcaacctccgcttcctacgttcaagcaattctcctgcctcagcctcacgagcggctgggaccacaggc

SEQ ID NO: 471456 - DNA, 201 bp, Homo sapiens
attacaggcgtgagccattgcgcccagcctgttttgttttgttttctgagacagagtcttgctgtgtcacccaggctggagtgcagtggcgcaatcttggytcattgcaacatctacctccgaggttcaagcaattctcctgcctcagcctccccagtagctgggattacaggtgcacaccaccacgctcggctaattttt

SEQ ID NO: 471457 - DNA, 201 bp, Homo sapiens
ttgctgctgcggcgctgttgttgttcaggatgttcagtagagatggagggtgatttaatgtttccctgagaaattctttctcaagtgctcgacttgtactstgcacctgtgaaacacatgacatctgccttcgttttctggttttctttcacctcctccccattttaagtttcatcacagccaggattctcatccgtttta

SEQ ID NO: 471458 - DNA, 201 bp, Homo sapiens
gaattaggcctgatgtggtgtgaggcatggaccaaacttagttggcatttttccagatgattatgtagtttattttaataccattttttcactttccctcttttttttttttttttttctttgagttggagtcttgctctgtcacccaggctggagtgcagtggcgtgatcttggctcactgcaagctccgcctcccaggt

SEQ ID NO: 471459 - DNA, 201 bp, Homo sapiens
agcatcatgacaggatacactttggggagtgaaatttcacagtacctttatttaattccaagccatagagcctggtaatatttttctctttatcagctgtrgcactaaaataacagtggattttttccctctagacattcttcttttggccgatgaaaaatttgacttcgatctttcattgtcttcttcgaggtaaacaaa

SEQ ID NO: 471460 - DNA, 201 bp, Homo sapiens
agtttattttaataccattttttcactttccctcttttttttttttttttttctttgagttggagtcttgctctgtcacccaggctggagtgcagtggcgygatcttggctcactgcaagctccgcctcccaggttcatgccattcttctgcatcagcctcccaagtagctgggactacaggcacctgccaccacacccgg

SEQ ID NO: 471461 - DNA, 201 bp, Homo sapiens
aagccggagccctgggccctgacacgtactcactttctggccccgttccaccctgcagtgacttctgacagctctctccatggaaggaggcggcggccgckatgagccttcagcctgccgggcaggggacgtgaacatggatgaccctaagaaggaaggcaagtccttgctgctgcggcgctgttgttgttcaggatgttc

SEQ ID NO: 471462 - DNA, 201 bp, Homo sapiens
ttttttttttttttctttgagttggagtcttgctctgtcacccaggctggagtgcagtggcgtgatcttggctcactgcaagctccgcctcccaggttcaygccattcttctgcatcagcctcccaagtagctgggactacaggcacctgccaccacacccggctaattttttgtattttttagtagagatggggtttcac

SEQ ID NO: 471463 - DNA, 201 bp, Homo sapiens
cacattctcccaagatggttgccagaaagatgctggactctgctcttaaccttggttttgtacccaggctcttcttgtagatatcaaactggaaccactcrcggtcactccagatgctgcaagccagcccctcattgaccttcctctcatcgacttctgcgataccccagaagcacacgtggctgtaggatctgaaagcag

SEQ ID NO: 471464 - DNA, 201 bp, Homo sapiens
gtacccaggctcttcttgtagatatcaaactggaaccactcgcggtcactccagatgctgcaagccagcccctcattgaccttcctctcatcgacttctgygataccccagaagcacacgtggctgtaggatctgaaagcaggcctctgatcgacctcatgacaaacactccagacatgaataaaaatgtggccaaacctt

SEQ ID NO: 471465 - DNA, 201 bp, Homo sapiens
aggtgactccccggacagctcaacaccaaagctttcgcgggcacagcggccgcagtcgtgcacgtcagttggcaggtgagtgacgttggtccgcttcctcyctttattgctgtagaatgactcacgcatctgcttacctcaaccatttggtaaccctgcagcctggcctgcgcatctggcttccacgccagtctcttgggt

SEQ ID NO: 471466 - DNA, 201 bp, Homo sapiens
tgtggctgcctgcagcagggtggccctttgtgtacttgtctgagccagtgccacctacactcaagttgggacagtggagatactcggagaattgcccattyggtgacgatcccccaacagtaggtctccccctgatcactttacctgaccgcacacttcctttcttggacttaggtgactccccggacagctcaacaccaa

SEQ ID NO: 471467 - DNA, 201 bp, Homo sapiens
gagccagtgccacctacactcaagttgggacagtggagatactcggagaattgcccattcggtgacgatcccccaacagtaggtctccccctgatcacttyacctgaccgcacacttcctttcttggacttaggtgactccccggacagctcaacaccaaagctttcgcgggcacagcggccgcagtcgtgcacgtcagtt

SEQ ID NO: 471468 - DNA, 201 bp, Homo sapiens
agaattgcccattcggtgacgatcccccaacagtaggtctccccctgatcactttacctgaccgcacacttcctttcttggacttaggtgactccccggasagctcaacaccaaagctttcgcgggcacagcggccgcagtcgtgcacgtcagttggcaggtgagtgacgttggtccgcttcctctctttattgctgtaga

SEQ ID NO: 471469 - DNA, 201 bp, Homo sapiens
ctacctgtcagacagccccttgctggggccccctgtgggtgagcctcggctcttggcctcctccccggccctgcccagctctggtgcccaggcccgcctcrcccgggcgccggggcctccgcactctgctcatgctttgcccagggaatcatgcactgctcatgctgcaagtcaggcagcgactcagaggaagcccgggac

SEQ ID NO: 471470 - DNA, 201 bp, Homo sapiens
cctttcttggacttaggtgactccccggacagctcaacaccaaagctttcgcgggcacagcggccgcagtcgtgcacgtcagttggcaggtgagtgacgtyggtccgcttcctctctttattgctgtagaatgactcacgcatctgcttacctcaaccatttggtaaccctgcagcctggcctgcgcatctggcttccacg

SEQ ID NO: 471471 - DNA, 201 bp, Homo sapiens
acagccccttgctggggccccctgtgggtgagcctcggctcttggcctcctccccggccctgcccagctctggtgcccaggcccgcctcacccgggcgccrgggcctccgcactctgctcatgctttgcccagggaatcatgcactgctcatgctgcaagtcaggcagcgactcagaggaagcccgggaccaaattgctgc

SEQ ID NO: 471472 - DNA, 201 bp, Homo sapiens
ttggacttaggtgactccccggacagctcaacaccaaagctttcgcgggcacagcggccgcagtcgtgcacgtcagttggcaggtgagtgacgttggtccrcttcctctctttattgctgtagaatgactcacgcatctgcttacctcaaccatttggtaaccctgcagcctggcctgcgcatctggcttccacgccagtc

SEQ ID NO: 471473 - DNA, 201 bp, Homo sapiens
tgtcaaacatcagcaagtcaggcagaatgggacccgccatgctgcggccagctctgcctgcaggccctgtgggggcatcctcctggcaggccaagcgggtygatgtttctgagctggcagcggagcagctcacggcacccccctcagcatcccccacccaaccccagactccggaaggtggcggccagtggctgaactcca

SEQ ID NO: 471474 - DNA, 201 bp, Homo sapiens
gtccacaaagatgagggaaaatgatgactgtgctgtgctctctacttcctgcggttactgcgtgattctaaagctgccactcggaacagcgagtcctctgscgtcgagagcagggaggggtagggtggacaggcgatgccgtggaaagacgtctcggtggaaactgccatggtggaaaggtggcgcgcttctcacggctga

SEQ ID NO: 471475 - DNA, 201 bp, Homo sapiens
ggagtgcagtggcgtgatcttggctcactgcaagctccgcctcccaggttcatgccattcttctgcatcagcctcccaagtagctgggactacaggcaccygccaccacacccggctaattttttgtattttttagtagagatggggtttcaccgtgttagccaggatggtctcgatctcctgaccttgtgatccaccctc

SEQ ID NO: 471476 - DNA, 201 bp, Homo sapiens
cggctaattttttgcattttttgtagagacagggtttcaccatgttagccaggatggtcttgatctcctgacctcgtgatccgcccgcctcggcctcccawagtgctgggattacaggcgtgagccattgcgcccagcctgttttgttttgttttctgagacagagtcttgctgtgtcacccaggctggagtgcagtggcg

SEQ ID NO: 471477 - DNA, 201 bp, Homo sapiens
aggtgttccaagggggtcctggtgcctgaggctttggaggccccagagcacatgtgctgatactcaagtgcacactgggattttcaaggagccagtatagwggaggaggaaccatggagccagtgtctgggggcgtggtggcgggactggacctctggggcctgtgttgggccttagctcggtaactggtgacccctttgc

SEQ ID NO: 471478 - DNA, 201 bp, Homo sapiens
actttgggaggccgaggcgggcaatcacttgaggtcaggagttcaagaccagcctggccaacatggcaaaaccctgtctctactaacaatacaaaaattakccgggcgtggtggcgggcacctataattccagctactcaggaggctgaggcaaaagaatcacttgaacccaggaggcggaggttgcggtaagccgagatc

SEQ ID NO: 471479 - DNA, 201 bp, Homo sapiens
ggaaagattcatacaggagtcaaaattaaaaataaacctctttgagaaagaaaaggaaatgaagaaaagccccacgtctcttaaaagggagacatactacytgtcagacagccccttgctggggccccctgtgggtgagcctcggctcttggcctcctccccggccctgcccagctctggtgcccaggcccgcctcacccg

SEQ ID NO: 471480 - DNA, 201 bp, Homo sapiens
ttcctgcaaatagctcccggcctctgtcaaacatcagcaagtcaggcagaatgggacccgccatgctgcggccagctctgcctgcaggccctgtgggggcrtcctcctggcaggccaagcgggtcgatgtttctgagctggcagcggagcagctcacggcacccccctcagcatcccccacccaaccccagactccggaag

SEQ ID NO: 471481 - DNA, 201 bp, Homo sapiens
tccagctagtccttccaggacaaaaatcccagctgagaaggaatcccaccgggatgttctccctgacaaacctgccccgggtgctgtcaatgtgccggccrccggaagccacttgggccagggcaagcgggcgatccctgttccaaacaaggtgagttggctgctggggcccaaacttgtggttgctgggaatgaggtggc

SEQ ID NO: 471482 - DNA, 201 bp, Homo sapiens
gaggtgatgacctcctgagatcaagcaatcctcccacctcagcctcctgagtagctgggactacaggcacatgccaccacacccggctaatttttgtgggttttttttttttgagatggagtctcactctattgccaggttggagtgcagtggcgcaatcttggctcactacaacctctgcctcccgggttcgagtgattc

SEQ ID NO: 471483 - DNA, 201 bp, Homo sapiens
gttggctgctggggcccaaacttgtggttgctgggaatgaggtggcagctgtgtgtacaagtgctttggattaaaatcccagcattttgggaggccaaggygggaggatcacttgagcccaggagttcaagaccagcctgagcaacatgatgaaacccatctctacaaaaaatacaaaaattagctgggcatggtggtgag

SEQ ID NO: 471484 - DNA, 201 bp, Homo sapiens
ctgaagaccctcggagccagggcgtggaaagattcatacaggagtcaaaattaaaaataaacctctttgagaaagaaaaggaaatgaagaaaagccccacrtctcttaaaagggagacatactacctgtcagacagccccttgctggggccccctgtgggtgagcctcggctcttggcctcctccccggccctgcccagct

SEQ ID NO: 471485 - DNA, 201 bp, Homo sapiens
aataaacctctttgagaaagaaaaggaaatgaagaaaagccccacgtctcttaaaagggagacatactacctgtcagacagccccttgctggggccccctktgggtgagcctcggctcttggcctcctccccggccctgcccagctctggtgcccaggcccgcctcacccgggcgccggggcctccgcactctgctcatgc

SEQ ID NO: 471486 - DNA, 201 bp, Homo sapiens
tcctccccggccctgcccagctctggtgcccaggcccgcctcacccgggcgccggggcctccgcactctgctcatgctttgcccagggaatcatgcactgytcatgctgcaagtcaggcagcgactcagaggaagcccgggaccaaattgctgctgcctcgagcggcctctgttagaggaagaagcatccctggggctgcg

SEQ ID NO: 471487 - DNA, 201 bp, Homo sapiens
gatcccccaacagtaggtctccccctgatcactttacctgaccgcacacttcctttcttggacttaggtgactccccggacagctcaacaccaaagctttygcgggcacagcggccgcagtcgtgcacgtcagttggcaggtgagtgacgttggtccgcttcctctctttattgctgtagaatgactcacgcatctgctta

SEQ ID NO: 471488 - DNA, 201 bp, Homo sapiens
agcagcagccggaaccaggcagcccaagctgccaagcctgaagaccctcggagccagggcgtggaaagattcatacaggagtcaaaattaaaaataaaccyctttgagaaagaaaaggaaatgaagaaaagccccacgtctcttaaaagggagacatactacctgtcagacagccccttgctggggccccctgtgggtgag

SEQ ID NO: 471489 - DNA, 201 bp, Homo sapiens
gaaggccctagagccgggacgcactccacccaggacactgttcctccagagtgacttgcttcccacatcagccaagtgaacgagcattttagagacatttyctcataagtttttttccttcccacagaactgaaccaacaagggagagcaacagaaagacagattccaggctggtggatgtgtcccctgacaggggttctc

SEQ ID NO: 471490 - DNA, 201 bp, Homo sapiens
tccatagtgatttggtggaggatgcgaactgcttgccctgttcccttcaatctggctgatgaatggaggggcatgtgtagcactggggaagatggggcctrggctcgctctgaatggaagcctgagtatctctgtacattgttaagcactagacagttctcacagttcaaattaaaattttcagcccaagaaagagattcc

SEQ ID NO: 471491 - DNA, 201 bp, Homo sapiens
agtagctcgggaggaagccaagccgggtggagatgcagcccctagtgaggtgggcagaacgggcgcagctgggttctgttagctgagattcctggaggctrctcgggaagcccgtggaacccagggctgtggctggcggagttccctgccatgcttcatcctggggccagtgcctccgtgccaagcaacccaaagggaggc

SEQ ID NO: 471492 - DNA, 201 bp, Homo sapiens
ctggcctcccgaggggccatggtggtgggatgtccttgactcattttattttaaaataatgtctttgtcctttttgggctactataacaaacgttctatcractatgtagcttgaacaacaaacatttgtttctcacaattctggaggctagaaatccaagatcaaggcacctgcagatttggtgtctggtgagggcctgt

SEQ ID NO: 471493 - DNA, 201 bp, Homo sapiens
ggaagcaaaatccatcatcacttatgtccatagtgatttggtggaggatgcgaactgcttgccctgttcccttcaatctggctgatgaatggaggggcatrtgtagcactggggaagatggggcctaggctcgctctgaatggaagcctgagtatctctgtacattgttaagcactagacagttctcacagttcaaattaa

SEQ ID NO: 471494 - DNA, 201 bp, Homo sapiens
attcttaactcttgtaacaaacggagtttctgaagaatgcggaggtagcaatgtgggtgcgtgatttagaaatgagtgaagggagacatcgcaagaagctkccagcacgctggaagcagagctgggtgtggtgggagacttgtttgtctcataaaattttaaccttcatttttaaaaactgtgcatgagtcactttgatag

SEQ ID NO: 471495 - DNA, 201 bp, Homo sapiens
cgcgatctcagcgcactgtaacctccacctaccgagttcaagcaattctcctgcctcagcctcccgagtagctgggattacaggtgcccaccaccacaccyggctaattttttttttgtatttttggtagagacggggtttcgccatgttggccaggctggtctggaactcctgacctcaagtgacccacccatctcggcc

SEQ ID NO: 471496 - DNA, 201 bp, Homo sapiens
gtggaggctttcatatgtgcactttctcaaaatactcgaggcaagcagcattctttgtaaaacagtccagttacaaatgttgctatttactatgagtccaygctgccgggtcacccagaggattgagacttggaattctggctgtgggctttgcctccccggtactgggagctgcagtggagacgcgccgtccaggtttag

SEQ ID NO: 471497 - DNA, 201 bp, Homo sapiens
atttgatgctgtttttaatgaggaagcaaaatccatcatcacttatgtccatagtgatttggtggaggatgcgaactgcttgccctgttcccttcaatctrgctgatgaatggaggggcatgtgtagcactggggaagatggggcctaggctcgctctgaatggaagcctgagtatctctgtacattgttaagcactagac

SEQ ID NO: 471498 - DNA, 201 bp, Homo sapiens
acacaccccttgagaagaagctgctctggggagacgagggtatgagtggaaagaggatgggcgaggaggccgggcttacctggacactaaggtgatggacrgcgtctgctgggcaggcctcggggaggacccctcagctttgctctcagcaggggcccgacaagctcagtgggcagtggcaggaactgagtgccactggaa

SEQ ID NO: 471499 - DNA, 201 bp, Homo sapiens
gcatgggggccggagggtgggagtgcagccgctgcggtcgggattctgcgtagacgtgcgacagctggtcagtactccttggtgtcagggacccaggcttrctccatcctgtgctgccgtgatgagcttctcatcctcatggtctagtgtggctgcaccggctctggccctcatacctcccggcaggaagccttcttctag

SEQ ID NO: 471500 - DNA, 201 bp, Homo sapiens
ctccaggcagaggcaacggcaggagtgcagaggtcctggggcaggaaggcgtgggacgtgctctgggagcagcatgggggccggagggtgggagtgcagcygctgcggtcgggattctgcgtagacgtgcgacagctggtcagtactccttggtgtcagggacccaggcttactccatcctgtgctgccgtgatgagcttc

SEQ ID NO: 471501 - DNA, 201 bp, Homo sapiens
gagccactgcgcctggcccacatttttgtgttttttgtagagaggatggtctcactatattagccaggctggtctcgaactcctggccttgagtgatctcytgccttggcctcccaaagtgtttggattacaggcgtgagccaccactcctgggctaaagtttttctttaagaatcctttaccagatcgtctgcgtatatt

SEQ ID NO: 471502 - DNA, 201 bp, Homo sapiens
ttttttttttgagatggagtctcactctattgccaggttggagtgcagtggcgcaatcttggctcactacaacctctgcctcccgggttcgagtgattctyctgcctcagcctcccaagtagctgggactacaggcacctgccaccacgcccggctaatttttgtatttttagtagtgacggggtttcaccatgttggcta

SEQ ID NO: 471503 - DNA, 201 bp, Homo sapiens
gtctcagcctcccgagtagctgggattacaggcgcccgccaccacgcccggctaatttttgtatttttagtagagacagggtttcatcatattagtcaggytggtctcaaactcctggcctcaggtgatctgcccgcctcggcctcacaaagtgctgggattacaggcgtgagccactgcacccggccgagtacaggttct

SEQ ID NO: 471504 - DNA, 201 bp, Homo sapiens
ggaaagctgggtgtgagcacaggacttgctgccagggctgcccgatctggctcttgctcgggagaggccacagagaggaagacggggcgggtgggagcccyggggcccaccctgcagcccgttcccagctctgccccctcccctgggcagcacgtacagaggaatgaccctgggtggggctgataggaggtgcaggcaaat

SEQ ID NO: 471505 - DNA, 201 bp, Homo sapiens
ataaccttagatcagcctgccacacccaaggagggcctgcccccagacccagactcaagtttagacacagcctaaacgtgtacctctaaatctgcacaaaytcagctgcccagatactggatttccttatctcttccgggaaatgcaagatgaaattgccctcctgttgggtattttcctgatcctttattctgaaaaagt

SEQ ID NO: 471506 - DNA, 201 bp, Homo sapiens
ctggaggtctgggggaaagctgggtgtgagcacaggacttgctgccagggctgcccgatctggctcttgctcgggagaggccacagagaggaagacggggygggtgggagccccggggcccaccctgcagcccgttcccagctctgccccctcccctgggcagcacgtacagaggaatgaccctgggtggggctgatagga

SEQ ID NO: 471507 - DNA, 201 bp, Homo sapiens
ccatctcggcctctcaaactgctgggattataggtgtgagccaccgtgcccggcccagcctttttccttgagctacagtttgggtagtttctgttgtcagatatcatttcttctgcagtgcctaacagctgtgaagcccatccagttaactttgtttctaacataatagtttccccttatttcttctcatggtacttgggt

SEQ ID NO: 471508 - DNA, 201 bp, Homo sapiens
catctcggcctctcaaactgctgggattataggtgtgagccaccgtgcccggcccagcctttttccttgagctacagtttgggtagtttctgttgtcagatatcatttcttctgcagtgcctaacagctgtgaagcccatccagttaactttgtttctaacataatagtttccccttatttcttctcatggtacttgggtt

SEQ ID NO: 471509 - DNA, 201 bp, Homo sapiens
ctcggcctctcaaactgctgggattataggtgtgagccaccgtgcccggcccagcctttttccttgagctacagtttgggtagtttctgttgtcagatatcatttcttctgcagtgcctaacagctgtgaagcccatccagttaactttgtttctaacataatagtttccccttatttcttctcatggtacttgggttttc

SEQ ID NO: 471510 - DNA, 201 bp, Homo sapiens
ctcagctcacgacactgatgttgtgtttgccagggtcactgtccacagcaccccggttagacgctcatctgggccagcaccacaaagcctgctgagcgcayggcgtgtgtcagccttgcccacacccgccagccggcgctgctctggccttccaccgatgacccccaaaacgatgcccagggccgtgggctctcccctgtg

SEQ ID NO: 471511 - DNA, 201 bp, Homo sapiens
gaagccacagctggagacctcagtgtaggtttcaacagcagagagctgagtttgtagagatgggagctgtgagctgggcacggtggctaactcctgtaatsctagcactttgggaggccgaggtgagcagatcacctgaggtcaggagttcgagagcagcctggtcaacatggtgaaaccctgtctctactaaaaatagaa

SEQ ID NO: 471512 - DNA, 201 bp, Homo sapiens
cggagccttgcccgccttggggcctgtcccaggagagcggagctcacacgggctccctggcttggctcttctgggctgaaaccaaagccctcagcactgcrttagcacaggctgaatgatgagatcttactttttctatgtcatctcagctcacgacactgatgttgtgtttgccagggtcactgtccacagcaccccggt

SEQ ID NO: 471513 - DNA, 201 bp, Homo sapiens
aagccacagctggagacctcagtgtaggtttcaacagcagagagctgagtttgtagagatgggagctgtgagctgggcacggtggctaactcctgtaatcmtagcactttgggaggccgaggtgagcagatcacctgaggtcaggagttcgagagcagcctggtcaacatggtgaaaccctgtctctactaaaaatagaaa

SEQ ID NO: 471514 - DNA, 201 bp, Homo sapiens
gcacctgcagatttggtgtctggtgagggcctgtttcccgattcacagctgccgccttctctgtcctcactgggttaggggtgaacaagtttcttttatgytgatttatttatttatttattttgagatggagactcgctctgtcacctaggctggagtgcagtggcgcgatcttggctcactgcaacctccgcttcctac

SEQ ID NO: 471515 - DNA, 201 bp, Homo sapiens
aattataaaacctgcctggaagtcagttttctcaaaatatataaaagtgtaatttatgcatactgtgaatatccccattttggaattatcttaatgtgatsttcaaacaagaaaggtaagacaaaaagacattaatcacagttttgtttataagagctaaatattggaaacaacattagtgtccatttataagaattgctt

SEQ ID NO: 471516 - DNA, 201 bp, Homo sapiens
tttggagattctctacagttttttttagatgaaatgccttctgtaggactagattggtgccgtaatacactgattttttttttttttgagacagagtctcrctctgtcacccaggctggagtacaatggcacaatctcggctcagtgcaacctccgcctcccaggttcatgtgattctcccgcctcagcctctcaagtagc

SEQ ID NO: 471517 - DNA, 201 bp, Homo sapiens
tgagaaagtttggtggttcctcaaaaagctaaacatagactatgttctagcacttctgctcctaagtatatacctaaaggacttgaaagaagaggtccaarcagataatttgtacaaccaagtccatagcagcattattcacaatagccaagatagaaacaacccaagtattcatcaacagatgaatggataaaatgtgac

SEQ ID NO: 471518 - DNA, 201 bp, Homo sapiens
ccaccgcgcccaggaaaaatttgcacttagaaggtgactactaggtaaggtgcagtggctgacgcctgtaatcccagcactttgggaggccgaggacagcmgattgcctgaggtcaggagttcaagaccagcctaaccaacatggtgaaaccctgtctctactacaaatacaaaaaatattagctgggcatggtggtgggc

SEQ ID NO: 471519 - DNA, 201 bp, Homo sapiens
cacagagtgctgattggtgcattcacaaaccctgagctagacacagggtgctaattggtgtgtttacaaaccttgagctagataaagagtgctgattggtrtatttacaatccgttagctagacataaagattccccaagtccccaccagactcaggagcccagctggcttcacccagtgaatcctgcaccggggccgcag

SEQ ID NO: 471520 - DNA, 201 bp, Homo sapiens
gaagtggtcaatctcagctcactgcaaccttcgcctcctgggtccaaggattctcatgcctcagtctcccaagtagctgggactacaggcatgagccaccrtgcctggctgatttttgtatttttttagtggagatgagctagtcttgaacttctaaccttaagtgatccaccctcctaagcctcccaaagtgctggggtt

SEQ ID NO: 471521 - DNA, 201 bp, Homo sapiens
aagaccagccctcatgattcagttacctccccctgggtccctcccacaacacatgggaattctgggaaatacaattgaagttgagatttgaatggggacamagccaaaccatgtgaccctgtctctactaaaaatacaaaaattagccagacatggtggtgtgtgcctgtggccccagctatttgggaggctgaggcagga

SEQ ID NO: 471522 - DNA, 201 bp, Homo sapiens
tgccatacaaatataaagcattaatattgatcataatttataattatagtcattaacattactaaatgctctcttgccattaactcattcaatccctttamgaattctaagagacacacagaaattatcttcatttaaaatgaggaaactatggctcagacatatggagtgacttgcatgaggtcacacagcaaggtaatt

SEQ ID NO: 471523 - DNA, 201 bp, Homo sapiens
caaggtgaattacttaatgttgaaacatcgttttcagcatcacattttttaatggtgaacccaaggtctcgtttctcaggacagcctgtacacaaggacaygataataataaatgcttagggaatttcctttttttctgggaacataaatgtgcacactgactaggagactgtttcgatatatataaatgaggccagcgtg

SEQ ID NO: 471524 - DNA, 201 bp, Homo sapiens
tgggaggcacggaagcccctcccggggaggactctccctcattgatggagcatttttggtgcagacccctcaccgcacacaccgaagcttagacaagggcrcatccgtccacgtcgccccagagtgcccaggaggcaggcagcgcggggcacccagacagacgggttcagcctgcaggactgagaggcgacctgtgaaacc

SEQ ID NO: 471525 - DNA, 201 bp, Homo sapiens
gccatcagagaaatgcaaatcaaaaccacaatgagataccatctcatgccagttacaatggcgatcattaaaaagtcaggaaacaacaggtgctggagagkatgtggagaaataggaacacttttacactgttggtgggactgtaaactagttcaaccattgtggaagtcagtgtggtgtttcctcagggatctagaacta

SEQ ID NO: 471526 - DNA, 201 bp, Homo sapiens
aatatgtgttattttaagccataagcccatgagaatttggtacagcagcaacagagaactaagaaggctgtctctcaactgaagaaacataaactatcccygagttattggaagattgtctttatcagagaccttaacctgagcattcttaggaacctacagaaacatacagtctttgggaagagataacgtttacccaac

SEQ ID NO: 471527 - DNA, 201 bp, Homo sapiens
gctggactgtactgctgccatctcggctcactgcaacctccctgcctgattctcctgcctcagcctgccgagtgcctgcgattgctggcgcgcacccccasgcctgactggttttcgtatttttttggtggagacggggtttcgctgtgttggccgggctggtctccagctcctaaccgcgagtgatctgccagcctcggc

SEQ ID NO: 471528 - DNA, 201 bp, Homo sapiens
tccttaaatcacaactccaaactgaagagtctttatcctactcttccttatcctgcatcttatgttatttaaacctccctctgccccatctttttcttttmtctgttcccctctttttcctagctagctagcaaccctcaaaactcaattgcctcttaaaattaaacttttctttgaacacaaaaaagttcttatggttga

SEQ ID NO: 471529 - DNA, 201 bp, Homo sapiens
aatctggaatttctctacagtcagctgggagccatcaaactactttaagcagctgggacaaaagcaagtttgcttttttaaatttttctttttttttttttaattgagagagagtctcattctgtcacccaggctggagtgcagtggttcaacccggctcactacaacctctgcctccccagttcaagcaattctcctgct

SEQ ID NO: 471530 - DNA, 201 bp, Homo sapiens
gagctcaagtgatcctcctgcctctgcctcccaaagtgctaggattacaggcatgagtcaccacacccaacctagagtctttatttatttatttatttatwcatttatttattttttgagacaaagtttcgctgttgtcacccaggctggagtgtgatggcacgatcttggctcactgcaacctccacctccagggttcaa

SEQ ID NO: 471531 - DNA, 201 bp, Homo sapiens
gagccgaagctggactgtactgctgccatctcggctcactgcaacctccctgcctgattctcctgcctcagcctgccgagtgcctgcgattgctggcgcgyacccccacgcctgactggttttcgtatttttttggtggagacggggtttcgctgtgttggccgggctggtctccagctcctaaccgcgagtgatctgcca

SEQ ID NO: 471532 - DNA, 201 bp, Homo sapiens
caatagaattgtgtttaatacttgcttaaaagccaatgaaagtaccacttcacacccattaggatggctattatcaaaaacaaatattggtgaggatgtakagaaattggaacccttatacattgctgctgggaatgtaaaatgatgcccctactgtgaaaaaccatttagtggctcctcaaaaagttaaacatagattga

SEQ ID NO: 471533 - DNA, 201 bp, Homo sapiens
cccaggccttagctgccttcctgcagggcggggcagggctggggacctgcagcacgccatgcctgagcctcccaccccctccgtgggctcctgtgcggccsgagcctccccaatgagcaccaccccctgctccacgatgcccagtcccatcgaccacccaagggctgaggagtgccagcacaaggcgtgggactggcaggc

SEQ ID NO: 471534 - DNA, 201 bp, Homo sapiens
cactttgcccagtcagaggtaattaatcttgaatcttatgttttcttctcccatgtccatgttaatttcctgttctcactcacctgcctgacagtcctacycacccagtgcatacacttaaaacagtgcagcattcttctggaagagtccagaaatcaccagaaatcataaggtcctctgattaactccactgaaacactg

SEQ ID NO: 471535 - DNA, 201 bp, Homo sapiens
tctaagaaattaaggtttcaaggcctggcacatttgcattcaactcatgtgctgaggcttcttctggcccatgttatccttcgaggcacagaagcatcatmacaaaatcctgctgtccctgcacgacattctcttggagccacttctcggtgcagattactgcttagtcttagaaaggataggcacagaaagaatgtagtg

SEQ ID NO: 471536 - DNA, 201 bp, Homo sapiens
gtgagggctgccagcaggctgtcacctctcattaggacacagcaagaaggctcccaccagatgctggcatctcaatctattttttttttttttttttttttgagacgagtctcactctgtcacctaggctggaatgcagtggcatgatcttggcttactacaacctctgcctcccaggttcaagcaattctcctgcctcag

SEQ ID NO: 471537 - DNA, 201 bp, Homo sapiens
gcaacaattacagctcctccacaatttttggaggctgtaatgttaaatcaatcaatcaggtgcaccactcactgaagctcgggctgccaactcacttaagkggtgcgcaggaagcaatcaatgcataagctgcttctcctggctgtcttatttgacttccatccactttgtgaagccattacaaatctgtccttaggaaag

SEQ ID NO: 471538 - DNA, 201 bp, Homo sapiens
aattctgatactatgaatgtttgttataggaaattacatttgttaaaatgtgtgctatagcaaattgttagttcactaagagtgtaaactatttttgtcayggaagtcttattttaaccacccaccttgtgacaattaactcaatttctataatcttatcaaatttgttacttcatttgtacataagtgaatcagcattcc

SEQ ID NO: 471539 - DNA, 201 bp, Homo sapiens
tttgtctcaaaaacaaacaaacaaaacaacaacaacaacaaaaagtcatcatcttgctgtgctcaagtctggggcttgacctaacttccctgtgaccctaygacccaattgccctatggccagggaaataaaggtaagaggcagtaaaggtaaatgtctaatgagaccattttccaggtcattttaacagaaacccaaaca

SEQ ID NO: 471540 - DNA, 201 bp, Homo sapiens
aaaccttttgaggaggcttagttgtcccggttaccctttgagatacccagtgaagcacactgtgacccctgggtcctcccagacttgacaactttcctgaytcctcctcaaccaccacccactaccacctcaacaaaacttattattccagttttccactcttggatgatgtggttaattgtttgtggcaagtcacataag

SEQ ID NO: 471541 - DNA, 201 bp, Homo sapiens
gcaatatccaaacgtttgttatctctaattaaatactcacagtgatcagtgtattcatttactagggccaccataacaagattccacaaactaggtgcctyaaattacacaagtgtatcatcaacaaatgctggtgaggatgtggataaaagggaaaccatgtatgctgttggtgggaatgtaaattagtacaaccactat

SEQ ID NO: 471542 - DNA, 201 bp, Homo sapiens
catttgaacaaataatacattttatcatctattataataacttggggtaatttcaaatgagattttctaggctatttggaataaagatctaattaaaggcraaagctgaggaacacccagaaggcactctggtgaagactttttcagattctggaaacataattacctttgcaatatccaaacgtttgttatctctaatta

SEQ ID NO: 471543 - DNA, 201 bp, Homo sapiens
aagtgggtgtagtcctgcttcagggaagcacagcaggggtgggaaatggatatatcatttgaacaaataatacattttatcatctattataataacttggrgtaatttcaaatgagattttctaggctatttggaataaagatctaattaaaggcgaaagctgaggaacacccagaaggcactctggtgaagactttttca

SEQ ID NO: 471544 - DNA, 201 bp, Homo sapiens
agtcccccagtgtggctgagcaggggcttttatggatcagaatgggggagtgcatgctcactggtttgtaagtatgcaaaactggctaaaaaaaaaaaaaaggcacgtccctctccctctccctacggtctccctctccctctctttccacggtctccctctgatgccgagccgaagctggactgtactgctgccatctcg

SEQ ID NO: 471545 - DNA, 201 bp, Homo sapiens
ttctaagaaattaaggtttcaaggcctggcacatttgcattcaactcatgtgctgaggcttcttctggcccatgttatccttcgaggcacagaagcatcatcacaaaatcctgctgtccctgcacgacattctcttggagccacttctcggtgcagattactgcttagtcttagaaaggataggcacagaaagaatgtagt

SEQ ID NO: 471546 - DNA, 201 bp, Homo sapiens
cctggctaatttttgtatttttagtagagatgagatttcaccatattggccaggctggtcccgaactcctgacctcaggtgatccatctgccttggcctcscaaagtgctgagattacaggtgtgagctactgcacctggccaggcatctcaatcttgaacttctcagcttccagtgagaaataaattgctgtgttttata

SEQ ID NO: 471547 - DNA, 201 bp, Homo sapiens
tagatgccagctgaactttaaggaaatgattcactgtggatagctgagacttctacatagctaaggacgtgcttctccaccatccatttccactccttccrttatccctttttctcacctctgtctgcctctgttgctgtgaaaccatttggaatcgtctatttacatgactgccttctacggtgagccacaatgcccacc

SEQ ID NO: 471548 - DNA, 201 bp, Homo sapiens
ggttttaccacataggccaggctggtctcaaactcctggcctcaagcaatccacctgcctctgcctctgaaagtgctggggttacaggcatgcaccaccaygcctggccttggaggtcacatttcaatatgagatttgcagggggcaaaacatccaaaccatataaaggccctacccatgataacatatgggaattcctag

SEQ ID NO: 471549 - DNA, 201 bp, Homo sapiens
caccatgcctggctaatttttgtatttttagtagagatgagatttcaccatattggccaggctggtcccgaactcctgacctcaggtgatccatctgcctyggcctcgcaaagtgctgagattacaggtgtgagctactgcacctggccaggcatctcaatcttgaacttctcagcttccagtgagaaataaattgctgtg

SEQ ID NO: 471550 - DNA, 201 bp, Homo sapiens
tgtatttttagtagagacggggttttaccacataggccaggctggtctcaaactcctggcctcaagcaatccacctgcctctgcctctgaaagtgctgggrttacaggcatgcaccaccatgcctggccttggaggtcacatttcaatatgagatttgcagggggcaaaacatccaaaccatataaaggccctacccatga

SEQ ID NO: 471551 - DNA, 201 bp, Homo sapiens
catcaatatgattgaaacggctgccacttaatgtggtgaggaggaatcagctgtgcccccaaaacagaagacaaggaggagcatcatcctattggtttccygggaaatgatgagccctagtaatagttgttaacatgaatcaacaaatcactcctctgtcagcagctggcgggctgggccccaaatcagtcagttaagggg

SEQ ID NO: 471552 - DNA, 201 bp, Homo sapiens
tccccctctgtgagaaacacccaagaatgatcaataaaaaaaaataaaaaaattttaaaaaaaaggcaccactcaaagatgggcataacagtgtaaaaaascaattagggaagggtaggtatatgcaaaataggggaagggtggcatcagtcagaggaaagcacactaaacaggaagagaggttctccatccggcccatgg

SEQ ID NO: 471553 - DNA, 201 bp, Homo sapiens
tacaaaataggtattagtagtagtggtattttcatttcatggatgacaaagacagcttaaacaatttgcacaaagtttaagtggagttactagaattcaaycttgagcctgtctgcagcaaaatccatgccctttccctacgagggtgcaaagtatggaattgttttcttcttccaccttcccctcaactggcccttatgc

SEQ ID NO: 471554 - DNA, 201 bp, Homo sapiens
cgcctataatcccagcattttggaaggcaggagagttacttgagcccaggagtttgagatcagcctgggcaacatgtcgagaccccatctctgcaaaaaarttaaaaatttgccaagcacggaggtatgcatctgtggttccagctactcgggaggctgagatgggaggatcacctgagcctggggaggtcgaggatacag

SEQ ID NO: 471555 - DNA, 201 bp, Homo sapiens
ggaacagaatatgcctatttttatgccagtaccacactgttttggtgactatggcatggccaaaaccttttgaggaggcttagttgtcccggttacccttygagatacccagtgaagcacactgtgacccctgggtcctcccagacttgacaactttcctgattcctcctcaaccaccacccactaccacctcaacaaaac

SEQ ID NO: 471556 - DNA, 201 bp, Homo sapiens
attcatcacaaaacgcagccggccatggctgagcagggattgcggccggcaatgatgccacctgccgtatggaagtggagttgctgtctttacagggaggwaattaaacaaacaaaaaatcaatgccttgacaaatcggtgctgctctgtttaggtaaattactctattatcctagtagctcagtacattatggaagtagt

SEQ ID NO: 471557 - DNA, 201 bp, Homo sapiens
aattgaagttgagatttgaatggggacacagccaaaccatgtgaccctgtctctactaaaaatacaaaaattagccagacatggtggtgtgtgcctgtggycccagctatttgggaggctgaggcaggacaatcacttgaatccaggagacaaaggttgcagtgagccaagattgcaccactgcactccaccctggaagac

SEQ ID NO: 471558 - DNA, 201 bp, Homo sapiens
atcacagcgcactgcagcctcaaaaactcctgggatcacagctcaagggatcttcccacctcagcctcccaagtagctgggactacaggcccgaaccactrtgcccagctaatttgtaaatttttcgtagagatggggtcttgctttgttgctcaagctgatcttgaactcctggactccagcaatcctcctgcctaagcc

SEQ ID NO: 471559 - DNA, 201 bp, Homo sapiens
cctagcacagaatctgacacacaaatgaaaactattgatgcaggactttttcagtgctgtttcaccagctggagacctacccagctggcaacgcccccacyggggctccactcagctctgagctcacagctggaggtaccccgcctgctcagccatgtggctgcacttggcttgcttcagcctgtttgtgttacaacttgt

SEQ ID NO: 471560 - DNA, 201 bp, Homo sapiens
gtctctactaaaaatacaaaaattagccaggtgtggtggtgcgtccctgtaatcccagctactcaggaggctgaggcaggagaatcacttgaacccatgarggggaggttgcagtgagccgagatggcaccactgcactccagtctgggcaacagagcaagactccatctcaaaaaaagaaaaagtgaaaaattgattgaa

SEQ ID NO: 471561 - DNA, 201 bp, Homo sapiens
ccaaatctcatcttgaattgtagctctcataattcccacatgtcatgggagggacccagtgggaggtaattgaatcgtggtggtgggtctttccagtgctrttttcatcatagtgaataggtctcacgagatctgacagttttataaaggggagttcccctgcacatgctctctttcctgccaccatgtaagatgtgattt

SEQ ID NO: 471562 - DNA, 201 bp, Homo sapiens
tcacttgaactcaggaggtggaggttgcagtgagccaatatcacgccactgttctccagcctgggtgacagagcaagactccatgtcaaaaaaaaaaaaaatagaaaaaagatccaagcaccctattaggtcctagagatgcaaaaagagataattaagacagggtccagtccctcaagaagctggagactactgaggaaa

SEQ ID NO: 471563 - DNA, 201 bp, Homo sapiens
tgagccaccatgccagccttattgtttcaattccttatagattctagataatagacctttgtcagatgcatagtttgtgaatattttctcccattctgtargttgtctgttttctctgtctgttgtttattttgctgtgcagacggtctttagcttaattaggtcccacttgtcaatttttgtttctgttacagatctttt

SEQ ID NO: 471564 - DNA, 201 bp, Homo sapiens
aatcatcaagcctttttttaggcttttttaaacaaatattttgtattctaaaagttgtatctctaaagtaaaatttaaattattttctttttttaattttkgtttttattatattttgtttttatcatggcctatattattactttggtaacattctctttaaccctcaaactaataaaaaactgtcactcatcacaaaag

SEQ ID NO: 471565 - DNA, 201 bp, Homo sapiens
atatgaataaaatgaatcatattaaaagtccaacaataggccatcagttaaatcaattagtataaatccaaataatacaacattctatagtcattaatatsattttatagacagttaaagacataagcaatggctatgatacgtttttggtgtaagaagtaggatggtgcctggacacggtggctcacgcctataatccca

SEQ ID NO: 471566 - DNA, 201 bp, Homo sapiens
cttgaacccaagaggtggaggttgcagggagccaagaccatggcactgcactccagcctggatgacagagtaaaactgtgttaaaaaaaaaaaaaaaaaaraaaaaaaacagaaagaaaatgtaactgaagccaaaagctataaaacctaattagcagctgagtgaggaacccttgagaagaattggaagactcaaagact

SEQ ID NO: 471567 - DNA, 201 bp, Homo sapiens
agcttcccaagagaacaaagcaggaggattcccaagagaccaaagcaggagtttgaagttatagtgacctatgatcacaccactgcattctagcctgagcracagagcaagaccctgtctcttaaagaaaagaaaaggggggcttttttttttaagagcattaaacttggactgaaaagatatgaactgtaatccctatca

SEQ ID NO: 471568 - DNA, 201 bp, Homo sapiens
ctgtttgagtaagacccttccgacatttgtactatcatagggaaggggttggaaagagaatcctaatgatgacagattgacttagtgggacaggggtacayggagtcagattgatttgattaaaaaaatatatatatgacatctttagcacccctgtctgtgacatatccactacataggaataataataactatgatgtg

SEQ ID NO: 471569 - DNA, 201 bp, Homo sapiens
aatgcttattccaatcagacaaaactaacatccagctgggcctgttcatttcggtgtcctacagaatcacaagcataagctgtcccaaactaaaccgactsccatcctcccaacatgatcacaccagcttccacccacccagtgtgcaagcaccaggctgttccctcacacctcatactccatggatccctcccaattttt

SEQ ID NO: 471570 - DNA, 201 bp, Homo sapiens
aaatccctcctaaaatgaaagaaaaaaatcattggtaagaataaggaaggccgggcatggtggctcatgcctgtaatcccagcactttgggatgccaaggygggcaaatcacctgaggtcaggagttcaagaccagcgtggccagcatggtgaaaccctgtctctactaaaaatacaaaaattagctgggcgtggtggcac

SEQ ID NO: 471571 - DNA, 201 bp, Homo sapiens
caaggtgctgactccgaaagcttgcaatgttcattttgatttcctcagatgctggcattatttctcagagcaggtcttcccccaactgcttctctagatgrgagtgagccataaactatttcggctgctaaactcataactagatcaaggagagaaactaggaatggcaggttggttttataccctcatgctgtctctcca

SEQ ID NO: 471572 - DNA, 201 bp, Homo sapiens
atgttggccaggatggtctcaatctcttgacctcatgatctgcccgcctaggcctcctgaagtgctgagattacaggtgtgagccaccgcacccagccaawtttaaaactatttgtacagatggtgtttcactatgttgcccaggctggtctcaaactctaggactcaggcaatcctcctgcctaggcctctcaaagtgct

SEQ ID NO: 471573 - DNA, 201 bp, Homo sapiens
aatccaagtactttgggaggctgaggtgggaggatcacttgaggccaggagttggagaccagcctgggcaatgtggcaagaccctatccccacaaaaaaawtttaaaaatcatcaggcatagtagtgcacacctgtagtcctagcttcccaagagaacaaagcaggaggattcccaagagaccaaagcaggagtttgaagt

SEQ ID NO: 471574 - DNA, 201 bp, Homo sapiens
gagctgcagttcctggccctatctttatctttccatagccttatttttccatctctaatctcttcatcccagcatagtgtatccattcgtgcttctagtaygggcaatatgaatttaaataagtgtataaataagtgaaacaaatatagctcataggtcctttgatggaagtgtatatgagcacaaagaaggaaacggaca

SEQ ID NO: 471575 - DNA, 201 bp, Homo sapiens
cttctccagagattgaagaggctgctggtcccaaccttctgtacgcatcgcacctcgcagatcctgccacggggagccacatccccgaagggacaaagccmggagagtcgcttgagaatgattcatgccatttctgttaaatgcctggcacgcagcaggacttgatacattttaacaactactcttctattttctttaagt

SEQ ID NO: 471576 - DNA, 201 bp, Homo sapiens
ccaaagcgtgtggatcacttgaggtcaggaagttcgagaccagcctgaccaacatggcgaaaccctgtctctactaataatacaaaaaaaaaaaaaaaaaacaattagcctggcatagtggcacacacctgtaatcccagctactcaggaagctgaggcacgagaatcacttgaacccaagaggtggaggttgcagggagc

SEQ ID NO: 471577 - DNA, 201 bp, Homo sapiens
tcttttaaaattcagccttgactagaaaatataacttggctgggtgcagtggcacactcctgtaatcccagcactttgagaggccaaagcgtgtggatcayttgaggtcaggaagttcgagaccagcctgaccaacatggcgaaaccctgtctctactaataatacaaaaaaaaaaaaaaaaaacaattagcctggcatag

SEQ ID NO: 471578 - DNA, 201 bp, Homo sapiens
cacgattttgcaatcatgaattgtgctgctataaacgtgtgtgcaagtatgctttcctttttttttctttttctttttttttttttttgttttttttttgkttttttttagatggagtctctctctgtagcccaggctggagtgcagtggcacaatcttggctcactgcaacctctgcctcccaggttcaagtgattctcc

SEQ ID NO: 471579 - DNA, 201 bp, Homo sapiens
ttgggttggttccacgattttgcaatcatgaattgtgctgctataaacgtgtgtgcaagtatgctttcctttttttttctttttctttttttttttttttkttttttttttgtttttttttagatggagtctctctctgtagcccaggctggagtgcagtggcacaatcttggctcactgcaacctctgcctcccaggttc

SEQ ID NO: 471580 - DNA, 201 bp, Homo sapiens
tactcttctattttctttaagtctactacagtggtttgaggcacaggctttggtttaaaatagttctaggttgaaatccatgctcaaattctactcattakctctctggcctcagagcggatttaccaccagcactctaaacctgtttcctcaacagtaaaattgaattaattaaatctatttatgggattgaattcgcta

SEQ ID NO: 471581 - DNA, 201 bp, Homo sapiens
tgtttctctttgacagatttcttttttcaatttttaatagtggttaaaaattccataacataaaatttaccactgtaactgctttttttttttttttttttgagatggtgcctcgctcttgttgcccaagctggagtgcaatggtgcaatctcagttcactgcaacctccgcctcccaggttcaagcaattctcctgcctc

SEQ ID NO: 471582 - DNA, 201 bp, Homo sapiens
tgaggcaagagaattgcttgaccctgggaggcagaggatggcgccactgcactccagcctggtagagcaagactctgtctcaaaaggaaaaaaaaaaaaaraaagaaagaaaaaatctgaccatgttatcaccctgatttccagcttcccagcctcaagaactatgagaaataagtttctatcatttataagccacctagt

SEQ ID NO: 471583 - DNA, 201 bp, Homo sapiens
gcatgcagctcatttagcatgaggacctaaaggcaagaacctttctctttccctttcccttcctcctttcatcacccaactcttactcccacccatctgcyacacccttagaaaatgtttgccatgactactgcatgtccaagctctatcaaatctgacagcagaatggttttgccaattattttttctcacaaataattg

SEQ ID NO: 471584 - DNA, 201 bp, Homo sapiens
catgaacccgggaggcagagcttgcagtgagccaagatcatgccactgcactccagcctgggcaacagagcgagaccccatctcaaaaaaaaaaaaaaaaacagaacagtgataaatgggtcaggcatggtggctcccacctgtaatcccagcactgtgggaggccaaggtgggaggatcacttgaggccaggagttcaag

SEQ ID NO: 471585 - DNA, 201 bp, Homo sapiens
acgatgcccagtcccatcgaccacccaagggctgaggagtgccagcacaaggcgtgggactggcaggcagctccacctgcagccgcagtgcgggttccacygggtgaagccagctggcctcctgagtctggtgcggccgtggagaacctttatgtctagctcagggattgtaaatacaccaatcagcaccctgtgtctagc

SEQ ID NO: 471586 - DNA, 201 bp, Homo sapiens
ttttccatgtgcatggtacaagctgttggtggatctaccattctggggtctggagggtggtggccctcttctcacagctccaataggcagtgacccagtgrggagtctgtgtgggggcttcaaccccacatttcccttccacactgtcccagcagaggttctctatgagggctctgcccctgcagaaaacttctgcctgac

SEQ ID NO: 471587 - DNA, 201 bp, Homo sapiens
acaaatttacgagaaaaaaacaaacaaccccatcaaaaagtgggcaaaggatatgaacagacacttctcaaaagaagacatttatgcagccaaaaaacacrtgaaatatgctcatcatcactggccatcagagaaatgcaaatcaaaaccacaatgagataccatctcatgccagttacaatggcgatcattaaaaagtca

SEQ ID NO: 471588 - DNA, 201 bp, Homo sapiens
aggagtgccagcacaaggcgtgggactggcaggcagctccacctgcagccgcagtgcgggttccaccgggtgaagccagctggcctcctgagtctggtgcsgccgtggagaacctttatgtctagctcagggattgtaaatacaccaatcagcaccctgtgtctagctcagggtttgtgaatgcaccaatcgacactctgt

SEQ ID NO: 471589 - DNA, 201 bp, Homo sapiens
ttcagcaaagtctcaggatacaaaatcaatgtacaaaaatcacaagcattcttatacaccaataacagacatacagagagccaaatcatcaatgaactccsattcacaattgcttcaaagagaataaaatacctttacaagggatgtgaaggacctcttcaaggagaactacaaaccactgctcaatgaaataaagaggat

SEQ ID NO: 471590 - DNA, 201 bp, Homo sapiens
caccatgatcaagtgggcttcatccctgggatgcaaggctggttcaacatacgcaaatcaataaatgtaatccagcatataaagagaaccaaagacaaaarccacatgattatctcaatagatgcagtaaaggcctttgacaaaattcaacaaccttcatgctaaaaactctcaataaattaggtattgatgggacgtatc

SEQ ID NO: 471591 - DNA, 201 bp, Homo sapiens
ctctctctggcttcttttccccatcttgtttatcttacatttacccctcattacttataagggagtcaccagctcagagttcttttgctatgggcttaggrgggggtccatctttacaaaaggttgagggctgggggaaggaaatcagaatgaatggaatcatattatatgtgcacaatcagctataattaggcatcttat

SEQ ID NO: 471592 - DNA, 201 bp, Homo sapiens
actcaataaaaccttgcactcattctccaagcccacatgtgatctgattcttccggtacaccaaggcaagaaccccaggattcagaaagccctctgtcctkgtgataaggcaggagtctaactgagctaacacaagctgcctacggatagctaaactaaaagagcaccttgtagcacacgcccactggggctgcagctgtg

SEQ ID NO: 471593 - DNA, 201 bp, Homo sapiens
cacccacctctgcctcccaaagtgctgggattacaggtgtgagccactgaacccagccaagaatattatttaggattatttatcttgaaaaattatattawcaactttactttaatataatcttaatgacctatgttcatttattccaggggtccccaatcctctggccacagaccagtaccagtccatggccagttagga

SEQ ID NO: 471594 - DNA, 201 bp, Homo sapiens
caacaaccaagaacaatttatattcaatgaggatgggattctcacgctgacagaaatacctcactctaggaaaggaggtttaattgactaacggttctgcmgcctgtacaggaagcatggtactggcatctgcttggcttctgagaaggcctcaggaaacctataatcatggcagaaggcaaaggggagcccccacacaga

SEQ ID NO: 471595 - DNA, 201 bp, Homo sapiens
ataagccagatacaaaaggacaaatcttgtgtgattccacttatatgaggtacctagattaagcaaatttgtagagacagaaagtagaatggagttatccrgggactgtcgggagagaggaatgggaagttattgtttgtgggtacagagtttctttttgggatgatgaagaagctccagaaatgaatggtggttatggct

SEQ ID NO: 471596 - DNA, 201 bp, Homo sapiens
acaaaaaaaaaggagagtaatggcaaatgtagtcatttctgaatacctatttcctcccattgagactccatgaatagttagggccaggagagagtcatgcrgactctcatgtctcatgtcagcctgacaacgtctaagtttccctcatctgtcattccctttcttccagcatgctgagccacagtccagaggcctcagcaa

SEQ ID NO: 471597 - DNA, 201 bp, Homo sapiens
aggcagagctaggaattgaatggaacatgcctgactaactctcaaaccacatatgctctttctgctatcccatagtggaaataggttcaaccccaacctcytcattgcccaatccaacattttgtgtttttttgtttttttgtggcttgtccaggctggggtgcagtggctatttacagatgtgatcccactactgatcag

SEQ ID NO: 471598 - DNA, 201 bp, Homo sapiens
tatttcttctttaaatctctacaaccagcctgcacaggaccttatttcatcaagtctaaaatgccaattcagagacccaatattatttaatggaacactgtttaaaaaagtgaagtcaattaaacttttgacacatgctaaaatgcaaccatcatcagggtagcctgatttcagagatgttaaatgtgagagaggagaaag

SEQ ID NO: 471599 - DNA, 201 bp, Homo sapiens
agtttagtcctcaaaggagatcccttcttcatgatccatccatccatccttctaccagcgactaatagctctgactctacggtttcctcttttggtgatcrcatttccctcatatttgggatctctagtgttgtgtgtgagatttcctggctagtaaactgtttgcgatacagagccacttaataagaaaaaccagagcag

SEQ ID NO: 471600 - DNA, 201 bp, Homo sapiens
ggtgccatcaaaactcactagagcctccaactcctgagcgcatgcaatcctcctgcttcaggctccttagtagctgggactacaagcagacaccaccacayctggctaattctaaaaaatttttttagaaatggaggtttcactatgttgcccaggctgatctccaactcctggactcaagcaatcttcctaccttaggct

SEQ ID NO: 471601 - DNA, 201 bp, Homo sapiens
ctgccgagccacccccatctcttcccccaaactatccttgaaaaagcctagtccccaaatgctcagggagatttatttgagtaataattttgtctcccccrtggcatggctgacctcatgtcaacaaaactctctctttactgcaatgccatgatctccatgaattaaattttgtttgtgcagtgggcaggaagaacccgt

SEQ ID NO: 471602 - DNA, 201 bp, Homo sapiens
tgcagggtctgtatgtcttgttctgactgccatcttcagttattgtccacctggagcgtgggctggtgccatctgaaggtgacaatggctgtgttgcagaytaactgccttgaggtaatctctacatggggaggattctgcagctgggtctctatgcctgatttatttcaagattagcccctgtaatttataagcaagcac

SEQ ID NO: 471603 - DNA, 201 bp, Homo sapiens
ttggcatgggaagcatgcgggagtggtgcagggtctgtatgtcttgttctgactgccatcttcagttattgtccacctggagcgtgggctggtgccatctsaaggtgacaatggctgtgttgcagattaactgccttgaggtaatctctacatggggaggattctgcagctgggtctctatgcctgatttatttcaagatt

SEQ ID NO: 471604 - DNA, 201 bp, Homo sapiens
cagcaagcacccactgccgagccacccccatctcttcccccaaactatccttgaaaaagcctagtccccaaatgctcagggagatttatttgagtaataaytttgtctcccccatggcatggctgacctcatgtcaacaaaactctctctttactgcaatgccatgatctccatgaattaaattttgtttgtgcagtgggc

SEQ ID NO: 471605 - DNA, 201 bp, Homo sapiens
ggcaacacaacaagaccatgtctcaaaaaaaaataatttaaaaattagccaagcatggtgatgcatgcctatagtcccaactactcaggaggatgagacargaggatcacttgagctcaggagttgaggctgcagtgagctatgagcccaccattgcactccaacctgggtgacagagtaagaccctgtctctaagaaaat

SEQ ID NO: 471606 - DNA, 201 bp, Homo sapiens
ccagctcccgtagccccactcagaagcagctcagcctgcaggaagactatttcccaaacccctataattgcacgcccaagcaatcagcagcaagcacccaytgccgagccacccccatctcttcccccaaactatccttgaaaaagcctagtccccaaatgctcagggagatttatttgagtaataattttgtctccccca

SEQ ID NO: 471607 - DNA, 201 bp, Homo sapiens
agtctcggataaaacagactttaaaccaacaaagatcaaaagagacaaagaaggccattacataatcataaagggatcaattcaaaaagaagagctaactrtcctaaatatatatgcacccaatacaggagcatccagattcataaagcaagtcctgagtgacctacaaagagacttagactcccacacaataataatggg

SEQ ID NO: 471608 - DNA, 201 bp, Homo sapiens
caagatatgcaacctccccaattactcctacagataacatcactattgcagaacctaagattggccttttgagatatgctatcaggttttttgtacgtctracacctgccaaccagctcccgtagccccactcagaagcagctcagcctgcaggaagactatttcccaaacccctataattgcacgcccaagcaatcagca

SEQ ID NO: 471609 - DNA, 201 bp, Homo sapiens
aagtgacggggagaatggaaccaagttggaaaacactctgcaggatattatccaggagaacttccccaatctagcaaggcaggccaacattcagattcagkaaatacagagaacgccacaaagatactcctcaagaagagcaacaccaagacacttaattgtcagattcaccaaagttgaaatgaaggaaaaaatgttaag

SEQ ID NO: 471610 - DNA, 201 bp, Homo sapiens
gcagaagtcagacacatagacacttatctgtgaaactccacacaaacagactatatgcacacatctatgcctcaaaataaaaaaccccagcacctcactctgcagtaagctccaccctgtgcctgaaaataggtaaatggcatgttcaggatttcagctcccatatttaatttgttaccacgcaaaacatcagaggcatca

SEQ ID NO: 471611 - DNA, 201 bp, Homo sapiens
gtccctgcacgacattctcttggagccacttctcggtgcagattactgcttagtcttagaaaggataggcacagaaagaatgtagtgagggaatgaatcgraggagaacactcagtgagcaccctcaatgccaagtcatttgtgtgtgttcttggtccctcctttaagcccagattctactctctgcattcttcttgatgc

SEQ ID NO: 471612 - DNA, 201 bp, Homo sapiens
gaagcatttcctaggccctcagtttccccatgcaatgcaacaaatccaaaagaaattgagattaaaggaagcatacatgtattttgttactttttttttttgaaacagggtctcattctgtcacccaggttggagtgaagaggtgcgatcacagcgcactgcagcctcaaaaactcctgggatcacagctcaagggatctt

SEQ ID NO: 471613 - DNA, 201 bp, Homo sapiens
gggaggatgaataggcagagcacagaggatttttaggacagtgagactaccccgtatgatactacagtgattaatagatatcattgtacatttgtcaaaamccatagaatgaacgacaccaagagcaagcccttaggtaaactatggactctgggcaataatgatagttaggttcatccattgtaacaggcaccattctgg

SEQ ID NO: 471614 - DNA, 201 bp, Homo sapiens
ttcacccccaggtaaatcagtaggaaaatggaggggaatgcattggtggaaaggtgaaggacagaagtggagttgaagcaaaaccagattctcactctacrcaaaagaccagcgtgcctctctccccagttcagagccagcaagagccccactaacaccaccacccgcttggtacctgaaagaactgacacaaagcacacg

SEQ ID NO: 471615 - DNA, 201 bp, Homo sapiens
aaaaaaattaattcgtactgattgcagagaatttgggaaatatagacaatttaaaggacaagattagaaatggtctgaggtggggtgtggtggctcacacytgtaattccagcactttggaaggccaaggtgggcagatcccttgagctcagaagttcgaggccagcctgggcaacaaggccagacccccatctctacaaa

SEQ ID NO: 471616 - DNA, 201 bp, Homo sapiens
attccaactatatcactttctgaaaaaggaaaagctatggagacagcaaaaagctcagtggtttcccagggttagggcagcgggaggatgaataggcagarcacagaggatttttaggacagtgagactaccccgtatgatactacagtgattaatagatatcattgtacatttgtcaaaacccatagaatgaacgacacc

SEQ ID NO: 471617 - DNA, 201 bp, Homo sapiens
ctccattatcataacaaagatacacttatcattctgaaatttcaagaatatctcctctcagaaccagggataaaggccagtcaaagtttttattatggaayatccacaacaagaaatgaccaggcctaaaatgtcaataatgcaagtttgagaaactctgctttaaaactatctaatgaccctgatactacagatttcttt

SEQ ID NO: 471618 - DNA, 201 bp, Homo sapiens
ttttatttgctttaatctcctgtccttctactgtctgccacccccaccacccagccttcttcctgcacacacaggtgcgcgcacacacacacacacacccctcttacctataaaggcttaacctgtcagctcaggaaaagagggtgtattcttccactctcatgctgctaataaagacatacccaagactgggcaatttat

SEQ ID NO: 471619 - DNA, 201 bp, Homo sapiens
ggaaactattaagggctgaaggactgagaaagggcttcagaatttattttgaaaaatttagaaattcatggaaagcagtaatcaggcaagaaggagaatcratgtgtatttaagagagatcactctgtgaccactcactgtggagaatgtcctggaagtaggcatacctgaaattgagcattgtttgggattgaattccag

SEQ ID NO: 471620 - DNA, 201 bp, Homo sapiens
atatttcttctttaaatctctacaaccagcctgcacaggaccttatttcatcaagtctaaaatgccaattcagagacccaatattatttaatggaacactgtttaaaaaagtgaagtcaattaaacttttgacacatgctaaaatgcaaccatcatcagggtagcctgatttcagagatgttaaatgtgagagaggagaaa

SEQ ID NO: 471621 - DNA, 201 bp, Homo sapiens
agagcttgtgcagggaaacccccattttgaagccatcagatctcatgagacccattcactatcacaagaagagcatgagaaagacccatccccatgattcrgtcatctcccaccagatccctcccacaacagtacaatgtcctttccacattgttttgttgctgtttgtagatatttccccaataagccaggaacttctca

SEQ ID NO: 471622 - DNA, 201 bp, Homo sapiens
ctttgggaagccaaggtaggaggattgcttgagcccaggagttcaagaccagcctgtgcaacatggtgaaaccccatctctacaaaaaatacaacaacaamaaattttcaggcatggtggtatgtgtctgtcatcccagctagttaggaagctgaagtggcaggatcacttaaacctgggaggtcaaggctgcagtgagcc

SEQ ID NO: 471623 - DNA, 201 bp, Homo sapiens
acttgttcattcttctactatagctttgtaaaataggtttttgggctttttgttttttggggtgtattttggagaaaagggtctcactctgtcacccagaytgtgcaatggcatgatctcagctcactgcaacctccacctgtcaaattcaagtgagtctcttacctcagcctcctgagtagctgggattacaggcacctg

SEQ ID NO: 471624 - DNA, 201 bp, Homo sapiens
ggcatgcgtggacagagtccccaagccttggctgtgtgggacccgacacctaaagaatgcagcattgaagtaaagaaagggcaatgtgtttgtccttcaasacaatgaattgctaactgcgcactggtttggaaggccatgaaatggacagggtggggatgggaacccccccagggccagaggccagcagctttacagaca

SEQ ID NO: 471625 - DNA, 201 bp, Homo sapiens
tccaggggaggacgagggaggggctgaaacgaggggaaggaagcagctcttgttcaccgcagctcagctaaattgcatttgccctcttttgcatagagcawaagtgttatagaaaatgcagcatggatttttaattttctccttgtcactggctgctgtaatcacataattaaccaagtggtagagatagtcatttatagc

SEQ ID NO: 471626 - DNA, 201 bp, Homo sapiens
gaaagaaaatcaaattcaggtccaaaaatatggaaaattttctttttttctgttttttccccaggcttctgcctttttgctctcaggaattaccgctgctraactggaagtagagattgtccctggcccttcctcatcagtaagtggttgttaagcatttcagtgatgtcacctgttttctttatgtactaagtgtggaag

SEQ ID NO: 471627 - DNA, 201 bp, Homo sapiens
tgatttgacgaaagactgggttcattttctcctgacaaaagaccaccgaccatgaactggttctggccagtttacagaggctgagcactgagtgcttcgtrtccctgcttcactttctactaataatatatagagcctaactttactgcatttaaaagttgtctctatctgccatgcatagtggttcatgcctgtaatccc

SEQ ID NO: 471628 - DNA, 201 bp, Homo sapiens
tgtaattccagccacctgggagactgaggcatgagaattggagaagtggaggttgcagtgagccaagatcacaccactatactctagcatgggtaacagarcgaggctctgtctcaaaaaaatgaaaagatcagaatagatgcatgtttcttcaaatgcgcagacaccaacacatggccatagaaactcaaataatcaggg

SEQ ID NO: 471629 - DNA, 201 bp, Homo sapiens
cagctgggtgtagtggctcatgcctgtaatcccagcactttgggaggctgaggtgggcagatcactggagatcaggagttcaagaccagcctggccaacayggtgaaaccctgtctccactaaaaatacaaaagttagctgggcatgttggtccatgcctgtagtcccagctacttggcaggctgaagcaggagaatcact

SEQ ID NO: 471630 - DNA, 201 bp, Homo sapiens
agaaaacaagacattgtgctcattttctcttagtttttaaaatttttagaaatattgatgtgaggatgatttaatcatagagcaagaaatgtttatttagmatctactttattcagcacatgtattcattaacttaacatttactaagagccaagtaccagctgggtgtagtggctcatgcctgtaatcccagcactttgg

SEQ ID NO: 471631 - DNA, 201 bp, Homo sapiens
tcattttcgtaagtgaaataagccaggcacagaaagacaaacattgcatgctctcacttatttgtagatcaaaacaattgaactcatgggaatagagaatagaaggatggttactagaggctgggaagggtggtggagggaatgggggtaggtggggacgattaacaggtacaaaagaaaatcgttagaaaggaggaaaag

SEQ ID NO: 471632 - DNA, 201 bp, Homo sapiens
actgtttagtatgagaaaaacaggtattatgatgcagtatgataagcactataatagaattatgcttcgggggctatccagtgcataaaagagataactasctagattggagagtgagaaggagagacacatacaacttgtgagataaccttggagataagctctaaatgatgagcagatttagccaagcaaaatggaaga

SEQ ID NO: 471633 - DNA, 201 bp, Homo sapiens
caatgctcatttaccattccaaaagtcctagtgcccttaagaattatgctaagtcagcagagtgtggtggctcatgcttgtaatcacagcactttgggaarccaaggtaggaggattgcttgagcccaggagttcaagaccagcctgtgcaacatggtgaaaccccatctctacaaaaaatacaacaacaacaaattttca

SEQ ID NO: 471634 - DNA, 201 bp, Homo sapiens
tccgtgttagcagtacctcccctttctgtatcttggatttttcagaagaggcacaactatagcagggcatcataaagaaataaagattaaatatggagccyaagctgaaaccttgttctacactaatgcacttagcagaagcccacaacttactggtctttcctgaaatcagggggaaatgtctggctgagctgctgctcc

SEQ ID NO: 471635 - DNA, 201 bp, Homo sapiens
gacaccagtcatattgcattagtggctcttttgcgccagtataaccacatctcagctagttacatctgtactgaccctatttcctgataagatcatattcygggattctgggatgccaagtgttgggacatcaacatatgaactggtgggggtggggtaccttatttaacccataaaagtcaacaataaaacccttaagag

SEQ ID NO: 471636 - DNA, 201 bp, Homo sapiens
ttctcctgcctcagcctccctaatagatgggattacaggcacccaccaccatgccagctaattttttgtatttttagtagagatgggatttcactgtgatrgccaggctggtctcgaacccctggcctcaggtgatcacccacctcagcctcccaaagtgctgggattacaggcgtgagccactgcacccagcagagtctt

SEQ ID NO: 471637 - DNA, 201 bp, Homo sapiens
ttaggggctggaggtgaaacaaaaaaatgtaactcaaggaataaaatgaaaattactaatttttttaatttataaagaaaaggaatttatttcttatggargctgtggggcctcatctagtgagggccttcctgctgatggggactctccgaagagtcccaagagcctatgcaatttaagaataacaggccaggcacggtg

SEQ ID NO: 471638 - DNA, 201 bp, Homo sapiens
atttatttcttatggaggctgtggggcctcatctagtgagggccttcctgctgatggggactctccgaagagtcccaagagcctatgcaatttaagaatamcaggccaggcacggtggctcacacctgtaatcccagcactttgggaggccaaggtgggtggatcacctgaggtcaggagttcaaggtcagcctggccaac

SEQ ID NO: 471639 - DNA, 201 bp, Homo sapiens
gttttgcatggttgaggaagcctcaggaaacttacaattgtggcagaagaggaagcaaacacatccttcttcacatggtggtaggagagacaatgagagaygagcaaaaggggaagccccttataaaaccatcagatctcatgagaactcactcactatcatgagaacagtatgggggaaaccacccccatggttcaatta

SEQ ID NO: 471640 - DNA, 201 bp, Homo sapiens
aaaatgtaaagcccaaggtatagacctgggtcgtaacctgtaacattatttacttgctattacattctctttggttttgctcctggatttgatgagagcarcagaatcaatttcaatgcacatgcatttattatacaactgcatttcatgcggggagccccccaaaaaaggatgggaatccttgatcttaaagcatttaaa

SEQ ID NO: 471641 - DNA, 201 bp, Homo sapiens
tctcccatgaaacccatccctggtgccaaaaaggttggaggccactgtttattcaacaaatacggtttgaggccttttatgtagcaaatactgctcccttrgcttgtcctcatttaattcctgacatgttgtttaatttaagtcacttatgtgtaaaaaatatttttgttgacaaacataaattccaaactggtatcatat

SEQ ID NO: 471642 - DNA, 201 bp, Homo sapiens
agccccttataaaaccatcagaacttgtgagaactcacttactatcatgagaacagcatggaggtaactgcccccatgattcaattacctcccaccaggtyccttccacaacacatgaggattatgggaaatacaattcaagatgagatttgggtggggacacagccaaaccatatcagagggggatgctgcatacagctt

SEQ ID NO: 471643 - DNA, 201 bp, Homo sapiens
gctgccacttaatgtggtgaggaggaatcagctgtgcccccaaaacagaagacaaggaggagcatcatcctattggtttcccgggaaatgatgagccctaktaatagttgttaacatgaatcaacaaatcactcctctgtcagcagctggcgggctgggccccaaatcagtcagttaaggggaagaaagctgatcattcca

SEQ ID NO: 471644 - DNA, 201 bp, Homo sapiens
ttgcagcaccattcacaaaaaccaagatttggaagcaacctgagtccatcaacagatgaatggataagaaaatatggtactattcacaatggagtactatmcagccattaaaaagaatgagattctgtcatttgccacaacatggatggaactggaagtcattttcgtaagtgaaataagccaggcacagaaagacaaaca

SEQ ID NO: 471645 - DNA, 201 bp, Homo sapiens
catgtctttccaacagtcccccaaagtcttatttcagcattaactcagaagtccacagtccaaagtctcatctgagacaaggcaagtcccttctgcccatragcctataaaatcaaaatcaagttagttacctcctagatataatgggggtagaggcattgggaaaatacacacatttcaaatgggagaaattggccaaag

SEQ ID NO: 471646 - DNA, 201 bp, Homo sapiens
tcaaaaaaaaaaaaaaaaaaaaaactaaactaaaactagagctaccatatgatccagcaatcccactgctgggcataaaccccaaagaaaggaaatcagtwtatcaaagagatagcttcactcccatgttttgttgcagcaccattcacaaaaaccaagatttggaagcaacctgagtccatcaacagatgaatggataag

SEQ ID NO: 471647 - DNA, 201 bp, Homo sapiens
ccttgcatccattcctttattgatttattttaatggcaatagtatcccaatttcctttactctcctcaggaatacaagcttttttttattctcaagctacrtgatttggagggtatccaccccagattaggagtggaatatgtaacctcgggttgacagtcgtggcctcaacattctctagtccagtgattgatcaatgtg

SEQ ID NO: 471648 - DNA, 201 bp, Homo sapiens
agcctgggcagcagagtaagtaaaactccatctcaaaataaagtgaaataaaataaaatgcttcatatgattatggtaattattagaataaagcattcagyccagaaacctcaggggtggttgtctaactatggctttgaatagcattattttacttaggagaaattctgtttccacccactacccagtttttgtggatat

SEQ ID NO: 471649 - DNA, 201 bp, Homo sapiens
tacaaaataaaataaattagccaggcatggcgacacatacctgtggtctcagctacctggaaggccgaggcagaaggatggctcaaaccaggagttcaagrctggagtgagttattattgcaccactacactccagcctggacagcacagcaagaccctgtctcttaaaaataaaataaaaggggccaggcgtggtggtgg

SEQ ID NO: 471650 - DNA, 201 bp, Homo sapiens
gaatgtttcccccaaaaatcatatgtcgaaacctaattaccaatttgatagagaggtatggcctttaggaggtgattaagtcatgaaggtggggactcttrcaaaagaactttatgctgggtgcagtggctcaaacctataatctcagctactcgagaggctgaggtgagagtatcacttaagcctaggagttccagacca

SEQ ID NO: 471651 - DNA, 201 bp, Homo sapiens
ccactgtccatggcgggcctcaaggagctgctgcgggactcagtggcacaggctgagctgcgtactgtggtgcaccccttccctgtggactgctatgaggrcttgccctggccgccgcctgcctctgtcctgctggaggcctccatcaatgaggagaagtttgcccgcgtagaagctgagttgcaccagctgcttctagcc

SEQ ID NO: 471652 - DNA, 201 bp, Homo sapiens
cagccttccagactgctgcccagttgcctgatgtcagagcccctccacacatgagcctgctccctactgccaacaccgtggcccagacagagacgctttcmgaggaagaggtacctgtgaggcgcaggacttgcagactggccaggggctgcagggcctctcggctgatggtgcccagctggttcctgctgaggtccagca

SEQ ID NO: 471653 - DNA, 201 bp, Homo sapiens
cctgtgaggcgcaggacttgcagactggccaggggctgcagggcctctcggctgatggtgcccagctggttcctgctgaggtccagcagtgctagggaggmcagccccgctagagcctggtcctccagcagctcaatgctgttttcttgcaggtgaagctcctgcagtcgctgaagtaaggacagcagatcgtgaggaaaa

SEQ ID NO: 471654 - DNA, 201 bp, Homo sapiens
cactcccgcagccctccagtgtggctgcaggcggtggtgcagccttccagactgctgcccagttgcctgatgtcagagcccctccacacatgagcctgctscctactgccaacaccgtggcccagacagagacgctttccgaggaagaggtacctgtgaggcgcaggacttgcagactggccaggggctgcagggcctctc

SEQ ID NO: 471655 - DNA, 201 bp, Homo sapiens
acctgccttgttgcttatgaagctgcttctgtgcttccagctctttggtgttttgtggagtccaagtgtagccctggagagcatctgtgaggagaggggarggaaaggtgatttggctgcttgactccttagagtgtcccgtcaatactaatgctgatgaaggttggtggggagagtcctgggctttattcaggtttcgaa

SEQ ID NO: 471656 - DNA, 201 bp, Homo sapiens
caggtggccgtctgcccggcccagcaccatgcacacgcttgtgttcttgagcacacggcaggtgctgcagtgccagccagctgcctgccaggccctgcccytgctgccacgcgaactcttccccctgctgttcaaggtggccttcatggacaagaagacagtggtactgcgcgagttggtacacacgtggcccttcccgct

SEQ ID NO: 471657 - DNA, 201 bp, Homo sapiens
aaagcacctgctccttaagtcttcctgcaacaagtgccactgtttttaggaacctgggcgtccacatagacatctcaccagcactgaaacctcacaagtcytctcagccttgcctttggatgccctctcttgggaatgtccccagtcctggtcagctgtctctctcctttgcaattttgtctgcctcccctcagcctaaaa

SEQ ID NO: 471658 - DNA, 201 bp, Homo sapiens
ttccacagtggctctccagggaagagggagaggtttaggccagtggtaagggccaacaaaggtgagggttgctttctttcggggtctccgtgcttggtgaygctctggagaatagtagcttttgcgggggcttgtattttataggctacatcatctggactcggtgttccctgggtctcggtcttttcaacctgccttgtt

SEQ ID NO: 471659 - DNA, 201 bp, Homo sapiens
acgcgtgccctcctgaaacacaggttggcaggccagtctcggcagtcgagagccagccaatagatggaatggaggcctgcacctgcgtctaacttttgacrctataaataggttcaagaaactaataaaacgttctggttttctcctttgacaaaaacattttcttaaagctctggggcatcaggttcaaatttagaattc

SEQ ID NO: 471660 - DNA, 201 bp, Homo sapiens
ctcccctcagcctaaaagtgtgcagaaccctcaattctgttaagtcaccctgtggagttcctgtcttctgttttccccaggcagggtgcctgagctgtatyccccagcacacccactcccgcagccctccagtgtggctgcaggcggtggtgcagccttccagactgctgcccagttgcctgatgtcagagcccctccaca

SEQ ID NO: 471661 - DNA, 201 bp, Homo sapiens
agcggcgagtggcgccagggctcccggctctaggcgggcgatgttgttgtcctgcaggaacagtgtctgcaggccggggaaagaggaggcgcttaccccgytgcgggggtcttcctctccctgggggcaccccgtcctcccgcagctccacacggtgcccacctgcgtccctggcgggattcccagcgggacgacgcgcaa

SEQ ID NO: 471662 - DNA, 201 bp, Homo sapiens
gtacacatgtgcctggaagttgaatttgtggctgtttttttttctgtccacgttggtcacccttatccttatctctgctgtcacccccaacatggccaccsggcaacaactgccatccagcctgtcgccccgcccttcgcggggcagccccgtcggcactgccggccagtccttgctcttcccacctttcggaggcccaag

SEQ ID NO: 471663 - DNA, 201 bp, Homo sapiens
ctgtgcttccagctctttggtgttttgtggagtccaagtgtagccctggagagcatctgtgaggagaggggaaggaaaggtgatttggctgcttgactccwtagagtgtcccgtcaatactaatgctgatgaaggttggtggggagagtcctgggctttattcaggtttcgaagaaggttttgtgaagcagctttgtaatt

SEQ ID NO: 471664 - DNA, 201 bp, Homo sapiens
cgtccaggagactctggagcgccaggcgcgggggctctgcacacatgatcttcctgtccctggaggtgagcagccgctggccgccctccttgatccaggcmcccagccagtgcagggcgcagtcacagcgccatgggttctctgtgggagagcagcgttaggcaggtggcttgagggtgctgctaaaacagcctgtgcagt

SEQ ID NO: 471665 - DNA, 201 bp, Homo sapiens
atacaaagaaaaatacaaataatgtgcaaaaaccattttcacaggtggcaatttataaaatggaaatgatagaaaagtccttcattcttaattatccccaratttcttatatattaacacagttctatttcctagtgtgtggacaattttaaatttgaaattctgatttatttttaatctacaaagtatttttatttttta

SEQ ID NO: 471666 - DNA, 201 bp, Homo sapiens
tacctacggtggagggggcaggcgggggacagatgctgctgggccaagactactgagtctctcctgcctgctggaggtccctagctcaggacttattccaygcacactctgatagaatatttacgcccaacactaactgtttggcttggcaaataagcaaagccataaagtcacagctggcctgtaggctcccagtcacca

SEQ ID NO: 471667 - DNA, 201 bp, Homo sapiens
gtgtggctgtctagctccaccctccagcagaggcagcttgacatttgtcttggataatgagggctaaatgcagggttgagagtcacgcccagcagcaaagytgtttctgtctgaactgtaaggtcactctaaatcccactctttcaaggcaggtatattcagcaggcttaattgaaaactggaacatagcttaccattgtt

SEQ ID NO: 471668 - DNA, 201 bp, Homo sapiens
ccctgctgaggggccctggcaagccctcctggtttgtcaaaaacacttttatgtttgttgtccctgttttctcaggcattgtcaacctctcatctgaacargattctgcttatcaacatttaaacatgcttgaatctcacttaccttaaaaaacaacaaaagcccctttctttgactccatgtcttactgcagctactgcc

SEQ ID NO: 471669 - DNA, 201 bp, Homo sapiens
ttaaacatgcttgaatctcacttaccttaaaaaacaacaaaagcccctttctttgactccatgtcttactgcagctactgccccaccctcctctcaaccayggtcaaacatctccagagcactgtctctttcctcacacctcacatgcctcctgtccatgacagcctggcctctacctgcctcacttcaccgaaacagcac

SEQ ID NO: 471670 - DNA, 201 bp, Homo sapiens
taaacatgcttgaatctcacttaccttaaaaaacaacaaaagcccctttctttgactccatgtcttactgcagctactgccccaccctcctctcaaccacrgtcaaacatctccagagcactgtctctttcctcacacctcacatgcctcctgtccatgacagcctggcctctacctgcctcacttcaccgaaacagcact

SEQ ID NO: 471671 - DNA, 201 bp, Homo sapiens
ccttggagtgcccaagctcattctgcccacaaagagaactttatgtcctggtccagtgtctaagagggtgaggcagtcctggctttgaatggccctgtaartggcctggccaggctgggtgtgacgtagaggtcagaggtcccctgtactcttaattctgtggtgccaagactggcctggttgacctgtcaggactgggga

SEQ ID NO: 471672 - DNA, 201 bp, Homo sapiens
ctggcctgcctccctcccagtcccccttcgccatcctcaccagggagatctttctaaaatacatgtcacaaacctgacttaacttcttttccttgctcctygtgatttcacctttgcccagtgatcttatcctttaatactcggcctaaatgtcatttactcaggaagtcctctcttaccccaaggctgggctatgagctc

SEQ ID NO: 471673 - DNA, 201 bp, Homo sapiens
aggctgcttctggataatgagggcaggaggaatgtgtgtggagcccatgtgatccactgtgcacctccaggtagccccactgtaattgtgaaaggatatgyagcaaccctgagaagggtttgattatttagcatttatccccttccctccccctcctctcacccctagaatgaaggtttggctcacaccaccaggtaagcc

SEQ ID NO: 471674 - DNA, 201 bp, Homo sapiens
attagtttcctattgctattgtaacaaattactacaaatttagcagcttaaaacaatacagatttattcttactattctggaggccagaagtccagaatgrtgttactgggctaaaatcaaggtgttggcagggctatgttcatttctggagctctgagggagaatccattttcttccttttactagcttccagaggttgc

SEQ ID NO: 471675 - DNA, 201 bp, Homo sapiens
gatggggttttactgtgttaaccaggatggtctcgatctcctgaccttgtgatctgcccgcctcagcctcccaaactgctgggattacaggcatgagccaycgcgccaggctggaaaatcacttttattgagactcttttccagtagtgaagcctggtcccccactgatgatggggagcaaatctggtttcttcataacca

SEQ ID NO: 471676 - DNA, 201 bp, Homo sapiens
tctgcatatcacattgcacctatgcccctctgcctcatcttattctccctaggccatcccccatccaatttgcttgttctgagctcctgcccccagtatayagctgttgtacgaatacgatgcaattgcacaaatcactgtggttcattatatagccctattagtttcctattgctattgtaacaaattactacaaattta

SEQ ID NO: 471677 - DNA, 201 bp, Homo sapiens
ttagtagagatggggttttactgtgttaaccaggatggtctcgatctcctgaccttgtgatctgcccgcctcagcctcccaaactgctgggattacaggcrtgagccatcgcgccaggctggaaaatcacttttattgagactcttttccagtagtgaagcctggtcccccactgatgatggggagcaaatctggtttctt

SEQ ID NO: 471678 - DNA, 201 bp, Homo sapiens
tgggactacaggcgcccgccaccacgcccggctaattttttttttttttttgtatttcttagtagagatggggttttactgtgttaaccaggatggtctcratctcctgaccttgtgatctgcccgcctcagcctcccaaactgctgggattacaggcatgagccatcgcgccaggctggaaaatcacttttattgagact

SEQ ID NO: 471679 - DNA, 201 bp, Homo sapiens
atcctgaataaagttgatataggaggagttaagaaattaggcagatagggtaaggaagtccttggtaaggttttccttttatgaaaagtagctcccaaatrattttcttttctaacaaagagcagcctgtaaaattgagctgcagacataaacaaggaagctagaagtttgcatgggtgaatgccagcagctgtgccaata

SEQ ID NO: 471680 - DNA, 201 bp, Homo sapiens
tttttttggtattgtttactcattaaaatatttttgatatattggagtaaacatatggtaaaaacaaatatattaaaattaatgtctttttttaacttgargatatctatggggcttgcattatatatgtttgatggtgctgctgtaaaccctatctcttcgtcaacactgctttattcactgcttaattcatagctttgg

SEQ ID NO: 471681 - DNA, 201 bp, Homo sapiens
ggaagtgggccctggagcgggcttgccgagcctacgaccggggctgggatgttggaggaagacgtggtcatgagggctgaaaaagaaggggtttttggtatggtagaaaaatggattgggctggcagctcgaaggccacagccctgtacctctgggcctggtctcgtgtgtgcacctgggaccggtgggtgaggggtgatg

SEQ ID NO: 471682 - DNA, 201 bp, Homo sapiens
gcccagcaaagttaagggactgattcaaggtcatagattacattagaagagagccagcactagaagccaggtctcttgccacccagctcttccctaccccsgcaggctctgctgtgagcaggctatttgctgtaaatatgcattgtttagtgtggtagcagtggaaataaggctagttgtggtagagtacaaaatatattt

SEQ ID NO: 471683 - DNA, 201 bp, Homo sapiens
caggcacgttggctcatgcctgtaatcccagcactttgggaggccgaggcaggctgatcacctgaggtcaggagtttgagaccagcctgaccaacatggtraaaccccgtctctactaaaaatacaaaattagccaggtgtggtggtgcatgcctgtaatcccacttacttaggaggctgaggcaggagaatcgcttgaac

SEQ ID NO: 471684 - DNA, 201 bp, Homo sapiens
taagtcaaagcccagcaaagttaagggactgattcaaggtcatagattacattagaagagagccagcactagaagccaggtctcttgccacccagctcttycctaccccggcaggctctgctgtgagcaggctatttgctgtaaatatgcattgtttagtgtggtagcagtggaaataaggctagttgtggtagagtacaa

SEQ ID NO: 471685 - DNA, 201 bp, Homo sapiens
aaggtgggaaagggagacagacagggagaccacttaggaggcaactgcagaaatccaggtgagagatgttggtggcttggaccagggtggcagtggtgagrgcagtgataagtggtccagtttaggacgtattttgaaggtaatcaggatttgctgatggatgggatatgggtgcgacctccctctggtgaggtggccctg

SEQ ID NO: 471686 - DNA, 201 bp, Homo sapiens
ggaatcacaaagtaacagatcatctgcgtcctgcatttttataagtcaaagcccagcaaagttaagggactgattcaaggtcatagattacattagaagaragccagcactagaagccaggtctcttgccacccagctcttccctaccccggcaggctctgctgtgagcaggctatttgctgtaaatatgcattgtttagt

SEQ ID NO: 471687 - DNA, 201 bp, Homo sapiens
tttgtattataaatgagttgtgaggatagtgagtagatgtatgtaacataaataaaggaatgtttaggatgatgactatttaggctgatgatagactagaytacatcagattagatagataggcacaggtggctggacagaatgtgaacatggattgttgatagctagttctctgtgagccaggaagcagaccctcaccag

SEQ ID NO: 471688 - DNA, 201 bp, Homo sapiens
gtcatttactcaggaagtcctctcttaccccaaggctgggctatgagctcctcccatctttctgcaggctcctacttgctctcaccctatcatagctctgrttacaccagaaatcatatcttggatagtaggttattttatttggggtccagagtatccaggagcaggcattagcacagaagaagcatcaataaatgtatg

SEQ ID NO: 471689 - DNA, 201 bp, Homo sapiens
tcttggatagtaggttattttatttggggtccagagtatccaggagcaggcattagcacagaagaagcatcaataaatgtatgttgaatgaaagaaaatgsacagacaagtgcatgggaagatggacacactggttttgggtgaccagctcattcataataggttccatcatacagctgtgaggggagagactgagatttg

SEQ ID NO: 471690 - DNA, 201 bp, Homo sapiens
tgcttcccttagaaaggaatggttccatatctgaaaattagcttaggtttgagaaccattgactaaagagctggccagctctctaagaggaaggaccttgyagaattgcagcaagtatatgtcacaatgattccttcatttttttcccccaaagggacctatggccatttaggtaatcattcactagagaaatggggataa

SEQ ID NO: 471691 - DNA, 201 bp, Homo sapiens
ggtcagcaatgaatggtgcctttaacctttcccatgcactgcaccaatgcactgaaggtgagggagctccttgtgctccagggggatgcctgagattcatscataccataaagttggccttcgtgtcccctttctttagttggagccatattggaagcccactgtcaggaaaacggtctcatggcctgagcagggccatag

SEQ ID NO: 471692 - DNA, 201 bp, Homo sapiens
gggccttcagatgtccagtgtgtcagcaagagaggccaatgctgagcccctgaaatggcactattccttgagaccaactcatcacttggggcaagtcaacygcatcaggccctttcaattctggaagggccaatggttcatctctacagggatagagacttattctgggcatgggtttgcctttcctcaccacagagcctt

SEQ ID NO: 471693 - DNA, 201 bp, Homo sapiens
tgatcggcaattggctgaaagagttattatctaaaaggctgaaattaattgaaaggagagtctgggttaagataaggggttgtagagacctaggttcttasgtagatgaagtctcataggtggctgcccttagaggcaacagatagcaaatatttcctattcagacctttaataaaaggtactagactcttagctaatctc

SEQ ID NO: 471694 - DNA, 201 bp, Homo sapiens
tccctcacagtggattaaataggatacgaaggtgtgtactgtactaagcacagacccttccacatattatgtgcttgataaatgtttcttaaatcagaaayaggaaatggggtatgagaagcagaaaacagagtatttggttttaaaatatatatatacatttttttgagacggagtcttgttctgtcacgaggctggagt

SEQ ID NO: 471695 - DNA, 201 bp, Homo sapiens
gtccagagtatccaggagcaggcattagcacagaagaagcatcaataaatgtatgttgaatgaaagaaaatggacagacaagtgcatgggaagatggacayactggttttgggtgaccagctcattcataataggttccatcatacagctgtgaggggagagactgagatttgggagaacatgtgcatggtcagggcttac

SEQ ID NO: 471696 - DNA, 201 bp, Homo sapiens
actacccacacttctgaccagaggaagtaaagcacccacagaagccacagccaagacctgactaaggctgctcgggcaactaaaacagctgggaagctgcyggaaggagtaaattgctctatttgcttgattgctttcttgtaacgctggaaaatcactttttttttttttttttttactgagacggagtcttgctctgtc

SEQ ID NO: 471697 - DNA, 201 bp, Homo sapiens
gggattattctgcttacagcaaatagcctgggtctactttaggttgtgagttctttgggggctgagctgtactgtattcatccagagattccttgggagcmattcagtgcccagtatgcaccagatgtttataatttattcaatatatttgttccttccttccctctctctttcacagcggtccacccccatcatggtctg

SEQ ID NO: 471698 - DNA, 201 bp, Homo sapiens
caaagaaaatcctataaatcctgtcagagaatgtcaagagtttggacccatgttttagatagtgacaactgtcctagtggcttttaaatagccatcctgcmcctgccatttagaatatttatttttgctctcagaagatatttagaaacaagcaagggaaaggagccaaatcatttacagattcatgtaaccaaaccaaaa

SEQ ID NO: 471699 - DNA, 201 bp, Homo sapiens
ctcagaggactgagacacattcctgttactccaagaacaattctgttaccaaggaccaatgctgtggtccgtggaccagcagcactggcctcattagaaaygcagaatgtcaagccccaccccaaacctactgaatcagaatctcattttaacaagatgattcatgtatgcattacaatttgagatgcactgatttagatg

SEQ ID NO: 471700 - DNA, 201 bp, Homo sapiens
aggctctgctgtgagcaggctatttgctgtaaatatgcattgtttagtgtggtagcagtggaaataaggctagttgtggtagagtacaaaatatatttgtyctttgttctgggttcctggcgcacagtgtctaaaaccctagaaattccctaagtgatagtttgttattcctaacacaccccaccctttaggagtatcttt

SEQ ID NO: 471701 - DNA, 201 bp, Homo sapiens
tagtcccatgtatgaatcctgagtgttaccctcctgaatgctgtgcactacagaatgaactttagttcacagtaaatgagggatgctttttcttaagaaakaaatttaattcaaggtggttagtgaatgtgaggcaatgtaatgccttcacgaaagttaaagtaatccagttacaaaagaagcactgtgtatagtctcaaa

SEQ ID NO: 471702 - DNA, 201 bp, Homo sapiens
aatttataaaatggaaatgatagaaaagtccttcattcttaattatccccagatttcttatatattaacacagttctatttcctagtgtgtggacaatttkaaatttgaaattctgatttatttttaatctacaaagtatttttattttttaaaagggaaccatttcattattgaaatcttatgaatgcatcagttaattt

SEQ ID NO: 471703 - DNA, 201 bp, Homo sapiens
tccaggtagccccactgtaattgtgaaaggatatgcagcaaccctgagaagggtttgattatttagcatttatccccttccctccccctcctctcaccccyagaatgaaggtttggctcacaccaccaggtaagccaccaacatctgaggaggttgttgagggtcgggggaattcggaatagatagtggacgagggagaga

SEQ ID NO: 471704 - DNA, 201 bp, Homo sapiens
tgtgtcacaacccaaacctatagtgtctcaaactttgaaatagctttttggtatgaaacctagtccaatgtttataaaaagcttaaactgcttatatatgktaaaactaaggaaaaccttaacacaaaatttcagaaagtgaaacataaatgatttcttactctacctctatttccaatggtgaatataaataattaaaga

SEQ ID NO: 471705 - DNA, 201 bp, Homo sapiens
taggttcttatgtagatgaagtctcataggtggctgcccttagaggcaacagatagcaaatatttcctattcagacctttaataaaaggtactagactctkagctaatctcttcaggatcagaaaaacaccggggaagggaaagggatcctctacagaatgtaaatcccctccccccgcacaagatacagctttgcagggc

SEQ ID NO: 471706 - DNA, 201 bp, Homo sapiens
tttaattcaaggtggttagtgaatgtgaggcaatgtaatgccttcacgaaagttaaagtaatccagttacaaaagaagcactgtgtatagtctcaaatagytgaaggtacaatgggctccatattttacaaagtacaaaaaattatttcatatacaaagaaaaatacaaataatgtgcaaaaaccattttcacaggtggca

SEQ ID NO: 471707 - DNA, 201 bp, Homo sapiens
aactgagtccttgccaaggtaaatatttggaatcacaaagtaacagatcatctgcgtcctgcatttttataagtcaaagcccagcaaagttaagggactgrttcaaggtcatagattacattagaagagagccagcactagaagccaggtctcttgccacccagctcttccctaccccggcaggctctgctgtgagcaggc

SEQ ID NO: 471708 - DNA, 201 bp, Homo sapiens
atccttcaatccaatcaagttgacactcagtattaaccatcacaacgaagaaagaaacaaaagtgaatttaccagagaagtcatgtcttgcagaaagaacrtggattctggagaaaccagagtactcaatccagaaagacacttgtctttaaaccaaaaaagataaaaaaccttttatcattccaggagaacgtacagtcc

SEQ ID NO: 471709 - DNA, 201 bp, Homo sapiens
tatttgctgtaaatatgcattgtttagtgtggtagcagtggaaataaggctagttgtggtagagtacaaaatatatttgttctttgttctgggttcctggygcacagtgtctaaaaccctagaaattccctaagtgatagtttgttattcctaacacaccccaccctttaggagtatcttttgctattcataactgccctt

SEQ ID NO: 471710 - DNA, 201 bp, Homo sapiens
tggtaaatcagttcctgtgacctttcttttccatactgccccagaacgtctgtatgaatttttcttcctcaactaccatactgttattgcctttacttttstggtctctagagtcataggggatgttgatagaagggtactggcaggaaagggagacacactgggagcgccttattttgcattttcttagtgtcgtctttg

SEQ ID NO: 471711 - DNA, 201 bp, Homo sapiens
aatagtatgtctagaaaatctcttttatatgtgaatttataagggtaaaacaagtttgatagcatagtggtttacttctaggttataaattatgggtgatyctcatcttttataactttctgtgtgttctttcaaaaaaatgaacattattactttcattattagaaaaaatcaataaactattatttttctaacaaaaaa

SEQ ID NO: 471712 - DNA, 201 bp, Homo sapiens
aaaaaaaaaaaaaaaaaaaaaaaaaaaaaagaccaggcctggggcagttgtaaccagttatacttactaccttcccaataagcagtatgcagatgcttaaraaattaaggtttctgattgtgatgtgaagaataacaattccatgagccaacaaaggtctggaagtataaacagggtggaaaatggtctcaccagtgctct

SEQ ID NO: 471713 - DNA, 201 bp, Homo sapiens
atgcataccataaagttggccttcgtgtcccctttctttagttggagccatattggaagcccactgtcaggaaaacggtctcatggcctgagcagggccayagaggatgacctatcctctttataaagccctgcttgactccagggactacataagtctccttctattatgtggcctataaagtgccccatggcctaccta

SEQ ID NO: 471714 - DNA, 201 bp, Homo sapiens
gaaaatgggactcctcttgtgcattctgtcaatacattcccaaatacagactccttttttggcatgcttttctcctttatcatcaaataaagttcctgtarattaaaaaaatccaacaaaacaaaattaaataaattcacactttgccaaaaaacgtatgatgcatgcagcagataaaaaagtggaatattttttatggct

SEQ ID NO: 471715 - DNA, 201 bp, Homo sapiens
ttaggaactgtctggcccatatcagggctcaaagctattcctcaggctggctactgccaggaggggttggttccggaacattccttgcagaagatggttgrcagcactcccatcaggccactgactacccacacttctgaccagaggaagtaaagcacccacagaagccacagccaagacctgactaaggctgctcgggca

SEQ ID NO: 471716 - DNA, 201 bp, Homo sapiens
gcctggtcccccactgatgatggggagcaaatctggtttcttcataaccataaccctagctcagagtaaggagagccatgttcagaagttacttagcctgrttcctttgccctcatgcctccagggcccctggtgcccctaggtgtgtgtctacagttgacttacactgaaaaggctggtgagagcatcaggctgagtaca

SEQ ID NO: 471717 - DNA, 201 bp, Homo sapiens
ggggttagcatcatccagtcataggaagggcctgtggacagggtctcttctatgtagtaatcccacttcttgaggctagagacgtttacattgggctttaragcctgttaaagaaaacagaaatatagtttcatcttgaccccaaagtaccccaagctcactgtcaggcaaacccctaacatttatagagtccaggggagg

SEQ ID NO: 471718 - DNA, 201 bp, Homo sapiens
ctgagacttttctctgtctctcctctcaggcatggtatgagcagggctaagtggaaaaaactgtatctatctttcatgttaaagaagtccagaagactggtaagaatgcaagtgtaatttgatgtaaattatagaaaaattatgacattctcctatgttatatttagaagcttaatggaacttttttacacagtgtaggct

SEQ ID NO: 471719 - DNA, 201 bp, Homo sapiens
aagtggtgcttctgataccgtggctctgacctgagacttttctctgtctctcctctcaggcatggtatgagcagggctaagtggaaaaaactgtatctathtttcatgttaaagaagtccagaagactggtaagaatgcaagtgtaatttgatgtaaattatagaaaaattatgacattctcctatgttatatttagaagc

SEQ ID NO: 471720 - DNA, 201 bp, Homo sapiens
ccctgcaagaggggactgggcaggagaacctcaggccctgggataacttgttgtcagctcctcaaggatccatgcttctttttctatctatctggcagcakgagttcttctgtttcttctgcgtgggttgaccatgggcatcaggcatcagagatacaactctggatcttgtccatccattgctgggcactctgtccatcc

SEQ ID NO: 471721 - DNA, 201 bp, Homo sapiens
ttctgagacatacagacaggaagagaggatagccttgggggtcaataatgctgagttcaagctctggaacaattcccatagccaagggggtctgtcatccmtctgtagtcaccaccaattactctgagggctccatcattcttggagacagacagaatgatgtgcagacagagccaggaaaagagaagtaagatcaactta

SEQ ID NO: 471722 - DNA, 201 bp, Homo sapiens
aagcccaggagttcgagaccagcctgggcaacatggtgaaaccccgtctctacaaaaacatacaaaaatcagccaatcgtggtggtgcatgcccgtagttscagctacccaggaggctgaggtgggaggattgcttgagcctgtgaggtcgagctgcagtgagctgagatcctgccactgcactccagcctgagtaagacc

SEQ ID NO: 471723 - DNA, 201 bp, Homo sapiens
ctcaggtaagctttctgtttcagagacaatggtctccaaacttctccctcatctatttgccaaaaggagtatgaataaaagggccaatattcaaacagaamacaaatatagtatactctttgctgcaaagagtttaaaggtacatgcttaaccttgtgaccagctcctccagttactgcttggacagatcaattgaaattc

SEQ ID NO: 471724 - DNA, 201 bp, Homo sapiens
gcgcctgtaatcccagctactcgggaggctgagccagagaatggcgagaacccaggaggtggagcttgcagtgagccgagattgcaccactgcactccagyctgggtgacaaagcgagactctgtctcaaaagaaaaaaaaaaaaaaagaaaaaaggaaaaaagtcaaagagactgctagggaataagccttattgggcca

SEQ ID NO: 471725 - DNA, 201 bp, Homo sapiens
tactcgggaggctgagccagagaatggcgagaacccaggaggtggagcttgcagtgagccgagattgcaccactgcactccagcctgggtgacaaagcgasactctgtctcaaaagaaaaaaaaaaaaaaagaaaaaaggaaaaaagtcaaagagactgctagggaataagccttattgggccataatctgtggatttcac

SEQ ID NO: 471726 - DNA, 201 bp, Homo sapiens
cacagtgtctaaaaccctagaaattccctaagtgatagtttgttattcctaacacaccccaccctttaggagtatcttttgctattcataactgcccttcrcaacacctgagtttatgctaacaaggtgattcagggtggggtccctagctaggttaaggatgtgggctggtcatctgaaagaccaaacaagtgaatagag

SEQ ID NO: 471727 - DNA, 201 bp, Homo sapiens
cctagctaggttaaggatgtgggctggtcatctgaaagaccaaacaagtgaatagagggtgggaactttcagccacccccaacctcgggggagggagggtwactggagactgggttgtaaaaactcttgaataatgagataaggagtgcctctgggttggtgaacacatcagatgctgggcgggtggtgtgttgcctccct

SEQ ID NO: 471728 - DNA, 201 bp, Homo sapiens
aaaaaagtcaaagagactgctagggaataagccttattgggccataatctgtggatttcactctctagtatacatggcaagaaagtggtgcttctgatacygtggctctgacctgagacttttctctgtctctcctctcaggcatggtatgagcagggctaagtggaaaaaactgtatctatctttcatgttaaagaagtc

SEQ ID NO: 471729 - DNA, 201 bp, Homo sapiens
gctaggttaaggatgtgggctggtcatctgaaagaccaaacaagtgaatagagggtgggaactttcagccacccccaacctcgggggagggagggttactkgagactgggttgtaaaaactcttgaataatgagataaggagtgcctctgggttggtgaacacatcagatgctgggcgggtggtgtgttgcctccctccat

SEQ ID NO: 471730 - DNA, 201 bp, Homo sapiens
acctcgggggagggagggttactggagactgggttgtaaaaactcttgaataatgagataaggagtgcctctgggttggtgaacacatcagatgctgggcrggtggtgtgttgcctccctccataccatgcatctcttccctttggctgatcctgaggtgtatcccttagaaataagctggtaaatgtaagtaaagtgttt

SEQ ID NO: 471731 - DNA, 201 bp, Homo sapiens
gagaccatcctggcgaacacggtgaaaccccatctctactaaaaatacaaaaaattagctgggcgtggtggtgggcccctgtagtcccagctacttgggasgctgaggcaggagaatggtgtgaacccgggaggtggagcttgcagtgagccgagattgcgccactgcactccagaactccagagcctgggcaacagagtg

SEQ ID NO: 471732 - DNA, 201 bp, Homo sapiens
tgaggtgtatcccttagaaataagctggtaaatgtaagtaaagtgttttcctgagttatatgatttgttctggcaaattactgaacctgaggaggggggaytgtggaaaccttcatatttatagctggttggttagaagttctggtggcccttggaacttgcaactagtgtttgaagtgggggcagtcttgaggacagacc

SEQ ID NO: 471733 - DNA, 201 bp, Homo sapiens
atcaattttattgatattctcaaagaacagcttttggtttcattagttttctttattgttggccacaagattttggggacctaaaggcaagtgtgcttcamataaatttagccttattatattatgtagaattgggaatgataggtatttcagctaataaattaattctatgtcagcatttccctaagtatggtgatgaat

SEQ ID NO: 471734 - DNA, 201 bp, Homo sapiens
ctgctcacctccatgaggaggatgcagctggaggaaggccagactagggttctatgattggggcccaggggaggggcctctcttggccctaagtaatggtrgaactgcttatcagaccagtctgttccattccagggcgtgtgttatgtagatgtgcatggtggggcagttgccccgagatatgttatccttcttgggctt

SEQ ID NO: 471735 - DNA, 201 bp, Homo sapiens
tatcagaccagtctgttccattccagggcgtgtgttatgtagatgtgcatggtggggcagttgccccgagatatgttatccttcttgggcttggctccgartatctctgcttcctacaggggtccttccatggctttggtacagatgaacttaaagaaaccttttctaaagtattttaaggtttttcagcttagaccacct

SEQ ID NO: 471736 - DNA, 201 bp, Homo sapiens
aaatgcagggttgagagtcacgcccagcagcaaagttgtttctgtctgaactgtaaggtcactctaaatcccactctttcaaggcaggtatattcagcagrcttaattgaaaactggaacatagcttaccattgttaggatagaactggagcttgaagtgacctgacttctcagtgagaccaaacattcacactctccaag

SEQ ID NO: 471737 - DNA, 201 bp, Homo sapiens
atgtgaagaataacaattccatgagccaacaaaggtctggaagtataaacagggtggaaaatggtctcaccagtgctctttcccttatcaaaagtatgcartatcatactagacaatttcaataggatgccctggaaagcggtatttcctgatttcagatttaaaactgagaacatcagtaaatattttcttggaattaag

SEQ ID NO: 471738 - DNA, 201 bp, Homo sapiens
gtacagagaacctcatttgggcagagttttatggcaagctattgaagttatatatgtacgcatatgtctgacagatctatatctatagaatatatcatatmtgtgtgtaatacataagctactatatatatatgtgtgtgtatatatgttaagattatacacatacaaacacagttgcctttagttgaggaaccccaagaa

SEQ ID NO: 471739 - DNA, 201 bp, Homo sapiens
tatactgtgtttggcaattgatagatatatattaacataagttatggttcttgctttccaggcaactgtggtgtaatagtgtgacatacaacaagaaaaaytgttcttacagaagtttggcaatgaaaaggattgagaagagaaggtggctgcttaaggggacagcaagagatgttttctggtcaaaagaaatgtgtgtgt

SEQ ID NO: 471740 - DNA, 201 bp, Homo sapiens
tttaaagtcgtgatctggatatcattgatttatcaaaatttatcatctggttaggaacctggttttctgtgatcattaaagggttttctacattttcttaytggcttttgaattgaagtaaaattttagcttgtaagtaatgtaaaataaaatggattttaggaagatgcattaaaaaagagtttgactcctatgcagtgg

SEQ ID NO: 471741 - DNA, 201 bp, Homo sapiens
taagaaatcatgggtttcctatgatcatgcaatacaagcaactaattataaaaactggctgggcgtggtggctcacgcctgtaatcccagcacctttgggrgaccaaggtggaaggatctcgaggccaggagtttgagaccaacctgggcaacatagtgagaccttttctctacaaaaattaaaacaaacaattagccagg

SEQ ID NO: 471742 - DNA, 201 bp, Homo sapiens
cagcccttgggataaaccttcagtagtcacaggccagcccctcactcactgtttccaagggaggaagagttctttccactgaaccagtctacaatatgttytaaaatttcttttaaaaatctttattaaagcctcaagggccaggcgtggtggctcacgcctgtaatcccaacactttgggaggccgaggcgggtggatca

SEQ ID NO: 471743 - DNA, 201 bp, Homo sapiens
aaactgtattaaagcctcaaaataacatttctctcaatgactattcttcatagaaaccagatacctcatacatacttgtatcttttcttgatgattctgayatttaatctactcaggaatacaattttgaagacccacttctgaggtaacagtagaatggaaatatgatcttaagttgaacttacaggcatttcagggaga

SEQ ID NO: 471744 - DNA, 201 bp, Homo sapiens
agctaatattaatttttgttatttcacaaattaagatttaacaaacattgtgtgctttgtgttacatccttccatattacatggccttaaatattaagctktgatgcaaaattgccttgttataaaacagattggattatgttcatttttgccagtttgcagttgaataggcagcagacagcagaaactcttgaatatacc

SEQ ID NO: 471745 - DNA, 201 bp, Homo sapiens
agacacaattcctggggatctcgacaggtgtctttgggactgaaaaagacaggacaggagctaggaaacctttacagacacttaaactactgactgactggaaaatttcatttacaaatatttatctcaaggaaaaaactggactaataagcaacaataatgtacaaaggtatcaatctcagagttagttatcgtggtaaa

SEQ ID NO: 471746 - DNA, 201 bp, Homo sapiens
aataactacaacctcttcgaattatttttagttgtaatttttgttttttgtcttttcaaagaaacatctaaaacattacaaaaattaaagcaaatccattycaagtttataaaaggctgtactgcacaggcctagcttattgagggacctgtggtttagcctcaggtgctgtggggaagtcttcagcacagcgagcagggt

SEQ ID NO: 471747 - DNA, 201 bp, Homo sapiens
ctttttccatcagaataatgctgtgtgctccctctttgcctgctactgaacaatgacgtctcttgttgtgaaccccactggcagagcacggaccatggaarcatcttttggcagcaccagagaactgagcatctcaaaggtcaggcattacaagtagatgtctctcataggaaacctagtccaggtagaatatgagacaat

SEQ ID NO: 471748 - DNA, 201 bp, Homo sapiens
aatttatcatctggttaggaacctggttttctgtgatcattaaagggttttctacattttcttattggcttttgaattgaagtaaaattttagcttgtaastaatgtaaaataaaatggattttaggaagatgcattaaaaaagagtttgactcctatgcagtgggcctgcaaaccacggaactgcttccttgatgtgagc

SEQ ID NO: 471749 - DNA, 201 bp, Homo sapiens
caatatcaactaaaatttagaatgtttatgcctattgaaacatctttccaggccgggcacggttgctcatgcctgtaatcctaacactttgggaggctgargcgggtggatcacttgaggtcaggagtttgagaccagcctgaccaatatggtgaaaccccgtctctactaaaaatacaaaaattagctgggcatggtggc

SEQ ID NO: 471750 - DNA, 201 bp, Homo sapiens
ggttgctcatgcctgtaatcctaacactttgggaggctgaggcgggtggatcacttgaggtcaggagtttgagaccagcctgaccaatatggtgaaacccygtctctactaaaaatacaaaaattagctgggcatggtggcaggcgcctgtaatcccagctactcgggaggctgagccagagaatggcgagaacccaggag

SEQ ID NO: 471751 - DNA, 201 bp, Homo sapiens
ttgaaatcttatgaatgcatcagttaatttatattaaattataagcaggctatctgaaaaacaaggatatagaaatcatatatacacatttttgaaatatyagtttagtatttaacatattaacatttcaaaacaaatgcaatgatctagctacctatgacgccagctggtgtcagtggttgtagcgaagatgctgtttct

SEQ ID NO: 471752 - DNA, 201 bp, Homo sapiens
ctaacagtagtcaaaagatttcttgacatagtcagcaaggaccagtctagtacttgcccacggtgaattccaagtttgggtgggcacatccccttctgccrcttttggggcccctttactcccctgttgctgccatctttgaagggtaacagtgcctcctttagtaaccagtacagcagtgggcacagaggtggtgttcga

SEQ ID NO: 471753 - DNA, 201 bp, Homo sapiens
accaggccgagctacttgggaaactccctcagaaggctattgcccttactcagggacatctggggcccttgaggagcctccagactacatatgagaggcactaaaaaagcagtctgtacatgaggaatctatctgtctgctagagccacataatagccagggactgggactagcctagacagaagtaatttcttttggctt

SEQ ID NO: 471754 - DNA, 201 bp, Homo sapiens
ggggcccttgaggagcctccagactacatatgagaggcactaaaaaagcagtctgtacatgaggaatctatctgtctgctagagccacataatagccaggractgggactagcctagacagaagtaatttcttttggctttaagagtattacctgatgttttgttacatccaaaacaaaccaacggggcttccaacctttc

SEQ ID NO: 471755 - DNA, 201 bp, Homo sapiens
gaagcagaaaacagagtatttggttttaaaatatatatatacatttttttgagacggagtcttgttctgtcacgaggctggagtgtggtggcacgatctcrgctcactcactgcaacctccgcctcctgagttcaagagattctcctgcctcagcctcctgagtagctgggattacaggcatgcgccaccacacccagcta

SEQ ID NO: 471756 - DNA, 201 bp, Homo sapiens
aggaaagtggtggacatgggcctgtgaggtctcccagccaggaatagtggtgagagctctagttggtgtgccgtactgtggcaaagatggtttattaggayctataactaggcctttttgtacaggatagcttacatactaggatgtgaaatatgtatctcagacatctgcacccttgggcagcccatgggaaatctgata

SEQ ID NO: 471757 - DNA, 201 bp, Homo sapiens
aagctcactgtcaggcaaacccctaacatttatagagtccaggggaggaagagtatgaatggagttcaaataccatatttctaaatatttaaaaatcatamatcaagataaattattaaataaaacattctccaatcctccctcctacattgagaaatgtaacttcctaatgacgtagaaggtcaagttcaatagagaatt

SEQ ID NO: 471758 - DNA, 201 bp, Homo sapiens
gctggaggaaggccagactagggttctatgattggggcccaggggaggggcctctcttggccctaagtaatggtggaactgcttatcagaccagtctgttscattccagggcgtgtgttatgtagatgtgcatggtggggcagttgccccgagatatgttatccttcttgggcttggctccgaatatctctgcttcctaca

SEQ ID NO: 471759 - DNA, 201 bp, Homo sapiens
tttaaaagttcaagtaactccaatgtccaaagttgcaaatgctctaggggttgcagtaagattttgaaagccaccttgtatattgctccatttggcgcctygaggcatggattagactgaaaggctgtgtggtagtcagcccaagttgaaataggctctaggcacctttgtagacagaaagagaatgagctgaaaccagaa

SEQ ID NO: 471760 - DNA, 201 bp, Homo sapiens
gtagacacaattcctggggatctcgacaggtgtctttgggactgaaaaagacaggacaggagctaggaaacctttacagacacttaaactactgactgactggaaaatttcatttacaaatatttatctcaaggaaaaaactggactaataagcaacaataatgtacaaaggtatcaatctcagagttagttatcgtggta

SEQ ID NO: 471761 - DNA, 201 bp, Homo sapiens
ggtagacacaattcctggggatctcgacaggtgtctttgggactgaaaaagacaggacaggagctaggaaacctttacagacacttaaactactgactgactggaaaatttcatttacaaatatttatctcaaggaaaaaactggactaataagcaacaataatgtacaaaggtatcaatctcagagttagttatcgtggt

SEQ ID NO: 471762 - DNA, 201 bp, Homo sapiens
tggtagacacaattcctggggatctcgacaggtgtctttgggactgaaaaagacaggacaggagctaggaaacctttacagacacttaaactactgactgactggaaaatttcatttacaaatatttatctcaaggaaaaaactggactaataagcaacaataatgtacaaaggtatcaatctcagagttagttatcgtgg

SEQ ID NO: 471763 - DNA, 201 bp, Homo sapiens
cttgaaaaaaaaacagatgaatcttaaattcagctgattagtaaataaaacaaaacagcagaaattaagcatataccccaaattgttttaattaacttagscttttgtagttttagcatctattgtattctaaagataataggaatgtaagttatgctacatcttagtgtatgttaaattgctttaatcataccacttaag

SEQ ID NO: 471764 - DNA, 201 bp, Homo sapiens
atggaaaaaacgaaaagcctgcattactgaactgggatttccctggacctatttcctgccctgtttccataaagcaagcagccagacctacaagtactttytgggccccagacaaattcttctccgtagaaacaaggtagctgctgttttctttttctggaactctagtttactgagatgttggacttactaattaaagat

SEQ ID NO: 471765 - DNA, 201 bp, Homo sapiens
tgcttgagcccaggaggtcaaggttgaagtgagctgtcattgcgccactgcactacagtctgggtgtcatagcaagaccctgtctcaaaaaaaaaaaaaaacaaaactataagaggttgaactggttcatggtttgcaggctgtaaggctgtagaggaagcatagtggcatctgcttctgggaaggcctctggaatcttac

SEQ ID NO: 471766 - DNA, 201 bp, Homo sapiens
cctgccctgtttccataaagcaagcagccagacctacaagtactttctgggccccagacaaattcttctccgtagaaacaaggtagctgctgttttctttytctggaactctagtttactgagatgttggacttactaattaaagattattattttttcctccagatttattgaattattatttaaaaataaaatttccct

SEQ ID NO: 471767 - DNA, 201 bp, Homo sapiens
ctataaaaaaattagctgggcatggtggagcacacttgtagtcccagctactcaggaggctgagctgggaggattgcttgagcccaggaggtcaaggttgmagtgagctgtcattgcgccactgcactacagtctgggtgtcatagcaagaccctgtctcaaaaaaaaaaaaaaacaaaactataagaggttgaactggtt

SEQ ID NO: 471768 - DNA, 201 bp, Homo sapiens
acaaggtagctgctgttttctttttctggaactctagtttactgagatgttggacttactaattaaagattattattttttcctccagatttattgaattrttatttaaaaataaaatttccctactttaagtgtatagttttattagttttggtcactgtacacagttgtgtaaccatcaccacaatcatgatacagaac

SEQ ID NO: 471769 - DNA, 201 bp, Homo sapiens
ctcctgggctcaagtgatcctcccaccgcagcctcctgaacagctgcaactacaggagtgcgccaccacacccagctaatttgtgtgtgtgtgtgtgtgtkttttttttttttttttgtagagatggggttttgtcatgttgcccaggctggtcttgaactcctggggctcaagcaagccgcccacctcagcctctcaaag

SEQ ID NO: 471770 - DNA, 201 bp, Homo sapiens
gcctgggcgacagagcgagactccgtctcaaaaaaaaaaaaaaaaaaaaaaaaaaaaagaaatacctgacgtcaggtgtggtggctcatgcctggaatccyagcactttgggaggccaaggtgggaggattgtttgagcccatgagttcaagaccatcttgggcaatatagtaagaccctgtctctataaaaaaattagct

SEQ ID NO: 471771 - DNA, 201 bp, Homo sapiens
gtccgcagtccggcctgggcgacagagcgagactccgtctcaaaaaaaaaaaaaaaaaaaaaaaaaaaaagaaatacctgacgtcaggtgtggtggctcaygcctggaatcctagcactttgggaggccaaggtgggaggattgtttgagcccatgagttcaagaccatcttgggcaatatagtaagaccctgtctctata

SEQ ID NO: 471772 - DNA, 201 bp, Homo sapiens
accatcctggctaacaaggtgaaaccccgtctctactaaaaatacaaaaaattagccgggcgcggtggcgggcgcctgtagtcccagctactcgggaggcygaggcaggagaatggcgtgaacccgggaagcggagcttgcagtgagccgagattgcgccactgcagtccgcagtccggcctgggcgacagagcgagactc

SEQ ID NO: 471773 - DNA, 201 bp, Homo sapiens
tgtatttttagtagagatggggtttcgccgtgttggccagactggtctcgaattcctggcctcaagcaattcacccaccttggcctcctcaaagtgctggsattacaggcgtgaaccaccgtgcctggccttacctggggagttttaaaagctgttgatgcctgggccttaccatcacagattctgatttaagtggttggg

SEQ ID NO: 471774 - DNA, 201 bp, Homo sapiens
tctttaaggtccacggttaccctttcccacagctgctgccacttctcaggggcttggttcaatttgtgctccaatttttcaatttcctgcaaagaaattaraagttttctgatcagtatttcatagaaatcaggatgggccccaaagccacactgcttctgtactaggcccagatgagcagcatggccagagggcagttga

SEQ ID NO: 471775 - DNA, 201 bp, Homo sapiens
aaggattgagaagagaaggtggctgcttaaggggacagcaagagatgttttctggtcaaaagaaatgtgtgtgtgtctgaaggcaatccagaaggagccartagagaaaacaaattttagaaaaatttgttagctaataactaagagaataagatcctgggaaagcaagaatgaatgaggctcgggcctagatttagggaa

SEQ ID NO: 471776 - DNA, 201 bp, Homo sapiens
agagtttgactcctatgcagtgggcctgcaaaccacggaactgcttccttgatgtgagccaatgccttcctgttgcatcagatctccacaggacagcagarctttccatgggacatggctctgaatagctaggtagcgtgccatactccaggtttgtagaactgtaagcatttgtattacgtagagttttctcatcagtga

SEQ ID NO: 471777 - DNA, 201 bp, Homo sapiens
ctggctgggcgtggtggctcacgcctgtaatcccagcacctttgggagaccaaggtggaaggatctcgaggccaggagtttgagaccaacctgggcaacayagtgagaccttttctctacaaaaattaaaacaaacaattagccaggtgtggtggcacgtgcctgtagccccagctactcaggaggctgaggaggaggatc

SEQ ID NO: 471778 - DNA, 201 bp, Homo sapiens
gccctttcaattctggaagggccaatggttcatctctacagggatagagacttattctgggcatgggtttgcctttcctcaccacagagccttagttagcrtcactttccagggatgtacagaatgcctgatccaaaggcatggaattccacacagcacagcacttaactgggggacagtatgatagcaagggtcctattg

SEQ ID NO: 471779 - DNA, 201 bp, Homo sapiens
gaaggacagagctagctgttctttctctttcttttgcctagtaaacctctgctcttaaactcactccttgtgtgtgtctgtgtccttaattttcttggcaygaggcaatgaacctcgggtattaccttagacaacaactcctgttcaaagtcaagagcttctaccaaaaagggagaggcttggcctgagagaaaatgcacc

SEQ ID NO: 471780 - DNA, 201 bp, Homo sapiens
ccgcctcgcaggttcatgccattctcctgcctcagcctcccgagtagctgggactacaggcgcccgccaccacgcccggctaattttttttttttttttgkatttcttagtagagatggggttttactgtgttaaccaggatggtctcgatctcctgaccttgtgatctgcccgcctcagcctcccaaactgctgggatta

SEQ ID NO: 471781 - DNA, 201 bp, Homo sapiens
tggggttttgtcatgttgcccaggctggtcttgaactcctggggctcaagcaagccgcccacctcagcctctcaaagtgctaggattataggtgtgagccrttgcacccagcctgtgtttatgagttttaagaggaaacatgtttcataggatggaaatgcttatattttcaaataatcatgataatctttcaatatatac

SEQ ID NO: 471782 - DNA, 201 bp, Homo sapiens
gaaggatctcgaggccaggagtttgagaccaacctgggcaacatagtgagaccttttctctacaaaaattaaaacaaacaattagccaggtgtggtggcaygtgcctgtagccccagctactcaggaggctgaggaggaggatcgcttgtgtccaggagttcgaagctgcagtggagccacaattgtgccactgtactcca

SEQ ID NO: 471783 - DNA, 201 bp, Homo sapiens
gatcaggtctactggaagtggaagagaagatgcagagcaatttgttttttactcttcagcaataaagtaacaagcatgtaaacatttctttggtggaaaargaaaagtcagatagacctcaagcctgggttgattagtacctagataccacgtttagaatccgacattaagaaacataaggaattttctgagatgtctttc

SEQ ID NO: 471784 - DNA, 201 bp, Homo sapiens
tagtgacgtcatctttctcatttcttatattggtaatatgtgtcttttttttctcaagcagtctagctagaggtttatcaattttattgatattctcaaasaacagcttttggtttcattagttttctttattgttggccacaagattttggggacctaaaggcaagtgtgcttcaaataaatttagccttattatattat

SEQ ID NO: 471785 - DNA, 201 bp, Homo sapiens
aacagcagaaattaagcatataccccaaattgttttaattaacttaggcttttgtagttttagcatctattgtattctaaagataataggaatgtaagttrtgctacatcttagtgtatgttaaattgctttaatcataccacttaaggggtactcacagaatacaggttaccttccagcatctagacctctcccactcct

SEQ ID NO: 471786 - DNA, 201 bp, Homo sapiens
attgtacttgggagacaatgatgttcccatctttgaggacagtgtatcttacatgagaacctcctatctcttactgattgtgagtggattatttcgctgamcctaatgtttaggtgtgcagaattctgcaagttgaacatagagatttaacatattaagtagtccatttaacttaagccagatttggctgtacaagctcat

SEQ ID NO: 471787 - DNA, 201 bp, Homo sapiens
aaacaaggtagctgctgttttctttttctggaactctagtttactgagatgttggacttactaattaaagattattattttttcctccagatttattgaaktattatttaaaaataaaatttccctactttaagtgtatagttttattagttttggtcactgtacacagttgtgtaaccatcaccacaatcatgatacaga

SEQ ID NO: 471788 - DNA, 201 bp, Homo sapiens
actgttgagtagtcgtccacggtatggatgtatcccagattgtgtagccattcacctactgtaggacagacatttgggttccccccagttatattcaaatyggatatgtggaagggtaattctttaggaaatgtggagccactgaaggtttttgtttgtttgctttgaagacttttgtggaggggaataaaaggattgtat

SEQ ID NO: 471789 - DNA, 201 bp, Homo sapiens
ttaggatattctagattttttttttttcccccaagacggagcctcgctctgtctcccaggctgcagtgcagtgggggcttctcagctcaatgcaacctccrcctcccgggttcaagcgattctcctgcttcagcctcccaagtagctgggactacaggcgtgcgcccccacgtctggctgattttttgtatttttagtaga

SEQ ID NO: 471790 - DNA, 201 bp, Homo sapiens
cttccctccccctcctctcacccctagaatgaaggtttggctcacaccaccaggtaagccaccaacatctgaggaggttgttgagggtcgggggaattcgkaatagatagtggacgagggagagaatgaaggccagttatggctccaagattaacttcattggtaggggccgtagttagtcccacagacctcctgctttct

SEQ ID NO: 471791 - DNA, 201 bp, Homo sapiens
agggtcagcaaaagattcaaagaattatgaactaaaataacatgtgtagtgctcagaacagtgcctggcacatagtaagcagtcgacacaaattagtaatyattgttagtaatggtggtatacggaggcaggaaatagtctagtccaattgataagcataataaaaaagcaagataagaagtgctttcatgaagaactcat

SEQ ID NO: 471792 - DNA, 201 bp, Homo sapiens
gagacagggtctcgctctgttgcccaggctggagtacagtggtgcaatcatggttcactgcaacctcaacctcctgggctcaattgatcctcctgcctcarcctcccaagaagctgggacaacaggtgcatgccaccatgcttgcctaatttttatactttttgtagagatggggctttgccatgttgcccaggctgttct

SEQ ID NO: 471793 - DNA, 201 bp, Homo sapiens
tgcgtgagcctgggaggcggaggttgtagtgagccgagatcacaccactacactccaacctaggtgacagagtgagactctgtctcaaaaaaaaaaaaaaattatatacatggaatcatactcagttggaccctttgagattgccttttttttctttcaatataatgtccttgagatcccttcaaggtgttgcatgtgcca

SEQ ID NO: 471794 - DNA, 201 bp, Homo sapiens
ttcactgtgttagccaggatggtctctatctcctgacctcgtgatctgcctgtctcggcttcccaaagtgctgggattacaggcgtgagccaccgtgcctrgccaaaaaaagtatttattatgttttttagaggtggggtcttgctgtgttgcccaggctggtcttgaactcctgggctcaagtgaacccaccttggcctc

SEQ ID NO: 471795 - DNA, 201 bp, Homo sapiens
tgggactacaggcatacaccaccacacctggctaatttttgtaattttggcagagatggggtttcaccatgttggccagcctcttttcgaactcctggccycaagtgatctacctgccttggcctcccaaagtgctgggattacaggcatgagccaccacgttagaccattttagccctgaattttccttgatatgatttg

SEQ ID NO: 471796 - DNA, 201 bp, Homo sapiens
atggggtttcaccatgttggccaggatggttttgatctcttacctcgtgatccacccaccttggcctcccaaagtgctgggattacaggcgtgagccaccrcgcccgaccaggatattctagatggtcttgatgaagggtggtaagagcatgaacaagacttgtggtctttcaaattctcatatattcattgagattatct

SEQ ID NO: 471797 - DNA, 201 bp, Homo sapiens
tttggtgaaatcagtacaaatgttttgcccatttcaaaaataagctgttggccgggcatagtggctcatgcctataattccagcactttgagaggctgagrtgggtggatcacttgaggtcaggaatttgtgaccagcctggccaatatggtgaaacaccatttctgctaaaaatacaaaaattagctgggcgtggttgtg

SEQ ID NO: 471798 - DNA, 201 bp, Homo sapiens
aggacccgtattacctagagattttgttcttaggtaataagcccaagtttgcttctcttctttgaagatggtcatttagagtgctggctacttcacttggsgcaagcccaacagccagcttagctgtcctagtttcagaaaccaactaattttttttcttttccattcctaggagtctactgctaagatttcagcatgtcc

SEQ ID NO: 471799 - DNA, 201 bp, Homo sapiens
ggttcatgtgattcttgtgcctcaccctaccaagtagctgggactacaggcatacaccaccacacctggctaatttttgtaattttggcagagatggggtytcaccatgttggccagcctcttttcgaactcctggcctcaagtgatctacctgccttggcctcccaaagtgctgggattacaggcatgagccaccacgtt

SEQ ID NO: 471800 - DNA, 201 bp, Homo sapiens
aacaaatacctgaatccctaccataagtagagatgggaagggaaccagcttttccgagcacctactgtgtgccagacaccagacgagggttttttttttttaaataaacataatctcatttaatctctacggtatagcaagagaggcattattatctccactttacaattgagaaagcataggatcagcaagattaagaca

SEQ ID NO: 471801 - DNA, 201 bp, Homo sapiens
ctaatgtttgtatttttagtagagatggggtttcgccgtgttggccagactggtctcgaattcctggcctcaagcaattcacccaccttggcctcctcaaagtgctgggattacaggcgtgaaccaccgtgcctggccttacctggggagttttaaaagctgttgatgcctgggccttaccatcacagattctgatttaag

SEQ ID NO: 471802 - DNA, 201 bp, Homo sapiens
atcctcccaccgcagcctcctgaacagctgcaactacaggagtgcgccaccacacccagctaatttgtgtgtgtgtgtgtgtgttttttttttttttttttgtagagatggggttttgtcatgttgcccaggctggtcttgaactcctggggctcaagcaagccgcccacctcagcctctcaaagtgctaggattataggt

SEQ ID NO: 471803 - DNA, 201 bp, Homo sapiens
gatcctcccaccgcagcctcctgaacagctgcaactacaggagtgcgccaccacacccagctaatttgtgtgtgtgtgtgtgtgttttttttttttttttttgtagagatggggttttgtcatgttgcccaggctggtcttgaactcctggggctcaagcaagccgcccacctcagcctctcaaagtgctaggattatagg

SEQ ID NO: 471804 - DNA, 201 bp, Homo sapiens
tacccgctagggcttcctcccccggccgccagcaggggtgagtcagcagtgatggcgggaggtcctccatgacccctgtcctgtctgtgggcaccaggggkctgtcctggctgtcagggctcctgagtcgctaggaagtgacacgtcctgttcccacaggggctcattcacaggcctcccaggacagtggctggctctgcc

SEQ ID NO: 471805 - DNA, 201 bp, Homo sapiens
gacacagacatgcacaggcggggcggacacacacacatgcacacgcgtggctagccccaacccccacccccatggtcccagagctaaccaatgtgccactsggccctggagatggggtctaggtctctgcaggggcacatggggtcaggcaggtgtccaggggatccagaagctctctctgcctctgccgcacttcattgt

SEQ ID NO: 471806 - DNA, 201 bp, Homo sapiens
ctcgcccggcctccgcagtgccaggtcgacccccagcgcctacacccacgcgggttcagacctgccgagcgcccgccgccgcgggaggggcttgaggccggggcggggcggggccggggcggggcgtccccctcgtaggctccgggccgcgcattctcagcgctgggagccgccgcccccgcagctgccgccgccgccagg

SEQ ID NO: 471807 - DNA, 201 bp, Homo sapiens
tcgcccggcctccgcagtgccaggtcgacccccagcgcctacacccacgcgggttcagacctgccgagcgcccgccgccgcgggaggggcttgaggccggggcggggcggggccggggcggggcgtccccctcgtaggctccgggccgcgcattctcagcgctgggagccgccgcccccgcagctgccgccgccgccaggg

SEQ ID NO: 471808 - DNA, 201 bp, Homo sapiens
cgcccggcctccgcagtgccaggtcgacccccagcgcctacacccacgcgggttcagacctgccgagcgcccgccgccgcgggaggggcttgaggccggggcggggcggggccggggcggggcgtccccctcgtaggctccgggccgcgcattctcagcgctgggagccgccgcccccgcagctgccgccgccgccagggc

SEQ ID NO: 471809 - DNA, 201 bp, Homo sapiens
cgcagtgccaggtcgacccccagcgcctacacccacgcgggttcagacctgccgagcgcccgccgccgcgggaggggcttgaggccggggcggggcggggccggggcggggcgtccccctcgtaggctccgggccgcgcattctcagcgctgggagccgccgcccccgcagctgccgccgccgccagggcccggactcgga

SEQ ID NO: 471810 - DNA, 201 bp, Homo sapiens
tgtctgagcccctacccctctgctgtctgagtggcctcctccgcccttactgcaggcccataggctcctgccagcctgtgacgtgcggccccgggaatgcygtggggagcgggcaggctggcatgagctcaccggaggtacccgctagggcttcctcccccggccgccagcaggggtgagtcagcagtgatggcgggaggt

SEQ ID NO: 471811 - DNA, 201 bp, Homo sapiens
ggtggaacatctaaggtcaggagttcgagaccagcctggtccacatggtgaaactctgtctgtactaaaaatacaaacattagctgggcgtggtggtgggygcctgtaatcccagtgactcaggaggctgaggcaggagaattgcttgaactcaggaggcggaggttgcagtgagctgagatcgtgccattgcactccagc

SEQ ID NO: 471812 - DNA, 201 bp, Homo sapiens
acctggctgtgctgtctggaaacgtggcccagggcgctcagctgtctgcaccccacgccctccctggcttccccatgctcacagcttgcccactgctgcakgtcgggcgggcacggggcatctggggaggggcatagcctgtctgtgctgccccctcgggttggtgtgggtcgcctgtccaggaaaaaccctcccagtctg

SEQ ID NO: 471813 - DNA, 201 bp, Homo sapiens
gttggggaagccaggtgagctctgacccttgggcctgggcctctgcccctcccaacccagccgtcgtctccctcgacagcgcccctgctgtcttccccacygcagtcaccaccacccgaaatgccacgtggtcactgtgcactgccctgttcatgtgcctctgcggggcagggccttcctggttttgtacactgctgtacc

SEQ ID NO: 471814 - DNA, 201 bp, Homo sapiens
gggcctctgcccctcccaacccagccgtcgtctccctcgacagcgcccctgctgtcttccccaccgcagtcaccaccacccgaaatgccacgtggtcactrtgcactgccctgttcatgtgcctctgcggggcagggccttcctggttttgtacactgctgtacccagatgcctacaaccatccctgccacatacaggtgc

SEQ ID NO: 471815 - DNA, 201 bp, Homo sapiens
cccaacccagccgtcgtctccctcgacagcgcccctgctgtcttccccaccgcagtcaccaccacccgaaatgccacgtggtcactgtgcactgccctgtycatgtgcctctgcggggcagggccttcctggttttgtacactgctgtacccagatgcctacaaccatccctgccacatacaggtgctcaataaacacttg

SEQ ID NO: 471816 - DNA, 201 bp, Homo sapiens
actcacaggactggcgagacagtgagtggatccgctcacaggaggccggtggccgtgtggtcccagacagctgctgcaagacggtggtggctctttgtggrcagcgagaccatgcctccaacatctacaaggtggaggtgggtgtgcagcgggatcatgcctccagtgtctacgaggtgggggggggcaccccagtgactg

SEQ ID NO: 471817 - DNA, 201 bp, Homo sapiens
gaggcagcttcaagtgccttttgctgcgcaccaatgcccagcaggggaggtgaggggggctggcggggcgaagtttggggggtgttttgtggggctccccrgacatactctctgcctggtggtcagatgcaggttggaaggggccttgctgagtggcgcaaggccgagcgttcccagcagggggagaaacccttcacaccc

SEQ ID NO: 471818 - DNA, 201 bp, Homo sapiens
ccgtcgtctccctcgacagcgcccctgctgtcttccccaccgcagtcaccaccacccgaaatgccacgtggtcactgtgcactgccctgttcatgtgcctytgcggggcagggccttcctggttttgtacactgctgtacccagatgcctacaaccatccctgccacatacaggtgctcaataaacacttgtagagcagat

SEQ ID NO: 471819 - DNA, 201 bp, Homo sapiens
tgtcttccccaccgcagtcaccaccacccgaaatgccacgtggtcactgtgcactgccctgttcatgtgcctctgcggggcagggccttcctggttttgtwcactgctgtacccagatgcctacaaccatccctgccacatacaggtgctcaataaacacttgtagagcagatggacgagctcgctgtgctggtaacagat

SEQ ID NO: 471820 - DNA, 201 bp, Homo sapiens
acggtggtggctctttgtggacagcgagaccatgcctccaacatctacaaggtggaggtgggtgtgcagcgggatcatgcctccagtgtctacgaggtggkggggggcaccccagtgactggctgtgggcagtgggacacgcctccaatatctaccaggaggtggggggtcaccccagtggccggatgtgggcagtgagac

SEQ ID NO: 471821 - DNA, 201 bp, Homo sapiens
agtcaccaccacccgaaatgccacgtggtcactgtgcactgccctgttcatgtgcctctgcggggcagggccttcctggttttgtacactgctgtacccaratgcctacaaccatccctgccacatacaggtgctcaataaacacttgtagagcagatggacgagctcgctgtgctggtaacagatggtggtctgttctca

SEQ ID NO: 471822 - DNA, 201 bp, Homo sapiens
cacgtggtcactgtgcactgccctgttcatgtgcctctgcggggcagggccttcctggttttgtacactgctgtacccagatgcctacaaccatccctgcmacatacaggtgctcaataaacacttgtagagcagatggacgagctcgctgtgctggtaacagatggtggtctgttctcagggccctcgcatccagcaggg

SEQ ID NO: 471823 - DNA, 201 bp, Homo sapiens
ccctccctggcttccccatgctcacagcttgcccactgctgcaggtcgggcgggcacggggcatctggggaggggcatagcctgtctgtgctgccccctcrggttggtgtgggtcgcctgtccaggaaaaaccctcccagtctgccaggctccacctgcctccacgctccattctccccaccccggccaggatgaaggaag

SEQ ID NO: 471824 - DNA, 201 bp, Homo sapiens
ctgccagcctgtgacgtgcggccccgggaatgctgtggggagcgggcaggctggcatgagctcaccggaggtacccgctagggcttcctcccccggccgcyagcaggggtgagtcagcagtgatggcgggaggtcctccatgacccctgtcctgtctgtgggcaccaggggtctgtcctggctgtcagggctcctgagtcg

SEQ ID NO: 471825 - DNA, 201 bp, Homo sapiens
ggggtctaggtctctgcaggggcacatggggtcaggcaggtgtccaggggatccagaagctctctctgcctctgccgcacttcattgtcaccctggtgacrgtcctggcaccacccaacctcccctcatgccgaggtctgacctcagcccttccctgtggctctgagctgggccccgggcctccccaccggccatcctggg

SEQ ID NO: 471826 - DNA, 201 bp, Homo sapiens
cggcattgcctgtgtgcaggtgagggcacatgggggtggcggtcatcttgttggggacacggggcagggcggtggctggtggccccatgacgtctgcttaygcccacccggctctgcacacaggtctttggcatgatcttcacgtgctgcctgtacaggagtctcaagctggagcactactgaccctgccttgggccttgc

SEQ ID NO: 471827 - DNA, 201 bp, Homo sapiens
atggagatggggtttcaccacaatggccaggctggttgtgaactcccgacctcaagtgattgcacctgccttggcctcccaaagtgctggcattataggcrtgagacaccgcacctggactcctttcctctactttctttgggttaatttgctagtctctttttattatttatttatttattttgagatggagtctcactc

SEQ ID NO: 471828 - DNA, 201 bp, Homo sapiens
agctcgcccggcctccgcagtgccaggtcgacccccagcgcctacacccacgcgggttcagacctgccgagcgcccgccgccgcgggaggggcttgaggccggggcggggcggggccggggcggggcgtccccctcgtaggctccgggccgcgcattctcagcgctgggagccgccgcccccgcagctgccgccgccgcca

SEQ ID NO: 471829 - DNA, 201 bp, Homo sapiens
tcccgggttcacgccattctcctgcctcagcctcccaagtagctgggactacaggcgcccgccaccacgcccggctaattttttgtatttctagtacagayggggtttcaccgtgttagccaggatggtcttgatctcctgaccttgtgatctgcctgccttggccccccaaagtgctgggattacaggcgtgagccaccg

SEQ ID NO: 471830 - DNA, 201 bp, Homo sapiens
gctcgcccggcctccgcagtgccaggtcgacccccagcgcctacacccacgcgggttcagacctgccgagcgcccgccgccgcgggaggggcttgaggccggggcggggcggggccggggcggggcgtccccctcgtaggctccgggccgcgcattctcagcgctgggagccgccgcccccgcagctgccgccgccgccag

SEQ ID NO: 471831 - DNA, 201 bp, Homo sapiens
ggcgtgagacaccgcacctggactcctttcctctactttctttgggttaatttgctagtctctttttattatttatttatttattttgagatggagtctcrctctgtcgcccaggctggagtgcagtggcaccatctcggctcactgcaagctccgcctcccgggttcacgccattctcctgcctcagcctcccaagtagc

SEQ ID NO: 471832 - DNA, 201 bp, Homo sapiens
agcttcaagtgccttttgctgcgcaccaatgcccagcaggggaggtgaggggggctggcggggcgaagtttggggggtgttttgtggggctccccggacayactctctgcctggtggtcagatgcaggttggaaggggccttgctgagtggcgcaaggccgagcgttcccagcagggggagaaacccttcacaccccaggc

SEQ ID NO: 471833 - DNA, 201 bp, Homo sapiens
cagatgcaggttggaaggggccttgctgagtggcgcaaggccgagcgttcccagcagggggagaaacccttcacaccccaggcccttcaggaactggggcyttgccttgcagccacatggccccatcccagttggggaagccaggtgagctctgacccttgggcctgggcctctgcccctcccaacccagccgtcgtctcc

SEQ ID NO: 471834 - DNA, 201 bp, Homo sapiens
cagcagggggagaaacccttcacaccccaggcccttcaggaactggggctttgccttgcagccacatggccccatcccagttggggaagccaggtgagctytgacccttgggcctgggcctctgcccctcccaacccagccgtcgtctccctcgacagcgcccctgctgtcttccccaccgcagtcaccaccacccgaaat

SEQ ID NO: 471835 - DNA, 201 bp, Homo sapiens
actggggctttgccttgcagccacatggccccatcccagttggggaagccaggtgagctctgacccttgggcctgggcctctgcccctcccaacccagccstcgtctccctcgacagcgcccctgctgtcttccccaccgcagtcaccaccacccgaaatgccacgtggtcactgtgcactgccctgttcatgtgcctctg

SEQ ID NO: 471836 - DNA, 201 bp, Homo sapiens
ggctttgccttgcagccacatggccccatcccagttggggaagccaggtgagctctgacccttgggcctgggcctctgcccctcccaacccagccgtcgtytccctcgacagcgcccctgctgtcttccccaccgcagtcaccaccacccgaaatgccacgtggtcactgtgcactgccctgttcatgtgcctctgcgggg

SEQ ID NO: 471837 - DNA, 201 bp, Homo sapiens
cccatcccagttggggaagccaggtgagctctgacccttgggcctgggcctctgcccctcccaacccagccgtcgtctccctcgacagcgcccctgctgtyttccccaccgcagtcaccaccacccgaaatgccacgtggtcactgtgcactgccctgttcatgtgcctctgcggggcagggccttcctggttttgtacac

SEQ ID NO: 471838 - DNA, 201 bp, Homo sapiens
gggccttcctggttttgtacactgctgtacccagatgcctacaaccatccctgccacatacaggtgctcaataaacacttgtagagcagatggacgagctsgctgtgctggtaacagatggtggtctgttctcagggccctcgcatccagcagggcagacagacccacccccgccccgcccagtgtcaggacaaagaaggg

SEQ ID NO: 471839 - DNA, 201 bp, Homo sapiens
ggggaccgaggccagggtgctgggtgggctcagcgctcatagcccctggctttcagctcacagagcatggctgcacgtgtcccgatacgtggaggcacctrtgtccctgtcctctgtccccccaggacccatggtcctcccccagcctggggaggaagcccagaggtgggggccctgggcctcagggctgctgggaggaca

SEQ ID NO: 471840 - DNA, 201 bp, Homo sapiens
agaagccacacccaggctgggcactgtgcccaggtctcctattggctccctgcagccacgaggggctgtgtggtcagagccagcaagtcagcccctgcctyggtactcccaatcctggggcccagagcacaggggtgacccctcttcctgcacccagtctgtccagctcccctgtgcgctgtgcctggcctgctggggagg

SEQ ID NO: 471841 - DNA, 201 bp, Homo sapiens
ccgccacacaggggagcttcgccacgctgtcctcttccttcccgtccctgtcggctgccaacctgctcatcatcaccggcgcctttgtcatggccatcggyttcgtgggctgcctgggtgccatcaaggagaacaagtgcctcctgctcactgtgagtgccggggcccaagcgatgctccgggtgggaccacgcagggtgg

SEQ ID NO: 471842 - DNA, 201 bp, Homo sapiens
gcctttcccaccaccagcctcggtgctctgccccatgctgggaggagggagggagggacaggtgcctggagcccccggaaccctgtttctggaaggccctrgctcaggtggcttcagggcctccggaccccccctgggaggggtggccacgtgctggctgcggaacccagggcaggggtgggaggggcctccagcactttt

SEQ ID NO: 471843 - DNA, 201 bp, Homo sapiens
gtggggcgtgcaagccaccaggaagctgaagggctctgccactgtgtcgcccaccctggggtcggggtcagggccagggcacctgctgaggacagggaccrctctgggcttgaggcctgagcctgtggagctgccatgcccagtcctcctcccctacctacagatcctgggcctgaccttcgccatgaccatgtactgcca

SEQ ID NO: 471844 - DNA, 201 bp, Homo sapiens
gaggctctggaggggtgaggcccaggcctgaggggcgccttggaggtaggggtggtgggaggtgtgggtgtggtctggagctggtgggtgtggggggtggsctgcaggtggctgagtgaccagagtgtttctgtgacggggggacggggcagaatgactgaagggcagtgggtgtgggggcccggcaggcaggcaggcagg

SEQ ID NO: 471845 - DNA, 201 bp, Homo sapiens
ctcctcctccgtcttctcaggggcgaagttcaggggttaaggtggtgggagggatgtccccccggcgggacctcaagatccccgcgtgtgtctgtcctgaccccccccgctgccggagtcctgctgggcctgtggggagggcatgggggagccccagtgggcagccagtgaccagagccgtgggcagtggtgggagccggg

SEQ ID NO: 471846 - DNA, 201 bp, Homo sapiens
ggtccctgggagggacagccagcctgggttgcctgctgagtgtgacccaaggaggctcttggcccagacatccacctccagaaggggtcacccaagggttwgttttctgcaagaggctctggaggggtgaggcccaggcctgaggggcgccttggaggtaggggtggtgggaggtgtgggtgtggtctggagctggtgggt

SEQ ID NO: 471847 - DNA, 201 bp, Homo sapiens
acaccccaggctcccatgcacctggctcacattcacgcctgctcacacgcaccccggctcacatgcacccccgcttgcatgcacctcgcctcccacccccrctcacacgcacccccggctcgcatcctgggctcccatgcacccccggctcccatgcacccctgggtcacacgcatccccgctcacacgcaccccagctct

SEQ ID NO: 471848 - DNA, 201 bp, Homo sapiens
taattttattaaccacgtgcacgcattttatctgtgtgggtctgccagcacgctggggcctcggggcccgggggacgccgggttgcagggcggtaacgcgygcgtgtggccacgtgtgatggtgtgaggcgtctgtggcaacgtgggctgttgtctgtcacagtgtgtgtgaccgagcccgtctggtgacagtgggtgtct

SEQ ID NO: 471849 - DNA, 201 bp, Homo sapiens
aggcgcgcatcaccacgcctgtctaatttttgtatttttagtagagacagggtttcaccatgttggtcaggttggtctcgaactcctgacctcgtgatccrcctgcctcgacctcccaaagtgctgggattacaggcggccccaattattttttattaatcaatcaccaccttcccgccagtccagcaaactggagccccg

SEQ ID NO: 471850 - DNA, 201 bp, Homo sapiens
gggcatctttgtagagctggcagacccctgcccaccctggggctgtgccccaagcccagtgctcccagtgaggacagattctcttaattagggatgtcccytggcacttctgccacggagctggcctctggtcctgcacactccagacacatccaccctggctcacacacaccctggctcacatgcaccccggatcccacc

SEQ ID NO: 471851 - DNA, 201 bp, Homo sapiens
ttcctactcgttgggagaccaggggatacaacctggcctcctcctcctcctcctccgtcttctcaggggcgaagttcaggggttaaggtggtgggagggaygtccccccggcgggacctcaagatccccgcgtgtgtctgtcctgaccccccccgctgccggagtcctgctgggcctgtggggagggcatgggggagcccc

SEQ ID NO: 471852 - DNA, 201 bp, Homo sapiens
tggaaggacagttacctcactccagagagctagttctgaggggcgaggtgttgcggggttgagccagcagggcagggagtagtgggcactgcgtttggctrcccaggtgggtttggggcctctccctggccagaaatccctgagtgccaggaggaggacagactccccagcctggcacccatggtggaggagggccttgcg

SEQ ID NO: 471853 - DNA, 201 bp, Homo sapiens
accccccctgggaggggtggccacgtgctggctgcggaacccagggcaggggtgggaggggcctccagcactttttatatttacgtattctccaaagcagkgttcacacgggagccagcctgtggcccccagcctcctggaaaacaggttggcgctggaggagccgggtcttggcatcctggaggtggccccactggtcct

SEQ ID NO: 471854 - DNA, 201 bp, Homo sapiens
ctggctcaggctggcaggcggcatggctttgggcttgtgggccgggctctgccctggggtccagagcttgcattggggcctcaccctgtctgtgtctctcmtgttgctgtgccccagctgggaggctgtggcgtgctgggtgtcggcatctggctggccgccacacaggggagcttcgccacgctgtcctcttccttcccg

SEQ ID NO: 471855 - DNA, 201 bp, Homo sapiens
gtttctggaaggccctggctcaggtggcttcagggcctccggaccccccctgggaggggtggccacgtgctggctgcggaacccagggcaggggtgggagsggcctccagcactttttatatttacgtattctccaaagcagtgttcacacgggagccagcctgtggcccccagcctcctggaaaacaggttggcgctgga

SEQ ID NO: 471856 - DNA, 201 bp, Homo sapiens
ggctctgccctggggtccagagcttgcattggggcctcaccctgtctgtgtctctcctgttgctgtgccccagctgggaggctgtggcgtgctgggtgtcsgcatctggctggccgccacacaggggagcttcgccacgctgtcctcttccttcccgtccctgtcggctgccaacctgctcatcatcaccggcgcctttgt

SEQ ID NO: 471857 - DNA, 201 bp, Homo sapiens
ctgccaccacgcccagctaattttttgtattttttagtagagacggggtttccccgtgttagccaggatggtctccatctcctgacctcgtgatctgcccrcctcggccttccaaagtgctgggattacaggtgtgagccaccacgcccggccccagtttgggttttaaatgacagttttctctgttgtgctagcacctcc

SEQ ID NO: 471858 - DNA, 201 bp, Homo sapiens
gggaggctgtggcgtgctgggtgtcggcatctggctggccgccacacaggggagcttcgccacgctgtcctcttccttcccgtccctgtcggctgccaacytgctcatcatcaccggcgcctttgtcatggccatcggcttcgtgggctgcctgggtgccatcaaggagaacaagtgcctcctgctcactgtgagtgccgg

SEQ ID NO: 471859 - DNA, 201 bp, Homo sapiens
cctgggtgccatcaaggagaacaagtgcctcctgctcactgtgagtgccggggcccaagcgatgctccgggtgggaccacgcagggtggggctccggtggyccccaggccttggctgccgcagtgaccccccagacgtgggcaccacctctggggccggacctccaggctggcagtgtggcccggggccctggccactgtt

SEQ ID NO: 471860 - DNA, 201 bp, Homo sapiens
gtctggaaaggctggagtggcctgtcaggtggggagtgagccttctgccctgcgcagaccagacggtgaagcggggttaggggtgtgcagactgcgtcctggggcctaagatcccgtccctttggctccaggccaggggttgggcggatccctcctagagggagtggttcagaggcacaagggagcctccccgactgtggc

SEQ ID NO: 471861 - DNA, 201 bp, Homo sapiens
cacccccgactcccagcagataaatacccaacagtgcaggaaaggattacagggaaggcctggagtgtggggttagcctcggtggtcccaggaggaaagaytgggggacctctggactatctgtccctcccctggggctgctgggggtatcagagtggtgtctccagcctccagggctcaggtttgggtgggaggggcctg

SEQ ID NO: 471862 - DNA, 201 bp, Homo sapiens
gggtggggctccggtggcccccaggccttggctgccgcagtgaccccccagacgtgggcaccacctctggggccggacctccaggctggcagtgtggcccrgggccctggccactgttgggtcttccaggccacactggggctggggggtgatttgcagagcggtgtgggggtcactcaagagaacgtgctgtaccttgtc

SEQ ID NO: 471863 - DNA, 201 bp, Homo sapiens
atggtggaggagggccttgcgggtcattgctggcagctccatagggagggcgtgaggccccttcctgagcctgggtgtctgctcagagcccaaggcagggkggggtagggtgcttgtgcctggtaggaagcagacagcaggctggtccaggggtccaggaccccagggaggaggcactgctgcgtgtctgtgtgggtgcaa

SEQ ID NO: 471864 - DNA, 201 bp, Homo sapiens
gtgggatctagcaggactctgggtggttctggctcaggctggcaggcggcatggctttgggcttgtgggccgggctctgccctggggtccagagcttgcaytggggcctcaccctgtctgtgtctctcctgttgctgtgccccagctgggaggctgtggcgtgctgggtgtcggcatctggctggccgccacacaggggag

SEQ ID NO: 471865 - DNA, 201 bp, Homo sapiens
cacagtctggaaaggctggagtggcctgtcaggtggggagtgagccttctgccctgcgcagaccagacggtgaagcggggttaggggtgtgcagactgcgycctggggcctaagatcccgtccctttggctccaggccaggggttgggcggatccctcctagagggagtggttcagaggcacaagggagcctccccgactg

SEQ ID NO: 471866 - DNA, 201 bp, Homo sapiens
aaaaaaaacaaaaaagactattgtggctaaaccatctctactaaaaatacaaaaaattaaccgggtgtggtgggggcatgcctgtaatcccagctacttgrgaggctgaggcaggagaatcacttgaacctgggaggcggaggaggttgcagtgagcccagatggtgccactgcactccagcctgagcaacagggtgagac

SEQ ID NO: 471867 - DNA, 201 bp, Homo sapiens
gtgcacacgaggagggggcatctcccacccccaggccccctgaggcaagagtgttggggctcatgggccctccgtgggccctgccagggtggaggccccakgcctgtcttgagctgggctggtgttgcaggtgggggtggggcggctgctggtggccagcagctatcccagccttggtttctgtctggaaagtggggtgtg

SEQ ID NO: 471868 - DNA, 201 bp, Homo sapiens
tccatgaggtacgtggccctggcccctggcatgctgtggggcggaggctgtgcggcctttcgggtccctgtctgagcctgccccctccacagttcttcctsctgctgctgctggtgttcctgctggaggccaccatcgccatcctcttcttcgcctacacggacaaggtacggctgccttggccgcaggcccaactgcagg

SEQ ID NO: 471869 - DNA, 201 bp, Homo sapiens; identical to SEQ ID NO: 404847

SEQ ID NO: 471870 - DNA, 201 bp, Homo sapiens; identical to SEQ ID NO: 404849

SEQ ID NO: 471871 - DNA, 201 bp, Homo sapiens; identical to SEQ ID NO: 404850

SEQ ID NO: 471872 - DNA, 201 bp, Homo sapiens; identical to SEQ ID NO: 404852

SEQ ID NO: 471873 - DNA, 201 bp, Homo sapiens
tgtctgctggcttgcaggggtgggcctgtgtccctggccaccgctggacctgtgggtttcagggctgggacccaggaccacaggcagagctctgttcgacsagagaggagaccgagtgtgctggcaggggcgaggggttttcggtggcccagccaaacaccaccttctctcaagggccctgtcctcatcccagaagtggtt

SEQ ID NO: 471874 - DNA, 201 bp, Homo sapiens
acgatggattctgggcaatacagcacgtctacggtgaaagcttcaggttactgaaagggaccagcggacagttccaggtcatgctgacctcagcagcaggkcgaggccagagaggcagcagtcatatgagactagtagatgccatttgaccatttgggccattagatggaaaggcaattgcttgggtgaaaaaggagaacc

SEQ ID NO: 471875 - DNA, 201 bp, Homo sapiens
acagcacgtctacggtgaaagcttcaggttactgaaagggaccagcggacagttccaggtcatgctgacctcagcagcagggcgaggccagagaggcagcrgtcatatgagactagtagatgccatttgaccatttgggccattagatggaaaggcaattgcttgggtgaaaaaggagaacccttagtagagaaagctgca

SEQ ID NO: 471876 - DNA, 201 bp, Homo sapiens
agagggcgagagagtcagtccagcaatcagaaggcaagtggcttagaagacaagtagccatccaccacatggctgaataaaccatgacaggaccaatcgcyactcagcaatgagaagcagctaactgttgacatgccaacagcttgaacgggcctcaagggtgtcacgtggcatgaaagacactcatctcaggccacacag

SEQ ID NO: 471877 - DNA, 201 bp, Homo sapiens
atttgtctgctggcttgcaggggtgggcctgtgtccctggccaccgctggacctgtgggtttcagggctgggacccaggaccacaggcagagctctgttcraccagagaggagaccgagtgtgctggcaggggcgaggggttttcggtggcccagccaaacaccaccttctctcaagggccctgtcctcatcccagaagtg

SEQ ID NO: 471878 - DNA, 201 bp, Homo sapiens
tggcttagaagacaagtagccatccaccacatggctgaataaaccatgacaggaccaatcgccactcagcaatgagaagcagctaactgttgacatgccawcagcttgaacgggcctcaagggtgtcacgtggcatgaaagacactcatctcaggccacacaggattccattcatcgaacattcctgagacaacggaattc

SEQ ID NO: 471879 - DNA, 201 bp, Homo sapiens
gctgggacccaggaccacaggcagagctctgttcgaccagagaggagaccgagtgtgctggcaggggcgaggggttttcggtggcccagccaaacaccacyttctctcaagggccctgtcctcatcccagaagtggttgttttcctcctgtggtctctgaaagacagaggcatggctctgggacagagccatgtggtgatg

SEQ ID NO: 471880 - DNA, 201 bp, Homo sapiens
acatggctgaataaaccatgacaggaccaatcgccactcagcaatgagaagcagctaactgttgacatgccaacagcttgaacgggcctcaagggtgtcaygtggcatgaaagacactcatctcaggccacacaggattccattcatcgaacattcctgagacaacggaattctggtgatggagcacaggtcagtggtggc

SEQ ID NO: 471881 - DNA, 201 bp, Homo sapiens
cagagaggagaccgagtgtgctggcaggggcgaggggttttcggtggcccagccaaacaccaccttctctcaagggccctgtcctcatcccagaagtggtkgttttcctcctgtggtctctgaaagacagaggcatggctctgggacagagccatgtggtgatgactgtaatgggagtatgcctgtctccaacaagagggc

SEQ ID NO: 471882 - DNA, 201 bp, Homo sapiens
tcgccactcagcaatgagaagcagctaactgttgacatgccaacagcttgaacgggcctcaagggtgtcacgtggcatgaaagacactcatctcaggccayacaggattccattcatcgaacattcctgagacaacggaattctggtgatggagcacaggtcagtggtggccaggggccaggtgtggctatgaaggggtgg

SEQ ID NO: 471883 - DNA, 201 bp, Homo sapiens
ggaagccccatcatgtccatgcccgacagcgtccattgttcccttttcccagagcccagagctgggtagagctgcaaggacaccgcctgcacagagtgccyggggctgggcattgcctgctgcaatgacaacatctggctggatggcagagagctgatggaccgtcgcgacgtcccagtccagctgggccactgtcaccct

SEQ ID NO: 471884 - DNA, 201 bp, Homo sapiens
gaagcagctaactgttgacatgccaacagcttgaacgggcctcaagggtgtcacgtggcatgaaagacactcatctcaggccacacaggattccattcatygaacattcctgagacaacggaattctggtgatggagcacaggtcagtggtggccaggggccaggtgtggctatgaaggggtggctgccttgtgatgattc

SEQ ID NO: 471885 - DNA, 201 bp, Homo sapiens
agagcccagagctgggtagagctgcaaggacaccgcctgcacagagtgcccggggctgggcattgcctgctgcaatgacaacatctggctggatggcagaragctgatggaccgtcgcgacgtcccagtccagctgggccactgtcaccctggggctgtctaagttggcagagatgtctgcctctaatgagaggccattga

SEQ ID NO: 471886 - DNA, 201 bp, Homo sapiens
ctcaagggtgtcacgtggcatgaaagacactcatctcaggccacacaggattccattcatcgaacattcctgagacaacggaattctggtgatggagcacwggtcagtggtggccaggggccaggtgtggctatgaaggggtggctgccttgtgatgattcaatatgctatgtttttcctttgtggttttctgtatctatg

SEQ ID NO: 471887 - DNA, 201 bp, Homo sapiens
aaagacactcatctcaggccacacaggattccattcatcgaacattcctgagacaacggaattctggtgatggagcacaggtcagtggtggccaggggccrggtgtggctatgaaggggtggctgccttgtgatgattcaatatgctatgtttttcctttgtggttttctgtatctatgttttatcttattttcttttgag

SEQ ID NO: 471888 - DNA, 201 bp, Homo sapiens
gatgccgtgggagatgatggctgtgctctcggagagtgtgactgagcctcccgagggctgcaccaagagagggcgagagagtcagtccagcaatcagaagrcaagtggcttagaagacaagtagccatccaccacatggctgaataaaccatgacaggaccaatcgccactcagcaatgagaagcagctaactgttgacat

SEQ ID NO: 471889 - DNA, 201 bp, Homo sapiens
ggagatgatggctgtgctctcggagagtgtgactgagcctcccgagggctgcaccaagagagggcgagagagtcagtccagcaatcagaaggcaagtggcwtagaagacaagtagccatccaccacatggctgaataaaccatgacaggaccaatcgccactcagcaatgagaagcagctaactgttgacatgccaacagc

SEQ ID NO: 471890 - DNA, 201 bp, Homo sapiens
ccttcgcactggcgctttgccagggaagagagttatctatggcttgaatacctcggtgccgtcctctcgtttctctgggaaactgcagtacggagatgctwtctccagtaatgagaaggcctttggtgtctcttcggggcttctgggactgcagtagagagagaggtggaggaaaacaatgttagactacagggtctttcc

SEQ ID NO: 471891 - DNA, 201 bp, Homo sapiens
gggttagggaagtagaaagggggcggggacgatgaacctgagagggtgcgcgatggcgccagctggagtgcggctggcggaggaaggagcctggcggcggrttgggggctgggtaactggggctgggggtttgtcaaggggttggcgcgtagtgatgacgcaaaggctttgtacctggggcttcgcagtgggacggaaatt

SEQ ID NO: 471892 - DNA, 201 bp, Homo sapiens
tgatgtgaagtacctcatgaagagctgcaaaaatctcaaagtaaggcttcggatggcattatctacagcagcacactgttcagaccaagtgactgtcatgmgagcctaggctgggatgttgttttaaaccatattttaaagtattacagtgaatgcaattatattatctggtcatgtgattttttttcttgcatacataat

SEQ ID NO: 471893 - DNA, 201 bp, Homo sapiens
caataagtggtggttctaaattctttattgttatgaaactagattatttaagagtgtttctggtaaggaaactattccgattttgtgaaatagacttccasgtatgaaaaagagttttcccatctaagtaaactaaactgacgttccagggactaaaagtaaccttcagaatgatattggcttttgttaggttttgaaaaa

SEQ ID NO: 471894 - DNA, 201 bp, Homo sapiens
tttggagttgatacatccatgaaaattgaagtggagtactgatgagctgtgaagaagagaagcattctgtggaaataatgtcactgataaagaggattaamacaaatttttaacaaattctcacttttaggctgggcgtggtggctcacgcctgtaatcccagcactttgggaggccgaggcgggcggatcacaaggtcag

SEQ ID NO: 471895 - DNA, 201 bp, Homo sapiens
atctaagttagactgatatatttgaatatttatcaagatagaagattttattccattaaatatcattagttgttttcctcatattctaatttcaagtaatraagaatagtttaagaagtttataaatcctaagcgctaatataatcttttaatgttagtgagcaaatgtcatataggcttcctgttagaggtccttggaag

SEQ ID NO: 471896 - DNA, 201 bp, Homo sapiens
agctgctaacgatacctaatcctcgtgctatttttagcgcagaagcaactgctgtgcaaagccttgtttcaagctgtgatgcacagaagggccattttgcyggtggaggccttaacaagttagagaagaatttttgttttgttgttggtgtttctttccttcacgctctacttattctcccctccctttactctccttgcc

SEQ ID NO: 471897 - DNA, 201 bp, Homo sapiens
agttctcaatatgtttgttttctctgttcttgtgtgcacttctctttaatgtttttgggagggctctagtgtgacttgcttaaatttgaatcagaaaaacttttttttttaatctttatagtatttatatgtccctcttctctattcttttaacccttttatagcggttacgactttggctacttaatcaaaatcctaacc

SEQ ID NO: 471898 - DNA, 201 bp, Homo sapiens
cccatctaagtaaactaaactgacgttccagggactaaaagtaaccttcagaatgatattggcttttgttaggttttgaaaaagcattgtgttacatagaygttaatactctcatacttggtccacttcacacatgtatcttaaatctgagtctcctgcatgtttagtttctgtctctgatctgtgggatgtttatagtga

SEQ ID NO: 471899 - DNA, 201 bp, Homo sapiens
tctattaaatgatactttttccgcattcaacaaatacattagtaattcacattctctgtttcttccccccaatctttataagattcacctttacatactamagtttatttttattttggtcagcgtctaagtttataatttgtgaatttaggccttgtaagatttttcttcttgacaagcaattttttattttttctaggg

SEQ ID NO: 471900 - DNA, 201 bp, Homo sapiens
gtaatgcttatttttttgtgtatatctttgcaatctattttatatatattgacaaaagagactgtgaaatacttagccatgcagaatatgtgaccagaccrgagcatgtgtaggaagactttacagtaatcattaactctaccccgaaatgatggactacaagttataatgtgtgttacctacacttcaatcagtaatatt

SEQ ID NO: 471901 - DNA, 201 bp, Homo sapiens
gttcaaggctatagtgatctagattgcaccactgcactccagcctgggcaacagagtgatactttgtctctaaaaatacctgtatctatacacacacgcasagtctacagaaccttgtaaagtaaacttgtccaacccttggcccaggatggctttgaatgcagcccaacagaaattcgtaaactttcttaaaacattatg

SEQ ID NO: 471902 - DNA, 201 bp, Homo sapiens
tgtatgtgtaaaaaagctattttaaaataactgaaattaggaccaggaaatctgtactgtagtcctttttttcctatagactagctgtgtgaccttaagtyactttctaaactttgattttttttttttatgagtcaagaactttgaataaataacttcttaggttcctgctggatcaattattctgtgattcagatttga

SEQ ID NO: 471903 - DNA, 201 bp, Homo sapiens
ttatttctcaggtgagaaaacaggctaataacttccatgattaaacacattactagtgggagaactccagagttcttttctgactcccattggtgctcctyctacgaggcaaggaatctttatattaggtttattctagcatgaccccttttaaggtttaaactggtgataaatatattatttgctcatgtcattcttcag

SEQ ID NO: 471904 - DNA, 201 bp, Homo sapiens
tctttaatcttaggaattgattttcctcaagtatggtgacatgctaggtgaatttggtgtagttatcctggaaatatataaaacgtaacatttcaaaagcrtggttttcttttttactatgggaccaaaaaaaatactttgatgttaaagatgttatatttaaaatatgactgcagctttttttgtatttggaagactggg

SEQ ID NO: 471905 - DNA, 201 bp, Homo sapiens
ttaggagtattaacataggtggattatagcagaccactctaaggagttgtgtgcatatactcgtcttaactaagaaaaccatagtgaagcatttagcataytcttaatgattattcataatggctttgttttgtaaaaattaagtgaaaactacaaatggatggtgggaagtttaagaaaatatgaaaaaaatggtgttat

SEQ ID NO: 471906 - DNA, 201 bp, Homo sapiens
aaccaagtgttttaatcctttctctcccaacacctagcataacacatatagtattcaataaagtggctgttgaattgcactgaatttagagaaatattgawttctttactatttcatagtgacttgataggtagtttttattcttagctagccctagtttgaattctaatactaaaccgatgtatctttgtctcagtattt

SEQ ID NO: 471907 - DNA, 201 bp, Homo sapiens
aaacgcactggaattcatgggaaccatgggccgtttgaataagagttaggaaggatttgggctcgtgtcaggtggtcttaggggaaggtaagggaagcagrgctttactgtggattggatgtgttcgggaagctggggtaattctgtgattgggtatcttactaagtcttaaatgagagactagaatgaggttaaagctgc

SEQ ID NO: 471908 - DNA, 201 bp, Homo sapiens
ggctaatagagttaatagaaaaaagattaaaattgcacctttggactctctgaatgattttttattcgaaacacttttctgaaataatgacctttgtattwaaattgcatttttcttgcatatatataaagcattgaaacaggtggactcaagccattcctctgtctcttttctggcactgtagttatagatgtaagcaga

SEQ ID NO: 471909 - DNA, 201 bp, Homo sapiens
ttacagtaatcattaactctaccccgaaatgatggactacaagttataatgtgtgttacctacacttcaatcagtaatattagcaaatctccaaatgttartcacattggtttgtctcccttgtacattctttattcatgatattacagtgctgtaactgggtggtcctttttaaacaaaacattatttgcaaaacagagg

SEQ ID NO: 471910 - DNA, 201 bp, Homo sapiens
gcacttcgggaggccagttggaagccagggtgggcagattgtttgagctcagtttaagaccagttcgggcaacatggcaaaaccctgtctacaaaaatagraaaattagccaggcatggtggctcatatctgtagtcccagctacttgggaggctacaaaaggaggattgcttgagtccgggaggtcaaggctacagtgag

SEQ ID NO: 471911 - DNA, 201 bp, Homo sapiens
tctttgcaatctattttatatatattgacaaaagagactgtgaaatacttagccatgcagaatatgtgaccagaccagagcatgtgtaggaagactttacrgtaatcattaactctaccccgaaatgatggactacaagttataatgtgtgttacctacacttcaatcagtaatattagcaaatctccaaatgttagtcac

SEQ ID NO: 471912 - DNA, 201 bp, Homo sapiens
tctcaggtgagaaaacaggctaataacttccatgattaaacacattactagtgggagaactccagagttcttttctgactcccattggtgctccttctacraggcaaggaatctttatattaggtttattctagcatgaccccttttaaggtttaaactggtgataaatatattatttgctcatgtcattcttcagtgctt

SEQ ID NO: 471913 - DNA, 201 bp, Homo sapiens
aagaaaatatgaaaaaaatggtgttatactagcttttcagttttataattattactggattgatagactatgagtgtacttgataaatattaccctatatrtggtctgcttccttcccatatctaggagagtatttacctgtcatatgccctaaaacatgatgaaaatacattttcccaattaggatcttgttttctatta

SEQ ID NO: 471914 - DNA, 201 bp, Homo sapiens
accaaattattgctcatcatgtggttgttactgggaagtttctaagtacagatattctgaatgtgtcctgagtaagctgctgtgttaaaattcaggttaaygacaaaggtgctttttgacctatagtcagccatgctgttctattcagttctagttctgttctcctaagcagctgctaacgatacctaatcctcgtgctat

SEQ ID NO: 471915 - DNA, 201 bp, Homo sapiens
acgactacattgaaaatggcatttgtttttccatctcatacttgctccacacttacttgggtcactatgttagcaatttcaggtttaattctggaaagagytgactgccatatagagttgtctcctaactcttaggaggctaatgttggtctgcttaaaggttaatttaaaatatgggatccatttttgcctgtgagaagc

SEQ ID NO: 471916 - DNA, 201 bp, Homo sapiens
aggatgcctgggtgcaggtggactgtgagttgagtgcttgtaacaggatgcttgagtgctagtgagctgtttgtggttgaccctatttctcagaacgttcrctccccactgctgttgtttctgtttctgctagtgacgcccatttttcaatgtttttttcttttcttttttttttttttttttgagtcaaagtcttgcatt

SEQ ID NO: 471917 - DNA, 201 bp, Homo sapiens
catgacaaagttgttgtgtttttagggcctcaggggctggtcatttccccttgcatcctccgttgctccctccccctttcatcctgttgctccctccccckttcatcctctgttgctccctcctccccttcatcctctgttgctccctcctcgcagtgagggctggggtgggaggccctcctggggcctgccccactgaga

SEQ ID NO: 471918 - DNA, 201 bp, Homo sapiens
atgaatatggtatatctttccatttatttagatctctgttttctttcatcagcattttgtaattttcagcatacaaattctgtatgttttgttagactaayacctaagtggccttcataaggtaataagaaaaatggaattaatagtcagcattttaaacctgagacatatttgtataaaaatttatagttaggaaattag

SEQ ID NO: 471919 - DNA, 201 bp, Homo sapiens
gcaggagatgcagcagcagatgagcctcggggagctgtgccatcccgtgcccctctcctttgagcccgtcaagagcttctttaagggcctcgtggaagccrtggagagtacattacagacgccattggacattcgccttaaggaaagtaagtcgccgagtgaccaactttgtgtccttaactcccctagtgtcctttagcc

SEQ ID NO: 471920 - DNA, 201 bp, Homo sapiens
gcctgggccgtcaaggctgcggtgagctatgagctatgattgtgctgctactctccagcctgggcaacagagtgagaccctgtctcaaaaaaaaaaaaaaattactaaagagtctgcagatcttttttatttttattttttgatgtggttttatttattcgtatttgctgaattaaaaattaaaattgtgaccaggcgcga

SEQ ID NO: 471921 - DNA, 201 bp, Homo sapiens
gccaagatcatgcctctgtactccagcctggatgacagagcgagactccatcttaaaaaaaaaaatctacctacacctttatggtcacctccctacccacygtatccccccgaccaatccctaacccctggcaattattaatttgtttgataattgttgcatttgaaaatgtcataaaaatggaaaatgatcttttgaggt

SEQ ID NO: 471922 - DNA, 201 bp, Homo sapiens
cctccctttccttccctccctctctccctttccttcctccctccctcccaccgtttccttcctttcctcccttccttcacctttctcactgctcttcctcygctttatttttaactcttctcttttccccttccatctttttcttttcttttgtggtagagacggggtcttgctatgttgcccagactggtctcaaactcc

SEQ ID NO: 471923 - DNA, 201 bp, Homo sapiens
gatttattccatcatacatatgttttgagaacctgtgtgtcaggtctggtgctagctgctggagtttggggttaccaggtggtgccatgtgtcctctatcracccctcatcctaccctactcatctgccctctgagccccctctcgcctccccggagctgctccctgcccaccctggacttcctgctagtgcttggtctcc

SEQ ID NO: 471924 - DNA, 201 bp, Homo sapiens
tacagcaagctccacctcccaccattctcctgcctcagcctcccgagtagctgggactacaggcgccccccaccacgcccagctaattttttgtattttttagtagagatggggtttcaccatgttagccaggatggtctccatctcctgacctcgtgatccgcccccctcggcccctcaaagtgctgggattacaggcgt

SEQ ID NO: 471925 - DNA, 201 bp, Homo sapiens
ttcttttcttaccacaaggtcgggaaccttgtaagggaactgtgtagacaaggaccaagctagtccagtctttccaaggatttttttttttttttttttttgagacagggtctcactctgttgcccaggctggagtgtggtggtgcaattttggctcactgcagcctccacctcccaggttcaagtgattctcccacttca

SEQ ID NO: 471926 - DNA, 201 bp, Homo sapiens
aacaatccaaatgtccatggaaaactgtttggccttgtttatgaaagctgaatatccacataccctgtgatccagacttaaaaaacaacaacaacaacaamaaaaaaaacttcatgtgtacatacatggtgtaatgcaaagagaaatgttaatgagagtttaaatcactacaaactttggggaggatagttttgcaatatg

SEQ ID NO: 471927 - DNA, 201 bp, Homo sapiens
atctctttaattccactgccatgctgaaagaaagcaagtagggtaagatctgttccacaaataggtactttcttcactctcctttcataatgatgtttgartggattctctgtggattttgaatgggaacttgaggctgatgttattctaagtaaccattttgacatgacaaagttgttgtgtttttagggcctcaggggc

SEQ ID NO: 471928 - DNA, 201 bp, Homo sapiens
cagagtcaagtaaaacctggctgaaggggaaattcactgaactcagattactacttgacgaagaggaagcgctggccaagaaattcattgataaaaacackcagcttaccctccaggtgtacagggaacaagctgactcttgcagagagcaacttgacatcatgaatgatctctccaacagggtctggagtatcagccagg

SEQ ID NO: 471929 - DNA, 201 bp, Homo sapiens
tctaatgatcaaaaactattttctgggctgggcatggtgtctcatgcctgtaatctcagcattttgggaggctgaggcaggtggatcacctgaggtcagaagttcaagaccagcctgaccaacatggtgaaactccgtctctactaaaaatacaaaattacctatgtgtggtggtgcgtgcttgtaatcccagctactcag

SEQ ID NO: 471930 - DNA, 201 bp, Homo sapiens
gaacccgggaggcgaaggttgcagtgagccgaggtcgcactactgcactccagcctggcaacagagcaagactccgtcttaaaaaaaaaaaaaaaaaaaaaagtgcacaaatcaaaaatgtgcagatcaatcagctcaatgattttttaaaaaggaaacatattttgtaaccaccttcagatcaagaaatggaaatttcca

SEQ ID NO: 471931 - DNA, 201 bp, Homo sapiens
taacagaggtacaaactctccctcttaataaacagccctgtgtagctcagaaagccacacagacatctcaggtttacttaatctgcagtccacagaaaggrcctgtgaactttgagctgaggacggcctgactgccctgggagcagcctcagctgtcactacctacctcctctcccctccccggccacacagacactccca

SEQ ID NO: 471932 - DNA, 201 bp, Homo sapiens
gttctttttcacctgttttttttttttctggagaactttccctgccaggacatataggtctactgcattgttttttgttgttgttgtttgtttttggagayggagtctcgttctgttgcccaggctggagtgcagtggcatgatctcggctcactgcaacctccgcctcctgggttcaagcaattctttgccccagcctcc

SEQ ID NO: 471933 - DNA, 201 bp, Homo sapiens
gcggcccacaggctgcaggttggataagcttggcctgagggatggcctggggtaggtttcagcttaatctaagccatggttctctttctcttgaccctttscccaactaactttttaactttttatagatttagaggaagttgcaaaaatagtagagttttgtgtaccttgacctagtttgccccaagggttacttgttac

SEQ ID NO: 471934 - DNA, 201 bp, Homo sapiens
ccccacgaggcagaggttgcagtgagccaagattgtgccactgcactccagcctgggcaacagagaaagactccacctcagaaagaaaaattagccaagcrtggtggcatgtacctgtagtcccagctactcaggaggctgaggcaggagaatcgcttgaacctaggaggcagaggttgcagtgagccgagatcatgccac

SEQ ID NO: 471935 - DNA, 201 bp, Homo sapiens
aaaactgttgttttatttgttttgctggtgattttcttttcacctgtgaccctggatgaatgactagattcctcttcttttccctgggcccgggggtggaktttttctggtgctagttgatggatggagcagctctttgtggatctgacttgatgcaggtcactcctttccactctcagctggaatgtggccaggtactct

SEQ ID NO: 471936 - DNA, 201 bp, Homo sapiens
actccgacctcaagtgaactgcccacctcagtgtcccaaagtgctgggcccccttttattgtattttattttattcttgttaacattttttaatagaggcrgggtctcactatgttgcccaggctggtttcaaactcctggactcaagtgatccacctacctcagcctcccaaagtgctgggattacagacctgagccacc

SEQ ID NO: 471937 - DNA, 201 bp, Homo sapiens
ccaggtcacttagcttcagctcctgccaggtcactcacactgtgtttcctctttggttttggcatcagtgaatttactttgtttgtttgtttttttgtttktttgtttgttttttgagacagagtctcgatctgttgccaaggctagagcacagtggcgtgatctcagctcactgcaacctccgcctcctgggctcaagca

SEQ ID NO: 471938 - DNA, 201 bp, Homo sapiens
tttgaaggtttcctctcctaggctagtttcaaacaggccctaaacaagtctgctgctgccctctcatcagacctccgcaccctcaccccaccatcacttamactactttaatccagttccttcaaagtgatacccccacaggtaagccctcagcatcctgaatacatcatccgcagcctgggaaccttctccctcgtacag

SEQ ID NO: 471939 - DNA, 201 bp, Homo sapiens
aaaaaaaaaaattactaaagagtctgcagatcttttttatttttattttttgatgtggttttatttattcgtatttgctgaattaaaaattaaaattgtgrccaggcgcgatggctcatgcctgtaatcccagcactttgggaggacaaggtgggcggatcacctgaggtcgggagtttgagaccagcctggccaaatggt

SEQ ID NO: 471940 - DNA, 201 bp, Homo sapiens
tatttggtttaataaaatgtgaataatgtcccttttaaccatggtcttcactgggagttcatgttgcttcaagtccctagcacccagtgatacccccacakgtaagccctcagcatcctgaatacatcatccgcagcctgggaaccttctccctcgtacagcacaggaacctgacacatagtaggcacacagtaaacattt

SEQ ID NO: 471941 - DNA, 201 bp, Homo sapiens
ctcactcaaacacacctgacagcatcagcaagggaactgagaattcagagaatggcactttatttttaagacttgatttttttgccatgattatctaccarttcttccatgatggtgtcatcctcttcaacagtgaccaggaccttcttgcccactagattaaagatgtcttcaggaggatagcctttgggctcacccacc

SEQ ID NO: 471942 - DNA, 201 bp, Homo sapiens
gaagcctgaagaagctgacacgggtgggagcacattcactgatcatttcatcagcctggctcagggagggctggtcctgaccatccctctcaggccagccyatcctttttccacacacggcagcagaaccgagtagagtccggcaggacacaccttctcattgcaggccatctcacagggcagcagctgcttggttgggga

SEQ ID NO: 471943 - DNA, 201 bp, Homo sapiens
gactccctggaatgtatgtttcatgagggcagcacctggaacagggcccagcacataataggtgctcagttaatactccataagtagatgttctttcccaraccccaagctgtttgccttaaagtcccacttgaaaggctggaaaagcaagtcacaggcaagacttgtcctagataaagtaaagtgtgaggaaggggtgca

SEQ ID NO: 471944 - DNA, 201 bp, Homo sapiens
atgtcaagtgataatcatgcatcctgttatgttttactgtctgctcagagagccaaattaagtgctcagctgttataaatcttactctggtttctggtctrattctctcctgtttcctctataaagaaactatttctttttactttattttaatttcctggtatagatgcatctttgatttggggaagcaggtaggcccca

SEQ ID NO: 471945 - DNA, 201 bp, Homo sapiens
aggctggaaaagcaagtcacaggcaagacttgtcctagataaagtaaagtgtgaggaaggggtgcaaatcaagattagaggcatacctgatgtggacctcygaggatcagagatgtcctagtcccagctcatccaccaacttgccatatgactttgggcaagttacctcaccttcagatgcctccattggaaaagaataca

SEQ ID NO: 471946 - DNA, 201 bp, Homo sapiens
gggcgtggtggtgcatgcctgtaatcccagctactagggaggctgaggcaagagagttgcttgaacccaggaggcggagattgcagtgagctgagattgcmccactgcactccagcctggggacagagcaagactcttgtctcaaaaaaaacaaaaaaaacatatatactgctgtatcatgccaggatttatcagcattcc

SEQ ID NO: 471947 - DNA, 201 bp, Homo sapiens
cccgagtagctgggactacaggcgccccccaccacgcccagctaattttttgtattttttagtagagatggggtttcaccatgttagccaggatggtctcsatctcctgacctcgtgatccgcccccctcggcccctcaaagtgctgggattacaggcgtgagccaccgcacccggccgatggtgttcctgtctttaggga

SEQ ID NO: 471948 - DNA, 201 bp, Homo sapiens
cccctgcgggtggaataaggagcctcagttgctggctccatgcctttctctgtgacccgcaggagctgtagggactgagccaaggcttgggatcaaggcaycaatggggggacatgaaccagcctttgccagactgggaacaaaaagatggggaccctgccaggccatgctgctgacaaggccactggtgtccattgcccc

SEQ ID NO: 471949 - DNA, 201 bp, Homo sapiens
gggaacaaaaagatggggaccctgccaggccatgctgctgacaaggccactggtgtccattgcccctgctgggcatggccactccctgcctcttcctgcctgccattgccaccatagcagagtctaaagagtccccatgctaacgtggtctgggcaaggttggacagcatgccttctttccctggtggtgcatcccatgag

SEQ ID NO: 471950 - DNA, 201 bp, Homo sapiens
tttccatactggttgccactgtgctgagagttagaacaaggtatagcgtcgtgaagcttcttttgtattttctactttacaaagtggatctataaaaactrcttggagcataacttggttgggaggagatatttgctctcttggtttctctgcaaaggtcctctgtgtacttacgttgcttcaacatgtgttcataaatca

SEQ ID NO: 471951 - DNA, 201 bp, Homo sapiens
acaggtaagccctcagcatcctgaatacatcatccgcagcctgggaaccttctccctcgtacagcacaggaacctgacacatagtaggcacacagtaaacrtttgtgaatgaatgggagtcatccagtcctgactcttctgtctcttgaggtcccttgaatcttccgcttcctccccaccgatttcagcgtgtccacatca

SEQ ID NO: 471952 - DNA, 201 bp, Homo sapiens
cccagcactttggtaggctgaggcaggcagatcatttgaggtcaggagttcgagaccagcctggccatcatgttgaaaccccatctctactaaaaaaaaaatacaaaaaaatgccgggaatggtggcgcctataatccaagctactcagaaggctgaggtgggaggatcgcttgaacccaggaggtggaggttgcagtgag

SEQ ID NO: 471953 - DNA, 201 bp, Homo sapiens
ggctacatctgattggccaaaacttggtgattggcacaagtgcaggctacggtctgtttacacctccacttgttattgttcatgacgtacagaaaaatatktaggccgaacttaaaagatgtaaggaggagctttaggcaaaacttgatttaaacagcctgcaggtgggcttcccacagatctctacaggcccctgtgatg

SEQ ID NO: 471954 - DNA, 201 bp, Homo sapiens
cacatacccttacagactgtatttcagtctcttaaaagtcttccaatctaatgatcaaaaactattttctgggctgggcatggtgtctcatgcctgtaatstcagcattttgggaggctgaggcaggtggatcacctgaggtcagaagttcaagaccagcctgaccaacatggtgaaactccgtctctactaaaaatacaa

SEQ ID NO: 471955 - DNA, 201 bp, Homo sapiens
tcccagcactttggtaggctgaggcaggcagatcatttgaggtcaggagttcgagaccagcctggccatcatgttgaaaccccatctctactaaaaaaaaaatacaaaaaaatgccgggaatggtggcgcctataatccaagctactcagaaggctgaggtgggaggatcgcttgaacccaggaggtggaggttgcagtga

SEQ ID NO: 471956 - DNA, 201 bp, Homo sapiens
ataaatataactcaaagaaagttaaacatcatttcttatttgacaatatttcccatatgactttgacatcccaaataagcctaatgtgtctcttttggacwtccaggggtcctggttatgcccaagttagcttgggtcaaaaagacttaatttaattttgggaagtatctcaaatattaaaggtttaaaacacttgatata

SEQ ID NO: 471957 - DNA, 201 bp, Homo sapiens
tcagcctcccaagtagttaggactacaggtgcatgccaccatgcccagctaattttattttattttattttattttattttattttattttattttatttwattttttgtggtagaggcagagtctcactatgttgcccaggctggtctcgaactccttgggctcaagtgatcctcctacctcagcctcccaaagtgttgg

SEQ ID NO: 471958 - DNA, 201 bp, Homo sapiens
tccattcgcctcagcctcccaaagtgctggaattacaggcgtgagccaccgtgcccagctttagtgtttttttaattgtataaataatacatgaacaaatkgtcattttttaaaatttaaacaatggtatagtatggaactacataaggtacaaagtgagagcctctcttttcccttacccccaatcccatgcctcttgcc

SEQ ID NO: 471959 - DNA, 201 bp, Homo sapiens
aagttgcaaaaatagtagagttttgtgtaccttgacctagtttgccccaagggttacttgttacataactatagcacactatccaaaaaaaaaaaaaaaaaggatggtatgtgtgtatagttttatgtcaacttatcacatgtatagatttgcataaccaccactgcaatcaaaatgcaggctattccatcactgccaagt

SEQ ID NO: 471960 - DNA, 201 bp, Homo sapiens
tgtagagacggggtttcaccatgttgtccaggctggtctagaattcctgggctcaagtgatcctcttgcctcagccttccaaagtgctgggattataggcrtgaaacaccacgcctggcctggatttgacttttaaaagccttacagctaaaaagccaaaccaaggattcaccatcagactatgcctgtgatacccataca

SEQ ID NO: 471961 - DNA, 201 bp, Homo sapiens
gagaactcatctcctgtttgctgccaaaccacatgctgtccccctgagaacacggtatcacgggagcctgcccacccctcgtgactggctgggtgctgggktcattctgctatgtggactgtgcagatgtttgggctgaggaagggagctggcctatgtttaattttttttttttttttttttgagacggagtctcgctct

SEQ ID NO: 471962 - DNA, 201 bp, Homo sapiens
ggaggatgctccgaggcccgacgctgctcccggcgggctgtcatcctcctaggggtcggccggccggcctggagccgccccgcccacggccgaggtttcgstttcccttgggagccccgccctgtgtcccggggagccggaggaggtggagatgaatggcgggcgcggcgaccgggagccggacccctgggaggtcggagc

SEQ ID NO: 471963 - DNA, 201 bp, Homo sapiens
ggccctcacccagccaccagctctcttcaaagcccagcccagttcagctgggatcttcactttgaaccaatgggacccaaaccagatggcgtacttccttrtttcatgaccatgatattctcttgctctctttctctctctctctctccccttccctctctctctctacccctttctgaccatattgcataatcagcctca

SEQ ID NO: 471964 - DNA, 201 bp, Homo sapiens
tccttagaccctgctcagctagactctgttaggccctcacccagccaccagctctcttcaaagcccagcccagttcagctgggatcttcactttgaaccartgggacccaaaccagatggcgtacttccttgtttcatgaccatgatattctcttgctctctttctctctctctctctccccttccctctctctctctacc

SEQ ID NO: 471965 - DNA, 201 bp, Homo sapiens
agcctgggcaacagagaaagactccacctcagaaagaaaaattagccaagcgtggtggcatgtacctgtagtcccagctactcaggaggctgaggcaggaraatcgcttgaacctaggaggcagaggttgcagtgagccgagatcatgccactgcactccagcctgggtgacagagcaagactctgtctaaaaaaaaaaaa

SEQ ID NO: 471966 - DNA, 201 bp, Homo sapiens
agctccgggcgctcatttctcaacaattccttacaggcataaactgccagctctcagacccttccagcaccaagccaggtaccttgttgaaaaccagcccytcaccagagcgatcgctattgctgaaatgtaagacccccgggagtggggatagggtggagacggtggagatggtgggatgttgggtggaggaggatcatg

SEQ ID NO: 471967 - DNA, 201 bp, Homo sapiens
ctctgctcctgcaggcatggcctgggctgaccataggtgccaggccaacgtggagcctgggcatgctggtgtgggtttgttcctgggtgcagcacaggagkctgggatgctgcctgcatctcccagagccaccctcacccccgtgtgcccacacaggcatacacggccaccgagcaggagatgcagcagcagatgagcctc

SEQ ID NO: 471968 - DNA, 201 bp, Homo sapiens
tggggataatagcactacctaccaagtgctgtgaggctcaaatgagccaaaggttataaacttgccttaaaactatagtcctatacaaaaattagctgggygtggtggtgcatgcctgtaatcccagctactagggaggctgaggcaagagagttgcttgaacccaggaggcggagattgcagtgagctgagattgcacca

SEQ ID NO: 471969 - DNA, 201 bp, Homo sapiens
gagacccagagtcacttgcccaaggtcgcacagctagtggtggagctggagtctgggcccaggctgtgagttccaggtctgtgctcatggccaccaggccmtactgctcagggtgaatgcagctggtctctggccagtgcctggtgctctggcccctctcgtggagctactgcccatgatgctttcctagtgcctggttac

SEQ ID NO: 471970 - DNA, 201 bp, Homo sapiens
tccacataccctgtgatccagacttaaaaaacaacaacaacaacaacaaaaaaaacttcatgtgtacatacatggtgtaatgcaaagagaaatgttaatgrgagtttaaatcactacaaactttggggaggatagttttgcaatatgtatcaaagaccttaaaaaaatacccattgacccagcaattcctgttttaggagt

SEQ ID NO: 471971 - DNA, 201 bp, Homo sapiens
cagtgccagcttcacagaagtaactagtgcacactactttactttacactcaaggtccctgatcagtcttccccaggcagtaccttgggagcaggcactcygttgccccctacactgctcagaatatctcatacatggcaggaattcaaccagtatagattgaattcagagactcagaggaggagcctttacaacaaagtg

SEQ ID NO: 471972 - DNA, 201 bp, Homo sapiens
aatccaaatgtccatggaaaactgtttggccttgtttatgaaagctgaatatccacataccctgtgatccagacttaaaaaacaacaacaacaacaacaamaaaaacttcatgtgtacatacatggtgtaatgcaaagagaaatgttaatgagagtttaaatcactacaaactttggggaggatagttttgcaatatgtat

SEQ ID NO: 471973 - DNA, 201 bp, Homo sapiens
atctgttctttgattcatttatgcattcattcattcattcacctctgctatcatgattcattcagaacatttatcaagcccctcttatatgccaggcatarcagggcacaaaacaaagctccttctcctcttttggtgctcacagtcttcgtaggggaagacagaccgtacacaaacatgtcaggtgacaggaactgctat

SEQ ID NO: 471974 - DNA, 201 bp, Homo sapiens; identical to SEQ ID NO: 283039

SEQ ID NO: 471975 - DNA, 201 bp, Homo sapiens; identical to SEQ ID NO: 283044

SEQ ID NO: 471976 - DNA, 201 bp, Homo sapiens
cagtattctatcattgcattgtagcaaggggagagttctaaattcttgttctttatcttgttccttgagggatggtactatcaagaaaagcagccaagggkcaaattgataaagaagggctttcttcctcctggacttttatttcctgcctgacttcaggtgaatcccagaccagctcctagtacatcccatcctgtatct

SEQ ID NO: 471977 - DNA, 201 bp, Homo sapiens
tatccaaggaaaaataatagaaaccccagatgtggaatggggtgggaaaattgggaacagcccaatgttgctgtcacaacaaatctaaattcatgtatagracagagataattcttgatttataaaggagaaaattgcctctaaaagagaggttcagggctagttcgtttaagaggtggtgtgggcattagaacccagacc

SEQ ID NO: 471978 - DNA, 201 bp, Homo sapiens
caagcagaacagccttctagcaccagtagcaccagcacctcccaaaatgccaggcaagagaaggtagagtttggctcggagaactgtatctcaaagatcamtgaagacagactcccccaactgctctcccaggagaaagctactctactatcccttcctccaccccacaaagtaagtctggatccaccacgcacattctgt

SEQ ID NO: 471979 - DNA, 201 bp, Homo sapiens
gcagttcacctccaccctccagcccccatccctccctggccaacctgtttctcctcagaggtaaccaccgttatcaacttccattaccaacctttttggtrcatagacttccatgatttttatgtacttacaaagagaaatatatttgacatgagggacatttaaggtggggtcagctagagaacaatggcatggtacacc

SEQ ID NO: 471980 - DNA, 201 bp, Homo sapiens
ggtggaaactagcactttcttacatggccgggggcattggcaattttccataccttatgaaaggcgattttgcaaacatatgtaggagacacaaaatgctyattccgttttacacaattaccccattcctgggaactttcggtacagaaatacctcaaggaaaaaaaaacagtttcatatataataatatttgtagcacta

SEQ ID NO: 471981 - DNA, 201 bp, Homo sapiens
gctattttcctacttcagcctcccgagtagctgggattacaggcaagaaccaacatgcccagctaatttttgtatttctagtagagatggggtttcaccawgttggccagactggtctcaaactcctggcctcaagtgatccatccaccttggcctcccaaagtaatgggattacaggcatgtgccaccgcacttggtgga

SEQ ID NO: 471982 - DNA, 201 bp, Homo sapiens
tacaaaaatgtatacaagttgcaggccgggcgcggtggctcacgcctgtaatcccagcactttgggaggccaaggcgggcagatcacaaggtcacgagatmgagaccatcctggctaacacagtgaaaccccgtctctattaaaaatacaaaaattagccaggcgtggtggcgggcgcctgtagtcccaggtactcgagag

SEQ ID NO: 471983 - DNA, 201 bp, Homo sapiens
tctccccattcagaccatctgaggtatccaagtccataagtattttcccactattatctctacactggggcaaaaccatcaagaaagactcttttcagagraagacattctgaaattcttacaaaaatgtatacaagttgcaggccgggcgcggtggctcacgcctgtaatcccagcactttgggaggccaaggcgggcag

SEQ ID NO: 471984 - DNA, 201 bp, Homo sapiens
aactgttttctaaagcagctgcaccattttacattctcaccagcaatggatgagagctctgatttctccacatccttgccaacctgtgttattgtctggcyttttgattagagctcattgtctttgaaggtaaaacaaaatgcgtaattgtctaatagtaatttatgtatcagttgttatcactgtgtggtcatgaaaaat

SEQ ID NO: 471985 - DNA, 201 bp, Homo sapiens
tttttcccacatacacattggttcatgttttcatagtctccaaatgaatcttttaatatctatacaatattttatctggttaatttctgtaatatcctacrtaacagtttttaacattttatatatttatttttggtataacatacagcagaaagaatctcagggcactttttttcatttttccttattgtataaaacttt

SEQ ID NO: 471986 - DNA, 201 bp, Homo sapiens
ctgaggcaggagaatcgcttgaacctgggaggcagaggttgcagtgagcccagatcgcgccattgcactccagccagggcgacaagagcgaaattccatcycaaaaaaaaaaaaaaatatatagtataaacattagtgtacaaatttttgtgtaaacaaaatttccatttcccttgggtatatatccaggattggaatttt

SEQ ID NO: 471987 - DNA, 201 bp, Homo sapiens
ggcatcatctggtatttgacttgatgcttcaggctctaggctgtagtgaaatgtcagaatgatgcttagtcctctttaacagcctttctgttcaattttcktttctactgaaaagacacttccagtgtgtattttaatattaacaccaaactaatgggaaatatttattttttattttgaaggctatgtctgtgaaatacc

SEQ ID NO: 471988 - DNA, 201 bp, Homo sapiens
tatttacttagatgatacaaacagttgatgggaaattcacttgacattcagcaataagcatgtcaaatccttaaatgtatagttttaactgtagctgtaataatgatcacttcccccccaaaaaacaagaaattactcaaggtgtgagattaattcttctccttttaaagttcactagtcatgcatgtttaggcccttgtt

SEQ ID NO: 471989 - DNA, 201 bp, Homo sapiens
tcactggccatcagaaaaatgcaaatcaaaaccacaatgagataccatctcacaccagttagaacggcgatcattaaaaagtcaggagacaacaggtgctrgagaggatgtggagaaataggaacacttttgggctgttggtgggactgtaaactagttcaaccattgtggaagtcagtgtggcgattcctcagggatcta

SEQ ID NO: 471990 - DNA, 201 bp, Homo sapiens
ggtggatcgcttgaggtcaggagttcaagaccagcctggccaacgtggcgaacccccatctctactaaaaatacaaaaattggccaggcgtgatgatgcayacctgtaatcccagctacttgagaggctgaggcaggagaatcgcttgaacctgggaggcagaggttgcagtgagcccagatcgcgccattgcactccagc

SEQ ID NO: 471991 - DNA, 201 bp, Homo sapiens
atttacttagatgatacaaacagttgatgggaaattcacttgacattcagcaataagcatgtcaaatccttaaatgtatagttttaactgtagctgtaataatgatcacttcccccccaaaaaacaagaaattactcaaggtgtgagattaattcttctccttttaaagttcactagtcatgcatgtttaggcccttgttt

SEQ ID NO: 471992 - DNA, 201 bp, Homo sapiens
acagtggctcacacctgtaatatcagcactttgggaggcccagatgggtggatcgcttgaggtcaggagttcaagaccagcctggccaacgtggcgaaccsccatctctactaaaaatacaaaaattggccaggcgtgatgatgcacacctgtaatcccagctacttgagaggctgaggcaggagaatcgcttgaacctgg

SEQ ID NO: 471993 - DNA, 201 bp, Homo sapiens
taaccaccgttatcaacttccattaccaacctttttggtgcatagacttccatgatttttatgtacttacaaagagaaatatatttgacatgagggacatwtaaggtggggtcagctagagaacaatggcatggtacacctggttaaggtttttaagaactaacatggccagataaggtggctcacacctgtaatcccagc

SEQ ID NO: 471994 - DNA, 201 bp, Homo sapiens
ctcttaatgttcggtccaggaataagcacacaatgcaattagggccaatgaaagggagaataagtcctaattctataatgaactcaggagtggattttctrtagtggttaaggaaataggaactggagtcaggctgcctaggataccaatgccagctacaccactcaccagctaactgatcatgataaagttagtgaactt

SEQ ID NO: 471995 - DNA, 201 bp, Homo sapiens
catgatcttggctcactgcgacctctgcctcccgggttcaagcgattcttctgcctcagcctcccgagtagctgggattacaagcacgtgccaccacaccyggctaatttttgtatttttagtagagacagagtttcaccatattggccaggctggtctcaaactcctgacctcatgatctgcctgccttggcctcccaga

SEQ ID NO: 471996 - DNA, 201 bp, Homo sapiens
ttgcactccagcctggacaacaagagcgaaactgtctcaaaaaaaaaaaaaaaaaaaaaagttcctctattgagaaaggcttcaacggtttttttcctcaytgtttttccttaattactctctcagtaaataaagtgccatgcctgttacttaggatgttacttagtaacatcctttgtgtgttgctttcccacaggtgaa

SEQ ID NO: 471997 - DNA, 201 bp, Homo sapiens
  misc_feature (1)...(201): n = A,T,C or G
gcttcagaagcttagggatgcttaaacattgcttgcacggcgcataagtgatggacttgcttgcacgttggccacttcactggttgctaatacctctgccnggtttccagagattgaagaaactgggtagaatgttctaaaggtttaatgaaagaataaattaagtatgggttataagaaactgtgctgtagatttcagtt

SEQ ID NO: 471998 - DNA, 201 bp, Homo sapiens
tgaactaggactcctatcgggtggtgtttgggagtgttcttttcctgtgttaacacaacctttacctacttgcttttggttttgcccagaaagaggcaggraagaaatcagtgaggtgcttcagaagcttagggatgcttaaacattgcttgcacggcgcataagtgatggacttgcttgcacgttggccacttcactggt

SEQ ID NO: 471999 - DNA, 201 bp, Homo sapiens
atgagatacatgaaataattgtgggaggaaagggcagccctactcatttcactatcactaagatatgcttttcaagtaaacatagtataaaaaaattaatrtttgtgtcttgcttgtcctatactaatcattctaatgataatacagaagaaaataaatgttaacctttacagccttatggattcagaaagcacattttaa

SEQ ID NO: 472000 - DNA, 201 bp, Homo sapiens
tttggcatataacttgtaaggagctcgaagactcaaggggagacattactataacatttctcacaagttagtaatgtgaaaaaggcttcttagcatttctmtattaaaaaaaaaaaaggaacacccaaaatagaaaatagacctagaattaatattgaacctgagtcttctagtggaaagccatattgatgcatgagatac

SEQ ID NO: 472001 - DNA, 201 bp, Homo sapiens
atcaaacagtgtatgacttttggcatataacttgtaaggagctcgaagactcaaggggagacattactataacatttctcacaagttagtaatgtgaaaarggcttcttagcatttctctattaaaaaaaaaaaaggaacacccaaaatagaaaatagacctagaattaatattgaacctgagtcttctagtggaaagcca

SEQ ID NO: 472002 - DNA, 201 bp, Homo sapiens
attgagttgccaactgatacattaaaaatggatatcattaaaaatggattttaataatcaaacagtgtatgacttttggcatataacttgtaaggagctcraagactcaaggggagacattactataacatttctcacaagttagtaatgtgaaaaaggcttcttagcatttctctattaaaaaaaaaaaaggaacaccca

SEQ ID NO: 472003 - DNA, 201 bp, Homo sapiens
ttcaacagtaagaactgactttgccagttaagctgtggtagatatgttcactaaattggatgcactaaatctatagccataatttgaggaaattgagttgmcaactgatacattaaaaatggatatcattaaaaatggattttaataatcaaacagtgtatgacttttggcatataacttgtaaggagctcgaagactcaa

SEQ ID NO: 472004 - DNA, 201 bp, Homo sapiens
aactttccagataaactgttttcttcatgaataagtaataaagtaatatctgctgagagaagaaagggatgaggtcgattacgagaagaccttcaagcatkgtacgtccttatgcgagtggcgcatggcttcaagaggagggttgatgggacccatccatgagtagagaagttaacaacaatgccagtctgcccaggatgt

SEQ ID NO: 472005 - DNA, 201 bp, Homo sapiens
tatctcttccacatactgattccatttcctttggatatattcccagtagtgagattgctggatcatatggtagttccattaattactgctaaaagctaaayatcagatttttatacatatagatggcatacattcatcagaaatatatcgtgcttcataaatacttgtacttttggctgcacattataatgtagtatggca

SEQ ID NO: 472006 - DNA, 201 bp, Homo sapiens; identical to SEQ ID NO: 221772

SEQ ID NO: 472007 - DNA, 201 bp, Homo sapiens
gtccttctgtgcttatttcacttaatgtaatgtcctacaggttcatccatgtcgccacagatgacaggatctcattcttttttatggccaaagagtactcygctgggtatatgtaccatatttttttaatccattcatccgctgatggaaagttaggttgcttccaaatcttggctgttgtgaatagtgctgcagtaaaca

SEQ ID NO: 472008 - DNA, 201 bp, Homo sapiens; identical to SEQ ID NO: 221775

SEQ ID NO: 472009 - DNA, 201 bp, Homo sapiens
ggaggccaagacgggcggatcacctgaggtcgggaattcgaccaacatggagaaaccccgtctctactgaaaatacaaaatagccgggcgtggtggcaggwgcctgtaatcccagctacttgggaggctgaggcaggagaatcgcttgaacccgggaggcagaggttgcagtgagtcgagatggtgccattgcactccagc

SEQ ID NO: 472010 - DNA, 201 bp, Homo sapiens
taaaagcatttccgttatcataagcttaagaaatgtttgtcttagttcatggaatgtaaataatttttttttttttttttttttttggagacggagtctcycactgtggcccaggctagaatgcagtggcacgatctcagctcactgcaagctccacctcccaggttcacgccattctcctgcctcagcctcccaagtagc

SEQ ID NO: 472011 - DNA, 201 bp, Homo sapiens
cacataaaaagttcttctactggccacgtgtggtggctcacgcctataatcctagcactttgggaggccaagacgggcggatcacctgaggtcgggaattygaccaacatggagaaaccccgtctctactgaaaatacaaaatagccgggcgtggtggcaggagcctgtaatcccagctacttgggaggctgaggcaggag

SEQ ID NO: 472012 - DNA, 201 bp, Homo sapiens; identical to SEQ ID NO: 221777

SEQ ID NO: 472013 - DNA, 201 bp, Homo sapiens; identical to SEQ ID NO: 221778

SEQ ID NO: 472014 - DNA, 201 bp, Homo sapiens
attcaagagagcctagtagctcgtttggacaggaaagctagattcagagatgacacaaaacagcccaaaaatgtggctgttgaatcaaaaacaaaaattcrgatgaaataaaacttttttgctaatgtgcttactctggtagacacataaaaagttcttctactggccacgtgtggtggctcacgcctataatcctagcac

SEQ ID NO: 472015 - DNA, 201 bp, Homo sapiens; identical to SEQ ID NO: 221784

SEQ ID NO: 472016 - DNA, 201 bp, Homo sapiens
tatagtaagtggcatgattaagactataattttacttgtactcagtgtaccttctaccactatataatgtttccaagcatatgaacttattactagtctgyatctatggttttcagtgatgttaaatgtgtttttaaaaattttattaatatgtaatacacaagagtgcaaaaatcttaagtgcacaacttaggaattttc

SEQ ID NO: 472017 - DNA, 201 bp, Homo sapiens
aaaaattctaaaccaaccttttctttattttcagacaatagccaaagtactcatgagtaaaataacgtatatgccaaggaagtagttatttacatagttayaatgctctttcaaacaactagattttttttttttttttttgcttagaatttaattaaaagaggaagaataattcttaagtattgcctgttctagttgttt

SEQ ID NO: 472018 - DNA, 201 bp, Homo sapiens
acctcagccttgcttaaattgcagacataagcagaacaagtagagtcattttgataaatgtttatgttagaagtaaaacttaacccccgccagtcgtaagytgccaactaacatatgactaagtgactaggggctttccaacaaggtacctaaaaaaaggcaattctgtaatttcaaatcaatcaaataatttctttattt

SEQ ID NO: 472019 - DNA, 201 bp, Homo sapiens
agtaatatttaatgaggggtgggtggaccaaagacacttccttcccttctgaagaggatttagagtggagtggtaagggggaggaattggactgcttccckttagaattctgcccctcctctcctttttaaggaaaatgtccctaaggagctcactataaccaggcggttctttaaactgacaactgcctgtgaagtgttg

SEQ ID NO: 472020 - DNA, 201 bp, Homo sapiens
gcttgaacccaggaggcggagcttgcagtgagccgagattgcaccactgcactccagcctgggcgacagagcaagactccgtctcaaaaaaaaaaaaaaaagtgtaagtggattaaaagagaaacttggtctagttcataatatttttaatagggctttccctggctgctggaaaacttaggccagtaagcatctctttgt

SEQ ID NO: 472021 - DNA, 201 bp, Homo sapiens
tctgattcaagtggaacaatggaggactgtgatagttaaatgacttcctgtgtacttataaggtagtcacagcaagggagtttccaaacgtggaactgtcmgctaaatgtctactggtcacctcttgtatccttccactaacctaccttgtactctcccttggccccttgaaaacgtgggattggataggttacttagaat

SEQ ID NO: 472022 - DNA, 201 bp, Homo sapiens
cgaggggggcggatcacgaggtcaggagatccagactatcctggctaacaaggtgaaaccccgtctctactaaaaatacaaaaaaaaacattagccaggcrtggtggcgggcgcttgtagtcccagctactcgggaggctgaggtaggagaatggcttgaacccaggaggcggagcttgcagtgagccgagattgcaccac

SEQ ID NO: 472023 - DNA, 201 bp, Homo sapiens
taacatatgactaagtgactaggggctttccaacaaggtacctaaaaaaaggcaattctgtaatttcaaatcaatcaaataatttctttattttgcttctrcgtttcccagtaaatacttgtctctgactttttgtcattgggacactaaaacttttttcgtctggtgttccccaattcatgaattgcttcttactcaaat

SEQ ID NO: 472024 - DNA, 201 bp, Homo sapiens
tcaggaaaggggtaccataggcactaaatggcctgaggccagagatgctgaatgtcatgaagtatgcatccacaggactttgatgctggttaaaaacgtargaaagaaaaacacctttgtataatgatgaacatagaacctaactgtgtttaggttgacatcatcaggtttaggttgatatctgtttcagatatcatcggc

SEQ ID NO: 472025 - DNA, 201 bp, Homo sapiens
ataacccagggttgtagctccatctgctggagagaagcaaacccactcttacatagtctataaatgaaagtgatctctccacaatcacagtgagccagccygtgtttgctaagcacttgctgtgcactgtgtaacactttgtcaggcttagggtaacagaggaaaaacatagacatgttccctgttcccaccatgcttagc

SEQ ID NO: 472026 - DNA, 201 bp, Homo sapiens
gaggccaagatgggcagatcatttgaggtcaggagttcgacaccagcctggcaacatggtgaaaccctgtctctaccaaaaatacaaaaattagccgagcktggtggcacgtgcctgttgacccagctacttgggaggctgaggcaggaaaatgacttgaacgtaggaagtggaggctgcaacgagctgagatcactccat

SEQ ID NO: 472027 - DNA, 201 bp, Homo sapiens
agagtacgtgaaggtgaagcctgtgaggttcccccaggagtgctgggcagaaccctgagttttagaactccctctgcctttagcttgtcttggatgtgctyttccactctttcaagcactaaacccttccctgtaaatagtcacctgccagggtgccctcaggttatagcttgtcaccagctctaagagtggctagtaccc

SEQ ID NO: 472028 - DNA, 201 bp, Homo sapiens
gaccagaaataaccaaaaggcattcaagagagcctagtagctcgtttggacaggaaagctagattcagagatgacacaaaacagcccaaaaatgtggctgytgaatcaaaaacaaaaattcagatgaaataaaacttttttgctaatgtgcttactctggtagacacataaaaagttcttctactggccacgtgtggtggc

SEQ ID NO: 472029 - DNA, 201 bp, Homo sapiens
tggcaacagctcgagcaaaggtttgcaggtcagtgttacttctctcttcagagtcctccattgcctttccatctcacctagaataacatccagtttttatkctgggctgcaagtgctttctggatctaccccctgccctattcctttctgtgctgtgttttccgctttagcctggaagatttgttaaacaggggctttgtt

SEQ ID NO: 472030 - DNA, 201 bp, Homo sapiens
tttaagatcatatatcatatatgtgtacatgtttttgttttgtttttttgagactaagtctcgctctatcgcccaggctggagcgcagttgcgccatctcrgctcattgcaacctccacctcccgggttcaagtgattctcctgcttcagcctcctgagtagctgggattacaggcacctgccaccacacccggctaattt

SEQ ID NO: 472031 - DNA, 201 bp, Homo sapiens
agttaatgaaagaaaagaaacctttttaaattcagcaaaatatacatatatgtgtgtgtgtgtgtgtgtgtgtgtgtgtgtgtgtgtgtgtgtgtgtgtgtattttagttcctctgcttcatcctggtcagtattttcaaatgctgtttaatgcagtaaaatctacacaaaacatgttctgtgtcaaaaagaaaataacgg

SEQ ID NO: 472032 - DNA, 201 bp, Homo sapiens
aagttaatgaaagaaaagaaacctttttaaattcagcaaaatatacatatatgtgtgtgtgtgtgtgtgtgtgtgtgtgtgtgtgtgtgtgtgtgtgtgtgtattttagttcctctgcttcatcctggtcagtattttcaaatgctgtttaatgcagtaaaatctacacaaaacatgttctgtgtcaaaaagaaaataacg

SEQ ID NO: 472033 - DNA, 201 bp, Homo sapiens
tgaaaccccatctctactacaaaaaaattagccgggcgtggtggcgggcacctgcagtcccagctactcgggaggctgaggcaggagaatggtgggaaccygggaggcagagcttgcagtgagccaagatcacgccactgcactccagcctgggcaacagagcaagactctgtctcaaaaaaaataaataaataaattatg

SEQ ID NO: 472034 - DNA, 201 bp, Homo sapiens
tccatctcaaaaaaaagaatgaggtagacagacttggactcccgtttaactgacaggtttattattctgtacctttacgtgataacacactcctcccccccgtctgttcctagttttgaatgtaaatacagttgtttaaatcgtctgttcctagttttgaatgtaaatacaattgtttaaattcctaagtgacatcttgga

SEQ ID NO: 472035 - DNA, 201 bp, Homo sapiens
agcgagctttatgaacatttaaaaatgttgctgctgctttgttgcttaaaaagaaagttgccaagagagacttcttagggaaaatatttgggtttttttttccaaaaattgctgaaatattgttttgccatttttaaaaagtctcaggttattaccactctgccattaaatatttgtatgcctgcatttttaaaaattctg

SEQ ID NO: 472036 - DNA, 201 bp, Homo sapiens
acaaaaattagtcaggcgtggtggtgggtgcctgtaatcccagctacttgggaggctgaggcagagaattgcttgaacccaggagggggaggtttcggtgactgagaccgcaccactacactccagcctgggtgacagagcaagactccatctcaaaaaaaagaatgaggtagacagacttggactcccgtttaactgaca

SEQ ID NO: 472037 - DNA, 201 bp, Homo sapiens
tgagtccaggagttagaggctgcagggagctgtgatcaccactgcactccagcctgagtgacagtcgaggctctgtttccaaaaaaaaaaaaaaaaaaaaagtgattgactgtacttaagtaaattatatttacattagatttcctgtttacttagtactgaataaaatgtaatctacagtctgtgttacacagatggatg

SEQ ID NO: 472038 - DNA, 201 bp, Homo sapiens
ttgaacaatgagtccatgtgtggcctctagtttacataaataaagaatggctgtggctgggcgcggtgactcacgcctgtaaccccagcactttgggaggyccaggcgggtggatcacctgaggtcaggagttcgagaccagcctagccaacatggtgaaaccccatctctaaaaatacaaaaattagctgggtgtggtgg

SEQ ID NO: 472039 - DNA, 201 bp, Homo sapiens
cttgccaaacgggagagagaagcaaaggataaggacaagcagaaaaagaaaaagccagtctgtttgtaaacttttctatccctgtgtcatcattttcactrctttctcctttggttagtcctttggaatatgtttttgttctgtttctgtcttttgctttcttccccccctgcaacttttgggcatgtatttgtagtcatc

SEQ ID NO: 472040 - DNA, 201 bp, Homo sapiens
gcagggctctctggtgtgccagctgccagctctcatgcagcactcagttttcagtgactctcatgttaattcagcatgccagctgttcaatttaatgtctrtaccaatggggaatgggagagaggtagataatgaggaaagagaagaaataatgaggtaatatgtcatctcctaaaagctcattttgtaacagaaattgtc

SEQ ID NO: 472041 - DNA, 201 bp, Homo sapiens
ctgctttgcctgttctacctgcaacactaaattaacactcaagtaagtgtacggttttgtccagtgtgaatcctaagactgaaaactttggggagacactkaaaaaaaatcctagaatttagaaaaagagaattatttgatttcttatttcctctttctgttcaggccttctgaaagtaaaggttcttcctttaactgttc

SEQ ID NO: 472042 - DNA, 201 bp, Homo sapiens
tcttttccctcccaactcccagtaggatattcctgattgaaagaaaggccaagaggagagaatgagatctagcaaaattgtaaacaaaggaacagagccasaaacctgttttacattcatataaaatgttacattgattgattaaacagtttaaaaatatcttcatagtatatggtacctttgatcataaaaccaggtcat

SEQ ID NO: 472043 - DNA, 201 bp, Homo sapiens
gcgtgaactgctttgcctgttctacctgcaacactaaattaacactcaagtaagtgtacggttttgtccagtgtgaatcctaagactgaaaactttggggrgacacttaaaaaaaatcctagaatttagaaaaagagaattatttgatttcttatttcctctttctgttcaggccttctgaaagtaaaggttcttccttta

SEQ ID NO: 472044 - DNA, 201 bp, Homo sapiens
gaaggtgatctatagagtgtgatagaagacaatctagctttcttgctgcatcttttcttcgttcagaacgtcagcttctcttttccctcccaactcccagyaggatattcctgattgaaagaaaggccaagaggagagaatgagatctagcaaaattgtaaacaaaggaacagagccacaaacctgttttacattcatata

SEQ ID NO: 472045 - DNA, 201 bp, Homo sapiens
atagagcaagaccctgtctcatttaaaaaaaaaaaaaaaaaaaaaaaaggttcttgagaacctccaccaagtgccacagacacagtcgtagttctgttttrgagttgaaattctaagctgccctgctccccatactgatgtatttccatgtgaccagatctctttcctctttctccagtggtctctgctcttaataaggcc

SEQ ID NO: 472046 - DNA, 201 bp, Homo sapiens
tctagagctcttatcctcaagcagctttgtgaccaaagaaaaggtgttcatggagaaggatctggggagcccagaggctgttcagggttctcctccacacyccaaaggcctggcacactgatgcctttgggaaattgctgaatgtgcagagcctgcccatgtgtacctgctttattcaggaatgagatttctgactatatg

SEQ ID NO: 472047 - DNA, 201 bp, Homo sapiens
aattagctgggcatggtggcacgcacctgtagtcccagctacttgggaaaatgaggcaggagaatcgcttgaacccaggaggcggaggttgcagtgagccrtgattgcgccactgcactccagcctggcaacagagcgagattccgtctcaaaaaaaaaaaaaaaaaaaaaaattagccaggtgtagtggcatgcactgta

SEQ ID NO: 472048 - DNA, 201 bp, Homo sapiens
cagctgaggcacaggaatgtgtcttgggctctggccattaggtacacctgtattggactgtgacctgagagctagagatgcaaagaaatagggattgcctrgaatcatttctggagagcacggttgtaacagcactcatgacacccattgtttaggggcagcaatagaacctggtgtgagcagcacagcccagtacccagc

SEQ ID NO: 472049 - DNA, 201 bp, Homo sapiens
aaatgctttctttgtgttctcagtccttaccagtctgtgaggggggtttattttgtctacattacagatgaagaatctcacctgcaaatgaagaaagttgsctggccgacaggagatcgtttgaaatgaaaggattccagggtttctttctactgagcgtattcaataagcagggcttattatactatctagaatggtgct

SEQ ID NO: 472050 - DNA, 201 bp, Homo sapiens
tgagcccaggagttcaagaccgtcctgggaaacatggcaagaccgtgtctctataaaaaatacaaaaattagacaggtataggccgggcgcagtggctcaygcttgtaatcccagcactctgggaggccaagacgggcggatcacaaggtcaagagattgagaccatcttggccaacatggtgaaatcccgtctctattaa

SEQ ID NO: 472051 - DNA, 201 bp, Homo sapiens
tatgtgaggccttagcaccactggccttgctgcttctgcactgtgtctgtcagggatatctgggacagaaagaataatttccgctgctggggcagccagascctggcgtgcccgtccctaagctggcctgcaccttgccaccggaagatgtagtgtagagtagctgcttgaccccagagtagcattcagagggcacataaa

SEQ ID NO: 472052 - DNA, 201 bp, Homo sapiens
gagttcgataccagcctgggcaacagagcaagacctccatctctacaaaataaaaataaaaaattagccaggtgtggtagcacacacctatggtcccagcyacacaggagaacgagaggagaagattgcttgagcccaggagttcgagctgtgatcgcaccactgcaatacagcctggacaacagagcgagaccctgtctg

SEQ ID NO: 472053 - DNA, 201 bp, Homo sapiens
ggaaatgtactatttagcaatatgtttagtgaacttttgtcctgtcatggtaagaagaaagcagctataactaagtaaggagttactcttattcattaacrtgtaaaacgctgtttaaaaaaaaaaaactggtcatttttttaagttttatttttaattggcacatttatttatggagtacaatgtgatattttggttcat

SEQ ID NO: 472054 - DNA, 201 bp, Homo sapiens
cacattacttatgaaagctagatattttagtttgcaagttggagttgtggttttacacgtcagttctaaaagttggtgaatgaggatgcttgagtggcagrtctaccttagggtgctgacaacattcattgctcagcttcagaagctgaaggtcagactttacatttttaaaaattcaccaaggtgggattcttcaccaag

SEQ ID NO: 472055 - DNA, 201 bp, Homo sapiens
aactcctctgtcttgaagatgacttccttggctgcttcaacacctattaggctttcttttcttgacctcccggagaatgcattgggtaagattcagttctytacccaaatttaatgtgtctgtatttgtgtgcaacacacaaacttcattatttttatttgaactcttggctgtgcttgcatatgtgaaagtgatatttac

SEQ ID NO: 472056 - DNA, 201 bp, Homo sapiens
cttcaagcatggtacgtccttatgcgagtggcgcatggcttcaagaggagggttgatgggacccatccatgagtagagaagttaacaacaatgccagtctkcccaggatgttctgctgggactcagaaaaacatccagtttccttcctttagattttaactgcagcatcacgagctgccttcctagagggaattttgtatt

SEQ ID NO: 472057 - DNA, 201 bp, Homo sapiens
agagttttagctcttggtcaggctggtcttgagctcctgacctcaaatgatctgcctgctttggcctcccaaagtactgtgagccaccatgcctggcctcsttttaatctctgattttatttatttaggtcctctatttttctcagtctgactaaaggtttatcaattttgtttaactttttaaaaaaactttttattgaa

SEQ ID NO: 472058 - DNA, 201 bp, Homo sapiens
ctcacagagtgactggtttgatttgtgttttagaattagaatcaccttcttcaccagacttcctttgcatgaagcagtaggagcaagtggctgcttgaccrgcttgagctctaaagtgtgtttgtggtatgaagtgttctcagaggaaccgaaatcggtgtggtcacacatcatcagtgcctcttcatacacccacgctct

SEQ ID NO: 472059 - DNA, 201 bp, Homo sapiens
atagatacgctagaatctatagcgtatagttgtatgtatagttggtggtcaggcagaacggatagaaacaatatctaaaaagtgatttcaatacatatatrtgtatctagttttaagtcaaattatgggaaaatctggatttgtggaaagctctcatttgtgaagagtaccactagaattccttttaaaaataagttcatt

SEQ ID NO: 472060 - DNA, 201 bp, Homo sapiens
atatgttgattgacccattagttccaggagaaggaggtatacaggagcagtgttttagctctgagtcggtgtgtcacttctgaggcgcagtttgtcagaayagttacaggatgaaatgttgatgtcctgtagagtgcttgattaaaataagtgaagtggcaggtggggaggtattttataccccaaatgttgccacaaatg

SEQ ID NO: 472061 - DNA, 201 bp, Homo sapiens
gggtcatcagttcctagggagaggctaatgggaaggtgatctatagagtgtgatagaagacaatctagctttcttgctgcatcttttcttcgttcagaacrtcagcttctcttttccctcccaactcccagtaggatattcctgattgaaagaaaggccaagaggagagaatgagatctagcaaaattgtaaacaaaggaa

SEQ ID NO: 472062 - DNA, 201 bp, Homo sapiens
gaccactagtgagaataataaagaagaaaagagagaagaatcaaatagatgcaataaaaaatgataaaggggatatcaccactgatcccacaaaaatacaractaccatcagcgaatactgtaaacacctctgcacaaataaaccagaaaatctagaagaaatggataaatcgctggacatgtacaccctcccaagactaa

SEQ ID NO: 472063 - DNA, 201 bp, Homo sapiens
ttagtagagacagggtttcaccgcgttagccaggatggtctcgatctcctgatctcgtgatccgcccgcctcggcctcccaaagtgctgggattacaggcrtgagtcaccgcgcccggcccaggagctggttttttgaaaagatcaacaaaatagatagaccactagtgagaataataaagaagaaaagagagaagaatca

SEQ ID NO: 472064 - DNA, 201 bp, Homo sapiens
aaaagttttatcctgaagtttcaggaccactcttccttaataaacttgttaatggaaagcgagctttatgaacatttaaaaatgttgctgctgctttgttrcttaaaaagaaagttgccaagagagacttcttagggaaaatatttgggtttttttttccaaaaattgctgaaatattgttttgccatttttaaaaagtct

SEQ ID NO: 472065 - DNA, 201 bp, Homo sapiens
gaggcagaggttgctgtgagccaagatcacaccattgcactccagcctgggcaacaagagcaaaaacttcgtctcaaaaaaaataaataaatgtatacaaracaatgtacataggttatatgcattttatatcagggacttgagcgtctgagattttggtatcctcacagcatcctagaaacagtatcctgcacatactga

SEQ ID NO: 472066 - DNA, 201 bp, Homo sapiens
tgcgatctcggctcactgcaagctccgcctcccgagttcatgccattctcctgcctcagcctcccgaatagctgggactatgagtagctgggactacaggygcctgccaacacacccggctaattttttgtatttttagtagagacagggtttcaccgcgttagccaggatggtctcgatctcctgatctcgtgatccgcc

SEQ ID NO: 472067 - DNA, 201 bp, Homo sapiens
gattaaagtcagccctccgtatccaggggctggatccaaacatccgtggattcaaccaactatggatcaaaaatatttagagaaaaataacaatataacartacaaatagtacagtataatgactatttacatatcatttacattgtactaggcattataattaacctagagatgatctaaagtatacgagataggaccag

SEQ ID NO: 472068 - DNA, 201 bp, Homo sapiens
ccagctcctgaaaccccggggcctgtttactcccaccattgcagtggaggacatgtctgagcctcctgcttgtctttaacccccacattagttcctttgtygtttcagtgtaagtagcttgggtaatgtgcagagaatttctttgccttgtattatttatgctgagaatcaactggttgggtcatcagttcctagggagag

SEQ ID NO: 472069 - DNA, 201 bp, Homo sapiens
gttaatgtctggatttttgaaaattatttacctagttcatatttccatgttgggccaacagcagtagggacagaaacagcaagctcacctaaacaacatgrtgcatggacagttgccacatgtgcccaggccaagggggcacagttgctggtgtaagacatggcacacatcatttataacttcacaggatacttaaggatg

SEQ ID NO: 472070 - DNA, 201 bp, Homo sapiens
aaggaagggcagcccatcagtgctgtcaccagctcctgaaaccccggggcctgtttactcccaccattgcagtggaggacatgtctgagcctcctgcttgkctttaacccccacattagttcctttgtcgtttcagtgtaagtagcttgggtaatgtgcagagaatttctttgccttgtattatttatgctgagaatcaac

SEQ ID NO: 472071 - DNA, 201 bp, Homo sapiens
aactgtcttcttatcatcagctctggaaaaaagactcctacaggggcaaataagttaatgtctggatttttgaaaattatttacctagttcatatttccawgttgggccaacagcagtagggacagaaacagcaagctcacctaaacaacatggtgcatggacagttgccacatgtgcccaggccaagggggcacagttgc

SEQ ID NO: 472072 - DNA, 201 bp, Homo sapiens
tgggctgctaaaggaagggcagcccatcagtgctgtcaccagctcctgaaaccccggggcctgtttactcccaccattgcagtggaggacatgtctgagcytcctgcttgtctttaacccccacattagttcctttgtcgtttcagtgtaagtagcttgggtaatgtgcagagaatttctttgccttgtattatttatgct

SEQ ID NO: 472073 - DNA, 201 bp, Homo sapiens
aaactgtcttcttatcatcagctctggaaaaaagactcctacaggggcaaataagttaatgtctggatttttgaaaattatttacctagttcatatttccwtgttgggccaacagcagtagggacagaaacagcaagctcacctaaacaacatggtgcatggacagttgccacatgtgcccaggccaagggggcacagttg

SEQ ID NO: 472074 - DNA, 201 bp, Homo sapiens
cagatccttattcacgacatacaaacaaccttgttcactcagcactgggcaccaaactatgtactgtatagtcatagaagcagaggctatgacttttattyatttattcattcattcattcattcagcagattgtagtatcttctactgatggtgggctggatacttcttaggcaccacattgggcctattgcatcatggg

SEQ ID NO: 472075 - DNA, 201 bp, Homo sapiens
agctggacattgggaggtgtgtgaggatgattaagttgttgaagatgactctcaggtttctcgcttggactagaaccattgtgttcatagtggtcccttgyatggaggagagagagtttcaggagggggatggggctttcattcagttatgaagtaataagttggagtatctaagcagaccacatttaatttaagaacact

SEQ ID NO: 472076 - DNA, 201 bp, Homo sapiens
ggcgcatagctcatgcctgtaaatccagcactttgggaggccaaggtgggaggattgcttgagcacaggaatttgagatgtgcctgggcaatacagcgagwtcctgtctctacaaaaataaaaataattagccaggtgtggtggtgcactataatcccagctacttgggaggctgaggtggaaggattgcttaagtccagg

SEQ ID NO: 472077 - DNA, 201 bp, Homo sapiens
aatccaggaaaacaatctttagtgccattgaaaataaaacttacctccctcctctgtgaaatagatgccaggtgaaagaagctgcaaaggaaactgtcttsttatcatcagctctggaaaaaagactcctacaggggcaaataagttaatgtctggatttttgaaaattatttacctagttcatatttccatgttgggcca

SEQ ID NO: 472078 - DNA, 201 bp, Homo sapiens
cccgctaccacgcccggctaattttttgtatttttcgtagagacggggtttcaccgtgttagccaggatggtctcgatctcctgacctcgtgatccgcccrcctcggcctcccaaagtgcagggattacaggcgtgagccaccgcgcccggccgctactagtgttttttaaaagctgctttttaaaaaaatgttggctgct

SEQ ID NO: 472079 - DNA, 201 bp, Homo sapiens
cttaaaaactgttatctgaaagtcactctgagcacaaatatttataccacggactgtcgtaggtgctggggagtcagcagtgaacaagtggagcccaccckccagccccaccacctcccatggagtcctgggttctccccacgttggagcatcctttgctccctcatttcctgcctgaggaagaggtggtggagaatgcct

SEQ ID NO: 472080 - DNA, 201 bp, Homo sapiens
tcctggcaaagttttgaacaatcctgttttcagcatgattcatggctccctgcagacatcacctaattcaggaaatacttttgaaacactgttcatgtgcmgtttgtgaaaacaatccaggaaaacaatctttagtgccattgaaaataaaacttacctccctcctctgtgaaatagatgccaggtgaaagaagctgcaaa

SEQ ID NO: 472081 - DNA, 201 bp, Homo sapiens
gtgcagggattacaggcgtgagccactgcacctgaccaccacctaaacattccatggccacactgttacagatccttattcacgacatacaaacaaccttsttcactcagcactgggcaccaaactatgtactgtatagtcatagaagcagaggctatgacttttatttatttattcattcattcattcattcagcagatt

SEQ ID NO: 472082 - DNA, 201 bp, Homo sapiens
acagtctatagagtgcattggagacaaatatccttttacatcaactgtgagaaaacttttaagaatatatttatttatttatttttaatttttttttttttgagatggagtcttactctgtcacccaggctggaatgcagtggtgcgatctcggctcactgcaacctccgcctcctgggttcaagcaattctcttgcctca

SEQ ID NO: 472083 - DNA, 201 bp, Homo sapiens
aggctgggctgattgattggaacagaaaggaagcagctgtgtttgctaagactcgctaacacacttctgccagagacttcctggcaaagttttgaacaatmctgttttcagcatgattcatggctccctgcagacatcacctaattcaggaaatacttttgaaacactgttcatgtgcagtttgtgaaaacaatccaggaa

SEQ ID NO: 472084 - DNA, 201 bp, Homo sapiens
ggtcaggccctcttgcttttgagcctggtttcttggatcagatccagtgtttctgtctcaggaagcttgcccctgctgtcctgctcccctccctgctgtcrgcatccactctgcaccctactttctactacttgacatgttttaaattgtgattatatggttgataccagtgtcccctactcgactgcaggctccacgagg

SEQ ID NO: 472085 - DNA, 201 bp, Homo sapiens
agacgttccatgactaaccccaagatgactaaaccagctactgaatgcacccacagaaagggaagtgacatttactgagaacacatttagtgttgctgaaygcttaaaatgctttctttgtgttctcagtccttaccagtctgtgaggggggtttattttgtctacattacagatgaagaatctcacctgcaaatgaagaa

SEQ ID NO: 472086 - DNA, 201 bp, Homo sapiens
ctaatttttgtattttgatagagatggggtttcaccatgttgcccaggctggtctcaaactcctgacctcaggtgatccacctgcctcagcctcccaaagygctagaattacaggcataggccaccatgcccagttggaattttctgtaaagtttcaaagatttaagtgaacatgattcttgaagttgttgatttgaaggt

SEQ ID NO: 472087 - DNA, 201 bp, Homo sapiens
attaggctgggctgattgattggaacagaaaggaagcagctgtgtttgctaagactcgctaacacacttctgccagagacttcctggcaaagttttgaacratcctgttttcagcatgattcatggctccctgcagacatcacctaattcaggaaatacttttgaaacactgttcatgtgcagtttgtgaaaacaatccag

SEQ ID NO: 472088 - DNA, 201 bp, Homo sapiens
ttcttggatcagatccagtgtttctgtctcaggaagcttgcccctgctgtcctgctcccctccctgctgtcagcatccactctgcaccctactttctactrcttgacatgttttaaattgtgattatatggttgataccagtgtcccctactcgactgcaggctccacgaggccactgagtctctgctgctaagagcagac

SEQ ID NO: 472089 - DNA, 201 bp, Homo sapiens
gttgaatagctcctgtgtgcagagagggaccaggagcataatcattatctggaagcttattgaagatgtagaatcttgggccctatctatctcagacctamcaaatccggatctgtgttgtagtgagatcctctgggagttcatgtgcattaaagtttgagaaacacaggaatagtggacagtgctggctgcctatcagca

SEQ ID NO: 472090 - DNA, 201 bp, Homo sapiens
gaactgtccctggtggaccctaagacctgttttgtgtccagtttcaggaagctctagaacaacgtttattaggaacagtttaatctgctatcgtagttagsaagaggcactttaacctgcacatgctaaaagctggcagttatcagcaagcatatctaggacttaccacccttgtactgtggtaattaggctgggctgatt

SEQ ID NO: 472091 - DNA, 201 bp, Homo sapiens
atatactatatatactatatatactacacgtatagtatatatatgaaactatatatatactatacgtgtagtatatatatgaaactatatatatactataygtgtagtatatatatgaaactatatactatacgtatagtatatatatgaaactatatatactatatatacttaactataattgtatatagttaaaaatat

SEQ ID NO: 472092 - DNA, 201 bp, Homo sapiens
ttttttcttacgaatttcctcaactttccatattaatatatagcttcaatactattaatcagaattccaagtggaattcttttggtaaaatggacagaatyattatgaagttcgttgagaggaataaacaggcaagaatagcaaaaagctaattattaagaagaaagacaaatggataaaacctgttagtaaaataatttg

SEQ ID NO: 472093 - DNA, 201 bp, Homo sapiens
ttttcagttgacttgacattaaattagacatggattatttcaataataatgtacaagtaaagtgtttctttttttttttttttttttttttttttttttttgagatgcagtgtcgctctgtcgcccaggctggagtgtagtggcatgatctcggctcactgcaacctctgcctcctgggttcaagcagttctcctgcctcg

SEQ ID NO: 472094 - DNA, 201 bp, Homo sapiens
cttttcagttgacttgacattaaattagacatggattatttcaataataatgtacaagtaaagtgtttctttttttttttttttttttttttttttttttttgagatgcagtgtcgctctgtcgcccaggctggagtgtagtggcatgatctcggctcactgcaacctctgcctcctgggttcaagcagttctcctgcctc

SEQ ID NO: 472095 - DNA, 201 bp, Homo sapiens
acttttcagttgacttgacattaaattagacatggattatttcaataataatgtacaagtaaagtgtttctttttttttttttttttttttttttttttttttgagatgcagtgtcgctctgtcgcccaggctggagtgtagtggcatgatctcggctcactgcaacctctgcctcctgggttcaagcagttctcctgcct

SEQ ID NO: 472096 - DNA, 201 bp, Homo sapiens
tgattgcaccactgcactccagcctgggcgacagagcaagagcctacctcaagaaacaaaaacaaactcacacacagcttcgttgaagtataatttaaatrctataaaattcacttgttgcaagtgtataaggcttttatgtatttatacagttgcacaaccattacaacaatgctgtttgagaatattttcatcactcca

SEQ ID NO: 472097 - DNA, 201 bp, Homo sapiens
tctgccacttttgtctcctaatgtagagaaaatgatcattttccttattcagaagtataggttagccaagaaaggtaaaccattgtctgtttatgcctggmtttttttttaatcagcttaggtgtatttttttttaccctagttatactaagcctattttcaggattaaatgaggtttctgagctaataggaatcaaagag

SEQ ID NO: 472098 - DNA, 201 bp, Homo sapiens
tgatgttgatatgtgtttcagattttccatttgaaatcttataattaatttgatttatttactgtaagtaggaggtataaatgacactcttaaattggaasgaggggtgttttagtgtctgttttaggtcaaaattagtgattctatttttatcaaaagttttatcctgaagtttcaggaccactcttccttaataaactt

SEQ ID NO: 472099 - DNA, 201 bp, Homo sapiens
ctaagacaaaaaacaagtgtaattcagaactacttgattttttttagttaaatgcaataattattatgcttagttttataacctgctctccttgtgaattmttccttcaaatgattacttaacgcagtagtaatagctagctgtaggatgtcctttaaatttttgtgcaaaaaaaaatttataccaggtatttggaaatat

SEQ ID NO: 472100 - DNA, 201 bp, Homo sapiens
tacattagatttcctgtttacttagtactgaataaaatgtaatctacagtctgtgttacacagatggatgtatagaaccaatttataaggacttttttttwaaattatactgaatttttatatatatatcacaataagaattgaggttaggattatggtttttttactaacatgaatataatatcatcacctagttgcctt

SEQ ID NO: 472101 - DNA, 201 bp, Homo sapiens
ccaaatctcaaactcctgacctcaggtgatccacccgcctcggcctcccaaagtgcagggattacaggcgtgagccactgcacctgaccaccacctaaacwttccatggccacactgttacagatccttattcacgacatacaaacaaccttgttcactcagcactgggcaccaaactatgtactgtatagtcatagaagc

SEQ ID NO: 472102 - DNA, 201 bp, Homo sapiens
ttactttttctctatctttggcgtattttccaagtaatctgtagcagtaagatgataatatcaaagagttggatttgttactgatttatgacactactttyggccactgctgtagtgttgtatgccagcaatcatgggaactgtccctggtggaccctaagacctgttttgtgtccagtttcaggaagctctagaacaacg

SEQ ID NO: 472103 - DNA, 201 bp, Homo sapiens
ggcaatcattctatgaccatggaaatgtcctgttcctcatcaacccgccctagattcagcaccccttgatgattcttgtctctgcgccagctgcaaacaayacttctccagccccatgccctccacccatagtctggtcctcagcgctctgcctgagcaagaacccacctcctctcccgtctataggtttattcatttatc

SEQ ID NO: 472104 - DNA, 201 bp, Homo sapiens
catcactgtgaattacaatttccttccctcctctgtaagaaagaagcaatctgtgggcaatcattctatgaccatggaaatgtcctgttcctcatcaaccygccctagattcagcaccccttgatgattcttgtctctgcgccagctgcaaacaatacttctccagccccatgccctccacccatagtctggtcctcagcg

SEQ ID NO: 472105 - DNA, 201 bp, Homo sapiens
cctggtgatctcccaggcatggtgctggctgataacatcactgtgaattacaatttccttccctcctctgtaagaaagaagcaatctgtgggcaatcattytatgaccatggaaatgtcctgttcctcatcaacccgccctagattcagcaccccttgatgattcttgtctctgcgccagctgcaaacaatacttctccag

SEQ ID NO: 472106 - DNA, 201 bp, Homo sapiens
tatacacagcaggttgtggcctcatacagtggcagggcatcttctcagaaccttgcccctggagcattttatacctctcctgccctggtgatctcccaggmatggtgctggctgataacatcactgtgaattacaatttccttccctcctctgtaagaaagaagcaatctgtgggcaatcattctatgaccatggaaatgt

SEQ ID NO: 472107 - DNA, 201 bp, Homo sapiens
agtgaagtatatttgtgggtagttgctaataagtaacttttcagttgacttgacattaaattagacatggattatttcaataataatgtacaagtaaagtrtttctttttttttttttttttttttttttttttttttgagatgcagtgtcgctctgtcgcccaggctggagtgtagtggcatgatctcggctcactgcaa

SEQ ID NO: 472108 - DNA, 201 bp, Homo sapiens
ctaaccatttattccagttttgtcacttgagtcaatatcctcacagcattttttccactcccagactggacccagcctctggctgtgatgtttctttagcyttcttaaatctggaacgtttccagagtcttttaaaatttttgatgacattgacattttggagggatgcagagggcccctaacccctttttaatagactac

SEQ ID NO: 472109 - DNA, 201 bp, Homo sapiens
ttatcaatattgataccgtactctaaccatttattccagttttgtcacttgagtcaatatcctcacagcattttttccactcccagactggacccagcctmtggctgtgatgtttctttagccttcttaaatctggaacgtttccagagtcttttaaaatttttgatgacattgacattttggagggatgcagagggcccc

SEQ ID NO: 472110 - DNA, 201 bp, Homo sapiens
ttctttctttagaatacaatacggactttgtcatattgaagcatgttttagggaatatatagtagtcttaattagaatctggagatggagtaattcatccrtcaaatgagcagccttttgttttaggagtgtgggtagtgatatttttgcaatagccgtgaaacctttgtaaacatggctagagactggttttctcttttt

SEQ ID NO: 472111 - DNA, 201 bp, Homo sapiens
tctctaaagggcaaagtaagttgtttatggagacttctataaagcacctgtaaatcatttgggtgtcaatactgtgcatgttttataatggagaataaagyttccttaatgatgcttgtgtttgaagtataacgttttgcttttcagtaatggtctccctgactataattgtgtctataactttagtctgttacggaaaaa

SEQ ID NO: 472112 - DNA, 201 bp, Homo sapiens
ttcaaaaatgacctatagcaattttttttcagcattttgtttgtgccaagtgtgagaaaccctttcttggacatcgccattatgagaggaaaggcctggcrtattgtgaaactcactataaccaggtattgaccttagtcactggatgctagatagacttttatgaacctaagcttatcagtagtttagctacaaggaaat

SEQ ID NO: 472113 - DNA, 201 bp, Homo sapiens
ccatcattaatgtttgggtcatttatagctaaaccagcagagcctagtggatcattctctagcgagcctgtctaatttgagtgatctttttttttttttttaaagacaatggtataaatagttttatgttaaatatcatacagactttgaaatgttcaatgaaagatagaaggaagataatctctaaagggcaaagtaagt

SEQ ID NO: 472114 - DNA, 201 bp, Homo sapiens
actgcctttttctgaaaatgatgatttcctgcctcagtgctgttcatgcccttctctgggcctggaaaatcatcatcttttgtgttttcttggcagctggracaaaattgccgcttctctcataaaataacgaattcctggagcattaatttagcccccgctgtgtagtagggaattagggattcagagctttttctgttt

SEQ ID NO: 472115 - DNA, 201 bp, Homo sapiens
tgaactcgggaggtggaggttgcagtgagctgagatcgtgccactgcactccagcctggcgacagagcaagactccgtctcaaaaaaaaaaaaaaaaaaaagatcctggttaaaaaggccttccccaaaggcccagaatttaattttactcagctgtggcagtttcatcagaacataagcattgatttgctgaagttcctg

SEQ ID NO: 472116 - DNA, 201 bp, Homo sapiens
aatagtgggagactttaacaccccactgtcaatattagatcaatgagacagaaagttaacaaggatatccaggacttgaacttagctctggaccaagcggrcctaatagaactcttcaccacaaatcagcagaatatacactcttctcagcaccacatagcacttattctaaaattgatcacataattggaagtaaaacac

SEQ ID NO: 472117 - DNA, 201 bp, Homo sapiens
cagtgctctgagttgacttcctctaactgcagggtgttagtctctactcagatttctagtctttgagaaatagtatctgattaacttagttcaagtccatwgtccaaatggaccaggaccagtcattgtggccagaggataggaagaagcaccatgcctagtcaatcaaggtaggtgactgttaggtggtcaggacaacta

SEQ ID NO: 472118 - DNA, 201 bp, Homo sapiens
gcaacgagctgagatcactccattgcccaccagcctgggcaacagagcatgactccgtctcaaaaaaaaaaaaaaaaaaaaaaggcggggccaggcgatayagggttttgtgtgttaccttaagggatgctgactgtcctcagtgcagtagagaatttaagcagggtagtgatagcaggttccttagaccgcttgctggct

SEQ ID NO: 472119 - DNA, 201 bp, Homo sapiens
caatctaattattattgactgtagtcaccctgttgtgctatcaaatactaggtcttattcattctttctaactaatgtttttgtacccattaaccattccyttcccattccccatctcaccactacccttcacagcctctggtaatcatctttctactctctgtgtccatgagttaaattgttttgatttttagatcccaa

SEQ ID NO: 472120 - DNA, 201 bp, Homo sapiens
tagctttctgagtgtagagttagtatgtgcatgagtgtttgggtccatgttctagtcctagttctgtcccttcatggctctttgactttggccctgtcagygtctttaagcctcagattcttaatttataaaataatcccacctgtctcagaggttgttgtgataactaaatatgaaggcaaatgcaaatatttctgaaag

SEQ ID NO: 472121 - DNA, 201 bp, Homo sapiens
tatattatatatacacatatataaaatatatatacatatattatatatacacacatatatatatacacacacatatacacacacacacacacacacacacmtatatatatatatatacatatatatatgccctaagagtgagttttttctcttggcaggggttcttgagatcaggattggaggattaaaacttcaggcctt

SEQ ID NO: 472122 - DNA, 201 bp, Homo sapiens
agtttttcactcaattacgtaataactgtatagtaagttacactttctatgtcttgtctcatcacctttgaaatgggaataataatagtactgtttcattrgattattgtaaaaactaaatttggtaagtgtatgcaaagtgcttatcacagttctgggcgcataagaagcactcaatacatctagctcttgaccaaggtg

SEQ ID NO: 472123 - DNA, 201 bp, Homo sapiens
tcgtgtatgttttcatttttaaaccatttaacaccatgccaggaacatagtagatgctcaatgaagtcatcatttcccatcatcctggttcttttcctccrgacttatactgctgctaatggcacctaacatggttgcttttgtttcttcctgtccttccctccctatagccaccttcttgctgagttcttaccttcgaat

SEQ ID NO: 472124 - DNA, 201 bp, Homo sapiens
atcgtgccactgcactccagactgggcgacaaagtgagactctgttacaaaaaatgtgtgtgtgtgtgtgtgtgtgtgtgtgtgtgtgtgtgtgtgtgtgtattattataaaactattcttttttattttctaaaaatagagatggggtctcactatgttggtcagggtggtctcaactcctggcctcaagcagttcttct

SEQ ID NO: 472125 - DNA, 201 bp, Homo sapiens
acctcatctctacaaaaaattttaaaattagctgggcatggtggcacgtgcccgtagtcctgtggcaggctaggtctcactaatgcaggcctccataacarctgtttcaatactgactgactggttaagtgaaatagtaaaagctaaacaagtcagtgcccttatcaaaggctggagtgtaacagaaacctaccaagagtt

SEQ ID NO: 472126 - DNA, 201 bp, Homo sapiens
gaaaataacaaaagaattcttaacaggacccttttaggattaaacaaattttattgtgggtctgaaaaaactccccaaacctctgtgatttagtaggagasaagggtaatcacctcagcacctggacccatttagatgaagtaaatctactgaggatccagaagaaggtctccagcactcagaccttagttatagattaaa

SEQ ID NO: 472127 - DNA, 201 bp, Homo sapiens
gatcgtgccactgcactccagactgggcgacaaagtgagactctgttacaaaaaatgtgtgtgtgtgtgtgtgtgtgtgtgtgtgtgtgtgtgtgtgtgtgtattattataaaactattcttttttattttctaaaaatagagatggggtctcactatgttggtcagggtggtctcaactcctggcctcaagcagttcttc

SEQ ID NO: 472128 - DNA, 201 bp, Homo sapiens
gtttaaacataacctcagcatcacacctgaaaaagatgagtagtaattccttgatatcatcaactacacagtgtttaaatttctgtttatcccaaacatcrattttattttgtggtttttctaaattgagatctgaataaggttcacaaatttgataggttgataagtcttttagtctcttttaacatataagtatacctt

SEQ ID NO: 472129 - DNA, 201 bp, Homo sapiens
agatcgtgccactgcactccagactgggcgacaaagtgagactctgttacaaaaaatgtgtgtgtgtgtgtgtgtgtgtgtgtgtgtgtgtgtgtgtgtgtgtattattataaaactattcttttttattttctaaaaatagagatggggtctcactatgttggtcagggtggtctcaactcctggcctcaagcagttctt

SEQ ID NO: 472130 - DNA, 201 bp, Homo sapiens
cagatcgtgccactgcactccagactgggcgacaaagtgagactctgttacaaaaaatgtgtgtgtgtgtgtgtgtgtgtgtgtgtgtgtgtgtgtgtgtgtgtattattataaaactattcttttttattttctaaaaatagagatggggtctcactatgttggtcagggtggtctcaactcctggcctcaagcagttct

SEQ ID NO: 472131 - DNA, 201 bp, Homo sapiens; identical to SEQ ID NO: 222189

SEQ ID NO: 472132 - DNA, 201 bp, Homo sapiens
gtgtttgtttacatatcaggcatacccaggcatctcctgcagccagaggttccattgctgtctttgctcagtcctcttttaaaatatgaattagtggacargcacggtgcctcacacctgtaatcccagcactttgggaggtcgaggcaggtggatcacgaggtcaggagatcaagaccatcctggctaccactgaaaccc

SEQ ID NO: 472133 - DNA, 201 bp, Homo sapiens
agtggcaggtggggaggtattttataccccaaatgttgccacaaatgtatgataatattgttgggagaaaaggatactttatcagcccagatgggacatayaatacagaatctaaaaaaattgaaaaataacttataccaatttttgtgtgtgggaggggggtgtgtggagaacaggcagagattcccttatagggcttta

SEQ ID NO: 472134 - DNA, 201 bp, Homo sapiens
ccagatcgtgccactgcactccagactgggcgacaaagtgagactctgttacaaaaaatgtgtgtgtgtgtgtgtgtgtgtgtgtgtgtgtgtgtgtgtgkgtgtattattataaaactattcttttttattttctaaaaatagagatggggtctcactatgttggtcagggtggtctcaactcctggcctcaagcagttc

SEQ ID NO: 472135 - DNA, 201 bp, Homo sapiens
tactgatagtggtgttaaacttttcagttgctgggaaataggccaagtcctgttgtggattgggtggtggatagtcaggcaggacatccttagggattgcyctgctgtacccttcatcaccaagggatggtatagggcagaggtggaattgatgaggttgagggtgtctttctcttcaaacccttagaacatgatgcttag

SEQ ID NO: 472136 - DNA, 201 bp, Homo sapiens
acacaagggtgtatttttgtgcatctagtaggattcactatggtttcatttttaggtatttctctctaacctggatataaccagaaaagaggtattgatcyctctaataaatttgcctattaaaagtactaagttttacaagtgaaattattaataccatgggcggagttccattttactgtattctttttgcttatttac

SEQ ID NO: 472137 - DNA, 201 bp, Homo sapiens
caaggatataaggcatgggaactctacgaatataaggcttgggaactttttagaaatgaagttttgttttgcactgtcatgctttccaggataaagcattrctggagattagctgaacaaatgagatgaaagccaaaatatgcagttggatattttagataaattttgataagacgttactttctaagaatatagcacttt

SEQ ID NO: 472138 - DNA, 201 bp, Homo sapiens
ttgtatttttttgcagggacttatttgtatttttagggtttcgtcatggtacccagccaggctggtctggaacacctgggttcaaatgatctgcctgcctyggcctcccaaaatgctgagatttacaggcacgagccactcgcctgaccaggttttctttttttcgatgtgtctttttctggttttgttatcagggtaaca

SEQ ID NO: 472139 - DNA, 201 bp, Homo sapiens
ttttattgaatctataaattgctttgagtagtatggacatattaacaatattgattctttcaacccatggaatgtctttccattttttggtgttctattcaattttctttatcagtgttttatagttttcattgtagagatgtttcacttcttcggttaaattaattcctgggtattttattttatttgtgtctattgtaa

SEQ ID NO: 472140 - DNA, 201 bp, Homo sapiens
ccaggctggtctcaaactcttaacctcaggtcatccacccactttggcctcccaaagtgctaggattacaggtgtgagccaccacactgggccagcctcartaattattgactgatggcaaatctttgactgaaggccaatcttttttcactcttctctcccctgtgtcatatcatagagattttaatatgtatccttaaa

SEQ ID NO: 472141 - DNA, 201 bp, Homo sapiens
attttattgaatctataaattgctttgagtagtatggacatattaacaatattgattctttcaacccatggaatgtctttccattttttggtgttctattcaattttctttatcagtgttttatagttttcattgtagagatgtttcacttcttcggttaaattaattcctgggtattttattttatttgtgtctattgta

SEQ ID NO: 472142 - DNA, 201 bp, Homo sapiens
cttagtattaatacgagttaatttgtaattcttacaaaagagtgtgagataaatgagcatgtgctgtctttaatttccaaaggaggaaatgaaagggtccrtggaagatgagctgtagctgtggaaggggcagaaaagccagagggtggctcaggagtctggtgttatatatgataacattttaaaaataagaggtgagga

SEQ ID NO: 472143 - DNA, 201 bp, Homo sapiens
gaaaatgacagaactattttacctcacaggctgtacaaaaacagggacaggctggtttggcctctggaccccactatgcagactttcaatctggattattrttaatgcattgagggtttcaaagatggaaatattctaattgttattgaagacattgcaggtcctagctgctgtacttctaaaaagagaagccctccttaa

SEQ ID NO: 472144 - DNA, 201 bp, Homo sapiens
cttcttatcatcagctctggaaaaaagactcctacaggggcaaataagttaatgtctggatttttgaaaattatttacctagttcatatttccatgttggrccaacagcagtagggacagaaacagcaagctcacctaaacaacatggtgcatggacagttgccacatgtgcccaggccaagggggcacagttgctggtgt

SEQ ID NO: 472145 - DNA, 201 bp, Homo sapiens
gattttattgaatctataaattgctttgagtagtatggacatattaacaatattgattctttcaacccatggaatgtctttccattttttggtgttctattcaattttctttatcagtgttttatagttttcattgtagagatgtttcacttcttcggttaaattaattcctgggtattttattttatttgtgtctattgt

SEQ ID NO: 472146 - DNA, 201 bp, Homo sapiens
agaggatagaagaggtggtggaggaatgacacctcttggtggggtcagtggtattgagatcctgtggaaaatctaggagatgctgctacttatttcctgtrtattcacttgatacctattgccctttacatcttcttcagtatgagccagactaacccatggctccacttcatcccagactctagagcctacactctattc

SEQ ID NO: 472147 - DNA, 201 bp, Homo sapiens
ttcttacaaaagagtgtgagataaatgagcatgtgctgtctttaatttccaaaggaggaaatgaaagggtccgtggaagatgagctgtagctgtggaaggrgcagaaaagccagagggtggctcaggagtctggtgttatatatgataacattttaaaaataagaggtgaggaaaatgggagcacactttttggaagatta

SEQ ID NO: 472148 - DNA, 201 bp, Homo sapiens
ttgatacctattgccctttacatcttcttcagtatgagccagactaacccatggctccacttcatcccagactctagagcctacactctattcccgaggastggtcaccttctccccctgtacttggcatggtgtcccattggggtagtgctactgaaggacagtctctgaagaagagtatcttccttattcttggggtag

SEQ ID NO: 472149 - DNA, 201 bp, Homo sapiens
ggattttattgaatctataaattgctttgagtagtatggacatattaacaatattgattctttcaacccatggaatgtctttccattttttggtgttctattcaattttctttatcagtgttttatagttttcattgtagagatgtttcacttcttcggttaaattaattcctgggtattttattttatttgtgtctattg

SEQ ID NO: 472150 - DNA, 201 bp, Homo sapiens
aagctgacaactgcgtctgctgcccagaaggaatgctgagggcagtcatgccccaggcacagtgttgcttgtgattaggcaaatctgaagcctgttagcartaatgtgaacctgtgatcagtcaagcagctgaccaatcgttacctactcctccctgctctttctacccaataaatacaaaggctgtagaagctcagggct

SEQ ID NO: 472151 - DNA, 201 bp, Homo sapiens
aaggattttattgaatctataaattgctttgagtagtatggacatattaacaatattgattctttcaacccatggaatgtctttccattttttggtgttctattcaattttctttatcagtgttttatagttttcattgtagagatgtttcacttcttcggttaaattaattcctgggtattttattttatttgtgtctat

SEQ ID NO: 472152 - DNA, 201 bp, Homo sapiens
tgcagaagctttttaacttaatgtgatcccatttgtgcatttttgctttggttgcctgtgcttgtggggtattattcaataaatttttgcccagaccaatrtctttgagagtttgccagacatttccttatactagtttcatagtttaagatcttagatttaagtctttaattcattttgatttgatttttgtttatggtg

SEQ ID NO: 472153 - DNA, 201 bp, Homo sapiens
tcttttctctttgttgactgttttcctttgctgtacagaagctgtatttgttgtttttgttgttgttgttgttgtcgtttgagatggagtctcactcactstgtcgccaaggctggagtgctgtgacgcaatctctgctcactgcaacctccgccttttgggctcaagcgattctcctgccccagcctaccgagtagctgg

SEQ ID NO: 472154 - DNA, 201 bp, Homo sapiens
gcctttttttcttaagactatagattttcattggttgagaggacttggtaattttaacatggaacttctgaactgaccattttataagatatcgaacataygatcagattcatattttaccctcattaatcaaaaaatagtaggaacttttttttttttgagagacctagtcttgctctgttgccctggctagagtgcagt

SEQ ID NO: 472155 - DNA, 201 bp, Homo sapiens
gaacttcctgtgaacattattgaaatgataacaaaggatttagaataatacataaacttagtaaagcaatggcagggtttgagagaattgacttcaatttygaatgttctagtggccaggcgcatagctcatgcctgtaaatccagcactttgggaggccaaggtgggaggattgcttgagcacaggaatttgagatgtgc

SEQ ID NO: 472156 - DNA, 201 bp, Homo sapiens
gagaggggtctcaccatgttaggcaggctggtctcgaactcctgacctcagatgatctgcccgcctaggcctcccaaagtgctgggaccacaggcgtaaaycaccacgcctggcccaaagggttttgtttttaaatgagagatggttagtaaactaatgttttcctgagtgacatagggcatatacatagagatgagcata

SEQ ID NO: 472157 - DNA, 201 bp, Homo sapiens
ctcccaaagacccaacttagccatgagggctgattagagtatagaacctcttaagaaacgccctggatttgttggcaagatggcaaataggaacagctccrgtctgcagctcccagcaagattggtgcggaaggcaggtgatttctgcatttccacctgaggtactcagttcatctcattgggactggttggacagtgggt

SEQ ID NO: 472158 - DNA, 201 bp, Homo sapiens
tcataaagtagaaatcactctgctctgggtggatttaaggaacatgtggggttcagacctgtcctgtaggatctcccaaagacccaacttagccatgaggkctgattagagtatagaacctcttaagaaacgccctggatttgttggcaagatggcaaataggaacagctccggtctgcagctcccagcaagattggtgcg

SEQ ID NO: 472159 - DNA, 201 bp, Homo sapiens
agagtgagactctgtctcaagaaaactaagcacaggctgggcacggtggctcacgcctgtaatcccagcacttggagaggccgaggcgggtggatcatgargtcaggagatcaacaccatcctggctaagatggtgaaaccccgtctctactaaaaacacaaaaaattagccgggcgtgttgataggcacctgtagtccca

SEQ ID NO: 472160 - DNA, 201 bp, Homo sapiens
ttttaaggacatttaaggtagaggtattttgggatgaactaggactcctatcgggtggtgtttgggagtgttcttttcctgtgttaacacaacctttaccwacttgcttttggttttgcccagaaagaggcagggaagaaatcagtgaggtgcttcagaagcttagggatgcttaaacattgcttgcacggcgcataagtg

SEQ ID NO: 472161 - DNA, 201 bp, Homo sapiens
agttattcaagaggctgaggcaggagaatcgcttgaacccagggggcagaggttgcagtgagctgagattgcaccacttcactccagcctgggcaacagcmaaactccatcttgcggggaaaaaaagtaagtttccacattacttcagtcatttcacactggtgaagtatcgatggtaaaaatggtttttagtgctcatta

SEQ ID NO: 472162 - DNA, 201 bp, Homo sapiens
agggaaacccggtctctactaaaaatacaaaaattaactgggcatggtggcaggtgccagtaatcccagttattcaagaggctgaggcaggagaatcgctygaacccagggggcagaggttgcagtgagctgagattgcaccacttcactccagcctgggcaacagccaaactccatcttgcggggaaaaaaagtaagttt

SEQ ID NO: 472163 - DNA, 201 bp, Homo sapiens
ggtggctcacacctgtaatcctagcactttgggaggcggagggaggaggatcacctgaggtcaggaattcgagaccagcctggccaacgtagggaaacccsgtctctactaaaaatacaaaaattaactgggcatggtggcaggtgccagtaatcccagttattcaagaggctgaggcaggagaatcgcttgaacccaggg

SEQ ID NO: 472164 - DNA, 201 bp, Homo sapiens
taaaggcagggtatttgagccagaaaacaattcagcacagtcagaggccaggtcaccagtccctgtaggtgtactgttcactctagcctctacttattccrtatgtctttcctgtaccaacatgtagatgtatggatggtgcaaaagagtatctgctttttaaaatcccagtagagttataaattcttagagtagaactct

SEQ ID NO: 472165 - DNA, 201 bp, Homo sapiens
ctttgtaaatatttgaggttacagtgagaattacagatatcgacctgaaaaatgtgggaggagagttgtatgtatgtgcatattttctggagggagaggtkatccatagctttcatcagattcattaaaggcagggtatttgagccagaaaacaattcagcacagtcagaggccaggtcaccagtccctgtaggtgtactg

SEQ ID NO: 472166 - DNA, 201 bp, Homo sapiens
tactatagagttgtttaagccccttatatattctggttattaaccccttgtcagatggttagtttgcagatatcttctcccattctgtggttgtcttttcwctttgttgactgttttcctttgctgtacagaagctgtatttgttgtttttgttgttgttgttgttgtcgtttgagatggagtctcactcactgtgtcgcc

SEQ ID NO: 472167 - DNA, 201 bp, Homo sapiens
gagcacataaaatgaaaacagttcaagaaatgaaagatgtaaaaatcttggctgttaagagaatgtttttaatggattttggtcattttaaaatgtgctarggctgagctactggctaacgcctgtggtcccagtgctttgagagactgaggtaggaggattgctttgggccaggagtccaagaactagcctaggcaacat

SEQ ID NO: 472168 - DNA, 201 bp, Homo sapiens
gttcttcacagtgattgtactcatttacatttccaccagcagggtacaagggttcccttttctctacatcctcaccagtatttgttattgcctgtcttttkgttataagccattttaactggggcgagatgagatctcattgtacttttgatttgcatttctctgatgatcagtggtattgagtaccttttcataggcctg

SEQ ID NO: 472169 - DNA, 201 bp, Homo sapiens
gatacatgaaataattgtgggaggaaagggcagccctactcatttcactatcactaagatatgcttttcaagtaaacatagtataaaaaaattaatatttrtgtcttgcttgtcctatactaatcattctaatgataatacagaagaaaataaatgttaacctttacagccttatggattcagaaagcacattttaaaatt

SEQ ID NO: 472170 - DNA, 201 bp, Homo sapiens
aaaggaaaaggaaagaaacattgtttgccacaaggaggttttcttcaattgccacagccaccccaggcttcagcagccaccatcctgatcagtcagcagtygtcaacatcaaggaagaccctgcaaaagataatgactcgctgaaggctcagatgattgctagcatttttgagcaataaagtattttaaaattaagatctg

SEQ ID NO: 472171 - DNA, 201 bp, Homo sapiens
tgtgactttgtataggctaggaggaaggagagactgaggagtactatgtttggaaggaaagctgaaggtagggcagccggatggttagctttgcagatatsaggccagtgagaagaaaacagctagttcgatattttgcttaggattaagccctgatggttggatactagccatctggggggtggtgggtggggaatcctt

SEQ ID NO: 472172 - DNA, 201 bp, Homo sapiens
ctgtgactttgtataggctaggaggaaggagagactgaggagtactatgtttggaaggaaagctgaaggtagggcagccggatggttagctttgcagataygaggccagtgagaagaaaacagctagttcgatattttgcttaggattaagccctgatggttggatactagccatctggggggtggtgggtggggaatcct

SEQ ID NO: 472173 - DNA, 201 bp, Homo sapiens
tgccacacccggctattttttgtattttttagtagagacggggtttcactatgttggcaaggctggtcttgaactcctgacctggtgatccgcccgcctcrgcctcccaaagtggtgggattacaggtgtgagccaccacacctggccagaaatgctatttttttaaagccttctcccacctgttctacagatgaattctg

SEQ ID NO: 472174 - DNA, 201 bp, Homo sapiens
cttgtacgtatgtctgtgtgaaagagacagaggcacacacacagactgtctctacctgcataactaaaagaatttctttgtgcatgtttcttttttctccktttcacttatctataatacaagcaaaaatgcttttttttttttttttttgcgacagagtcttgcatgttgcccaggctggagtgcagtgatgcagtctca

SEQ ID NO: 472175 - DNA, 201 bp, Homo sapiens
ccaggcagatgtgtgccagtctgacactgttcatttcttctgttgtttatgccagttcaggcaacacggaagctgtgtctgtttctcctgtcattgtaaaygtagccctggtctttcaaaaagctgtggttgtgtgggtctttaaggtattccttcagtaattgtggtggccactatttcatttaaggagttagcatctta

SEQ ID NO: 472176 - DNA, 201 bp, Homo sapiens
ttccccattagggatgtatgtaaagaaagggcatgttggccgggcatggcacacgcctgtaatcctagcactttgggaggccaagatgggcagatcacctraggtcaggagtttgagaccagcctgatcaacatggagaaacctcatctcaactaaaaatacaaaattagccaggcgtggtggtgcatgcctgtaatccca

SEQ ID NO: 472177 - DNA, 201 bp, Homo sapiens
atttacagaacagatcaatggaattcagttaggtctcagattttactttccccattagggatgtatgtaaagaaagggcatgttggccgggcatggcacaygcctgtaatcctagcactttgggaggccaagatgggcagatcacctgaggtcaggagtttgagaccagcctgatcaacatggagaaacctcatctcaact

SEQ ID NO: 472178 - DNA, 201 bp, Homo sapiens
agaaagacctgatactgttttgacttcatgtgtccctgtagccattcagcggccaacatttgtatagtactttatctttctcagcttatttctaattagcrataattaatactcttagtattaatacgagttaatttgtaattcttacaaaagagtgtgagataaatgagcatgtgctgtctttaatttccaaaggaggaa

SEQ ID NO: 472179 - DNA, 201 bp, Homo sapiens
agtgacttaaagctgctaaaaggatgtgtgtcagggctttggcattctgccgcagacatagaaagacctgatactgttttgacttcatgtgtccctgtagscattcagcggccaacatttgtatagtactttatctttctcagcttatttctaattagcgataattaatactcttagtattaatacgagttaatttgtaat

SEQ ID NO: 472180 - DNA, 201 bp, Homo sapiens
tattcacttgcagaagtgacttaaagctgctaaaaggatgtgtgtcagggctttggcattctgccgcagacatagaaagacctgatactgttttgacttcmtgtgtccctgtagccattcagcggccaacatttgtatagtactttatctttctcagcttatttctaattagcgataattaatactcttagtattaatacg

SEQ ID NO: 472181 - DNA, 201 bp, Homo sapiens
gtaaaaatgactgctgcttttaaataggcttaaattattgactttttatacaaccagcataggcgctgtcattagagcgtcagacctcttatattcagtcygaacatagtccaaatagtcaccatatttattagtttatttgaaccactctcaatttcaccatttgatttgctttcctaataggttctaaactctttgaag

SEQ ID NO: 472182 - DNA, 201 bp, Homo sapiens
cacaaatgaagttttactggaacacagccatgcttatttgtatgtgttgcctgtggtggttttctgctacgctggcaaagttgagttgtgacacagaccartgtggcccacaaagacaaaaattatttaccttcaggcccttcacagaaaacctgggctgacccctggtctagtgctgagataagaactcctagagctttc

SEQ ID NO: 472183 - DNA, 201 bp, Homo sapiens
cacatccccacacccaaaaccttcctaacattgtcactttccgaggtcaaatgtacagataaatacagggtatataggacccattccaccttaaagccaayagcattgtgtcagccggggtggcctttcctacgagagggcattattcacagccagtaattacaatgaatgaaggaagaaaccatcttcctttcagttatg

SEQ ID NO: 472184 - DNA, 201 bp, Homo sapiens
ggggaaagccccaggagttttatgaggtagtaatttccccatcactgcaagtgtccatgaagagacaaactcccaggtcatagatattgtatagggatgargccatggggaaaatgacggtggggaattctgcattgaatgagagtctggactgaccttcaaagatttttttagagtgctaaaatgaaaaatatctctatt

SEQ ID NO: 472185 - DNA, 201 bp, Homo sapiens
tgactgtcttccatgtccctggccctatagatgcagcggtaagtgggatatggggtttagaaaggtttctcggaagagatgatccttgtagtgagtcttaktgggatgatcaggagctagtcctgccagtgatccttcttccagtcttaccaagccatatgtgcaaaggctagaaagtgagaggaagcacagtctgtctgg

SEQ ID NO: 472186 - DNA, 201 bp, Homo sapiens
tcagcgctctgttgaggaggaccctctgttctctttgggtcgggtggggggtatggtggggctagggtgatcagcatgcctttttgtggtccttatctacyctagagctcttatcctcaagcagctttgtgaccaaagaaaaggtgttcatggagaaggatctggggagcccagaggctgttcagggttctcctccacacc

SEQ ID NO: 472187 - DNA, 201 bp, Homo sapiens
agtgggtactttaaagtccatctgaattcagactagccacatttcaagttgctacatgtgactactggctaccaaagtagacagcatagctctaaaaaaaaggtagacagactcatcctaaaaaaaaatcgaatgtagaggccctgctttgaagtcattgagaggaattatggtggggcaagaaagcagcttcacctgaga

SEQ ID NO: 472188 - DNA, 201 bp, Homo sapiens
atatctaacaaacgagtgataattctttatcaccatccagtaccccacccataatcaaatgtcctcacttgtcccaagagtagcattctacatttgttttmtttaaaccaagatctaaacaaaggccatagtttaataatacatttgattgatatgtctgttaagtctctcttaatctgcaggaaaaccccttctctgttt

SEQ ID NO: 472189 - DNA, 201 bp, Homo sapiens
tccgcctcccaggttcaagtgattcttctgtctcagcctcccaagtagctggaattacaggcacgcaccaccatgcccggctaatttttgtatctttggtrgagacgaagtttcaccatattggccaggctggtctcgaactcctgacctcaggtgatccacgtgcctcggcctcccaaagtgcttggattacaggtgtga

SEQ ID NO: 472190 - DNA, 201 bp, Homo sapiens
tttgtattgcttccagtgcgtgttgctgttcaacagtacccttggtttcagcgtagttgctatgatgaagaaaacctgttagaatctgccttttttttttytccagaactgttggaaacattgaataattccatgtactctaaaaggaaataaagtcttttgggtaatttggacccaaagactcctaaggaatctaggaat

SEQ ID NO: 472191 - DNA, 201 bp, Homo sapiens
tcactgcagccttgacctcctgggctcaagaaattctcctgctcccgcctcccaaatagctgtgactacaggcacacaccaccatgcctggctaatttttwaaatttttataaaaacagagtctcactgtgttgcccaggcttgtcttgaactcctggcctcaagagatcttcctgccttggcctctcaacatgctgagat

SEQ ID NO: 472192 - DNA, 201 bp, Homo sapiens
atgaggtgtaatattaggctgttatttgagatctttcttttttgaagtaggtgtctattgctgtaaacttccctgttagcactaacttttgctgcatcccrtaagttttagtatgttgtatttccatcttcatttgtcacaagatttttttatatatctcctttattttcttctttaatttcccctttaattttttcttta

SEQ ID NO: 472193 - DNA, 201 bp, Homo sapiens
cagtgttggataacaagcaaaagtgatgagttgttttcttggggtttgtgtgtgtgtgtgtgtgtgtgtgtgtgtgtgtgtgtgtgtgtgtgtgtgtttggtttgttgtggtggtatgtttttgtttttgttttttcagagacatggtctccctatgttgcctagtctgggcctgaactcctgggctcaagtgatctccta

SEQ ID NO: 472194 - DNA, 201 bp, Homo sapiens
ctcagtgttggataacaagcaaaagtgatgagttgttttcttggggtttgtgtgtgtgtgtgtgtgtgtgtgtgtgtgtgtgtgtgtgtgtgtgtgtgtttggtttgttgtggtggtatgtttttgtttttgttttttcagagacatggtctccctatgttgcctagtctgggcctgaactcctgggctcaagtgatctcc

SEQ ID NO: 472195 - DNA, 201 bp, Homo sapiens
tctcagtgttggataacaagcaaaagtgatgagttgttttcttggggtttgtgtgtgtgtgtgtgtgtgtgtgtgtgtgtgtgtgtgtgtgtgtgtgtgtttggtttgttgtggtggtatgtttttgtttttgttttttcagagacatggtctccctatgttgcctagtctgggcctgaactcctgggctcaagtgatctc

SEQ ID NO: 472196 - DNA, 201 bp, Homo sapiens
gtctcagtgttggataacaagcaaaagtgatgagttgttttcttggggtttgtgtgtgtgtgtgtgtgtgtgtgtgtgtgtgtgtgtgtgtgtgtgtgtgtttggtttgttgtggtggtatgtttttgtttttgttttttcagagacatggtctccctatgttgcctagtctgggcctgaactcctgggctcaagtgatct

SEQ ID NO: 472197 - DNA, 201 bp, Homo sapiens
agtctcagtgttggataacaagcaaaagtgatgagttgttttcttggggtttgtgtgtgtgtgtgtgtgtgtgtgtgtgtgtgtgtgtgtgtgtgtgtgtgtttggtttgttgtggtggtatgtttttgtttttgttttttcagagacatggtctccctatgttgcctagtctgggcctgaactcctgggctcaagtgatc

SEQ ID NO: 472198 - DNA, 201 bp, Homo sapiens
ttgcccctaccactagcaagaggcaaatctttcagccctcccaaggctggctttcaggctcctgaagctgtgccttctgaatgtgacaccttgtcctggcsacatctctggagagacgccacacacatcagtgttaagtggtacacatggtccttttcaccacaaatgtcctgaaatcgagggactatttagaaaacaggc

SEQ ID NO: 472199 - DNA, 201 bp, Homo sapiens
ccagtctcagtgttggataacaagcaaaagtgatgagttgttttcttggggtttgtgtgtgtgtgtgtgtgtgtgtgtgtgtgtgtgtgtgtgtgtgtgtgtgtttggtttgttgtggtggtatgtttttgtttttgttttttcagagacatggtctccctatgttgcctagtctgggcctgaactcctgggctcaagtga

SEQ ID NO: 472200 - DNA, 201 bp, Homo sapiens
ctgtgggctttgggaataaaactaggatagttttccctcagatactagaggaggaattttttattgatacataataattgtacatatttatggggtgcatrtgttattttgctgcatgcatgtaatgcataaggatcaaatcggggtaactagcatatccatcacttcaaacatttatcatttccttgagtttagaacttt

SEQ ID NO: 472201 - DNA, 201 bp, Homo sapiens
gcttctgcgtttcccagtaaatacttgtctctgactttttgtcattgggacactaaaacttttttcgtctggtgttccccaattcatgaattgcttcttaytcaaataaactctttaaaattgtattgttcctcagatttttcttttatagtaactttcccaaactcagaaaggcccccagagcttaggggcttttaggac

SEQ ID NO: 472202 - DNA, 201 bp, Homo sapiens
cagtttgtgaaaacaatccaggaaaacaatctttagtgccattgaaaataaaacttacctccctcctctgtgaaatagatgccaggtgaaagaagctgcaraggaaactgtcttcttatcatcagctctggaaaaaagactcctacaggggcaaataagttaatgtctggatttttgaaaattatttacctagttcatatt

SEQ ID NO: 472203 - DNA, 201 bp, Homo sapiens
tcttttagctttactctgttgtagctaaataagataagtgactgcaggtagtctttttgggagaattgtgtgccgcctaaactttcttttcttttcttttytttttttttttctttcgagacggagttttgctcttgttgcccaggcttgagtgcagttgcacaatctcggctcactgcagcctctgcctcctaggttcag

SEQ ID NO: 472204 - DNA, 201 bp, Homo sapiens
aagacacaccccttgaattccagggcagggagaagaaccgtttttgttctttctggtcttcagaatatcggaactgttagcttgcaagtaactgttacatktctcctctcacacagaagtatttaacctattggatttttttgtaatgacgatttagtttagaaatatgctgagcagatatagatacgctagaatctatag

SEQ ID NO: 472205 - DNA, 201 bp, Homo sapiens
cagcatgactgtaccatttcacttaaaaagtgaaattgacattattttcctgtgagtacataaaggtaaagaattcagggacagtaccacggccctctttmgtgctaagcggccagcagttgtaccgactgttgtttttgcactatctgtgtgtcaacacagtccacaatgctacagtgacttcttaggaatatcttagta

SEQ ID NO: 472206 - DNA, 201 bp, Homo sapiens
attttccaagtaatctgtagcagtaagatgataatatcaaagagttggatttgttactgatttatgacactacttttggccactgctgtagtgttgtatgycagcaatcatgggaactgtccctggtggaccctaagacctgttttgtgtccagtttcaggaagctctagaacaacgtttattaggaacagtttaatctgc

SEQ ID NO: 472207 - DNA, 201 bp, Homo sapiens
cctaaatacttcagtgtatatttcccaagaatatgggactctctaacataattgtagttatcaatattgataccgtactctaaccatttattccagttttrtcacttgagtcaatatcctcacagcattttttccactcccagactggacccagcctctggctgtgatgtttctttagccttcttaaatctggaacgtttc

SEQ ID NO: 472208 - DNA, 201 bp, Homo sapiens
atttcccaagctcagtcttcctgtgtaaaacacatagttacgtaaatattatatacaagtacgatggctgttttgccaataagttcatcatactcctttayccctaaatacttcagtgtatatttcccaagaatatgggactctctaacataattgtagttatcaatattgataccgtactctaaccatttattccagttt

SEQ ID NO: 472209 - DNA, 201 bp, Homo sapiens
acccagtctcagtgttggataacaagcaaaagtgatgagttgttttcttggggtttgtgtgtgtgtgtgtgtgtgtgtgtgtgtgtgtgtgtgtgtgtgtgtgtgtttggtttgttgtggtggtatgtttttgtttttgttttttcagagacatggtctccctatgttgcctagtctgggcctgaactcctgggctcaagt

SEQ ID NO: 472210 - DNA, 201 bp, Homo sapiens
agagaggggtctcaccatgttaggcaggctggtctcgaactcctgacctcagatgatctgcccgcctaggcctcccaaagtgctgggaccacaggcgtaartcaccacgcctggcccaaagggttttgtttttaaatgagagatggttagtaaactaatgttttcctgagtgacatagggcatatacatagagatgagcat

SEQ ID NO: 472211 - DNA, 201 bp, Homo sapiens
tttgtctcctaatgtagagaaaatgatcattttccttattcagaagtataggttagccaagaaaggtaaaccattgtctgtttatgcctggctttttttttaatcagcttaggtgtatttttttttaccctagttatactaagcctattttcaggattaaatgaggtttctgagctaataggaatcaaagagagtaaggac

SEQ ID NO: 472212 - DNA, 201 bp, Homo sapiens
  misc_feature (1)...(201): n = A,T,C or G
aggtattttgggatgaactaggactcctatcgggtggtgtttgggagtgttcttttcctgtgttaacacaacctttacctacttgcttttggttttgcccngaaagaggcagggaagaaatcagtgaggtgcttcagaagcttagggatgcttaaacattgcttgcacggcgcataagtgatggacttgcttgcacgttgg

SEQ ID NO: 472213 - DNA, 201 bp, Homo sapiens
  misc_feature (1)...(201): n = A,T,C or G
tagaacaagctggaggagtatcaaaacctagagatcattgatttttaaggacatttaaggtagaggtattttgggatgaactaggactcctatcgggtggngtttgggagtgttcttttcctgtgttaacacaacctttacctacttgcttttggttttgcccagaaagaggcagggaagaaatcagtgaggtgcttcaga

SEQ ID NO: 472214 - DNA, 201 bp, Homo sapiens
agtgctgggattacaggcgtgagccattgctcctggtcatgaaatgtaaataatttttaaatctagtttacaaagaaaaatgatgatgtagggatatcatwtttttgttcctcaagaataaatttagtcttaaatttcaggttagcatcctggattcattatcctatatcactttttggtatgcattcatgggattttgta

SEQ ID NO: 472215 - DNA, 201 bp, Homo sapiens
gactgaggtaggaggattgctttgggccaggagtccaagaactagcctaggcaacatagcaagactcccatttaaaaaaataataaaatacaatgtgctaraatatttgccctttgtaaatatttgaggttacagtgagaattacagatatcgacctgaaaaatgtgggaggagagttgtatgtatgtgcatattttctgg

SEQ ID NO: 472216 - DNA, 201 bp, Homo sapiens
ctaataggttttattcattcctgcaaaaggaatagaatagaacttgtcatactgggtcagtaccagttatgggtcaactaagcaagttttgttttgttttsttttgttttgttgagacagggtctgtattgcccaggctggtcttgatcctgggctcaagcaatcctcctgcctcagccttctgagtagctggaattacag

SEQ ID NO: 472217 - DNA, 201 bp, Homo sapiens
tattttatgttttgatttgttataactattgcagaaatcaatcctgagtcatcagggttgtttagtctttctccttttgtgcgtttgtgtgtgtgtggtawtattcattttggctgtttggatggcatgtgatacagcattttttattttgtagccaaaaccaaaccaagaggttgccaacaggacagaaaaaagcagcaa

SEQ ID NO: 472218 - DNA, 201 bp, Homo sapiens
catttttattttttatttctaggtgatcctcaaaacaaccctgcaaagtaagtggtattagccccactgcagggatgaattacctcacttgtaatcatgtrttatttaacaaatattgctgcgtgcctggtagagaccaggtgtatgcttggctctagggatacagcagaaagcagagcagacagaactctctgtcttcat

SEQ ID NO: 472219 - DNA, 201 bp, Homo sapiens
atattctggatattaaagcctcatccattcatgatttgcaaatattttctcctgtttcatattttgccttttcactctgattgggtcctttgatgcacaamagttttaaagtttgatatagttccatttgtctgtttttgcttttgttgcctgtgcttttagttttggattgggaaaccgttgcctagtccaatgtcatgc

SEQ ID NO: 472220 - DNA, 201 bp, Homo sapiens
gtaccactgcactccagactgggcaacagagcgagactctgggaaaaaaaaaaaagttattttttctaggagaaaatctgctttggttggttcaacagtargaactgactttgccagttaagctgtggtagatatgttcactaaattggatgcactaaatctatagccataatttgaggaaattgagttgccaactgatac

SEQ ID NO: 472221 - DNA, 201 bp, Homo sapiens
aaggaaagggccagcgctctgccctagctctttaagagaaacccctagctctttaagagaaacccatagttcaggaagtgtttgtgctggacaaaatctctgagctttctccaagtcggtttctgtcaaaactgagaactgctccataactgagttgacctctggaatacttgattctctcaactcaactttgttacttat

SEQ ID NO: 472222 - DNA, 201 bp, Homo sapiens
ggaaggattgcttaagtccaggagttcaaggctacagtgagctatgatcacacctgggtgacaggccaagaccctgtctcaaaaaaaaaaaaaaaaaaaaaggaaaaggaaagaaacattgtttgccacaaggaggttttcttcaattgccacagccaccccaggcttcagcagccaccatcctgatcagtcagcagttgt

SEQ ID NO: 472223 - DNA, 201 bp, Homo sapiens
gttaagagaatgtttttaatggattttggtcattttaaaatgtgctagggctgagctactggctaacgcctgtggtcccagtgctttgagagactgaggtrggaggattgctttgggccaggagtccaagaactagcctaggcaacatagcaagactcccatttaaaaaaataataaaatacaatgtgctagaatatttgc

SEQ ID NO: 472224 - DNA, 201 bp, Homo sapiens
tataaaatatacaaagaatacctgtatgtctttcattcaagtccacagtttgctttatcatttcccaagctcagtcttcctgtgtaaaacacatagttacrtaaatattatatacaagtacgatggctgttttgccaataagttcatcatactcctttatccctaaatacttcagtgtatatttcccaagaatatgggact

SEQ ID NO: 472225 - DNA, 201 bp, Homo sapiens
ctaactataaaatatacaaagaatacctgtatgtctttcattcaagtccacagtttgctttatcatttcccaagctcagtcttcctgtgtaaaacacatasttacgtaaatattatatacaagtacgatggctgttttgccaataagttcatcatactcctttatccctaaatacttcagtgtatatttcccaagaatatg

SEQ ID NO: 472226 - DNA, 201 bp, Homo sapiens
atttgggaaataatttcagactcagaagctaactataaaatatacaaagaatacctgtatgtctttcattcaagtccacagtttgctttatcatttcccamgctcagtcttcctgtgtaaaacacatagttacgtaaatattatatacaagtacgatggctgttttgccaataagttcatcatactcctttatccctaaat

SEQ ID NO: 472227 - DNA, 201 bp, Homo sapiens
tgcaatcatggctcactgcagcctcaacctcctggggtcaggtgatcctttcaccttagacttctgagtagctgggacaacaggtacatgccactatgccyggctaatattttgtattttttgtagtgacagggtttccccatcttgcccagcctagtgttgaattcctggcctcaagcgatccgcccttctcggcctctc

SEQ ID NO: 472228 - DNA, 201 bp, Homo sapiens
atggtttttagtgctcattatgaataactgttggatacttcatcactcctcttccctattgttaacatagaacaagctggaggagtatcaaaacctagagwtcattgatttttaaggacatttaaggtagaggtattttgggatgaactaggactcctatcgggtggtgtttgggagtgttcttttcctgtgttaacacaa

SEQ ID NO: 472229 - DNA, 201 bp, Homo sapiens
tatcaatattgataccgtactctaaccatttattccagttttgtcacttgagtcaatatcctcacagcattttttccactcccagactggacccagcctckggctgtgatgtttctttagccttcttaaatctggaacgtttccagagtcttttaaaatttttgatgacattgacattttggagggatgcagagggcccct

SEQ ID NO: 472230 - DNA, 201 bp, Homo sapiens
gtacatcgcagtctaggaagttactccgggctctgccttagttatccttatgtgccccgtacctatagcagttagtgatatggtagtcattgggtaaataktcactgaaatgaaaatggaagttttcaatgtgtatgtatttgttttctacttacccctattttaatggtacagagtgggtaagggtaggttaacacttgc

SEQ ID NO: 472231 - DNA, 201 bp, Homo sapiens
gaaatgaaaatggaagttttcaatgtgtatgtatttgttttctacttacccctattttaatggtacagagtgggtaagggtaggttaacacttgcatttgytcaaaagttaatttttacaataactaaatgtttttacattcttaaaatgtattttacattcttaacaaacatgaatctatattgtagtactttatttttt

SEQ ID NO: 472232 - DNA, 201 bp, Homo sapiens
atttgttagtagttattatagattagttgttacttattgaagacattaggaccagtcaaatattattggattcttagcaggtagaggtgtattggtcatcrtagggttcaaccagaggcctggcttatttggaatgttgtagggaaaattcaagaatcagggagaacagtgctctcaaaacatgggctgcagacttctaat

SEQ ID NO: 472233 - DNA, 201 bp, Homo sapiens
actttgagactcaacacttaacgacattcatagaagaaaatgcacaaaggcacatgcatagaaagtttttgtataacttccaggaattcatgcccccagtscagccacagcaacacgtgattgtaatgatgattgcatttctgaagactttttaaaagcatttttttggatagaagagttaaaatgttgtgaattcttgat

SEQ ID NO: 472234 - DNA, 201 bp, Homo sapiens
ttgtgaattcttgataaattgaataagcaacaaatacactagcagtcactagagggtgatgttttctagcatacaacatcaagttctttccggcaggttgycattgtaggttcctgtgtatgtgcttgcttgtacgtatgtctgtgtgaaagagacagaggcacacacacagactgtctctacctgcataactaaaagaat

SEQ ID NO: 472235 - DNA, 201 bp, Homo sapiens
gcctcaaactcccaagtagctgggactacaggtgcctgccaccatgcctggctaattttttagtagagatggggtttcactgtgttagccaggatggtctygatctcctgacctcgtgatccgcctgcctcagcctcccaaagtgctgggattacaggtgtgagccaccacaccgggacgatttgtgcgtttttatagtac

SEQ ID NO: 472236 - DNA, 201 bp, Homo sapiens
aaaggaagcagctgtgtttgctaagactcgctaacacacttctgccagagacttcctggcaaagttttgaacaatcctgttttcagcatgattcatggctscctgcagacatcacctaattcaggaaatacttttgaaacactgttcatgtgcagtttgtgaaaacaatccaggaaaacaatctttagtgccattgaaaat

SEQ ID NO: 472237 - DNA, 201 bp, Homo sapiens
ctgtgcttagatgaggttatacacagcaggttgtggcctcatacagtggcagggcatcttctcagaaccttgcccctggagcattttatacctctcctgcmctggtgatctcccaggcatggtgctggctgataacatcactgtgaattacaatttccttccctcctctgtaagaaagaagcaatctgtgggcaatcattc

SEQ ID NO: 472238 - DNA, 201 bp, Homo sapiens; identical to SEQ ID NO: 221971

SEQ ID NO: 472239 - DNA, 201 bp, Homo sapiens
tagtgttgtatgccagcaatcatgggaactgtccctggtggaccctaagacctgttttgtgtccagtttcaggaagctctagaacaacgtttattaggaasagtttaatctgctatcgtagttaggaagaggcactttaacctgcacatgctaaaagctggcagttatcagcaagcatatctaggacttaccacccttgta

SEQ ID NO: 472240 - DNA, 201 bp, Homo sapiens
gacattaaattagacatggattatttcaataataatgtacaagtaaagtgtttctttttttttttttttttttttttttttttttttgagatgcagtgtcrctctgtcgcccaggctggagtgtagtggcatgatctcggctcactgcaacctctgcctcctgggttcaagcagttctcctgcctcgccctccctagtagc

SEQ ID NO: 472241 - DNA, 201 bp, Homo sapiens
tcttgataaattgaataagcaacaaatacactagcagtcactagagggtgatgttttctagcatacaacatcaagttctttccggcaggttgccattgtargttcctgtgtatgtgcttgcttgtacgtatgtctgtgtgaaagagacagaggcacacacacagactgtctctacctgcataactaaaagaatttctttgt

SEQ ID NO: 472242 - DNA, 201 bp, Homo sapiens
ggaacacaaaaaggtcacaacttgtttttgcgattgtctattgttttttaataactaacgtgtaagaatagattgaaatagagatttctctgaaacagcgmtggatgaatgcctcaaggggctcactcaacctgtttcaggacttagtgaccattgtttgtgtccatgttcaattgagttcaaatttaatatttaactttt

SEQ ID NO: 472243 - DNA, 201 bp, Homo sapiens
gtttggaaggaaagctgaaggtagggcagccggatggttagctttgcagatatgaggccagtgagaagaaaacagctagttcgatattttgcttaggattragccctgatggttggatactagccatctggggggtggtgggtggggaatccttttgggagaacggacggagtgtgggaatgaggccctggccaggcagat

SEQ ID NO: 472244 - DNA, 201 bp, Homo sapiens
tgggcaatcattctatgaccatggaaatgtcctgttcctcatcaacccgccctagattcagcaccccttgatgattcttgtctctgcgccagctgcaaacratacttctccagccccatgccctccacccatagtctggtcctcagcgctctgcctgagcaagaacccacctcctctcccgtctataggtttattcattta

SEQ ID NO: 472245 - DNA, 201 bp, Homo sapiens
tacaactgcagaagtattatattatggggccacctatggccaaatgaaatgactgtctcaaactttccttcatcttctctgaaaataggttaactctggtrtttactttattagatataaaatatggcaattcaaaaatgacctatagcaattttttttcagcattttgtttgtgccaagtgtgagaaaccctttcttgga

SEQ ID NO: 472246 - DNA, 201 bp, Homo sapiens
aatttctttattttgcttctgcgtttcccagtaaatacttgtctctgactttttgtcattgggacactaaaacttttttcgtctggtgttccccaattcaygaattgcttcttactcaaataaactctttaaaattgtattgttcctcagatttttcttttatagtaactttcccaaactcagaaaggcccccagagctta

SEQ ID NO: 472247 - DNA, 201 bp, Homo sapiens
gctcatgcctgtaatcctagcactttgggaggccgaggcaggcagatcacctgaggtcaggagttcaagaccagcctgaccaacgtggtgaaaccccatckctactaaaaatacaaaattactcgggagtggtggcgcatgcctgtaatcccagctactagggaggctgaggcaagagaattgcttgaacccaggaggcag

SEQ ID NO: 472248 - DNA, 201 bp, Homo sapiens
atagcgtcttgatgctaaattctcatatacctctacacgagaaatatggaggagaaaaacaagcatttacatatattcttcgtcactttgaagatgcatgrcctgaactcgactgcttgtgtttgtttacatatcaggcatacccaggcatctcctgcagccagaggttccattgctgtctttgctcagtcctcttttaaa

SEQ ID NO: 472249 - DNA, 201 bp, Homo sapiens; identical to SEQ ID NO: 221978

SEQ ID NO: 472250 - DNA, 201 bp, Homo sapiens
gcagggagctgtgatcaccactgcactccagcctgagtgacagtcgaggctctgtttccaaaaaaaaaaaaaaaaaaaaagtgattgactgtacttaagtwaattatatttacattagatttcctgtttacttagtactgaataaaatgtaatctacagtctgtgttacacagatggatgtatagaaccaatttataagga

SEQ ID NO: 472251 - DNA, 201 bp, Homo sapiens
gggaaaactgggattactcttctaccatacggagaacttcgaatgatagggacaaacatttgtgtagtgtttgatgatatagataggcatgattatcctcrttctcttttatttttttagataagcaaaccaagactcaggaaatacttgtttactcacatagttggttggtaaaatgacaaagctgatgttgagacctgg

SEQ ID NO: 472252 - DNA, 201 bp, Homo sapiens
gaactgctgtgatgactctgttggacattagagtatatggaggagccatgcctgagatcattttcaatctgaacatccaggatttgtgagaattacagagktctctggtgtatggggaaaactgggattactcttctaccatacggagaacttcgaatgatagggacaaacatttgtgtagtgtttgatgatatagatagg

SEQ ID NO: 472253 - DNA, 201 bp, Homo sapiens
gagagaatgcagagccagtgtcctgtggactgtaaacttattccaactggcttgaaaaaaaaaatctatgcacatactaagtgtttgaagtggaacaaatratgttttgtgaatgtttctaattttcatttaacaggtgataaagtacagattcctttttttttttttttttttttttgagacggagtcttgctctgttgc

SEQ ID NO: 472254 - DNA, 201 bp, Homo sapiens
tggttggatactagccatctggggggtggtgggtggggaatccttttgggagaacggacggagtgtgggaatgaggccctggccaggcagatgtgtgccartctgacactgttcatttcttctgttgtttatgccagttcaggcaacacggaagctgtgtctgtttctcctgtcattgtaaacgtagccctggtctttcaa

SEQ ID NO: 472255 - DNA, 201 bp, Homo sapiens
aggcagatgtgtgccagtctgacactgttcatttcttctgttgtttatgccagttcaggcaacacggaagctgtgtctgtttctcctgtcattgtaaacgyagccctggtctttcaaaaagctgtggttgtgtgggtctttaaggtattccttcagtaattgtggtggccactatttcatttaaggagttagcatcttata

SEQ ID NO: 472256 - DNA, 201 bp, Homo sapiens
atttcatatccagccaaacaaagcttcataagcgaaggagaaataaaatccgtcacagacaaggaaatgctgagacagtttgtcaccaccaggcctgcctyacaagaactcctgaaggaagcactaaacatggaaaggaacaaccggtacgagccactgcaaaaacttaccaaattgtaaagactatcaatgctgtgaaga

SEQ ID NO: 472257 - DNA, 201 bp, Homo sapiens
ttatgagaagtatttcaatctttgaaattcttttgaattaccagcatgattgttccagttttccctcatagttaccattgtgtttggagctctaaaaataytttgttccagtttacatgtttccttctataaagaggaattaaatgtaaatgtaagattaaaacaatgaggccgggcatggtggctcacgcctgtgatccc

SEQ ID NO: 472258 - DNA, 201 bp, Homo sapiens
tgaggctgctgcagtgagccatgactgccactgcactccagcttgggcgacagagtgagactctgtctcaaaaaaaaaaaaaaatctttcagcatgtttcrtatctaagcaaagtccatctgatttacgtaagacatcttcttctgtgatgttcgaatgtgcattcatacaatacccatatgctactgtttatgaattcat

SEQ ID NO: 472259 - DNA, 201 bp, Homo sapiens
tatctttggcgtattttccaagtaatctgtagcagtaagatgataatatcaaagagttggatttgttactgatttatgacactacttttggccactgctgyagtgttgtatgccagcaatcatgggaactgtccctggtggaccctaagacctgttttgtgtccagtttcaggaagctctagaacaacgtttattaggaac

SEQ ID NO: 472260 - DNA, 201 bp, Homo sapiens
ttggtgatgtttgcttccactgcaatcgtgttatagaaggtgatggtaagtatctgtgtgagttttagattggtgccactttgacacaaaaacacttgggkaatgtggaaattcaggttggtgattgctatggtttgaaatgtgatcgttatcagttactttttctctatctttggcgtattttccaagtaatctgtagca

SEQ ID NO: 472261 - DNA, 201 bp, Homo sapiens
ttttgcactatctgtgtgtcaacacagtccacaatgctacagtgacttcttaggaatatcttagtatgatgaaaatagttttgatctctcggatcccttaraaaggtcttggagaccctcaggagttcaaggccatactttaagaaccactgttaaagacataatcctaaatgatgaaggatatgcaggtattggggatat

SEQ ID NO: 472262 - DNA, 201 bp, Homo sapiens
aaatcaggaaaattaagttttattttatattatttaagtaattaaatgataagaaatttacacacaggtgtgtgtgtgtgtccatccttgtgcctcaattrcaaaatttcctgaaataatctccctgagctccatcgtggtgtttctcccaccaagcttttcttgtgattctgtcttgcacaccaccgttctttagaagta

SEQ ID NO: 472263 - DNA, 201 bp, Homo sapiens
ataggcttaaattattgactttttatacaaccagcataggcgctgtcattagagcgtcagacctcttatattcagtctgaacatagtccaaatagtcaccrtatttattagtttatttgaaccactctcaatttcaccatttgatttgctttcctaataggttctaaactctttgaagctcagttattttgttctgttttc

SEQ ID NO: 472264 - DNA, 201 bp, Homo sapiens
tgggtgttcaaactgtcatccgggaagtttttcttttaattgatgagagtgaattactttcattgtaagaagtaaaaacttgtcaaagaacttttactaawtttctctagtagtgataaatcctcaatttagatagccagctatttttaaatgttcagtgttctaaaaattctaacacatcttgaactttgaccacctttt

SEQ ID NO: 472265 - DNA, 201 bp, Homo sapiens
ccattatgatattgttcttctgattatgtttgtgctcaggttaataaagtgtaccaggtgactcccttgtccccttccccctccactccaggaagcatccrtgtatcccctgctctgctctgaaatagaacatttaatgttcatcatgacggcagtggaagatttggttttgccttttgaattattcctgctcttctgtcc

SEQ ID NO: 472266 - DNA, 201 bp, Homo sapiens
cccgtctataggtttattcatttatctatttcttatccatatggactcacagatttctatattttgcatcacttatttgggtgttcaaactgtcatccggraagtttttcttttaattgatgagagtgaattactttcattgtaagaagtaaaaacttgtcaaagaacttttactaattttctctagtagtgataaatcct

SEQ ID NO: 472267 - DNA, 201 bp, Homo sapiens
tctcccgtctataggtttattcatttatctatttcttatccatatggactcacagatttctatattttgcatcacttatttgggtgttcaaactgtcatcygggaagtttttcttttaattgatgagagtgaattactttcattgtaagaagtaaaaacttgtcaaagaacttttactaattttctctagtagtgataaat

SEQ ID NO: 472268 - DNA, 201 bp, Homo sapiens
acaacaagagcgaaactgtctcaaaaaaaaaaaaaaaaaaaaaagttcctctattgagaaaggcttcaacggtttttttcctcattgtttttccttaattrctctctcagtaaataaagtgccatgcctgttacttaggatgttacttagtaacatcctttgtgtgttgctttcccacaggtgaattcatcattggccgag

SEQ ID NO: 472269 - DNA, 201 bp, Homo sapiens
gtttcaccattttggccaggctggtcttgaactccttacctcaggtgatctgcccacctcggcctcccaaagtgttgggattacaggcatgagccaccacrcctggccttgcagaagctttttaacttaatgtgatcccatttgtgcatttttgctttggttgcctgtgcttgtggggtattattcaataaatttttgccc

SEQ ID NO: 472270 - DNA, 201 bp, Homo sapiens
agagatggggtttcaccattttggccaggctggtcttgaactccttacctcaggtgatctgcccacctcggcctcccaaagtgttgggattacaggcatgrgccaccacgcctggccttgcagaagctttttaacttaatgtgatcccatttgtgcatttttgctttggttgcctgtgcttgtggggtattattcaataaa

SEQ ID NO: 472271 - DNA, 201 bp, Homo sapiens
accacgcccggctgattttttgtatttttagtagagatggggtttcaccattttggccaggctggtcttgaactccttacctcaggtgatctgcccacctyggcctcccaaagtgttgggattacaggcatgagccaccacgcctggccttgcagaagctttttaacttaatgtgatcccatttgtgcatttttgctttgg

SEQ ID NO: 472272 - DNA, 201 bp, Homo sapiens
ggtttatgccagtttgactttgggttttctgatttcctgcagctggaagcatcctagtctgctttggtaatgagcactctgagcacaaagtgctgtgtgcrtggtcctcttgtgaaaggcctacattctcaggtgctcctaggcttttctcctagtcttgtgaattgtgcttttaccctgtggtgattattccactgttca

SEQ ID NO: 472273 - DNA, 201 bp, Homo sapiens
agtagagttataaattcttagagtagaactcttagtttagaaacatctttcctgtatatcttcatcaaataattatatttctcctgtgattgtttcgtgtytgtaagttggtggtaccctctctttcagtttgaaggaagaaagtactgtgaacatgactttcagatgctctttgccccttgctgtcatcagtgtggtaag

SEQ ID NO: 472274 - DNA, 201 bp, Homo sapiens
tgtaaagtttcaaagatttaagtgaacatgattcttgaagttgttgatttgaaggtacccaactttgtgtgtgagaacaaattggtttatttctactaatragtacaatgttatctctatgatctgtgaaaaacaaaaggctgaatgtatgaaggggaaattatggatataaaatacaagatctcacagttctattaatac

SEQ ID NO: 472275 - DNA, 201 bp, Homo sapiens
aaggctgaatgtatgaaggggaaattatggatataaaatacaagatctcacagttctattaatactttctagcaaacagactatttaatacctaaaaattktaagtataggactatgaagaaagccattatgagaattcctgttacagtatctttgaaacatactagaaggtaattatagatttaaaatggattgcccctt

SEQ ID NO: 472276 - DNA, 201 bp, Homo sapiens
ctgtagaaggctatgaagatacataatcacaatatcccttgacatccatggatgtgagaaatgctagcctggaaaatgtgagaattggttcctgagaattkttaaatgtcctcagcgacattaaaacacttcaaaataacttgtaaaaatgtgttgttctagagtgatttgcattacatgtaattttaaaagtttattagt

SEQ ID NO: 472277 - DNA, 201 bp, Homo sapiens
ttgtttcaaaatattttatggttgatgagtagataaattgatcacgacttgatgactgttggagttggataatggttcagagggattcgttatactcactygtttaatatatgtttgaaatcttcagtaatcaaaggttttaaattttttgaaatacgtatcatgacgaatggcacagttttaacgtttcccttatgtgta

SEQ ID NO: 472278 - DNA, 201 bp, Homo sapiens
agaaaacattttttgctcttaaagtttaaataaaaggctgtgctctgaaacacgagatgcacgtgcttaaagagcactgtaatacacatgaaaatagttcyggcgtcaaacttgaaattgttcaaaaccgaagcaggtaaaaggtggcatgacaaacactgggcttcctagacttttgttttaaagtattaaatatgactt

SEQ ID NO: 472279 - DNA, 201 bp, Homo sapiens
caaagagagtaaggactttgaagttaggtacaccagagtttcagtaccactcagttggacaagttatataatttttttaagtcttggtttattcttttttwaaaaaaataaggataaaaataactactattattgaacattatttactctctcacagaactcaaaccaccaattcagtgaggcaggtggcattgttatctt

SEQ ID NO: 472280 - DNA, 201 bp, Homo sapiens
tggccaggctggtctcaaactcctgacctcaggtgatgctcccgcctcagccttccaacgtgctgggattacaggtgtgagctactgcacctggcccatcrtaacactttttaagtgtgtagttcagtggtgttaagtatgtttatattgttgtgaaatagctctccagaactttttcatcttgcagaactgaaactctat

SEQ ID NO: 472281 - DNA, 201 bp, Homo sapiens
tctataaagaaattcataagattactctttatttctatgcagtagaagaaaaatgtaaacatggcttaagagcataaaagtcatacatattacaaaattaraaaatgtttttagaaatgtttttaggtttcagggaactgtatggatcaaatctcaacttagaatctctaatccttagaatttgcctctaaagtctgtctt

SEQ ID NO: 472282 - DNA, 201 bp, Homo sapiens
tttattttacttttcttctcttttggtctgcttgtgtgccatcatcatattgttgttaatgttggcactttatactttgtgtaaataaaaatagggctggwaagcccctcactgcttttttgtcaagcttttcagtgactaccattgattaacatttccttgtgaacttgagaatctgtttcaccttgttccaggataata

SEQ ID NO: 472283 - DNA, 201 bp, Homo sapiens
ccatttatactgttccatacaaaagctatttttcaaaaattaatttgaaccaaaactactactatagggaaaagatgccaaaacatgtcccctcacccagrctaaacttgatactgtattattttgttcaatgtaaattgaagaaaatctgtaagtaagtaaaccttaagtgtgaaactaaacatgttctttgttcaaata

SEQ ID NO: 472284 - DNA, 201 bp, Homo sapiens
tgaatgaggagtgtgtcagcgaaactaaaactttcagttgggtctttgtcattttgtaattctaagaatatatagcttcttctctctaaaatataagctcsacagggtattgaattttgttggtttttctttcattcactggcatagcctaaatgtataaaaatagcctgacacatgttaggcactgtattagtctggtct

SEQ ID NO: 472285 - DNA, 201 bp, Homo sapiens
taatcaggttaaatgtttactcaaatgtagtaatagtatgaggccaaaatacatgccttgaaggtggagtgaaatcagttgagtgtcacactgcatatttrtgtaaatagagtaaatgaaaattcaagaatacttccattcaggatatgcccctgccttattttttctaaggtctacttttactactttaataattttggg

SEQ ID NO: 472286 - DNA, 201 bp, Homo sapiens
agagactgacttcagagtctgatttctgtcacttactctgtgggcctggagcaaattacttctccaaggacctatgaaatggatataatggtagctattgyacctggtgtgcatagcgggcattcaataaatgctagccatttcccttaatgaatcactgcccacaaatctggagtcctgggaaaactcaacaacatgcac

SEQ ID NO: 472287 - DNA, 201 bp, Homo sapiens
ttcatactaagatcctggtattatataaaactgaaggattaaaaactgtatagctcatacctcatttcttggtgaacttcaataaaattctaagcatttartaaaattagacttctcgttttgacgtgttctccatgttgattctttgttttagtttatccttatgtgggccgatggcagcttatgtgaatcctcatggat

SEQ ID NO: 472288 - DNA, 201 bp, Homo sapiens
gcatatgcttgtgaaaattatgtagtaaataggtgccaagtaaggtatgtagatagcaagtgctagtgcaatttataggtgccataatccctatggactgrgtcagaaatggcctaatagaaggcagaagagaggccagttccaagcaggggcatagaacagaacaatctgcaagggagttgggagcatataccgctgggt

SEQ ID NO: 472289 - DNA, 201 bp, Homo sapiens
gtcggccctcggccagcgatggagtcgcggcgctttcttcgctgctctgttgccccgagccgtgagccagggtgtcggggggagcatttgctattaagaayaggaaacccatcctctccatcctccttgtgttctgagtttagctcctaggaaatgctctgaaactagaggaccgggtcagattcacagcggttacttttg

SEQ ID NO: 472290 - DNA, 201 bp, Homo sapiens
gggattacaggcacctacaaccacacccggctaacttttgtgtttttagtagagatggggttgcaacatgttggccaggctggtcttgaactcctgacctyaagtgatctgcctgcctcgtcctcccaaagtgctgggattacaggtgtgagccaccacacctggccttcattttaagataatgtagcgactgccagggaa

SEQ ID NO: 472291 - DNA, 201 bp, Homo sapiens
atgtggtcttggcaaccagcaatttctataaagaaattcataagattactctttatttctatgcagtagaagaaaaatgtaaacatggcttaagagcatamaagtcatacatattacaaaattagaaaatgtttttagaaatgtttttaggtttcagggaactgtatggatcaaatctcaacttagaatctctaatcctta

SEQ ID NO: 472292 - DNA, 201 bp, Homo sapiens
tagtattgtgtatttgctcagtatctgaactataagcccatttatactgttccatacaaaagctatttttcaaaaattaatttgaaccaaaactactactmtagggaaaagatgccaaaacatgtcccctcacccaggctaaacttgatactgtattattttgttcaatgtaaattgaagaaaatctgtaagtaagtaaac

SEQ ID NO: 472293 - DNA, 201 bp, Homo sapiens
atgtgcctgttagtaaaaagtagtattgtgtatttgctcagtatctgaactataagcccatttatactgttccatacaaaagctatttttcaaaaattaayttgaaccaaaactactactatagggaaaagatgccaaaacatgtcccctcacccaggctaaacttgatactgtattattttgttcaatgtaaattgaaga

SEQ ID NO: 472294 - DNA, 201 bp, Homo sapiens
ttacatttttattacatatcgatcatgacactatacctatatatgtttttatatagtacctaggtgctgatatggaagaatttcatggcaggactttgcaygatgacgacagctgtcaggtgattccagttcttccacaagtgatgatgatcctgattcccggacagacattacctcttcagctttttcaccctcaagaag

SEQ ID NO: 472295 - DNA, 201 bp, Homo sapiens
aaactgaaactaataatttgatcctgatgtatgggacagcgtatctgtaccagtgctctaaataacaaaagctagggtgacaagtacatgttccttttggraagaagcaaggcaatgtatattaattattctaaaagggctttgttcctttccattttctttaacttctctgagatactgatttgtaaattttgaaaatta

SEQ ID NO: 472296 - DNA, 201 bp, Homo sapiens
cacccagaaatgctatttacataataaatgatcaataaatacttgtagtctatgtgccttgtgacatttagaaattccctgagtatactgtttcagcagtwattcattttgacaaagctgtcatggctgggttttgcacaaattcaagggatacacattaaaacagacacaaaaaagtccagtttattttatcctctttta

SEQ ID NO: 472297 - DNA, 201 bp, Homo sapiens
tgaggccaaaatacatgccttgaaggtggagtgaaatcagttgagtgtcacactgcatatttatgtaaatagagtaaatgaaaattcaagaatacttccawtcaggatatgcccctgccttattttttctaaggtctacttttactactttaataattttgggtttgtgtgacttcactggtctggtttgttcctatagtt

SEQ ID NO: 472298 - DNA, 201 bp, Homo sapiens
gattaacatttccttgtgaacttgagaatctgtttcaccttgttccaggataataatcgtaagaacagtaacatttattgactatttttatataaagaagraaagtcttgaaatcttaggctatgtatagtcaggtgcttcctcagaaagactggtcatttcccaggcatacatcttgtatgtacacttgtgtatctgcca

SEQ ID NO: 472299 - DNA, 201 bp, Homo sapiens
gttgacaactgcagttgtcctcagattactgtatccagttaaatccaaaattgtttttttctgtcagtcatgtaattctgaaaatcagctgtcttatgacmcagtagaactttatatctggaccatattctgtagtaatgtaaaaccggagaatgtttacaaagcaatgatagactaagaaggtgcagaacccattgaatc

SEQ ID NO: 472300 - DNA, 201 bp, Homo sapiens
gtaacttttaactagttgttctctttcccttctaaggtatagcccagtggtttccaaccttgctatgcatcagaatcacctgggaagcttttaaaactatrgaagcttgagttccaacctcatctcccatctccagagagtgatgaggctgcagcatcttttaaaaatgattttcaggtgattctaatgtctctccaggtt

SEQ ID NO: 472301 - DNA, 201 bp, Homo sapiens
caggtctcactgacataggactcttcagaagttcctacttcttagcatgtagagaggaggaggggattgatatcctattggcatcacaagagaagatctcwtacctgtctagactgagaccaataattgttagtcaaaaagttagctgaagctggaaatcacaaaatgttacacatatatagcttaaacattttattttaa

SEQ ID NO: 472302 - DNA, 201 bp, Homo sapiens
acactcagttatttttccttctaataaataagtaaaatgtcagaatttcatccataatatcttgtggtcaaacagtggttattatgaaagactactttagmagtcttaagtataactaataaagcagagacttttaatatatttgactttgtcagtctgacagtgttatatactagcatttgaatatagttacatattcta

SEQ ID NO: 472303 - DNA, 201 bp, Homo sapiens
aaatataaggattatattaagccagaaatgtttctcattaaggaatcctttgttttgagctgtaggtcgtgttttagaacaagtctgtcctcttccatatkgcaactcctaaaatatttgaaaaccagtgtgtccacttgagagacagctctaaactgaacatctctggtaacaagacattccctttgataataaaagttc

SEQ ID NO: 472304 - DNA, 201 bp, Homo sapiens
ttgaaaaccagtgtgtccacttgagagacagctctaaactgaacatctctggtaacaagacattccctttgataataaaagttcccatatttgaacagcakggaatagaataacattgtctcatagattctagtcttctgttaaaaccgcagttacttttgcaccaaactaacatagctagaataggattggagtggcggg

SEQ ID NO: 472305 - DNA, 201 bp, Homo sapiens
gcgtagtacaattccagctgtcagctcagtcccgagtcccttttatgtgtgctgtgttcccacgtttcctgcagatcttactccggcacttgcaagatcawatgactaggtatgaaacatacctagggtaagtatcattcagcgtatgaaacatacctagtcatttgatattgcaggtgcaggagtagggtcttcctcttg

SEQ ID NO: 472306 - DNA, 201 bp, Homo sapiens
acaaatccatcagttgtaaatcaagaaggtaaggaaactgctttctgcaaaataatcaactgccccaaaatgaccacacaggaccttgtcattgcacttayactctcagactcctttagaagcatttgagttttatattctttacaatgtctgtcttgaggagggttttaaaaacaagtactatttcctttgggtcatcac

SEQ ID NO: 472307 - DNA, 201 bp, Homo sapiens
ccacaatctttataataaaaagtagacagacaaatgagtaatttgctacaaaaattagccgggtatgggggcaggggtctgtactcccagctgctcgggakgctgaggcacaagaatctcttgaacctggaaggcaagagtgttgcagtgagccaagattgtgccactgcagtccagcctgggtgacagagtgagaatctg

SEQ ID NO: 472308 - DNA, 201 bp, Homo sapiens
gttattgaacatactaacattttatacttactgtttgtgatatgtgggcatagagatatttcttggtaaaaataatactttgtactaaaaaaattcttgartttctgtgtttgtgatatattcataaaagattagaaattcttctaagagttaaagttagattaaaaattatattttaacatgggatgcttatataccacg

SEQ ID NO: 472309 - DNA, 201 bp, Homo sapiens
tcttttatcattgaatgaaaggaagaaaaggttgacaactgcagttgtcctcagattactgtatccagttaaatccaaaattgtttttttctgtcagtcaygtaattctgaaaatcagctgtcttatgacccagtagaactttatatctggaccatattctgtagtaatgtaaaaccggagaatgtttacaaagcaatgat

SEQ ID NO: 472310 - DNA, 201 bp, Homo sapiens
aaaattgtttttttctgtcagtcatgtaattctgaaaatcagctgtcttatgacccagtagaactttatatctggaccatattctgtagtaatgtaaaacyggagaatgtttacaaagcaatgatagactaagaaggtgcagaacccattgaatcctgcttttcttctagtttgccttttgtttgtttgtttgtttgcttc

SEQ ID NO: 472311 - DNA, 201 bp, Homo sapiens
acaagaatctcttgaacctggaaggcaagagtgttgcagtgagccaagattgtgccactgcagtccagcctgggtgacagagtgagaatctgtctatttawaaaaaaaaaaaaatttatttaaatgtccttcattccacaaatagctagaaacatctgttgcactttttgtatcttttatcattgaatgaaaggaagaaaa

SEQ ID NO: 472312 - DNA, 201 bp, Homo sapiens
cacaagaatctcttgaacctggaaggcaagagtgttgcagtgagccaagattgtgccactgcagtccagcctgggtgacagagtgagaatctgtctatttwaaaaaaaaaaaaaatttatttaaatgtccttcattccacaaatagctagaaacatctgttgcactttttgtatcttttatcattgaatgaaaggaagaaa

SEQ ID NO: 472313 - DNA, 201 bp, Homo sapiens
gcacaagaatctcttgaacctggaaggcaagagtgttgcagtgagccaagattgtgccactgcagtccagcctgggtgacagagtgagaatctgtctattwaaaaaaaaaaaaaaatttatttaaatgtccttcattccacaaatagctagaaacatctgttgcactttttgtatcttttatcattgaatgaaaggaagaa

SEQ ID NO: 472314 - DNA, 201 bp, Homo sapiens
aaatacttgtagtctatgtgccttgtgacatttagaaattccctgagtatactgtttcagcagtaattcattttgacaaagctgtcatggctgggttttgyacaaattcaagggatacacattaaaacagacacaaaaaagtccagtttattttatcctcttttaaaaaggaaacaaagcatttgccttgatcactggata

SEQ ID NO: 472315 - DNA, 201 bp, Homo sapiens
tactgtgtataaggcttgcaacttgaatctgataggccggccttctacagaacacagctggtttcctgggtaatattatggtggtggttgcttttttttttctttttttaccttaattgggcagaaaaatccagagtcctaagcagagttgccacaatctttataataaaaagtagacagacaaatgagtaatttgctaca

SEQ ID NO: 472316 - DNA, 201 bp, Homo sapiens
tatatctctaaaccacttctctgttttgtttttcttactatcggtctttctcaggcatgtacgattatgcttaatcagagatacttagtttttctttttcstgtatgttgtgtgaaatgtttagactttggccttgtgttgaaatactgaacaaaaaaaaaaaggcatggaatattgcataaacttttcatggaatgcctt

SEQ ID NO: 472317 - DNA, 201 bp, Homo sapiens
ttcccttgcttaaacattgatagagtttcttaggttctgaaatttggaatctagatcactaggccaagagaaaccgctagctgatctattttggactccargtgacctacaaactctgttctgctttagagagaccacttagagccattctgtgtgcatcaaaaaggaatctaacagggaaaggggatggcagatatcttt

SEQ ID NO: 472318 - DNA, 201 bp, Homo sapiens
aaacacttcctgtgtaaggactcctttccctgttcttcaaggtgcctttaaaagaagtgagtctagttccaggacttgccttaattatagatactctctttatctgtttataaggtatagtttagttatttttctagtctcttggcaaataacttctaacatggatttgagttcatgtttaacataaaaggattttaccaa

SEQ ID NO: 472319 - DNA, 201 bp, Homo sapiens
aaccgctagctgatctattttggactccaagtgacctacaaactctgttctgctttagagagaccacttagagccattctgtgtgcatcaaaaaggaatcyaacagggaaaggggatggcagatatctttggtgggaactccgtatgcagtgggaccatctgagtggtttggcatgctgcacctttagtgggacgctagct

SEQ ID NO: 472320 - DNA, 201 bp, Homo sapiens
aaaacacttcctgtgtaaggactcctttccctgttcttcaaggtgcctttaaaagaagtgagtctagttccaggacttgccttaattatagatactctctttatctgtttataaggtatagtttagttatttttctagtctcttggcaaataacttctaacatggatttgagttcatgtttaacataaaaggattttacca

SEQ ID NO: 472321 - DNA, 201 bp, Homo sapiens
acctacaaactctgttctgctttagagagaccacttagagccattctgtgtgcatcaaaaaggaatctaacagggaaaggggatggcagatatctttggtrggaactccgtatgcagtgggaccatctgagtggtttggcatgctgcacctttagtgggacgctagcttaccatgagggctggattatgtaacagtgtttg

SEQ ID NO: 472322 - DNA, 201 bp, Homo sapiens
aaaaacacttcctgtgtaaggactcctttccctgttcttcaaggtgcctttaaaagaagtgagtctagttccaggacttgccttaattatagatactctctttatctgtttataaggtatagtttagttatttttctagtctcttggcaaataacttctaacatggatttgagttcatgtttaacataaaaggattttacc

SEQ ID NO: 472323 - DNA, 201 bp, Homo sapiens
atggctgggttttgcacaaattcaagggatacacattaaaacagacacaaaaaagtccagtttattttatcctcttttaaaaaggaaacaaagcatttgcyttgatcactggatattacctcttaacggagtgcttctaaactgtggcatcacccgtgaggtctcacagatacacagtcctggtacgcaatacaagtacta

SEQ ID NO: 472324 - DNA, 201 bp, Homo sapiens
caaaaacacttcctgtgtaaggactcctttccctgttcttcaaggtgcctttaaaagaagtgagtctagttccaggacttgccttaattatagatactctctttatctgtttataaggtatagtttagttatttttctagtctcttggcaaataacttctaacatggatttgagttcatgtttaacataaaaggattttac

SEQ ID NO: 472325 - DNA, 201 bp, Homo sapiens
gttttgcacaaattcaagggatacacattaaaacagacacaaaaaagtccagtttattttatcctcttttaaaaaggaaacaaagcatttgccttgatcaytggatattacctcttaacggagtgcttctaaactgtggcatcacccgtgaggtctcacagatacacagtcctggtacgcaatacaagtactagtgaattg

SEQ ID NO: 472326 - DNA, 201 bp, Homo sapiens
ctctgtatttatctgaaatgtgtagatctccctttccattccacagtgacattgaagatccgtaccttaggttatctttggttttaactttggtatgattwatgaaataaaattattttctgaaagtttctgtatcttaacatcagtatttgatgaatatgtttaaaagataaaacttggaaaatcttggtatttaaaatt

SEQ ID NO: 472327 - DNA, 201 bp, Homo sapiens
ctagactgcgtgctccttatgagaatctaatgataaatgtaatgcacttgaatcattccaaaaccatcctccaccccatctttggaaaaactgttttccaygagactggtccctggtgtcgaaaaggttggggacggctgatctttgcatagtctcaaatataaggattatattaagccagaaatgtttctcattaaggaa

SEQ ID NO: 472328 - DNA, 201 bp, Homo sapiens
attgacatgtcaggtagctccttggagctaaagagagcatagaggcatgtgagatgggattgccagagctcttagggtgtttagttctccccaggtacttytccagaacattcactgtgcaaactttgatagccttaccacattgcactgtcctgacaggattttatgtacgtctccctcaatagataagctgcttgagaa

SEQ ID NO: 472329 - DNA, 201 bp, Homo sapiens
cgcagaaattgacttgagactaggtgctctttaaaaatgttgcttgtttgggcactaattcctatgttatatcctttgactaaatcataattgtcataggraaaaaaaattgagggagcctgtttctactcgtttgtgagatgtgcaattttaagtatagttaatatttataattgctacctaaagaaaaagattactagt

SEQ ID NO: 472330 - DNA, 201 bp, Homo sapiens
tgacatgtgggaattgtgggagttacaattcaagatgagatttgagtggggacacagccagatcatatcaccgtgcaatactttcttccccataccagatrcagacactttaaatacatgtttacccttgtttcttttaactgaactgtgagaaattttgctcccatagtcattttaaatgttactgttgaaataagtatg

SEQ ID NO: 472331 - DNA, 201 bp, Homo sapiens
gaacctggaaggcaagagtgttgcagtgagccaagattgtgccactgcagtccagcctgggtgacagagtgagaatctgtctatttaaaaaaaaaaaaaaatttatttaaatgtccttcattccacaaatagctagaaacatctgttgcactttttgtatcttttatcattgaatgaaaggaagaaaaggttgacaactgc

SEQ ID NO: 472332 - DNA, 201 bp, Homo sapiens
atgttttgaacattctacgttgttgggaggcaaagccgaagccatagttatgaggcttaagaatggaggactgtgatagattacctccaggtaacagattsgttttaagggcttttatgcctgctttcagtagtaaatcctgttcccagagtgaatactactctgctggagaatccgtcattggtcacttttaagtgccta

SEQ ID NO: 472333 - DNA, 201 bp, Homo sapiens
ggtatgaaacatacctagggtaagtatcattcagcgtatgaaacatacctagtcatttgatattgcaggtgcaggagtagggtcttcctcttgttttgttmaatgttaccttgtttttcttgttctggtctgttaaaagtgccttttgatctaccttattccttttctctctcactttcatgtgtcatgtcacatgtcaat

SEQ ID NO: 472334 - DNA, 201 bp, Homo sapiens
tctacaatttctacaattcacaattcaactgaaatttctacaattcacatttttatatggacttaggcatgctcctgtttggatttcagttacaattagargtgataaataatcggtttcccctctccttgagttttatgaaatgaggaacttcatcatgaagtctcaagtaaacgaacattttatctttcttgggattct

SEQ ID NO: 472335 - DNA, 201 bp, Homo sapiens
ttttatgaaatgaggaacttcatcatgaagtctcaagtaaacgaacattttatctttcttgggattctatcacttcttaatgtttgcccttatagtgattmagctgattctcatttaaagtttttacacaaaaacagtttggattatatcttgaggttttcacttcagatactggacaagtaattagtataaaggcaacta

SEQ ID NO: 472336 - DNA, 201 bp, Homo sapiens
cagtaccttaaagttacaaacatttagcaaatgaaatatagggaattagctcacttttgctaagaccatcttccagattgggtactcagagcaacaatgcrtgtcagggattattcacaggtaatgagcatggtaaagtaaaacaactgagaaattcttttccccctaattcttgttgacaatctatatattagactgtct

SEQ ID NO: 472337 - DNA, 201 bp, Homo sapiens
aggcaagagtgttgcagtgagccaagattgtgccactgcagtccagcctgggtgacagagtgagaatctgtctatttaaaaaaaaaaaaaaatttatttawatgtccttcattccacaaatagctagaaacatctgttgcactttttgtatcttttatcattgaatgaaaggaagaaaaggttgacaactgcagttgtcct

SEQ ID NO: 472338 - DNA, 201 bp, Homo sapiens
ttagccgggtatgggggcaggggtctgtactcccagctgctcgggatgctgaggcacaagaatctcttgaacctggaaggcaagagtgttgcagtgagccragattgtgccactgcagtccagcctgggtgacagagtgagaatctgtctatttaaaaaaaaaaaaaaatttatttaaatgtccttcattccacaaatagc

SEQ ID NO: 472339 - DNA, 201 bp, Homo sapiens
aaagcaattaaatttagagcttctgaaaagtgtatctttgacagctggtatatttttgtattgtttatacttgtataaaatgtgtaaccttaaagagaagsgtttatttcaaaaggatattatccgatttgtaagttctctgatgcttatctgactcctaagtttaaaacttgaaaaaccatgtcttgaagatttttctta

SEQ ID NO: 472340 - DNA, 201 bp, Homo sapiens
attatgcttaatcagagatacttagtttttctttttcgtgtatgttgtgtgaaatgtttagactttggccttgtgttgaaatactgaacaaaaaaaaaaakgcatggaatattgcataaacttttcatggaatgcctttcaagagatgctttccaaaaggtgtatcatccaaacttgaaagtgttacttgagtcccttcgt

SEQ ID NO: 472341 - DNA, 201 bp, Homo sapiens
gccagaaagctaaatgggactcttaaatttgaggatgttgaaatgtcttaaactttggcagttgctctgtaaaagctagctagctaatctgttctggtatrtgtctcttcagtgtgtctaattgactaacacacatcacaaatattaaggatgtattatgcatatttgaatctgtcaggatgctccagataaagaatttta

SEQ ID NO: 472342 - DNA, 201 bp, Homo sapiens
actgaacaaaaaaaaaaaggcatggaatattgcataaacttttcatggaatgcctttcaagagatgctttccaaaaggtgtatcatccaaacttgaaagtrttacttgagtcccttcgttatatgacaagtatgttaggtgttgtggagatgaaacgagaggtaatacacaatctgataattgaggtttactgtctaggcg

SEQ ID NO: 472343 - DNA, 201 bp, Homo sapiens
atggctagggaagccttaggaaacttaccatcatggcagaaggggaagcaaacatgttcttcttcacatgatggcaggaagaagtgccaagcaaaagggtmaaaaccgtcttaataaaaccatcagatctcgtgagaactcactatcatgagaaaaccatggcagtaactgtccccatgattcagttacctcccaccagat

SEQ ID NO: 472344 - DNA, 201 bp, Homo sapiens
ctgttcccagagtgaatactactctgctggagaatccgtcattggtcacttttaagtgcctaaactttttggctagtattaaaattttcttgaggtataamcattttatgacatcaatcatggtgttgatatatttaaagaatgcctataaattgctagaacttatcatccattttacccagatataagacaggagccttt

SEQ ID NO: 472345 - DNA, 201 bp, Homo sapiens
tacagtaaaaatcctcctcaaaaaaaaagaggaaattttgtttaaacctgtttggagtatgacttaaatgtttctaagtatattccctgcttgcccagaccatctgcttattcatatatcaaggcttactatgttaatcagaaaagagttgagtatgaaatgtaaagataagtcaaatgggaaacagatactaagaaagta

SEQ ID NO: 472346 - DNA, 201 bp, Homo sapiens
agtgactaccattgattaacatttccttgtgaacttgagaatctgtttcaccttgttccaggataataatcgtaagaacagtaacatttattgactatttytatataaagaagaaaagtcttgaaatcttaggctatgtatagtcaggtgcttcctcagaaagactggtcatttcccaggcatacatcttgtatgtacact

SEQ ID NO: 472347 - DNA, 201 bp, Homo sapiens
ttgtttttttctgtcagtcatgtaattctgaaaatcagctgtcttatgacccagtagaactttatatctggaccatattctgtagtaatgtaaaaccggaraatgtttacaaagcaatgatagactaagaaggtgcagaacccattgaatcctgcttttcttctagtttgccttttgtttgtttgtttgtttgcttcagct

SEQ ID NO: 472348 - DNA, 201 bp, Homo sapiens
tgagtcatcagacttcactgatagctctgaacagtcagcgtggttttttgtttgttttttttttgtttgttttgttttgttttttgtttttcagaaaagcrtcgggagagggcccagagatggtgtagatatagcaataatgcctctccaaattacgtaaattttatttgtagggaaacactgggctttccataattccat

SEQ ID NO: 472349 - DNA, 201 bp, Homo sapiens
gctttttaaatttattttttatgtgagttactacttaaattcttcctgttctatggttaaagcatcttgtttacattacattccgaatttggcccatgcamctgggttgccactggcttaataagacaagaaaagatagagctgggaagaccaaagaagcacatatttgcctgggttcagatcctctgaatttttcctctt

SEQ ID NO: 472350 - DNA, 201 bp, Homo sapiens
aaggagttaggccagtgtaattaggaaacactttcaaaacccactccatctagagacatttcttgttctggaatttgagctctgaaactgtttacttcttytcccatcacagtgcctttctctattcactggtttactgtagggggatttgagaatccccctacagtaaaaatcctcctcaaaaaaaaagaggaaattttg

SEQ ID NO: 472351 - DNA, 201 bp, Homo sapiens
tttttaaatttattttttatgtgagttactacttaaattcttcctgttctatggttaaagcatcttgtttacattacattccgaatttggcccatgcaactgggttgccactggcttaataagacaagaaaagatagagctgggaagaccaaagaagcacatatttgcctgggttcagatcctctgaatttttcctcttgt

SEQ ID NO: 472352 - DNA, 201 bp, Homo sapiens
gagcagtaataattataaagagtcttttctgagcagtaggtctcaacagcaggcttaaaatattcagtaaaccattatctaaacagatgttctgtcatccrgactttgttccatttactacagagcacaggcagagtagatttagcattcttaaagggccctaggatttttggaatggccagtgagcattggctttaactt

SEQ ID NO: 472353 - DNA, 201 bp, Homo sapiens
agtataccgttaactctgaaaacaagacaaggaatggatttttgactctagtaaagattaacatcaggccgcgcacagtggctcatgcctgtaatcccagyattttgggaggccaaggcaggacgatcacctgagctcacgagtttgagatcagcctgaccaacatggagaaaccccatctctactaaaaatacaaagtta

SEQ ID NO: 472354 - DNA, 201 bp, Homo sapiens
tgcagaaaaggaacttaaagtatcgaggattgtagtcttcctgagatatattcaattaactttgaaactgcacacagcatttgccgtggaaacctaaacawctcaaatgacatgaaataaaattatttaagcttctggaagtgttctgtgttatctaccattctgacaaggaagcattagagaagattcagcacgtgtctc

SEQ ID NO: 472355 - DNA, 201 bp, Homo sapiens
atcctgggaacctgttcagttccctcagctgtactatcttcagttttcaaagagggatgctaagaagggattacatgctactctggggttaggactatgtmtcttggattgccctatcttacttggcaccctatgtgaggactaaaactagaatacatttgttactataaataaatgtggcatggtatacctagggaaaaa

SEQ ID NO: 472356 - DNA, 201 bp, Homo sapiens
gtcccatactgatgatagatctgtactaaataacatgtacaaatgaccttttatataggtaaatatttatgataacttttaaagagtgaggttattggctyacagggtaaatgcatttataattctgtcagttttaaaaataattttgaggccaggcacagtggctcacgcctgtaatcccagcactttgggaggctgagg

SEQ ID NO: 472357 - DNA, 201 bp, Homo sapiens
ttacatggtttatcttaagaacaaaataccatggtttgtatttctggttgcattatctgacaatcgttcttattttagaatagtagtttttaaatatttaytttttgagacgtgtccttcctggcccatccagtttaactcagacagaagtgcattatttctgcaggtaattgctgttttctaacttgactgcaatacaac

SEQ ID NO: 472358 - DNA, 201 bp, Homo sapiens
gcaaccacctgccgctcctgcctggtaaccgcccggagtagttccctgtagtcgggagtggggcgaggctcggagccgctagcggtgcagctgggcctggraggcgggcgtgggggcgccaagcctggcgagccagcccagcagggccgcaccggaaagctgcttcacgtcggccctcggccagcgatggagtcgcggcgc

SEQ ID NO: 472359 - DNA, 201 bp, Homo sapiens
actgcaatacaacaaaggaaaagccagtacaagttagaatgtggtgccagtacaagttagaatgtggtcttggcaaccagcaatttctataaagaaattcwtaagattactctttatttctatgcagtagaagaaaaatgtaaacatggcttaagagcataaaagtcatacatattacaaaattagaaaatgtttttagaa

SEQ ID NO: 472360 - DNA, 201 bp, Homo sapiens
tgctggtggatagtcttgttttgctgttgatggctgctgactaatcagggtagtggttgctgaaggttggggtgactacagcaatttcttaagacagcaaygaagtttgccccacagattgactcttcctttcacaaaagatccctctttagcatgcggcgctgtttgatagcatttaagccacaacagaactttcaaaat

SEQ ID NO: 472361 - DNA, 201 bp, Homo sapiens
ttgtgagaattaccaaaatatggcacaggcaggtagttagcacatgctgttggaaaaatggcttgatagacttgcttgaaacagggttgccagaaatcttyaattttttttttgtttgtttgtttttaaaggcagtatctgtgaatcacagtatgcctgtattaagtatttgggtatatagaatagttcttcggcaccaag

SEQ ID NO: 472362 - DNA, 201 bp, Homo sapiens
agacgatgctaaggaatgagaaggcctaaaaggttttaggtgatacaaataactccatcccatatacgtcaggttatctacagggttcccttgcttaaacrttgatagagtttcttaggttctgaaatttggaatctagatcactaggccaagagaaaccgctagctgatctattttggactccaagtgacctacaaactc

SEQ ID NO: 472363 - DNA, 201 bp, Homo sapiens
tttcagagaaagtttcattgtgcaaatctaacttcatggcctcgctggctgtattccttatatgatgctgtaagtaacttaccttaaatttactttatatrtggtaggccatgtcataattaagggtcattaaaaaacaaaggtttagtttttccagtttctagtgccttataacttaagatatcgttaagagtggtggct

SEQ ID NO: 472364 - DNA, 201 bp, Homo sapiens
gaaatcttcaattttttttttgtttgtttgtttttaaaggcagtatctgtgaatcacagtatgcctgtattaagtatttgggtatatagaatagttcttcsgcaccaagatggcttaaaaattcttaaccattaaaaatcctaaattaacgcttctttgcaaagttctaagtatagagtgagagcagtggtagttaattcc

SEQ ID NO: 472365 - DNA, 201 bp, Homo sapiens
ttggctttaacttaaagtcaccagctattagcccctgaaaggagacttagggactttctctggattaggctttggctcaacggaaatttgtggctggtttratcttctgtccagaccattaaaactttctccatatcagtaataagactttttggctttcaccagagtagcatttcatattcacagctttgctgtttgccc

SEQ ID NO: 472366 - DNA, 201 bp, Homo sapiens
ttaatgtaaattattatggataattaatgaagtggacttatatactagtcactgtaccgaatttttattgttcttgcagtagaattcctccagttttcagygaaaacttgtgcagaatgggcacttgatgggcatcagggttataaccaggtatctataagacttcctggtctttatctcagttaactgatctgtttcatg

SEQ ID NO: 472367 - DNA, 201 bp, Homo sapiens
atgatattctcaagtagcattttggaaatgactttattatgacattttaaataacttttaagaaaaaatctaatttatagtttgatcctttgtacagttamactcttaagaacgtgaaaaggaatgcacacagaaaggttgcatgtaactctctagtgttattttaattcatccatgtaaatgcattcttgatttttctct

SEQ ID NO: 472368 - DNA, 201 bp, Homo sapiens
tgcatatgcagtggaccctggccatgtttaaccaggtaaaggagagcattccttaatccttcaaggcaattcagacagtttgtactgcagactaattaacrtgatctgtaagccaggggatcaataatgttactgtttttatcataatcaaatcttatacaatagttgggtaaagcatagttcttaattcagttacctata

SEQ ID NO: 472369 - DNA, 201 bp, Homo sapiens
tgggcatcttctgaacacatagaaattttttttttaataaaaacaggtctcactgacataggactcttcagaagttcctacttcttagcatgtagagaggrggaggggattgatatcctattggcatcacaagagaagatctcttacctgtctagactgagaccaataattgttagtcaaaaagttagctgaagctggaaa

SEQ ID NO: 472370 - DNA, 201 bp, Homo sapiens
tgaagtggaggctacacctagtgatttgcttccgaagggtacaatgtgaaaaggaggggggaaaggaactttacagcggaaaaacctgacacacactgctktagccaggtgatcaaggttaacagcaggaatagttcataatatataggctggatatgtaataaaaacagcacattggcaacagaccccatttctaaaaag

SEQ ID NO: 472371 - DNA, 201 bp, Homo sapiens
agtcatgagtgtgtgtgggttggggagggcggagggggggtgggcatcttctgaacacatagaaattttttttttaataaaaacaggtctcactgacatasgactcttcagaagttcctacttcttagcatgtagagaggaggaggggattgatatcctattggcatcacaagagaagatctcttacctgtctagactgag

SEQ ID NO: 472372 - DNA, 201 bp, Homo sapiens
tatttgccagtagataaacatttaactgtaatttttaagaagcttaatactatgttgtggtagaattgtttgaggaattgttgctctttatactctttctrgtaattgagctattaaatacttctctgtacttctaggtactagagtgttattgaacatactaacattttatacttactgtttgtgatatgtgggcataga

SEQ ID NO: 472373 - DNA, 201 bp, Homo sapiens
gtagctattgtacctggtgtgcatagcgggcattcaataaatgctagccatttcccttaatgaatcactgcccacaaatctggagtcctgggaaaactcamcaacatgcacgacactaaaggaaactgcagttgatctccgctctttagcagcttttcagcaattacaaagacacaatatatgagtttttgcatgttttgc

SEQ ID NO: 472374 - DNA, 201 bp, Homo sapiens
ctgcactccagcttcgccaacagtgagactccatctcaaaaaagaaaaaaagtatacaacccccaaagtcatgagtgtgtgtgggttggggagggcggagsgggggtgggcatcttctgaacacatagaaattttttttttaataaaaacaggtctcactgacataggactcttcagaagttcctacttcttagcatgtag

SEQ ID NO: 472375 - DNA, 201 bp, Homo sapiens
ctgtgcccggcctgtatttcttttaatgtgatttgctctttagtctgttgagcttacatttttattacatatcgatcatgacactatacctatatatgttyttatatagtacctaggtgctgatatggaagaatttcatggcaggactttgcacgatgacgacagctgtcaggtgattccagttcttccacaagtgatgat

SEQ ID NO: 472376 - DNA, 201 bp, Homo sapiens
cgcccaggctggagtgcaatagcacaatctcagctcactgcaacctccacctcctgggttcaagcgattctcctgcctcagcctccccagtagctgggatyacaggcacctacaaccacacccggctaacttttgtgtttttagtagagatggggttgcaacatgttggccaggctggtcttgaactcctgacctcaagtg

SEQ ID NO: 472377 - DNA, 201 bp, Homo sapiens
gaatggtgaatagaagagggaggatactgatcttctgtcgacattcacatcgtgcctctgcatgagatgagtcatcagacttcactgatagctctgaacartcagcgtggttttttgtttgttttttttttgtttgttttgttttgttttttgtttttcagaaaagcgtcgggagagggcccagagatggtgtagatatag

SEQ ID NO: 472378 - DNA, 201 bp, Homo sapiens
gccttcctcatgtctacaaacagcaagacagacaaggcccttttcttcatagaactgatattctggcagtgacaaacactacaaaagtaaccaaacaagayatctgcagatagtgacaagtgtgatgatagtaaattaatgggtatagcactaaacagtgattgtgtagagggtgctttagatctgatcaccaggaggcct

SEQ ID NO: 472379 - DNA, 201 bp, Homo sapiens
aatttgatgtcacaggatgttcttaatttttaaaatttaaaaatgatcaaaattgtgttgatcaacaaaagatatttaagcataaaaatatactacattakgataaaattcttaggaatgtagattgaaataagagtttagggagaaaatgtaatgagataaaatttctcattgttaaagaaaaacttgtatatttgttta

SEQ ID NO: 472380 - DNA, 201 bp, Homo sapiens
aaagacaaatactgtatgattccacctacatgcagtacctagagtagtcaaattcatagaaagtacagtcgtggttgctacgggctgggggatggggaaamgggaagtgagtgcttaacgagtacagagtttcagtttgggaagataaaaaggttctgaagatggacggtggtgatggttgcacagcaacgtgagtgtact

SEQ ID NO: 472381 - DNA, 201 bp, Homo sapiens
cacacccacgttcaaaacagcattattcacaatagccaaaagatggaagcaacccaagtgtccatcaatggctgaatggataagcaaaactaggtaaatayatgcaagaatattagcctaaaaaaggaagttctgagacatgcaacaacatggatgaaccttgaaaacatggcactaagtgaaataaaccagtcacaaaag

SEQ ID NO: 472382 - DNA, 201 bp, Homo sapiens
gcggcggcccccgctctagagagcgtgcgccagggggaaacgcaggagccacgggtgtggcacagaacggagcccagggccacagctgagagtcttaggaracccgggaacctggatgcaggtgcggtggcggggaaggactgcgccctttgggaaccgtctggtcgaccgcgccttctctaagccagcagcacagttccc

SEQ ID NO: 472383 - DNA, 201 bp, Homo sapiens
agggggaaacgcaggagccacgggtgtggcacagaacggagcccagggccacagctgagagtcttaggaaacccgggaacctggatgcaggtgcggtggckgggaaggactgcgccctttgggaaccgtctggtcgaccgcgccttctctaagccagcagcacagttcccacgttttcctgcggtcttgtcgacaaaactg

SEQ ID NO: 472384 - DNA, 201 bp, Homo sapiens
tgcggtggcggggaaggactgcgccctttgggaaccgtctggtcgaccgcgccttctctaagccagcagcacagttcccacgttttcctgcggtcttgtcracaaaactgctgtttgagatctgtttcctacaactaataagggatttgcatttccatttcttcgttctcactgaaggcaaccgaagcaagtggtataatg

SEQ ID NO: 472385 - DNA, 201 bp, Homo sapiens
ctcccgaatttctcttttcaaggtttaagaggaaagctggttcgtggggattggatgggaggccaccaggaaaccaagttcccgcgccagcttcagtgctstcctcttcccgccgcctttgccccgcccacatcactttcgctccagtttttgaaaacgctgcgaagcggaatggtccacaggggaaaacggaggaggggc

SEQ ID NO: 472386 - DNA, 201 bp, Homo sapiens
cccaggaggcggaggttgcttgcagtagctgagaaagcgccactgcactccagtctgggtgacagagccgtatggggaaaaaaaaaaaaaagatttgaatsaatagaaaggaatatctgggttaagataaggggttgtggagaccatggattcatcatgcagattaaacctccaggtagcaggctttagagagatagattg

SEQ ID NO: 472387 - DNA, 201 bp, Homo sapiens
ctagagtagtcaaattcatagaaagtacagtcgtggttgctacgggctgggggatggggaaaagggaagtgagtgcttaacgagtacagagtttcagtttrggaagataaaaaggttctgaagatggacggtggtgatggttgcacagcaacgtgagtgtacttaatgccacaaattgtgcactttaaaatggttaaaatg

SEQ ID NO: 472388 - DNA, 201 bp, Homo sapiens
atttctcttttcaaggtttaagaggaaagctggttcgtggggattggatgggaggccaccaggaaaccaagttcccgcgccagcttcagtgctctcctctycccgccgcctttgccccgcccacatcactttcgctccagtttttgaaaacgctgcgaagcggaatggtccacaggggaaaacggaggaggggccaaagcc

SEQ ID NO: 472389 - DNA, 201 bp, Homo sapiens
ggctgtcgctgctgtgtgtgttgcccgcgccagtcacgtccctaatgggaccctccgtttcggcgtctgtaaggcgaggaggacgatgcgtcccctccctsgcaggattgaggttaggactaaacggggtccgcagcgcccggcagctcccgagcgctctccccagccgcgcctccctccttcccgccacccgtcccgcag

SEQ ID NO: 472390 - DNA, 201 bp, Homo sapiens
ccacccaccttggcctcccaaagtgctgggattacaggtgtgaggcaccgtgcctggcctacatttctttttataatttgtaatactgactgtatatactstcattgtaatccttagtgatatatactgacacatagctctcctattattgtgttgcaccaaggtccaaattatgaggttgagcgtcagccaggaaaatct

SEQ ID NO: 472391 - DNA, 201 bp, Homo sapiens
aggagagacagggtttcaccatgttggtcaggcttgtctcagacttctgatctgaagtgatctgcccacctcggcctcccaaagtgctgggattaaaggcrtgagccaccatgcccagccttacttgtgttattttttaaaaacctgatacataataattgtgaggtagacagggcttgactctggaggcagggctctgac

SEQ ID NO: 472392 - DNA, 201 bp, Homo sapiens
ttccctgccaggagcagtggctcatgcctgtaattacagcacttttggaggctgaggcgggcagattgcttgagcctgggagtttgagaccagcctggacmacatggagaaaccccatctctactaaaaaaatacaaaaatagacgggcatggtagtacctgtagtcccagctactcaggaggctgaggtgggaggatcac

SEQ ID NO: 472393 - DNA, 201 bp, Homo sapiens
accctgtctcaaaaaaaaaataacataattctcattttttatagccttcagttatgatttagaaaaggtttatcttcatttggagttaattatattcaatkggctgcctctgaactctaactttctctgacaagcctttctgtcagatagatcaagactgggtgaaaagttctttaaaagttcagagttctctctctttca

SEQ ID NO: 472394 - DNA, 201 bp, Homo sapiens
aaataaaccagtcacaaaaggacactgtgattgcaccactgcactccagcctgggcgacagagtgagaccctgtcttagaaaacaaaaaacaaaacaaaayaaagcaaaagacaaatactgtatgattccacctacatgcagtacctagagtagtcaaattcatagaaagtacagtcgtggttgctacgggctgggggatg

SEQ ID NO: 472395 - DNA, 201 bp, Homo sapiens
aataaaccagtcacaaaaggacactgtgattgcaccactgcactccagcctgggcgacagagtgagaccctgtcttagaaaacaaaaaacaaaacaaaacraagcaaaagacaaatactgtatgattccacctacatgcagtacctagagtagtcaaattcatagaaagtacagtcgtggttgctacgggctgggggatgg

SEQ ID NO: 472396 - DNA, 201 bp, Homo sapiens
taaaatttaaaaatgatcaaaattgtgttgatcaacaaaagatatttaagcataaaaatatactacattaggataaaattcttaggaatgtagattgaaakaagagtttagggagaaaatgtaatgagataaaatttctcattgttaaagaaaaacttgtatatttgtttaaatggatgatgctgggtcaaattgcgatga

SEQ ID NO: 472397 - DNA, 201 bp, Homo sapiens
tggttgcacagcaacgtgagtgtacttaatgccacaaattgtgcactttaaaatggttaaaatggtaaattaatgccatgtgtattttaccacaatttaaraaaagactatacagaacctattggtctttacaaaacaaagcaatgaatcttagatttttttccaaaaaagtcaattatatatattttaagtgcaaaagca

SEQ ID NO: 472398 - DNA, 201 bp, Homo sapiens
atatatactgacacatagctctcctattattgtgttgcaccaaggtccaaattatgaggttgagcgtcagccaggaaaatcttgtgttttccataaaataygtatgtcaaaagacagcgctgttgtgccaattttaaaaagtaactatgtagcacacccacgttcaaaacagcattattcacaatagccaaaagatggaag

SEQ ID NO: 472399 - DNA, 201 bp, Homo sapiens
ttgaaggagggaagggagtaaaccagatatttgggaagaagagtggtagtggaaaagagagagcaagagcaaagactgagaggaaggaccttgccagccaygttcaaagaacagtaagcaggattcatgtctgcagtagagacagtgatggggcagaggttagagatgaggtcagagaagcagttttggaccaaattatat

SEQ ID NO: 472400 - DNA, 201 bp, Homo sapiens
tccaggggagcccgcgcggaaacgcggaccaggcgcttcggcccggatgctggatccaggagaaggggacctcgcttgccgtgtccaccgccgcggccccrgcgccaagaacagagcctggccgtgagtgaacgactggccggggtacaaatggttttgaagcacttgaagctcacaggcaaaggctaagagtctaaatcc

SEQ ID NO: 472401 - DNA, 201 bp, Homo sapiens
tatgcaaaaaacctcttcaatcccactaaatgagctgtacccaccactcattaacctctgggaaggtgacagcgagaaagacaaagatggttctgcagacmccaagccaacccaggtcgacacatccagaagctattacatgtggtaactcagaggatattttgcttctggtagtaaggagcacaaagacgtttttgcttt

SEQ ID NO: 472402 - DNA, 201 bp, Homo sapiens
cagtgaaggtggaggataaggcagatcatctggacacttatggaaaaagatggctagaaaacagggaagtttcaagggcctgactattcagatcaaccagyctcatcattttagttttatgttgtaagtgttcagtttctgaaacaatatacagtgttacatgaaagtcagagctagaaggaaccaagtaagcagctaatt

SEQ ID NO: 472403 - DNA, 201 bp, Homo sapiens
aactagccttcatgcagaaaagggaagccttttccttttcccttggcctgtagacaatagcattagacaatttttggagtgacaagatcacttcctcctgsctagttttaaagagtgaccacaaggaacagcttcgcccttagaaataacttttgattatttgataatggaaaggaaaaaaagtgtacaactctcctctag

SEQ ID NO: 472404 - DNA, 201 bp, Homo sapiens
gaatcaaacactgccccactatcttccctattacacagagaaagcctatattctataacaaaatatgagatccacacagacaaacagaggtgagggacagrccaagtcttgataacctcgcttggtcctctggatcaggctgtgcctaaaactgtgataaacgttcacttcaaagttgtgtgaaccaaaaattctctttta

SEQ ID NO: 472405 - DNA, 201 bp, Homo sapiens
aagtagattgaaatctatagctagatccccaggtgtaacgtttcattttttaaaatcaatatgaaatggaagcattttgcagtaagtatttttggctccarctctaaagtactaaggctattatgatgcatttagtcatccagatagttgatcatattcagcctatacttgttttcactctcaatctttctgtcctgcata

SEQ ID NO: 472406 - DNA, 201 bp, Homo sapiens
aatatagacttgccctgtgacttggtttgaccagtggaatgtggtggaagtgactaagatacttccaagctagcacaaaggagatctgctgtttttgctaycaccttcttggaatattctgggaaccataccactgtggagtgagaagcccaagccatgtaggaggccacagggagcagaaccaggacgtgccagtcaaca

SEQ ID NO: 472407 - DNA, 201 bp, Homo sapiens
gtgttaaggccccacggaaagctaccactgtgttaaaaatagaaataaaaaacaataaaatttcaaattgatcatttctagttactaaaagaagaaaatawtagactttcccttcctgattatgttcattaccatagatttcaatttgtctcaaattacaaggaaaagtagattgaaatctatagctagatccccaggtgt

SEQ ID NO: 472408 - DNA, 201 bp, Homo sapiens
atgagagacacagttcagtccataacagacagactgatggatggatgtgaatggatggacagatggatggatggatacatggatggatgcatggatggatrcatggatggatgcatggatgggagggacggagggagggagggagagagggaagaagagaaggaaggaaggagggaaggaagagagagaaggacggaggga

SEQ ID NO: 472409 - DNA, 201 bp, Homo sapiens
aaaaaaaaaaaaaaaaaactgagtctcagcaagtttaaataacttgatcagaccacacattaatgatggagctaggattgaattcagacatgtcctatatmtttcattcattcatgagtatattaatttattcagtgaatatctttgtcctaaagaaatgccactgtagcagaaagatggttgcaaattctttgtcactgt

SEQ ID NO: 472410 - DNA, 201 bp, Homo sapiens
gagcacctctctccagacagtagtatgcagaatatcctcccttccagacctttttccttttaaaacagcaagcattgcgtctctctgttcttctcccccayaggaatcaatgcaatcattgtgttaaggccccacggaaagctaccactgtgttaaaaatagaaataaaaaacaataaaatttcaaattgatcatttctag

SEQ ID NO: 472411 - DNA, 201 bp, Homo sapiens
atccctttgtaaacataaaagattattactcctcagtaggtcaccattttacaaggcagatcatttcattttaagagcttccaaatactgagccaacacawggtttttttggtaactttcttccaatgtgtctaggtccatagttttcagcgcatgccttctcccgaagtcttcagggtgagactccacaatgccttaggt

SEQ ID NO: 472412 - DNA, 201 bp, Homo sapiens
tgttagtttgctgcgaatgatggtttccagcttcatccatgtccctgcaaaggacatgaactcatcctttttcatggctgcatagtattccatggtatatmtatatgccacattttctttatccagtctatcattgatgggcatttgggttggttccaagtctttgctattgtgaacagtgctgcagtaaacatacatgtg

SEQ ID NO: 472413 - DNA, 201 bp, Homo sapiens
tttgaagccagaaagcgtgatgccttcagctttgttccttttgcttaggattgtttggctataggagctctgttttggttccatgtgaaatttaaagtagtttttttataattctgtgagtaaagtcaatggtagcttgatagggatagcactgaatctataaattactttgggcagtatggccattttcacaatattgat

SEQ ID NO: 472414 - DNA, 201 bp, Homo sapiens
gttcctatttggccatcttcttccctccacccctgcctcaaatagacctatatattttttttaaaattgagataactaacctaaaagccttgactacaccrttatgcaatctatgcatgaaacaaaattacccttgtgcaccataagtttacacaaatttttatttttttaatttttaatttttgtgggtgcatagtaggt

SEQ ID NO: 472415 - DNA, 201 bp, Homo sapiens
gaatagggtatccatcctctcaagcatttatccattgagttgcaaacaatccaattacacactttaagttattatgaaatgtagttataattgactatagycatcctgttatgttatcaaatagtaaatcttattcattatttctagccttttttagtacccattaatcatcccaaccttctcccccatgaacccctgact

SEQ ID NO: 472416 - DNA, 201 bp, Homo sapiens
ttaaggagatttgaggccgagatgatggggttttctaaatatacaatcatgtcatctgcaaacagaggcaatttgacttcttctcttcctatatgaatacsctttccttctcttgcctgattgccctggccagaacttccaatactatgttgaataggagtggtgagagagggcatccttgtctcatgccggttttcaaag

SEQ ID NO: 472417 - DNA, 201 bp, Homo sapiens
acaatccaattacacactttaagttattatgaaatgtagttataattgactatagccatcctgttatgttatcaaatagtaaatcttattcattatttctrgccttttttagtacccattaatcatcccaaccttctcccccatgaacccctgactacccttcgcaactctggtaaggatccttctactttctatatccat

SEQ ID NO: 472418 - DNA, 201 bp, Homo sapiens
tgcacttattctaaaattgacctcataattggaagtaaaacattcctcagcaaatgcaaaagaacggaattcataacaaacagtctctcagaccacaatgyaacaatcaaattagaactcaggattaagaaactcactcaaaaccacacaactacatggaaactgaacaacctgctcctgaatgactactggataaataac

SEQ ID NO: 472419 - DNA, 201 bp, Homo sapiens
atccaattacacactttaagttattatgaaatgtagttataattgactatagccatcctgttatgttatcaaatagtaaatcttattcattatttctagcyttttttagtacccattaatcatcccaaccttctcccccatgaacccctgactacccttcgcaactctggtaaggatccttctactttctatatccatgaa

SEQ ID NO: 472420 - DNA, 201 bp, Homo sapiens
aacatcagagtagaactgaaggagatagagatacacacaaaaaaaaaaaaccttcaaaaaatcaatgaatccagcagctggctttttgaaaagattaacaraatagatagatggctagccagactaataaagaagaaaagagagaagaattgaatagacacaataaaaaatgataaaggggatatcaccactgatcccaca

SEQ ID NO: 472421 - DNA, 201 bp, Homo sapiens
tagtaaatcttattcattatttctagccttttttagtacccattaatcatcccaaccttctcccccatgaacccctgactacccttcgcaactctggtaasgatccttctactttctatatccatgaattacattgttttgacttttagatgccacaaataagtgagaacatctgatgtttgtcattctgtgcctggctta

SEQ ID NO: 472422 - DNA, 201 bp, Homo sapiens
tccctgaatagaacaataacaagttctgaaattgaggcaataattaatagcctaccaaccaaaaaaagcctgaccagacagattcacagccagattctacyagaggtacaaagaggagctggtaccgttccttctgaaactattccgaagaatagagtaagagggactcctccttaactcattttatgaggtcagcatcat

SEQ ID NO: 472423 - DNA, 201 bp, Homo sapiens
gtacccattaatcatcccaaccttctcccccatgaacccctgactacccttcgcaactctggtaaggatccttctactttctatatccatgaattacattsttttgacttttagatgccacaaataagtgagaacatctgatgtttgtcattctgtgcctggcttatctcatttaacaaaatgatctccagttccatctat

SEQ ID NO: 472424 - DNA, 201 bp, Homo sapiens
aacaagttctgaaattgaggcaataattaatagcctaccaaccaaaaaaagcctgaccagacagattcacagccagattctactagaggtacaaagaggarctggtaccgttccttctgaaactattccgaagaatagagtaagagggactcctccttaactcattttatgaggtcagcatcatcctgataccaaaaccta

SEQ ID NO: 472425 - DNA, 201 bp, Homo sapiens
tctgtgcctggcttatctcatttaacaaaatgatctccagttccatctatgttgttgtaaatgatgaatctcattctttttatggctgaaaggtactccaytgtatatatgcaccacagtttctttattcattcgtctgttgatggaaactaagtttcttccaaatcttgttgtagacagtgctgtaacaaacatgggagt

SEQ ID NO: 472426 - DNA, 201 bp, Homo sapiens
ggcaataattaatagcctaccaaccaaaaaaagcctgaccagacagattcacagccagattctactagaggtacaaagaggagctggtaccgttccttctraaactattccgaagaatagagtaagagggactcctccttaactcattttatgaggtcagcatcatcctgataccaaaacctagcagagacaaaacaaaaa

SEQ ID NO: 472427 - DNA, 201 bp, Homo sapiens
cttatctcatttaacaaaatgatctccagttccatctatgttgttgtaaatgatgaatctcattctttttatggctgaaaggtactccactgtatatatgyaccacagtttctttattcattcgtctgttgatggaaactaagtttcttccaaatcttgttgtagacagtgctgtaacaaacatgggagtgtagacatctc

SEQ ID NO: 472428 - DNA, 201 bp, Homo sapiens
agtgaggtgatatctcattgtagttttgatttgcatttctctgatgatcaatgatactgtgcaccttttcatgtgtgtgtttgccatctgtatgtcttgaraaatatctttcacccatgttttgattaaattattatgttttttcctatagagttgtttgagctccttaaatactctgattactaaccccttgtcaaatag

SEQ ID NO: 472429 - DNA, 201 bp, Homo sapiens
agtctagtttctttcttctgcttatggatatccagttttcccagcaccatttattgaagatactgtcttttccccagtgtatgttcttggcgcatttgtcsaaaatgagttcactatacgtgtgtgaatttgtttctgtgttctctattctgctccattggtctctgtctctgtttttatgccagtaccatgctgttttgg

SEQ ID NO: 472430 - DNA, 201 bp, Homo sapiens
tgtaacggtctgcatttgcagtttccattcttcatgtagctacaagcatctgactactttattatgtcttttagtgtaaccaagctcaagcccttaggtaytaactacatattatgttacttttaattattttacacttttaaacctttatataaaaattagggcattatattaatttattttctatatgaaattaagtat

SEQ ID NO: 472431 - DNA, 201 bp, Homo sapiens
acaggagccctgcatgaaccccttaaaccatatttgttggtggctgcctactctcttcttgtgtaagaccagtcctgctgaagaagccactggtgagcatrgtgagcacctctctccagacagtagtatgcagaatatcctcccttccagacctttttccttttaaaacagcaagcattgcgtctctctgttcttctcccc

SEQ ID NO: 472432 - DNA, 201 bp, Homo sapiens
tctctcaagttgatatcctgcagagagcagagctcatgatcttctgtactagagagacacaatgtcatccagagggcaaaaaccagcttataaatccttayaaacccttccttccttccccattctatagatgtgtaaattgaggctcaaaactattaagtaatttcctgtagtcactgataaatggcagaaccaggatca

SEQ ID NO: 472433 - DNA, 201 bp, Homo sapiens
tttagtgatattgataagatctatgatgcatcactacttttggaaaatgttgctgattccaaagatattagcactggatgctatctttgaaatgatgcagyattgagcagtactaatgtagcttaactgttggtgaaattgccagagtattagcatgtctatgattccctctgtctctcaagttgatatcctgcagagagc

SEQ ID NO: 472434 - DNA, 201 bp, Homo sapiens
catcaggaacattaataataaatgtagatttcagttcagactattctcttcaaaataatggtttcagttatttgagactatttgctacttgaacacagccyatatttactgcacagcaatgatccataattaagctttaactttccatgtgcctagatatgagtccatttttagtgatattgataagatctatgatgcatc

SEQ ID NO: 472435 - DNA, 201 bp, Homo sapiens
agattctactagaggtacaaagaggagctggtaccgttccttctgaaactattccgaagaatagagtaagagggactcctccttaactcattttatgaggycagcatcatcctgataccaaaacctagcagagacaaaacaaaaaaagagaattttaggccaatatccctgatgaacgttgatgtgaaaatactcaataaa

SEQ ID NO: 472436 - DNA, 201 bp, Homo sapiens
gcaagcataccaacctttcagtatccgtactctctctatacctttcctcctgttaataatatagtattcttatccctaagaaagcaacctcacctcctcasaggcttttttctacaattaatggatctactgcatgatttccaacagcatgtaaacatggtctatatcacccaacaaaaaaaaaggtgtgtatatgtggtg

SEQ ID NO: 472437 - DNA, 201 bp, Homo sapiens
gaatagagtaagagggactcctccttaactcattttatgaggtcagcatcatcctgataccaaaacctagcagagacaaaacaaaaaaagagaattttagrccaatatccctgatgaacgttgatgtgaaaatactcaataaaatgctggcaaaccgaatccagcagcacatcaaaaagcttctccaccacagtcaagtcg

SEQ ID NO: 472438 - DNA, 201 bp, Homo sapiens
agagggactcctccttaactcattttatgaggtcagcatcatcctgataccaaaacctagcagagacaaaacaaaaaaagagaattttaggccaatatccytgatgaacgttgatgtgaaaatactcaataaaatgctggcaaaccgaatccagcagcacatcaaaaagcttctccaccacagtcaagtcggcttcatccc

SEQ ID NO: 472439 - DNA, 201 bp, Homo sapiens
tcctacagttttgttctttttgcttagaatagctttgggtattctggttccatgtaaactttaggattgttttttctatttctgtgaagaatgttattggwatttgaaagagattccattgaatctatatattactttgggttatatagacattttaacaacattgattcttccaatctatgaacatgagatattttttca

SEQ ID NO: 472440 - DNA, 201 bp, Homo sapiens
cctccttaactcattttatgaggtcagcatcatcctgataccaaaacctagcagagacaaaacaaaaaaagagaattttaggccaatatccctgatgaacrttgatgtgaaaatactcaataaaatgctggcaaaccgaatccagcagcacatcaaaaagcttctccaccacagtcaagtcggcttcatccctgggatgca

SEQ ID NO: 472441 - DNA, 201 bp, Homo sapiens
gggttatatagacattttaacaacattgattcttccaatctatgaacatgagatattttttcattttttgatgtcctcttcaatttctttcattagtgatytatagtttttattatagaggtctttcttttcttggttaattcctatatatttaattttatgtgtggctattataaatgattgcttttttatttctttttc

SEQ ID NO: 472442 - DNA, 201 bp, Homo sapiens
tgataccaaaacctagcagagacaaaacaaaaaaagagaattttaggccaatatccctgatgaacgttgatgtgaaaatactcaataaaatgctggcaaascgaatccagcagcacatcaaaaagcttctccaccacagtcaagtcggcttcatccctgggatgcaatccgtcacataaacagaatcaatgacaaaaacca

SEQ ID NO: 472443 - DNA, 201 bp, Homo sapiens
atatagacattttaacaacattgattcttccaatctatgaacatgagatattttttcattttttgatgtcctcttcaatttctttcattagtgatctatartttttattatagaggtctttcttttcttggttaattcctatatatttaattttatgtgtggctattataaatgattgcttttttatttctttttcacatt

SEQ ID NO: 472444 - DNA, 201 bp, Homo sapiens
aaaaaaagagaattttaggccaatatccctgatgaacgttgatgtgaaaatactcaataaaatgctggcaaaccgaatccagcagcacatcaaaaagcttmtccaccacagtcaagtcggcttcatccctgggatgcaatccgtcacataaacagaatcaatgacaaaaaccacatctcaatagatatagaaaaggccttc

SEQ ID NO: 472445 - DNA, 201 bp, Homo sapiens
ggccaatatccctgatgaacgttgatgtgaaaatactcaataaaatgctggcaaaccgaatccagcagcacatcaaaaagcttctccaccacagtcaagtsggcttcatccctgggatgcaatccgtcacataaacagaatcaatgacaaaaaccacatctcaatagatatagaaaaggccttcgataaaattcaacacca

SEQ ID NO: 472446 - DNA, 201 bp, Homo sapiens
catccctgtctttggccacttccttaaagactcactgtggcccccaagctttcagaggaaaggtttcaacaagcaggcacacctctacttcattttcttgyggcgattaaaaatgtctagttctttaagtccttattagaaatagtcataaaaaatagtttagaaaaggaatttgaaatcaagtttattttaagagttcag

SEQ ID NO: 472447 - DNA, 201 bp, Homo sapiens
tttttcattttttgatgtcctcttcaatttctttcattagtgatctatagtttttattatagaggtctttcttttcttggttaattcctatatatttaatkttatgtgtggctattataaatgattgcttttttatttctttttcacattgctcactggtggcatacagaaatgctactgatttttgtctgctgattttgt

SEQ ID NO: 472448 - DNA, 201 bp, Homo sapiens
tggcgtgaacccgggaagcggagcttgcagtgagccgagattgcgccactgcagtccgcagtccggcctgggcgacagagcgagactccatcccaaaaagaaaaaaaaaaaaaaaaaagatctcattgctgctggaaattagcctgggtcaatcctattactgggtatatacccagagggatataaagcactctaccatat

SEQ ID NO: 472449 - DNA, 201 bp, Homo sapiens
atgatcttatcatagcattggattcttttgtattttaatggttatgaaggacaatatggatattcaactaaaattattctttttacttttaataatgaacmtattagttgaagagctattatagaatgcactatgatttataatgcattttaatgttctcagctgttcctttgcaccatatgattacacaagcctagactg

SEQ ID NO: 472450 - DNA, 201 bp, Homo sapiens
ttttttgatgtcctcttcaatttctttcattagtgatctatagtttttattatagaggtctttcttttcttggttaattcctatatatttaattttatgtrtggctattataaatgattgcttttttatttctttttcacattgctcactggtggcatacagaaatgctactgatttttgtctgctgattttgtatcctgc

SEQ ID NO: 472451 - DNA, 201 bp, Homo sapiens
aatactgcatattctcacttataagtgggagctaaatgataagaacttatgaacacaaagaaggaaacatcagacactggggtctagttgagtgggaaagktgggaggagggagaggagcagaaaagataattattgggtactgggtttaattcctgggtgatgaaataatctgtataataaacccccataacatgacttt

SEQ ID NO: 472452 - DNA, 201 bp, Homo sapiens
gtcctcttcaatttctttcattagtgatctatagtttttattatagaggtctttcttttcttggttaattcctatatatttaattttatgtgtggctattrtaaatgattgcttttttatttctttttcacattgctcactggtggcatacagaaatgctactgatttttgtctgctgattttgtatcctgcaactttact

SEQ ID NO: 472453 - DNA, 201 bp, Homo sapiens
atatttaattttatgtgtggctattataaatgattgcttttttatttctttttcacattgctcactggtggcatacagaaatgctactgatttttgtctgytgattttgtatcctgcaactttactgaatttatcagttctaattgtttccttgtggaatctttaggtttttcccaagtataagatcatatcatctgcaaa

SEQ ID NO: 472454 - DNA, 201 bp, Homo sapiens
tgaattcttcctttccctttttttttcttctttttgagacagagtcttgttgtgtcacccaggctggagtgcagtggcatgatctcgattcgctgcaatcyccacctcctgggttcaagcaattattgtgtctcagcctcccaagtagctaggactacaggagtgtaccaccacacctggctaatgctttgtgttattagt

SEQ ID NO: 472455 - DNA, 201 bp, Homo sapiens
tgaatgcacaaaatatatgtagatactaatgttttatcatttaataccataaaatatatacaaatctattataaaaagttaaaatttaacaaaactttggyatacaaacacaagaccttacatggcaatattcacagttgagagaaacgtaaacaaacataaagatacagtattaaatcataaatgcataaaattaactgt

SEQ ID NO: 472456 - DNA, 201 bp, Homo sapiens
attttttaagcaggacagtagtcactaaccataatgagaaggactgatgaattggactacagttgacctttgactaacaagggttcaaactatgcaggccyatttatatgcagagtttttcaataaatgtactggaaaattttttggagatttgccacaatttgaaaaaactcacagatggaccatgtagtgtagtccaaa

SEQ ID NO: 472457 - DNA, 201 bp, Homo sapiens
caaatttctaggagataggaaaatattgttatgacttgagtagacaaagattttttaagcaggacagtagtcactaaccataatgagaaggactgatgaaytggactacagttgacctttgactaacaagggttcaaactatgcaggcccatttatatgcagagtttttcaataaatgtactggaaaattttttggagatt

SEQ ID NO: 472458 - DNA, 201 bp, Homo sapiens
aagaatgagccattaaagagttgtctgaaaaaatgtaatgtatggagttcatgcatgcactcattcaataagcaggctttgagctgctataaccctcaggsggcatgtcctagagataatgagatcttagtattaaacacctctgtaacagaaatattatcatacaacaatgtagcaatatggctagacatttggaaatta

SEQ ID NO: 472459 - DNA, 201 bp, Homo sapiens
gtcaaaatgtctttcttataattaagaatcatggttctcagaggagacaagtggcaactcaatagctcaaaacttactgaaaaatgccactgcatattgawgtgccacacacttgagcattcatacccatctctccaatcccaatggctttgctcagtgaagagagcaaggaagccatccatgcaaggacactttaagtag

SEQ ID NO: 472460 - DNA, 201 bp, Homo sapiens
tactctatcttatcttcataactatccaatgaggtgagtaagttattattctcttttttataggttagatcgatgagattaggccaggcgtggtggctcaygcctgtaatcccagcattttgggaggccgagatgagcggatctcctgaggttgggaattcgagaccagcctgaccaacatggagaaaccccgtctctact

SEQ ID NO: 472461 - DNA, 201 bp, Homo sapiens
atactgtctcctaagtctacaatcataactaaaccatttcagtcagagggaaatagggaatatagtggcaaggaagcaaatcacatagcaagagggtgacagagaggttaaatcactacatcaacagagagtggtgtagtaaagggaggaagggctgggaaaactgcatgagggtggattacagagagctctgaatgccat

SEQ ID NO: 472462 - DNA, 201 bp, Homo sapiens
tactgtctcctaagtctacaatcataactaaaccatttcagtcagagggaaatagggaatatagtggcaaggaagcaaatcacatagcaagagggtgacagagaggttaaatcactacatcaacagagagtggtgtagtaaagggaggaagggctgggaaaactgcatgagggtggattacagagagctctgaatgccatt

SEQ ID NO: 472463 - DNA, 201 bp, Homo sapiens
gaggtatttctttctttggcagtatcttgcttttgtgaatcactttattaaaaaaaatcactttcttcccattcttaaggggttttggcaaacagaatttyagatcttgaaacaaatgagctgcaacagaaaaataagtacctgagctcgaggtatcccttcccaaagccttcacttattggtgagaaaaacctgggccca

SEQ ID NO: 472464 - DNA, 201 bp, Homo sapiens
attatatgaacctctggactctggagtaagcatgtaaatatatacgtatatgtctgtgtgtgtgtgtttctgtgtctgtgtgtattacttatatttatgtktatatttatatttataggcattttgaggtcctgtggtaaaggccttggtcatgtctgcataaaagtcagcatgggatatcctcaaagctgcaaggctcca

SEQ ID NO: 472465 - DNA, 201 bp, Homo sapiens
atcttccccaacccttcaaagatgggaaagaacttcatttagatgttccatcctaccccgtttttttactgatctgggcaataccaggtccccttaacacacacacacacacacacacacacacacacacacacacacacacacacacacttcctgcaatatattgtgctgaaaatcagccttgctgtcacagttccatta

SEQ ID NO: 472466 - DNA, 201 bp, Homo sapiens
tcttccccaacccttcaaagatgggaaagaacttcatttagatgttccatcctaccccgtttttttactgatctgggcaataccaggtccccttaacacacacacacacacacacacacacacacacacacacacacacacacacacacttcctgcaatatattgtgctgaaaatcagccttgctgtcacagttccattat

SEQ ID NO: 472467 - DNA, 201 bp, Homo sapiens
cttccccaacccttcaaagatgggaaagaacttcatttagatgttccatcctaccccgtttttttactgatctgggcaataccaggtccccttaacacacacacacacacacacacacacacacacacacacacacacacacacacacttcctgcaatatattgtgctgaaaatcagccttgctgtcacagttccattatc

SEQ ID NO: 472468 - DNA, 201 bp, Homo sapiens
ttccccaacccttcaaagatgggaaagaacttcatttagatgttccatcctaccccgtttttttactgatctgggcaataccaggtccccttaacacacacacacacacacacacacacacacacacacacacacacacacacacacttcctgcaatatattgtgctgaaaatcagccttgctgtcacagttccattatca

SEQ ID NO: 472469 - DNA, 201 bp, Homo sapiens
acaggcagagctgggattcaaattgacctctctctgattctgaaccccatggtctttcccatgaagagatctagttttttttgtttttgtttttgtttttktttttcatctgttaggggctgttatgggttgacttgtgtttcctccatcctccctgaaaaagatattttgtagccctaacctctagtaccccagaatgtg

SEQ ID NO: 472470 - DNA, 201 bp, Homo sapiens
taaattttttttctaattttaaaacaagacagcaaattaattgttagtgtccaggcaaagcagatctgctgaggtcagtgaggcaaaaaaaaaaaaaaaawaaaaaaagagaccatggtgaaatcacaaggagaatcatacagaactaggtggagatactgagggaaccaacacactgttctgaacactttgggggcttca

SEQ ID NO: 472471 - DNA, 201 bp, Homo sapiens
aaacgactgattaatggaaccacaacaccgacaccccacatgaattgcacccggagcccacaatccatactccttccccatgctccttcagtttatcgatrctgtttaattatcagtagtggctcggattaagccctaaacatctagctaccctgttccacagccaagactgttactctcactcctcactcctaggtcttg

SEQ ID NO: 472472 - DNA, 201 bp, Homo sapiens
ttatcgatgctgtttaattatcagtagtggctcggattaagccctaaacatctagctaccctgttccacagccaagactgttactctcactcctcactccyaggtcttgcctaactccccccatttcaggtattttatagctgagtctctacaagttatcactcacagctaaattcacacttttacttggtctctacattt

SEQ ID NO: 472473 - DNA, 201 bp, Homo sapiens
ggctcagtgttggtctctgctgctggcaaattgggcactcagcagtgtctggagccaggtcagccttggtgagcagaagtccatgttgctgagcccatgtktaacctatatccctgccaccatggccactttgttcatggactctttgagcaacgacaggggtggctggggaaagaggctgagtggtgtccacggaatggg

SEQ ID NO: 472474 - DNA, 201 bp, Homo sapiens
attttctcctccatcaagtggagatattgccatctacctagtaggtttgttgcaggaattaaatacaatcacatatacaacacacctaacacaatgcctcrtacacagtaggtgtctagtagttggttatatattgttatgggtcctttggcacttcacatgtactctacttgtattctaatttaactttttgggtatttc

SEQ ID NO: 472475 - DNA, 201 bp, Homo sapiens
gttcaaatcccagctctgtgttatctgggtcatggtacctaatctctgtgagcctaaattttctcctccatcaagtggagatattgccatctacctagtasgtttgttgcaggaattaaatacaatcacatatacaacacacctaacacaatgcctcatacacagtaggtgtctagtagttggttatatattgttatgggt

SEQ ID NO: 472476 - DNA, 201 bp, Homo sapiens
ctctagttagaatatttatgttaatgtattgggctgtgctcccccaaggatatggagaacaatattagataattaagcaagaacgaaatgctaaagaaacwgaaataatatgactacccacacttttcagctcaaaatatttctggtgttaagattagaatgacctacaaaagattcccatagaataaaaaatttataact

SEQ ID NO: 472477 - DNA, 201 bp, Homo sapiens
taggattagaaaagggtgaatactcactcatctggtgccctgaataagttcagtaaaatgaaacaattgcacaccctgccattaccatttcccaggaatgstgtgtctgctctaaggtggggaataagggatagagccaacactggcttcttcctttctggcaaggaaagtgtatcaagtggtcacaaaacctcaaagatc

SEQ ID NO: 472478 - DNA, 201 bp, Homo sapiens
tgacaggaggcagagctcaggtggtaatgctcacctgcccaccactcacctcatgctgtgcagcccagttcctaacagcccatggactggtaccagtctgkggcccaggggctggggaccccttgggtacagaaaatgtagtatatatatgccatgaaatactacacagccatagcaaagaatgaaatcatgtcctttgta

SEQ ID NO: 472479 - DNA, 201 bp, Homo sapiens
tgtgcagcccagttcctaacagcccatggactggtaccagtctgtggcccaggggctggggaccccttgggtacagaaaatgtagtatatatatgccatgmaatactacacagccatagcaaagaatgaaatcatgtcctttgtagcaacatggatgcagctggaggccattatcctaagtgaattaacagaggaacataa

SEQ ID NO: 472480 - DNA, 201 bp, Homo sapiens
tatgtagaattactatttgatttgactaactcaaatcgagctaacaactccatataatcactgctctttcctaacaggccttgtgattttgttttccagaytctgcatatctgttacattctaaggccacttcacaacactaccaaacccagctttacagtttggaagactgagagaatcatacccaaagccacaaacatc

SEQ ID NO: 472481 - DNA, 201 bp, Homo sapiens
tgtcttttaaaggtttcttaagattagaaaacaaaaagaagtcagaagaagtcaaatcaggacggtaaggtggatacctaatgagttcccatcaaaactcytgcaaaattgccctagtttgttgagaagcatgagcaggagcattgttgtggtggagaaggtctctctggtgatgttttccaaggtggtggtgtgctaaag

SEQ ID NO: 472482 - DNA, 201 bp, Homo sapiens
aaaagaaactaccatcagagtaaacaggcaacctacagaatgagagaaaatttttgcaatctactcttctgacaaagggctaatatccagaatctacaaasaacttaaaaaaatttacaagaaaaaaacaaccccatcaaaaagtgggcaaaggatatgaacagacacttctcaaaagaagacatttatgcagccaacaga

SEQ ID NO: 472483 - DNA, 201 bp, Homo sapiens
cagccactcaggaagctgagggaggaggatcacttgagaccaggagttcaaggccagcctaggcaacctagcgagacgtcatttctaaacaaacaaacacacacacacacacacacacacacacacacacgcacgcacgcacatgaaaaaattggtgtctctgaatctgtgctatccctccagatcctcagatgtgaaatc

SEQ ID NO: 472484 - DNA, 201 bp, Homo sapiens
agccactcaggaagctgagggaggaggatcacttgagaccaggagttcaaggccagcctaggcaacctagcgagacgtcatttctaaacaaacaaacacacacacacacacacacacacacacacacacgcacgcacgcacatgaaaaaattggtgtctctgaatctgtgctatccctccagatcctcagatgtgaaatcc

SEQ ID NO: 472485 - DNA, 201 bp, Homo sapiens
gccactcaggaagctgagggaggaggatcacttgagaccaggagttcaaggccagcctaggcaacctagcgagacgtcatttctaaacaaacaaacacacacacacacacacacacacacacacacacgcacgcacgcacatgaaaaaattggtgtctctgaatctgtgctatccctccagatcctcagatgtgaaatcct

SEQ ID NO: 472486 - DNA, 201 bp, Homo sapiens
ccactcaggaagctgagggaggaggatcacttgagaccaggagttcaaggccagcctaggcaacctagcgagacgtcatttctaaacaaacaaacacacacacacacacacacacacacacacacacgcacgcacgcacatgaaaaaattggtgtctctgaatctgtgctatccctccagatcctcagatgtgaaatcctt

SEQ ID NO: 472487 - DNA, 201 bp, Homo sapiens
caatgatttagatgaagatataggggatatatttattgaacatgcaattgaaacaatagcaactatatgaacaaaatcaacttccaaaatactcgtaacartcaagccagtctaaatagaaggaagtttaacagacatataaatacaagattgggtataaaacctaaagaagtgaagaatgtctgagatttgatttagcag

SEQ ID NO: 472488 - DNA, 201 bp, Homo sapiens
atcttttgacctctgaaaaatgagttttaattgttctcattaattcaacagccatggttgacaataccatttgtggttgactcaatcattcagcaagtccwgtcacactatttgacttcacatttcccaaaatgagaaatgattctcaacaacaacaaccaaaagacaaatattgggacacatttatcacaggcaggaaat

SEQ ID NO: 472489 - DNA, 201 bp, Homo sapiens
aaatgtaatttccataatccccagcgtgtctagggagggaccaagtttaaggttgacggcatcatgggggtggtttcccccatggtgttctcacgataatraatgagttctcatgagatatgatggtttttataaggggctcttcctcctttgcttcacacacacaccctctctctctcacctgctgccatgtaaaacatg

SEQ ID NO: 472490 - DNA, 201 bp, Homo sapiens
gtagattatcctagctaatattaactcttgcgtaaaatacacagaagcattctgttcattaattgtccttaaatatgtatcattcataaccttgaagtcaytataattacgaatttatgatgccaatttactgatataaattttgaaagtatctcttctttcttgtaataattaagataattaatcttaagattaacaagt

SEQ ID NO: 472491 - DNA, 201 bp, Homo sapiens
taaatgaatcttttaaaataaaataataagtgactattaggagatctgtgatcttttctcatctctatcactatgcacatttatagatgatgaaactggcraaaaaaggtaaatgacacaccttaagcaaatcatttacctttttttggtcagtttcatcatctataaaatgtaagaattggataagttctcattcggcct

SEQ ID NO: 472492 - DNA, 201 bp, Homo sapiens
ttcaagggttgattctgttttattctgatctgcacagtgctgaaataggcatgttcactttgtgaaaattcactggctatatgcttgcactttttaaaatmcgtacattacttttgtgcatatgttacctgtgattaccacaaataaagattctacacaaatatacatctgcacaaatatttgcataaagacagaaaataa

SEQ ID NO: 472493 - DNA, 201 bp, Homo sapiens
aatatgtattgtttaagctgctaagtttgggggtaatttgttatgtagtaagagaaaacgaatacagccatattacttaagtagatggacatttattcagygttctagtcaatcttcctggcatacaattaatctttttgttcaaagaaaagttttcttgcctttcgtttgaaagtgtcacatctcctgtgaaatagccct

SEQ ID NO: 472494 - DNA, 201 bp, Homo sapiens
  misc_feature (1)...(201): n = A,T,C or G
actctatttactgtcctcaatgtgagaacatgtacttgctataaatcccgcctttacatcaaagcaaccttgatgttattgcacaaattataggctatgangcacatagcattcttgccttttctggagggctgcctttaattggctatagagcacatatgccctttctctgtggtatataagctcctggtctgaggagta

SEQ ID NO: 472495 - DNA, 201 bp, Homo sapiens
acaaagcagaattccagactcagagaaactgtgagatactaaatatgtattgtttaagctgctaagtttgggggtaatttgttatgtagtaagagaaaacraatacagccatattacttaagtagatggacatttattcagcgttctagtcaatcttcctggcatacaattaatctttttgttcaaagaaaagttttcttg

SEQ ID NO: 472496 - DNA, 201 bp, Homo sapiens
attataggctatgatgcacatagcattcttgccttttctggagggctgcctttaattggctatagagcacatatgccctttctctgtggtatataagctcytggtctgaggagtaatggtgtggagatctacctgtcttgctgccacccaagaccatgaggcaagttccccagtaaatcaccctttactagcaaactggat

SEQ ID NO: 472497 - DNA, 201 bp, Homo sapiens
ctaaataattattaccaacagtttttgagctcttactatgtagaaaatttaatttacttgatcctaagaaaagaatttttttgtgaggtactattattatyattcccattttacagatcaagaaatcaagccccctatgagataagaaacttgtttcaagtcccagagccagaatggtacccagagaggctatattcctag

SEQ ID NO: 472498 - DNA, 201 bp, Homo sapiens
tagtttggagggattgttttagtaaaatagattacaaaatatatatttttaaaaataatttcacctgtttcttttcaccctaaataatatatgtactagaraatttaaaattacaaatgtagttcacatgtttgaattacattatatttttatagggctctaatgctctggaggacacatccttattctccaagatctcta

SEQ ID NO: 472499 - DNA, 201 bp, Homo sapiens
aactcttcccataggcctgagtgaaggctgctgcaggaggagttttctcactcctcacttccatttccttcttgctatgatcctcagaaatgaatccattaaaaaaaaaaaaaaacagagctggtcaaccaagacctgctcagtccagagaagctacacagagccccactgtgaggagaaactaacatgataatctattct

SEQ ID NO: 472500 - DNA, 201 bp, Homo sapiens
aaatacaacattaaatgaagaaaatcattcataaaattgtacctaatatatgattccattaatgtattggtcaaaaccaggaaaaactaattaatgatgayagaagtcaggagaatagctgattctgggcatggtaagggagaggcatggctgaagactggtagggcatattaggaggttttcaagggttgattctgtttt

SEQ ID NO: 472501 - DNA, 201 bp, Homo sapiens
gaggggctttgctttaaattttttttctaattttaaaacaagacagcaaattaattgttagtgtccaggcaaagcagatctgctgaggtcagtgaggcaaaaaaaaaaaaaaaaaaaaaaaagagaccatggtgaaatcacaaggagaatcatacagaactaggtggagatactgagggaaccaacacactgttctgaaca

SEQ ID NO: 472502 - DNA, 201 bp, Homo sapiens
agggtgactacagccaataataatgtacagtatatttctaaataactaaaagtaaatttcaaatgcttcaacataaaaaatggtaggtaagtgacatgatsgctatgctgattagcttgatgtaaccattttacactgtataaatctatcaaaacatcacattggaatccacaaatgcatataattacaatttgtcaatta

SEQ ID NO: 472503 - DNA, 201 bp, Homo sapiens
gaaagttaatggtagagggaggaatagtgtgttttttagttctatcagattcttttttatactggcattttcatctgtcaactcctgtatcatttttttgygattcttagtttcctttgattggattttgctgttctcccaaatcttgatgatcttcattcctatctatattctcaattctatttctgtcatttcagacaa

SEQ ID NO: 472504 - DNA, 201 bp, Homo sapiens
gaatatggtcagtagacttcttttctggatgtgttcacagggccaaggctttgcgcagggtctttatttgtaactgacatcttgcctttggtttcacagtkggcgggttatgttattgaggtattttggtattgaagctttggagtatgatccaataggtggcacttagatgtagtggtcagttagcaggttcttgctcag

SEQ ID NO: 472505 - DNA, 201 bp, Homo sapiens
agagaattgaaatacagaaaatacatttaatatatatcataatccatatcctaaaaatggatctataacttccttcaagcatgcctgaaacatctatgcawatttttttttttttttttttttttttattatactctaagttttagggtacatgtgcacattgtgcaggttagttacatatgtatacatgtgccatgctgg

SEQ ID NO: 472506 - DNA, 201 bp, Homo sapiens
gagaattgaaatacagaaaatacatttaatatatatcataatccatatcctaaaaatggatctataacttccttcaagcatgcctgaaacatctatgcaawtttttttttttttttttttttttttattatactctaagttttagggtacatgtgcacattgtgcaggttagttacatatgtatacatgtgccatgctggt

SEQ ID NO: 472507 - DNA, 201 bp, Homo sapiens
cactaatgtgtcatctagcattaggtatatctcccaatgctatccctcccccctcccccgaccccaccacagtccccagagtgtgatattccccttcctgkgtccatgtgatctcattgttcaattcccacctatgagtgagaatatgcggtgtttggttttttgttcttgcgatagtttactgagaatgatggtttccaa

SEQ ID NO: 472508 - DNA, 201 bp, Homo sapiens
aaacatgtagaagccaccagttctttttgattagctattcaaagccagacttttccttccttgggaacaattcttattcatttctatatttcaatcactcytaaataattattaccaacagtttttgagctcttactatgtagaaaatttaatttacttgatcctaagaaaagaatttttttgtgaggtactattattatt

SEQ ID NO: 472509 - DNA, 201 bp, Homo sapiens
aaaattaagaaacttgccacagggagccaaaaaagaatcataaaataagatcatagtgaattatgataaatctcccataatattcatggagtccttgcagrgaatgagaacttatcagtcattagtcccctttcttacccaaagcaaggatctcttctacagcacctctgaagtgtaccaacgatatttattttgcatttc

SEQ ID NO: 472510 - DNA, 201 bp, Homo sapiens
cagcatccctatctgccactgacacctcaagcaccattgggtctcctgggtcatatggcccaagtggcagagcactttgcacagcagccagggcttgttgyagagcctgcttctgttctggaccccactcaaaactggcagcctctcagttcacttgataaatgggccggagtaacacaccccaacgaggaatgtgttgcc

SEQ ID NO: 472511 - DNA, 201 bp, Homo sapiens
gagtccaatgatgattactcgaggctaggaggctgaggagggaggaaatgggagatggtgatcaaagagtacaaagtttcagacagacaggagcaataagktttgagatctattgcacggcagggtgactacagccaataataatgtacagtatatttctaaataactaaaagtaaatttcaaatgcttcaacataaaaaa

SEQ ID NO: 472512 - DNA, 201 bp, Homo sapiens
tttgcatatgtggccttttcacagaacagactatacatgtcaaatacacatcagattttgaagatttagaataaaaataataacattggtaatttctataytgattccatgtaaaaatggtagtagtttggagggattgttttagtaaaatagattacaaaatatatatttttaaaaataatttcacctgtttcttttcac

SEQ ID NO: 472513 - DNA, 201 bp, Homo sapiens
ttccccagtaaatcaccctttactagcaaactggatttgtctgcctcattctttggtttctcagctccttctgtgcttggtggtcactttgcatatgtggycttttcacagaacagactatacatgtcaaatacacatcagattttgaagatttagaataaaaataataacattggtaatttctatactgattccatgtaa

SEQ ID NO: 472514 - DNA, 201 bp, Homo sapiens
attgtaaatggtagagtacttcaccaatgttaattataataatttgacacaatgtagggtagtggtcaatagcataggttttgaagtcagaacaacccagwcttgaatcttgccttgcctgctactaactctctaactttggcaagtttttcaacgcctgagtactccctttgctggcctataacatgcaaacatgcaaat

SEQ ID NO: 472515 - DNA, 201 bp, Homo sapiens
agttaatttcagtttatgataagtactataaaaaataagagtactgagataagaatactttgtgtgagagagagaaggtagcctattccttcccccgcctycccaaccctccctggcccccacccacggctatctacagcacattctagatcatgctattatgaaaagattcagtcccctggtgctggctttgtagcaata

SEQ ID NO: 472516 - DNA, 201 bp, Homo sapiens
agatgtcaaagatgggcagggcgtggtggttcacagctgtaatcccagcactttgagaggctgaggcaggcagatcacaaggtcaagagatcaagaccatyctggccaacatggtaaaatcctgtctctacaaaaaatacaaaattagctgggcatggtggcgcacgcctgtagtcccagctacttgggaggctgaggcaa

SEQ ID NO: 472517 - DNA, 201 bp, Homo sapiens
atttaaagtactagaagacatttcttttcttgttgggttaacaacacattctccatcagtcattcctattcatactgtcccaacaggtccattccaaagartatctgataatgagagggctacagaggttgccattaattgctaggacatcaagttcattaataccatctactgctaacagattacacagaacctgtatat

SEQ ID NO: 472518 - DNA, 201 bp, Homo sapiens
gcttaaaaaatctattaaggctccacctgaactccaacaaattgaaagttattgatagtcgctggtttgattctacacccaacctggaaattctcatgatyggagaaaaccctgtgattggaattctggatatgaacttcaaacccctcgcaaatttgagaagcttagttttggcaggaatgtatctcactgatattcctg

SEQ ID NO: 472519 - DNA, 201 bp, Homo sapiens
tatccctccagatcctcagatgtgaaatccttaaatcctttatgaacatggagcctactccatgaagagcaccattagattcaagatagtaaaattcattygaaactaattggtgagtaatgaagttgctaaagtttatgagccttgcaccaacactaatacagaggtacagtgtcaacaataaaattgtaatcactgaca

SEQ ID NO: 472520 - DNA, 201 bp, Homo sapiens
ccgtcgttttaataatccagttgatttgggtggtattttccttagttagttggaaattcaaacttagatctcagagcaaaggctcatatggtgcaatagcytgattttctataataaagtagataattatcctttggatactatttagcatgaactctgattcagcttttctctactttgtcctaataaagtgaaacagtc

SEQ ID NO: 472521 - DNA, 201 bp, Homo sapiens
gaatttctatgccctcatagactttacaggcacatgttctatcaccaattaagagaaatttaacttacacattttacaacttatacatgcaatttggctgwgcttatacagcacagatcaacattacaatcaatttactgccatgttaaaaaaaaaatcagtgaacattgttcggctgacctgactaattttttgaaataa

SEQ ID NO: 472522 - DNA, 201 bp, Homo sapiens
tcctttacctagttggtaggtgcttcattcaccctggagatctttgactaaaaggcaggcattcaggaccaagcataatccatctcttgcataaaacatgrgacgctttggaggatgcctggtgttcaaaatggtaatatttctacccctttgtcaaaagtaacatcatattccatatcactgccccccctccacctgtca

SEQ ID NO: 472523 - DNA, 201 bp, Homo sapiens
ccactgctcaagacatgttatctcatttaatcttcagaacatccaaatgaggtaggtataactatgcccatcaaaaagagggggaaaccagggcttagagrggtggagtcatttgtcccaggtggcataggtagtaccaggatatggacccagctctgtctgcctcttgagactgtgcctttctttttaatttttttttaa

SEQ ID NO: 472524 - DNA, 201 bp, Homo sapiens
tcattgaggatttttgcatcaatgttcatcagaaatattggccttacattttcttattttgttatttccctgccaggctttggtatcaggatgatgcaggmcccagaaaatgagttagagaggagtccctctttttgtcttgtttggaattgtttcagaaggaatggtaccagctcctctttgtacctctggtagaattca

SEQ ID NO: 472525 - DNA, 201 bp, Homo sapiens
atgtgttggaaatttaatccccattgcaatagtgttggaaggtggggtcttttggaaggtgtttagattatgagggctctgccttcatgaatagattaatsctgttataaaagggcttgatagagagagttttgttcctttttgcttttccaccttgtgccatgtgaaggtgcagcgctgtacccctccaaaggatgcagc

SEQ ID NO: 472526 - DNA, 201 bp, Homo sapiens
atggtctgaatgtgtccctcaacacaaaattcatgtgttggaaatttaatccccattgcaatagtgttggaaggtggggtcttttggaaggtgtttagatkatgagggctctgccttcatgaatagattaatgctgttataaaagggcttgatagagagagttttgttcctttttgcttttccaccttgtgccatgtgaag

SEQ ID NO: 472527 - DNA, 201 bp, Homo sapiens
aagctgacacagatagagtctcctcctgtgagacatctgttacatatgttacatgtgttaaacctgttataaattcagttaaattgccctcaaagtaaagwttataaaagaaggatgttaagggagatactgttggatttgttgcagtgcatttaaaaatagataacttcaaggccatggaatatgggactgttttttagc

SEQ ID NO: 472528 - DNA, 201 bp, Homo sapiens
tgcttattctctctgctgttttcccagaatcattcactgcccttctccacatcacaggagctcctgtctcctctgacttcaggttggactggctaatagamagaccaaaaggtggcaggagagcagagttgagcattcgttccctggctctccccctgcctcagcactgtggctctgacaatgactggatccctctacaac

SEQ ID NO: 472529 - DNA, 201 bp, Homo sapiens
caggaatgtatctcactgatattcctggaaatgctttggtgggtctggatagccttgagagcctgtctttttatgataacaaactggttaaagtccctcarcttgccctgcaaaaagttccaaatttgaaattcttagacctcaacaaaaaccccattcacaaaatccaagaaggggacttcaaaaatatgcttcggttaa

SEQ ID NO: 472530 - DNA, 201 bp, Homo sapiens
gtgaacggggaggtagtcgtgcagtagactctggagcaagggcctttctgccgtgtctaacattagctgcgtgaccacactgcactgttcacctcttggcrttgtgcgacagctgaacaaaaggcaggcagtgtgggccgcacgtgaggcaggcgattatattaatacctacgactaaccagccccagtggcctcttcttt

SEQ ID NO: 472531 - DNA, 201 bp, Homo sapiens
gatggaaatattctagatttgtgctgttctagatctgctctagatctgttttaggtacagtagctaccaggcacctgtggcttttgggcacttgaaatacrgccagtgcaactgaggaattgagtttttaattgtatgtgttttatttattttaaatgtaaacagccacatgttgctagtgcataccatattagacaaagc

SEQ ID NO: 472532 - DNA, 201 bp, Homo sapiens
aaccaggacgtgccagtcaacagcctcaataaccagcaccaaagctagtcatgtgtgtaagcaatcttatgcatcttagggctgttgaacactgagatcaytgcagccccaactaacactacatgtagtggaaaaaccacccagcagtatacagtcaactcacagaatagcaagagacagtaaatggttgcttcaaacaac

SEQ ID NO: 472533 - DNA, 201 bp, Homo sapiens
gtatgtgttttatttattttaaatgtaaacagccacatgttgctagtgcataccatattagacaaagcaggtctactgtgctcttccttgagatatctgcrtggctcattccctcacttctttcaggtatctgcttaaatgtcactttaatagtgaggctttcctgatcaaagtacttaaaagagcaagtcaccgccacct

SEQ ID NO: 472534 - DNA, 201 bp, Homo sapiens
ttccatcagacaggtgccagacaagcaaaagcaaggaagttggcagaaagaaagtccaggtgatgtaggttgaggtatttctttctttggcagtatcttgsttttgtgaatcactttattaaaaaaaatcactttcttcccattcttaaggggttttggcaaacagaatttcagatcttgaaacaaatgagctgcaacaga

SEQ ID NO: 472535 - DNA, 201 bp, Homo sapiens
caacagagaagagaaggtaacttctggaccctgaagtaaatcttatttttatttggggaattatttggacatagctgctattgccaaaaaaagattaatcyatactatgcccacctcccacaggctctacaaccattccaaagaaaaacaggtgaggagctaaatgatgttgcaaaaatcagtgaatttggaataaaaaac

SEQ ID NO: 472536 - DNA, 201 bp, Homo sapiens
atcagaccaatgagactatttctttctcattcacagcctgcctagagcagcacaaacaatgcaaaaacaaaccaaaaaatgaataagcgtgtgtatgtagrtctcttagtaccatgcttggcccataacaagtgcttactagctactagttactaattttttagtagtagagatttaataggaaagattataggaaaagaa

SEQ ID NO: 472537 - DNA, 201 bp, Homo sapiens
tactactctctgaaattaccttattttcttatctcccttattagaatgtaagtactagagaaatcagaccaatgagactatttctttctcattcacagcckgcctagagcagcacaaacaatgcaaaaacaaaccaaaaaatgaataagcgtgtgtatgtaggtctcttagtaccatgcttggcccataacaagtgcttac

SEQ ID NO: 472538 - DNA, 201 bp, Homo sapiens
tgaacagatgaactgtcccagggtcttcactgtgattggaggggctcaagtcatttgggaaaaatcggtgttggcttcaagagctataaatgctcccaggyagccagactatactattgatacttcattcatttgattcaaaattgggggtttttgggatgactgtgtgtcctgtgggaggtggtacttagagcatgggct

SEQ ID NO: 472539 - DNA, 201 bp, Homo sapiens
ctagatggttgatattgacatttctgttcttatcataggttgtgatgctggctctttccatcactgacttctccacctgttttcaaaggtggacttgtaayagtaattgccaaagtaattcctctattattgctctgctcttttgggtgcccttttcttcagctaaaggttattgcacccactaatcagaaatacggaaaa

SEQ ID NO: 472540 - DNA, 201 bp, Homo sapiens
ttgccccttccactcccattaccctatttaacattctccatgacacttactactctctgaaattaccttattttcttatctcccttattagaatgtaagtrctagagaaatcagaccaatgagactatttctttctcattcacagcctgcctagagcagcacaaacaatgcaaaaacaaaccaaaaaatgaataagcgtgt

SEQ ID NO: 472541 - DNA, 201 bp, Homo sapiens
ggtcttcctggccctgtgacacagcaaacactgaatgtatttttaattaaatcagtgtgactcaatttgcaccattttattggatctcttttgcatttcarctgacactagatttcatcagagtctagagaaaaggatggatcacagaacaggtttgtctcaatcacaaacagtaggatggatttttgctaaattgcaagg

SEQ ID NO: 472542 - DNA, 201 bp, Homo sapiens
ccaagtaatttcttaggtttaattacacctagctgcatagaaaatatcttttactaaactgggaaaaaacatactgtttttttcattttttagctaccaascagagaaggcaaagaaatgccctagatggttgatattgacatttctgttcttatcataggttgtgatgctggctctttccatcactgacttctccacctg

SEQ ID NO: 472543 - DNA, 201 bp, Homo sapiens
aagcagattcaacaaattttgcaaggtactgggggcaatgtggctattatacagaaataaaagacaactttcctgtcctccaagaacttatagtttggcaygaaagtggtaagtaaacagacaacagcaagttagacatcttcttcagagattatatttgagcagtgcagatgtacaaagaaaggggaagaaagtgaacag

SEQ ID NO: 472544 - DNA, 201 bp, Homo sapiens
gggtctggtcttcctggccctgtgacacagcaaacactgaatgtatttttaattaaatcagtgtgactcaatttgcaccattttattggatctcttttgcmtttcagctgacactagatttcatcagagtctagagaaaaggatggatcacagaacaggtttgtctcaatcacaaacagtaggatggatttttgctaaatt

SEQ ID NO: 472545 - DNA, 201 bp, Homo sapiens
tttgtaccctgtgactctattaaaattttgaatggtatcagattctaagagatctttattcagaggattatctcaacatgtgatggtttcatttattctcrggatatccctaatgggtaaactatggataaaagacagtacttttcccctccaaggaggaaacagggaagagaaattgcaagaaaactatcatggtcccaa

SEQ ID NO: 472546 - DNA, 201 bp, Homo sapiens
aagtgattctataaaagtcacaaaataagaatactaggaagaggagataatcttggactggaagataagcagagaaggcttcttggtttgtgcaaaattgyggcttttgccattactttcaatggcaaaataaattttggcaaaactttttgttaggagacttgcagaagcagtgagatttgaatagatacaaatagaaaa

SEQ ID NO: 472547 - DNA, 201 bp, Homo sapiens
tgtactatattctttaccaactattatcttatttaattatcaaaggctctttggcgttggatattattacccttgtttttttgttttgtcttgtttttttyctaaaaaaaagaaagaaattaagctggatcaagaattcaagcatcctgtattctggaacattcttcttgccattagatataagtttcttagctaggcctc

SEQ ID NO: 472548 - DNA, 201 bp, Homo sapiens
acctcaaaattgaaatgaagtctaatagacatcaagcacaactacctgccagttcctaacaaggatgaggaaaaaaaaatagtgatatctggggagccaaygggcagtatgacagggtgtccttcctgccttctctgatgacactttgctatcaacaccagttcttccttttgtgccttactcagtttgtaagccagtctg

SEQ ID NO: 472549 - DNA, 201 bp, Homo sapiens
gttttaaacatatctacctcacaacttatattccgaagtaaagtcaaatcccgaccatcgcatcttttgtattcattcaaaataatacttctaaaaacttyctttgcaacagtattgaaggattctattatctcatatagatcgacctctggaaatatttcttttagttgttcctctgtatctaatcttattttgttaaca

SEQ ID NO: 472550 - DNA, 201 bp, Homo sapiens
tcaaaagatgaaagatgatggtgactactttggagaagagaaggcttggcacggagctgacaggtggtgttcatctggccctacagctgagccagtgatasaactgagagtaaaaccttcatatcttcaaaaatccctgggatagcctggcaaagagtgagagattttgtaccctgtgactctattaaaattttgaatggt

SEQ ID NO: 472551 - DNA, 201 bp, Homo sapiens
cccaccatgggcaaagccaagcctgtgttatgggaaatgttgaaggcatactcttgggcacaccttgtattccctcactcaattatcctcagctgaatagkttaacttaaaaatgacctgaagcttttctcatcttaagcaagatactctctgtcttcttccataacttacagagaactgggaagcaggagtcagcactta

SEQ ID NO: 472552 - DNA, 201 bp, Homo sapiens
ctactgggagatgtctcctgtttggctacacaggggtcagggacccatttgcagaagcagtctgttcattctcagaacacaaacgctgtgctgggagaacmagtgctctcttcagagctgtcagacagggatgtttaagtctgcagaagttgtctgctgccttttgttcagctatgccctgcccacagaggtggagtttag

SEQ ID NO: 472553 - DNA, 201 bp, Homo sapiens
agatcaccaaggtgagagaattcaaggtggaagtcacatgaaggacaacctgtatcaaaagtaagcaaaatgtctcagaaggatgctctgactcactgtgwtctttcttgataaacacacagaataatggattcgttactcagttttctctctagttagaatatttatgttaatgtattgggctgtgctcccccaaggata

SEQ ID NO: 472554 - DNA, 201 bp, Homo sapiens
atagcatgaattttaaacatcaataattaaaaagggaacgtcactaaagacattataaatgttaaaaagataacaggaacatattaggagcaactctatgrcaataaatttggaagtttaaatgaaatagactaatttctagaaagatgaaacccacaaaaaccaacacaaaaagaaatgaaaagtctagataattcccta

SEQ ID NO: 472555 - DNA, 201 bp, Homo sapiens
aaatggcagtgactatgttcttcttattaatctaatgtcatcattgctcaataaataaagagtctttctgggatgtgaggcaataaaatctgccacccaawaggtgttcacccagtatttaagatttgcattaattatttaatattcaaagtgaagagttttaactatttggaatgtaatcaactagttggattagaggcc

SEQ ID NO: 472556 - DNA, 201 bp, Homo sapiens
aaaaccacaatgggatagcatctcacaacagtcagaatggctactatgaaaaagtcaaaaaataacagatattggcgaggctgcagagaaaagggaacacytatagactgatggtgtgtatgtaaattagttcaacaactacggaaagcagtttggagatttctcaactcttgaatagaggacagataatccactaggcca

SEQ ID NO: 472557 - DNA, 201 bp, Homo sapiens
aaagacagtcttcatctttccccacctgtatttcatgaattgcttcaggacgtcaggctatggggcaccagtacagaggaggctagagagacaaatgaagyaaatccccaatggtggctgttggaaggtgcaacacaaaagtttcttcatctttaaaacctgcatggaagtaaagatcaattacccatagaagtatgggga

SEQ ID NO: 472558 - DNA, 201 bp, Homo sapiens
caggtgtagacatctatactcagactggtgtaaattcaacaacataagggcagagcactgactgcctgtactaccagacttcctaatcccctccaaccctstcttctgttacaacaattcagtcatgaaataagcagtgaggagcattaccgaaagaggccaaagcagcacactttgatgtgtctctctgtggatctcacc

SEQ ID NO: 472559 - DNA, 201 bp, Homo sapiens
tcagatgtaactcttatggcaaaaggaaaatctttgggaataacaggatacaaagctttctcagcaagagcatcaggcccaagttctcttctatttatacyggtgactttgacaatttcattagttgcataaggaggaaactcatagtgcagcatgaaatttttatcttttatcccatttatagttgttataactcgatcc

SEQ ID NO: 472560 - DNA, 201 bp, Homo sapiens
gcccggggacggggagggaggagggctgccgggatgtgaaccggggaaggcagctggggctggagagcagcgcggaaagggggcccagggagctggaaagmgggccaagaggagggcaaggaaggtggcgggctacggggagaggaaagaaaaagggtgtcttggcggtggccttggtaagagaaaggggcaaggggtata

SEQ ID NO: 472561 - DNA, 201 bp, Homo sapiens
cactaagcactttacttatattgtctaatttaatatttataccaacttcatgaacagttctggcattcccatcatgtagataagaaaactgagactcatarggagcaagtaaattgcccaaggtcacaaaactagtaagtagcagagcaaaggttggaactcaaaagctaggttcttaatccattgtactatcagagaaat

SEQ ID NO: 472562 - DNA, 201 bp, Homo sapiens
taaagaagacaaatgagatataggaagagatctgttataataacatatatgacatatatctaagtttttcatatatttcagaattatagaaaaaaaagtaygtaatcttttctaagatgtatggatgacttacttttaataatatttcttgatttataatgtaaataagattaagcgaatatgggttactcttgaatttaa

SEQ ID NO: 472563 - DNA, 201 bp, Homo sapiens
cagttaatgaaggccttccattattcactacctcatgtcaggagacttcccagagtccttcacattccaaactagtgatctctccctcctgtgagtcccaygtagtagtagcagcagaaataataataagagtgataataccaccatttaataagcactaagcactttacttatattgtctaatttaatatttataccaac

SEQ ID NO: 472564 - DNA, 201 bp, Homo sapiens
ttcaagtgatcttccgacctcagcctcccaagtagctgggactacaggcatgtgccactgagtccggtgtatttttataagatttttaaaaagataacatrttctaaattatgacgtccacataccatttacttttgtgtggaattataaggtgatattttaaatgatgggaatgaacaagttgacatgtatatcagtaac

SEQ ID NO: 472565 - DNA, 201 bp, Homo sapiens
agatctattctgatggaaacctttgcttgcttccatcctaagggtttaggtaaaagaattcttatgtatttccttctggattcaaattacatgaactttaygagtccatacacctgtttcagacaggctttgttctcgcaggtatagcgagagaaatgcaataaatgaagaaaggtctaaatatactttgtgatgtactct

SEQ ID NO: 472566 - DNA, 201 bp, Homo sapiens
tctgaactccagacttagaatcaacagttctatttctgggtctcccaggccgctcaaacttaacatgtgcaaatgtaaacatctaccccccatccttcccrctacagacttgttcctccctgcttgttctctatctactagatggaactatcatcttaccagtgtcagccttgaattggtatcttttctttactctttccc

SEQ ID NO: 472567 - DNA, 201 bp, Homo sapiens
tgggtactgagcagaggcagtcaatttggtttgctttatgatctgaaccaaacacaaatattaagtgaggtcaaataacacaccccactggcaatcctcawatctctaaagctgatttaaaagagactgggaaattgagctcaacagaaatggcaaaaataaagaagttcatttttaatgaacaaggaagcctaccaatac

SEQ ID NO: 472568 - DNA, 201 bp, Homo sapiens
tttcttgaataattataagtttagcctgctgggtcctagaagaagttataaagatcatagagcttaccacagcttttaaagttaaggaacaggtacctctrtctccctatctgtaggatatacaggcaacagtagaaagcaaactcttttcataatcagttgtgtgtagtaagagtacaatggggagaagtagggtaagga

SEQ ID NO: 472569 - DNA, 201 bp, Homo sapiens
aatagcacacaagacagttatatccaaaatatcacagaaaacatcagtcttttttcccaaattgctacctggagcttcatggatcccatttcacagagccrtataattttaacatcaccagaccttctttaaagaagtcaagacaggcctgtcattttactccgctgactatgaccagatgcattcaagaaagacacaatt

SEQ ID NO: 472570 - DNA, 201 bp, Homo sapiens
aaagaagaatagaatcatgatctcctcttatcttttggtgctcagaaacagaaaactgaaccctgcaaaaggaacacatgcttcaattatctgcaaagttsagccgtaggccttgacctcagacagggctggattcaggggatatcacaatgtcagtaagacacagtccttccctcttttggctctcctctgttctgtgtt

SEQ ID NO: 472571 - DNA, 201 bp, Homo sapiens
caaactgtggcaagataagactattaaacatctgaagtgtacctcagattgaactatcaagaattacaaccacattgagaaatgtgctttaaaatgttgtmatgagcacacgttagtgatgagacaaaaattgttattcacttctgaaagacccctgaactgaatatttaagtactatttcaaagcctatttttataaaag

SEQ ID NO: 472572 - DNA, 201 bp, Homo sapiens
aggcctgatgcactctggctgggtgtgatcctgatcgtttgttcaatcagattttggtaggtttgtgccaaaaagaagaatagaatcatgatctcctcttwtcttttggtgctcagaaacagaaaactgaaccctgcaaaaggaacacatgcttcaattatctgcaaagttgagccgtaggccttgacctcagacagggct

SEQ ID NO: 472573 - DNA, 201 bp, Homo sapiens
agtattgtggatgatcaaaaccttttgaaacaaggcagaccttacattaaatcctgactctccaatattggttatacgaccttgaaaaagttttttcagckccctgagaatttgtttctattttacaaaatgaggctaatgagtaatacctaccttaaagtattagtttctgagagcttgaattctcctggcttctagtag

SEQ ID NO: 472574 - DNA, 201 bp, Homo sapiens
ttagaaattttccagttaatttcccttggggcttactagtcttacattgaactcccttcttttgtcctctagttttcatcattaatatttcaaatcatcakgaagaacaggtaagatgacaccaaccctaaaaaatagtatttagtattgtggatgatcaaaaccttttgaaacaaggcagaccttacattaaatcctgac

SEQ ID NO: 472575 - DNA, 201 bp, Homo sapiens
gtaccttggaaatatctaacatacaaattgaagactcaggaagatacacatgtgttgcccagaatgtccaaggggcagacactcgggtggcaacaattaargttaatgggacccttctggatggtacccaggtgctaaaaatatacgtcaagcagacagaatcccattccatcttagtgtcctggaaagttaattccaatg

SEQ ID NO: 472576 - DNA, 201 bp, Homo sapiens
gcaataacatcgcaaagactgtggatgagctgcagcagcttttcaacttgactgaactagatttctcccaaaacaactttactaacattaaggaggtcggkctggcaaacctaacccagctcacaacgctgcatttggaggaaaatcagattaccgagatgactgattactgtctacaagacctcagcaaccttcaagaac

SEQ ID NO: 472577 - DNA, 201 bp, Homo sapiens
tgtatctcccagaattcccacgtcttgtgggatggactccggggaggtaactgaatcatgggggctggtctttcccgtgctgctctcctgatatgattaastctcatgggatctgatgggtttatcagggtttctgcttttgtttctctcattttctcctgctgccaccatgtaaaaagtgccttttgcctcccaccatga

SEQ ID NO: 472578 - DNA, 201 bp, Homo sapiens
ctaaagaaagatgacattattttcaaagaaacaacaataacattaacaggttacttctcaaaataagtaataggatcgaagaaaaagtgggatgacgtatytgacatgctacaataaagaaacttacaacatagaatttcattcagagcaaattattcttcaaatattaaagcaaatttaaaacattttagatagtgaaaa

SEQ ID NO: 472579 - DNA, 201 bp, Homo sapiens
atggcagtgactatgttcttcttattaatctaatgtcatcattgctcaataaataaagagtctttctgggatgtgaggcaataaaatctgccacccaatargtgttcacccagtatttaagatttgcattaattatttaatattcaaagtgaagagttttaactatttggaatgtaatcaactagttggattagaggccta

SEQ ID NO: 472580 - DNA, 201 bp, Homo sapiens
cagcaggaaatccaagtttcctattggtcctccttctgattcttctctgatttcttattctgaaaaattactgatagtagtgtactaattaagtttttagsagggagacccttaatgatgaattaagatagcatttttgcagtgttgctaagtggctttagtctacaatggactcagtgatcccaaaataaatttaatctt

SEQ ID NO: 472581 - DNA, 201 bp, Homo sapiens
ctggcctcaccatgcataacagctagaatataaatctagactctcgccgcccatctatcttttcttttctgtgtcatgtagaggttcctatgtgaaggaawgatctccagaataagatgagagatagcttttataagaacaccaaatgatagaaattatggaaatcatgatattgaaataatttcttccaagttaaaacat

SEQ ID NO: 472582 - DNA, 201 bp, Homo sapiens
tgctccttcagtttatcgatgctgtttaattatcagtagtggctcggattaagccctaaacatctagctaccctgttccacagccaagactgttactctcwctcctcactcctaggtcttgcctaactccccccatttcaggtattttatagctgagtctctacaagttatcactcacagctaaattcacacttttacttg

SEQ ID NO: 472583 - DNA, 201 bp, Homo sapiens
tacctactgcagcagccttttgtccgtagtcaaccaccaaaggcataaactgggaaggggaaggttttgttttactgacggctgtggccattaccgcagtrtcacctgactgtattacagcagagccatttgcaaatctggccagctttccagaggatatttctaatttcctgttgcccaagtccatggccacagcttgag

SEQ ID NO: 472584 - DNA, 201 bp, Homo sapiens
gtgttgcttttgctgctataccaccagtgcctagaaaaatacctgggacatagagctcaggaattgcttatagattctaaaatctcctttccatcactaamttcttggctggtcttgcacaagtaatggtccatctcttggtttcagcttttttctttctcctaatgtcctctaatattgagccctgtttgtttccttctt

SEQ ID NO: 472585 - DNA, 201 bp, Homo sapiens
ggtttgtgggaattctacctactgcagcagccttttgtccgtagtcaaccaccaaaggcataaactgggaaggggaaggttttgttttactgacggctgtsgccattaccgcagtgtcacctgactgtattacagcagagccatttgcaaatctggccagctttccagaggatatttctaatttcctgttgcccaagtcca

SEQ ID NO: 472586 - DNA, 201 bp, Homo sapiens
attttttctagagatgaaagctggttctaatccggtcaacctccttttcactgtgggaacccaaacaatcagtatctcaccctcaccatatgcacaatgakgttggattagatgtgatagatcatctctaaggtatgcttcccctctataaaattctgtggctatacaagtattgtaaattagaaattttccagttaattt

SEQ ID NO: 472587 - DNA, 201 bp, Homo sapiens
gcttacttgtgtattagtcatgattctttagttttaagtgcacaaaccaaatagaactagcttgggcaaagaaaaaatgttcacataactgagaagtcaayggctaatcagggactttaggcacaatgggattaagggttcacacaaagttgtctgggctttctcctgtctatgtgtcagtcttattctgtcctactctag

SEQ ID NO: 472588 - DNA, 201 bp, Homo sapiens
accaatttcttttaccagctgctggatgccctgaattatttgctgggtatatttcactcccactttgatagcgtggcaaaagtcctgctgtaaaatgttcyctgcagaggcttccaacatgacagtctgacttttaggtgctccagcaaccactacatttaaagtactagaagacatttcttttcttgttgggttaacaac

SEQ ID NO: 472589 - DNA, 201 bp, Homo sapiens
  misc_feature (1)...(201): n = A,T,C or G
caagctgctctggaagtcaaatgagatactgttgcaaagtacctagttatatccctgaccatcataaaatggtagatattataggcataggagagaagttnaagagcattggcattacagagggatatggtcttccagtgattggaaatgattttttctagagatgaaagctggttctaatccggtcaacctccttttcac

SEQ ID NO: 472590 - DNA, 201 bp, Homo sapiens
ttactttgcttctttaaaaaaagatggcattcaatgtggttgagttctatcaagtcaaaggacaagtactgtctcattcacccaaacactgctgtctttamccttgactagcgggaacttctatgttaaatgtatgcacacttctgtacatctgccttcaaattttaaaggaacattttaatgtggaagggatatgttctt

SEQ ID NO: 472591 - DNA, 201 bp, Homo sapiens
caagtgccccccactaaacctcttttctaatcagattgctacacttaacctgctcgtggggaccgtcacagcttggtcaaatagacctgggcttgactccycaattcacctattgacaaagaatatttatttagtttttcccagtttcaacactcactactattttggggattatactatttatctcaacaagctgctctg

SEQ ID NO: 472592 - DNA, 201 bp, Homo sapiens
tctcagaactttgggaggccaatgtgggacgatcacttaaggtcaggagtttgagatcagcctcagcaacatagcaagacctcatttctacaaaaaaaaawttttaaaaatcaaccatttgtggtggcacatgcctgtagtcccagctattcagaaaattgaggcaggaggatagcttgagtccaggagtttgagaccgca

SEQ ID NO: 472593 - DNA, 201 bp, Homo sapiens
ttgaattagtcatgatttgccagagaaagagaatgaataggatgggtgattgattgattgattgataagatagataagatacgatagagagatttattacrggaattagcctacgtgattatggaggccgagaagccccaccacctgccatctataagctggaaaactgatgttctgtcccagtgttgtaagaatgtaagt

SEQ ID NO: 472594 - DNA, 201 bp, Homo sapiens
gtcatatggcccaagtggcagagcactttgcacagcagccagggcttgttgtagagcctgcttctgttctggaccccactcaaaactggcagcctctcagktcacttgataaatgggccggagtaacacaccccaacgaggaatgtgttgcctccaagatccaaataggcccactaggcattctgcctctttcttggttgt

SEQ ID NO: 472595 - DNA, 201 bp, Homo sapiens
atctaatcttattttgttaacagcttcatctctggaaattttatcatgttcataatctgtaaaaactgcatagagtctctccatagtgagtttatgagcaygtttcacaatctcttgtgaaggggtaaataacttctgaggtgtcctcttggtaacaccaatttcttttaccagctgctggatgccctgaattatttgctg

SEQ ID NO: 472596 - DNA, 201 bp, Homo sapiens
ctttgggaggccaatgtgggacgatcacttaaggtcaggagtttgagatcagcctcagcaacatagcaagacctcatttctacaaaaaaaaatttttaaamatcaaccatttgtggtggcacatgcctgtagtcccagctattcagaaaattgaggcaggaggatagcttgagtccaggagtttgagaccgcagtgagtta

SEQ ID NO: 472597 - DNA, 201 bp, Homo sapiens
tactagccacatgttgatggtaatatttgtgtacccagaattttttggtgagtgccaacataggtactagctggatttttgagacttgaaaacgctgaagwgaaaataaactaactacttgctcacattttgtgctaagttgctgaagcatagcatactacttaatgttgcttaattctccaataaaataattctcatttt

SEQ ID NO: 472598 - DNA, 201 bp, Homo sapiens
aggaaccaaccagttcccaatctaggaatgaatgtactttgcaaagtacattttgctgagtaaagataaacatcacaatctgaatatcactgacaatagcsgaaacttaccagttacatcctacattcaaggcccttagtgtaaattatttcctttaatcctcaccacaatttgataaaatagattaagatgccatgcaat

SEQ ID NO: 472599 - DNA, 201 bp, Homo sapiens
  misc_feature (1)...(201): n = A,T,C or G
gaaagcctcattcttccatcagctgggtcacatccaaagtatttcacctgaatttcttggccaacttctaatcctagggcagtaggatgtttaatatttcnttgatcaagttgtgtgttataaagcagtaccaaaatcatatttggatataattttaccattacaccagtatctctgctttcagttattgtggcagtacac

SEQ ID NO: 472600 - DNA, 201 bp, Homo sapiens
cctttagctcttcttcctaaataatgatacgtttattacttatacattgctgcccactacatttgtaaaataaaactaaattttttccttagaaatgcttwcagacattgtatccacctcttcaagatatttaaaaataaaaaaaatttattttaactgttaacaggtttagaaaaattaatacaccatggagtctatagc

SEQ ID NO: 472601 - DNA, 201 bp, Homo sapiens
aaagaagtaagtttattcctaaagaaataaaattgagagacagcaaataaccgtactgatgtaagaatagatggcagacttctgcactgcacattttcagyaaatcctatttttcacaaaaatgatttgcaaagctggcatcttgaaacacgagagatgcccgaaatgagagttctgtatttaaaacccccattttagtag

SEQ ID NO: 472602 - DNA, 201 bp, Homo sapiens
  misc_feature (1)...(201): n = A,T,C or G
tagcacattaccctagaaaacatagaattctagaattctctttaaaaagatcactgagaattattagatgatgactgtgaaataggttctcccagtacaanactacttctgtcattcaaagttctgacaacagttgtagctgaagactgaagcactttatgagaaagcctcattcttccatcagctgggtcacatccaaag

SEQ ID NO: 472603 - DNA, 201 bp, Homo sapiens
aaaaaactaggcaatcagaaaaaattcaaatgttacttcataattataaaactttttaatttaaaaaattcttcaaagttaaaataatttatacatttggycatttttttaaaaaaatgaacaggtttatatggtttcagtgctgcactgaaatgacatctatagttatttttaattgctatttacaggaatcttgatatc

SEQ ID NO: 472604 - DNA, 201 bp, Homo sapiens
aaattgtgtaatctagattcctatattggtagttcagaggaagagagaatggatggggaattttgcagaaataaaaagaaaacatcaaatgcggctcttcyatgacctgctaggatctgcttctaccaaatcatggatatagaaataggcccagctgcacaccactctaattatcctgttcttccaattcctcttttatgc

SEQ ID NO: 472605 - DNA, 201 bp, Homo sapiens
cagatggaactaggtttaggtagaaggccagttccacaaagggcagagggagggatgggatttaataggtaaagaagaacccatttgaaaataaaggttgyttcaaaaggcagctgccgccaggcacacagcattccatcagacaggtgccagacaagcaaaagcaaggaagttggcagaaagaaagtccaggtgatgtag

SEQ ID NO: 472606 - DNA, 201 bp, Homo sapiens
ttatgaactagttagccctgagtcataaatttacctactttttttttttttttttttgagatagtttcactctctttgcccatgctggagagcagtgacgygatctcagctcactgcaacctccaactcccaggttcaagagattctcctgcctcagcctctcaagtagctgggattacaggcacctgccaccacacccag

SEQ ID NO: 472607 - DNA, 201 bp, Homo sapiens
ctctttccgaagctccagcaaaatatggcaggacttatactcactgaccataacatggtttgggtcatacacccatccctgacaaagcatgtgagttttcyctttggacaagcctgggtttcagaccctgtggagttagaaggtagactcaaggccatctgaactatatatactaactggaagggaggaatagtttcctct

SEQ ID NO: 472608 - DNA, 201 bp, Homo sapiens
cctttggcacttcacatgtactctacttgtattctaatttaactttttgggtatttcttccttgcttcttctatgaaactctgaattcctggagagcaagwaacatgctatttacttaatctggattttctatataatgctctgatggttaatactcagtgtcaaattgattggcttgaaggatgcaacattgatcctggg

SEQ ID NO: 472609 - DNA, 201 bp, Homo sapiens
gtcctacaataccggttgtccaacaaccaaaaatcattattttaaattttgttcaattttctgggtttctttatggtgggagagcaaggacagagctagaragaacttgaaaaggaagtccacatccttcccttttgtagatgaagcaacagagactcagggtggagttgcagtacactcaaggtcacacagctactggta

SEQ ID NO: 472610 - DNA, 201 bp, Homo sapiens
aggcgtgttcagaagaaaatgattagccttacaatccatttatttgaaaagatgactgaacattaatgatttaagatttatctcaagaaattagaaaaacrgccaataaaacccaaagaacatatgaggaaggcaacaataaaggtaagagcaaatattaatggaataaaacaaaacattcaatagaaaaatcaatagcac

SEQ ID NO: 472611 - DNA, 201 bp, Homo sapiens
attttatgaactagttagccctgagtcataaatttacctactttttttttttttttttttgagatagtttcactctctttgcccatgctggagagcagtgrcgtgatctcagctcactgcaacctccaactcccaggttcaagagattctcctgcctcagcctctcaagtagctgggattacaggcacctgccaccacacc

SEQ ID NO: 472612 - DNA, 201 bp, Homo sapiens
gagttttcctattggcttgacataattttttacagggatttaacattttctaagacatccgctaagctctcaatagatcttccataaaaaagaactgagtyctaagattatcacctttggttagaaacccagtttatcagcatcagtattatcacttgcttaattgtttaaaaaaaatgtacaatcacctcccagtcattt

SEQ ID NO: 472613 - DNA, 201 bp, Homo sapiens
aacatgcaaacatgcaaataatatcaatatctacctcccagggtcatctaagtgctaagtggagagagtatatgtaaagtacttatatagtgcctgctcawtatgttaaatattattattaattgtattagctcaataaatgtttgtttagagtaaatctactggttaattaatcactggattattgtaaggactaaatta

SEQ ID NO: 472614 - DNA, 201 bp, Homo sapiens
cgaaaacatctatccactttctctgaccccaccttagtccaagccaccaacatcttgttcctggactgcctcctaacctctctctctgttctgatttttcyacttccagttcatttgccacacagtagccagagtgatcttttaaagacattccgtttacaataaaatccaaacccctcaccattgcctataagatcaggc

SEQ ID NO: 472615 - DNA, 201 bp, Homo sapiens
tcctgcctccccctgccctggcctctgagagccgactgagcccagccccgtgcagcagcggttgcctgtgtcgccgcctagtctccggtcttggtgctctsccgggggtgccccaaggagccagtgcgcgctgcgggctgggaaggaggcgccgctcagctagtcctcctcctcctcctcgtctttctcctcctcctgctg

SEQ ID NO: 472616 - DNA, 201 bp, Homo sapiens
agacttgttcctccctgcttgttctctatctactagatggaactatcatcttaccagtgtcagccttgaattggtatcttttctttactctttccctacakccaaccatcagtaagacctcctaagtgtatctcgaaaacatctatccactttctctgaccccaccttagtccaagccaccaacatcttgttcctggactg

SEQ ID NO: 472617 - DNA, 201 bp, Homo sapiens
agtgtgctgagaggaacacataccaactctgggagttatgtattatccccattttaaagatgtggaaaaaaaaccctagacaaggatcttgcccagtatcrtacagctagtaagaagtatgcataggaacaatactcttaactctggttttcctccagactgagttagtcacattgtccttgatcttcccacatctccttg

SEQ ID NO: 472618 - DNA, 201 bp, Homo sapiens
gaacctgtggatatattaccttacgaggccaaaggaactttgctgacaagattaagttaaggacattgatactgagatggtgagattagattggattagcygggtgggcccaatgtaatcacaagggtccttaaaacagggaggcagaagagtcagagtcagggaaggaaatgtgaccgaggaagcagaggtcagagcaat

SEQ ID NO: 472619 - DNA, 201 bp, Homo sapiens
tcctcgtcatcagtgcttcccaattgctgtgaccacatttacaggttaattgtagatatccatactcttagctctgggggaaagccagtaccacacagctrgtcacctggctacccttgcaggccaataaatagagttttctaagtgtgctgagaggaacacataccaactctgggagttatgtattatccccattttaaa

SEQ ID NO: 472620 - DNA, 201 bp, Homo sapiens
atcagagaataatgaccagtgtatacagatatgcacacttacatgcacacacatcacacatatagagcaggggagacagatttcatacaagtttatgtttstttcttgtttgtttagtaagacttgcacgtcagaacgagttttggagagaaccttccctcaaggtcttatttctggtttctctgggataatgagtgtaag

SEQ ID NO: 472621 - DNA, 201 bp, Homo sapiens
ggttaaagaagaatcacttatatcaagcccttaacattccagacatggtttaaagccaagaaaagtgaaatcacttatcaaaggtctcacaacttttgagmaagactcaaattctgttttctttagtccaaatcctgtgctctggtacaggtattaggaagtctccttaatagtcagtacatccttgggtttcccaattga

SEQ ID NO: 472622 - DNA, 201 bp, Homo sapiens
tagaatcaacagttctatttctgggtctcccaggccgctcaaacttaacatgtgcaaatgtaaacatctaccccccatccttcccactacagacttgttcmtccctgcttgttctctatctactagatggaactatcatcttaccagtgtcagccttgaattggtatcttttctttactctttccctacagccaaccatca

SEQ ID NO: 472623 - DNA, 201 bp, Homo sapiens
tttccaggacacatgtggaatctacatgaactcatcagaccatcagagaaccataaggacagtggagtagcaatgactggctttctccaggttgttattcyagctgactgtggttctgtgcagtgaggactacatgtaaggcctaaccccccaaaggaccagttagctttgctgtgttccacagggacacagccagcctcc

SEQ ID NO: 472624 - DNA, 201 bp, Homo sapiens
atgtgggaagaatggactgcctagaatagatgttatagtggtatcattttctgttttcattgatttttgttttttctttgataggagcgttttaactttcstatcagagaataatgaccagtgtatacagatatgcacacttacatgcacacacatcacacatatagagcaggggagacagatttcatacaagtttatgtt

SEQ ID NO: 472625 - DNA, 201 bp, Homo sapiens
tatctacagcacattctagatcatgctattatgaaaagattcagtcccctggtgctggctttgtagcaatagctgactgtactctgatgaggatgctttgytacttaaatatcttcctagcagaggactcacagcagttttcaaatggcatttccattcatcactgcagcactcctgagaggcaacagaggttcaagcctc

SEQ ID NO: 472626 - DNA, 201 bp, Homo sapiens
caaagttcacaactgggcctctttctttctctctcctcctcttccttatctcattcttttcccaagcttttattctcattgacagacttagtcatccaaaygtatttctccagttctgacatctctgaactccagacttagaatcaacagttctatttctgggtctcccaggccgctcaaacttaacatgtgcaaatgtaa

SEQ ID NO: 472627 - DNA, 201 bp, Homo sapiens
ctagagttagaaaacgagatagaaaatgggacaacccagaacatgtgggaagaatggactgcctagaatagatgttatagtggtatcattttctgttttcrttgatttttgttttttctttgataggagcgttttaactttcctatcagagaataatgaccagtgtatacagatatgcacacttacatgcacacacatcac

SEQ ID NO: 472628 - DNA, 201 bp, Homo sapiens
cacaccccactggcaatcctcaaatctctaaagctgatttaaaagagactgggaaattgagctcaacagaaatggcaaaaataaagaagttcatttttaaygaacaaggaagcctaccaataccaatctccattgggccacagatgcctcattgtgcccaaattggattggaatgcacaagccaacaagcacaagcacaac

SEQ ID NO: 472629 - DNA, 201 bp, Homo sapiens
ccttaagcagttctctgaaactttgtttaatacaaacacttccactgcattgcaattgggaatacatctttcaacccacattttgcctggttataagtccwattgggtactgagcagaggcagtcaatttggtttgctttatgatctgaaccaaacacaaatattaagtgaggtcaaataacacaccccactggcaatcct

SEQ ID NO: 472630 - DNA, 201 bp, Homo sapiens
agtttcagagtctttattaggtcaaaaggaaaggacatctaattgctatcttagctatcatttttcactaaccactgaaatgtgtggggttttttttagcmtgaagtctttttttttttaatttttccaactttcttagcagtttcagatggtacattgtgagacaaaggcaaaagcaacagggagaatcatctcatgaga

SEQ ID NO: 472631 - DNA, 201 bp, Homo sapiens
ttcatgagcaattataagcatcttagcaaatgtgctcaaattctatcaaaaaagaatagcaaaattgtatcatggattttctaattcattaattaatctcyaaataagtctttattgagctcctaccatttgtcaggggatacaagaaaacaaagcagacttgtttcttgccctctttgaatttatgtttttgaaggacaa

SEQ ID NO: 472632 - DNA, 201 bp, Homo sapiens
tagtcccagctacctagaaggctgagacaggaggatcccttaagcccaggagttcaaggctgcagtgagctatgatcatgccactgcactccagcctgagygacagagccagactttgtcacaaaaaaagaaaaaaaaaattactttgcaaaaaaaaatctacattctcaattatccatttcactgatactaggtgtacat

SEQ ID NO: 472633 - DNA, 201 bp, Homo sapiens
taaaccagatacagaaagacaaatactgcattaactcattcatatttgaaatctaaaaaggttgaactcatagaagtagagagtccaatgatgattactcraggctaggaggctgaggagggaggaaatgggagatggtgatcaaagagtacaaagtttcagacagacaggagcaataagttttgagatctattgcacggc

SEQ ID NO: 472634 - DNA, 201 bp, Homo sapiens
ttttttttgagacagggtcttgctctgtcacccacactggagtgcagtggtgcaatgtgggctcactgcaacctccacctttcgagttcaagtgattctcygggctcaggctcctgaatagctgaaaatacaggcgtccgccaccacacccagctaatttttgtatttttatagtacaggtagggtttcaccatgttggcc

SEQ ID NO: 472635 - DNA, 201 bp, Homo sapiens
ctgcagatgagtcagtgagtcagccaggatccctgaatgagaggagtaaacttttgacctcaagaagcttactgtgatctggtgattaccacagcagagcycaatccatcagctttgaaaaaacaatgaactctggtgacctggtttggccaaacctcactgctgtgataaaaagcatgactcctgtcttttgatacacca

SEQ ID NO: 472636 - DNA, 201 bp, Homo sapiens
gtttggccaaacctcactgctgtgataaaaagcatgactcctgtcttttgatacaccatggcccatttttaaaattgcttctgagaaagtaaatgagaccycagtttgaaagaaatgaggccagactgaaagatgtccttccataagcatttggcaagcatggaaatgacatctgtgggcttatcattcccaggcccctat

SEQ ID NO: 472637 - DNA, 201 bp, Homo sapiens
cctgtgattatataagttaatacttaataaactcccccttatatatatcctattagttctgtccctctaagacaaccctgacaaatacagatgccaagatkgattgatgttgtacacgatatataaaatttttgtcaattaaaaaaaattgagaaaagaaggaatgacttgaaatatagcaaaggtgtcttcaacacagta

SEQ ID NO: 472638 - DNA, 201 bp, Homo sapiens
gtcttatatgttagaggtgctctatgagatatcatttgtagggggatgggggcttacttgtgtattagtcatgattctttagttttaagtgcacaaaccawatagaactagcttgggcaaagaaaaaatgttcacataactgagaagtcaacggctaatcagggactttaggcacaatgggattaagggttcacacaaagt

SEQ ID NO: 472639 - DNA, 201 bp, Homo sapiens
gcaaagaaaaaatgttcacataactgagaagtcaacggctaatcagggactttaggcacaatgggattaagggttcacacaaagttgtctgggctttctcytgtctatgtgtcagtcttattctgtcctactctaggggcactttttctgcaaagagacagaaagtggctgccaatagctccaggttatattatactagct

SEQ ID NO: 472640 - DNA, 201 bp, Homo sapiens
tgactagaggcttgaatcctgaaaacggggacacgtagtaaagataaattactaacaagcccttacccataataggaggaaagtcatcactataataattstgtttgctgagatgacccaatgccagtttcagagtctttattaggtcaaaaggaaaggacatctaattgctatcttagctatcatttttcactaaccact

SEQ ID NO: 472641 - DNA, 201 bp, Homo sapiens
ccaagtataagatcatatcatctgcaaacaaggataatttgaattcttcctttccctttttttttcttctttttgagacagagtcttgttgtgtcacccakgctggagtgcagtggcatgatctcgattcgctgcaatccccacctcctgggttcaagcaattattgtgtctcagcctcccaagtagctaggactacagga

SEQ ID NO: 472642 - DNA, 201 bp, Homo sapiens
gagaagccacatgactactcaaggttcttttcattctctgtggtttccaggatcaggagtgagagttaggtaggacttcaaccatatcctgagagtttccmggacacatgtggaatctacatgaactcatcagaccatcagagaaccataaggacagtggagtagcaatgactggctttctccaggttgttattccagctg

SEQ ID NO: 472643 - DNA, 201 bp, Homo sapiens
tatgcacacttacatgcacacacatcacacatatagagcaggggagacagatttcatacaagtttatgtttctttcttgtttgtttagtaagacttgcacrtcagaacgagttttggagagaaccttccctcaaggtcttatttctggtttctctgggataatgagtgtaaggtttcctatgagaagtaagactgagaagc

SEQ ID NO: 472644 - DNA, 201 bp, Homo sapiens
gggctcggggaaaagtccagcagcgagagggccgcgtgtcccgggacggttccaggggagcccgcgcggaaacgcggaccaggcgcttcggcccggatgcyggatccaggagaaggggacctcgcttgccgtgtccaccgccgcggccccggcgccaagaacagagcctggccgtgagtgaacgactggccggggtacaaa

SEQ ID NO: 472645 - DNA, 201 bp, Homo sapiens
cagaccctgtctttaaatgtagtcacattctgaggtactggcagttagggactttggggagacaattcaaccacaacaattgggagttctgcttggatgartatgtccaggtagttgactgtcattgtgaatcctgggtagggcatacccttcacaatgacatacaaaacaagttctgcttttctcactcgccaaatgggt

SEQ ID NO: 472646 - DNA, 201 bp, Homo sapiens
tattattcctgggtctgattctattgactaatttgtctcctggttatgggtcatattttcctgctactcagagtgtctagtactttttaattagttgaaaracactatgaacattacgttgctgaatatctggatttttctgtcttcttctaaagactgttgaaggttattttggcaagcagtaaacatttcttgcaaatg

SEQ ID NO: 472647 - DNA, 201 bp, Homo sapiens
acatatatatacatacatatatatacacatacatatatatatacacatacatatatatatatagagggagaggagtatgtgtgtgtgtgtgtgtgtgtgtrtgtatataatatatatataatatatatatataaaatatatataatatatgaatataccttgcatttatatatgaaaaaaacagaatgtattagcctgttt

SEQ ID NO: 472648 - DNA, 201 bp, Homo sapiens
gttatagtggtatcattttctgttttcattgatttttgttttttctttgataggagcgttttaactttcctatcagagaataatgaccagtgtatacagawatgcacacttacatgcacacacatcacacatatagagcaggggagacagatttcatacaagtttatgtttctttcttgtttgtttagtaagacttgcacg

SEQ ID NO: 472649 - DNA, 201 bp, Homo sapiens
atatatatacatacatatatatacacatacatatatatatacacatacatatatatatatagagggagaggagtatgtgtgtgtgtgtgtgtgtgtgtgtrtatataatatatatataatatatatatataaaatatatataatatatgaatataccttgcatttatatatgaaaaaaacagaatgtattagcctgttttc

SEQ ID NO: 472650 - DNA, 201 bp, Homo sapiens
acatattgggcactattctaggccctgtggatgtattagtgaactaagcaggaaaaaaaatcacctactcatgtgaaggttatgttgcaatagactttggrgacagagacagacaataaattaaacaaataagtaaagtttataataccttagaaaataaaaagcactataaataaaataaagccaggaagagatatagga

SEQ ID NO: 472651 - DNA, 201 bp, Homo sapiens
ccaattttttgcagccttgaggaccgggagatgactgggaaattgctgacagggcagggaaagggctatactctacatgctggcattcacagacaaacacsgaggggcagcaacagcaaagaggagtcttggtgctcttcctggagttcccaggctttactggccatggatcctgttattcaatcaaatacttattgtgtg

SEQ ID NO: 472652 - DNA, 201 bp, Homo sapiens
atttggattatcttcttctctgtaggcaacatccattctggggagtgaggaaagctcgaagttggatgtagaagagtggaggcaggggtctggactctaargatcctaaagttttctttttaagttgtcctggccagttccccagggcatacggaaaaaaggcatccagaataaaagctctgtccatgcattcttaaaaaa

SEQ ID NO: 472653 - DNA, 201 bp, Homo sapiens
ccttttccctcttctttttcactttctctaagcaaagctgttcagaatttctacaattacttgtaacacctctctcatttggattatcttcttctctgtargcaacatccattctggggagtgaggaaagctcgaagttggatgtagaagagtggaggcaggggtctggactctaaggatcctaaagttttctttttaagt

SEQ ID NO: 472654 - DNA, 201 bp, Homo sapiens
tctctctccctcaaagctctgtaacatgagatcctggtgggagtggacaaattataactcaaagtttgctgaaagaagagccttttaaactggcctcttargaaacagtctctccttttccctcttctttttcactttctctaagcaaagctgttcagaatttctacaattacttgtaacacctctctcatttggattatc

SEQ ID NO: 472655 - DNA, 201 bp, Homo sapiens
caggagaaggggacctcgcttgccgtgtccaccgccgcggccccggcgccaagaacagagcctggccgtgagtgaacgactggccggggtacaaatggttytgaagcacttgaagctcacaggcaaaggctaagagtctaaatcccatcccgccgtaagtattttcattcccaaacctaaatcgtaaaggaaaagtggaat

SEQ ID NO: 472656 - DNA, 201 bp, Homo sapiens
tctacctcacaacttatattccgaagtaaagtcaaatcccgaccatcgcatcttttgtattcattcaaaataatacttctaaaaactttctttgcaacagyattgaaggattctattatctcatatagatcgacctctggaaatatttcttttagttgttcctctgtatctaatcttattttgttaacagcttcatctctg

SEQ ID NO: 472657 - DNA, 201 bp, Homo sapiens
tgccatgttgcccaggctggtcttgaatgcctgagctcaagcaatccacccttcttggtctcccaaaatgctgggattataggtgtgagccactgcacccrgccttaattcttcctttccagtttggatgcccttcatgtttttctcttgtctcattgctctagctaggacttccaggattatgttgaataacattggtga

SEQ ID NO: 472658 - DNA, 201 bp, Homo sapiens
cttccaggattatgttgaataacattggtgacagtgggcatacttgtcatgttccagatcttagaggaaaggctttcatttttttccccattcagtatacyagctatgggtctgtcatatatggcttttattatggtgagctatagtccttctataccctgttattttagggtttttatcataaaacaatgttgaatttta

SEQ ID NO: 472659 - DNA, 201 bp, Homo sapiens
ggggagactggaggtgggataagacctgagactcctgtctctctcagacctagtgtcttccactcagatggtagcagcttcctagaccgtggagtcctaayaggtaacaagctgacggtgactcagcatgctagctcttgggttaccgaagaaagcaaggacctacgatgcatcggttaaaaagtatcatgcagagaaact

SEQ ID NO: 472660 - DNA, 201 bp, Homo sapiens
tatttatctcatttgacctataacatcctgagaaaccaaatgtgattgttctttctccttttccccagtaactgagggacaagagtcatggagaggttcaytgtgactgtggacaagtcactcgatgaagtttatctgtaaaaggagaggtcttgtgaggctcctcttcccagcacaagttgaatttgtctagggtcaccc

SEQ ID NO: 472661 - DNA, 201 bp, Homo sapiens
attcaaaagaaaattaaatttactaatggaaactaccgctattcattttctggacatatgtaaagataaagccagcttaaaacaacaaataaccaacctartcttttaaccttcagatatggtgcaaaagcatgacctaaaagatactttttcattactagcgaagcaggctttagtctcaaactttaccttagaccattc

SEQ ID NO: 472662 - DNA, 201 bp, Homo sapiens
gggaaatgctttgagactatgtaaatatcctgttactcctcaaactttcacctactggttttaagagtcattgaatattcttgtctggattagttattatyatgatgtttgccaaataatgatttgataatttcatcttcctttctatatttattagttggactttgactataagaaagagttttccattttcatttgttt

SEQ ID NO: 472663 - DNA, 201 bp, Homo sapiens
gtgggagtgcaggctacacaagtacagaagcagcagccttaactcagatgtcagctgccagcagaggctttaagaaacagactggttaattcacagaacargctttcacctgccacacaagtgctcagcaggagacgattttccatctagcctctttgaacataagggggttggatggttgcttgagagagggtagactcc

SEQ ID NO: 472664 - DNA, 201 bp, Homo sapiens
cctttttaatttccaattcacaaagtgctatcctccaggatgccaggaaatgaactgggggacagaagaaagagtcaagaaaagaagataaaacttagctkgtagcctagtggcataatagctaacatgtctaaccattagcaaatgctcaaaaatcctgagcccagaaaagccttattcactaccgttacagaaataaat

SEQ ID NO: 472665 - DNA, 201 bp, Homo sapiens
ccaggctggtctcgaactcctgacttcaagtgatctgccctcctcggcctcccaaagtgctaggattacaagcatgagccaccacacccagcttaacctgyctttttaatttccaattcacaaagtgctatcctccaggatgccaggaaatgaactgggggacagaagaaagagtcaagaaaagaagataaaacttagctt

SEQ ID NO: 472666 - DNA, 201 bp, Homo sapiens
aaaattctcttttattattcaagttaatgtaagttggatttctgtccactgcttccaaaagaatcttgtctaaaaataaaattaaagcatcagaggtataytgaaatcatctgagacctttcataacttgtttgggcaactaatctcttatgaggataaaagtatcatcattctcagtaaacgaccacaagaacaaaagac

SEQ ID NO: 472667 - DNA, 201 bp, Homo sapiens
aaaagaagaaaataaaatgcatgtatactactctgcaatccactctcaggtcatttgaaacaaagtcaaaggagagaaggagttagggggatgatgtataygactgtggattctacaaaaattttatttgatataaagcattcaacgcatctaaagtcatagaatgttataactggaagagtcttagagacaaagcctagc

SEQ ID NO: 472668 - DNA, 201 bp, Homo sapiens
caggtttgttacataggtatacacgtgccacggtgttttgctgcacccattaacctgtcatctacattaggtatttctcctaatgctatccctcccctaaycccccaccgcctgacaggccccagtgtgtgatgctcccctccctgtatccatgtgttctcattgttcaactcccatttatgagtgagaacatgcagtgtt

SEQ ID NO: 472669 - DNA, 201 bp, Homo sapiens
catgcacataaagtaatcatcacaatgcttggcacatagtaagtgctccataaatgttagctattagaatgattatccatgatagagatccatcctagaamacaaattggagccagccataatatgtggggaaatcctccccttcagttcacctcctagacactgggccagaataggtcctggaggcatgaggtgaagatg

SEQ ID NO: 472670 - DNA, 201 bp, Homo sapiens
caatgtgagaacatgtacttgctataaatcccgcctttacatcaaagcaaccttgatgttattgcacaaattataggctatgatgcacatagcattcttgycttttctggagggctgcctttaattggctatagagcacatatgccctttctctgtggtatataagctcctggtctgaggagtaatggtgtggagatctac

SEQ ID NO: 472671 - DNA, 201 bp, Homo sapiens
tgccctcactttaacagtagacacttggtgaggctgtgcatgcacctttcattgcaggtcacccactcgcatgataagagtttgtgtctgtttttccacartttcagctctttctgtacagaagacaagactctcactcagggcaatcttagcagatttgaggctcggtatctgcttctgaagccaggagacagaatccct

SEQ ID NO: 472672 - DNA, 201 bp, Homo sapiens
taattacaatttgtcaattaaaagtaatatcattaaaatgtttaaaaactaaatacacttttatgatacaatctagcaatcatgatctttagcatttatcyaagtaagttgaaaacttacgtgcacacaaaaacctgaacatggatatttatagcagctttattcacaattgccagcaacaaaaacgtccttcaatgggta

SEQ ID NO: 472673 - DNA, 201 bp, Homo sapiens
agaaaatgtattaaaacaaaagccagctctttgaaaagaccaatacaactgataagtctctagccaggataatagagagagaagacataaattacccatawcagaaatcaaaaaggggatattgctacagatcccatgggcattcaaaggataataatggaatagtatgaactctgcccacaaatttgataacatagataa

SEQ ID NO: 472674 - DNA, 201 bp, Homo sapiens
ctaagtgtttaccttagaaaactagaaatagaagagtaaattaaatccaaagtgagcagatgtaaagaaataataaaaattagagcagaaatccatgaaaytgaaaacaggaaactaatacagaaaatgtattaaaacaaaagccagctctttgaaaagaccaatacaactgataagtctctagccaggataatagagaga

SEQ ID NO: 472675 - DNA, 201 bp, Homo sapiens
ttctggaaaaagcaaaactatggagacagtaaaaagatcactggttgccaggatttaggcgggagggaggaatgaataggtgataggtggagcacggaaawttttttttttttttttttttgagacagggtcttgctctgtcacccacactggagtgcagtggtgcaatgtgggctcactgcaacctccacctttcgagtt

SEQ ID NO: 472676 - DNA, 201 bp, Homo sapiens
attccctaagtgtttaccttagaaaactagaaatagaagagtaaattaaatccaaagtgagcagatgtaaagaaataataaaaattagagcagaaatccaygaaactgaaaacaggaaactaatacagaaaatgtattaaaacaaaagccagctctttgaaaagaccaatacaactgataagtctctagccaggataatag

SEQ ID NO: 472677 - DNA, 201 bp, Homo sapiens
ctgaggagtgctttacttccaattatgtggtcaattttagaataagtgcaatgtggtgctgagaagaatgtatattctgttgacttggggtggagagttcygtagatgtctattaggcctgcttgttgcagagctgatttcaagtcctggatgtccttgttaaccttctgtcttgttgatctgtctaatattgacagtggg

SEQ ID NO: 472678 - DNA, 201 bp, Homo sapiens
cccaccaggtccctcccacaacatgtggggattatgggagctacaattcaagatgagatttgggtagggacacagagaaaccaaatcacagagccaccagstgatagtctgcaaactccttgttttaaaattattttctcctttgcctggcctagaggtatggaggctctattatcatagcatccagatggacataggaga

SEQ ID NO: 472679 - DNA, 201 bp, Homo sapiens
catcccaggtcaacttcagactgctcttctggcagggacaatttcaagccagtggatcttagcttgctaggctccatggggatgggatctgctgagctagrccacttggctccctgacttcagcaccctttccagaggagtgaatggttctgtctcactggcattccaggcgccactggggtatgaaaaaaaactcctgca

SEQ ID NO: 472680 - DNA, 201 bp, Homo sapiens
tgagctccttaaatactctgattactaaccccttgtcaaataggtattttgcaaattttttctcccattctataggttgtctcttcactttgttgattgtrttctttgttgtgcagaagctttttaacttgatgtgatcacatttgtccatttttgctttggttgcctgggcttgtggggtattgctcaagaaatttttgc

SEQ ID NO: 472681 - DNA, 201 bp, Homo sapiens
actctcggcggtccacgcggggacagacctcagcccgtgagccttgagctccacgcggggacagacctcagcccgtgagccttgagctccacgcggggacrgacctcagcccgtgagccttgagctccacgcggggacagacctcagcccgtgagccttgagcccagaaggagtggcagcctcaggacgtttgccaggtgg

SEQ ID NO: 472682 - DNA, 201 bp, Homo sapiens
agccttctttttgtcatctgctgtcacaagtgagggtgggatgagggtgttataccggcatctaatgggatgctgctcaacatcctaaaatgcatagcacwggaagccccacgacggagaattatctggtccaaatgtcagtagtcgcaaggatcctgcctctgccctcagtgagcttcagtctagtcggggttacagaaa

SEQ ID NO: 472683 - DNA, 201 bp, Homo sapiens
ttcaaggaaatgcaaattaacaccaccataaaacactgctgtgtaactaccagaatggcaatatttataaaataaatgctattgtatatatataaggtacrtaacatgatgctataagatatatagtaaaatggtttctgtagtggaacaaattaacatatccatcatcggccaggcgtggtggctcacgcctgtaatccc

SEQ ID NO: 472684 - DNA, 201 bp, Homo sapiens
atttggagccttctttttgtcatctgctgtcacaagtgagggtgggatgagggtgttataccggcatctaatgggatgctgctcaacatcctaaaatgcayagcacaggaagccccacgacggagaattatctggtccaaatgtcagtagtcgcaaggatcctgcctctgccctcagtgagcttcagtctagtcggggtta

SEQ ID NO: 472685 - DNA, 201 bp, Homo sapiens
tacaaaataggaagaacggcaataaataaaaatcattaacaaatttggtacacattaacccaactaaatcaataatcacttcaaatgtcaatgggctaaayttactaattaaaagacagatatagtagattaaaaaataagacccaactacatgttgtctacaagaaacccactttaaatataaaagtagagggatacaga

SEQ ID NO: 472686 - DNA, 201 bp, Homo sapiens
gggacattaggcaatatttggagccttctttttgtcatctgctgtcacaagtgagggtgggatgagggtgttataccggcatctaatgggatgctgctcarcatcctaaaatgcatagcacaggaagccccacgacggagaattatctggtccaaatgtcagtagtcgcaaggatcctgcctctgccctcagtgagcttca

SEQ ID NO: 472687 - DNA, 201 bp, Homo sapiens
cactaaaaaagtttcaaaaagaagtataattgatatattaagaaaggggagaaaatcaaatcatagaaaatgctcaattaataccacaaaagataggaaamgaatgagatacaaaataggaagaacggcaataaataaaaatcattaacaaatttggtacacattaacccaactaaatcaataatcacttcaaatgtcaat

SEQ ID NO: 472688 - DNA, 201 bp, Homo sapiens
taaatgcaagtaaagcactaatcacagcacccggcacataaatattcattaaatgtcagttgttttgtgaaaattaaagagaaacgtaacagtagaatggsatttaaagaagagaagtatctccttgtcagactctttctctttcttaaatatgaattttctatagcctctggcccctgttctagtaccattttccctttt

SEQ ID NO: 472689 - DNA, 201 bp, Homo sapiens
ttcatctgatggttagaaaaataactatctgcttcatggagttgtctgaaaagtaaatgcaagtaaagcactaatcacagcacccggcacataaatattcmttaaatgtcagttgttttgtgaaaattaaagagaaacgtaacagtagaatgggatttaaagaagagaagtatctccttgtcagactctttctctttctta

SEQ ID NO: 472690 - DNA, 201 bp, Homo sapiens
cttccacaaatctaacatcaataaaataagacagccctggacctgaatatgacagcctttacatggttctaatgcattgcctaccctatgcacagaacaaycactaaactcagcaggaaaaaagatcaatcagtaaaaataggaatttgagtttaattcaagtacctgggaataccaacatgctttcatataatctcagta

SEQ ID NO: 472691 - DNA, 201 bp, Homo sapiens
taattaaagctgtctccaaaacagaatggctttcctcatctagcatccttggcacagggtaattcaactgaagactgggttcatttatccattcaactccmtaataaatacttatggagtattaggcaatgtcctggatattggaggaatacaaagaatagtgccagtcatatcaatcttgctctcaaagagtttaggttc

SEQ ID NO: 472692 - DNA, 201 bp, Homo sapiens
caataggtttatttaaaaatctctctgatcttttactctgactcactgaaagcaaattttgaaaagtgaaaaacctataaggcttttcattttctactaastatcttccacaaatctaacatcaataaaataagacagccctggacctgaatatgacagcctttacatggttctaatgcattgcctaccctatgcacagaa

SEQ ID NO: 472693 - DNA, 201 bp, Homo sapiens
agaccacttacatagtggctcaaaaaatcaagtatttagaaataaatctattaaaagataagcaaaaatgccaaacccaaaactacaaaacatttatatgrggaagggatatccaactccaactccctctaggcatcctatctgccctacgtaaggggaggaaaagggaccgagtagcacttgtgaagattacagtgcaag

SEQ ID NO: 472694 - DNA, 201 bp, Homo sapiens
ctaacctctagtaccccagaatgtgaccatatttggagatacggtctttatagaaatattaaagttaaaataggttcatttggtgtgagctctaatcccayatgactggtgtccttatgcacagaggaaatatgaataccaagaaagagacacagaggaatcagagaaaagacagacacctatgagccaaggagaaaggcc

SEQ ID NO: 472695 - DNA, 201 bp, Homo sapiens
atataaaacaaaaatgaatttcatgtttagacttgggtccctttcctgagatatctcattatgtgtatgcaaatattccaaattcagaataaaatgaaaaycaaaacactctgatcccaagcatttcagataagggatactcaacctgtaccaaactgtggcaagataagactattaaacatctgaagtgtacctcagatt

SEQ ID NO: 472696 - DNA, 201 bp, Homo sapiens
aaagatcctaatcatgcctagatgacaaggtgagtgtaacaattaaatatgacatgcacataaagtaatcatcacaatgcttggcacatagtaagtgctcsataaatgttagctattagaatgattatccatgatagagatccatcctagaacacaaattggagccagccataatatgtggggaaatcctccccttcagtt

SEQ ID NO: 472697 - DNA, 201 bp, Homo sapiens
ttttaaaaagaccacttacatagtggctcaaaaaatcaagtatttagaaataaatctattaaaagataagcaaaaatgccaaacccaaaactacaaaacawttatatggggaagggatatccaactccaactccctctaggcatcctatctgccctacgtaaggggaggaaaagggaccgagtagcacttgtgaagattac

SEQ ID NO: 472698 - DNA, 201 bp, Homo sapiens
tgcatttatcctgagtttactactttattgattctgatatactcaagccagaatgattttatattgtcctaatacagacctattttcaatatgtgctaatsctatagtttgagtaggctaaaatgatttgttctaaatagtcatttttacatgatagggccaagcaaagttaaaattagaggttggatgcaccacaaataa

SEQ ID NO: 472699 - DNA, 201 bp, Homo sapiens
gttcggctaatttttgtatttttagtagagacggagtttcaccatgtcggccaggctgagggtctcgaactcctgacctcaagtgatccaaccacctcagyctcccaaagtgctgggattacaggtgtgagccactgcacccaacctgacaagtgactattttcaagctaagtaaattaaatgtatctctaaatagctcat

SEQ ID NO: 472700 - DNA, 201 bp, Homo sapiens
caggagagtgtccatttaatattcatttcaaaatatttgctcttcctatttgtgactgccctttgtgagataatgtattagcatagtcattttcaatttgyagggggacagtgggcagcaccaatattagcacctatctcagtaagacctaggaaacaaaaaaggagtttgcactattaagcagtgagccacagaaagaat

SEQ ID NO: 472701 - DNA, 201 bp, Homo sapiens
ttcttgataactttttggaagttgacaaaatagaaaaagaaggtccaaatgtctatatttttatgtacacatttatgcatatttacaacttctgatatttmttcttttttctcagattatatgaacctctggactctggagtaagcatgtaaatatatacgtatatgtctgtgtgtgtgtgtttctgtgtctgtgtgtatt

SEQ ID NO: 472702 - DNA, 201 bp, Homo sapiens
gttgtcagctcttatagacctgaagcaatgtgatcaactttccgaaggtataggaaagagaaatgaaaagagccaaaggctgtttccattttgaaaacatwggctttgggtataaaaaacaaaagtaatacttggcttagattggtacctatgttaacttaattacaaactgatcttttattgtttttaattaaatgctac

SEQ ID NO: 472703 - DNA, 201 bp, Homo sapiens
acactggtggcattttttggttaccatagttacattaacaatgtacatgtgacatgacatccttctatgtgaaaggtttctgtggcagatattttgtagamctgggagtaaaggaaaactatttaaagtttggggaacacataaattagtctgccattgtattccggagccaccatttcaatccagggaagagagccatcc

SEQ ID NO: 472704 - DNA, 201 bp, Homo sapiens
ttaagttacaaaataatagttccccgaatgattcatttcagcactaatgtcaggttattcaaatattgtatttaattttaaaaaattatgctgaacatctrttttgggttaagccaatctggagataaagcaaattccattgtagaatcatatgatcatttagaatcatatgtttctgggaacaatgaaagtatctttaac

SEQ ID NO: 472705 - DNA, 201 bp, Homo sapiens
aatgaatacagtgttgatatgtctttaagatttctccacaaccaacagagaagagaaggtaacttctggaccctgaagtaaatcttatttttatttggggrattatttggacatagctgctattgccaaaaaaagattaatccatactatgcccacctcccacaggctctacaaccattccaaagaaaaacaggtgaggag

SEQ ID NO: 472706 - DNA, 201 bp, Homo sapiens
acaagacttctggaggagtctttcactccgtatggatcaaaaatggtgtgtttcaaccaagagtatggctttggacatcttctcgtacaattcacatattkgtcagtcatataaacatttcaatttcaagaatagcatctaatgtgcaatttaatttggcctccattttgtaactctcggagctgcaaatgtagttatttt

SEQ ID NO: 472707 - DNA, 201 bp, Homo sapiens
ttgttctcattaattcaacagccatggttgacaataccatttgtggttgactcaatcattcagcaagtcctgtcacactatttgacttcacatttcccaamatgagaaatgattctcaacaacaacaaccaaaagacaaatattgggacacatttatcacaggcaggaaatgcaacacaaagaaaagcaaggcaaaaagtg

SEQ ID NO: 472708 - DNA, 201 bp, Homo sapiens
caaggaaggccttgcttccctgccacagggagtatcaccagcagacagcctccagctgtcagcctctgcaggaccaccttagctgcagagagctggctcamagaggtcatgcccttcccaggatagcttttatccactggctgagaaaagtggggctagacaggtcttgccattcagcctgtagcaggacactatgcaggg

SEQ ID NO: 472709 - DNA, 201 bp, Homo sapiens
aatgaaatagactaatttctagaaagatgaaacccacaaaaaccaacacaaaaagaaatgaaaagtctagataattccctatttgcccaataattgaatcyatactttataaagcttcccacaataaaatatacaggctcatgttggcctttctgttgaaattttataaacatttaatgaagaaactatactaactttaca

SEQ ID NO: 472710 - DNA, 201 bp, Homo sapiens
atctgtacatttttaatactaatatgtgaattcagaaagttcactggaaacaagattagtagtaaaaaatctattgcactttcatatatgagaaaaaatamtattagagaaagaattgttttaaaaagaccacttacatagtggctcaaaaaatcaagtatttagaaataaatctattaaaagataagcaaaaatgccaaa

SEQ ID NO: 472711 - DNA, 201 bp, Homo sapiens
ctggatcataaggtagttctcttattaattcctttaagaacctccatactgtttccacaatggctgtacccatctacattcccaccaacagtatacaaggsttcccttttctccagaccttcagaatggcaatatttaaaggattaacaatacaaaatgttgatgaaactggagaaaaactataattttcatatttctgtt

SEQ ID NO: 472712 - DNA, 201 bp, Homo sapiens
aaaagagaccatggtgaaatcacaaggagaatcatacagaactaggtggagatactgagggaaccaacacactgttctgaacactttgggggcttcagagyatgaagatgaccaggttccaagatatacacacagcttaaaagtttcaaggagacacaaatcagaaaggtgtatcaccacaggaggagaaacaaataaatt

SEQ ID NO: 472713 - DNA, 201 bp, Homo sapiens
gcttcccttttctccagaccttcagaatggcaatatttaaaggattaacaatacaaaatgttgatgaaactggagaaaaactataattttcatatttctgytaggaataaaaatgtggaaaattgttcagcagtatttacaaacactggatatatatacgtatatactttatgacccaataattttacttccaggtattta

SEQ ID NO: 472714 - DNA, 201 bp, Homo sapiens
atctatgtaagaaaaaactcaaatactaagaataaaagggaacatccttaatctgacaaatcttatctacaaaaatagaagggactacaataaacattatrctcgtgaaatattaaaagctttttctctaaaatcagcaatgagataaatatctctactattacaatttctaccaccattaaactgtacatgttagctagt

SEQ ID NO: 472715 - DNA, 201 bp, Homo sapiens
caatcacttgcaacaatatggatagatctcacaaatacaacattaaatgaagaaaatcattcataaaattgtacctaatatatgattccattaatgtattrgtcaaaaccaggaaaaactaattaatgatgatagaagtcaggagaatagctgattctgggcatggtaagggagaggcatggctgaagactggtagggcat

SEQ ID NO: 472716 - DNA, 201 bp, Homo sapiens
atacaaaatgttgatgaaactggagaaaaactataattttcatatttctgttaggaataaaaatgtggaaaattgttcagcagtatttacaaacactggayatatatacgtatatactttatgacccaataattttacttccaggtatttatcaaacagaaatacatatatctatttgtacatcaaaaggcatgtgcagga

SEQ ID NO: 472717 - DNA, 201 bp, Homo sapiens
agcagtatttacaaacactggatatatatacgtatatactttatgacccaataattttacttccaggtatttatcaaacagaaatacatatatctatttgyacatcaaaaggcatgtgcaggatgttcagagtagcactatctatatagccaaatgacataatgcccatcaataatagaataaattatgatgtgttcatac

SEQ ID NO: 472718 - DNA, 201 bp, Homo sapiens
gataccaaagccaggcagagacacaaccaaaaaagagaattttagaccaatatccttgatgaacattgatgcaaaaatgctcaataaaatactggcaaagmgaatccagcagcacatcaaaaagcttatccaccatgatcaagtgggcttcatccctgggatgcaaggctggttcaatataagcaaatcaataaatgtaat

SEQ ID NO: 472719 - DNA, 201 bp, Homo sapiens
taaatgcagtaaaagcatttcgtaaaatgtagtatctatgtaagaaaaaactcaaatactaagaataaaagggaacatccttaatctgacaaatcttatcyacaaaaatagaagggactacaataaacattatgctcgtgaaatattaaaagctttttctctaaaatcagcaatgagataaatatctctactattacaatt

SEQ ID NO: 472720 - DNA, 201 bp, Homo sapiens
cattgatggatacttaggttgtttctgtatcttggctattgtgaatagtgctgcaatgaacttgggagtgcacatatctttacaagatggtgatttcattkcctttgggtaaatacctggaagaggattgctggatcataaggtagttctcttattaattcctttaagaacctccatactgtttccacaatggctgtaccc

SEQ ID NO: 472721 - DNA, 201 bp, Homo sapiens
tccagcagcacatcaaaaagcttatccaccatgatcaagtgggcttcatccctgggatgcaaggctggttcaatataagcaaatcaataaatgtaatccakcatataaacagaaccaaagacagaaaccacatgattatctcaatagatgcagaaaaggcctttgacaaaatatttaattttaaatatatgaaattctatg

SEQ ID NO: 472722 - DNA, 201 bp, Homo sapiens
ggtgctctatgagatatcatttgtagggggatgggggcttacttgtgtattagtcatgattctttagttttaagtgcacaaaccaaatagaactagcttgrgcaaagaaaaaatgttcacataactgagaagtcaacggctaatcagggactttaggcacaatgggattaagggttcacacaaagttgtctgggctttctc

SEQ ID NO: 472723 - DNA, 201 bp, Homo sapiens
tggcccataacaagtgcttactagctactagttactaattttttagtagtagagatttaataggaaagattataggaaaagaaactcaaaacaagggaatrgtgtgaattaaagactagcttttcttaaactatgttgccaaggtagttttacccacaagtctgtgtcctgggcaaaaatagtggaaattggcttcagcgc

SEQ ID NO: 472724 - DNA, 201 bp, Homo sapiens
ctgtggcttcctccttctctcttggatcactcactctagcagaagccagctgccatttcgtgaagacattcaagcaaccgtacggtgaggcccatatggtaaaaaaaactgagccctccggataatggctagtgaggaactgagacctcctatcaacagccactctcaagtctttagatgactgtaacccaagctgatatt

SEQ ID NO: 472725 - DNA, 201 bp, Homo sapiens
cctagtaatgttgtcatataaaattaactatcacaccccggaagagccacatggtaagattttaggacttctatttcttcctcattcagagcagacctacwtttatctgtcttatatgttagaggtgctctatgagatatcatttgtagggggatgggggcttacttgtgtattagtcatgattctttagttttaagtgca

SEQ ID NO: 472726 - DNA, 201 bp, Homo sapiens
tagttctgtccctctagagaaccctaatagaatcctcttgctgaattgaccactttgtcattatatagtgaccttctttgtatcttcttacagtttttaaycttgaaatctattttgtcttatataagcatagcaactcctactcctttgatttccattggcacggaatatcattttccatcccttttttagtctatgtgt

SEQ ID NO: 472727 - DNA, 201 bp, Homo sapiens
acagtgtcaacaataaaattgtaatcactgacaaaactagccttcatgcagaaaagggaagccttttccttttcccttggcctgtagacaatagcattagwcaatttttggagtgacaagatcacttcctcctgcctagttttaaagagtgaccacaaggaacagcttcgcccttagaaataacttttgattatttgataa

SEQ ID NO: 472728 - DNA, 201 bp, Homo sapiens
attttcttatctcccttattagaatgtaagtactagagaaatcagaccaatgagactatttctttctcattcacagcctgcctagagcagcacaaacaatrcaaaaacaaaccaaaaaatgaataagcgtgtgtatgtaggtctcttagtaccatgcttggcccataacaagtgcttactagctactagttactaattttt

SEQ ID NO: 472729 - DNA, 201 bp, Homo sapiens
tatttataactaccttcttatactacccattctgtgtttcctttgccttcagcaaacatctcattcggtcttggctctttacctagcaaggtgacccaaamcatcattcctgaagggtctaggccatttgtagtcctgcctggattgaattgtagttttccattgaccttaattacagggtatggtaatactaagatatgc

SEQ ID NO: 472730 - DNA, 201 bp, Homo sapiens
ttataaagcttcccacaataaaatatacaggctcatgttggcctttctgttgaaattttataaacatttaatgaagaaactatactaactttacacaaatstttgtagattttagaaaaagagagaaaaaatacaaactcactttatcagaacaacataacattgtcccaaaatctgaccaaaaaaattacaagaaaggga

SEQ ID NO: 472731 - DNA, 201 bp, Homo sapiens
aattgagctaaaaactaaagcttacttttaaaaaatcactgagacatattaaagacaaagtaactaaatggaaggctatacaatgtttgagaactattaayagaaaactcaatattgtaaaaatgacaattatccctattgcattagcatcatgcaatatgctgattgcaatgatgatcagcatcatcacaatcaaaattc

SEQ ID NO: 472732 - DNA, 201 bp, Homo sapiens
cagtgtcaacaataaaattgtaatcactgacaaaactagccttcatgcagaaaagggaagccttttccttttcccttggcctgtagacaatagcattagayaatttttggagtgacaagatcacttcctcctgcctagttttaaagagtgaccacaaggaacagcttcgcccttagaaataacttttgattatttgataat

SEQ ID NO: 472733 - DNA, 201 bp, Homo sapiens
aaatattcatgatgattatagtccttgtttttctaactggtcatgtggttgtagctggtatttataactaccttcttatactacccattctgtgtttcctytgccttcagcaaacatctcattcggtcttggctctttacctagcaaggtgacccaaaccatcattcctgaagggtctaggccatttgtagtcctgcctgg

SEQ ID NO: 472734 - DNA, 201 bp, Homo sapiens
taatgtatactataacctttgggtgataatatgtcaatgtaggttcatcaactgcaacaaatgtaccactctggtacaggatattgataatggggaaggcyatgtatgtgggagtagaggcagagtagatgggaaatctataaccttcctttcaatttggtggtgaaattagaattgagctaaaaactaaagcttactttt

SEQ ID NO: 472735 - DNA, 201 bp, Homo sapiens
agttatctgcagaagatggcagggccttgctccaaaatcctagaggcctccactgtgattcatctatgggggcctgccaaaggctccaaacagcatccctrtctgccactgacacctcaagcaccattgggtctcctgggtcatatggcccaagtggcagagcactttgcacagcagccagggcttgttgtagagcctgct

SEQ ID NO: 472736 - DNA, 201 bp, Homo sapiens
ctgacaaaactagccttcatgcagaaaagggaagccttttccttttcccttggcctgtagacaatagcattagacaatttttggagtgacaagatcacttsctcctgcctagttttaaagagtgaccacaaggaacagcttcgcccttagaaataacttttgattatttgataatggaaaggaaaaaaagtgtacaactct

SEQ ID NO: 472737 - DNA, 201 bp, Homo sapiens
aggaaaatacttatacatacttacataagtcagtaaagggaagaaaacaaaggtatttccttcatatatgtatatatacacacaaatttacttataaaaawtagggaggaaatattcatgatgattatagtccttgtttttctaactggtcatgtggttgtagctggtatttataactaccttcttatactacccattctg

SEQ ID NO: 472738 - DNA, 201 bp, Homo sapiens
ctaatgtatactataacctttgggtgataatatgtcaatgtaggttcatcaactgcaacaaatgtaccactctggtacaggatattgataatggggaaggscatgtatgtgggagtagaggcagagtagatgggaaatctataaccttcctttcaatttggtggtgaaattagaattgagctaaaaactaaagcttacttt

SEQ ID NO: 472739 - DNA, 201 bp, Homo sapiens
tataccaccataagtaggccataagtcataaataaaatatggtaaattataggatgcagatgccagttttacgagacttgcacaatgcttacttaaaattyatttttaagttacaaaataatagttccccgaatgattcatttcagcactaatgtcaggttattcaaatattgtatttaattttaaaaaattatgctgaac

SEQ ID NO: 472740 - DNA, 201 bp, Homo sapiens
ggcactgtactatattctttaccaactattatcttatttaattatcaaaggctctttggcgttggatattattacccttgtttttttgttttgtcttgttytttttctaaaaaaaagaaagaaattaagctggatcaagaattcaagcatcctgtattctggaacattcttcttgccattagatataagtttcttagctag

SEQ ID NO: 472741 - DNA, 201 bp, Homo sapiens
ggtaaataaaactgataaagtgtttaattattagaaaaggatcattctgctaaataaaagatctcaagaccagatccaactgcagactgtgtttctaaaamataacctcagctagctctggttaatgtctgaaattctgggaaagcaaggaaaaactcaaccattgatctctctctggttagtctgtgctaaggccacctt

SEQ ID NO: 472742 - DNA, 201 bp, Homo sapiens
tttgggcaattatcatcactgtacaagtggctgttaatagcattttccacttgctctgtgctgggcactgtactatattctttaccaactattatcttatytaattatcaaaggctctttggcgttggatattattacccttgtttttttgttttgtcttgttttttttctaaaaaaaagaaagaaattaagctggatcaa

SEQ ID NO: 472743 - DNA, 201 bp, Homo sapiens
tgcctgtgtaatcgttattctgcaagtctaatgaaaggacagattagaactcattccttggtaaataaaactgataaagtgtttaattattagaaaaggawcattctgctaaataaaagatctcaagaccagatccaactgcagactgtgtttctaaaaaataacctcagctagctctggttaatgtctgaaattctggga

SEQ ID NO: 472744 - DNA, 201 bp, Homo sapiens
cttaaaacttaacaagaaaacatactcacaaaaacctgaccttaaaatgtacaaaagacctgaacagagacctctccagagaagatatacagatggcaaawaaacatatgagagatgctcaccatcatatattattaggttactgcaaattaaaacaacaatgagatactaccacatatctaacagaatggccaaaatcca

SEQ ID NO: 472745 - DNA, 201 bp, Homo sapiens
agatattgtattacctacaaattatattatctgtgagagtaagaagggcactacaaaatgtctgttgggaagaggggatattaggtctgataggtttaagytcagtattagtatttattgagaataaagtgaatattctcaataaaccctgtagataccagccataccctttcatggcttcgcccttacagctgcatcagt

SEQ ID NO: 472746 - DNA, 201 bp, Homo sapiens
attgagcactggagcggagattagttctatgcaaatgagatgctttagtgatcgagaggaaaatattacatagagctcccaaattctatccccagagcccmtttttcctaacgtagcatacagtagtagcagtagaataatgatactctacactgtgcctttccaatgtgttgggacccatcaccaacaccttatgtgcat

SEQ ID NO: 472747 - DNA, 201 bp, Homo sapiens
tctgctgtcacaagtgagggtgggatgagggtgttataccggcatctaatgggatgctgctcaacatcctaaaatgcatagcacaggaagccccacgacgragaattatctggtccaaatgtcagtagtcgcaaggatcctgcctctgccctcagtgagcttcagtctagtcggggttacagaaaggagactgacaagtgc

SEQ ID NO: 472748 - DNA, 201 bp, Homo sapiens
tcgatgtccatgaatacaacctaacgcatctgcagccttccacagattatgaagtgtgtctcacagtgtccaatattcatcagcagactcaaaagtcatgygtaaatgtcacaaccaaaaatgccgccttcgcagtggacatctctgatcaagaaaccagtacagcccttgctgcagtaatggggtctatgtttgccgtca

SEQ ID NO: 472749 - DNA, 201 bp, Homo sapiens
caaaaatgtcaaaatgaagggtggaaaaatggtcatcaggctgggcgtggtagctcatgcctgtaatcccagcgctttgggaggccgaggcaggtggatcrcaaggtcaggagttcaagactggcctagccaagacggcgaaaccccacctctactaaaaactacaaaaattagccgggcgcagtggcaggcgcctgtaat

SEQ ID NO: 472750 - DNA, 201 bp, Homo sapiens
caaactttcacatttatcatgttatttgattattaaaataaagtaagagtattacctagcttttacaagtgaaaaaaacaatagaaggtaagtttttagargtttgatgatatctccaaggtcacagagctaatcacacagctagaattctaacacaaatcgtcttaacacccagtttcttctaaggttctgcctctcaaa

SEQ ID NO: 472751 - DNA, 201 bp, Homo sapiens
atggcattcctgctttccaggcagagcattttcaagaactgcctctgtgacttgtgaatgataggggaagagctggtcggtggagaagcaggggttgaacktgggtctgtctgactctaaacctgtactgttaaagtgcttggctatatttcttcctctttaattgcagctataaaacaagaggactggactacgttagct

SEQ ID NO: 472752 - DNA, 201 bp, Homo sapiens
aacatttgatagataatatgttttcagaacaaattttaagtaaacaaaataagaaaattataatatataatagaactgcactgtgacttatagattgcaawctttcacatttatcatgttatttgattattaaaataaagtaagagtattacctagcttttacaagtgaaaaaaacaatagaaggtaagtttttagaggtt

SEQ ID NO: 472753 - DNA, 201 bp, Homo sapiens
ccagctccagaagagacagtgaacttgcctttcctttacctttttgttctatcctggcccttgattggataacgcctacccacattaatgagggggatcawctatactcaatctacctattcaaatagtaatatgttctggtaacacacacatccagaaataatgcttattcagatatctaggcatcatatggcccagtca

SEQ ID NO: 472754 - DNA, 201 bp, Homo sapiens
gcccaagggtaggagaaatatggatatcccagctccagaagagacagtgaacttgcctttcctttacctttttgttctatcctggcccttgattggataaygcctacccacattaatgagggggatcatctatactcaatctacctattcaaatagtaatatgttctggtaacacacacatccagaaataatgcttattca

SEQ ID NO: 472755 - DNA, 201 bp, Homo sapiens
gtgtgtctttataggtgaagtgtgtttcttgtatgcaacagaccagtaggtattgttttttttcacccattcagccagtctatgacttttgattggaaagygtagtccatttaccttcaatgttattattgacaatattattgacaagaacttactcctaccatttgattatttgtcttctgtttgttttgtgctgttctc

SEQ ID NO: 472756 - DNA, 201 bp, Homo sapiens
agaaatttaacttacacattttacaacttatacatgcaatttggctgtgcttatacagcacagatcaacattacaatcaatttactgccatgttaaaaaaraaatcagtgaacattgttcggctgacctgactaattttttgaaataagttggccatcagtgtaattgattgagctatctgtacaacccccaacctaccta

SEQ ID NO: 472757 - DNA, 201 bp, Homo sapiens
gagaaccagggaaactggtgatataattcagtgtgagaacctggggcaggggtaggggctgctggtgttggagtctgaaggcccaagaacctggagctctraagcccaagggtaggagaaatatggatatcccagctccagaagagacagtgaacttgcctttcctttacctttttgttctatcctggcccttgattggat

SEQ ID NO: 472758 - DNA, 201 bp, Homo sapiens
cagagttagagctacaggataaaaataagttaactgaactcagggggagaaaggaggggaacctactccaaattctagctcaggtcttacctaaatgtggrctggctcagctcccaagtggctgagtgaggtcatgactgagaagaaaggacccctggcccaagtcgtgagttgaatgactcttaggttgagaagctttcg

SEQ ID NO: 472759 - DNA, 201 bp, Homo sapiens
cctgactaattttttgaaataagttggccatcagtgtaattgattgagctatctgtacaacccccaacctacctaagcaaaggtcaaaatggaggttattraagaaaaccagccactgaactatccctaaattgagtgatgttttcctgtgctactgataaatgattcattgatggagcactaaagactaatgtcattcaa

SEQ ID NO: 472760 - DNA, 201 bp, Homo sapiens
tgataagctgtctgcaacctggagaaccagggaaactggtgatataattcagtgtgagaacctggggcaggggtaggggctgctggtgttggagtctgaargcccaagaacctggagctctaaagcccaagggtaggagaaatatggatatcccagctccagaagagacagtgaacttgcctttcctttacctttttgttc

SEQ ID NO: 472761 - DNA, 201 bp, Homo sapiens
atgtcttaaaacttaacaagaaaacatactcacaaaaacctgaccttaaaatgtacaaaagacctgaacagagacctctccagagaagatatacagatggmaaataaacatatgagagatgctcaccatcatatattattaggttactgcaaattaaaacaacaatgagatactaccacatatctaacagaatggccaaaa

SEQ ID NO: 472762 - DNA, 201 bp, Homo sapiens
attgtaaggactaaattagaaaatgtacacaacagacatagcacaaagcctggacaatgccctgtttcattttttctaagaaatcatccattataagatgyaccgttgaggcatgtgcttctacaaaagaaaaaaattatgtcaattaattgtaaaaaaccatcaaacatgagacaaagctctattgcagagaagtaaaaa

SEQ ID NO: 472763 - DNA, 201 bp, Homo sapiens
aacagccaaattagcaataaattctgatagccccatctatcagctctgttcagccaatccaatggcaacactgtgtttctttgcaggtccagggaacacacgcttgcaaaggaaaaaaatgcacttgattagatttggttttgaataattggttcattgaaattcttgagctgaagaaaaatggcatttctaatttataga

SEQ ID NO: 472764 - DNA, 201 bp, Homo sapiens
tttgaaagaacatggatgttgtaatctaagttgtttctgctttcaggggcaccctaagtctagtaacactgtggttcttaaaagatgtcttaaaacttaayaagaaaacatactcacaaaaacctgaccttaaaatgtacaaaagacctgaacagagacctctccagagaagatatacagatggcaaataaacatatgaga

SEQ ID NO: 472765 - DNA, 201 bp, Homo sapiens
gattaatgacaggatggggttcccctgtgcttttaccagtagcatgaccccttctgaagccatccgtagaaagtactttgtcctccaaaaagctaacatayggttttgaagcagcattgaaacttttgtagcaatctggtctatagacttttaactcaagaagctaaggctagacttgttaccttcgttgaatgatgttag

SEQ ID NO: 472766 - DNA, 201 bp, Homo sapiens
tgtactttaagcaactctccatcacagctgcagctgaaatcaggtggaacaagaggttgtgtcataggccacaaagaatctactacaagtggtttttaaastacgttgcctacaactttggggttgttctgcaaaaaggctccagagaggcctgagaaaggacctagtgtattagggttctcaagagaaataaaaccaata

SEQ ID NO: 472767 - DNA, 201 bp, Homo sapiens
aagtccaagacgaaggtgtcatcagggttagtatgtagcaaggcctctcttcctggcttgcaggtcactgccttcttgttgaatgctcacatgactttttmtctgtgcactcacagagaaagaatgaaatgagctctctggtgtctcttcctgtttgtataaggtatcagattatggccccacccttctaagctcatttaa

SEQ ID NO: 472768 - DNA, 201 bp, Homo sapiens
gagacgctttggaggatgcctggtgttcaaaatggtaatatttctacccctttgtcaaaagtaacatcatattccatatcactgccccccctccacctgtsagaaggggattagaaagggtgttgttccagaaaataaaagtttcaaaaccaacaaacccaggtcagatacctataaaaccttataagacaagaacaaatt

SEQ ID NO: 472769 - DNA, 201 bp, Homo sapiens
ttagtcatccagatagttgatcatattcagcctatacttgttttcactctcaatctttctgtcctgcataaacatgaggctctaaatgtcagtggtttttragagcttcttccctgtcaaaatagctgtgtatagtttgcttgggctgggtatttttggtgtttttctgtgtctgtatctacaaccagcagtgaaggtgga

SEQ ID NO: 472770 - DNA, 201 bp, Homo sapiens
ttgctagctgaaagtccaagacgaaggtgtcatcagggttagtatgtagcaaggcctctcttcctggcttgcaggtcactgccttcttgttgaatgctcamatgactttttctctgtgcactcacagagaaagaatgaaatgagctctctggtgtctcttcctgtttgtataaggtatcagattatggccccacccttcta

SEQ ID NO: 472771 - DNA, 201 bp, Homo sapiens
tcctcccttccagacctttttccttttaaaacagcaagcattgcgtctctctgttcttctcccccacaggaatcaatgcaatcattgtgttaaggccccayggaaagctaccactgtgttaaaaatagaaataaaaaacaataaaatttcaaattgatcatttctagttactaaaagaagaaaataatagactttcccttc

SEQ ID NO: 472772 - DNA, 201 bp, Homo sapiens
tcagcagatgtgttattaaactgcctgtcactcaagcctcaatcctgaaaaatacctaggtcacctaatcctttatgccatccacatcttttcacatatartaacaggaactttagtgcctggaattgttattaataataattccaaaaactcaatcatttctgggatgcctttgagttaatgggaaagaagctactatct

SEQ ID NO: 472773 - DNA, 201 bp, Homo sapiens
atagaaatatgtatatcagattttttaatgtaacaaactacatgttaattgttatcttattctttttatctttagtagacacttttaaaagaaaagacaaktttgttgtgtttaactcaccaacacgtggtgtataatgaagacagaactataataaattagttttgttctgattttttagaacacttgcaataatgtatc

SEQ ID NO: 472774 - DNA, 201 bp, Homo sapiens
gtttgtctgtgccctgcccccagaggtggagcctacagaggcaggcaagcctccttgagctgtggtgggctctacccagttcaagcttccaggctgctttstttacctaatcaagcctgggcaatggcaggcagccctcccccagcctggctgctaccttgcagtttgatctcagactgctgtgctagcaatcagggagac

SEQ ID NO: 472775 - DNA, 201 bp, Homo sapiens
catggtgagcacctctctccagacagtagtatgcagaatatcctcccttccagacctttttccttttaaaacagcaagcattgcgtctctctgttcttctyccccacaggaatcaatgcaatcattgtgttaaggccccacggaaagctaccactgtgttaaaaatagaaataaaaaacaataaaatttcaaattgatcat

SEQ ID NO: 472776 - DNA, 201 bp, Homo sapiens
aggcttctaaataattatatgtttgataaatatgaatgaatgaccttttctatggaaagctaggcgctaaaggtgatagagagataacatgcacatacgarctctcaagggaaatagacagacacatagataatgtataagtagaataataattctttgaattgaaatccccagggaaacattttcactcaaccgaaaatc

SEQ ID NO: 472777 - DNA, 201 bp, Homo sapiens
tgcccccagaggtggagcctacagaggcaggcaagcctccttgagctgtggtgggctctacccagttcaagcttccaggctgctttgtttacctaatcaascctgggcaatggcaggcagccctcccccagcctggctgctaccttgcagtttgatctcagactgctgtgctagcaatcagggagactctgtgggcatagg

SEQ ID NO: 472778 - DNA, 201 bp, Homo sapiens
aacttttacatctcttgcaagaggttacttgaattacttgtttacatacatgtctatctcccaaacaagtctaaaaatggtaggcttctaaataattataygtttgataaatatgaatgaatgaccttttctatggaaagctaggcgctaaaggtgatagagagataacatgcacatacgaactctcaagggaaatagaca

SEQ ID NO: 472779 - DNA, 201 bp, Homo sapiens
ggcagccctcccccagcctggctgctaccttgcagtttgatctcagactgctgtgctagcaatcagggagactctgtgggcataggaccatccgagccagrtgtggggtataatctcctggtgcaccattttttaagcctgttggaaaagtgcagtattagggtgggagtgatccaatattccaggtgccgtctgtcaccc

SEQ ID NO: 472780 - DNA, 201 bp, Homo sapiens
taggcagaaggaaccatgaaaacaaaggcagggatgtgaacaacatctttgaggaggagccagcatacagaatgaaagatattgcgcatcaaaagcaaaayagcctttgcttttacacagacctatcatggtaaagcatcctcacagctgtacacatttaggtaatctctgtgttccccagcccctctaaagagcatcact

SEQ ID NO: 472781 - DNA, 201 bp, Homo sapiens
ggaccatccgagccaggtgtggggtataatctcctggtgcaccattttttaagcctgttggaaaagtgcagtattagggtgggagtgatccaatattccasgtgccgtctgtcacccctttctttgactaggaaagggaactccctgaccccctgggcttcccgagtgaggcaatgcttcgccctgcttcagctcgcgcct

SEQ ID NO: 472782 - DNA, 201 bp, Homo sapiens
ttttcagacaaagctctgaaaagccccttaatgcccaagagccacaggttgtgtttgtgttaattactacagggctcagttcacaatatcacttaataaarattaataattttcaagaatagattcataatcttctcagttatcagaacagctgaagttatttatgtgcttattggaacaatattataaatgtttgctttg

SEQ ID NO: 472783 - DNA, 201 bp, Homo sapiens
agtggggtgatcacagctcacttgcagccttgaactcctggcagtcctcctgcttcagcctcctaagtaggtaggactataggcacacaccgccatgcctggctaatttttgtattttttgtagggatgggatctcgctatgttagcaggctggtcttgaactcctgggctcaagcaagcctcctgcctcagcttcccaaa

SEQ ID NO: 472784 - DNA, 201 bp, Homo sapiens
cccgagtgaggcaatgcttcgccctgcttcagctcgcgcctggtgcactgcacccaccatcctgcacccgctgtctggcactccctagtgagatgaacccsgtacctcagagggaaatgcagaaatcaccagtcatctgcgttgctcatgctgggagctgtagaccggagctgttcctattcggccatcttggctcctcct

SEQ ID NO: 472785 - DNA, 201 bp, Homo sapiens
tagcagaggctcagcttcttgcccttccagaatgagaggctgtgtggttttgtgttcaagatcacgctatgaacatgatatgaacggttggtatgtcgagwcaccttcattgaaaagagagaataagaaattgctccctgaaacctagaatagatggtgccccaggattgatcacaataatcattgggaatatacattgta

SEQ ID NO: 472786 - DNA, 201 bp, Homo sapiens
ttcctagcagaggctcagcttcttgcccttccagaatgagaggctgtgtggttttgtgttcaagatcacgctatgaacatgatatgaacggttggtatgtygagacaccttcattgaaaagagagaataagaaattgctccctgaaacctagaatagatggtgccccaggattgatcacaataatcattgggaatatacat

SEQ ID NO: 472787 - DNA, 201 bp, Homo sapiens
tgctgaatagtaacacccctgaagagagacaccatggaaagtagttgtcggacttgtggctacaaacaacaagaaagtccttcgcctggagctgcctctgsaaagagcagctagactctagctggagagtctgacagagaaacacttcctagcagaggctcagcttcttgcccttccagaatgagaggctgtgtggttttg

SEQ ID NO: 472788 - DNA, 201 bp, Homo sapiens
aagccaccactgttgattgcaatgacctccgcttaacaaggattcccagtaacctctctagtgacacacaagtgcttctcttacagagcaataacatcgcraagactgtggatgagctgcagcagcttttcaacttgactgaactagatttctcccaaaacaactttactaacattaaggaggtcgggctggcaaacctaa

SEQ ID NO: 472789 - DNA, 201 bp, Homo sapiens
tatgtctgctggttcaacattgcccagaacaggtaaacagaactaaatgggtttctcatattaaagaattcctaggagacttgacggcgggagatgacaakgaaggctttctttatgtcttcaaatttatttatcttttcttctttaagaaaccttatatgctgggaatcttgaggtacattccaaaactatacttatatc

SEQ ID NO: 472790 - DNA, 201 bp, Homo sapiens
aggggtcatggaacagagacagggagtggatctgcccagaccttccatccgccacttactgggcctcattgttagaggagggtaaggggcataggaagaamagtactgaagaggaacgaaagtggcagggaagagaaaagtgttagaagaaaaatatagcctggtcccttgcataatttcagagggagcacaggaaattta

SEQ ID NO: 472791 - DNA, 201 bp, Homo sapiens
gttctttataacaatgaataacttttataagcacctaacaaagctgattaagaaaaaagtgatagcatgaattttaaacatcaataattaaaaagggaacrtcactaaagacattataaatgttaaaaagataacaggaacatattaggagcaactctatggcaataaatttggaagtttaaatgaaatagactaatttct

SEQ ID NO: 472792 - DNA, 201 bp, Homo sapiens
ttgagctgcggtgggctccgcccagttcaagcttcctggccgctttgtttacctactcaagcctcagcaatggcggacgcccctcccccagccaggctgcygccttgcagtttgatctcagactgctgcgctagcagtgagcaaggctctgtgggcatgggacccactgagccaggcatgggagcaaatctcctcatctgc

SEQ ID NO: 472793 - DNA, 201 bp, Homo sapiens
gatacagaaagacaaatactgcattaactcattcatatttgaaatctaaaaaggttgaactcatagaagtagagagtccaatgatgattactcgaggctargaggctgaggagggaggaaatgggagatggtgatcaaagagtacaaagtttcagacagacaggagcaataagttttgagatctattgcacggcagggtga

SEQ ID NO: 472794 - DNA, 201 bp, Homo sapiens
tacagaagtctgggaggattctgtacacaccttcgttaatgctcatgcctgtaaggatgagttttcaagggactgagataaggatgcctcatgcctgagcycttgagatgcgaacatattcctcttcatacttcagtacctagtacatgtgtggcacatagaaaacattctgacaatgtctgttatatgaaggcaagagta

SEQ ID NO: 472795 - DNA, 201 bp, Homo sapiens
taagccaccccccattcctctccaggcgcgaatttaccatggctctggacttgccctttaccagttctctattaatttaaaagctgataagtcctctcccwagctcctatttccccatcctctcttcttcgtctatctcacactttatttctccataggaaagaatttgaactatcgatctgtctgctgtataatttggat

SEQ ID NO: 472796 - DNA, 201 bp, Homo sapiens
attgcaccactactgtccaacctgggggacacagcaagagcttgtctcttaaaaaagaaaaaaaaagattgagtccagagttagagctacaggataaaaayaagttaactgaactcagggggagaaaggaggggaacctactccaaattctagctcaggtcttacctaaatgtgggctggctcagctcccaagtggctgag

SEQ ID NO: 472797 - DNA, 201 bp, Homo sapiens
ctttggttagaaacccagtttatcagcatcagtattatcacttgcttaattgtttaaaaaaaatgtacaatcacctcccagtcattttactttaggaaaakttacactgggcctcattttgatatcttccaaagttacctttcttcttcttatgaccttaatacttctagcaagaatcaataattaaacagatatttgtga

SEQ ID NO: 472798 - DNA, 201 bp, Homo sapiens
ggcctagttgtgctcctatcattgccagctacctctgagacttcacgacctccaattctctcagtcagtcctctactcttactgtgccggtcttcttgccrctgttcaaacacttcacaccctctttcctctgacagcctttgtgcactggttagttcctctgtctatccaatagaactctctatcatgatggaaatattc

SEQ ID NO: 472799 - DNA, 201 bp, Homo sapiens
agacattaaagtggcattatgcatttgccctcctgacagcccattatgtcagttatatattaaatatgaagcaaatccagtatcatgtacctcatgcaagyagttctggccacaaagtgcgtcagatcatgcctctcctttccacctgggcctccctgtctccctcccataagattagatggacaaagtaaatttcagcct

SEQ ID NO: 472800 - DNA, 201 bp, Homo sapiens
caccttggggttaaggcttcaaaatatgaatttgatgagagacacagttcagtccataacagacagactgatggatggatgtgaatggatggacagatggstggatggatacatggatggatgcatggatggatgcatggatggatgcatggatgggagggacggagggagggagggagagagggaagaagagaaggaagg

SEQ ID NO: 472801 - DNA, 201 bp, Homo sapiens
cttggggttaaggcttcaaaatatgaatttgatgagagacacagttcagtccataacagacagactgatggatggatgtgaatggatggacagatggatgsatggatacatggatggatgcatggatggatgcatggatggatgcatggatgggagggacggagggagggagggagagagggaagaagagaaggaaggaag

SEQ ID NO: 472802 - DNA, 201 bp, Homo sapiens
ttaaggttttcaaaatctgtcatcctcagagttaagatgaaattcaacttctcttggtttggggtggtcagttaaggtaacatatcactagaagaattggkattcatgatttctaaagaagtattaaagactataaagagcttttaaattaaaatatcaagaattataaaaggagtttttaaccataaagtcctctccaag

SEQ ID NO: 472803 - DNA, 201 bp, Homo sapiens
ggaaggagttaagaggaagtatattctaggagaaggtaccaccatgttcaaaggctccgtagtggcaggaagcatagctggtttgacgaaatgaaaagaagccagcaaaaatggccattgaaaagtttaaaatatgggagtgaatgttacagggtagctgtgagatgatatgaaacagggcacagaacatttctttaagta

SEQ ID NO: 472804 - DNA, 201 bp, Homo sapiens
tttttttttgttttagcagaaagaggccacctaatctgaactcatttacggattaggaaactgaagttcagaaaggctgaatgagttgcctgagaaggcasaactcagaaatagtagagtcaggacttgacatccccaactcaggcattaatctgttcatccaacagcatttatgggtatctactatgtgccaggcactgt

SEQ ID NO: 472805 - DNA, 201 bp, Homo sapiens
gtctgatggtacactcattatagtgctgttgtttctgagaataaggtcctccaagttaattaaataaggctggggagcttacttatgaaacaaacagcccrctgctgcttctgctgataaataacaattttctcaataaaatgatgttgtatggatgctgcagttgggttcttgttatgctcatcagcgagctcctgaatg

SEQ ID NO: 472806 - DNA, 201 bp, Homo sapiens
cttctttctttcattcctgattttgtgaagatgattttctctaataatatgatttagttccttgccttttattctttgtgtatttgttgtatgttttttgrtttgaggctaccatgaggtttgcaaatactattttataatccacttttaacctgataacaacttaatagtatttgcataaacaaacaagaaaaagaaaac

SEQ ID NO: 472807 - DNA, 201 bp, Homo sapiens
ctatatgcttagacccgtgttagtctctatatctgtgtggcaatatctgctgagacaagtaaatgattaatagaaaacaaaacaacttccgtacagttcamacttttcatccaaatatatatagacagttttggagaattgtttcaagattatagaggaaacatgtaacatttagagcagatggaactaggtttaggtaga

SEQ ID NO: 472808 - DNA, 201 bp, Homo sapiens
gtttcagcaaataaatcggtgtctgatggtacactcattatagtgctgttgtttctgagaataaggtcctccaagttaattaaataaggctggggagcttwcttatgaaacaaacagcccactgctgcttctgctgataaataacaattttctcaataaaatgatgttgtatggatgctgcagttgggttcttgttatgct

SEQ ID NO: 472809 - DNA, 201 bp, Homo sapiens
gtctatatgcttagacccgtgttagtctctatatctgtgtggcaatatctgctgagacaagtaaatgattaatagaaaacaaaacaacttccgtacagttsaaacttttcatccaaatatatatagacagttttggagaattgtttcaagattatagaggaaacatgtaacatttagagcagatggaactaggtttaggta

SEQ ID NO: 472810 - DNA, 201 bp, Homo sapiens
atatgccctgccttccctcctgttactcctgtttgcttcctggacttgtccttgcttctacctaaattaattccccacaattgtgcagtagatgccatccmctcttgcctacttcaggatatttccctagcaattggtccctctctttcatgcataattaaattttccctctctactgaattatcctcgtcagcattcaag

SEQ ID NO: 472811 - DNA, 201 bp, Homo sapiens
ttactgtacatttcaaactccctctgtttcagcaaataaatcggtgtctgatggtacactcattatagtgctgttgtttctgagaataaggtcctccaagktaattaaataaggctggggagcttacttatgaaacaaacagcccactgctgcttctgctgataaataacaattttctcaataaaatgatgttgtatggat

SEQ ID NO: 472812 - DNA, 201 bp, Homo sapiens
ggcttacctgataacaacttcatgatacacagatggtatcatgtaccaagaccgtcaccctgtgatatgctcataaccaggatctgtctcataatcagcayagcaacctagccacaacacagaaaaatcttcaaaggattcaataagctgcagagcagaaagagttcaagttgtttctagagatccagtcacttcttccat

SEQ ID NO: 472813 - DNA, 201 bp, Homo sapiens
ctctgctctctaagcggctatctctacttctccttctattctccctcaatcctctaaaaccaggcttctttcccgccaactactccttccctttccaatgaaccactcttaacagggtgtcttccatatttccaactcaaatgatcatctctctcttcatctcttttgacctctcagaagtatttatcattgttgtccact

SEQ ID NO: 472814 - DNA, 201 bp, Homo sapiens
tgtcactctgattctttcacatcagccaaaataaaacaaactaatctcttaataatttattttgtcaaagcagggatgtctatctaggtaaggcttacctsataacaacttcatgatacacagatggtatcatgtaccaagaccgtcaccctgtgatatgctcataaccaggatctgtctcataatcagcacagcaaccta

SEQ ID NO: 472815 - DNA, 201 bp, Homo sapiens
tgacccctgtccacagtcatcagccttatttctcaccattccccaagtggctcccttattcttcctcccatctcattctcataccttcttaccttgtataytctgccctcagccaaaccatcctccttcatgcaccatgctgctgcaaatgcccatccctctgctgggatgccttttgcctcccagctcctgcttggaaac

SEQ ID NO: 472816 - DNA, 201 bp, Homo sapiens
gtggtactttgttttggcagccctggaaatctaatacaagcccctgttctgccaagttggtaggaggtggaatttcaacccttagggacatttccaccccyccctcatcatgctctggagatgtctttagactccagtataaaaaccaggccaagccaggggactgaccccagagaagtgagcctagaaaaaagggtcacc

SEQ ID NO: 472817 - DNA, 201 bp, Homo sapiens
gtaggaggtggaatttcaacccttagggacatttccacccctccctcatcatgctctggagatgtctttagactccagtataaaaaccaggccaagccagrggactgaccccagagaagtgagcctagaaaaaagggtcacctttgaccagcttacctagggatcccagtctggacacaacaccattctctttccagatcc

SEQ ID NO: 472818 - DNA, 201 bp, Homo sapiens
ctgagacttcacgacctccaattctctcagtcagtcctctactcttactgtgccggtcttcttgccactgttcaaacacttcacaccctctttcctctgamagcctttgtgcactggttagttcctctgtctatccaatagaactctctatcatgatggaaatattctagatttgtgctgttctagatctgctctagatct

SEQ ID NO: 472819 - DNA, 201 bp, Homo sapiens
ttcaatacccttgttttgcagatggagaaactgaggcccagggaaagagaataatttagccaggcactctcaacccgtgagtggagaagctgaaactagargtaaagcctccctacatttagaaataggaaaacttaagctttcccccaaaattttctcaccctgcattatgaggaaaattgccttaggctaatttcatta

SEQ ID NO: 472820 - DNA, 201 bp, Homo sapiens
tggactcacaccagtagtttgccaggggctctcaggactttggccacagactgaaagctgcactgtcagcttcccttctcttgagattttgggactcggamtgagccactactggcttccttactcctcaacttgcagacggcctgtcatgggacttcatcttgtgattgtgtgagtcaattctccttaataaactccttc

SEQ ID NO: 472821 - DNA, 201 bp, Homo sapiens
tactttgttttggcagccctggaaatctaatacaagcccctgttctgccaagttggtaggaggtggaatttcaacccttagggacatttccacccctcccycatcatgctctggagatgtctttagactccagtataaaaaccaggccaagccaggggactgaccccagagaagtgagcctagaaaaaagggtcacctttg

SEQ ID NO: 472822 - DNA, 201 bp, Homo sapiens
tctcaaacatcagactccaagttctttggcttttagactgttggactcacaccagtagtttgccaggggctctcaggactttggccacagactgaaagctrcactgtcagcttcccttctcttgagattttgggactcggactgagccactactggcttccttactcctcaacttgcagacggcctgtcatgggacttcat

SEQ ID NO: 472823 - DNA, 201 bp, Homo sapiens
atcatctgtccaggtagagtcctattcttaattggaggtcaggaactggttaggagcgctggttaagatgtcaaagatgggcagggcgtggtggttcacasctgtaatcccagcactttgagaggctgaggcaggcagatcacaaggtcaagagatcaagaccatcctggccaacatggtaaaatcctgtctctacaaaaa

SEQ ID NO: 472824 - DNA, 201 bp, Homo sapiens
tactttgggcagtatggccatttttgtgatattgattcatcctatccatgagcatggaatgtttttccatgtttgtgtcctctcttatttccttgagcagyggtttgtagttctccttgaagaggtccttcacatcccttgtaagttggattcctaggtattttattctctttgtagcaagtgtgaatgggacttcactca

SEQ ID NO: 472825 - DNA, 201 bp, Homo sapiens
gtccctctttttgtcttgtttggaattgtttcagaaggaatggtaccagctcctctttgtacctctggtagaattcagctgtgaatccatctggtcctgarctttttgttggttggtaggctattaattactgcctcaatttcagaactcattattggtctagtcagggattcagcttcttcctggtttagtcttgggagg

SEQ ID NO: 472826 - DNA, 201 bp, Homo sapiens
acaagatcaccattagtttcctcacagtttgaaggggcaggggtcatggaacagagacagggagtggatctgcccagaccttccatccgccacttactggrcctcattgttagaggagggtaaggggcataggaagaacagtactgaagaggaacgaaagtggcagggaagagaaaagtgttagaagaaaaatatagcctg

SEQ ID NO: 472827 - DNA, 201 bp, Homo sapiens
cctcacagtttgaaggggcaggggtcatggaacagagacagggagtggatctgcccagaccttccatccgccacttactgggcctcattgttagaggaggktaaggggcataggaagaacagtactgaagaggaacgaaagtggcagggaagagaaaagtgttagaagaaaaatatagcctggtcccttgcataatttcag

SEQ ID NO: 472828 - DNA, 201 bp, Homo sapiens
tatgtggtcaattttagaataagtgcaatgtggtgctgagaagaatgtatattctgttgacttggggtggagagttccgtagatgtctattaggcctgctygttgcagagctgatttcaagtcctggatgtccttgttaaccttctgtcttgttgatctgtctaatattgacagtggggtgttaaattctcccattattat

SEQ ID NO: 472829 - DNA, 201 bp, Homo sapiens
ctctccagcacctgttgtttcttgactttttaatgattgccattctaaatggtgtgagacggtatctcattgtggttttgatttgcatttctctgatggcyagtgatggtaagcattttttcatgtgtcttttggctgcataaatgtcttcttttgagaagtgaaattttctttatgatttcttctagtgcagaaaggctg

SEQ ID NO: 472830 - DNA, 201 bp, Homo sapiens
aagacccatgataagctgtctgcaacctggagaaccagggaaactggtgatataattcagtgtgagaacctggggcaggggtaggggctgctggtgttggwgtctgaaggcccaagaacctggagctctaaagcccaagggtaggagaaatatggatatcccagctccagaagagacagtgaacttgcctttcctttacct

SEQ ID NO: 472831 - DNA, 201 bp, Homo sapiens
cttaggtatatttccccgtgtttagcgccataccgtaaacctagaataacaccaaaaggactcatatgaaatgccactagtgatgctggaagtgctcccaraaagcagagaaaaagtcacgacattccaataaaaagttgaattgtttgatatgtaccatagaatgaggtctgcagctgtagttgcccaccatgtcagata

SEQ ID NO: 472832 - DNA, 201 bp, Homo sapiens
accaaaaggactcatatgaaatgccactagtgatgctggaagtgctcccaaaaagcagagaaaaagtcacgacattccaataaaaagttgaattgtttgakatgtaccatagaatgaggtctgcagctgtagttgcccaccatgtcagataaacaattcatcttgtaaacagacaatgtaaacttaagatattgagcaata

SEQ ID NO: 472833 - DNA, 201 bp, Homo sapiens
ttctggcctccagaactatggaagaacaaatttctgttgtttaaaccacccagtttgtggtactttgttttggcagccctggaaatctaatacaagccccygttctgccaagttggtaggaggtggaatttcaacccttagggacatttccacccctccctcatcatgctctggagatgtctttagactccagtataaaaa

SEQ ID NO: 472834 - DNA, 201 bp, Homo sapiens
ggcctcccaaagtgctgaaattacaggcatgagccacagcacccagtcaaccattctttatgatgatatatcaggtgacttactttttatttccctttcgygttcacctgacacaataactacttttgtagacaatacccttcagagagcttcagcactgcaatcctgctcaggtggaaacttagtgagtaagaaggaagt

SEQ ID NO: 472835 - DNA, 201 bp, Homo sapiens
agtgagctgagactgagccactgcactccaacctgagtgacaagagcaaaactctgtaaaaaaaaaaaaaaaaaaaaaaacaaacaacaacaacaacaacmaccaaaaaaaaaaccatcatagttactcagctataacctcatttagcaaaagtcttgaatacaatacactatgatcaaccatattcctcgtgttttacag

SEQ ID NO: 472836 - DNA, 201 bp, Homo sapiens
gccctgacctcttaatttagccccaaagttatctgtttagctaactgcttgacatcctcatctatgtgtctataggcatttcagtcttaacttggccaaartatgattgttgatttttcctgtgtagatctgtccctcccacaatcttccccatctcagcaaatggcatcactatgtacgtagttgattaagccaaggact

SEQ ID NO: 472837 - DNA, 201 bp, Homo sapiens
cggcctcccaaagtgctgaaattacaggcatgagccacagcacccagtcaaccattctttatgatgatatatcaggtgacttactttttatttccctttcrtgttcacctgacacaataactacttttgtagacaatacccttcagagagcttcagcactgcaatcctgctcaggtggaaacttagtgagtaagaaggaag

SEQ ID NO: 472838 - DNA, 201 bp, Homo sapiens
cctgtttcaatcattgaagtgtgaatacaccaagctttcctttagtcttcttttctgtccctacattcttcaaactctacattaatcctcatctagacctstgttttaaatataatatgtataacaaggactctctagccctgacctcttaatttagccccaaagttatctgtttagctaactgcttgacatcctcatcta

SEQ ID NO: 472839 - DNA, 201 bp, Homo sapiens
taaggggtccacatattagatccaaactgctcaagaagttttaaggttttcaaaatctgtcatcctcagagttaagatgaaattcaacttctcttggtttggggtggtcagttaaggtaacatatcactagaagaattggtattcatgatttctaaagaagtattaaagactataaagagcttttaaattaaaatatcaag

SEQ ID NO: 472840 - DNA, 201 bp, Homo sapiens
tttcatctttctctcattctggatgcttctgatctcaaacatcagactccaagttctttggcttttagactgttggactcacaccagtagtttgccagggsctctcaggactttggccacagactgaaagctgcactgtcagcttcccttctcttgagattttgggactcggactgagccactactggcttccttactcct

SEQ ID NO: 472841 - DNA, 201 bp, Homo sapiens
tgtacttgctataaatcccgcctttacatcaaagcaaccttgatgttattgcacaaattataggctatgatgcacatagcattcttgccttttctggaggrctgcctttaattggctatagagcacatatgccctttctctgtggtatataagctcctggtctgaggagtaatggtgtggagatctacctgtcttgctgcc

SEQ ID NO: 472842 - DNA, 201 bp, Homo sapiens
ttaacagggtgtcttccatatttccaactcaaatgatcatctctctcttcatctcttttgacctctcagaagtatttatcattgttgtccactccctcctkcttaaaatattcccttctcttgatttctcacgatttgccttccatatcactggccattacttcttagtcacttttgctagttctctctcctgtttcaatc

SEQ ID NO: 472843 - DNA, 201 bp, Homo sapiens
ctcaaatttccaagaggaattggccagcagtgctgtgtaacagaagccagagtccagagattcaggccacaggctgactctgcaccaatggctatgtggartgggacagttcatctccgtctctggttctgtgtgtccccctctgtaaaagcagagtttgtacttacatttagtctaattctatagtttcaaagcacccta

SEQ ID NO: 472844 - DNA, 201 bp, Homo sapiens
gtccctctctttcatgcataattaaattttccctctctactgaattatcctcgtcagcattcaagtgtgctgtaatttcttacatctcaacaaaaaaaaamaatcttgacccacttttccctctagctaccacctcatttctcagctgccctttaaagcagactctctagtttatcccctcccataaatccacttttgaat

SEQ ID NO: 472845 - DNA, 201 bp, Homo sapiens
aactactccttccctttccaatgaaccactcttaacagggtgtcttccatatttccaactcaaatgatcatctctctcttcatctcttttgacctctcagmagtatttatcattgttgtccactccctccttcttaaaatattcccttctcttgatttctcacgatttgccttccatatcactggccattacttcttagtc

SEQ ID NO: 472846 - DNA, 201 bp, Homo sapiens
ttcaatttcatttatttctgctctgatctttattatttcctttcttctactaattttgggtttggtttgctctggcttttctggttctttaagatgcatcrttagattgtctatttgaaattttcccttttttgatatagacacttatagccataaaattctatcttactattgcttttgctatattccataggttttgct

SEQ ID NO: 472847 - DNA, 201 bp, Homo sapiens
agtccacttactaatagtggatgttaacctaggtactttagtttcaaagtccctcaagtgaacaatataggttattccaatacaaaataaaatactgaatkgcaaaagagaatcctacattgtatctgaagtatgtctgtaaacattagaacctagcaaaccgagcataatatgtatacatatacatagacatacatatac

SEQ ID NO: 472848 - DNA, 201 bp, Homo sapiens
atcttgacccacttttccctctagctaccacctcatttctcagctgccctttaaagcagactctctagtttatcccctcccataaatccacttttgaatcyacttccctgaaactgatcttgaaaaagacaccaatggtttccatgctgctaaactgaatgattttgctttaaaggcctcatcctacttgaaaggtgagca

SEQ ID NO: 472849 - DNA, 201 bp, Homo sapiens
gttccattcatcttttgtattctctctctcaattcaatttcatttatttctgctctgatctttattatttcctttcttctactaattttgggtttggtttsctctggcttttctggttctttaagatgcatcattagattgtctatttgaaattttcccttttttgatatagacacttatagccataaaattctatcttac

SEQ ID NO: 472850 - DNA, 201 bp, Homo sapiens
taaactgaatgattttgctttaaaggcctcatcctacttgaaaggtgagcagcatttgacacagttgatcattcccgcctcctggaaacagtttcttcccrtggcatctgggactccacaccctcttgattttccacctgccttacagaacagtctttctcagcccttttgctggtttctccttatctccccaaactcttc

SEQ ID NO: 472851 - DNA, 201 bp, Homo sapiens
ttttggatttcttcttgactcaattttggtaggctgtatgtggctaggaatttgtgcatttcttctagattttccaatttattggcatatagttgctcacmgtagctactaatgatcctttgaatttctgcagtatcagctagaatgtctccttcatttctgattttatttaattggatcttctcttttttttcttagtct

SEQ ID NO: 472852 - DNA, 201 bp, Homo sapiens
gctctacacatccatgtttctctgctctctaagcggctatctctacttctccttctattctccctcaatcctctaaaaccaggcttctttcccgccaactrctccttccctttccaatgaaccactcttaacagggtgtcttccatatttccaactcaaatgatcatctctctcttcatctcttttgacctctcagaagta

SEQ ID NO: 472853 - DNA, 201 bp, Homo sapiens
taatcaattcaaaagaaaattaaatttactaatggaaactaccgctattcattttctggacatatgtaaagataaagccagcttaaaacaacaaataaccaacctagtcttttaaccttcagatatggtgcaaaagcatgacctaaaagatactttttcattactagcgaagcaggctttagtctcaaactttaccttaga

SEQ ID NO: 472854 - DNA, 201 bp, Homo sapiens
cgtctttaaaaaatgtgtccttataaatccagcaggaaatccaagtttcctattggtcctccttctgattcttctctgatttcttattctgaaaaattackgatagtagtgtactaattaagtttttagcagggagacccttaatgatgaattaagatagcatttttgcagtgttgctaagtggctttagtctacaatgga

SEQ ID NO: 472855 - DNA, 201 bp, Homo sapiens
ccatctagctctacacatccatgtttctctgctctctaagcggctatctctacttctccttctattctccctcaatcctctaaaaccaggcttctttcccrccaactactccttccctttccaatgaaccactcttaacagggtgtcttccatatttccaactcaaatgatcatctctctcttcatctcttttgacctctc

SEQ ID NO: 472856 - DNA, 201 bp, Homo sapiens
agacatttcaacccccttagcctgacacagggaaagaacagaaggtggggagaaagaactggggaggcggaactgtcaatgagtaaattcgtatctggcakactacacttatttagcatgtctcttgggctttttttttagtttatattcatgtaacacatcaggacagggtcaagagagatggtatagtatagtgaaaat

SEQ ID NO: 472857 - DNA, 201 bp, Homo sapiens
cagggaaagaacagaaggtggggagaaagaactggggaggcggaactgtcaatgagtaaattcgtatctggcatactacacttatttagcatgtctcttgrgctttttttttagtttatattcatgtaacacatcaggacagggtcaagagagatggtatagtatagtgaaaattaccctggtttcatcaggagaccttga

SEQ ID NO: 472858 - DNA, 201 bp, Homo sapiens
cagctgatagaaaacaaaatgatagagtacttttttccttggccaagtattttctcatttgtatttaatttcataaattagacagccagtgaaattagacmtcaaactaggtcctgatggataatgaatgttatgtcacctttaacagtgaagtggttattataggtcactttctaatttcatattttcccttttgctttc

SEQ ID NO: 472859 - DNA, 201 bp, Homo sapiens
gcctggacatgactgagataaagaatgattcccgagctgggcacactggcttatgcctataattccagtgactcagaaggctgaggcaagaggattgcttsaggccaagagtctgaggctctattgagctatgattgcaccactactgtccaacctgggggacacagcaagagcttgtctcttaaaaaagaaaaaaaaaga

SEQ ID NO: 472860 - DNA, 201 bp, Homo sapiens
gcagctgcactgttggtgtgagcttggggctccacttgctggggagcaaagggcgaagggctcactgggaagagagactagtctactctccatatggtgayagtggcatgctgtaagctcaggtgtagccctcaggctctttgtttcttccccagactgagggcagcaggaatagaaccactgctgtggcagtggaagaga

SEQ ID NO: 472861 - DNA, 201 bp, Homo sapiens
ttttcccttggcctgtagacaatagcattagacaatttttggagtgacaagatcacttcctcctgcctagttttaaagagtgaccacaaggaacagcttckcccttagaaataacttttgattatttgataatggaaaggaaaaaaagtgtacaactctcctctagttaaatttcaagcatttagagaagtggatatgtct

SEQ ID NO: 472862 - DNA, 201 bp, Homo sapiens
gctagcaataaatgatccagaacaatatgagactgctgggcaagagaaggcatgattgatttaagataatgtacacgaaacttggtagcagacatgaaatmcctttgtaaacataaaagattattactcctcagtaggtcaccattttacaaggcagatcatttcattttaagagcttccaaatactgagccaacacatgg

SEQ ID NO: 472863 - DNA, 201 bp, Homo sapiens
catagaagcagacttggaaacagacaagtgctgtgtctgcaaaataaactaactagtgtagggcaaaatgggctctatgctttcctcaaccccagccccarcaaaaagcaagatccttgtggtcattttgcctttgcttacatccactgctgcctgaagctaaagaaaggctccttagtagaccatggtaagccccctttt

SEQ ID NO: 472864 - DNA, 201 bp, Homo sapiens
atcacccaacaaaaaaaaaggtgtgtatatgtggtggttgcaggggcggggggatagattgcattattgttttcaagtgctcactatttcttcatttgtgyacattaccataggcagtgaagtgtcttacagaaggagtgtacttttctgcccattgacattgggcttgccatgtaacttgatttggtcaatggaatgtgt

SEQ ID NO: 472865 - DNA, 201 bp, Homo sapiens
atagaagcagacttggaaacagacaagtgctgtgtctgcaaaataaactaactagtgtagggcaaaatgggctctatgctttcctcaaccccagccccaasaaaaagcaagatccttgtggtcattttgcctttgcttacatccactgctgcctgaagctaaagaaaggctccttagtagaccatggtaagccccctttta

SEQ ID NO: 472866 - DNA, 201 bp, Homo sapiens
tatggcaagcataccaacctttcagtatccgtactctctctatacctttcctcctgttaataatatagtattcttatccctaagaaagcaacctcacctcmtcagaggcttttttctacaattaatggatctactgcatgatttccaacagcatgtaaacatggtctatatcacccaacaaaaaaaaaggtgtgtatatgt

SEQ ID NO: 472867 - DNA, 201 bp, Homo sapiens
aagcaaaaacagaaccaaaatttagaatcaaaaagtcatcatataaaaaatatggcaagcataccaacctttcagtatccgtactctctctatacctttcytcctgttaataatatagtattcttatccctaagaaagcaacctcacctcctcagaggcttttttctacaattaatggatctactgcatgatttccaacag

SEQ ID NO: 472868 - DNA, 201 bp, Homo sapiens
ctcattcttcaatgataattacttgagttaccaccttttaccattgctatgaagaaaaggatattttatgagaaggaaatgagttcatttctaagctctasgtaggtgaaatcccttatatttgttcatcccatagaagttattactaagattgatgatcttaatatatagactgtaaggaagatccagttttcaccctga

SEQ ID NO: 472869 - DNA, 201 bp, Homo sapiens
gcaacagagtgagagcctgtctcttaaaaaaaaatccataaaattcaccaattaacaaaatggaaaaaaagtataatcatctcaataaatgcagtaaaagyatttcgtaaaatgtagtatctatgtaagaaaaaactcaaatactaagaataaaagggaacatccttaatctgacaaatcttatctacaaaaatagaaggg

SEQ ID NO: 472870 - DNA, 201 bp, Homo sapiens
caagtctctctttctgtgctaaggaatgtcttcccaattttttgcagccttgaggaccgggagatgactgggaaattgctgacagggcagggaaagggctrtactctacatgctggcattcacagacaaacaccgaggggcagcaacagcaaagaggagtcttggtgctcttcctggagttcccaggctttactggccatg

SEQ ID NO: 472871 - DNA, 201 bp, Homo sapiens
ttgcagtctgctactaattgaagacgttctaatttcactttttttctgacccaaacttcaagtcattaaaaattaattattttcatttgtttcattctgayttatcagcacccgtgtagtacagttcacacatcacatcctcctattatgtgctcataaaaattacgttttggtgtttattaaaatatgcacttgattaat

SEQ ID NO: 472872 - DNA, 201 bp, Homo sapiens
ctgggaaattgctgacagggcagggaaagggctatactctacatgctggcattcacagacaaacaccgaggggcagcaacagcaaagaggagtcttggtgstcttcctggagttcccaggctttactggccatggatcctgttattcaatcaaatacttattgtgtgcctactacatattgggcactattctaggccctgt

SEQ ID NO: 472873 - DNA, 201 bp, Homo sapiens
atcagcagttaatgattcatgttcaaagctcaaagttgtctaattaacaaaaggcaatgttttacagaggccatttttgctttcaagttaatagcacaccrtacatacaaagggtggattgtatccaggtcttcaagcttgcagtctgctactaattgaagacgttctaatttcactttttttctgacccaaacttcaagt

SEQ ID NO: 472874 - DNA, 201 bp, Homo sapiens
tgtttcccaggaacagaggccacaaaagagctgtaagagcagagtgaagcaggctcatcctggtaatttgtagttttgcagataaagaacactttcctcascacatgtgcagtggatcctgacaccagagcttcaaagaggtaatcctacaaatgatcccaggaaatctgtcacatcactggcaaaatcagcacatgacag

SEQ ID NO: 472875 - DNA, 201 bp, Homo sapiens
tgctgtataactataaatatttttattttatatggtttgttaaatcatctgtccaggtagagtcctattcttaattggaggtcaggaactggttaggagcrctggttaagatgtcaaagatgggcagggcgtggtggttcacagctgtaatcccagcactttgagaggctgaggcaggcagatcacaaggtcaagagatca

SEQ ID NO: 472876 - DNA, 201 bp, Homo sapiens
acctctcacctctacaccttttgtttcccaggaacagaggccacaaaagagctgtaagagcagagtgaagcaggctcatcctggtaatttgtagttttgcmgataaagaacactttcctcagcacatgtgcagtggatcctgacaccagagcttcaaagaggtaatcctacaaatgatcccaggaaatctgtcacatcact

SEQ ID NO: 472877 - DNA, 201 bp, Homo sapiens
gaccatctagatttctaacagagcaatggtcattaaacatctaataaccacccaggcacaaagaagaccattagctgtgcaaaccggcatgtatccaacaragatgatctgggcacacagtccctgttgctctcatttgaaatgtttctctcttttattgtctgaagatcatgataaaatgcctctaagcagtacaaaagg

SEQ ID NO: 472878 - DNA, 201 bp, Homo sapiens
tattttaagcaataatgactgagaattttttcaaattaatatcagacatgaaaacacagatccaggaagctcagagaacatcaagcaggataaattcattaaaaaacatacactcaggcatatgatattcaaactgcagaaaataaattaaaaaaaaaaaaaaaccttgaaagaagccagaggaaaaacaccttatctata

SEQ ID NO: 472879 - DNA, 201 bp, Homo sapiens
gaggctgaggcaggagaatcacttgaacccaggaggtggaagttgcagtgagccaagatcacaccactgcactccagcttgggtgacggagtgagagaaartgagagtgtgagagagagagagagagagagaaagaaagaaattaatttattctttcccatttctacagaccagaaatccaaaaccaaagtgttggtaggg

SEQ ID NO: 472880 - DNA, 201 bp, Homo sapiens
ttgcctccataaataaaattataaacaagatttatttctatttgtatcacccttcattctaaatacccacgtgcttacgatgtccttacctagcagtcttycaataagaattattgacagaacagatccactgtcgtgccgaatttcatcccccacaaaaatcaaaaactaaatcttgctgtgttcttacttagaaatagg

SEQ ID NO: 472881 - DNA, 201 bp, Homo sapiens
gtttgttagttttccttctaacagtcaggtctgtcagctgcaggtgtgttggaatttgctggaggtccactcccgaccctgtttgcctgggtatcaccaamggaggctgcagaacagcaaatatgcagaacagcaaatattgctgcctgacccttcctctggaagctttgtcccagaggggcatctgcctatatgaggtgt

SEQ ID NO: 472882 - DNA, 201 bp, Homo sapiens
gaaaacacagatccaggaagctcagagaacatcaagcaggataaattcattaaaaaacatacactcaggcatatgatattcaaactgcagaaaataaattaaaaaaaaaaaaaaaccttgaaagaagccagaggaaaaacaccttatctatagagaggcaaagaaaagaataacaaacaacttatcctcagaaaccatgta

SEQ ID NO: 472883 - DNA, 201 bp, Homo sapiens
ccaccatgaagattgataaccctcacataacatatactgccagggtcccagtcgatgtccatgaatacaacctaacgcatctgcagccttccacagattaygaagtgtgtctcacagtgtccaatattcatcagcagactcaaaagtcatgcgtaaatgtcacaaccaaaaatgccgccttcgcagtggacatctctgatc

SEQ ID NO: 472884 - DNA, 201 bp, Homo sapiens
caatctgcgtgagatcagtatccatagcaatcccctcaggtgtgactgtgtgatccactggattaactccaacaaaaccaacatccgcttcatggagcccstgtccatgttctgtgccatgccgcccgaatataaagggcaccaggtgaaggaagttttaatccaggattcgagtgaacagtgcctcccaatgatatctca

SEQ ID NO: 472885 - DNA, 201 bp, Homo sapiens
tttcacatcttccattttaacattcttcccagaaaacataaatggccaatacatcggaataaaatttcacatatgccaatataacaagagatgaaggaaasttaatggtagagggaggaatagtgtgttttttagttctatcagattcttttttatactggcattttcatctgtcaactcctgtatcatttttttgtgatt

SEQ ID NO: 472886 - DNA, 201 bp, Homo sapiens
gaaaccaactccaaatcctcagcagctacggaaatatgaaatggatttcaggtggactgagacagagtttagaaatgggaccaaatgtgcagtctcttttraccaaagtttaaaggatgatttgcttcttcttttcccaagcagaatgcaattttagatcactcattacatcccaagagaaattcataaaagtattactca

SEQ ID NO: 472887 - DNA, 201 bp, Homo sapiens
cttaggcaacactttctttccatcaacgcctaaagcgatggttggagccctttgaaatcaagttaaatggggagaggtgcacagaagcactagaacttgcmattgtttaagagacagaaaagaattgtgctgtctgagcaagacaatcctagccatgtgcctgctgagagcccagagcatgtgagctttaactaaggaaac

SEQ ID NO: 472888 - DNA, 201 bp, Homo sapiens
cagtgtaaaagtgttcctatttctccacatcctctccagcacctgttgtttcttgactttttaatgattgccattctaaatggtgtgagacggtatctcaytgtggttttgatttgcatttctctgatggctagtgatggtaagcattttttcatgtgtcttttggctgcataaatgtcttcttttgagaagtgaaatttt

SEQ ID NO: 472889 - DNA, 201 bp, Homo sapiens
tagtggagggaaaagttcataatgtccccaaagacaaaaatacagcacaatgagttattccttcaatgagcatacttaggcaacactttctttccatcaaygcctaaagcgatggttggagccctttgaaatcaagttaaatggggagaggtgcacagaagcactagaacttgcaattgtttaagagacagaaaagaattg

SEQ ID NO: 472890 - DNA, 201 bp, Homo sapiens
accacttaccatcaattggaccctcggcaagttatttaacctcactaggcctctcttttatcatctgtaaaatgggaacaatgaaatagagacactgagamaattcagtgagacaatgaatatgtgataggcagaacaatgtccccgtcccccaaaaaagtctacgtcctaattcccagaacctgtaaacacgtcatatta

SEQ ID NO: 472891 - DNA, 201 bp, Homo sapiens
gagagctcttgtttggctctctgaccttctgtgggaaattaaatctcccaagttgttaaatccaagccagtctttttctccttttcagttttccaaggtcrtaaacacagaaaagggattcctggccctggtactagagctcatcttataagcccaatgtagtatagttctaaactaagcatattctataagcaaagtccc

SEQ ID NO: 472892 - DNA, 201 bp, Homo sapiens
ccagcaaagagagaatgaaagccaagcgaaaagcgtttccccctataaaaccatcagacctcgtgagtcttattcactaccacaagaccagtgtgggggamctcaccccccatgattcaattacctcccaccaggtccctcccacaacatgtggggattatgggagctacaattcaagatgagatttgggtagggacacag

SEQ ID NO: 472893 - DNA, 201 bp, Homo sapiens
gatacctaaggggcttgtcaacacctaatgctgtctctccttctccttggctccaaacactgttctgggtattgcctcgctgggcctggctaaagctctgycttctgaagtgaaggttgaccttttattaaatactaaccctacaagaaaagtagaataaactagtcccattgtaacttgccaagattaatacatccatag

SEQ ID NO: 472894 - DNA, 201 bp, Homo sapiens
agcaataatagcataaagagattggctattacttttaaaacctatatttcaataatgctttcacatatattgatttcatttgatattcacaacaacacgaygagatgacagagaagactgtgcatttcttttttttaaattatactttaagttctgggatacatgtgcagaacgtgcaggtttgttacataggtacacacg

SEQ ID NO: 472895 - DNA, 201 bp, Homo sapiens
tgtatccctcaaatttccaagaggaattggccagcagtgctgtgtaacagaagccagagtccagagattcaggccacaggctgactctgcaccaatggctrtgtggaatgggacagttcatctccgtctctggttctgtgtgtccccctctgtaaaagcagagtttgtacttacatttagtctaattctatagtttcaaag

SEQ ID NO: 472896 - DNA, 201 bp, Homo sapiens
gtagacaatagcattagacaatttttggagtgacaagatcacttcctcctgcctagttttaaagagtgaccacaaggaacagcttcgcccttagaaataasttttgattatttgataatggaaaggaaaaaaagtgtacaactctcctctagttaaatttcaagcatttagagaagtggatatgtctatatcacaacatat

SEQ ID NO: 472897 - DNA, 201 bp, Homo sapiens
caggagaatcacttgaacccaggaggtggaagttgcagtgagccaagatcacaccactgcactccagcttgggtgacggagtgagagaaaatgagagtgtragagagagagagagagagagaaagaaagaaattaatttattctttcccatttctacagaccagaaatccaaaaccaaagtgttggtagggctagttcctt

SEQ ID NO: 472898 - DNA, 201 bp, Homo sapiens
tagtcactaaccataatgagaaggactgatgaattggactacagttgacctttgactaacaagggttcaaactatgcaggcccatttatatgcagagtttytcaataaatgtactggaaaattttttggagatttgccacaatttgaaaaaactcacagatggaccatgtagtgtagtccaaaaatatatttaaaaaaaag

SEQ ID NO: 472899 - DNA, 201 bp, Homo sapiens
cctgtgtttgcgttttgcattcattcattcattcactatgtagttggctaggacacttattgagtgtccattatggaccaagtcttttcctaggttccagsaaacagaatcccaaaatctctgatcaagaaattatgtgttgcctccataaataaaattataaacaagatttatttctatttgtatcacccttcattctaa

SEQ ID NO: 472900 - DNA, 201 bp, Homo sapiens
aatattgatctaattcagactgttcatttttatagatgaagaaactgaggcacagagaggtcacaaaaacaaaactacttgtttttcatgtatatttaccwtttctatcagagatactaccactgaacagatggctttccttgatggatggtttcattagcagtgtctgaatacttatcttctgtttgccatgtgtttctc

SEQ ID NO: 472901 - DNA, 201 bp, Homo sapiens
tcagaagaatcttggtgccttgagcaaggccatctctaccacatgagcatgtgagagccaagttggataatactgaagtggtaggtcagtcagtgcttgcygcactcacagcctgttttgagaaaagcagttctttgagcagggaaggccatcttctgtacacatgaatagcctcactccagccagaactctgtgaacttg

SEQ ID NO: 472902 - DNA, 201 bp, Homo sapiens
caggacttgacatccccaactcaggcattaatctgttcatccaacagcatttatgggtatctactatgtgccaggcactgtgctcttttgtcagcatcacyccagttccaaaaacatatcatggaaatgaactcttaatacagtatttgcaactggagccaatgaacaataataaatgtttcacaagaccctgttaagaca

SEQ ID NO: 472903 - DNA, 201 bp, Homo sapiens
accagttgtttccagaggtcagtcctggagaatgccagcaagccctgggatctttattggctgggatcttcatgttggctctgatgctacactgaccaacraagttaccacaggtctcacacagctattgagcactgaaatagggccagtccaagtggcatggactgtgtgcagacaaagtgactccatattaaatgttaa

SEQ ID NO: 472904 - DNA, 201 bp, Homo sapiens
acaaatttgataacatagataaaatggaccaattcttggaaggcacaatctgccaaaactcacacaataatatgaaaaacaagaaatggggaaagtattcyctattaataagtggtcctgggaaaactcgctagccatatgtagaaagctgaaactggatcccttccttactccttatacaaaaattaattcaagatggat

SEQ ID NO: 472905 - DNA, 201 bp, Homo sapiens
gtctatcccatcccacatgatcagtccaatttaatcaccctattcaatcctctgggggctcagctggtccaaggaggggcacgggtctttggcccaaacaractgaagagaaggaactatattatgtagttggctaggagatttttcttctctctcacattggatgtgaaaagcatgacgcttcaatttacataaagtctc

SEQ ID NO: 472906 - DNA, 201 bp, Homo sapiens
caacgcttattctctagagatccttgttaaacaatgtcccatccatcaagggtgaattagatttgtccctggcttgaggacagaataagatgacttcaccygactccttataaacttataattttatgaaaaatccataagctctcatctttccagcactctgataacgaggtaattacccttttaatgaaaaaggaagcc

SEQ ID NO: 472907 - DNA, 201 bp, Homo sapiens
ccaattcttggaaggcacaatctgccaaaactcacacaataatatgaaaaacaagaaatggggaaagtattccctattaataagtggtcctgggaaaactsgctagccatatgtagaaagctgaaactggatcccttccttactccttatacaaaaattaattcaagatggattaaagaattaaactttagacctaaaacc

SEQ ID NO: 472908 - DNA, 201 bp, Homo sapiens
ctaatttgattgcactgtggtctgagagacagtttgttgtgatttctgttcttttacatttgctgaggagtgctttacttccaattatgtggtcaattttrgaataagtgcaatgtggtgctgagaagaatgtatattctgttgacttggggtggagagttccgtagatgtctattaggcctgcttgttgcagagctgatt

SEQ ID NO: 472909 - DNA, 201 bp, Homo sapiens
tatttattgatgggttgcgggggagaaacagaaaaggatcaggctatttgcttaaagtccctcagcaagttggctcccaaggcaagtccagtgcccttgcrtcccatcacctcctagaccctccaccagtgctgcttattctctctgctgttttcccagaatcattcactgcccttctccacatcacaggagctcctgtct

SEQ ID NO: 472910 - DNA, 201 bp, Homo sapiens
agcaatataacctgtcactgtgaagagtaaaggaatgtctctggaggatttccaacacattttagatcctcaaaagtattgattgctattactcactattsattcagtagacacttactaggcacctactatgtataaagcactgtactaggttctacagaataacaagacagacataaataagatatgggtccaacagtc

SEQ ID NO: 472911 - DNA, 201 bp, Homo sapiens
gacctttaaagttccacctcctctgagatgacttctctaatgaatccaaccacatggtttattcacattatgtgacattatatgtggcctctggcatgaarccattagcaaataagcatggatctaatttgtttttttatatatctccacccaaaataaataaataaataaacagagacaaggacttaggtgcaaggagtt

SEQ ID NO: 472912 - DNA, 201 bp, Homo sapiens
gccgggcatggtggcaggctcctgtaatcccagctacttgggaagctgaggcaggagaactgcttgaaccctggaggcagaggttgcagtgagctgagatygtgtgactgcactccagcctgggcgacagagtgagactccgtctcacaaaacaaacaaacaaatatccactggcaagtgctatggaccacagacctagga

SEQ ID NO: 472913 - DNA, 201 bp, Homo sapiens
gccaggagcagtggctcacgcctgtaatcccagcactttggcaggtcaaggcaggcagatcacctgaggtcgggagttcaaggccagcctggccaacaccrtgaaaccctgtctctactaaaaatacaaaaaaattagccgggcatggtggcaggctcctgtaatcccagctacttgggaagctgaggcaggagaactgct

SEQ ID NO: 472914 - DNA, 201 bp, Homo sapiens
tattcacagaattgtgcaaccatcaccacaatctttagaatattttcatcatctcaaaaagatactttgtagcctttagcacccttcccactgtacccccmcccatacccctggccataggcaactactaaattactttctgtccctgcaggttgtcctattctggatactttgtatatgtggaatcataaaataggtgat

SEQ ID NO: 472915 - DNA, 201 bp, Homo sapiens
ttagaatattcacagaattgtgcaaccatcaccacaatctttagaatattttcatcatctcaaaaagatactttgtagcctttagcacccttcccactgtrcccccccccatacccctggccataggcaactactaaattactttctgtccctgcaggttgtcctattctggatactttgtatatgtggaatcataaaata

SEQ ID NO: 472916 - DNA, 201 bp, Homo sapiens
ggtttgcactactatgagaatctaatgccatggctgatctgacaggaggcagagctcaggtggtaatgctcacctgcccaccactcacctcatgctgtgcrgcccagttcctaacagcccatggactggtaccagtctgtggcccaggggctggggaccccttgggtacagaaaatgtagtatatatatgccatgaaatac

SEQ ID NO: 472917 - DNA, 201 bp, Homo sapiens
tcctaatgagtatgaggtgatatttcattgtgctttttatttgcatttctcttatgattagtgatatggagcattttttcatatgcttgtgggtcatttgyatgtctttggagaattgtctatttaagcccttcacccattttttaataaggttattttgttgtaggagtttataatatattctggatattaaccctttat

SEQ ID NO: 472918 - DNA, 201 bp, Homo sapiens
atgcttcttagatcttagagttcaggctaaacatgtgataggttcaaaacaatgctttgaccgtcccccacagccctacaccaaatgaatttctttatgawatcctccacagcccgatccacatctctgaaactgaaacacattaaaaggaaaagatttttgaagaagtataatttccatttcctttttccacccacatat

SEQ ID NO: 472919 - DNA, 201 bp, Homo sapiens
aatcgtatggtgattatattttcaattttttgagaaatcactatattgttttccataatggttgcaccattttacattctctacaacagtgaacaagggtkacaatttctctacatcctttccaatgcctgttattttctgttgtgatagtgtccatcctaatgagtatgaggtgatatttcattgtgctttttatttgca

SEQ ID NO: 472920 - DNA, 201 bp, Homo sapiens
cctactagtactcacatttcataattctaactggaaataaatacaccaggcattcaatcctgtcttatgcaatatggcctaaaatgaggcccacaaactgstataatccaaagacaagtggactcttggaagagctgaattacataatagaataagtttctatcatagatccccagggaatgagtcttttttatacactta

SEQ ID NO: 472921 - DNA, 201 bp, Homo sapiens
attgctctatttatgccatctttgcaactaaatactgtgattaacttgaagtgtggtttccagaaatttcttatgaggaaacagataaatatggaaagatrtatgccgaaagatgtttactgcagcaatgcctaagataaagactgaaaacaatataaatatccatcaggagacgattgcttaagtatagtacagtaacac

SEQ ID NO: 472922 - DNA, 201 bp, Homo sapiens
attgtgaataataataggtgcaatgaacgtgggtgtacaaatatctctttaagattccgctttaattcttttggatatgtaccctgaactgggacataatygtatggtgattatattttcaattttttgagaaatcactatattgttttccataatggttgcaccattttacattctctacaacagtgaacaagggttaca

SEQ ID NO: 472923 - DNA, 201 bp, Homo sapiens
aaaggacatgatcttgtttctttttataactcagaaataagaccacccatctacaaccatctgatctttgacaaacctaacaaaaacaagcaatggggaarggattccctatttaataaatggtcctgggagaactgactactcatatgcagaaaattgaaactggaccccttccttacaccttataaaaaaactaactca

SEQ ID NO: 472924 - DNA, 201 bp, Homo sapiens
acaggacactgcaacatcaaaacaaagcctctaaatactcccctaaagacaaggaagactaatatctgtgacgtagctattctcttctgggacatagaggaaaaaaataggtctctctcataacaagacaccattcatttctcaggttaagctgccattaccttcgaacacacagaagctgagggctgtttctgcagccct

SEQ ID NO: 472925 - DNA, 201 bp, Homo sapiens
ccatctaaacagccaccagcgaatataaagcaggcagaaaagaatgaaacacttgaggaggcagtctgcccattctcagatctccagctgcatgctgggasaaccactacactcttcaaagctgtcagacagggacatttaagtctgcagagtttactgctgtctttttgtttgtctgtgccctgcccccagaggtggagc

SEQ ID NO: 472926 - DNA, 201 bp, Homo sapiens
ttccactcccctcagctctggaaagcactgcaaaagtcttccttaggagtgctgtgaagacgctggggaagatgccggcccaggcaggtggccctgagtgkgcaaaaagaaaaacttgactttccatgcagtatcaagcaaggttactttgtaaacaaacaaaactggaaaataagactacatactaagtccttgagagca

SEQ ID NO: 472927 - DNA, 201 bp, Homo sapiens
tttaaattttttttctaattttaaaacaagacagcaaattaattgttagtgtccaggcaaagcagatctgctgaggtcagtgaggcaaaaaaaaaaaaaawaaaaaaaaagagaccatggtgaaatcacaaggagaatcatacagaactaggtggagatactgagggaaccaacacactgttctgaacactttgggggctt

SEQ ID NO: 472928 - DNA, 201 bp, Homo sapiens
gagaaggcaaacccacccttaattaggtgggcaccatctaaacagccaccagcgaatataaagcaggcagaaaagaatgaaacacttgaggaggcagtctrcccattctcagatctccagctgcatgctgggagaaccactacactcttcaaagctgtcagacagggacatttaagtctgcagagtttactgctgtctttt

SEQ ID NO: 472929 - DNA, 201 bp, Homo sapiens
tcctttcactttctctggactaaattccactcccctcagctctggaaagcactgcaaaagtcttccttaggagtgctgtgaagacgctggggaagatgccrgcccaggcaggtggccctgagtgtgcaaaaagaaaaacttgactttccatgcagtatcaagcaaggttactttgtaaacaaacaaaactggaaaataaga

SEQ ID NO: 472930 - DNA, 201 bp, Homo sapiens
tacaacacacctaacacaatgcctcatacacagtaggtgtctagtagttggttatatattgttatgggtcctttggcacttcacatgtactctacttgtawtctaatttaactttttgggtatttcttccttgcttcttctatgaaactctgaattcctggagagcaagaaacatgctatttacttaatctggattttcta

SEQ ID NO: 472931 - DNA, 201 bp, Homo sapiens
atcacgtactattcacgctattgtgaatggcttatttcataatgtcctcaagattcatccgtgttgtagcatatgacaggacttcctttttaaagctggakagtattccattgtatgtacacaccacattttcgtgtgtgtgtgtttgtgtgtgtgtatgtagtagtggtttttactgattggcacaagatcacggcctgt

SEQ ID NO: 472932 - DNA, 201 bp, Homo sapiens
actgtggtagacatagaaaggcatggtccaggcccccttcaaggaaggccttgcttccctgccacagggagtatcaccagcagacagcctccagctgtcascctctgcaggaccaccttagctgcagagagctggctcaaagaggtcatgcccttcccaggatagcttttatccactggctgagaaaagtggggctagaca

SEQ ID NO: 472933 - DNA, 201 bp, Homo sapiens
gataccggcagaatttgcctttggcatcactgtggtagacatagaaaggcatggtccaggcccccttcaaggaaggccttgcttccctgccacagggagtrtcaccagcagacagcctccagctgtcagcctctgcaggaccaccttagctgcagagagctggctcaaagaggtcatgcccttcccaggatagcttttatc

SEQ ID NO: 472934 - DNA, 201 bp, Homo sapiens
cactcagttatcctagcatcttagagagccaggaaagactactccagacctgtctgaccattgcaaggcaaggtggaatgttattatgtatgatatctgartgacaaaggagaatctatgcttctcctccagccttgtttcatgggcacattagtgtggtttagattgtgtaatatctcttaattattacatgcaaattca

SEQ ID NO: 472935 - DNA, 201 bp, Homo sapiens
ctggacagaaaaggagagaaggaaaaatcgcttccattagcaactccagcacctctttgggaggaatctttcataggtgcacactgcatgcttgcaaatayccccactaacctgcactgggtatgctgggcactcagttatcctagcatcttagagagccaggaaagactactccagacctgtctgaccattgcaaggcaa

SEQ ID NO: 472936 - DNA, 201 bp, Homo sapiens
ctagtattgagaagcaaatgaggtaagagacatgagaaagatttagaaattataaaattcaacataaatacaaattaatgaggtacatctattatgtcacstgatctttataacgtgacaattgtccaaatcaaaatggagtcactaaagtttttttttgtttgcttgtttgcttgtttgtttttaaaaaaaccctgataa

SEQ ID NO: 472937 - DNA, 201 bp, Homo sapiens
taaaagcagcagatggtaaaattcccctaatacagcaggatctgattgtcccagatagttggcatatctacagaccagacacaagctggggggaagaaaasttgcccccattagtagcatttttatgcgtaggtgacattctacaggtaagttacaagagggcaaaaataaaaaataacacatcttgtaaggcacaggcat

SEQ ID NO: 472938 - DNA, 201 bp, Homo sapiens
gaaggaagtgccacataaaagcagcagatggtaaaattcccctaatacagcaggatctgattgtcccagatagttggcatatctacagaccagacacaagytggggggaagaaaagttgcccccattagtagcatttttatgcgtaggtgacattctacaggtaagttacaagagggcaaaaataaaaaataacacatctt

SEQ ID NO: 472939 - DNA, 201 bp, Homo sapiens
tgtctacacaggcagttgtctgctaccaaagaggggttccagaagaaaatgttatttggggcagaaaagactggcctcccgccccccaacagatctataakaatatgttaacctcctgtgcaactcccagagagctgaatggataaatacactgagtactcagtaaaatctacctcaaaacaattattctggtttttgctt

SEQ ID NO: 472940 - DNA, 201 bp, Homo sapiens
ctgctcaggtggaaacttagtgagtaagaaggaagtgccacataaaagcagcagatggtaaaattcccctaatacagcaggatctgattgtcccagatagytggcatatctacagaccagacacaagctggggggaagaaaagttgcccccattagtagcatttttatgcgtaggtgacattctacaggtaagttacaaga

SEQ ID NO: 472941 - DNA, 201 bp, Homo sapiens
tttcattgtagtgaacctctcattatgatacttgctaactgagatcacatcacctgtgttgctcacagatacagattttttatagtagtttggtgatagcsgaaacatttctcttgcttggcatgcaaatgctatcattctcgttcatgaactcattgtgtaaaatgcacttagccacatctggctgctgttcgcatgaac

SEQ ID NO: 472942 - DNA, 201 bp, Homo sapiens
catgtctccctactatagtgaccaggaacccagcaggcgtctaataacccttcctccagccctgtttagcattttaatcaatgatttagatgaagatatasgggatatatttattgaacatgcaattgaaacaatagcaactatatgaacaaaatcaacttccaaaatactcgtaacaatcaagccagtctaaatagaagg

SEQ ID NO: 472943 - DNA, 201 bp, Homo sapiens
taaaattgaaactaagtttctaaataattccttatctggtcccttccttctcattctgacatcaccgcctccttccttcaacttctatagtaagttctaastggtctccttatccacctccacttttaacccattcttttcacatcttccattttaacattcttcccagaaaacataaatggccaatacatcggaataaaa

SEQ ID NO: 472944 - DNA, 201 bp, Homo sapiens
caagttttaatatgcaactaattttccaggacagtctctagcctgtaaatcatggggaggaaactttaccaaaaattgttcaccaccctgaaaatcacttyaccaacactataatgacattcttgctacttgagtgacaagtacaaagctcctgtaacggtctgcatttgcagtttccattcttcatgtagctacaagcat

SEQ ID NO: 472945 - DNA, 201 bp, Homo sapiens
agccagcctcctcacgtactcagaaactcatcctttctcatggggaggccatgtgaaaaatgtaggtcacttcaaagccatctgaaggcaaaacacaaaawatgtgggcaaaggctggtgggatatgtttctcttcatgcattcattcacactgtcaaattggagtcctggtgaacaagttcccaaatggcttcactacca

SEQ ID NO: 472946 - DNA, 201 bp, Homo sapiens
acttatttgtacgtacagaagtctgggaggattctgtacacaccttcgttaatgctcatgcctgtaaggatgagttttcaagggactgagataaggatgcytcatgcctgagctcttgagatgcgaacatattcctcttcatacttcagtacctagtacatgtgtggcacatagaaaacattctgacaatgtctgttatat

SEQ ID NO: 472947 - DNA, 201 bp, Homo sapiens
ttaaagtagttttttccaattctgtgaagaaagtcattggtagcttgatggggatggcactgaatctgtaaattaccttgggcagtatggccattttcatgatattgattcttcctacccatgagcatggaatgttcttccatttgtttgtatcctcttttatttcactgagcagtggtttgtagttctccttgaggaggt

SEQ ID NO: 472948 - DNA, 201 bp, Homo sapiens
gagagagggaagaagagaaggaaggaaggagggaaggaagagagagaaggacggagggaaggagggagagaaggagggagggagggatatgattaactcaygaaggaggtaggattacgatcagacttaaatctgctggaagcaaaccattgcctgtaaggtaaaaaattgagaagtgttagaaaagcctcacactgctcc

SEQ ID NO: 472949 - DNA, 201 bp, Homo sapiens
aacaatattaactttaaatgtaaatggactaaatgctccaattaaaagacacagactggcaaactggataaagagtcaagacccatcagtgtgctgtattyaggaaacccatctcacatgcagagacacacataggctcaaaatgaaaggatggaggaagatctaccaagcaaatggaaaacaaaaaaaagcaggggttgc

SEQ ID NO: 472950 - DNA, 201 bp, Homo sapiens
ggaaatagacagacacatagataatgtataagtagaataataattctttgaattgaaatccccagggaaacattttcactcaaccgaaaatctaactgcartctaaagattttcacatacaaccacttggcattgacttacaactccacctagataggttcataaagtcagatccttttcttgttacattcttagagctca

SEQ ID NO: 472951 - DNA, 201 bp, Homo sapiens
tgtgctgtattcaggaaacccatctcacatgcagagacacacataggctcaaaatgaaaggatggaggaagatctaccaagcaaatggaaaacaaaaaaargcaggggttgcaatcctagtctctgataaaacagactttaaaccaacaaagatcaaaagagacaaagaaggccattacataatggtaaagggatcaattc

SEQ ID NO: 472952 - DNA, 201 bp, Homo sapiens
tgaccttttctatggaaagctaggcgctaaaggtgatagagagataacatgcacatacgaactctcaagggaaatagacagacacatagataatgtataartagaataataattctttgaattgaaatccccagggaaacattttcactcaaccgaaaatctaactgcaatctaaagattttcacatacaaccacttggca

SEQ ID NO: 472953 - DNA, 201 bp, Homo sapiens
ttaatttaattacacctgaataaaaccttttttccaaataaaagcatattcacagaagattaggacaaggatatattttagagaggccacaactcaacctwctataggcttccattaggctgtatgatagatagacagagaccagtttttgaagacagacctaccctggtttgtaaaatcaattctgctacttattgggca

SEQ ID NO: 472954 - DNA, 201 bp, Homo sapiens
catttttcttcatttggggatcaaaattttagttctttgctgtgattatactatctatgagatggtgataatttccaggttggaggtttgtgttttataawttgcctggatagggtttcaatttagctttaatacaatatttggtctctggattttattaatttcaatgataatggttgaaaatataatagaaatgacaaa

SEQ ID NO: 472955 - DNA, 201 bp, Homo sapiens
gaggccgaggcaggtggatcacaaggtcaggagttcaagactggcctagccaagacggcgaaaccccacctctactaaaaactacaaaaattagccgggcrcagtggcaggcgcctgtaatcacagctactcgggaggctgaggcaagagaattgcttgaatctgagcggtagatgttacagtgagccgagatcatgccac

SEQ ID NO: 472956 - DNA, 201 bp, Homo sapiens
actttcatcttcaacacccatgaaaaagactcagattcaatacgagacatcaatcctgtaaataatagtagctaacatctactcggggcttgccatgtgcyaggccctctgccaaaggctttacatttaacagttcattctaattctctcacagtccttataaagcaggttttataatctccattttcttaaagaggaaac

SEQ ID NO: 472957 - DNA, 201 bp, Homo sapiens
gaaagcaggtaggttctgtttggcctgcacagctaaaacattttgggttgccttttggaattcatgcactctccagccttctacatgactactgcttcttrctgtgttagaatcaactccctacacctacctggccctagaaagcattaagtttgagatctttgtcacaatcaaactccatccctccaaaacaatttaata

SEQ ID NO: 472958 - DNA, 201 bp, Homo sapiens
aggccgaggcaggtggatcacaaggtcaggagttcaagactggcctagccaagacggcgaaaccccacctctactaaaaactacaaaaattagccgggcgyagtggcaggcgcctgtaatcacagctactcgggaggctgaggcaagagaattgcttgaatctgagcggtagatgttacagtgagccgagatcatgccact

SEQ ID NO: 472959 - DNA, 201 bp, Homo sapiens
tgcattcctcagtatgccaattgcattcttcaactccagaatttctgcttgattcttttaaattatttcaatatctttgttaaatttatctgatagaattytgaaatccttctctgtgttatcttgaatttctctgagttcctttaacatgggtattttgaattctctacctgaaatgtcacatatctctgtttctccagg

SEQ ID NO: 472960 - DNA, 201 bp, Homo sapiens
ggccgaggcaggtggatcacaaggtcaggagttcaagactggcctagccaagacggcgaaaccccacctctactaaaaactacaaaaattagccgggcgcrgtggcaggcgcctgtaatcacagctactcgggaggctgaggcaagagaattgcttgaatctgagcggtagatgttacagtgagccgagatcatgccactg

SEQ ID NO: 472961 - DNA, 201 bp, Homo sapiens
cgggaggctgaggcaagagaattgcttgaatctgagcggtagatgttacagtgagccgagatcatgccactgcactccagcctgggcgatagagtgagacyccgtctcaaaaaaaaaaaaaaaaaaaagtcatcaatcatctgacatgaaatcacaaaagtgagcatcttttgacctctgaaaaatgagttttaattgttc

SEQ ID NO: 472962 - DNA, 201 bp, Homo sapiens
tatcatggtaatcaggtaagtttacatctatattatgcattgttctaaggaagggagtaaaatctctgataatttaataaggcttttctttttctttccttttttttttttttttttttttttttgagacagagtctcatgccgttgcctaggctggagtgcagtggtacaatctcagctcactgcaagctctgcctccct

SEQ ID NO: 472963 - DNA, 201 bp, Homo sapiens
ctcagattccatgaaacctgctttaaactttttctaatattctagaaatctactctatccttacccaagggatagaggatatttctgtggcacccaagctrttcagtgaacagatgaactgtcccagggtcttcactgtgattggaggggctcaagtcatttgggaaaaatcggtgttggcttcaagagctataaatgctc

SEQ ID NO: 472964 - DNA, 201 bp, Homo sapiens
actgaagtttaaacccaaggccaggcattaaatattattatgtaaggcaccagttctgtatcaagtcctttcaaggcttaacagccaaattagcaataaaytctgatagccccatctatcagctctgttcagccaatccaatggcaacactgtgtttctttgcaggtccagggaacacacgcttgcaaaggaaaaaaatgc

SEQ ID NO: 472965 - DNA, 201 bp, Homo sapiens
agctgtagaccggagctgttcctattcggccatcttggctcctcctcaagtgggtccctgacccctgagcagcctaactgggaggaaccctccagaagggrcagactgacacctcacacagccgggtactcctctgagacaaaacttccagaggaatgatcaggcagcagcatttgcggttcaccaatatccgctgttcta

SEQ ID NO: 472966 - DNA, 201 bp, Homo sapiens
cactccccttaagattagaagctgtttaagggcagggtctggtcttcctggccctgtgacacagcaaacactgaatgtatttttaattaaatcagtgtgaytcaatttgcaccattttattggatctcttttgcatttcagctgacactagatttcatcagagtctagagaaaaggatggatcacagaacaggtttgtctc

SEQ ID NO: 472967 - DNA, 201 bp, Homo sapiens
aagtatgtaagcgatccactgaggtgagttcacacataaaaaagaagaaaataaaatgcatgtatactactctgcaatccactctcaggtcatttgaaacraagtcaaaggagagaaggagttagggggatgatgtatacgactgtggattctacaaaaattttatttgatataaagcattcaacgcatctaaagtcatag

SEQ ID NO: 472968 - DNA, 201 bp, Homo sapiens
agagtacaatggggagaagtagggtaaggaaagtcaggactctaagtatttgataaaataagcattcatataaaaataatttagatggcagttaatacacwtattaattaactactttacttttttttttttgagacaagagtctcactctttcacccagactagaaggcagtggggtgatcacagctcacttgcagcctt

SEQ ID NO: 472969 - DNA, 201 bp, Homo sapiens
gaaagtttctcctccatttctgtgtggctttgagcatgctgattaacttctctgaatcttggttgtaaaaaaaaaaaaaaaaaaaaagatgtagcaccacragtttgtgaagtttgtgggaatgggaagatataatgcatgtgaacgtggcacatagtgtctagtaagttagcttagcttattttattttctgctcctcat

SEQ ID NO: 472970 - DNA, 201 bp, Homo sapiens
gattgtttggctataggagctctgttttggttccatgtgaaatttaaagtagtttttttataattctgtgagtaaagtcaatggtagcttgatagggatakcactgaatctataaattactttgggcagtatggccattttcacaatattgattcttcctatccatgagcatggaatgtttttccatttgtttgtatcctc

SEQ ID NO: 472971 - DNA, 201 bp, Homo sapiens
caagtgaatgaatgaatgaatgaatgggtacacatctgttttagaggagagagtcctttatttgaattctcagtttatggcattcctgctttccaggcagrgcattttcaagaactgcctctgtgacttgtgaatgataggggaagagctggtcggtggagaagcaggggttgaacttgggtctgtctgactctaaacctg

SEQ ID NO: 472972 - DNA, 201 bp, Homo sapiens
aaagtgctaggattacaggtgtgagccaccacacctggcctaaaaaggcttatcctaaacatttccataaataggatttgaaatttttctagttcaccttycttttctctttgctgtgtctttacatgtcatttgatttcacatgtcatttatcagagagcagggagtgctttatcactctccaaagttcatagcctcctc

SEQ ID NO: 472973 - DNA, 201 bp, Homo sapiens
attgtttggctataggagctctgttttggttccatgtgaaatttaaagtagtttttttataattctgtgagtaaagtcaatggtagcttgatagggatagyactgaatctataaattactttgggcagtatggccattttcacaatattgattcttcctatccatgagcatggaatgtttttccatttgtttgtatcctct

SEQ ID NO: 472974 - DNA, 201 bp, Homo sapiens
ctggttcaagtgatttttgtgccacagtctgtcgagtagctgggattaaaggcatgcaccaccatgcccagccaatttttgtatttttagcagagacaggkttttgccacgttggccagactggtctcgaattcctgatctcaagtgatccacctgccttggcctcccaaagtgctaggattacaggtgtgagccaccaca

SEQ ID NO: 472975 - DNA, 201 bp, Homo sapiens
cccttgtaagttgtattcctaggtattttattctttttgtagcaattgtaaatgggagttcactcatgatttggcttcctttttgtctattatttgtatayaggaatgcctgtgattttgcacattgattttgcatcttgagactttgctgaagttgcttatcagcttaaggagatttgaggccgagatgatggggttttc

SEQ ID NO: 472976 - DNA, 201 bp, Homo sapiens
aactatataaaatccagtggtcacagttttgctgcttcttccatcttgatcctcattttatattccctatatataaagtttgagtgtgtgcgtgtgtgttwgagacatcaaaagtttcaaaaaactagtttctcagtctttggagggtcaggtagctaagaaaccaagacatccagcctttaaaggtacctcctaaaatct

SEQ ID NO: 472977 - DNA, 201 bp, Homo sapiens
gttgtattcctaggtattttattctttttgtagcaattgtaaatgggagttcactcatgatttggcttcctttttgtctattatttgtatacaggaatgcytgtgattttgcacattgattttgcatcttgagactttgctgaagttgcttatcagcttaaggagatttgaggccgagatgatggggttttctaaatatac

SEQ ID NO: 472978 - DNA, 201 bp, Homo sapiens
atcaattatactactaaacccccagttaagagtccatattggaaccttatttttgaagtcaattccaggaaaagttttgtttcttttgtaaaagcgttacrttttgaaagggcagcattataaatagaaggggaaataactgtatacaaagagggaacgatatcaaagtttggtagtagaaataagaagagtaaataaatt

SEQ ID NO: 472979 - DNA, 201 bp, Homo sapiens
agggctagattccacctaaaagctagagtgaagaatcctttgccacttccatctactggtagctccaggccatcattggcttgtggctctatcacttctayctctgcctctgcgttcatgtgagtttctcatcttctccctgttatcatcctcttttgtctcttatgagagcatctgtgattggattaagatcccaaccag

SEQ ID NO: 472980 - DNA, 201 bp, Homo sapiens
atgagttagtctatggtttcaaaatgaaataggctatgcattattttcctgtcactcccataagaaattatcacaaaatgaatggcttaaaacaacaagartgtactgtctcacagatctggaggctggaagtctgaaatcaagtgttggtagggctagattccacctaaaagctagagtgaagaatcctttgccacttcc

SEQ ID NO: 472981 - DNA, 201 bp, Homo sapiens
ctgtctgagcaagacaatcctagccatgtgcctgctgagagcccagagcatgtgagctttaactaaggaaaccaactccaaatcctcagcagctacggaartatgaaatggatttcaggtggactgagacagagtttagaaatgggaccaaatgtgcagtctcttttaaccaaagtttaaaggatgatttgcttcttcttt

SEQ ID NO: 472982 - DNA, 201 bp, Homo sapiens
aagattacagtgatcacagagtgtagtggtttggcatcaggctgccaagagtgaaattccaacaagtttgcttatcagtgtctcagtttccttgtctgtargctccgcctgttaatagtgtctacctacagggtcactaagtaaggtatttatcacagggtaagtattaaataggtaatagatgtaaccctatgaggtatt

SEQ ID NO: 472983 - DNA, 201 bp, Homo sapiens
ctactgataaagacatacccaagactgggtaatttataaagaaaaagaggtttcatggactcacagttccacatgtctgggaggcctcacaatcatggcasaagagcaaggaagaacaaacggacatcttacatagaggccagcaaagagagaatgaaagccaagcgaaaagcgtttccccctataaaaccatcagacctc

SEQ ID NO: 472984 - DNA, 201 bp, Homo sapiens
tataatatatatataatatatatatataaaatatatataatatatgaatataccttgcatttatatatgaaaaaaacagaatgtattagcctgttttcacwctactgataaagacatacccaagactgggtaatttataaagaaaaagaggtttcatggactcacagttccacatgtctgggaggcctcacaatcatggca

SEQ ID NO: 472985 - DNA, 201 bp, Homo sapiens
catttctgcgtttatgcttatccacctatttctatcctctaaattcatttgatatctgctcttcctttcaaaggtaattcagatcacaccatagcaccacrgaccataaatcattctgaacagaactctgtttctggggcacatcaatgttcattcaagggatcgtgctttagaaactaaccaccaatatgtatttcagta

SEQ ID NO: 472986 - DNA, 201 bp, Homo sapiens
aagtgacagaggtaggatttagagataggtagatccacttgagtccagagcttatagaggtacctaccttaccaacaggacggctttttggaattcatttygataaaaaaaaaatcaagttggatatgacggacttgatcatttcttctgcctgagatgcctaacacatctaaaagagctgtacgttagttcatgttattg

SEQ ID NO: 472987 - DNA, 201 bp, Homo sapiens
tctagagacagcaagatattctcaagatgctccaagtatccattctgactctatgactattctgagcacaaactcaggattttagtttccttcactaatayctagtaataaaaaacctccatgtgttatttatgagaacagttaagcagataaataataaagtctcctgacacttcaaaggaaaatgaagaaaatatgagt

SEQ ID NO: 472988 - DNA, 201 bp, Homo sapiens
aaaggagcctagcctcttcctccctacaggacactgcaacatcaaaacaaagcctctaaatactcccctaaagacaaggaagactaatatctgtgacgtarctattctcttctgggacatagaggaaaaaaataggtctctctcataacaagacaccattcatttctcaggttaagctgccattaccttcgaacacacaga

SEQ ID NO: 472989 - DNA, 201 bp, Homo sapiens
tatataaactaagaatcttcttctgtgtaaacctgctattaaaaataatgcttaagaagtattttcaaaggtttaacaagtgcttatgacgtaatgttcgkcaacaaacaattgtatacaaactaggatctcaattatgttgaagtgtgtagaatattgacagtgggtatttctgagtggtaggatttggggtgtttctaa

SEQ ID NO: 472990 - DNA, 201 bp, Homo sapiens
acagacctgcagctgagggtcctgtctggtagaaggaaaactaacaaacagaaaggacatccacaccaaaaacccatctgtacatcaccatcatcaaagamcaaaagtagataaagccacaaagatggggaaaaaacagagaagaaaaactggaaactctaaaaagcacagtgcctctcctcctccgaaggaatgcagctc

SEQ ID NO: 472991 - DNA, 201 bp, Homo sapiens
caacaatagaggatatgttatataaactaagaatcttcttctgtgtaaacctgctattaaaaataatgcttaagaagtattttcaaaggtttaacaagtgsttatgacgtaatgttcggcaacaaacaattgtatacaaactaggatctcaattatgttgaagtgtgtagaatattgacagtgggtatttctgagtggtag

SEQ ID NO: 472992 - DNA, 201 bp, Homo sapiens
gagtgggggccaacattcaacattcataaagaaaacaattttcaacctagaatttcatatccagccaaactaagcttcataagtgaaggagaaataaaatrctttacagacaagcaaatgctgagagattttgtcaccaccaggcctgccctaaaagagctcctcaaggaagcactaaacatggataggaacaaccggtac

SEQ ID NO: 472993 - DNA, 201 bp, Homo sapiens
atgtcgagacaccttcattgaaaagagagaataagaaattgctccctgaaacctagaatagatggtgccccaggattgatcacaataatcattgggaatayacattgtagagacctcagattcctattgcacatgtgtcctacaaagaagggttacagagattctatcttgaattgtttgtgaatttttccacatgcatta

SEQ ID NO: 472994 - DNA, 201 bp, Homo sapiens
ccaaactaagcttcataagtgaaggagaaataaaatactttacagacaagcaaatgctgagagattttgtcaccaccaggcctgccctaaaagagctcctsaaggaagcactaaacatggataggaacaaccggtaccagccactgcaaaaacacgccaaaatgtaaagaccatcaaggctaggaagaaactgcatcaact

SEQ ID NO: 472995 - DNA, 201 bp, Homo sapiens
attaaaataaaatgccatatctttgtgaagttaaaagtctctggattgtggttaaaagtctggtctgctccttatacaatggaaagtctttcaaaagccaygtgtttcttaagctggcctcaccatgcataacagctagaatataaatctagactctcgccgcccatctatcttttcttttctgtgtcatgtagaggttcc

SEQ ID NO: 472996 - DNA, 201 bp, Homo sapiens
ccaaggtcaaacaactagtgtgtatgtaataaatatttgtcaagtgaatgaatgaatgaatgaatgggtacacatctgttttagaggagagagtcctttayttgaattctcagtttatggcattcctgctttccaggcagagcattttcaagaactgcctctgtgacttgtgaatgataggggaagagctggtcggtggag

SEQ ID NO: 472997 - DNA, 201 bp, Homo sapiens
aggaagcactaaacatggataggaacaaccggtaccagccactgcaaaaacacgccaaaatgtaaagaccatcaaggctaggaagaaactgcatcaactavcgagcaaaataaccagctaacatcataatgacaggatcaaattcacacataacaatattaaccttaaatgtaaatgggctaaatcctccaattaaaagac

SEQ ID NO: 472998 - DNA, 201 bp, Homo sapiens
aagaaactgcatcaactaacgagcaaaataaccagctaacatcataatgacaggatcaaattcacacataacaatattaaccttaaatgtaaatgggctamatcctccaattaaaagacacaaactggaaaattggataaagagtcaagacacatcagtgtgctgtatacaggaaacccatctcacgtgcagaggcacaca

SEQ ID NO: 472999 - DNA, 201 bp, Homo sapiens
tggaaaattggataaagagtcaagacacatcagtgtgctgtatacaggaaacccatctcacgtgcagaggcacacataggctcaaaataaagggatggagraatatctaccaagcaaacggaaaacaaaagaaggcaggggttgcaatcctagtctctgataaaacagactttaaaccaacaaaaatcaaaagagacaaag

SEQ ID NO: 473000 - DNA, 201 bp, Homo sapiens
gatgtttctggtccctaatcccatagctaagagattttgttgttctttttaaaattttctctccctagcattgacagtttctcaccacctcacctgggccygcttgaggggaaaaattttaccaggggtacaggaagccatttacaatcattaaacatttgttcacctcacaagtatatattgagcacctgctgtatgcca

SEQ ID NO: 473001 - DNA, 201 bp, Homo sapiens
aggggttgcaatcctagtctctgataaaacagactttaaaccaacaaaaatcaaaagagacaaagaagaccattacatagtggtgaagggatcaattcaasaagaagagctaactatcctaaatatatatgcacccaatacaggagcacccagattcataaagcaagtcctgagtgacctacaaagagacttagactccca

SEQ ID NO: 473002 - DNA, 201 bp, Homo sapiens
actggtagatgatttcaatatcaccagtgcgaataatttgatttctgccccaagagctagaattatatggagagctaatggtctgggtacagcccctaccyttctgcaaggtgatgtttctggtccctaatcccatagctaagagattttgttgttctttttaaaattttctctccctagcattgacagtttctcaccacc

SEQ ID NO: 473003 - DNA, 201 bp, Homo sapiens
tttttttcagcaccacaccaaacctattccaaaattgaccacatggttggaagtaaagcactcctcagcaaatgtaaaagaacagaaattataacaaactrtctctcagaccacagtgcaatcaaactagaactcaggattaagaaactcactcaaaaccgctcaactacgtggaaactgaacaacctgctcctgaatgac

SEQ ID NO: 473004 - DNA, 201 bp, Homo sapiens
caatgtctgaccttctggatgtcctgcaaccatcccggtgcttcatggctctatcagagttgtgcgttaaaggatccaggaacactggtagatgatttcartatcaccagtgcgaataatttgatttctgccccaagagctagaattatatggagagctaatggtctgggtacagcccctacctttctgcaaggtgatgtt

SEQ ID NO: 473005 - DNA, 201 bp, Homo sapiens
aatgtaaaagaacagaaattataacaaactgtctctcagaccacagtgcaatcaaactagaactcaggattaagaaactcactcaaaaccgctcaactacrtggaaactgaacaacctgctcctgaatgactactgggtacataacaaaatgaaggcagaaataaagatgttctttgaaaccaacaagaacaaagacacaa

SEQ ID NO: 473006 - DNA, 201 bp, Homo sapiens
aggtggcttaattggtttcatgcctataattttcccctctagaaagaaaaatgttagcatggcaataaagaatatcattaacctgcattgttatttcacartagtgataagtcttagtttgcatccataataatcagtgtaatcaagtactgtacagagaatcaggaaggcgcaggctcaattcccagcaatgacactaat

SEQ ID NO: 473007 - DNA, 201 bp, Homo sapiens
aaaccgctcaactacgtggaaactgaacaacctgctcctgaatgactactgggtacataacaaaatgaaggcagaaataaagatgttctttgaaaccaacragaacaaagacacaacataccagaatctctgggacacattcaaagcagtgtgtagagggaaatttatagcaccaaatgcccacaagagaaagcaggaaag

SEQ ID NO: 473008 - DNA, 201 bp, Homo sapiens
tttaaaagagagaaaggtggcttaattggtttcatgcctataattttcccctctagaaagaaaaatgttagcatggcaataaagaatatcattaacctgcrttgttatttcacaatagtgataagtcttagtttgcatccataataatcagtgtaatcaagtactgtacagagaatcaggaaggcgcaggctcaattccca

SEQ ID NO: 473009 - DNA, 201 bp, Homo sapiens
gctattatccagtcgtagctggatgatcttggatcagttgcttaaccccataccaaccttcaattttgtcatgtataacataatcgagttgggagaataamgctggaaggactaactgccataatcagtgagattactaaaaggtttatgtaagccatgcctccagtaccacaattaacatcaacatttaacttatatgga

SEQ ID NO: 473010 - DNA, 201 bp, Homo sapiens
tgttacagttttttaaaagaaacaatatgcaagctttactactatttatattttctactttttgaatgttttcaaagctctaggcaaatgtcgggagttaytaacaattttatcagttgattggttggttagcaagctattatccagtcgtagctggatgatcttggatcagttgcttaaccccataccaaccttcaattt

SEQ ID NO: 473011 - DNA, 201 bp, Homo sapiens
tatgatcatttagaatcatatgtttctgggaacaatgaaagtatctttaactcatgaatagagctctgattaatatttaattcaggatgaaattatatggrtgaagtcagaaaaacatttattctctcttgttttggctcaaagtacagaatagagataaaagttaaaccctatctgtaaaattcaatactttagtgacca

SEQ ID NO: 473012 - DNA, 201 bp, Homo sapiens
ggtgcaaggagtttattttggagatacccccaggaagcagcagttagggaatggggagattgaaacaaagaggtaggaagaaaccataagaggtgctgttmaccaccatgggcaagtggtgctcgatgcagctggggactaattcttgagtgacaggtaggatgtacctaagaatttccttctaagggacaggaggttaag

SEQ ID NO: 473013 - DNA, 201 bp, Homo sapiens
tatctttcatcattatgagggatatccttcaatataattttcatgacaccatctgccatgttcttctctcaactttttttggtggggtgacaactcagtgrttatgaatgtcatatctggcatcttttaaaaataaaactctatcagagatctcaagggggaaaacaagtaataaaaacatatccggccaggagcagtggc

SEQ ID NO: 473014 - DNA, 201 bp, Homo sapiens
aataagaggcagaagacaaacttttcagggacttaagagctgtgataaagagtttggggtttatgctgagtgtgatagggaaccagcaaatgtttttcatygggcaagtggcaaggtcagatgtaaatttgtagtttgtggcatagtccatgagacctgtggtttgtgtgacagctgccagagagcaccaagggcagtcag

SEQ ID NO: 473015 - DNA, 201 bp, Homo sapiens
aggcagtagactagttgttgggaaacatattttgtcttcatgggagaaatagacagtgaagcaaaaataaataaataaacaaactgaataatatggctcaygataaatgccataaagccaataagcagaggacttgatagcgaatgctaagagaagggtagcagaagtggcctgggatgattttctgagataatactatat

SEQ ID NO: 473016 - DNA, 201 bp, Homo sapiens
tcataacacacattttctatgaacttgtgaagagccctcatacacctctcacttactttgtataatttactttaaagctgcaaccacactcaaggtgtggrtcacagctatcctggccacgtgcaaggaacaaaacaaaaaacgactttaagatggaagatatattaaaaattagggctgacttagaagtgtagagcagct

SEQ ID NO: 473017 - DNA, 201 bp, Homo sapiens
aaaaattttaatctatgcatagttttttcataacacacattttctatgaacttgtgaagagccctcatacacctctcacttactttgtataatttactttmaagctgcaaccacactcaaggtgtggatcacagctatcctggccacgtgcaaggaacaaaacaaaaaacgactttaagatggaagatatattaaaaatta

SEQ ID NO: 473018 - DNA, 201 bp, Homo sapiens
aaacacagtaagttagtactaacaagaaactatgtccatctgttgcccatgtgtccattaaatattgctaagaaaaagaagtaggacgcaaatagtatgtrtaatatgaactaatttttaactttgtatgtatgtttgagaaagagaaaagcgtaaaaatggtgaatcaaattaacagtgattttcatggaagactgggat

SEQ ID NO: 473019 - DNA, 201 bp, Homo sapiens
gaagaatcagatagacacagtaaaaaatgataaaggggatgtcaccaccgatcccacagaaatacaaactaccatcagagaatactacaaacacctctacrcaaataaactagaaaatctagaggaaatggataaattcctggacacatacaccctcccaagactaaaccaggaagaagttgaatctctgaatagaacaat

SEQ ID NO: 473020 - DNA, 201 bp, Homo sapiens
aaaatgataaaggggatgtcaccaccgatcccacagaaatacaaactaccatcagagaatactacaaacacctctacgcaaataaactagaaaatctagargaaatggataaattcctggacacatacaccctcccaagactaaaccaggaagaagttgaatctctgaatagaacaataacaggctctgaaattgtggcaa

SEQ ID NO: 473021 - DNA, 201 bp, Homo sapiens
tgatgcaaaaatgctcaataaaatactagcaaagcgaatccagcagcacatcaaaaagcttatccaccatgatcaagtgggcttcatccctggaatgcaasgctggttcaacatacgcaaatcaataaatgtaatccagcatataaacagaaccaaagacaaaaaccacatgattatctcaatagatgcagaaaaggcctt

SEQ ID NO: 473022 - DNA, 201 bp, Homo sapiens
ggtaacttaaaataaacttgacatttctagactataaaccattttgttgtaaagttatctagatatttttgaaacctggtaagttaaaaatgaccctcacwtttgtgaaaccttatctttggcaattaacctgcctgtgtaatcgttattctgcaagtctaatgaaaggacagattagaactcattccttggtaaataaaa

SEQ ID NO: 473023 - DNA, 201 bp, Homo sapiens
aattcagcaaccttcgtgctaaaacctctcaataaattaggtattgatgggacgtatctcaaaataataagagctatctaagacaaacccacagccaatakcatactgaatgggcaaaaactggaagcattccctttgaaaactggcacaagacagggatgccctctctcaccactcctattcaacatagtgttggaagtt

SEQ ID NO: 473024 - DNA, 201 bp, Homo sapiens
gggatgccctctctcaccactcctattcaacatagtgttggaagttctggccagggcaattaggcaggagaaggaaataaagggtattcaattgggaaaaraggaagtcaaattgtcctggtttgcagatgacaaggttgtatatctagaaaaccccattgtctcagccccaaatatccttaagctgataagcaacttcag

SEQ ID NO: 473025 - DNA, 201 bp, Homo sapiens
cagctataaaacaagaggactggactacgttagctctcttagcccattccactcaaaaagttacataattccatattaaagtctatgtaaaataaatcactttttttttattttactacttttaattttgaaatctagtttggtatttttatttaaccaatcattgaattatcttttaaaattatattagaattattaaca

SEQ ID NO: 473026 - DNA, 201 bp, Homo sapiens
aagtaagaaaatgttatagccaagtttgcattttgtgtcttagagctatatagaagtcagaaagtaacaaatcattctaataaactcttaatttgactctwcacgcctgatgtcttcctgatagagttgaagggtaacttaaaataaacttgacatttctagactataaaccattttgttgtaaagttatctagatatttt

SEQ ID NO: 473027 - DNA, 201 bp, Homo sapiens
aaagaggatacaaagaaatggaagaacattccatgctcatgggtaggaagaatcaatattgtgaaaatggccatactgcccaaggtaatttatagattcartgccatccccatcaagctaccaatgactttcttcacagaattggaaagaactactttaaagttcatatggaaccaaaaagagcccgcatcgccaagtcaa

SEQ ID NO: 473028 - DNA, 201 bp, Homo sapiens
aaaacaagaggactggactacgttagctctcttagcccattccactcaaaaagttacataattccatattaaagtctatgtaaaataaatcactttttttwtattttactacttttaattttgaaatctagtttggtatttttatttaaccaatcattgaattatcttttaaaattatattagaattattaacagaacata

SEQ ID NO: 473029 - DNA, 201 bp, Homo sapiens
agtgtttcgggggaggggtggacaacagatgttagtctgctattttacatgttcctttaagttatttttgcaggttcagtgccttttatacataaggcaawattttcacaggatggggaaaaatgaattgaatcaaatttaagtaagaaaatgttatagccaagtttgcattttgtgtcttagagctatatagaagtcaga

SEQ ID NO: 473030 - DNA, 201 bp, Homo sapiens
ggtactggtaccaaaacagagatatagatcaatggaacagaacagagccctcagaaataatgccgcatatctacaaccatctgatatttgacaaacctgasaaaaacaagcaatggggaaaggattccctatttaataaatggtgctgggaaaactggctagccatatgtagaaagctgaaactggatcccttccttacac

SEQ ID NO: 473031 - DNA, 201 bp, Homo sapiens
aaacaagaggactggactacgttagctctcttagcccattccactcaaaaagttacataattccatattaaagtctatgtaaaataaatcacttttttttwattttactacttttaattttgaaatctagtttggtatttttatttaaccaatcattgaattatcttttaaaattatattagaattattaacagaacatat

SEQ ID NO: 473032 - DNA, 201 bp, Homo sapiens
agagatatagatcaatggaacagaacagagccctcagaaataatgccgcatatctacaaccatctgatatttgacaaacctgacaaaaacaagcaatgggraaaggattccctatttaataaatggtgctgggaaaactggctagccatatgtagaaagctgaaactggatcccttccttacaccttatacaaaaattaat

SEQ ID NO: 473033 - DNA, 201 bp, Homo sapiens
ggactggcatatgccaagtcgggcacaccaggaagaaagtttctcctccatttctgtgtggctttgagcatgctgattaacttctctgaatcttggttgtaaaaaaaaaaaaaaaaaaaaagatgtagcaccacaagtttgtgaagtttgtgggaatgggaagatataatgcatgtgaacgtggcacatagtgtctagtaa

SEQ ID NO: 473034 - DNA, 201 bp, Homo sapiens
ttatgactggcatctttcaagcatgtttttgatattttcatccatgttgtaggatattaaattaactttttgcataggaataactgagctagaaaagcatkggctgaatatgtctgcagaatgtagcatttagaaaagaaagacttccaggagacaaatgaggtagtaactaaaatgtaaataactaaaaattagctttga

SEQ ID NO: 473035 - DNA, 201 bp, Homo sapiens
acagaacagagccctcagaaataatgccgcatatctacaaccatctgatatttgacaaacctgacaaaaacaagcaatggggaaaggattccctatttaayaaatggtgctgggaaaactggctagccatatgtagaaagctgaaactggatcccttccttacaccttatacaaaaattaattcaagatggattaaagact

SEQ ID NO: 473036 - DNA, 201 bp, Homo sapiens
tgtaccatctgttttcttctaagtctctgacaaggatgagaaatcagagaaaactccttagtgaagcataaaggccctccatatctaggaaccatcctacyttcctgtcttgatttccatagctactgtggcataaccaaaatcccattcaaaatgaaagcattcctattctgtcccctattccaagtctgctgccctgac

SEQ ID NO: 473037 - DNA, 201 bp, Homo sapiens
tcccattggaaataagataactgtggaaaccctttcagataaatacaagctaagtagcgaaggtaccttggaaatatctaacatacaaattgaagactcargaagatacacatgtgttgcccagaatgtccaaggggcagacactcgggtggcaacaattaaggttaatgggacccttctggatggtacccaggtgctaaa

SEQ ID NO: 473038 - DNA, 201 bp, Homo sapiens
ccctcagaaataatgccgcatatctacaaccatctgatatttgacaaacctgacaaaaacaagcaatggggaaaggattccctatttaataaatggtgctbggaaaactggctagccatatgtagaaagctgaaactggatcccttccttacaccttatacaaaaattaattcaagatggattaaagacttaaatgttaga

SEQ ID NO: 473039 - DNA, 201 bp, Homo sapiens
gtaaggaaagtcaggactctaagtatttgataaaataagcattcatataaaaataatttagatggcagttaatacacatattaattaactactttactttwttttttttgagacaagagtctcactctttcacccagactagaaggcagtggggtgatcacagctcacttgcagccttgaactcctggcagtcctcctgct

SEQ ID NO: 473040 - DNA, 201 bp, Homo sapiens
taaggaaagtcaggactctaagtatttgataaaataagcattcatataaaaataatttagatggcagttaatacacatattaattaactactttacttttwtttttttgagacaagagtctcactctttcacccagactagaaggcagtggggtgatcacagctcacttgcagccttgaactcctggcagtcctcctgctt

SEQ ID NO: 473041 - DNA, 201 bp, Homo sapiens
cctagggctctttcatagacacccttcccgtctgtcccaagacaccttcctgggtttggattcatgccagctggcactgggcttttggcttttcatttttcttttgctttttacattttctgttgtaattcttaagtccatccagtccagcctaccctgcttcccatgcctggccaaccctcctgaaagggctaaagtgcc

SEQ ID NO: 473042 - DNA, 201 bp, Homo sapiens
attattaaaagcctcctctgctgaggtcacccattggtgagcactcacatgggatacaaacatcttcacagtttttgaccactcaggtcaatccacatacytcctccccaaatttctttgtcaccaattttccaatcatgtttcttccaagtccctgaccatccagccaaaccattggctacagcccatgaatcggtatat

SEQ ID NO: 473043 - DNA, 201 bp, Homo sapiens
agccttgagctccacgcggggacagacctcagcccgtgagccttgagcccagaaggagtggcagcctcaggacgtttgccaggtggcctggaatgtgaggraagcctcagccccgccaggaacagagctggcgctgagttcccggctcggcccgggtcagaagcgaggaaagtttgccggcgagtgtcctttgtgctgcgt

SEQ ID NO: 473044 - DNA, 201 bp, Homo sapiens
ataaaccagatacagaaagacaaatactgcattaactcattcatatttgaaatctaaaaaggttgaactcatagaagtagagagtccaatgatgattactmgaggctaggaggctgaggagggaggaaatgggagatggtgatcaaagagtacaaagtttcagacagacaggagcaataagttttgagatctattgcacgg

SEQ ID NO: 473045 - DNA, 201 bp, Homo sapiens
ccatccatcaagggtgaattagatttgtccctggcttgaggacagaataagatgacttcacccgactccttataaacttataattttatgaaaaatccatragctctcatctttccagcactctgataacgaggtaattacccttttaatgaaaaaggaagcctttttatatctatccccattgaattatggacctcaaaa

SEQ ID NO: 473046 - DNA, 201 bp, Homo sapiens
ttgtttggtaaaattcaggattgaagccctgatgtcctgggcttttctttactatgagactttttattaatattatggctttgacctcattacttgttatyggtctgttctggttttggatttcttcttgactcaattttggtaggctgtatgtggctaggaatttgtgcatttcttctagattttccaatttattggcat

SEQ ID NO: 473047 - DNA, 201 bp, Homo sapiens
tgtgcatttcttctagattttccaatttattggcatatagttgctcacagtagctactaatgatcctttgaatttctgcagtatcagctagaatgtctccytcatttctgattttatttaattggatcttctcttttttttcttagtctagctaaaggtttatcaattttgtttaacttttcaaagaaacaactttttgtt

SEQ ID NO: 473048 - DNA, 201 bp, Homo sapiens
atagacacttatagccataaaattctatcttactattgcttttgctatattccataggttttgctatgttgtgtttcattatcatttgtttcaagaaaatktttaatttccttattaatttcttcattgacccacgggtcatttgggagcacatattttaacttccatctatttctatattttccaaaattcctcttgtta

SEQ ID NO: 473049 - DNA, 201 bp, Homo sapiens
caaaaacaagcaatggggaaaggattccctatttaataaatggtgctgggaaaactggctagccatatgtagaaagctgaaactggatcccttccttacaycttatacaaaaattaattcaagatggattaaagacttaaatgttagacctaaaaccataaaaaccctagaagaaaacctaggcaatatcattcatgacat

SEQ ID NO: 473050 - DNA, 201 bp, Homo sapiens
gctatattccataggttttgctatgttgtgtttcattatcatttgtttcaagaaaatgtttaatttccttattaatttcttcattgacccacgggtcattygggagcacatattttaacttccatctatttctatattttccaaaattcctcttgttatttatttctagttttattccattgtggtcagagaagatacttg

SEQ ID NO: 473051 - DNA, 201 bp, Homo sapiens
tctgggtgcatcagtgttgggtgcatatatatttaaaattgttatatccctgtgatggttaatattgtcaacttgattggcttgaaggctgcaaagtattktttctggatgtatctgggtgtttgtaggtgttgccagaagagattaacatttgagtcagtggactgggagacaaagacccaccctcaagaagacccatcc

SEQ ID NO: 473052 - DNA, 201 bp, Homo sapiens
aaccccatcaaaaagtgggcgaaggatgtgaacagacacctgtcaaaagaagacatttatgcagccaaaaaacacatgagaaaatgctcatcatcactggycatcagagaaatgcaaatcaaaaccacaatgagataccatctcacaccagttagaatggcgatcattaaaaagtcaggaaacaacaggtgctggagagga

SEQ ID NO: 473053 - DNA, 201 bp, Homo sapiens
agaagatgacccatttgactctaggacttcagatgtaactcttatggcaaaaggaaaatctttgggaataacaggatacaaagctttctcagcaagagcaycaggcccaagttctcttctatttataccggtgactttgacaatttcattagttgcataaggaggaaactcatagtgcagcatgaaatttttatcttttat

SEQ ID NO: 473054 - DNA, 201 bp, Homo sapiens
gttctttggcttttagactgttggactcacaccagtagtttgccaggggctctcaggactttggccacagactgaaagctgcactgtcagcttcccttctyttgagattttgggactcggactgagccactactggcttccttactcctcaacttgcagacggcctgtcatgggacttcatcttgtgattgtgtgagtcaa

SEQ ID NO: 473055 - DNA, 201 bp, Homo sapiens
gtggaagtcagtgtggagattcctcagggatctagaactagaaataccatttgacccagccatcccattactgggtatatacccaaaggattataaatcaygctgctataaagacagatgcacacatatatttattgcggcactattcacaatagcaaagacttggaaccaacccaaatgtccaataacgatagactggat

SEQ ID NO: 473056 - DNA, 201 bp, Homo sapiens
aattctccttaataaactccttcatttatacatatattctttagttctgtccctctagagaaccctaatagaatcctcttgctgaattgaccactttgtcrttatatagtgaccttctttgtatcttcttacagtttttaaccttgaaatctattttgtcttatataagcatagcaactcctactcctttgatttccattg

SEQ ID NO: 473057 - DNA, 201 bp, Homo sapiens
gacccagccatcccattactgggtatatacccaaaggattataaatcatgctgctataaagacagatgcacacatatatttattgcggcactattcacaayagcaaagacttggaaccaacccaaatgtccaataacgatagactggattaagaaaatgtggcacatatacaccatggaatactgcagccataaaaaatga

SEQ ID NO: 473058 - DNA, 201 bp, Homo sapiens
gtttcttccaagtccctgaccatccagccaaaccattggctacagcccatgaatcggtatatactcacacatctggccatttctccttccatccaaagtgyacaaccaggtgcactgcttgaagctctgcccactgggaagattaccctccaccgctgtcctttagggatgtcctaaaaaggggctgtagtgctgcagctg

SEQ ID NO: 473059 - DNA, 201 bp, Homo sapiens
ctcctttgatttccattggcacggaatatcattttccatcccttttttagtctatgtgtgtctttataggtgaagtgtgtttcttgtatgcaacagaccartaggtattgttttttttcacccattcagccagtctatgacttttgattggaaagtgtagtccatttaccttcaatgttattattgacaatattattgaca

SEQ ID NO: 473060 - DNA, 201 bp, Homo sapiens
catatggacacaggaaggggaacatcacactccggggactgttatggggtggggggcggggggagggatagcattaggagatatacctaatgctaaatgaygagttaatgggtgcagcataccaacatggcacatgtatacatatgtaacaaatctgcacattgtgcacatgtaccctaaaagtataataataataaaatt

SEQ ID NO: 473061 - DNA, 201 bp, Homo sapiens
aaggcagggtggcctgagtggagaccatgggcatttgagccacttccttatgtaacttacttgtgccttcaggacctgcttgagcccgatcatgtatatamcacttccatttgatgatggaatgctgctgtgcatgacccactttatggctagatgggtcagaaagcacccagtttatgatagttcaggttgcatggtagc

SEQ ID NO: 473062 - DNA, 201 bp, Homo sapiens
gaaagtgtagtccatttaccttcaatgttattattgacaatattattgacaagaacttactcctaccatttgattatttgtcttctgtttgttttgtgctrttctcttccttctttctttcattcctgattttgtgaagatgattttctctaataatatgatttagttccttgccttttattctttgtgtatttgttgtat

SEQ ID NO: 473063 - DNA, 201 bp, Homo sapiens
attttactcaaggcatatgtacttgagctcaagtcaggagtgccacagtccatcaactcaactgaaaagaatttaggaaggtacaaggtgaagtaaaaacrgataccagtttttcagcaataacatcagcaaaggctgatatggagtcttgtcagttttgttagcataaagcatggcatttggaaggcagaagtgcctcac

SEQ ID NO: 473064 - DNA, 201 bp, Homo sapiens
aatgctgctgtgcatgacccactttatggctagatgggtcagaaagcacccagtttatgatagttcaggttgcatggtagcttggtgacccatggtcaaaygttcagtttccaccaaagcctagtaacaggccaagagctgtctctcaaaaggagagtagttatctgcagaagatggcagggccttgctccaaaatcctag

SEQ ID NO: 473065 - DNA, 201 bp, Homo sapiens
ttactattaccagtaagttttataccttcaggtgattatctattactcattactatccttttctatttgattgaagtactccctttggcatttcttgtagratggttgtggtattaatgaactctctcaacttttgtttgtcagggaaaaacatttctttctccttcatgtttgaaggacatttttgccagatatactaat

SEQ ID NO: 473066 - DNA, 201 bp, Homo sapiens
ggaaggtacaaggtgaagtaaaaacagataccagtttttcagcaataacatcagcaaaggctgatatggagtcttgtcagttttgttagcataaagcatgrcatttggaaggcagaagtgcctcaccagaacagggagcagccaaacccattgtggcttcagctccatcagaagaatcttggtgccttgagcaaggccatc

SEQ ID NO: 473067 - DNA, 201 bp, Homo sapiens
ccggaggagaatcaacattattttgcctggcaactgcctcaggagagaggccatcactgttgcctcaggcagcgcagggtttgtctcctcagacaaaggcrgaaaggcctatggcagcatgtgttggggaggggatgttgccactactggggatggggaagctgtttcttctggcaaaaaaggtgcatcagagtttacaaa

SEQ ID NO: 473068 - DNA, 201 bp, Homo sapiens
gataagacttttgtagattcatcatgatcttgaatctcaaaacaaagctgattccaaggaagtaaatgcttgttcctctataatgcctggatactttgcayatccatttattataattgcttactttcttgtctgtgtccatactagcaagcagagagtctatcattgcatctttgcagtatagcacagtggttaagaaaa

SEQ ID NO: 473069 - DNA, 201 bp, Homo sapiens
aaaggcctatggcagcatgtgttggggaggggatgttgccactactggggatggggaagctgtttcttctggcaaaaaaggtgcatcagagtttacaaacrtagtgtccccagcttcatcagggtgctcccacacatccccattccaagttgcagggttgcattcttttccaatcagtgccctcactttaacagtagacac

SEQ ID NO: 473070 - DNA, 201 bp, Homo sapiens
actctaagtgcagctttcttatctgtaaaatgagcataatggtatccatttttctcccagatctgatgggaacaataaaagcattcagagtggcttatatytggttaatacccatcaattgttagctattattatttgcatttttagtatccacaaaccagggatgagaatatggtaactagtcagtgattattaaaagag

SEQ ID NO: 473071 - DNA, 201 bp, Homo sapiens
tggcagcatgtgttggggaggggatgttgccactactggggatggggaagctgtttcttctggcaaaaaaggtgcatcagagtttacaaacgtagtgtccycagcttcatcagggtgctcccacacatccccattccaagttgcagggttgcattcttttccaatcagtgccctcactttaacagtagacacttggtgagg

SEQ ID NO: 473072 - DNA, 201 bp, Homo sapiens
acccatcaattgttagctattattatttgcatttttagtatccacaaaccagggatgagaatatggtaactagtcagtgattattaaaagagtaaatagaygagttaataagacaaacactagtattcctatttatagatgagtaaaaccagcctccataaagaaaaaaaaatcattcccaatttcagtcaagtagtaagt

SEQ ID NO: 473073 - DNA, 201 bp, Homo sapiens
ctgttcctgcgttagtttgctgaggataatggctgccagcttcatccatgtccttgcaaaggacatgatcttgtttctttttataactcagaaataagacsacccatctacaaccatctgatctttgacaaacctaacaaaaacaagcaatggggaaaggattccctatttaataaatggtcctgggagaactgactactc

SEQ ID NO: 473074 - DNA, 201 bp, Homo sapiens
tcactgcaacctctgcctcccaggttcaagcgattctcctgcctcaggcccctgagtagctgggattacaggcacgtaccaccacgcctagctaatttttrtatttttagtagagacagggtttcaccatgttggtcatgttggtctcgaactcctgacctcatgatctgccccctgccagcctcccacagtgctgggatt

SEQ ID NO: 473075 - DNA, 201 bp, Homo sapiens
atgacagaatgaagtccttttatcagtcagtcaagatctgatgtggctattcaaatataggcaaaactgatgttttccttttttagttaagttaaatgtamtatttaaataactgtgaatatttagaatattcacagaattgtgcaaccatcaccacaatctttagaatattttcatcatctcaaaaagatactttgtagc

SEQ ID NO: 473076 - DNA, 201 bp, Homo sapiens
tagaatattcacagaattgtgcaaccatcaccacaatctttagaatattttcatcatctcaaaaagatactttgtagcctttagcacccttcccactgtacccccccccatacccctggccataggcaactactaaattactttctgtccctgcaggttgtcctattctggatactttgtatatgtggaatcataaaatag

SEQ ID NO: 473077 - DNA, 201 bp, Homo sapiens
atgacattctggaaaaagcaaaactatggagacagtaaaaagatcactggttgccaggatttaggcgggagggaggaatgaataggtgataggtggagcayggaaatttttttttttttttttttttgagacagggtcttgctctgtcacccacactggagtgcagtggtgcaatgtgggctcactgcaacctccaccttt

SEQ ID NO: 473078 - DNA, 201 bp, Homo sapiens
acatattaggagcaactctatggcaataaatttggaagtttaaatgaaatagactaatttctagaaagatgaaacccacaaaaaccaacacaaaaagaaaygaaaagtctagataattccctatttgcccaataattgaatccatactttataaagcttcccacaataaaatatacaggctcatgttggcctttctgttga

SEQ ID NO: 473079 - DNA, 201 bp, Homo sapiens
ccctcaatttggttttgtcagatcttttttcaagattagattccagctacacacttttggcagaaatatcacagaagtgatgctgagttcttctcggtgcrtcatatcagaaggcacatgctacagatatatcccatatcccataagccaattaggtcatttggttaaggtggcatatcaggtttctccactataaagtta

SEQ ID NO: 473080 - DNA, 201 bp, Homo sapiens
ctcaggtgatccacccacctcggcctcccaaagtgctgggattacaggcataagccaccgcgctgggccacacacgtatttttcaactcatggaggtaaamacccccatgttgttcaagggtcaattgtacattaaaattaagcacttctgttcaccaaaagagatatttaaaaggcaagccaaagagtagaaaaagttat

SEQ ID NO: 473081 - DNA, 201 bp, Homo sapiens
cacactgctccaaattctaattgctgctcctgatcatccttgcggatttcagcaatgaagtctcttgcctcatgcatagcaccgggtgttggtgcaaatayagaaaacgtttcttcatccacctgactaatagttacaactgtttcagcctgaagttttttaagttatatccacctggtccaacaaatttttctcattttg

SEQ ID NO: 473082 - DNA, 201 bp, Homo sapiens
atgaactctctcaacttttgtttgtcagggaaaaacatttctttctccttcatgtttgaaggacatttttgccagatatactaatctggggttaaaggttktttcccttcagcattttgaatatgtcatgccactctctcctggcctgtaaagtttccactgaaaagtttgctgccagacatattggagctccatagtatt

SEQ ID NO: 473083 - DNA, 201 bp, Homo sapiens
atgtttgaaggacatttttgccagatatactaatctggggttaaaggttgtttcccttcagcattttgaatatgtcatgccactctctcctggcctgtaargtttccactgaaaagtttgctgccagacatattggagctccatagtattttgtttctttctcttgctgcttttagaatgctttctttatccttgaccttt

SEQ ID NO: 473084 - DNA, 201 bp, Homo sapiens
taaatgagcattttaatacaaataattagaatatatttatactgtatacacagctacacaacggaagatactactaaaattttgctctatagcacattacsctagaaaacatagaattctagaattctctttaaaaagatcactgagaattattagatgatgactgtgaaataggttctcccagtacaatactacttctgt

SEQ ID NO: 473085 - DNA, 201 bp, Homo sapiens
gagtttcattataaaatgcctcgatgtactcttgtttgggttaaatctgcttggtgtttaaccttcttgtaccgggatactgatattttcctctaagtttsgaaagttctcattattatccttttgaataaactttctacccctatctttttctctaactcctctttaaggccaataactgttagattttcccttttgagg

SEQ ID NO: 473086 - DNA, 201 bp, Homo sapiens
gtaaatgagcattttaatacaaataattagaatatatttatactgtatacacagctacacaacggaagatactactaaaattttgctctatagcacattaycctagaaaacatagaattctagaattctctttaaaaagatcactgagaattattagatgatgactgtgaaataggttctcccagtacaatactacttctg

SEQ ID NO: 473087 - DNA, 201 bp, Homo sapiens
ctaattttcttctgcttgattaactccactattcaaggactctgatgcattcctcagtatgccaattgcattcttcaactccagaatttctgcttgattcytttaaattatttcaatatctttgttaaatttatctgatagaattctgaaatccttctctgtgttatcttgaatttctctgagttcctttaacatgggtat

SEQ ID NO: 473088 - DNA, 201 bp, Homo sapiens
ttttagtatccacaaaccagggatgagaatatggtaactagtcagtgattattaaaagagtaaatagacgagttaataagacaaacactagtattcctatytatagatgagtaaaaccagcctccataaagaaaaaaaaatcattcccaatttcagtcaagtagtaagtgacagaatcatttttcaaacttgggtctatct

SEQ ID NO: 473089 - DNA, 201 bp, Homo sapiens
tcctcagtatgccaattgcattcttcaactccagaatttctgcttgattcttttaaattatttcaatatctttgttaaatttatctgatagaattctgaartccttctctgtgttatcttgaatttctctgagttcctttaacatgggtattttgaattctctacctgaaatgtcacatatctctgtttctccaggattgg

SEQ ID NO: 473090 - DNA, 201 bp, Homo sapiens
cattcaataagcaggctttgagctgctataaccctcaggcggcatgtcctagagataatgagatcttagtattaaacacctctgtaacagaaatattatcrtacaacaatgtagcaatatggctagacatttggaaattaaaaaaataattccagacctatcaaattgttttgttgaaggcaacaggcaacaaaagatgtc

SEQ ID NO: 473091 - DNA, 201 bp, Homo sapiens
atttctgcttgattcttttaaattatttcaatatctttgttaaatttatctgatagaattctgaaatccttctctgtgttatcttgaatttctctgagttyctttaacatgggtattttgaattctctacctgaaatgtcacatatctctgtttctccaggattggtccctcgtgccttattgagttcatttggtgtggtc

SEQ ID NO: 473092 - DNA, 201 bp, Homo sapiens
aatcctctaaaaccaggcttctttcccgccaactactccttccctttccaatgaaccactcttaacagggtgtcttccatatttccaactcaaatgatcatctctctcttcatctcttttgacctctcagaagtatttatcattgttgtccactccctccttcttaaaatattcccttctcttgatttctcacgatttgcc

SEQ ID NO: 473093 - DNA, 201 bp, Homo sapiens
accaaatcatggatatagaaataggcccagctgcacaccactctaattatcctgttcttccaattcctcttttatgcattttttttgcccactctctctcraaacacagtagctctgggagttgaaaattaagttttaatgaagagattaaaagaagtaagtttattcctaaagaaataaaattgagagacagcaaataac

SEQ ID NO: 473094 - DNA, 201 bp, Homo sapiens
tgttaaatttatctgatagaattctgaaatccttctctgtgttatcttgaatttctctgagttcctttaacatgggtattttgaattctctacctgaaatrtcacatatctctgtttctccaggattggtccctcgtgccttattgagttcatttggtgtggtcatgttttcctagatggtgttgatgctagtagatgttc

SEQ ID NO: 473095 - DNA, 201 bp, Homo sapiens
atcctctaaaaccaggcttctttcccgccaactactccttccctttccaatgaaccactcttaacagggtgtcttccatatttccaactcaaatgatcatctctctcttcatctcttttgacctctcagaagtatttatcattgttgtccactccctccttcttaaaatattcccttctcttgatttctcacgatttgcct

SEQ ID NO: 473096 - DNA, 201 bp, Homo sapiens
atcttgaatttctctgagttcctttaacatgggtattttgaattctctacctgaaatgtcacatatctctgtttctccaggattggtccctcgtgccttaytgagttcatttggtgtggtcatgttttcctagatggtgttgatgctagtagatgttctccactgtctgggcattgaagagttcagtatttattgtggtat

SEQ ID NO: 473097 - DNA, 201 bp, Homo sapiens
cttgttaccttcgttgaatgatgttagttgactgtactgtaatgttgtatcaactgaattgaatgtttgcctttaaacaatgaattttctttttctttcctttttttttttttgttgtaatagttaaagaggcttagaacaagctaacaggcaatagaaatatgtatatcagattttttaatgtaacaaactacatgttaa

SEQ ID NO: 473098 - DNA, 201 bp, Homo sapiens
gaaacataaatgcatattactaagtgaaaaatgccaatctgaaaaggatacttactgtatgattccaactgtatgacattctggaaaaagcaaaactatgsagacagtaaaaagatcactggttgccaggatttaggcgggagggaggaatgaataggtgataggtggagcacggaaatttttttttttttttttttttga

SEQ ID NO: 473099 - DNA, 201 bp, Homo sapiens
ggtttttaaagtacgttgcctacaactttggggttgttctgcaaaaaggctccagagaggcctgagaaaggacctagtgtattagggttctcaagagaaayaaaaccaataggatatttatatatatatgaggggattactacgagaattggctcatgcaattatggaggctgagaagacccatgataagctgtctgcaac

SEQ ID NO: 473100 - DNA, 201 bp, Homo sapiens
ttgttaccttcgttgaatgatgttagttgactgtactgtaatgttgtatcaactgaattgaatgtttgcctttaaacaatgaattttctttttctttcctttttttttttttgttgtaatagttaaagaggcttagaacaagctaacaggcaatagaaatatgtatatcagattttttaatgtaacaaactacatgttaat

SEQ ID NO: 473101 - DNA, 201 bp, Homo sapiens
ttgaacaatgagatcacatggacacaggaaggggaacatcacactctggggactgttgtggggtggggggaggcgggagggatagcattgggagatctacytaatgctagatgacgagttagtgggtgcagcgcaccagcatgtcacatgcatacatatgtaactaacctgcacattgtgcacatgtaccctaaaacttaa

SEQ ID NO: 473102 - DNA, 201 bp, Homo sapiens
tttttttgagacagggtcttgctctgtcacccacactggagtgcagtggtgcaatgtgggctcactgcaacctccacctttcgagttcaagtgattctccrggctcaggctcctgaatagctgaaaatacaggcgtccgccaccacacccagctaatttttgtatttttatagtacaggtagggtttcaccatgttggcca

SEQ ID NO: 473103 - DNA, 201 bp, Homo sapiens
attactagtcaatctctgtcaagaacatagatgtatatatcttaggaaaatattaagaaattgaatccagcaattcacaaaaaggctaatccatcatgacycagttgagtttcttctagaaatgcaagattggtttagctatcaagatattaatccagggcgagccatgatggttcatgtgtataatctcagaactttggg

SEQ ID NO: 473104 - DNA, 201 bp, Homo sapiens
gggaacagccagacaatggctcttgcataattaccaaattgtggagtttgtggatgtgtttatatttaggaaatcatccagtccccctccccagtttatayggatgccgtaagacattaaagtggcattatgcatttgccctcctgacagcccattatgtcagttatatattaaatatgaagcaaatccagtatcatgtac

SEQ ID NO: 473105 - DNA, 201 bp, Homo sapiens
ttgaatccagcaattcacaaaaaggctaatccatcatgacccagttgagtttcttctagaaatgcaagattggtttagctatcaagatattaatccagggygagccatgatggttcatgtgtataatctcagaactttgggaggccaatgtgggacgatcacttaaggtcaggagtttgagatcagcctcagcaacatagc

SEQ ID NO: 473106 - DNA, 201 bp, Homo sapiens
tacaaacacgatgtccatttatcgttaaatacctcaatgtgtaattcctaaaacaaagaatgttctcttacatgaccacagtacaatttacaaaatcaggwcaaataatatgaatataatactattatctaatctacagcccttatttggatttatctaattgcctaacgatgttctttatagcaaaagaaaaaatctaag

SEQ ID NO: 473107 - DNA, 201 bp, Homo sapiens
tacaaaatcaggacaaataatatgaatataatactattatctaatctacagcccttatttggatttatctaattgcctaacgatgttctttatagcaaaakaaaaaatctaagattaagtgtttcacttagtgttcatgtctttttagtttctttcaatctggaatagttcttcagtctttctttgtattttatgacattg

SEQ ID NO: 473108 - DNA, 201 bp, Homo sapiens
tgaaatattaaaagctttttctctaaaatcagcaatgagataaatatctctactattacaatttctaccaccattaaactgtacatgttagctagtgcaayaaggcaaggaaaagaaggtgtagtcactgaaaaggaagaaataaaactgttacatgcagatgacatgatcatgtatgtagaaagtccaaatgtatctgta

SEQ ID NO: 473109 - DNA, 201 bp, Homo sapiens
gatacaagaaaacaaagcagacttgtttcttgccctctttgaatttatgtttttgaaggacaactagataataagttaaataattagttaatttcagtttrtgataagtactataaaaaataagagtactgagataagaatactttgtgtgagagagagaaggtagcctattccttcccccgcctccccaaccctccctgg

SEQ ID NO: 473110 - DNA, 201 bp, Homo sapiens
tgcctaacgatgttctttatagcaaaagaaaaaatctaagattaagtgtttcacttagtgttcatgtctttttagtttctttcaatctggaatagttcttsagtctttctttgtattttatgacattgacatttttgaagagggcaggccaagattactgaatgtccctcaatttggttttgtcagatcttttttcaagat

SEQ ID NO: 473111 - DNA, 201 bp, Homo sapiens
cagttgatatcttaaaaatcacatgcatggcaaattgcctattggctatggaaattcaaatgttcatgagcaattataagcatcttagcaaatgtgctcawattctatcaaaaaagaatagcaaaattgtatcatggattttctaattcattaattaatctctaaataagtctttattgagctcctaccatttgtcagggg

SEQ ID NO: 473112 - DNA, 201 bp, Homo sapiens
tagcaaaagaaaaaatctaagattaagtgtttcacttagtgttcatgtctttttagtttctttcaatctggaatagttcttcagtctttctttgtattttrtgacattgacatttttgaagagggcaggccaagattactgaatgtccctcaatttggttttgtcagatcttttttcaagattagattccagctacacact

SEQ ID NO: 473113 - DNA, 201 bp, Homo sapiens
ccttaagcccaggagttcaaggctgcagtgagctatgatcatgccactgcactccagcctgagcgacagagccagactttgtcacaaaaaaagaaaaaaamaattactttgcaaaaaaaaatctacattctcaattatccatttcactgatactaggtgtacatgctgaagctccttaagaagattgtactgacacatgaa

SEQ ID NO: 473114 - DNA, 201 bp, Homo sapiens
aaacccaagggaaagtgaatttatactagaataatgaaacactataaaaatgttctttaaaaaacttggagaatgttattttatggaattctctatagaakaaaatacaggatgtaagcagtatgtaaggaaacaattcaaggagaaatgaaggacaagatgggtttgaaatatccactaactctcaacctctgatcacta

SEQ ID NO: 473115 - DNA, 201 bp, Homo sapiens
gataccagcctgggcaacatagcgagctcccatctctaaaaaaattatttttaacttagctgggtgtggttgcatgcacctgtagtcccagctacctagarggctgagacaggaggatcccttaagcccaggagttcaaggctgcagtgagctatgatcatgccactgcactccagcctgagcgacagagccagactttgt

SEQ ID NO: 473116 - DNA, 201 bp, Homo sapiens
gatctgccctctaattctggtgctgccacttacctgctgtgtaactttaggcaagtcatttatatgttccaggcctcatcacacttattccaaaattgacyacatagttggaagttaagcactcattagcaaatgtaaaagaacagaaattataacaaactgtctctcagaccatagtgcaatcaaattagagctcagggt

SEQ ID NO: 473117 - DNA, 201 bp, Homo sapiens
agttaataagagaaagacagtcttcatctttccccacctgtatttcatgaattgcttcaggacgtcaggctatggggcaccagtacagaggaggctagagrgacaaatgaagcaaatccccaatggtggctgttggaaggtgcaacacaaaagtttcttcatctttaaaacctgcatggaagtaaagatcaattacccata

SEQ ID NO: 473118 - DNA, 201 bp, Homo sapiens
acaccaaaagcaatggcaacagaagccaaaattgacaaatgggatctaattaaactgaagagcttctgcacagcaaaagaaactaccatcagagtgaacargcaacctacaaaatgggagaaaatttttgcaatctacccatctgacagagggctaatatccagaatcaaaaaaaacttaaacaaatttacaagaaaaaat

SEQ ID NO: 473119 - DNA, 201 bp, Homo sapiens
taaatgtactggaaaattttttggagatttgccacaatttgaaaaaactcacagatggaccatgtagtgtagtccaaaaatatatttaaaaaaaagaaacrgttatgtatgtcatgaatgcacaaaatatatgtagatactaatgttttatcatttaataccataaaatatatacaaatctattataaaaagttaaaattt

SEQ ID NO: 473120 - DNA, 201 bp, Homo sapiens
agatgaaacccacaaaaaccaacacaaaaagaaatgaaaagtctagataattccctatttgcccaataattgaatccatactttataaagcttcccacaayaaaatatacaggctcatgttggcctttctgttgaaattttataaacatttaatgaagaaactatactaactttacacaaatctttgtagattttagaaaa

SEQ ID NO: 473121 - DNA, 201 bp, Homo sapiens
tagaagggagccactgaaggactttgaacaatgagaatgacataatcaatgtcattctttaggagggtcaaggtaataatacaatgatcaaggatcaagcrtccaaaatacatgcaagaaagacccccaccaagacttcttacaaaagtttaaaaatataaaataaaagtgcagctttcaagcaccaaggtaatttccctg

SEQ ID NO: 473122 - DNA, 201 bp, Homo sapiens
gacactgtggcagggcctcagagaatggggagcatttgaacttgggaaagtcggggaaggaaaagcatgaactaaaggaagtctgaaggaaaatgtcaatkatggggtattgcaacaaaaattagtttagttgctggactagttcaggagggagaagtggtaaaaataacaaacttttattgagcctttacaatgttccag

SEQ ID NO: 473123 - DNA, 201 bp, Homo sapiens
aatactttttgagcaactattatgtgttgggcataattacaggtggtcctctttactggttagagtcagcatggtagagcggactgacattacctcatcayagaagcccacgggaaaagaagacacatcccccagacctcacctaagtgggagtccagagagcctccttgatttaagtggctgtggctttcaaaaagtgtt

SEQ ID NO: 473124 - DNA, 201 bp, Homo sapiens
gagtgcagtggtgcaatgtgggctcactgcaacctccacctttcgagttcaagtgattctccgggctcaggctcctgaatagctgaaaatacaggcgtccrccaccacacccagctaatttttgtatttttatagtacaggtagggtttcaccatgttggccaggctggtctcaaactcctgacctcaactgatccacccg

SEQ ID NO: 473125 - DNA, 201 bp, Homo sapiens
ccaagaacaacctgaaaaagagtaaagctggaggacttatgctatcagacatgaaaacatattcaaaactataataattaaaatagaatgttttgcctaargatagacaaatatataaatggaatacaatcaaaactgtctcacacatatatgaccacttaatttaactgtaatctaaatataaaagtaataccacaaatt

SEQ ID NO: 473126 - DNA, 201 bp, Homo sapiens
ggctggagtgcaatggcgcaatctcggctcaccgcaacctctgcctcctgggttcagttgactctcctgcctcagcctcccaagtagctgggattacaggyacgtgagaccacacccagctaattttttgtatttttagtagaaatggggtttcaccatgttagccaggctggtcttgaactcctgacctcaggtgatcca

SEQ ID NO: 473127 - DNA, 201 bp, Homo sapiens
aacatagataaaatggaccaattcttggaaggcacaatctgccaaaactcacacaataatatgaaaaacaagaaatggggaaagtattccctattaataartggtcctgggaaaactcgctagccatatgtagaaagctgaaactggatcccttccttactccttatacaaaaattaattcaagatggattaaagaattaa

SEQ ID NO: 473128 - DNA, 201 bp, Homo sapiens
atcatcggccaggcgtggtggctcacgcctgtaatcccagtactttgggaggccaaggcaggcagatcacctgaggtcaggagttcaagatcagcctgatmgacatggtgaaaccctgtgtctactaaaaatacaaaaaattagccaaatgtggtggcaggcacctgtagtcccagctactcgggaggctgaggcaggaga

SEQ ID NO: 473129 - DNA, 201 bp, Homo sapiens
aaaaacaagaaatggggaaagtattccctattaataagtggtcctgggaaaactcgctagccatatgtagaaagctgaaactggatcccttccttactccytatacaaaaattaattcaagatggattaaagaattaaactttagacctaaaaccaaaaaaccctagaagaaaacctaggccatatcattcaggacatagg

SEQ ID NO: 473130 - DNA, 201 bp, Homo sapiens
cacctgtagtcccagctactcgggaggctgaggcaggagaatagcttgaacccaggaggtggaggttgcagtcagccgagattgcgccattacactcctgyctaggtgacagagcaagactctgtcttttaaaaaaatatgatgataatgataatttgctgggtgtggtggcaggcgcttggagtcccacctacttgggag

SEQ ID NO: 473131 - DNA, 201 bp, Homo sapiens
taggcatgggcaaggacttcatgactagaacactaatatatatatacatatatacaggttatatatataattatatattttatatatataattaatatatattaattatactttaagttctagggtacttgtgcacaacgtacagatttgatacataggtatacatgtgccatgttggtttgctgcacccatcaactcatc

SEQ ID NO: 473132 - DNA, 201 bp, Homo sapiens
ttacttaacccgggaggcagaggttgcagtgagctgagactgagccactgcactccaacctgagtgacaagagcaaaactctgtaaaaaaaaaaaaaaaamaaaaaacaaacaacaacaacaacaaccaccaaaaaaaaaaccatcatagttactcagctataacctcatttagcaaaagtcttgaatacaatacactatg

SEQ ID NO: 473133 - DNA, 201 bp, Homo sapiens
aggcatgggcaaggacttcatgactagaacactaatatatatatacatatatacaggttatatatataattatatattttatatatataattaatatatattaattatactttaagttctagggtacttgtgcacaacgtacagatttgatacataggtatacatgtgccatgttggtttgctgcacccatcaactcatca

SEQ ID NO: 473134 - DNA, 201 bp, Homo sapiens
actatcacgaggaccataaaaccaaacaccacatgttctcactaatatgtgggaattgaacaatggaaacacttggacacagggaggggaacatcacacaycagggcctgtcatggggtggggggaggggggagggatagcattaggaggaatataattacattatttacctaatgtaaataatgagttaatgggtgcagc

SEQ ID NO: 473135 - DNA, 201 bp, Homo sapiens
agctgagactgagccactgcactccaacctgagtgacaagagcaaaactctgtaaaaaaaaaaaaaaaaaaaaaaacaaacaacaacaacaacaaccaccaaaaaaaaaaccatcatagttactcagctataacctcatttagcaaaagtcttgaatacaatacactatgatcaaccatattcctcgtgttttacagtgga

SEQ ID NO: 473136 - DNA, 201 bp, Homo sapiens
ggcatgggcaaggacttcatgactagaacactaatatatatatacatatatacaggttatatatataattatatattttatatatataattaatatatattaattatactttaagttctagggtacttgtgcacaacgtacagatttgatacataggtatacatgtgccatgttggtttgctgcacccatcaactcatcat

SEQ ID NO: 473137 - DNA, 201 bp, Homo sapiens
aagaatagatggcagacttctgcactgcacattttcagcaaatcctatttttcacaaaaatgatttgcaaagctggcatcttgaaacacgagagatgcccraaatgagagttctgtatttaaaacccccattttagtagctgcattcttaggattatgggctctggagtcaaactgtctagggtcaaatacaggctctgcc

SEQ ID NO: 473138 - DNA, 201 bp, Homo sapiens
tcaccatgtcggccaggctgagggtctcgaactcctgacctcaagtgatccaaccacctcagcctcccaaagtgctgggattacaggtgtgagccactgcrcccaacctgacaagtgactattttcaagctaagtaaattaaatgtatctctaaatagctcataaataataataagtgtaaatacttaactctaatgtata

SEQ ID NO: 473139 - DNA, 201 bp, Homo sapiens
gcatgggcaaggacttcatgactagaacactaatatatatatacatatatacaggttatatatataattatatattttatatatataattaatatatattaattatactttaagttctagggtacttgtgcacaacgtacagatttgatacataggtatacatgtgccatgttggtttgctgcacccatcaactcatcatt

SEQ ID NO: 473140 - DNA, 201 bp, Homo sapiens
gcaattggtccctctctttcatgcataattaaattttccctctctactgaattatcctcgtcagcattcaagtgtgctgtaatttcttacatctcaacaamaaaaaaaaatcttgacccacttttccctctagctaccacctcatttctcagctgccctttaaagcagactctctagtttatcccctcccataaatccact

SEQ ID NO: 473141 - DNA, 201 bp, Homo sapiens
aatcctcaaaactattctacttacagttgataaaactgagtctgggaggagccaagatggccgaataggaacagctccggtctacagctcccagcgtgagygacgcagaagacgggtgatttctgcatttccatctgaggtaccgggttcatctcactagggagtgccagacagtgggcgcaggccagtgtgtgtgcgcac

SEQ ID NO: 473142 - DNA, 201 bp, Homo sapiens
gtatacatgtgccatgttggtttgctgcacccatcaactcatcatttacattaggtatttctcctaatgctatccctcccccagtcccccacccggcaacrggccccagtgtgagatgttccctgccctgtgtccaagtgttattgttcaattcccacctaagagtgagaacatgtggtgtttggttttctgactttgtgg

SEQ ID NO: 473143 - DNA, 201 bp, Homo sapiens
cttctggtggagtgatctgtacagtagtcacaggatggtcctttcactgaataaatactttttgagcaactattatgtgttgggcataattacaggtggtyctctttactggttagagtcagcatggtagagcggactgacattacctcatcatagaagcccacgggaaaagaagacacatcccccagacctcacctaagt

SEQ ID NO: 473144 - DNA, 201 bp, Homo sapiens
ggtaaactatggataaaagacagtacttttcccctccaaggaggaaacagggaagagaaattgcaagaaaactatcatggtcccaagtgggagtgtgaatrgcagagtcatgaaggtcttttttttttttttttttttaactgctgacactccatgtcaccacaagccaaaaattcttaattctggaaaaaaaaacagaaa

SEQ ID NO: 473145 - DNA, 201 bp, Homo sapiens
tgtgcgcaccgtgcgcgagccgaagcagggcgaggcattgcctcacctgggaagcgcaaggggtcagggagttccctttccgagtcaaagaaaggggtgayggacgcacctggaaaatcgggtcactcccacccgaatattgcgcttttcagaccggcttaagaaacggcgcaccacgagactatatcccacacctggctc

SEQ ID NO: 473146 - DNA, 201 bp, Homo sapiens
ccggcaacgggccccagtgtgagatgttccctgccctgtgtccaagtgttattgttcaattcccacctaagagtgagaacatgtggtgtttggttttctgwctttgtggtactttgctgagaatgatggtttccagcctcatccatgtccctgcaaaggacaagaactcatccttttttatggctgcatagtatgccttgg

SEQ ID NO: 473147 - DNA, 201 bp, Homo sapiens
gatttggtcagatgagtacctattctttatagttcaggggggtacactttcacagttcctcaaactctggaagccttattcaaaagagtacagccatcttwttttttaccccagcaaattttgcactttggagatgaatactgggaattaacacacaatcttcctcttgtagcacaactaccaaaggtcaggttagggaga

SEQ ID NO: 473148 - DNA, 201 bp, Homo sapiens
tgcctttatgataattctagattattttttaattttcatttttttattatacgtaagttctgggatacatatgcagaacgtgcaggtttgttacataggtrtacacgtgccacggtgttttgctgcacccattaacctgtcatctacattaggtatttctcctaatgctatccctcccctaaccccccaccgcctgacagg

SEQ ID NO: 473149 - DNA, 201 bp, Homo sapiens
ttctagatccttgaggaatcgccacactgtcttccacaatggttgaactagtttacagtcccaccaacagtgtcaaagtgttcctatttctccacatccayatgaactttgaagtagttttttccaattctgtgaagaaagtcactgatagcttgatggggatggtattgaatctataaattactttgggcagtatggcca

SEQ ID NO: 473150 - DNA, 201 bp, Homo sapiens
tcacatagagaaactgagcctcagttcatcactgataagtgatgaggccaagcagccctggctatcagattccaaggcccaagactaaccatgaatctatsttctaactgaaaaggcactcagagtactgggctggccatctcattggcctgatggatttagttctttcctgagaatgaggaacaaagaaaagggtaggtg

SEQ ID NO: 473151 - DNA, 201 bp, Homo sapiens
cgcctgacaggccccagtgtgtgatgctcccctccctgtatccatgtgttctcattgttcaactcccatttatgagtgagaacatgcagtgtttggttttmtgttcctgtgttagtttgctgagaatgacggtttccagcttcatccatgtccctgccaaggacatgaactcatccttttttatggctgcagagtattcca

SEQ ID NO: 473152 - DNA, 201 bp, Homo sapiens
ttgaggaatcgccacactgtcttccacaatggttgaactagtttacagtcccaccaacagtgtcaaagtgttcctatttctccacatccacatgaactttraagtagttttttccaattctgtgaagaaagtcactgatagcttgatggggatggtattgaatctataaattactttgggcagtatggccagtttcacgat

SEQ ID NO: 473153 - DNA, 201 bp, Homo sapiens
ggaacaatggagaagagggagggtctaatttaagactcaaacctgagatcaatatacggaaatcacaagccaaagaggaaaaagtaaaggacaggtcttcyatggttgtgacaacaaatccctacattgaactggaagaacctgaagctgcaaaagaaaagcaatcagtcaaaatgagagtgggtgggagtaaaagtaggt

SEQ ID NO: 473154 - DNA, 201 bp, Homo sapiens
gtattccatggtatatatatgccacattttctttatccagtctatcatcgatgggcatttgggttggttccaagtctttgctattgtgaatactgccgcartaaacatacgtgtgcatgtgtctttatagtagcatgatttataattctttgggtatatacccagtaatgggattgctgggtcaaatggtatttctggttc

SEQ ID NO: 473155 - DNA, 201 bp, Homo sapiens
catgcctctcctttccacctgggcctccctgtctccctcccataagattagatggacaaagtaaatttcagcctgggccctgacagagtgatcatgaattyctagtaaggggtgggggtgtcctgaattaataaggtagcattttaatgcatcagtctgcgtattaccacgtctcattcatataaacaagacagtggtcat

SEQ ID NO: 473156 - DNA, 201 bp, Homo sapiens
gttttttttgaagggtttttcatgtctctatctcattcagttctgctctgatcttagttatttcttgtcttttgctagcttttgaatttgtttgctcttgyttctgtagttcttttaattgtgatgttagggtgtagattttagatctttcctgctttctcctgtgggcatttagtgctataaatttccctctaaacactc

SEQ ID NO: 473157 - DNA, 201 bp, Homo sapiens
tggcattatgcatttgccctcctgacagcccattatgtcagttatatattaaatatgaagcaaatccagtatcatgtacctcatgcaagtagttctggccrcaaagtgcgtcagatcatgcctctcctttccacctgggcctccctgtctccctcccataagattagatggacaaagtaaatttcagcctgggccctgaca

SEQ ID NO: 473158 - DNA, 201 bp, Homo sapiens
gtgggcatttagtgctataaatttccctctaaacactcctttagctgtgtcccagagattctggtaggtcgtgtcttcattctcattgatttcaaagacatttatttctgccttaaattcgttatttacccagtcgtcattcaggagcaggttgttaagtttccatgtgtggttttgagtgagttttttaatcctgagttc

SEQ ID NO: 473159 - DNA, 201 bp, Homo sapiens
tggaaatatctaacatacaaattgaagactcaggaagatacacatgtgttgcccagaatgtccaaggggcagacactcgggtggcaacaattaaggttaaygggacccttctggatggtacccaggtgctaaaaatatacgtcaagcagacagaatcccattccatcttagtgtcctggaaagttaattccaatgtcatga

SEQ ID NO: 473160 - DNA, 201 bp, Homo sapiens
gcatttagtgctataaatttccctctaaacactcctttagctgtgtcccagagattctggtaggtcgtgtcttcattctcattgatttcaaagacatttakttctgccttaaattcgttatttacccagtcgtcattcaggagcaggttgttaagtttccatgtgtggttttgagtgagttttttaatcctgagttctgat

SEQ ID NO: 473161 - DNA, 201 bp, Homo sapiens
acctcagcaaccttcaagaactctacatcaaccacaaccaaattagcactatttctgctcatgcttttgcaggcttaaaaaatctattaaggctccacctsaactccaacaaattgaaagttattgatagtcgctggtttgattctacacccaacctggaaattctcatgatcggagaaaaccctgtgattggaattctgg

SEQ ID NO: 473162 - DNA, 201 bp, Homo sapiens
aactagatttctcccaaaacaactttactaacattaaggaggtcgggctggcaaacctaacccagctcacaacgctgcatttggaggaaaatcagattacmgagatgactgattactgtctacaagacctcagcaaccttcaagaactctacatcaaccacaaccaaattagcactatttctgctcatgcttttgcaggct

SEQ ID NO: 473163 - DNA, 201 bp, Homo sapiens
attcatgccacggacctgtgcacatgcctggaattgagagacacagttaaaagactccaagttgctttctgccttttgaaaactcctgaaaaccatccctytggactctggaattctacacagctcaaccaagactttgcttgaatgtttacattttctgctcgctgtcctacatatcacaatatagtgttcacgttttgt

SEQ ID NO: 473164 - DNA, 201 bp, Homo sapiens
caaagcggggcgcaccgcgggcgccggcaacgagccggtgaacgaggcgaggcccgtgcgcccgcggctgcaagcgcccgcctggcggggagaggggccgrcggcgtcagcccgggcggcggcatccctaggcgcctggggcgccttcctccggacctggccgctcgctgccccgccctctgcaccccacttctccgaccc

SEQ ID NO: 473165 - DNA, 201 bp, Homo sapiens
atgtgaaccggggaaggcagctggggctggagagcagcgcggaaagggggcccagggagctggaaagagggccaagaggagggcaaggaaggtggcgggckacggggagaggaaagaaaaagggtgtcttggcggtggccttggtaagagaaaggggcaaggggtataattgacaaggcactgaaagtattgaagtcagag

SEQ ID NO: 473166 - DNA, 201 bp, Homo sapiens
ttattcctttattagtgccagctattttgaagtccatgtcaccattgtaagcttcaattcccagaatatctgttagcaaatgataatcttctatttcaccsttctcaagatcggttttggtggccaatcccattgctacacctgtgacagcagattaaattggaagccctgaatccattaatgctaaacttccaccacatg

SEQ ID NO: 473167 - DNA, 201 bp, Homo sapiens
aatgagatactaccacatatctaacagaatggccaaaatccaacacactgacaatgctaaatactcatgagcatgtggaacaacaagaactctcattcacygcttgtagtaatacaaaaggtacagccactttggaagacaatctgtcagtgtctttcaaaactaaacacactctcaaatataacatggatgaacctgaag

SEQ ID NO: 473168 - DNA, 201 bp, Homo sapiens
tcaccgcaacctccgcctccggagttcaagcaattctcctgcctcagcctctgagtagctgggactacaggcacacaccaccatgcccaggtaatttttgkatttttactagagataggctttcaccatgttggccaggctggtcttgaactcctgacctcaagtgatctgccctcctcggcctcccaaagtgctgaaatt

SEQ ID NO: 473169 - DNA, 201 bp, Homo sapiens
tatttgcataaacaaacaagaaaaagaaaactaataaaacttgcattaactttgtcctcccatgttttaactttttattgtttctatttatatcttcttawactgactgtgtcttaaaaagttgttgagttgttatttttgattggttcattgtttagtctttctacttgggacaagtatagtttacatgccacaattaca

SEQ ID NO: 473170 - DNA, 201 bp, Homo sapiens
tgaggtttgcaaatactattttataatccacttttaacctgataacaacttaatagtatttgcataaacaaacaagaaaaagaaaactaataaaacttgcwttaactttgtcctcccatgttttaactttttattgtttctatttatatcttcttaaactgactgtgtcttaaaaagttgttgagttgttatttttgattg

SEQ ID NO: 473171 - DNA, 201 bp, Homo sapiens
atattttttttaaaattgagataactaacctaaaagccttgactacaccgttatgcaatctatgcatgaaacaaaattacccttgtgcaccataagtttayacaaatttttatttttttaatttttaatttttgtgggtgcatagtaggtatatatatttatggggtatgtgatatgttttgatacaggcatgcaatatga

SEQ ID NO: 473172 - DNA, 201 bp, Homo sapiens
catgtatacatatgtaactaacctgcacaatgtgcacatgtaccctaaaacttagagtataataaaaaaaaaaaaaaaaaaaaaaaaaaactgagtctcarcaagtttaaataacttgatcagaccacacattaatgatggagctaggattgaattcagacatgtcctatatatttcattcattcatgagtatattaattt

SEQ ID NO: 473173 - DNA, 201 bp, Homo sapiens
acctttcataacttgtttgggcaactaatctcttatgaggataaaagtatcatcattctcagtaaacgaccacaagaacaaaagaccaaacaccgcatatmctcactcataggtgggaattgaacaatgagatcacatggacacaggaaggggaacatcacactctggggactgttgtggggtggggggaggcgggaggga

SEQ ID NO: 473174 - DNA, 201 bp, Homo sapiens
ggaattgaacaatgagatcacatggacacaggaaggggaacatcacactctggggactgttgtggggtggggggaggcgggagggatagcattgggagatmtacctaatgctagatgacgagttagtgggtgcagcgcaccagcatgtcacatgcatacatatgtaactaacctgcacattgtgcacatgtaccctaaaac

SEQ ID NO: 473175 - DNA, 201 bp, Homo sapiens
tattgtttctttctatccatgagcatggaatattcttccattttatggtgtcctcttttatttagttgagcagtggtttgtagttctccttgaagaggtcyttcatatcccttgtaagttggattcctaggtattttattctctttgtagcagttgtgaatgggagttcactcatcatttggctctctgtttgtctgttaa

SEQ ID NO: 473176 - DNA, 201 bp, Homo sapiens
ccttcttcccttgtctaactacagatcaacacagatttttttctcatctttttttttttttttttttgagacagagtcttgctctgttgcccaggctggartgcagtggtgtggtgtgatcacggctcactgcaacctccacctcccaggttcaagagattctcctgcctcagcctctcaagtagctgggaaaacttggac

SEQ ID NO: 473177 - DNA, 201 bp, Homo sapiens
gagacattgctgaagttgcttatcagcttaaggacattttggtctgagatgatggggttttctaaacatccagtcatgtcatctgcaaaagggacaatttsactttctcttttcctgattgaataccctttatttctttctcctgcctgattgccctggccagaacttccaacactatgttgaataggagtggtgagagag

SEQ ID NO: 473178 - DNA, 201 bp, Homo sapiens
gtccccagagtgtgatgttcccctttctgtgtccatgtgttctcattgttcaattcccatctatgagtgagaatatgcggtgtttggttttttgtccttgygatagtttactgagaatgatgatttccagtttcatccatgtctctacaaaggacatgaactcatcattttttatggctgcatagtattccatggtgtata

SEQ ID NO: 473179 - DNA, 201 bp, Homo sapiens
accagccttgcatcccagggatgaagacaacttgatcgtggtggataagctttttgatgtactgctggattcggtttgccagtattttattgaggattttygcactgatgttcctcagggatattggtctaaaattattttttttggttgtgtctctgccaagctttgatatcaggttgatgttggcctcatcaaatgagt

SEQ ID NO: 473180 - DNA, 201 bp, Homo sapiens
gaaacttaacacaatagaaatttattcttcctggccgggagcagtggatcatgcctgtaatcccagcatgttgggaggccaaggcaggcagatcacttgargtcagaagttcgatgccagcctggccaacatggtaaaaccctgtctctactaaaaatataaaaataaaccaggtgtgatggcacttgcctatattcccag

SEQ ID NO: 473181 - DNA, 201 bp, Homo sapiens
tctgccaagctttgatatcaggttgatgttggcctcatcaaatgagttagggaggattccctctttttctattcattggaatcgtttcagaaggaatgctrctagctcctctttgtacctctggtagaattcggctgtgaatcggtctggttctggacattttttggttggtaggctattaactattgcctcaatttcaga

SEQ ID NO: 473182 - DNA, 201 bp, Homo sapiens
ctcctttagctgtgtcccagagattctggtaggtcgtgtcttcattctcattgatttcaaagacatttatttctgccttaaattcgttatttacccagtcrtcattcaggagcaggttgttaagtttccatgtgtggttttgagtgagttttttaatcctgagttctgatttgattgcactgtggaaagactgtttgttat

SEQ ID NO: 473183 - DNA, 201 bp, Homo sapiens
agtctttattaggtcaaaaggaaaggacatctaattgctatcttagctatcatttttcactaaccactgaaatgtgtggggttttttttagcatgaagtctttttttttttaatttttccaactttcttagcagtttcagatggtacattgtgagacaaaggcaaaagcaacagggagaatcatctcatgagaaaaattag

SEQ ID NO: 473184 - DNA, 201 bp, Homo sapiens
aattcggctgtgaatcggtctggttctggacattttttggttggtaggctattaactattgcctcaatttcagagcctgctattggtatattcagtgattmaacttcttccttgtttagtcttgggagggtggatgtgtccaggaatttatccatttcttctagattttctagtttatttgcatagaggtgtttatagtat

SEQ ID NO: 473185 - DNA, 201 bp, Homo sapiens
aggtcgtgtcttcattctcattgatttcaaagacatttatttctgccttaaattcgttatttacccagtcgtcattcaggagcaggttgttaagtttccaygtgtggttttgagtgagttttttaatcctgagttctgatttgattgcactgtggaaagactgtttgttatgatttccattcttttacatttgctgaggag

SEQ ID NO: 473186 - DNA, 201 bp, Homo sapiens
tgtttgatataaatatacatatctttaaaatctttggtttaaccagctaaacttttaatattttatgaactagttagccctgagtcataaatttacctactttttttttttttttttttgagatagtttcactctctttgcccatgctggagagcagtgacgtgatctcagctcactgcaacctccaactcccaggttcaa

SEQ ID NO: 473187 - DNA, 201 bp, Homo sapiens
attttttattgcgtctatttgattcttctcttttcttctttattagtcttactagtggtctatcaattttgttgctcttttcaaaaaaccagctcctggaytcattgattttttgaagggttttttgtgtctctatctctttcagttctgttctgatcttagttatttcttgccttctgctagcttttgaatttgtttgct

SEQ ID NO: 473188 - DNA, 201 bp, Homo sapiens
cggaggcagtctgtcccttagcagagctcgagtgttctgctgggagatccactgctctcttcagagccagcaggcaggaatgtttaagtctgctgaagctktgctcacagccgccccttgccccaggtgttctgtcccagggagatggtagttttatctataagcccctgactggggctgctgcctttctttcagagatgc

SEQ ID NO: 473189 - DNA, 201 bp, Homo sapiens
aatattacacagtactaaaaatgcattctcttttcctcatgattttttaaataacatttttctctagcttactttatcataagaatacattatataatacwtataacataaaaatgtgtgttaatcaactgtttatcagtaaggttttcagtcaacagttggctattcatagttaactttttgagtcgtcaaaagttaaac

SEQ ID NO: 473190 - DNA, 201 bp, Homo sapiens
ttctcttttcttctttattagtcttactagtggtctatcaattttgttgctcttttcaaaaaaccagctcctggactcattgattttttgaagggttttttgtgtctctatctctttcagttctgttctgatcttagttatttcttgccttctgctagcttttgaatttgtttgctcttgcttctctagttcttttaattg

SEQ ID NO: 473191 - DNA, 201 bp, Homo sapiens
ttctggcagggacaatttcaagccagtggatcttagcttgctaggctccatggggatgggatctgctgagctaggccacttggctccctgacttcagcacyctttccagaggagtgaatggttctgtctcactggcattccaggcgccactggggtatgaaaaaaaactcctgcagctagattggtgtctgcccaaatggc

SEQ ID NO: 473192 - DNA, 201 bp, Homo sapiens
caatctactattcaacgtgtaagaatttctttatcagaagtactaatctctcttctcagagggtttgtgggaattctacctactgcagcagccttttgtcygtagtcaaccaccaaaggcataaactgggaaggggaaggttttgttttactgacggctgtggccattaccgcagtgtcacctgactgtattacagcagag

SEQ ID NO: 473193 - DNA, 201 bp, Homo sapiens
attattttacacttttaaacctttatataaaaattagggcattatattaatttattttctatatgaaattaagtatgtagagatattgtattacctacaarttatattatctgtgagagtaagaagggcactacaaaatgtctgttgggaagaggggatattaggtctgataggtttaagctcagtattagtatttattga

SEQ ID NO: 473194 - DNA, 201 bp, Homo sapiens
tctcttttcttctttattagtcttactagtggtctatcaattttgttgctcttttcaaaaaaccagctcctggactcattgattttttgaagggttttttgtgtctctatctctttcagttctgttctgatcttagttatttcttgccttctgctagcttttgaatttgtttgctcttgcttctctagttcttttaattgt

SEQ ID NO: 473195 - DNA, 201 bp, Homo sapiens
gctccatggggatgggatctgctgagctaggccacttggctccctgacttcagcaccctttccagaggagtgaatggttctgtctcactggcattccaggygccactggggtatgaaaaaaaactcctgcagctagattggtgtctgcccaaatggctgcccagttttgtgcttgaaactcagggctgtggtggtgtaggc

SEQ ID NO: 473196 - DNA, 201 bp, Homo sapiens
gctcaagcccttaggtattaactacatattatgttacttttaattattttacacttttaaacctttatataaaaattagggcattatattaatttattttmtatatgaaattaagtatgtagagatattgtattacctacaaattatattatctgtgagagtaagaagggcactacaaaatgtctgttgggaagaggggat

SEQ ID NO: 473197 - DNA, 201 bp, Homo sapiens
ttctttattagtcttactagtggtctatcaattttgttgctcttttcaaaaaaccagctcctggactcattgattttttgaagggttttttgtgtctctayctctttcagttctgttctgatcttagttatttcttgccttctgctagcttttgaatttgtttgctcttgcttctctagttcttttaattgtgatgttatg

SEQ ID NO: 473198 - DNA, 201 bp, Homo sapiens
tttgcccactttttgatggggttgtttgtttttttcttgtaaatttgtttgagttcattgtagattctggatattagccctttgtcagatgagtaggttgygaaaattttctcccattttgtaggttgcctgttcactctgatggtagtttcttttgctgtgcagaagctctttagtttaattagatcccatttgtcaatt

SEQ ID NO: 473199 - DNA, 201 bp, Homo sapiens
agtctttatacaatttcccagtctgtgtcttttaattggggcatttagcccatttacttttaaggttaatattgttatgtgtgaatttgatcctgtcattwtgatgttcactggttattatgcctgttaagtgatgcagtttcttcatagcattgatggtctttacaatttggcctgtttttgcagtggctggtagtagtt

SEQ ID NO: 473200 - DNA, 201 bp, Homo sapiens
tcaattttggcttttgttgccattgcttttggtgttttagacatgaagtccttgcccatgcctatgtcctgaatggtaatgtctaggttttcttctagggyttttatggttttaggtctaacatttaagtctttaatccatcttgaattaatttttgtgtaaggtgtaaggaagggatccagtttcagctttctacatatg

SEQ ID NO: 473201 - DNA, 201 bp, Homo sapiens
gtttttgtcaggtttgtcaaatatcagatagttgtagatatgcggtgttatttctgagggctctgttctggtaccagtaccatgctgttttggttactgtrgccttgtagtatagtttgaagtcaggtagcgtgatgcttccagcttcgttcttttggcttaggattgacttggcgatgcgggctcttttttggttccata

SEQ ID NO: 473202 - DNA, 201 bp, Homo sapiens
ctttaaagtagttttttccaattctgtgaagaaagtcattggtagcttgatggggatggcactgaatctgtaaattaccttgggcagtatggccattttcatgatattgattcttcctacccatgagcatggaatgttcttccatttgtttgtatcctcttttatttcactgagcagtggtttgtagttctccttgaggag

SEQ ID NO: 473203 - DNA, 201 bp, Homo sapiens
tttaaagtagttttttccaattctgtgaagaaagtcattggtagcttgatggggatggcactgaatctgtaaattaccttgggcagtatggccattttcatgatattgattcttcctacccatgagcatggaatgttcttccatttgtttgtatcctcttttatttcactgagcagtggtttgtagttctccttgaggagg

SEQ ID NO: 473204 - DNA, 201 bp, Homo sapiens
cctcagaaagttttgagcagaggtatgatacaatataacttggctgctgaattgagaaggacagaagcaaggagattagttaggaggccattacaataatrcaactagtactctggcgatttcaataggcatcttaattttttcacagtctaccttcaaataatactatactacttcatacataatgtaataaccaagtca

SEQ ID NO: 473205 - DNA, 201 bp, Homo sapiens
tcagagaagcagttttggaccaaattatatatggattgataaaacaccagtttttgctctgatgtgggcagtcctcagaaagttttgagcagaggtatgayacaatataacttggctgctgaattgagaaggacagaagcaaggagattagttaggaggccattacaataatgcaactagtactctggcgatttcaatagg

SEQ ID NO: 473206 - DNA, 201 bp, Homo sapiens
gagaaagaataataaaaagaaatgaacaaagactccaagaaatatgggactatgtgaaaagaccaaatctacatttgattggtgtacctgaaagtgacggkgagaatggaaccaagttggaaaacactctgcaggatattatccaggagaacttccccaacctagcaaggcaggccaacattcagattcaagaaatacaga

SEQ ID NO: 473207 - DNA, 201 bp, Homo sapiens
gtacctagttatatccctgaccatcataaaatggtagatattataggcataggagagaagtttaagagcattggcattacagagggatatggtcttccagkgattggaaatgattttttctagagatgaaagctggttctaatccggtcaacctccttttcactgtgggaacccaaacaatcagtatctcaccctcaccat

SEQ ID NO: 473208 - DNA, 201 bp, Homo sapiens
tcgatcatgctgggagctgcagaccagagctgttcctatttggccatcttcttccctccacccctgcctcaaatagacctatatattttttttaaaattgwgataactaacctaaaagccttgactacaccgttatgcaatctatgcatgaaacaaaattacccttgtgcaccataagtttacacaaatttttattttttt

SEQ ID NO: 473209 - DNA, 201 bp, Homo sapiens
caccagaactccatccatggggcatagaagcagacttggaaacagacaagtgctgtgtctgcaaaataaactaactagtgtagggcaaaatgggctctatsctttcctcaaccccagccccaacaaaaagcaagatccttgtggtcattttgcctttgcttacatccactgctgcctgaagctaaagaaaggctccttagt

SEQ ID NO: 473210 - DNA, 201 bp, Homo sapiens
cccaccctgcttcagctcaccctctctgggctgcacccactgtccaaccagtcccagtgagacgaaccagttacctcagttggaaatgcagaaatcacccrtcttcttcatcgatcatgctgggagctgcagaccagagctgttcctatttggccatcttcttccctccacccctgcctcaaatagacctatatatttttt

SEQ ID NO: 473211 - DNA, 201 bp, Homo sapiens
gataaaacttagcttgtagcctagtggcataatagctaacatgtctaaccattagcaaatgctcaaaaatcctgagcccagaaaagccttattcactacckttacagaaataaatctagaaggttagctatgctgaatatgttagggaaatggagaagcactgctattttgataatcaattcaaaagaaaattaaatttac

SEQ ID NO: 473212 - DNA, 201 bp, Homo sapiens
taaagtctgaagagacagaggaaacatcagatccaaattcagatatggcagatactctgaactaaaaattttttaaaattgtgattaatatgctaagagtkctagtggaaaaaaatagacaacatgcaaggatagatgattaatgtatgcagagagatggaattctaagaaaaaaataaaaaataaatgctagatatcaaa

SEQ ID NO: 473213 - DNA, 201 bp, Homo sapiens
ttaaaaatcaaccatttgtggtggcacatgcctgtagtcccagctattcagaaaattgaggcaggaggatagcttgagtccaggagtttgagaccgcagtragttatggtcatgacactgcactccagcctgggcaacagagtgagagcctgtctcttaaaaaaaaatccataaaattcaccaattaacaaaatggaaaaa

SEQ ID NO: 473214 - DNA, 201 bp, Homo sapiens
tttgaaatgaagccctggttcaggttcccatttaggtgtgactttctccattcctactatgttgactgtaatcaaagggctgggctcagtcctgacaacaygttcagatcccacactgcactagccctgctctagaatctcaatctattttcccagtgtcctaagacctgtcaaagcccctgccaccagcctcttccacta

SEQ ID NO: 473215 - DNA, 201 bp, Homo sapiens
agctggtatttataactaccttcttatactacccattctgtgtttcctttgccttcagcaaacatctcattcggtcttggctctttacctagcaaggtgayccaaaccatcattcctgaagggtctaggccatttgtagtcctgcctggattgaattgtagttttccattgaccttaattacagggtatggtaatactaag

SEQ ID NO: 473216 - DNA, 201 bp, Homo sapiens
actatcaccttggggttaaggcttcaaaatatgaatttgatgagagacacagttcagtccataacagacagactgatggatggatgtgaatggatggacakatggatggatggatacatggatggatgcatggatggatgcatggatggatgcatggatgggagggacggagggagggagggagagagggaagaagagaag

SEQ ID NO: 473217 - DNA, 201 bp, Homo sapiens
ggggttaaggcttcaaaatatgaatttgatgagagacacagttcagtccataacagacagactgatggatggatgtgaatggatggacagatggatggatggatacatggatggatgcatggatggatgcatggatggatgcatggatgggagggacggagggagggagggagagagggaagaagagaaggaaggaaggag

SEQ ID NO: 473218 - DNA, 201 bp, Homo sapiens
atggtctttacaatttggcctgtttttgcagtggctggtagtagttgtttttttccatctttagtgcttccttcaggagctcttgtaaggcaggcctggtkgtgacaaaatctcccatcatttgctagtctgtaaaggattttatttctccttcatttatgaagcttaatttggctggatatgaaattctgggttgaaaat

SEQ ID NO: 473219 - DNA, 201 bp, Homo sapiens
ggcttcaaaatatgaatttgatgagagacacagttcagtccataacagacagactgatggatggatgtgaatggatggacagatggatggatggatacatggatggatgcatggatggatgcatggatggatgcatggatgggagggacggagggagggagggagagagggaagaagagaaggaaggaaggagggaaggaa

SEQ ID NO: 473220 - DNA, 201 bp, Homo sapiens
tggctggtagtagttgtttttttccatctttagtgcttccttcaggagctcttgtaaggcaggcctggttgtgacaaaatctcccatcatttgctagtctrtaaaggattttatttctccttcatttatgaagcttaatttggctggatatgaaattctgggttgaaaattcttttctttaagaatgttgaatattggcct

SEQ ID NO: 473221 - DNA, 201 bp, Homo sapiens
aaaaattctcttttattattcaagttaatgtaagttggatttctgtccactgcttccaaaagaatcttgtctaaaaataaaattaaagcatcagaggtatwctgaaatcatctgagacctttcataacttgtttgggcaactaatctcttatgaggataaaagtatcatcattctcagtaaacgaccacaagaacaaaaga

SEQ ID NO: 473222 - DNA, 201 bp, Homo sapiens
gcttcaaaatatgaatttgatgagagacacagttcagtccataacagacagactgatggatggatgtgaatggatggacagatggatggatggatacatgsatggatgcatggatggatgcatggatggatgcatggatgggagggacggagggagggagggagagagggaagaagagaaggaaggaaggagggaaggaag

SEQ ID NO: 473223 - DNA, 201 bp, Homo sapiens
gtgctctctgtatttcctgaatttgaatgttggcctgccttgttaggttggggaagttctcctggataatatcctgaaaaatgttttccaacttggttccrttcttcccatcactttcaggtacaccaatcaaatgtagatttggtcttttcacatattccctatttcttggaggctttgttcatttctttttactctttt

SEQ ID NO: 473224 - DNA, 201 bp, Homo sapiens
cttcaaaatatgaatttgatgagagacacagttcagtccataacagacagactgatggatggatgtgaatggatggacagatggatggatggatacatggatggatgcatggatggatgcatggatggatgcatggatgggagggacggagggagggagggagagagggaagaagagaaggaaggaaggagggaaggaaga

SEQ ID NO: 473225 - DNA, 201 bp, Homo sapiens
ttttccaacttggttccattcttcccatcactttcaggtacaccaatcaaatgtagatttggtcttttcacatattccctatttcttggaggctttgttcrtttctttttactctttttttgtctaaccttgtcttcttgctttattttattaatttgatcttcaatcactgataccctttcttccacttgattgaatcag

SEQ ID NO: 473226 - DNA, 201 bp, Homo sapiens
ttcaaaatatgaatttgatgagagacacagttcagtccataacagacagactgatggatggatgtgaatggatggacagatggatggatggatacatggatggatgcatggatggatgcatggatggatgcatggatgggagggacggagggagggagggagagagggaagaagagaaggaaggaaggagggaaggaagag

SEQ ID NO: 473227 - DNA, 201 bp, Homo sapiens
aaatgtagatttggtcttttcacatattccctatttcttggaggctttgttcatttctttttactctttttttgtctaaccttgtcttcttgctttatttyattaatttgatcttcaatcactgataccctttcttccacttgattgaatcagctattgaagcttgtgcatgcattacaaagttctcatgccatggttttc

SEQ ID NO: 473228 - DNA, 201 bp, Homo sapiens
tcaaaatatgaatttgatgagagacacagttcagtccataacagacagactgatggatggatgtgaatggatggacagatggatggatggatacatggatggatgcatggatggatgcatggatggatgcatggatgggagggacggagggagggagggagagagggaagaagagaaggaaggaaggagggaaggaagaga

SEQ ID NO: 473229 - DNA, 201 bp, Homo sapiens
ctattgaagcttgtgcatgcattacaaagttctcatgccatggttttcagctctatcaggtcatttaaggtcatctccacactgttctagttacccattcrtctaatctttttaaaggtttttagcttccttgcgatggttttgaacttcctcctttagctcggaaaaatttgttattcctgaccttctgaagcctactct

SEQ ID NO: 473230 - DNA, 201 bp, Homo sapiens
aaaatatgaatttgatgagagacacagttcagtccataacagacagactgatggatggatgtgaatggatggacagatggatggatggatacatggatggatgcatggatggatgcatggatggatgcatggatgggagggacggagggagggagggagagagggaagaagagaaggaaggaaggagggaaggaagagaga

SEQ ID NO: 473231 - DNA, 201 bp, Homo sapiens
taaggtcatctccacactgttctagttacccattcgtctaatctttttaaaggtttttagcttccttgcgatggttttgaacttcctcctttagctcggaraaatttgttattcctgaccttctgaagcctactctgtcaactcatcaaagtcattctctgtccagctttcttcaattgctggcgacgagctgctatcttt

SEQ ID NO: 473232 - DNA, 201 bp, Homo sapiens
aaatatgaatttgatgagagacacagttcagtccataacagacagactgatggatggatgtgaatggatggacagatggatggatggatacatggatggatgcatggatggatgcatggatggatgcatggatgggagggacggagggagggagggagagagggaagaagagaaggaaggaaggagggaaggaagagagag

SEQ ID NO: 473233 - DNA, 201 bp, Homo sapiens
tgctggcgacgagctgctatcttttggagaagaggcactctgatttttagaattttcagcttttctgctctgttttctccccatctttgtggttttatctrcctttggtctttgatgttggtgacctacagatggggttttcgtgtagatgacctttttgttgatgttgatgctatgcctttctgtttgttagttttcctt

SEQ ID NO: 473234 - DNA, 201 bp, Homo sapiens
cgagctgctatcttttggagaagaggcactctgatttttagaattttcagcttttctgctctgttttctccccatctttgtggttttatctgcctttggtytttgatgttggtgacctacagatggggttttcgtgtagatgacctttttgttgatgttgatgctatgcctttctgtttgttagttttccttctaacagtc

SEQ ID NO: 473235 - DNA, 201 bp, Homo sapiens
agaaccagtgctctcttcagagctgtcagacagggatgtttaagtctgcagaagttgtctgctgccttttgttcagctatgccctgcccacagaggtggartttagaggcagtaggccttcttgagctgcggtgggctccgcccagttcaagcttcctggccgctttgtttacctactcaagcctcagcaatggcggacgc

SEQ ID NO: 473236 - DNA, 201 bp, Homo sapiens
tagtggaaaagagagagcaagagcaaagactgagaggaaggaccttgccagccatgttcaaagaacagtaagcaggattcatgtctgcagtagagacagtratggggcagaggttagagatgaggtcagagaagcagttttggaccaaattatatatggattgataaaacaccagtttttgctctgatgtgggcagtcctc

SEQ ID NO: 473237 - DNA, 201 bp, Homo sapiens
gctgccagaggctcaggtgctcggcagacactgtctacccctcagggaagagccttggtggtgagcctggcctgcttccaggagcagagtagggacacttkggccacttccccctggggcctggctctggcgtttccaagactgcttctctggcagccagctgtctccctgtgttctctttagaaagctcctcctgagctt

SEQ ID NO: 473238 - DNA, 201 bp, Homo sapiens
agttgcagtgagctgagatcgtaccactgcactccagcctggtgacagagtgaggctccgtctcaaaaaaaacccaaaaattagctggccgtggttgcgcrtgcctgtagtcccagctacttgggaggctgaggcaggagaatcgcttgaaccggggagttggaggttgcagtgagccaagatcgcgccactgcactccag

SEQ ID NO: 473239 - DNA, 201 bp, Homo sapiens; identical to SEQ ID NO: 350610

SEQ ID NO: 473240 - DNA, 201 bp, Homo sapiens
gcctccgcccagcagctgccagccgaggggccagccatgaatgggcccggccaggacgaccctgaggacgctgatgaggcggaagcccctgacggcggcascaggcgtgatcccaggaagagccaggacagcaggaagcccctgcagaaaaagaggaagcgctcccccaagagcgggctcggccccgcggacctggccctc

SEQ ID NO: 473241 - DNA, 201 bp, Homo sapiens; identical to SEQ ID NO: 350614

SEQ ID NO: 473242 - DNA, 201 bp, Homo sapiens
tgcggggcttagctcccacaccctccagatacataaacaagcattccccacagcatggtcccaaggacggtggcaggagggccccagggatgggtttgcaygttgggcaaaggcctcagtatgtccgcacctgctgcaaggagcggctttgcctgcccggctactccaggcccctccccacagagagggagccccggggag

SEQ ID NO: 473243 - DNA, 201 bp, Homo sapiens
acaagcattccccacagcatggtcccaaggacggtggcaggagggccccagggatgggtttgcacgttgggcaaaggcctcagtatgtccgcacctgctgyaaggagcggctttgcctgcccggctactccaggcccctccccacagagagggagccccggggagctgccgagatggggtttgctgagagctccatgcagc

SEQ ID NO: 473244 - DNA, 201 bp, Homo sapiens
cacttggtgtggggccaggcctggcactccttcccccgcagacatgggcgcctttgcctgtcgtcacagcctcaggcatctcccgcttttctggcccgccragctctcgttctgtgcagtactttcttgctgtctctatgtgagggttcatggggttttttggtttgttttttaattaaattcttttttaataataaaaaa

SEQ ID NO: 473245 - DNA, 201 bp, Homo sapiens
actagacacacctgcggaggcagcagactagcagcggtgtctgtgaggggcagctgcacagccccctcttgagggtgctcctaggcgttggttaggcccakgcgtttctgcttttggggagcagagcctggagtcgggcatggctggggaggaagctatcgcaggctgagcgcgggctggggtgctgacctgcatcccaag

SEQ ID NO: 473246 - DNA, 201 bp, Homo sapiens
gtagctgtggcctgacaggctggctggggaaggggtgtcctccgggaggtggcagccctggtgttcccgaggagttgggactgcgttctccccgggacggrgtggtgtcctggccccaagaacggggtcagtgtttctgtggctgctgctatggctttccacagcctcacgctggaaacagtacatctgtatcatgccggg

SEQ ID NO: 473247 - DNA, 201 bp, Homo sapiens
tcagcaagcctgcctacgacagcgccgagtgccgccaccacgctgccgaggccctgcgtgtggcctggtgcctcgaagctgcctccctgtctcaccgaccsggtcctcggtctggcctgtccgtgtccagcctgagacccaagtaggagaaacgtgctgggtgggcacccagcctgggctgtgggcacagggacagccatc

SEQ ID NO: 473248 - DNA, 201 bp, Homo sapiens; identical to SEQ ID NO: 350619

SEQ ID NO: 473249 - DNA, 201 bp, Homo sapiens
ggctgcctctaaccttgctgcttttccttcatgctgtcctaggaggccaaagcaaagtaagtactcgcctgtcctcatgccccattccccttcatttgacyggggaacccccagccctcgctgcacctgagggaacccagcaccacctgcgcatggcccagtctgcccagagggcctcagtttcccatctggaaagtggag

SEQ ID NO: 473250 - DNA, 201 bp, Homo sapiens; identical to SEQ ID NO: 350621

SEQ ID NO: 473251 - DNA, 201 bp, Homo sapiens; identical to SEQ ID NO: 350623

SEQ ID NO: 473252 - DNA, 201 bp, Homo sapiens; identical to SEQ ID NO: 350624

SEQ ID NO: 473253 - DNA, 201 bp, Homo sapiens; identical to SEQ ID NO: 350626

SEQ ID NO: 473254 - DNA, 201 bp, Homo sapiens
gagccactgcgcccggcctgttttctcttcacaacaaaacgtccccacatgggcttgacttcgaagtcctcgaatgtcatctcatggaagccccactgggragcatcctcagcccctgcccagggagggcagccacggggagggcgggcacggggagggtgggcacggggctgcggccacccgctgtgttgcaactctgcc

SEQ ID NO: 473255 - DNA, 201 bp, Homo sapiens
attctacgagcagatgaacgggcctgtggcaggtgcctcccgccaggtgagagctgcacgtggggcggctgggcggctctgctgcccgacaggagtggccrgggcacacaaagcggattcagccaggccaggaaggcagaggcaccctggcccagtggctctgctgtgggtgctgggagtggggtctcggggcaggcggcc

SEQ ID NO: 473256 - DNA, 201 bp, Homo sapiens
ggggtgtgctggctcccgggccataagctgggcatccctgggtgggtgggcccaggaagggctgccactcctgtctgccaggtggggtgctcctttgtgcyttgcgttctgcccactggcttgcacccctggcttgcccaggcacctgaccaagtccaggctaggcagacatgagattaagggagcacagatttttgcgcc

SEQ ID NO: 473257 - DNA, 201 bp, Homo sapiens; identical to SEQ ID NO: 350632

SEQ ID NO: 473258 - DNA, 201 bp, Homo sapiens
cctactgttacttcctgcagaaggatgcagaggccccctggctcagcaagcctgcctacgacagcgccgagtgccgccaccacgctgccgaggccctgcgkgtggcctggtgcctcgaagctgcctccctgtctcaccgacccggtcctcggtctggcctgtccgtgtccagcctgagacccaagtaggagaaacgtgctg

SEQ ID NO: 473259 - DNA, 201 bp, Homo sapiens
ctgcaggggaccacgtggccctgctggcttccacgtcgccctgtgggctggccccagcagcagtgatgagctggcagccaggatactggagtcctcaggtycccaggaaggtttacagttagccctgggcaggtggaggcagtttttgtctttcctggggccctgcatgtacacagctgcggtacacaggggctgcccttc

SEQ ID NO: 473260 - DNA, 201 bp, Homo sapiens
agccatggcccagctccccacagcctccgtctctggggcaccaagagcctcctgtcctggactttgcctggctgagaatttcactgtggtctgtggtggcygccacctctgaggtcataagtttgagctgggcatcagcggggggcacctcctgctctcccgagctgtagttttccttccgtgagttcctgcagtcctgag

SEQ ID NO: 473261 - DNA, 201 bp, Homo sapiens; identical to SEQ ID NO: 350640

SEQ ID NO: 473262 - DNA, 201 bp, Homo sapiens
gccctcctgggcctctcggccgaacgcgtgtggctggacaagtcacttttcgaccaggcagagagctcctaccgccagaagctggcagatgtggctgcccrggcagcctggcctcctgccttggccccttggggtctctgcacccatggaaaccaggtggcctgccaccacgtgacctgggggatctgggtcaacaagtcc

SEQ ID NO: 473263 - DNA, 201 bp, Homo sapiens
gccaggacagcaggaagcccctgcagaaaaagaggaagcgctcccccaagagcgggctcggccccgcggacctggccctcctgggcctctcggccgaacgygtgtggctggacaagtcacttttcgaccaggcagagagctcctaccgccagaagctggcagatgtggctgcccaggcagcctggcctcctgccttggccc

SEQ ID NO: 473264 - DNA, 201 bp, Homo sapiens
acccgcttcctcaggggctccagcctcttttaagggctagtcgtcgcgccctttgggcactgaaggtactgaaagttctatcaggcagtgccagtccacakactcaggccagccaggtgggccggagaggggtgctgctgggagggatgggcgtgcacaggctgagccggtggctgaccccgtcccctgcccacctccctg

SEQ ID NO: 473265 - DNA, 201 bp, Homo sapiens
aatcctgaatttaatcgtgtttgccaattcttctttttgccatgtaaggtagtggatttgcaggctctgggggttgggacgtgggcgccggagattctcaktgtctcatttgtaaggtgcattgctcctcaccaacatctgcagaagcctgggtcccccacagtgtccctccaaagtccagaatcccatccaatcaggcat

SEQ ID NO: 473266 - DNA, 201 bp, Homo sapiens
gccacctgtgtcacaggccctgttagctgggtggagccttccagagccaggaccccagggcactctcaaactctgggcagctgccagaggctcaggtgctyggcagacactgtctacccctcagggaagagccttggtggtgagcctggcctgcttccaggagcagagtagggacacttgggccacttccccctggggcct

SEQ ID NO: 473267 - DNA, 201 bp, Homo sapiens
ggttggctcagatagtggtccctgcttgtcccccagggcctgcctaggctccaactgacagtaatcccaagagctcccctttcaggggatgacggagtgaygtcacctgtgtggactcagctgccacctgggattgtggtggcggcgggtctgtctggcgctcagcttccatctccaccagtgtcacctccacaccacctc

SEQ ID NO: 473268 - DNA, 201 bp, Homo sapiens
cccctgcagaaaaagaggaagcgctcccccaagagcgggctcggccccgcggacctggccctcctgggcctctcggccgaacgcgtgtggctggacaagtyacttttcgaccaggcagagagctcctaccgccagaagctggcagatgtggctgcccaggcagcctggcctcctgccttggccccttggggtctctgcacc

SEQ ID NO: 473269 - DNA, 201 bp, Homo sapiens
ctccagcttcctcccctgcccacctggggtgggggctccccgagacccgtgggcccagcagagttgaatgcaggagcaggctgagtaaaggtggtgctgcrcttgtgggttccagggacactgcttgaggttacaaaattccaggctgcctggatgagggcagggaagggctcagcacagggcagaatctctgccttgccc

SEQ ID NO: 473270 - DNA, 201 bp, Homo sapiens
aagagctcgcctggccaccgggccacggccccacagacccaggtgaatgctctccccacgcctgacactgcaggggaccacgtggccctgctggcttccaygtcgccctgtgggctggccccagcagcagtgatgagctggcagccaggatactggagtcctcaggtccccaggaaggtttacagttagccctgggcaggt

SEQ ID NO: 473271 - DNA, 201 bp, Homo sapiens; identical to SEQ ID NO: 350645

SEQ ID NO: 473272 - DNA, 201 bp, Homo sapiens
ctggcttccacgtcgccctgtgggctggccccagcagcagtgatgagctggcagccaggatactggagtcctcaggtccccaggaaggtttacagttagcyctgggcaggtggaggcagtttttgtctttcctggggccctgcatgtacacagctgcggtacacaggggctgcccttcctccagtcaaaggagggaggagg

SEQ ID NO: 473273 - DNA, 201 bp, Homo sapiens
ctcagaaatgctaagtgtacttatttgttgaagaaacttgttacatattactaacatcttttttttttatgagaaatacttttcccataaccaaaaaattyagtgagcagaatggccttgcttgaggtttttgcaaatctctcgggtgtctggcttagtgggaggcagctgggccctcatacctgcctccgcacttcagct

SEQ ID NO: 473274 - DNA, 201 bp, Homo sapiens
gggcagtctctgaagggggcggggatgctgttgctaagaagtagtactttcagaggctttaagtggaaggaagaaggcaaagggggcggagtgggttgggracctgatgagacgtcaggattggtttccagaatgaaggaccgcctggcagcagaagaactgtgtagctaaacttggggttgtccctgcccgacagggcgg

SEQ ID NO: 473275 - DNA, 201 bp, Homo sapiens
cctgacggcggcagcaggcgtgatcccaggaagagccaggacagcaggaagcccctgcagaaaaagaggaagcgctcccccaagagcgggctcggccccgyggacctggccctcctgggcctctcggccgaacgcgtgtggctggacaagtcacttttcgaccaggcagagagctcctaccgccagaagctggcagatgtg

SEQ ID NO: 473276 - DNA, 201 bp, Homo sapiens
ctccaggccgtgcagcaccttggtggccacagctctccaggatgtcctcaccttcctcagggccctgccctcctgacctggagtgttctgggtaggagtctttgccggggctgctcccaggacagggacaggggaggctgtgagggccatgccgctgcagtgggtcttgctggctgccacctgtgtcacaggccctgttag

SEQ ID NO: 473277 - DNA, 201 bp, Homo sapiens
tccaggccgtgcagcaccttggtggccacagctctccaggatgtcctcaccttcctcagggccctgccctcctgacctggagtgttctgggtaggagtctttgccggggctgctcccaggacagggacaggggaggctgtgagggccatgccgctgcagtgggtcttgctggctgccacctgtgtcacaggccctgttagc

SEQ ID NO: 473278 - DNA, 201 bp, Homo sapiens
cttcctcagggccctgccctcctgacctggagtgttctgggtaggagtctttgccggggctgctcccaggacagggacaggggaggctgtgagggccatgccgctgcagtgggtcttgctggctgccacctgtgtcacaggccctgttagctgggtggagccttccagagccaggaccccagggcactctcaaactctggg

SEQ ID NO: 473279 - DNA, 201 bp, Homo sapiens
ctgacggcggcagcaggcgtgatcccaggaagagccaggacagcaggaagcccctgcagaaaaagaggaagcgctcccccaagagcgggctcggccccgcrgacctggccctcctgggcctctcggccgaacgcgtgtggctggacaagtcacttttcgaccaggcagagagctcctaccgccagaagctggcagatgtgg

SEQ ID NO: 473280 - DNA, 201 bp, Homo sapiens
gccaccacgtgacctgggggatctgggtcaacaagtcctccttcgaccaggctgagcgggccttcgtggagtggtctcaggccctgttgctggcccccgasggcagccgcaggcaggggactcccaacacaggccagcaggtggccgtccccgacctggcccaccagcccagcccaccggtcaatggccagcccccgctgg

SEQ ID NO: 473281 - DNA, 201 bp, Homo sapiens
ctgcccggccacctggccccctcctggggaggacagtcaggcccacaaagaagctccctctttttttttcttttcccctgctctgttgtccaggctggagkgcagtggcgccatctcggttcactgcaagctccgcctcccggcttcacgccattctcctgcctcagcctccctaggagctgggactacaggcgcctgcca

SEQ ID NO: 473282 - DNA, 201 bp, Homo sapiens
caaaaaattagccaggcacagtggtgtgcactggtagtcccagttactcgggaggctgaggcaggaaaatcgcttgaacccaggaggcggacgttgcggtragccgagatcgcgccgctgattccagcctgggcgacaagagtgagactccatctcacacaaaaaaaaaataacaaaaaaactcagaaatgctaagtgtac

SEQ ID NO: 473283 - DNA, 201 bp, Homo sapiens
agttagccagttaaagcttatttcagataaatgacgaaaaatttttagtgtaagtatgtctcagatacttcatgggccatacattcactaacaaaattatrtattgttcatgtattgggaggcacttggcctcccagagtactgagattacaggcatgagccactgcgcccggcctgttttctcttcacaacaaaacgtcc

SEQ ID NO: 473284 - DNA, 201 bp, Homo sapiens
atgggccccggttcctcgttggtgccattagaacttgttgctgggactgcgggattcgggccacatgcccgcaaagaactccatgttccacttagaggctkcagagtgcagtgccaggggtgccttcccaaaagtcctccctgcctgggtggagcgtagacagctcagcaccccacggggggcgttggagccagccttggt

SEQ ID NO: 473285 - DNA, 201 bp, Homo sapiens
cacaccctccagatacataaacaagcattccccacagcatggtcccaaggacggtggcaggagggccccagggatgggtttgcacgttgggcaaaggcctsagtatgtccgcacctgctgcaaggagcggctttgcctgcccggctactccaggcccctccccacagagagggagccccggggagctgccgagatggggtt

SEQ ID NO: 473286 - DNA, 201 bp, Homo sapiens; identical to SEQ ID NO: 350648

SEQ ID NO: 473287 - DNA, 201 bp, Homo sapiens; identical to SEQ ID NO: 350649

SEQ ID NO: 473288 - DNA, 201 bp, Homo sapiens
tggggtgcatgaggcctcaggtgccactcacagactccggcctcctcaggacccagccccactcccgcgggaggtctgctgtgattctccatgccccctgrcgccccaaagcctggccctcccgtgctccagcttctgcccccgagtttgtcagtttctgccggtgcctcccgtacccccaccaccattcacgcgcctctg

SEQ ID NO: 473289 - DNA, 201 bp, Homo sapiens
cagactccggcctcctcaggacccagccccactcccgcgggaggtctgctgtgattctccatgccccctgacgccccaaagcctggccctcccgtgctccrgcttctgcccccgagtttgtcagtttctgccggtgcctcccgtacccccaccaccattcacgcgcctctgccagcctggcctttccctgtccatttcctc

SEQ ID NO: 473290 - DNA, 201 bp, Homo sapiens
ttgggcaaaggcctcagtatgtccgcacctgctgcaaggagcggctttgcctgcccggctactccaggcccctccccacagagagggagccccggggagckgccgagatggggtttgctgagagctccatgcagccaggtgcaccctgtccttcgagccatcctgttggagggtgggcaggctaaatggcccatgcgtgca

SEQ ID NO: 473291 - DNA, 201 bp, Homo sapiens
cgaagtcctcgaatgtcatctcatggaagccccactggggagcatcctcagcccctgcccagggagggcagccacggggagggcgggcacggggagggtgrgcacggggctgcggccacccgctgtgttgcaactctgccctctgcttgctttttatcgctgtgtccggaagatgaggagcgggaaggcctcctgcaccct

SEQ ID NO: 473292 - DNA, 201 bp, Homo sapiens
ccccgagacccgtgggcccagcagagttgaatgcaggagcaggctgagtaaaggtggtgctgcgcttgtgggttccagggacactgcttgaggttacaaarttccaggctgcctggatgagggcagggaagggctcagcacagggcagaatctctgccttgcccagggtccctctttggctgggaagctccccaagtcccc

SEQ ID NO: 473293 - DNA, 201 bp, Homo sapiens; identical to SEQ ID NO: 350650

SEQ ID NO: 473294 - DNA, 201 bp, Homo sapiens; identical to SEQ ID NO: 126700

SEQ ID NO: 473295 - DNA, 201 bp, Homo sapiens; identical to SEQ ID NO: 126702

SEQ ID NO: 473296 - DNA, 201 bp, Homo sapiens; identical to SEQ ID NO: 127043

SEQ ID NO: 473297 - DNA, 201 bp, Homo sapiens
gcgagccaagatcctgccattgcactccagcctgggcaacaagagcaaaactccatctcaaaaaaaaaaaaaaaaaaaaagagttttttgttttttgttttttgtttgtttgtttgtttgtttttaagtgggtaataacatccagagggcagacatccaggaacatgtaaccttttcacttatatttactgagcacctgtt

SEQ ID NO: 473298 - DNA, 201 bp, Homo sapiens
aacaaccctctcccaccagccgtaactacagcttttattgatttcagttactttctcctgataagaaggtcactgaccatggacttgttctggccaatttrtagtgattgcatgcttacgtaacttcctgaaaagatattttgatgtataggaccaaactgtaaatacatttaaatgttaagtctccaccccaaagtgaac

SEQ ID NO: 473299 - DNA, 201 bp, Homo sapiens
agcgagccaagatcctgccattgcactccagcctgggcaacaagagcaaaactccatctcaaaaaaaaaaaaaaaaaaaaagagttttttgttttttgttttttgtttgtttgtttgtttgtttttaagtgggtaataacatccagagggcagacatccaggaacatgtaaccttttcacttatatttactgagcacctgt

SEQ ID NO: 473300 - DNA, 201 bp, Homo sapiens
tctcccaccagccgtaactacagcttttattgatttcagttactttctcctgataagaaggtcactgaccatggacttgttctggccaatttatagtgatkgcatgcttacgtaacttcctgaaaagatattttgatgtataggaccaaactgtaaatacatttaaatgttaagtctccaccccaaagtgaacatggattg

SEQ ID NO: 473301 - DNA, 201 bp, Homo sapiens
cagcgagccaagatcctgccattgcactccagcctgggcaacaagagcaaaactccatctcaaaaaaaaaaaaaaaaaaaaagagttttttgttttttgttttttgtttgtttgtttgtttgtttttaagtgggtaataacatccagagggcagacatccaggaacatgtaaccttttcacttatatttactgagcacctg

SEQ ID NO: 473302 - DNA, 201 bp, Homo sapiens
aaacagctggagcagtggtcctgggccgccagtccgcggtcatcccgggagcttaagatgcggagtggtgataggctccggatgtatgagccctgtggctyaagggcgctgttctctctgctccgaaatagaaataatacctgtctcacagagctgttgaaaagctccactgaaataatgaccgcaagtgtgaactgtaaa

SEQ ID NO: 473303 - DNA, 201 bp, Homo sapiens
tggctggttgcggctaactgggccgcgctaaaaggtaacccaaggcaggtggattacctggggaaacagctggagcagtggtcctgggccgccagtccgcsgtcatcccgggagcttaagatgcggagtggtgataggctccggatgtatgagccctgtggctcaagggcgctgttctctctgctccgaaatagaaataat

SEQ ID NO: 473304 - DNA, 201 bp, Homo sapiens
taatcccagctactcaggaggccgaggcaggagaatggtttgaacccggcaggcggaggttgcagtgagcggagatcgtgccattgcactccagcctgggygacaagagtgaaactctgtttcaaaaaaaaaaacggagatgataggactgacggaattgactccatggcaataagataccaaagtataaacaggacctaa

SEQ ID NO: 473305 - DNA, 201 bp, Homo sapiens
acccgggaggcggaggtttcagcgagccaagatcctgccattgcactccagcctgggcaacaagagcaaaactccatctcaaaaaaaaaaaaaaaaaaaaagagttttttgttttttgttttttgtttgtttgtttgtttgtttttaagtgggtaataacatccagagggcagacatccaggaacatgtaaccttttcact

SEQ ID NO: 473306 - DNA, 201 bp, Homo sapiens
gtggctcacgcctgtaatcccactactttgggaggccgagccagctggatcacctgaggtcgggagtttgagaccagcctggccaatatggtgaaaccccrtctctactaaaaatacaaaaatcagccaggcatggtggcaggcacctgtaatcccagctactcgggaggctgagtcaggagaatcgcttgaacccgggag

SEQ ID NO: 473307 - DNA, 201 bp, Homo sapiens
agccaagatcctgccattgcactccagcctgggcaacaagagcaaaactccatctcaaaaaaaaaaaaaaaaaaaaagagttttttgttttttgttttttgtttgtttgtttgtttgtttttaagtgggtaataacatccagagggcagacatccaggaacatgtaaccttttcacttatatttactgagcacctgttttt

SEQ ID NO: 473308 - DNA, 201 bp, Homo sapiens
cgagccaagatcctgccattgcactccagcctgggcaacaagagcaaaactccatctcaaaaaaaaaaaaaaaaaaaaagagttttttgttttttgttttttgtttgtttgtttgtttgtttttaagtgggtaataacatccagagggcagacatccaggaacatgtaaccttttcacttatatttactgagcacctgttt

SEQ ID NO: 473309 - DNA, 201 bp, Homo sapiens
caccaccacacctggctgatttttgtgcttttaaaaatagaggcaggttttggccatcttgcccaggctggtctcaaactcctgagctcaagtgatccacycgcttcggcctcccaaagtgctgggattacaggcctgagccactgtgccctgcccccaaaaattctaaactaaggaattagacatacagaagtccagtct

SEQ ID NO: 473310 - DNA, 201 bp, Homo sapiens
tttagtagagacggggtttcaccgtcttggccaggctggtcctgaactcctgacctcgtgatccactgccttggcctcacaaagtgctgggattacaggcmtgagccaccgtgcctggcctttttttttttttttttttttgagatggagtctcactctgtcacccaggctgcagtgcagtggtgcaatcccagctcactg

SEQ ID NO: 473311 - DNA, 201 bp, Homo sapiens
ttaggcattttaccttttcagtaacattttatacatctacttgtcaatgtatttgagacattcacagccaaaagcctgggactctttgtgaaggtcctccycacctctatctttctttctctctctctcaaactttccttaaagttctcattgcctttgcactgcttctgtgaacagtctttgtctcctccccacctttgg

SEQ ID NO: 473312 - DNA, 201 bp, Homo sapiens
cataaatcaaacactggtcactgggctagcaatcttcacaccttggccagcagtcttcacaccttggccttctgaagtattaggattacaggcatgagtcmctgctcctggcctgggctccaatcagggtttcagcaggactgccttcctttctggaggctctaggagagggtctagttcctcgaatattgggttgttggc

SEQ ID NO: 473313 - DNA, 201 bp, Homo sapiens
ccaggcatggtgtctcatgcctgtaattccaagctacctgggaggctgaggcatgagaatcacttgaaccctggaggcaaaggttgcagtgagccaagatygtgccactgtactccagcctgggtgacagagtgagactctctctcaaagaaaaagaatttactttgagggagcatctgaagttcttcaaatatgttagca

SEQ ID NO: 473314 - DNA, 201 bp, Homo sapiens
caaaacagccagggaatagatgaaaaggaaacttgttagctaagtgttaaatcattgcgtgggagagtctcagcgaatatttcagacttgaaaactgaagkttattgagagatgactgaacaacaatgttggaggagagagtagaagataatgaccatgctaagataccttttctctcatatgttgagaatagttggaaaa

SEQ ID NO: 473315 - DNA, 201 bp, Homo sapiens
tatgaataaatgggtatgatacccactcctaagacattcagaattttgctggaaaagtaagacttaactacaaaaacattccaaaagaaagacagtttttkttttttttttgagacagagtctcattctgtcgcccaggctggagtgcagtggtgcaatctcggctcactgcaacctccgcctcccgggttcaagcgattc

SEQ ID NO: 473316 - DNA, 201 bp, Homo sapiens
ctgtttcccaggctggagtgcagtggtgcaatctcggctcactgctacctccatctcctgggttcaagcagttctctgcctcagcctcccgaatagctggrattacaggcgcccgccaccacacccggctaatttttgtatttttagtagagacggggtttcaccgtcttggccaggctggtcctgaactcctgacctcgt

SEQ ID NO: 473317 - DNA, 201 bp, Homo sapiens
ctcctgggttcaagcagttctctgcctcagcctcccgaatagctggaattacaggcgcccgccaccacacccggctaatttttgtatttttagtagagacrgggtttcaccgtcttggccaggctggtcctgaactcctgacctcgtgatccactgccttggcctcacaaagtgctgggattacaggcctgagccaccgtg

SEQ ID NO: 473318 - DNA, 201 bp, Homo sapiens
acaggtgtgaaccaccgtgcccggcctgacagtattgatttttgtaatgctgaagttatatgcattaagttcagagaaggagctgtctgataacagcattkgtttcctaacgagaactggtattttcagttaaaggctggtgataatgtacacatacttgtgctctggtttcagatttatccagctgctgaatgctttctc

SEQ ID NO: 473319 - DNA, 201 bp, Homo sapiens
cctcccgaatagctggaattacaggcgcccgccaccacacccggctaatttttgtatttttagtagagacggggtttcaccgtcttggccaggctggtccygaactcctgacctcgtgatccactgccttggcctcacaaagtgctgggattacaggcctgagccaccgtgcctggcctttttttttttttttttttttga

SEQ ID NO: 473320 - DNA, 201 bp, Homo sapiens
aatagctggaattacaggcgcccgccaccacacccggctaatttttgtatttttagtagagacggggtttcaccgtcttggccaggctggtcctgaactcytgacctcgtgatccactgccttggcctcacaaagtgctgggattacaggcctgagccaccgtgcctggcctttttttttttttttttttttgagatggag

SEQ ID NO: 473321 - DNA, 201 bp, Homo sapiens
ggcaggtggattgcttgagttcaggagtttgagatcagcctgggcaacaaagtgagacccccatatctaccaaaacaaaaaacaaaaaaattagccaggcmcagtggcatccacctactgagtagtaattgcagctactcgggaggctgaggtggaaggatcacttgaacctaggagttggagggtgcagtaagctatgat

SEQ ID NO: 473322 - DNA, 201 bp, Homo sapiens
aatttttgtatttttagtagagacggggtttcaccgtcttggccaggctggtcctgaactcctgacctcgtgatccactgccttggcctcacaaagtgctrggattacaggcctgagccaccgtgcctggcctttttttttttttttttttttgagatggagtctcactctgtcacccaggctgcagtgcagtggtgcaat

SEQ ID NO: 473323 - DNA, 201 bp, Homo sapiens
ggcatgagccaccgtgccctgcaggaaaggacgtttttgtggggccgttattctctacttgcaacacttgataggaagttcagcagatccactctaagcarctgtgctatgagtggatcttagcactgtatccatttccatttgtattctgtgtattattcctctttttcattgtaggtgttgtgtgtgtctgtgtctgtg

SEQ ID NO: 473324 - DNA, 201 bp, Homo sapiens
accagcctgagcaacatagtaagatcctgtctctacaaaaatattaggtggtgtgcacctgtagtcccagctgtttgggaggttgaggcaggaagatcacyagagcccagggagattgaggctgcagtgagctatgattgtgccactgcactccagcctgggtgacagtgtgtgacctttcttaaaaaaaaaaaaaaagaa

SEQ ID NO: 473325 - DNA, 201 bp, Homo sapiens
acgtagggtgaagattctatgcagatgcctgaagacagctgttaagggaaactaccagtgacttaggacactgagtgctgagttaagatgtggagggaacractgattgggagaggtaaactggaacccggtctttatatgactttttgaggagttcagattttatcctgtgagcattgagaaggttttaggcaaaggaat

SEQ ID NO: 473326 - DNA, 201 bp, Homo sapiens
gtggttaatcatctttattaggggaaagtttctggctgtgtgactggagatgatatttgcaaatacactcgtatttggtaatggtttgaatggattgagtycactgttgtcagatgaccaggagagtctaaaggggcaattctggacttggagagaagtccatgatagcattaatgtacttcactgttcacaaagatgttt

SEQ ID NO: 473327 - DNA, 201 bp, Homo sapiens
ttgcccaggctggagtgcagtggcgcagtctcagctcactgcaacctctatgtcctgggttcaagtgattctccttttttttttttttgagacggagtttsggtcttgtgcccaggctggagtgtaatggcgcgatcttggctcaccgcaacctctgtcgcccaggttcaagcgattctcctgcctcagccttctgagtag

SEQ ID NO: 473328 - DNA, 201 bp, Homo sapiens
catgttggccaggatgatcttgatctcctgacctggtgatctgcccacctcggcctcccaaagtgctgcgattacaggcgtgagccaccacgcctggcccttttttttttttaaagggctatttttgaataatagtgggtatttcacagaattgaacagaatgaaaaagaaggctaaataactagactgaacaaagttcaa

SEQ ID NO: 473329 - DNA, 201 bp, Homo sapiens
taatccctgtcacttgtcctctagatacagaagatcattgagacactgacacagcagcttcaggcaaagggaaaagaactaaatgaattccgggaaaagcmcaacattcgtctcatgggagaagatgagaagccagcagccaaggaaaactcagaaggggctggggctaaggccagctcagctggagtgttggtctcctag

SEQ ID NO: 473330 - DNA, 201 bp, Homo sapiens
ggagtttcggtcttgtgcccaggctggagtgtaatggcgcgatcttggctcaccgcaacctctgtcgcccaggttcaagcgattctcctgcctcagccttytgagtagctgggattacagacatgtgccaccatacccagttaattttttggtattatttttagtagagacagggttgcaccatgtcagccaggctggtct

SEQ ID NO: 473331 - DNA, 201 bp, Homo sapiens
gaagataaagaatagaaggcagtctgcatggtggaaaataacacaatataaatagaaaagattttgtcaaattatttaagtaactaatatgcatttttatrtgagcacatataaagggttaacatatgggaatggaagatggccagattcttctgcttcccagaagaatctaagttgaaacctgaagaaagaactagactt

SEQ ID NO: 473332 - DNA, 201 bp, Homo sapiens
ctcaaaaaacaaacacacaaaaagtatgaattgtttatttctggaattttccatttattttcagacattggataactctggataatgagagactattgtamatgaaacagactttgtcttcaaattgctttactcagactcatttgagaaaagacaaaccaaacaataaagatttatagtgtgctgcacaatcccttcatt

SEQ ID NO: 473333 - DNA, 201 bp, Homo sapiens
aaggggtgatagatgggagaaaggaggaggttgctggaatgacaagtttttggtgaagtattactccttggtttattggcagtagaagggacataagggtrgtgcaggtcagccatttggataatatttgctgtatgtgatccttgcagaaggcgaactagagctaaggggccaggccaggcatgttggctcatgcctgta

SEQ ID NO: 473334 - DNA, 201 bp, Homo sapiens
ggttgcaatgagctgagatcgcgccactgcactccagcctgggcgacagagcaagactcctctcagaaaaaaaaagaaaagaaaagaaaagtagattcctrttaattactaaggaaaataaattctgctgggcatggtagctcctgcgtgtaatcccagctctttgggaggccagggtgggaggattgcttgaggccagga

SEQ ID NO: 473335 - DNA, 201 bp, Homo sapiens
catttgttgaaatgaatggctaaagtagcttgagatgaaggggtgatagatgggagaaaggaggaggttgctggaatgacaagtttttggtgaagtattaytccttggtttattggcagtagaagggacataagggtggtgcaggtcagccatttggataatatttgctgtatgtgatccttgcagaaggcgaactagagc

SEQ ID NO: 473336 - DNA, 201 bp, Homo sapiens
tctttggtggataatggtgccataaggaatgtaggaagacagacaattttgggggaaatgtaagtttattttaggattttgagtttaggtttcttgtgggrcacccaggttaaacattcagtagacactttgatttttaaatcttgagatacagtaagaaatctgagttggagatacagatttgagaattgagtttatgga

SEQ ID NO: 473337 - DNA, 201 bp, Homo sapiens
cttgagatgaaggggtgatagatgggagaaaggaggaggttgctggaatgacaagtttttggtgaagtattactccttggtttattggcagtagaagggayataagggtggtgcaggtcagccatttggataatatttgctgtatgtgatccttgcagaaggcgaactagagctaaggggccaggccaggcatgttggctc

SEQ ID NO: 473338 - DNA, 201 bp, Homo sapiens
cttgcctggcacagacctttccatagcacacgcatgatgtataatgggcatctattctgggttctcagggccaatctcccaaaggctgcgggagaactcarccgtttgcccaatttatcccgcctgtcctcaaggaagttttgatactgacatcacatccacggctgttctctcttcctcttttcatggatgagcaaacaa

SEQ ID NO: 473339 - DNA, 201 bp, Homo sapiens
tatgtgggactggaggtggccagggatgaagtcgtccaggctgagcccagcgcggaggctgcggggtgggccctgcatgcttgggtcaaggtgggaggacwccgggcaagccagctgctcctctgcgtgtcctctgtggggaaggaggaaggaagggaaagccctgctaggctaggctgcccatgccctcttggctcgacc

SEQ ID NO: 473340 - DNA, 201 bp, Homo sapiens
caagttactgatccctcagagcctcaggctcagaacctgtaatatagaaatgatttggtgagagaacatatatgaggtgcccgggagaaggcctcacacayatatttgctccaggtgtggcccgaccctctcctgtgggcctttttgctaaagtgtcctgtatgtgtgtttggtctggccccatgactgtggctatgtgcg

SEQ ID NO: 473341 - DNA, 201 bp, Homo sapiens
actctctggtggaggcaggctacctcacctgggtctggggtctaggctcctgggtggggaaggagaagccagtgcgacggggggaggtctgtccccccaartcggtggggtcagctgggctgcgcagggctgagggggagctggggtgacgggctgagcgggcggcagcggtcaggcggggagacgtggggagctgggggc

SEQ ID NO: 473342 - DNA, 201 bp, Homo sapiens
tggggccaccaaaaccctaatctccctggtttatcaggctgctgtccccagcaccctgcagcactcacctcaatgggctgggagggcttctcaccagggtsgtccaccagcggtttcttgggctgaagggtagaaagggtgtgtcagagcaggtgaactcactttccaaaatgtatcagctgagggtgcgtgcacaccccg

SEQ ID NO: 473343 - DNA, 201 bp, Homo sapiens
gaatatttcctgataatcccagtgcgcactgaccactcccttttctgctcctgctttggccaacacatatttatttaacacatgtttactgagcgcctcckgtatgccagccactgtcctgagtgctggcattacagaaataaaccatgtgggactggagagagagctcttagttcgtggcctatgcccatggttactggg

SEQ ID NO: 473344 - DNA, 201 bp, Homo sapiens
ctgtggctatgtgcgtctgtgcagctttgaagaagctggtctttctgggtgctgtggctgagtgatcgtacacccatgggcaaggaaagccagaggcagcyctgccctgcagctctggccaagttatttctgctccctgggcctagttccatgagggtgctggattcagtgactctgtctgtgagaccaccccagccactg

SEQ ID NO: 473345 - DNA, 201 bp, Homo sapiens
cggcctttctctaggcaggggagaggacagagtgggctctctcagttgggcgggtggcagatccaggatggcagccttgggaccactccaggtcccccacrcctggtcccctccttaccttcttctcttccctcctggctgggctgccccctccgttagaggcactagggtctgtggagaagcacaacctcagcttgggga

SEQ ID NO: 473346 - DNA, 201 bp, Homo sapiens
aaacaagcacaatgcacagacggggtgtctttgagaagaactgagctgggtgaacctctcttagttctcaggaaagatgaaacaaacaagtggctgtcagstctagaaagtagattttataagggaaggataagtaagtgatgacctcagagggaaaaccaagccaagtcaactcagccacaaaggagggcacagacccag

SEQ ID NO: 473347 - DNA, 201 bp, Homo sapiens
cctgcaaatgttgccagccaagttctactgatggccctttccatgccaaccactcatgggaacaggagcaggcagaagaagggagtgcaaatgacccattktggggcttcaaagggcctcctatgctgacaatggcatgacgtggctcatctggaattcaagatttctggtagagtcactgtagagtgagggatctgagtg

SEQ ID NO: 473348 - DNA, 201 bp, Homo sapiens
agctcataggcacccccagggttggctgcattttgagttgtggaagaaagcaatgcctccagtaagggaatgaccgctaacagtggcattccagcttggcrgggaaatcagagagggacttaaggaaaggaatggcttctcagtcccctcagaggacactgtgggacagtggctggtcaatgttcttcttggggatgctct

SEQ ID NO: 473349 - DNA, 201 bp, Homo sapiens
ctcaggctggggaaactcgacttgcaccctcttccaaacgctttccttccccatttgccaagacccactcctagctcctcaaggtgcctgggaatttctgrggcttcctggaaagagctactgacccactgctccccacggcgcgtgcgcgcgcgcacacacacacacacacacacacacacacacacacacacgcatgcg

SEQ ID NO: 473350 - DNA, 201 bp, Homo sapiens
ctgcagagtcagctccctgcaggtggggacgaggaccgcagggtaagctgaagccttcccaagcctccttcccttcagaccctgcccaacacaccccagtyctctcaccccttggggatgcccactgcagcccagtccccctccccatccccctctgggatggcagagattgccttgggtggaaggggagggggaggaggg

SEQ ID NO: 473351 - DNA, 201 bp, Homo sapiens
atgcttctacctctgggtcttcggagctccctttgctggaatgcttcccccagctctgccaggccgactccttcactccctccatggtctgatcaaacacsgcttacaaatgaccttcctggccgctcctgggtgaaggagcagcctccctgcatggggcactctcccagtctggctttatttttccctagccctttccac

SEQ ID NO: 473352 - DNA, 201 bp, Homo sapiens
cattaaaaagtctgcttcatttaccattaaattattcatctactgtatcaaaattacattttctttctaaagcctgaaagttgtgataaaaaaaaaaaaargcaagaccatgcaattacatgcagcaggcaacaaagtgaggaacagatctagatggagcaacaggttaatatgaatttgcattgaagtccttcatttcca

SEQ ID NO: 473353 - DNA, 201 bp, Homo sapiens
gggctcccaggaattgaattgaactcctcagcctgccaaatagctgagactgcaggtgtgtgccaccacacccagctagtcttaaggcttttaaaacgccrtctattcccatgtttcacaatcttggctgctagttaaaagtttaaagtttccccactagaattactggggaaactttaaatcaaaatctctctcttcttt

SEQ ID NO: 473354 - DNA, 201 bp, Homo sapiens
cccttccccccttgaccctgtagggaagagagtctatgggggtggtggagacccagagatgggacagagcccagacggacacggaagtgagaccccactcstggctgggctccgaggctgtgccggctgtggtcacgagggggcgcccgtcccatggtgtctcgcgggccgcgcccctccgcagccctcggccccgcccca

SEQ ID NO: 473355 - DNA, 201 bp, Homo sapiens
gccaggagcgggtgccaggtccactcttgcctacccttccccccttgaccctgtagggaagagagtctatgggggtggtggagacccagagatgggacagrgcccagacggacacggaagtgagaccccactcctggctgggctccgaggctgtgccggctgtggtcacgagggggcgcccgtcccatggtgtctcgcggg

SEQ ID NO: 473356 - DNA, 201 bp, Homo sapiens
aagcttagatgggcaaagctacacttcccacactcaaccaccaaagaatctgagcaatcaacaaatgtgcatcacactgtacacagcagagtcactccccscctcctccgcaaagtggggacacaggaggaggaatcacagaactgaaatcgggagaaacgtccctggtctaatagggcaccctcacttagagatgggtgg

SEQ ID NO: 473357 - DNA, 201 bp, Homo sapiens
ataattttttttttttttgatacggagtctcgctctgtcgcccaggctggagtgcagtggcgcaatcccggctcactgcaagctccgcctcctgggttcawgccattctcctacctcagcctcccgagtagatgggactacaggcacccgccaccgcgcccggctaattttttgtattgtttttagtagagacggggtttc

SEQ ID NO: 473358 - DNA, 201 bp, Homo sapiens
acagcgccaggtccaagttcccctcaacagttctgtccacggctgtcctggccgccccactcccggtctcataagaccggtgggatctttggggcaaagakttcctgctgctgaccacaaacgcatcacaggcgttcctggccaggagcgggtgccaggtccactcttgcctacccttccccccttgaccctgtagggaag

SEQ ID NO: 473359 - DNA, 201 bp, Homo sapiens
cacacatatttgctccaggtgtggcccgaccctctcctgtgggcctttttgctaaagtgtcctgtatgtgtgtttggtctggccccatgactgtggctatrtgcgtctgtgcagctttgaagaagctggtctttctgggtgctgtggctgagtgatcgtacacccatgggcaaggaaagccagaggcagccctgccctgca

SEQ ID NO: 473360 - DNA, 201 bp, Homo sapiens
ctgaggcagaagccagcacacagccctctcaccctgcccttgtccctgctgtggggtctattctgcctctgactgccctgccgttactctggaagcaagaytaaactgtggaagtgtgtgagctccaagcttaaattccagctctactgtttagtggatgtgtaacctttgaacaagttactgatccctcagagcctcagg

SEQ ID NO: 473361 - DNA, 201 bp, Homo sapiens
agaaagggaaggacatctcttcagcttccttttagggagactgaggcagaagccagcacacagccctctcaccctgcccttgtccctgctgtggggtctaytctgcctctgactgccctgccgttactctggaagcaagactaaactgtggaagtgtgtgagctccaagcttaaattccagctctactgtttagtggatgt

SEQ ID NO: 473362 - DNA, 201 bp, Homo sapiens
cctgtgggaggtcctccggcgcccagggctcctgcacgcttcctttccctggcaccaggctggagggcaggggaagggatgcatcagcctgctctccccargcgggtgtctcttgcagagtcagcaggctccgcagggaggggctcatagtgagcccagaggcctctgaggaacctcctcatggccttgagaaccccatct

SEQ ID NO: 473363 - DNA, 201 bp, Homo sapiens
cctgctttggccaacacatatttatttaacacatgtttactgagcgcctcctgtatgccagccactgtcctgagtgctggcattacagaaataaaccatgygggactggagagagagctcttagttcgtggcctatgcccatggttactggggccaccaaaaccctaatctccctggtttatcaggctgctgtccccagca

SEQ ID NO: 473364 - DNA, 201 bp, Homo sapiens
taacccaagtgttgccgcttcctgtgaatgccccagggtcccttcatgctctcactagcccctgatccagctcctcagagcaactcagcctgtgctcaccrtagtctttcccaggcctgcctcctgccctctgggccctaagcactgaaccctcgcctcctctgagcacctggtgccttcctgtccattccaccagttcca

SEQ ID NO: 473365 - DNA, 201 bp, Homo sapiens
cgatcgcccccgtccgccccgcccggccgcgccacgttccctcccgcccggcctgggacagcccccttcctcctcccgcgtctcccactcacccggccggrggccgctgctccggggcccgtcggggcgccggcgagctctgcgcggggaaacggcgcaatcagggcccgcgaccccgggacccagcggcagccgaggccg

SEQ ID NO: 473366 - DNA, 201 bp, Homo sapiens
gtggacaagtcacgggggtgggggatgaggggtgaggaggaggtcgactctctggtggaggcaggctacctcacctgggtctggggtctaggctcctgggyggggaaggagaagccagtgcgacggggggaggtctgtccccccaagtcggtggggtcagctgggctgcgcagggctgagggggagctggggtgacgggct

SEQ ID NO: 473367 - DNA, 201 bp, Homo sapiens
tctggaaatgagctataaaaacctctcaggttgaactgagccaactggagagccccaaagccaggcggggctgcgagtcccagccccagggaggggcggaygcaggcgcagggctatggcaggcaggtgggcccgcatcccctcacctctgggtggctcctcgaaggtccagtccagctgcaagtctgcaggagcagaagg

SEQ ID NO: 473368 - DNA, 201 bp, Homo sapiens
ggggaaccccagcgggcaaagcatctggggggcctggcacccgatgcttccccaaagccagcacttctgttggctgctttccttcgtgccatgaagagaasgacgccctggaggaaactggcaccaccccagggtcactgatggagtcactggggacccaggccggggttgccgaccttcagagccctgccccttttccct

SEQ ID NO: 473369 - DNA, 201 bp, Homo sapiens
acgccagcatggatgaaccaagaacacccagggtcaggagcctgggccggctttgggattccatctagagctccctcggctagagctcggtaggttgaggycccccaggccagggtggggctgccatactagcttctgccctgtcaccccactcctatgtcccagggctgtctgggaaggagtcccaagtgtggacaagtc

SEQ ID NO: 473370 - DNA, 201 bp, Homo sapiens
gctgggacctcgagagtgggacagagctggaccaggggtgccaagattctgggagttgacaggaagaaagggatgtcagagggaggaagacgatgggtacmtgtaagcctgagggaggaggcccaaaatgggcgttcccagtccacctgccagcacgccttacaaacggcttcatcttagcctccaaacccccagggcaca

SEQ ID NO: 473371 - DNA, 201 bp, Homo sapiens
tgctcacctccacataattagcagggaagatgcccaggcggccgtggtgctctccctccagccagttcttgtccacctccttgtggatgtagacaatgtcwcccttctgcagagtcagctccctgcaggtggggacgaggaccgcagggtaagctgaagccttcccaagcctccttcccttcagaccctgcccaacacacc

SEQ ID NO: 473372 - DNA, 201 bp, Homo sapiens
tggcattttccggtgaatctgctggaacattctccggtaccagtctctgggtctgtcaacgctctgggatcagaaaatgcaaagtcagtcctccctgcttrttcaccctcccaatttcaagccacaaaaatctttccctagtgagtcccttctctggccatccctgaaccccccataggtgggctgggaaatgcttctctt

SEQ ID NO: 473373 - DNA, 201 bp, Homo sapiens
cagagctggaccaggggtgccaagattctgggagttgacaggaagaaagggatgtcagagggaggaagacgatgggtacatgtaagcctgagggaggaggyccaaaatgggcgttcccagtccacctgccagcacgccttacaaacggcttcatcttagcctccaaacccccagggcacagggacacctgctgtgactatt

SEQ ID NO: 473374 - DNA, 201 bp, Homo sapiens
cagctgactgcttcgggccaaattgcagctcagcagctgccgcctgggccatcagctgacagcgccttccttccctgacctccccgcccacctcgtgctcrgtgagaactgctctcttggaggatgggtagggcaggaggtcccccacgacccgtagtcagaggttgcttacccttggtgcccccatctgccccttctcaa

SEQ ID NO: 473375 - DNA, 201 bp, Homo sapiens
tttttggggggttttgctctcagaattctgagtgttttcttccttcctctaagctgagcagtcagaccagaaggggttagcgcagaaagcactgcccattyccagcagtttggacttctctagaaggccacagtgacacaatggtgaggaattgaaaccaagtcacatggacataccagcaggaatctggactatgtttca

SEQ ID NO: 473376 - DNA, 201 bp, Homo sapiens
acagcattgggccaagccctgtgggggccaaggacagttccgagacacgccccagcccctcacagttttttgctttaggaaacccaaggtttgcactaagyctctcccaacccctgcgccctcccagcccagccccacttgctcttgtctctcctgctcacctccacataattagcagggaagatgcccaggcggccgtgg

SEQ ID NO: 473377 - DNA, 201 bp, Homo sapiens
gattttttggggggttttgctctcagaattctgagtgttttcttccttcctctaagctgagcagtcagaccagaaggggttagcgcagaaagcactgcccrttcccagcagtttggacttctctagaaggccacagtgacacaatggtgaggaattgaaaccaagtcacatggacataccagcaggaatctggactatgtt

SEQ ID NO: 473378 - DNA, 201 bp, Homo sapiens
tctggtggaggcaggctacctcacctgggtctggggtctaggctcctgggtggggaaggagaagccagtgcgacggggggaggtctgtccccccaagtcgrtggggtcagctgggctgcgcagggctgagggggagctggggtgacgggctgagcgggcggcagcggtcaggcggggagacgtggggagctgggggccgtc

SEQ ID NO: 473379 - DNA, 201 bp, Homo sapiens
tttgatctgcctgcttttccgctgttctcgctgctctgagctgggtccccagagccccggcccttccggctccccatccattctggtcatcccctctccckgtctctgccccaagcctctgtatggcacttcagaaagtgggaatgcttaaggaacattgaaggaccgtggaaacactctggaatcctttctggcccttga

SEQ ID NO: 473380 - DNA, 201 bp, Homo sapiens
taagctcttcgaggacaagggctacctggtagaagtttcccaaatccacaggtggggacttgggggagggtggaatatggggcattgcctgccagtgaccscccccacgtctgatcaagagccctcagatggtactcacggggtccagtgtatctgagaggtgttaggagaggaggtccccaggtccaggggatggctggg

SEQ ID NO: 473381 - DNA, 201 bp, Homo sapiens
tgtgtgtttggtctggccccatgactgtggctatgtgcgtctgtgcagctttgaagaagctggtctttctgggtgctgtggctgagtgatcgtacacccaygggcaaggaaagccagaggcagccctgccctgcagctctggccaagttatttctgctccctgggcctagttccatgagggtgctggattcagtgactctg

SEQ ID NO: 473382 - DNA, 201 bp, Homo sapiens
tcaccgtagtctttcccaggcctgcctcctgccctctgggccctaagcactgaaccctcgcctcctctgagcacctggtgccttcctgtccattccaccakttccacacttcaattatacatgcaccgacctcagggctagaaacccaatgaggagaccaaggccacaaggccacatagctgccaggagggattgggaaca

SEQ ID NO: 473383 - DNA, 201 bp, Homo sapiens
tctccctggtttatcaggctgctgtccccagcaccctgcagcactcacctcaatgggctgggagggcttctcaccagggtcgtccaccagcggtttcttgrgctgaagggtagaaagggtgtgtcagagcaggtgaactcactttccaaaatgtatcagctgagggtgcgtgcacaccccgagagccagccagcactcacc

SEQ ID NO: 473384 - DNA, 201 bp, Homo sapiens
agtgcccagaactgtaggggagttctgtaggggagcccagagagggaattggatttgctctcctccttcctgccccctagcggcagaagcttagatgggcmaagctacacttcccacactcaaccaccaaagaatctgagcaatcaacaaatgtgcatcacactgtacacagcagagtcactccccccctcctccgcaaag

SEQ ID NO: 473385 - DNA, 201 bp, Homo sapiens
gggggtcgtctgcagatgctgggagctcaggtcctggggaaggaggatgtgggcgggggtcctctccctcccacgagtgccaccgctccccaccccatccwggctggctccaagttgccatggagaccactcacaccggggcaacgtaatttccagggaacgttccgaatttctgggtcctccgggagacacctgaaagag

SEQ ID NO: 473386 - DNA, 201 bp, Homo sapiens
gcctggccccacagtgcggggtgatatgccagggccagggccaggacttggcagcccctgggaagaggaggccttggggccagagctcttgccaggcctaratcgctaagaaggtgctgcgtctgtcccccgccttgctccgcccccccacacccagctggaggccagaaggcaaagagggcagccagcaagctggggtgc

SEQ ID NO: 473387 - DNA, 201 bp, Homo sapiens
ctcctagacaggaggaggcatcccctaccccaaggaaaaggccgcagagacaaggtcccttgtgtccaggtttattttacattctcttccagaggggatgkggggctgggggagagccagcaggcaggcgggcagcacacagcagtctccctggggaatatttgagccaggctagtggtgcctggccccacagtgcggggt

SEQ ID NO: 473388 - DNA, 201 bp, Homo sapiens
ctctaggcaggggagaggacagagtgggctctctcagttgggcgggtggcagatccaggatggcagccttgggaccactccaggtcccccacacctggtcycctccttaccttcttctcttccctcctggctgggctgccccctccgttagaggcactagggtctgtggagaagcacaacctcagcttggggaggccatac

SEQ ID NO: 473389 - DNA, 201 bp, Homo sapiens
cccgccagcgcccaggagggcccgaggccggtgcgcgccgctggaggccggacctcggctgcccgtcctccgcccagcccagccgccgaggctcccggctygccccgaccctgcggtcgccggcgtgccccgcgggtgaaccctgggggctggtaccttgggggacggcagtcgggtctcaattgcccgcaggtccttgtc

SEQ ID NO: 473390 - DNA, 201 bp, Homo sapiens
aaaattatctgggcgtggtggcgcattcctgtagtcccagctacttaggaagctggggcaggagaatcccttgaaccagggaggtggaggttgcagtgcaycaagatcccgccactgcactccagcctggacagcagagcaagactctgtctctccaaaaaaaaaaaaaagaaagagaagacatcactacatattttactg

SEQ ID NO: 473391 - DNA, 201 bp, Homo sapiens
agtttcagcaccacccccttgctcctgggtggatggtgggggcagggtggttggtgctcagggacactgaacgcgggcattgccctcagagctttacgacrtttactacatcttcaaaacaactccgagtaggtgatgatctcatcttatagatgaggaaagggaggcccagagaaatcccggccagggagtggcagagcg

SEQ ID NO: 473392 - DNA, 201 bp, Homo sapiens
cggctgttctctcttcctcttttcatggatgagcaaacaagcacaatgcacagacggggtgtctttgagaagaactgagctgggtgaacctctcttagttytcaggaaagatgaaacaaacaagtggctgtcaggtctagaaagtagattttataagggaaggataagtaagtgatgacctcagagggaaaaccaagccaa

SEQ ID NO: 473393 - DNA, 201 bp, Homo sapiens
gttctctttgcttcactctgcccataaaaatcaagcagccaataaaccatttcacacaaagatagaaacgactggcggagtgaaatactgtatatactttktgaaatttcaggaccaagtggatcatcgtgtaagcaagggaggcctaatgatacctatcaaaacaagagcctgaattaaacaacaacccaacccatgggt

SEQ ID NO: 473394 - DNA, 201 bp, Homo sapiens
atatatggagtgggcattactgaagtgaagaactccaagagaaaagatggaagccagtccaattagagagtttaagttggaccacagaagaaaatgaggckttccaagcagcaaggggaacttggggaactgttccaaaactgagcattcacccttttctcactgctgagaaccgggtgtccctgggttccagcgtctcgg

SEQ ID NO: 473395 - DNA, 201 bp, Homo sapiens
atctgcgggcagcacctgcatgaagaaaggtcatgagaaagatttggcctgggcatcaacatagcacaggctgggggttcctgtgagacagcaaagagaakgtgggcccgcccctaggcagagaaaagatataaacaccagacacaagccctgggggcagccacgggtgggcacagccaaagggtgctggaggatggggag

SEQ ID NO: 473396 - DNA, 201 bp, Homo sapiens
aattgcttgaacccgggaggcggaggttgcagtgagccgagatggcaccactgcgctacagcctggcgatagagtgagactctgtctcaaaaaaaaaaaastgtttttagtgcacatatttacctacatcttcacctgcccccacccacccctccgtctccggcctggcccaccttgcggaaggacagctccacctccagg

SEQ ID NO: 473397 - DNA, 201 bp, Homo sapiens
ccctatgtgggactggaggtggccagggatgaagtcgtccaggctgagcccagcgcggaggctgcggggtgggccctgcatgcttgggtcaaggtgggagractccgggcaagccagctgctcctctgcgtgtcctctgtggggaaggaggaaggaagggaaagccctgctaggctaggctgcccatgccctcttggctcg

SEQ ID NO: 473398 - DNA, 201 bp, Homo sapiens
tggcctccagcccttgccttcccctgtcctctcctgcccccatctgtctccatccagccaccttcttccccctctgtccctggggccagctcttctgggargcattcactatgggccgtctttcgcttattttgggagcatgatcactgctcccaaaatcaaccaaaggcagaccacttccctgctttctagaacagcatt

SEQ ID NO: 473399 - DNA, 201 bp, Homo sapiens
ccagctaggtcaagtgtgagccctggtcctttccaccaggagctctcccccagggctgctcgaggcaggggtgtgcaggaggaagaggcagagctctggasgttgggaaccctggcctgggtccccactgactccatcagtgaccctggactggtgccagtttcctcctgggccttggcctcttcatgaaggaaggcagcc

SEQ ID NO: 473400 - DNA, 201 bp, Homo sapiens
ttcttcttgtctgcataggtttgcaaaactttattagtagttgtaaaaaaattccaaagcaaaagtgtatccagtaaatttgaatgcatctccaagcacckcctccctccctcccccactagaaggtaggggccattcacaggctagtgcttaatggtcctgggtgggtcagtacagctggctggcagctgtactgggatc

SEQ ID NO: 473401 - DNA, 201 bp, Homo sapiens
tcccccatgtagcagagagcggaggggtcctcccagaattcagacctcccctccaggcaggcagccagccccgggagcggggagaggcccctggagcgggrgaggggaggcggctctgctggggtgggcactggcctccctgctctgaacactgccctgaccttgggtgcctggccctaagagctttcccaggtatttctc

SEQ ID NO: 473402 - DNA, 201 bp, Homo sapiens
ggtcaggagacttagggaggacttacaaggaagagggcagcatctggggactggtcccccatgtagcagagagcggaggggtcctcccagaattcagacckcccctccaggcaggcagccagccccgggagcggggagaggcccctggagcgggagaggggaggcggctctgctggggtgggcactggcctccctgctctg

SEQ ID NO: 473403 - DNA, 201 bp, Homo sapiens
ccccctagcggcagaagcttagatgggcaaagctacacttcccacactcaaccaccaaagaatctgagcaatcaacaaatgtgcatcacactgtacacagmagagtcactccccccctcctccgcaaagtggggacacaggaggaggaatcacagaactgaaatcgggagaaacgtccctggtctaatagggcaccctcac

SEQ ID NO: 473404 - DNA, 201 bp, Homo sapiens
cgtgtcaaaaacacactccccaggacaggcagggagtcctgaaggccacaggctggctgacattaggtagaaccaccccctgggagggtggcctccagccyttgccttcccctgtcctctcctgcccccatctgtctccatccagccaccttcttccccctctgtccctggggccagctcttctgggaggcattcactatg

SEQ ID NO: 473405 - DNA, 201 bp, Homo sapiens
ggtcgtgtgcaaacaaacacgcgcgcgtacactgcaaacgtggggacgctcacacacgtgcaagcacagggaggaaatcagcccaagggagcggccccccygggcgtgccgcgcccctaaagaggataagggtggggtccctttggcggggatgggattaggagggtcttggtgttcccagacactgtgtttgttttgatc

SEQ ID NO: 473406 - DNA, 201 bp, Homo sapiens
gggtgtccaagggggctttttgacccagagcacggtgctacggcgtccatccctccgcgtcttggctgctggactggaccagaaacagccaagctctgccmctgcccaggactggatggaatcaggtttgcctgtgcctgtggggtccttgggggctctcagggagggctgcaaatgcatcgggaggagctgtgtgtatgt

SEQ ID NO: 473407 - DNA, 201 bp, Homo sapiens
ttccggctccccatccattctggtcatcccctctccctgtctctgccccaagcctctgtatggcacttcagaaagtgggaatgcttaaggaacattgaagraccgtggaaacactctggaatcctttctggcccttgagttggctcagggatccccaagccccaaaccagccaaccaaccaacagttactgatcaacttta

SEQ ID NO: 473408 - DNA, 201 bp, Homo sapiens
ctccctccatccctttcatcctcctgcccccacctgacctgctagcgtcccaaccaactccgggcccgcaggacaccctcctccctactgactcactcacycgtgtcccccgggaggaagaccctatgtgggactggaggtggccagggatgaagtcgtccaggctgagcccagcgcggaggctgcggggtgggccctgca

SEQ ID NO: 473409 - DNA, 201 bp, Homo sapiens
gagggtcttggtgttcccagacactgtgtttgttttgatctgcctgcttttccgctgttctcgctgctctgagctgggtccccagagccccggcccttccrgctccccatccattctggtcatcccctctccctgtctctgccccaagcctctgtatggcacttcagaaagtgggaatgcttaaggaacattgaaggaccg

SEQ ID NO: 473410 - DNA, 201 bp, Homo sapiens
cgcccgggagcgcaggagcatccctgcccggctgctgcctggcgcgggcgctcgaggaggaagggcaaggagaagcgcgggccgtcgcggccctcgtgacygggtcaggacgggccgggccgggccgggcgccggcgcaggaagagggaggccgaaggggcgcgcgccggaggccggaccgtgagagtcgcgcggcggggc

SEQ ID NO: 473411 - DNA, 201 bp, Homo sapiens
cctcacctgggtctggggtctaggctcctgggtggggaaggagaagccagtgcgacggggggaggtctgtccccccaagtcggtggggtcagctgggctgygcagggctgagggggagctggggtgacgggctgagcgggcggcagcggtcaggcggggagacgtggggagctgggggccgtcgtcacagagccggagccg

SEQ ID NO: 473412 - DNA, 201 bp, Homo sapiens
ttgcccgagagcaccccgacgcttaggagtaagcttgggactccgatccaggcctctcagccccacagaaactcgtgtcttgaagaggaggaggggggggraccccagcgggcaaagcatctggggggcctggcacccgatgcttccccaaagccagcacttctgttggctgctttccttcgtgccatgaagagaacgacg

SEQ ID NO: 473413 - DNA, 201 bp, Homo sapiens
gggagtggggtggggaggaaatgaaagggctgtgggaggaatgcctgtgagtcgtgggtgggaatcagtccagggggcttcgaggggggtccgagggaaakgctgcgggggtcgtctgcagatgctgggagctcaggtcctggggaaggaggatgtgggcgggggtcctctccctcccacgagtgccaccgctccccaccc

SEQ ID NO: 473414 - DNA, 201 bp, Homo sapiens
acctctgtatttggggagtggggtggggaggaaatgaaagggctgtgggaggaatgcctgtgagtcgtgggtgggaatcagtccagggggcttcgaggggsgtccgagggaaatgctgcgggggtcgtctgcagatgctgggagctcaggtcctggggaaggaggatgtgggcgggggtcctctccctcccacgagtgcca

SEQ ID NO: 473415 - DNA, 201 bp, Homo sapiens
ctactgggacactggccaggctcaaaatgcaggcttgcaggcccctgcccttcccctgggcccacggtgtcctccaagggattcaagctgaaaggacatcrtggcatagggtcttggccatacggcatacagctggggctgaccagggactatgctgggtgggctacctgatttgagggctgcagcacagtggagaatgct

SEQ ID NO: 473416 - DNA, 201 bp, Homo sapiens
cccactcctatgtcccagggctgtctgggaaggagtcccaagtgtggacaagtcacgggggtgggggatgaggggtgaggaggaggtcgactctctggtgsaggcaggctacctcacctgggtctggggtctaggctcctgggtggggaaggagaagccagtgcgacggggggaggtctgtccccccaagtcggtggggtc

SEQ ID NO: 473417 - DNA, 201 bp, Homo sapiens
gaacccaggtaaggtgcatgtgggtagctggagctccaggctgaggccgggctgcacggggcacagagactgagcctccagcctggggctccgcaccccaycctggtcacccctagaccgctctgaccccccatcgcccccatccctgccacctcctcccagggcgtctcccgggtcctgggctctccacaggatgtccta

SEQ ID NO: 473418 - DNA, 201 bp, Homo sapiens
tttgccaagacccactcctagctcctcaaggtgcctgggaatttctggggcttcctggaaagagctactgacccactgctccccacggcgcgtgcgcgcgrgcacacacacacacacacacacacacacacacacacacacgcatgcgctgcaacggcacctgcctaaacgccagccacatcacccctcactggaccccac

SEQ ID NO: 473419 - DNA, 201 bp, Homo sapiens
tctttggcacctagaatagtgctcagcatgtggtacatgctcaatagatggtcaaggactcactgaatggatgggtgacctcggagccagctcataggcacccccagggttggctgcattttgagttgtggaagaaagcaatgcctccagtaagggaatgaccgctaacagtggcattccagcttggcggggaaatcagag

SEQ ID NO: 473420 - DNA, 201 bp, Homo sapiens
gcagcctccaattcctgggctcaagcaatcatcctgcctcagcctcctgagtagctggaactacagtcgtgcaccaccttgcctagctaattttattttattttttttttatagagacagggtctcactatgttgcccaggctggtctggaactcttggtttcaagcaatcctcccgccttgacctcccaaagtgctggga

SEQ ID NO: 473421 - DNA, 201 bp, Homo sapiens
gtcatcatcacccctactttgtcaggatatcgaggggttaaacgaggtgagcctcgtaaagtgtttttacagtgtccagcacgctctgggtgttccataaytgtgtgggtgttttttttggttttgttttgtttttgtttttgttttgagacagttttgctcttgttgcccaggctggagtgcagtggcacgatctcagct

SEQ ID NO: 473422 - DNA, 201 bp, Homo sapiens
aaaatatcacaccaccaactggtctgacgtcttgaccacctcaccatttaggaaggaatactggggccccttcttggaaaatgcctgctgacagaactatygggaaaaacagctatgggggtcaccatgcactgagaaaataaaagttagggatttacagtgtcatcctcaaaaagttctgtgacaaaaacacatctttat

SEQ ID NO: 473423 - DNA, 201 bp, Homo sapiens
acacttcccgttcttggtaggccaactccacattcaaatcctctttggctgccttggcttctccaagatggaattcaccatgtctattattaggatcacaygcacagtcattaaattacaagagtacaaaactatttttatccttggtaaacaatgtatgttttctgggatgtctttcttccttttcttcaagtagtggcc

SEQ ID NO: 473424 - DNA, 201 bp, Homo sapiens
ctcatgggaacaggagcaggcagaagaagggagtgcaaatgacccattgtggggcttcaaagggcctcctatgctgacaatggcatgacgtggctcatctrgaattcaagatttctggtagagtcactgtagagtgagggatctgagtgaaaaaatacccagtacaggtcaagtatgatgggtattggggcctgacagcca

SEQ ID NO: 473425 - DNA, 201 bp, Homo sapiens
ttaatagcatcaacattaaaaagtctgcttcatttaccattaaattattcatctactgtatcaaaattacattttctttctaaagcctgaaagttgtgataaaaaaaaaaaaaggcaagaccatgcaattacatgcagcaggcaacaaagtgaggaacagatctagatggagcaacaggttaatatgaatttgcattgaag

SEQ ID NO: 473426 - DNA, 201 bp, Homo sapiens
atgatctcatcttatagatgaggaaagggaggcccagagaaatcccggccagggagtggcagagcgcgcgttccccgtgcaagctgaggctgttaattacyacctaccgggggatttgaagtgctctggaaatgagctataaaaacctctcaggttgaactgagccaactggagagccccaaagccaggcggggctgcgag

SEQ ID NO: 473427 - DNA, 201 bp, Homo sapiens
ccttccacgcttgccacagtgagagaccttctcacacaagactcactcactcattcggccggtcagtcattcattcagcaaccatttcatgagcgtcgtgrcaggccctggggatatgaaactaagagagggtcccctgcagcctcaggccttacagcaggggttctctacctttgaggccctgatgagagttctagatct

SEQ ID NO: 473428 - DNA, 201 bp, Homo sapiens
catcacctgcttcatccaagcctcaaaacagcctcaaaacaggaagggaatgttaccagctccaatttccagatgagaaaatggagctggctcaagacacraaggtggatggaaaagggcagggtatccccagtcctaactggacccccggatccttccacgcttgccacagtgagagaccttctcacacaagactcactc

SEQ ID NO: 473429 - DNA, 201 bp, Homo sapiens
ttgctctcctccttcctgccccctagcggcagaagcttagatgggcaaagctacacttcccacactcaaccaccaaagaatctgagcaatcaacaaatgtrcatcacactgtacacagcagagtcactccccccctcctccgcaaagtggggacacaggaggaggaatcacagaactgaaatcgggagaaacgtccctggt

SEQ ID NO: 473430 - DNA, 201 bp, Homo sapiens
ctccggtaccagtctctgggtctgtcaacgctctgggatcagaaaatgcaaagtcagtcctccctgcttattcaccctcccaatttcaagccacaaaaatytttccctagtgagtcccttctctggccatccctgaaccccccataggtgggctgggaaatgcttctcttgcgatctctttaataacaatagcttcatgta

SEQ ID NO: 473431 - DNA, 201 bp, Homo sapiens
ggcggggagacgtggggagctgggggccgtcgtcacagagccggagccggggttcacgagacacctgcacgtagctggcagggaatatgccttggcgcccygtgcccgtgatgcgtccctcgtaccagttctcgttcaccttgcggatcaggcagatgtgctctccctgaggggggaaaagtcagtgtctgtggggccttc

SEQ ID NO: 473432 - DNA, 201 bp, Homo sapiens
gttttcttctttttttaaatcttaagattacctctaatttatagtacaaaagtcctaacaaattaatttcttgttcacaaaaaagacattagatgatttcrgccaataagtaacatttccctcgccttctttaacataactgaaagcaagaaaaagtaggcaatctctaagcacaagcaaataatccatcattcagaacct

SEQ ID NO: 473433 - DNA, 201 bp, Homo sapiens
ctgccccgtgcctgtgcacacacacacgtgccaccggggatggcccctgccccaagcccgtgcacacacacacgtgccaccggggatggcccctgccccgygcctgtgcacacacacacgtgccaccggggatggcccctgccccaagcccgtgcacacatgtgccaccggggatggcccctgccccgcgcctgtgcacac

SEQ ID NO: 473434 - DNA, 201 bp, Homo sapiens
cgtgccaccggggatggcccctgccccgtgcctgtgcacacacacacgtgccaccggggatggcccctgccccaagcccgtgcacacacacacgtgccacyggggatggcccctgccccgcgcctgtgcacacacacacgtgccaccggggatggcccctgccccaagcccgtgcacacatgtgccaccggggatggcccc

SEQ ID NO: 473435 - DNA, 201 bp, Homo sapiens
caggcctgggggctgctcccctgacccccttgaggccagccctgcagggtgggacccgcccctgcatctgggcctgggggcagtgccctctgctggtgagratggggccttccatctggggctctttcgggacagaccccaaggatctctgcccgcctctgcccccagatcctgtttgaccaggcccagaggtccgtgcgg

SEQ ID NO: 473436 - DNA, 201 bp, Homo sapiens
ggacaaagcggcggccccgccccgccatgccctgggggttggaacaaaagacgctcctgccctgtgcggccgccccgggtggagggcgtgcgcgtgggcarccgtgggcacctcgggaccgtccgcccccgctctgtgtctgcacctccactgggctgagcccctcccgggccctgcagtccagctctggccagggtcgtc

SEQ ID NO: 473437 - DNA, 201 bp, Homo sapiens; identical to SEQ ID NO: 278128

SEQ ID NO: 473438 - DNA, 201 bp, Homo sapiens; identical to SEQ ID NO: 278130

SEQ ID NO: 473439 - DNA, 201 bp, Homo sapiens; identical to SEQ ID NO: 278131

SEQ ID NO: 473440 - DNA, 201 bp, Homo sapiens
tgggctgtgcctggcctggaaccgagctgcgctggctcacctgaaggccggcgtcgggttggggggggcacgtttctgctcctctagtcggggggggggggaatcccacattttcaagtcagtgtggggttgggggacagccctgggggctctgccgtgtcccaggcaagggccacactagaccctgggggaggggtggtt

SEQ ID NO: 473441 - DNA, 201 bp, Homo sapiens
agcggcgtccgcgacctgtcccagcagtgccagggcgacaccgtcatctcggtgaggggccgactgacctctgacctcaaggtggggttgggggagaggcygagggaggcagccccttgagggcgtccaggccagaagcaggccggtgtctgcaccgcccaggggctcagagggcgtggctgggtgacctgggcccggatt

SEQ ID NO: 473442 - DNA, 201 bp, Homo sapiens
tcactaggtacacatgttgatgcgtgtctgtgcagtgtctccttgaacacacatgtatgtgtggtaccagtgtgtgcaggcatgtttgtgcatgaacatgyttgcacatgtgtgcttgattgtgtatgtgtgggtgtgcacgcgcgcgctgggtctcttgggatctgctggcaagtcagcatgtgtgtggaggcacgggga

SEQ ID NO: 473443 - DNA, 201 bp, Homo sapiens
cccggcagggctgggaggggcttgccttggtcggggatggactccgtcaaggggctggtggcagggctctgggggcacctcaggctccgcagactcccggygtgacctggggttccctgccccaccccgggcctgttccacactctgaacacgcactgcccctgcagtgggcaccctggatcgtaagttccgccgagactc

SEQ ID NO: 473444 - DNA, 201 bp, Homo sapiens
atgtggctggccctgagtctcgtcccatctgggaggggctgggctgtggtgagtccccgacccacggtggctgcccgtcccctctgctgggctggtgacayggggacagctgctgtgtgggctgagccttggtgtggctggggctggggctgagaaaggggagggggcaacaggccgtggaggggggagccgtgtccatga

SEQ ID NO: 473445 - DNA, 201 bp, Homo sapiens
ggccagtcggctggtcactatgcaatgctgccctggggaggctccctgagggcacagtgggcgctggacccggccccccaactctcttgcctgctgcctgygaccctgaagaacagaattgattcttgcccctctccctgtgtgagcttggccccgcctcttgccccaggcccctgctggcgggtctcaccccccacccct

SEQ ID NO: 473446 - DNA, 201 bp, Homo sapiens
gtggagacatttcagcctgggccagccacagacggggctggggggcccactgcggggggtgccgggtaaggcggcgagcgggagggaagggcttcccaaarggcctgggctttagggggctacccctggcacctttgagctgttatttggttttctctcctttgctcctagcctgcagctggctccccccggccctgggtg

SEQ ID NO: 473447 - DNA, 201 bp, Homo sapiens
ggcactagtggacgccggagccggaacagtcagggagcagagagctggacacggggcttggggctcaggcagtcggcctccgggtctccaaggtgaagcargaagtgggtggtcggggccgggtggtggctgagggcaggggccacagcggtgccgcccacaggatgccctcaccgtggtggtggatgacctccgcctgtg

SEQ ID NO: 473448 - DNA, 201 bp, Homo sapiens
tgcccggccaagcttgggatggccacatggccagactcgccctccaggccttactaagccacttacaccccccatatgtggagcatgcgtgtggtgctccmggtcctggtccctgtgtcttagcatgtgtgttccagggtgcacatgtcacatgcacacatgtggctggccctgagtctcgtcccatctgggaggggctgg

SEQ ID NO: 473449 - DNA, 201 bp, Homo sapiens
ccagctggtctgggtcctcctggtgctgccaggaccgagagcagctgccctactgcccccaccctgtcccacagtgcatgggcgccagacctggatgggckgcagtagtgcagtggggtgaggggaggtgccgcagggttgaggggctccagatgggtccagggttgactctgaactcctagaggagaggcgggtgaggct

SEQ ID NO: 473450 - DNA, 201 bp, Homo sapiens
tccaaagtggagtttgacgtggacgcgcccagtggggtggtgatggagggctacctcttcaagagggccagcaacgctttcaagacatggaaccggtgagrggccttcctcaggtgggggcggggtccttaggcgggggtggggtcctcaggcgggggtggggtcctcaggtgggggcaggggtcacagcagccctgggat

SEQ ID NO: 473451 - DNA, 201 bp, Homo sapiens
cacatgaatggggcactcaggatgcggagggtgggggcgcagcttccttcctgatcgcagcctgctggtccctgcagggctggggtggggccggcactctygggcccccagctgtgaacgtgaggggtctgccccacgggttgcagggctgggggccttgctcaggtcaagaagtggctgtggtgaacagagggtctctcg

SEQ ID NO: 473452 - DNA, 201 bp, Homo sapiens
tgtgtatgtgtgggtgtgcacgcgcgcgctgggtctcttgggatctgctggcaagtcagcatgtgtgtggaggcacggggagcctctgtatccctggagcyctcaccaggaggctcaggagccttggagtgggaggctcagggccagccaggagagtggcccccagccctgggcagaggaactggggccatcctctgctct

SEQ ID NO: 473453 - DNA, 201 bp, Homo sapiens
agatcaatgttctgcaggccaagaagaagtttgagatcctggactctgtgagtgcgtgggggctgcccctgagcacaggctgcatgttgggggctggaccrggtgtgcttgggcctcacctgtgctgcccccgcagatgctgtccttcatgcacgcccagtccagcttcttccagcagggctacagcctcctgcaccagct

SEQ ID NO: 473454 - DNA, 201 bp, Homo sapiens
agccgggggcgtctctccccagctggtctgggtcctcctggtgctgccaggaccgagagcagctgccctactgcccccaccctgtcccacagtgcatgggygccagacctggatgggctgcagtagtgcagtggggtgaggggaggtgccgcagggttgaggggctccagatgggtccagggttgactctgaactcctaga

SEQ ID NO: 473455 - DNA, 201 bp, Homo sapiens
tggctttggttggggggcagcctcaccctcctccccgtcctccaagctgctgaggaaatcctgggctgagcacagcagaggaggcctaggtccccaggacygaggaagggagagctgaggggctcccagcagtgggagcggctctcggggcctctgccagggcccaccctgtccccatgagcacgtccgtgagctcctggg

SEQ ID NO: 473456 - DNA, 201 bp, Homo sapiens
agatggcccggacagccagtgagccgattgtgtggagggctgccgggatcctggccctgtttccctgttgcctgctcccggagggggtggtcacgtgcccsatccatctgcctcctgtcttccggggattctcccgccgaggcttctctggtgatgtcatgccttaactcttctctccccaggcagccccactgtcaggct

SEQ ID NO: 473457 - DNA, 201 bp, Homo sapiens
gggattttgagcaggagtgacgattcttgctttgcccatgggtgggaactccagacatggggaagcagtccaggaccatgggaggatgaggctggcccagwgctgggagctgaagacgacctgggggtctcagggaaccacaagcagctcaggtggactctatggcaggtgcagggcttggggctgcctcagcctccgggg

SEQ ID NO: 473458 - DNA, 201 bp, Homo sapiens
agcctgagctgctaaaggtgcgtgtggggctcctggaggccacgggaccccgtttgtgggggcgggagctggggtctgcaggttcgcactgatgcctgctygccctgtctcccgctagctgatgtgtgagcttggaaacagcgctgtgaatcagatctatgaggcccagtgtgagggtgcaggcagcaggaaacccacagc

SEQ ID NO: 473459 - DNA, 201 bp, Homo sapiens
ggaaagtgcctcacccctgtggggcatggactggagtggggagatgagaatggcctggcccagtgggttttggggttaggctgtgatttaactggggttcraggggctccctgaggctgtcctgggggcaggccctaagggcgtaacttgagtttcctggcctaccgccaggttggggggccaggcagggtgggcgggaag

SEQ ID NO: 473460 - DNA, 201 bp, Homo sapiens
aacctgagccgcagactgaacagaggaggtcccgaagtagacaaggcaggatggctcagccgtccctttgctcctggttgtgcccggtccttctctacttygggttccgattcagagcccaggctccagctccccaggcccagcccctgggtgctcccggctctggctgagtgctccctgctgcagggatgggcaccccag

SEQ ID NO: 473461 - DNA, 201 bp, Homo sapiens
agccctgggcagaggaactggggccatcctctgctctcccatcttctgttgctgacctgggaaaaggggttgaataacttgagcaccctaggatcctgcaytgaggacccgggctgtggggaggtgtgggcatggcctccctgctgggggctggaccctggctgaagcacccaccttctccctggcccctccgtcagaagc

SEQ ID NO: 473462 - DNA, 201 bp, Homo sapiens
cacacgtgccaccggggatggcccctgccccaagcccgtgcacacatgtgccaccggggatggcccctgccccgcgcctgtgcacacacacacgtgccacyggggatggcccctgccccgtgcctgtgcacacacacacgtgccaccggggatggcccctgccccaagcccgtgcacacacacacgtgccaccggggatgg

SEQ ID NO: 473463 - DNA, 201 bp, Homo sapiens
gccctcaccctcaccaggaagtgcttccgccacctggcactggactatgtgctccaggtcagccccagaaatgggctggggggcggggaccagctgtagcraatggaggcctcaacggccttgtacagaactggagggattttgagcaggagtgacgattcttgctttgcccatgggtgggaactccagacatggggaagc

SEQ ID NO: 473464 - DNA, 201 bp, Homo sapiens
tgagccttggtgtggctggggctggggctgagaaaggggagggggcaacaggccgtggaggggggagccgtgtccatgagccccacatgggctgagaaagrgggggcaacaggccgtggagaggggagccgtgtccatgagccccacatgggctgagaaagaggagggggcaacaggccgtggagctgggagtgggcagcc

SEQ ID NO: 473465 - DNA, 201 bp, Homo sapiens; identical to SEQ ID NO: 473433

SEQ ID NO: 473466 - DNA, 201 bp, Homo sapiens
gtgcttgcttctgcatgtagcctgccgatgagtgcacgcaagcgtgtgcacacaccacctgtctgtgtgggttcacgtactgtgttagccatgtcagcaayagacacatcaccttgtacacgcgtgttccatcactaggtacacatgttgatgcgtgtctgtgcagtgtctccttgaacacacatgtatgtgtggtaccag

SEQ ID NO: 473467 - DNA, 201 bp, Homo sapiens
tggcccctgccccgtgcccgtgcacacgtgccaccggggatggcccctgccccgcgcctgtgcacacacacacgtgccactggggatggcccctgccccgygcctgtgcacacacacacgtgccaccggggatggcccctgccccaagcccgtgcacacacacacgtgccaccggggatggcccctgccccgcgcctgtgc

SEQ ID NO: 473468 - DNA, 201 bp, Homo sapiens
cccaggcaggcccaggcgtgaggaagctgcaccggggcactgagtcctgagtgccaacgccctgagtggaacctaccctgggagctcttcctgcctctgartggccgtgtgtggtggcgagtgcaggcgccagtgcccactgtgctcaccacgccccgctggcccacagctggtgaagctgtgcagtggcatggtggaagc

SEQ ID NO: 473469 - DNA, 201 bp, Homo sapiens
agcgcaggtcaggctaaggccagtcggctggtcactatgcaatgctgccctggggaggctccctgagggcacagtgggcgctggacccggccccccaactytcttgcctgctgcctgtgaccctgaagaacagaattgattcttgcccctctccctgtgtgagcttggccccgcctcttgccccaggcccctgctggcggg

SEQ ID NO: 473470 - DNA, 201 bp, Homo sapiens
ggccgggccctcggggctgggcggggcctccagggcaggggcggggcctccagggcaggggcggggcctccagggcaggggcggggcctccagggcagggkcgtctcacgctgtgcctccccgtaggctccgtctggcgcgcatggcggaggaaatgcgcgaggccgaggctgcccctggtcccccgggcgccctggcggg

SEQ ID NO: 473471 - DNA, 201 bp, Homo sapiens
ggccaaggaggctggcctgaagggtgcctgagtgtggatggcccttgccagggaatggagcagcatctgaaggggcggggggcctcctggccacacagctrgaggccaaggccctgactgtcaggggtgagctgtgcaaatgtgtgtgtgggctgtgtgcacctgggtgtgtgcacacagcgggtggcccggggtgctggg

SEQ ID NO: 473472 - DNA, 201 bp, Homo sapiens
gacagaggggcaggggtgacagccatcgcctctgggtgccaactcaggcctgggggctgctcccctgacccccttgaggccagccctgcagggtgggaccygcccctgcatctgggcctgggggcagtgccctctgctggtgaggatggggccttccatctggggctctttcgggacagaccccaaggatctctgcccgcc

SEQ ID NO: 473473 - DNA, 201 bp, Homo sapiens
agtggggctccggctcaggctgtgatgaggcagccttggcctctgcactcatcaagggccaggtgggacagaggggcaggggtgacagccatcgcctctgrgtgccaactcaggcctgggggctgctcccctgacccccttgaggccagccctgcagggtgggacccgcccctgcatctgggcctgggggcagtgccctct

SEQ ID NO: 473474 - DNA, 201 bp, Homo sapiens
tgggaggctcagggccagccaggagagtggcccccagccctgggcagaggaactggggccatcctctgctctcccatcttctgttgctgacctgggaaaargggttgaataacttgagcaccctaggatcctgcactgaggacccgggctgtggggaggtgtgggcatggcctccctgctgggggctggaccctggctgaa

SEQ ID NO: 473475 - DNA, 201 bp, Homo sapiens
gaggcctggatcaaggacaaatacgtggaaaagaagtttctgcggaaggcgcccatggcaccagccctggaggccccaagacgctggagggtgcagaagtrcctgcggccccacagctctccccgcgctcccactgcccgccgcaaggtccggcttgagcccgttctgccctgtgtggccgctctgtcctcaggtgggagg

SEQ ID NO: 473476 - DNA, 201 bp, Homo sapiens
cacaggtgggcccctgagggccaggccgggggtgggggttgggccggagctgggggccttgcctcccccagactcatccctacctctgctctccaggagcytgggtgtccactgctccaaggtgcggtccctgacgctggactcgtgggagcctgagctgctaaaggtgcgtgtggggctcctggaggccacgggaccccg

SEQ ID NO: 473477 - DNA, 201 bp, Homo sapiens
ccactcacctctgggccttctctctggtaaccggctctcatgggagcctgttacaggagccagttatgggggctgtggggctgcagtaggtgccgtagagygactgccctgggaaagtgcctcacccctgtggggcatggactggagtggggagatgagaatggcctggcccagtgggttttggggttaggctgtgattta

SEQ ID NO: 473478 - DNA, 201 bp, Homo sapiens
accatctgcccacgtgagggtgtgcacacgtacgtgcgtgtgcgggcgtgtgctcggcgccacctgtccacgtgagggtgtgcgcgtgtgtgcgtgtgcgkgcgtgtgctcgaggggggggccatctgcccacgtgagggtgtgcgcgtgtacgtgcgtgtgcgggcgtgtgctcgaggggccctggcctgcattggctct

SEQ ID NO: 473479 - DNA, 201 bp, Homo sapiens
gctgcaactcctggggtgtggcgctctctgctgccttctcctgggaggatggtcccttctctgttctgggatcctccagctgaggtagaggtcagggtccrggggctgcaggctgggcactggcggtcagcggacaccacagcgagattccctccatcgccccctgcttcgggattcagagtcctcttagccccttgggaa

SEQ ID NO: 473480 - DNA, 201 bp, Homo sapiens
tgagcgagccacgggggctgcgcgcaggacacaggtgcacagtcgcgtttgcatcttctgtggcgcccacacaagggtcgcctgtccgcggtggggaccamgttcggtcccggctgggggcgcccaaggccggggtcagggtgcagaggcgcggagaggggccggtgccgtggctccgtctgagttgccccggctccccag

SEQ ID NO: 473481 - DNA, 201 bp, Homo sapiens
gttgggtttgggggtctggagtctggggcatggctggggtctgggctggacagatcttgagagtgaggtggggaggggctggggaggcctggagcagatgrtcggggtcagcaggggtgcgggcaggcctgggataggctggtgaggaaggaggctatgcccaggagcaaagaaagggcctggagtggaggggggtggggc

SEQ ID NO: 473482 - DNA, 201 bp, Homo sapiens
tcagcctgggccagccacagacggggctggggggcccactgcggggggtgccgggtaaggcggcgagcgggagggaagggcttcccaaaaggcctgggctktagggggctacccctggcacctttgagctgttatttggttttctctcctttgctcctagcctgcagctggctccccccggccctgggtgggagctggtcc

SEQ ID NO: 473483 - DNA, 201 bp, Homo sapiens
tgcccctctccctgtgtgagcttggccccgcctcttgccccaggcccctgctggcgggtctcaccccccacccctcgctttgaataaagcacttgcgcccmctgcctgctcctgggctcccgtgccttgctctgctctgtctccggggagtgtctgtgtcccttgccctccccgaggggcattcctgagccgggtagcact

SEQ ID NO: 473484 - DNA, 201 bp, Homo sapiens
tgtgtgtggaggcacggggagcctctgtatccctggagccctcaccaggaggctcaggagccttggagtgggaggctcagggccagccaggagagtggccsccagccctgggcagaggaactggggccatcctctgctctcccatcttctgttgctgacctgggaaaaggggttgaataacttgagcaccctaggatcctg

SEQ ID NO: 473485 - DNA, 201 bp, Homo sapiens
ccaggtcagccccagaaatgggctggggggcggggaccagctgtagcgaatggaggcctcaacggccttgtacagaactggagggattttgagcaggagtracgattcttgctttgcccatgggtgggaactccagacatggggaagcagtccaggaccatgggaggatgaggctggcccagagctgggagctgaagacga

SEQ ID NO: 473486 - DNA, 201 bp, Homo sapiens
cagttggggttagcacagggccggggcactagtggacgccggagccggaacagtcagggagcagagagctggacacggggcttggggctcaggcagtcggmctccgggtctccaaggtgaagcaggaagtgggtggtcggggccgggtggtggctgagggcaggggccacagcggtgccgcccacaggatgccctcaccgt

SEQ ID NO: 473487 - DNA, 201 bp, Homo sapiens
tggtctaccagaagaagctcaaggtgtgccctgggcctggggctggggccctgatggctggacgccccacctgggccacagggcagactggtcagttgggkttagcacagggccggggcactagtggacgccggagccggaacagtcagggagcagagagctggacacggggcttggggctcaggcagtcggcctccgggt

SEQ ID NO: 473488 - DNA, 201 bp, Homo sapiens
cgtgtacacctgcgtgaactacatgttcacagacgtgtgcacaagtgtgcatcggctttgcttggtggacatttggcaaacgacaatggaggcaaagaaayctctctgcatccccaagtgcgcacctgcgtgaggccccctcctctgcacgagctcgtgcggggtgcgctcttgtgaactttgcccctctgcgtgcctccc

SEQ ID NO: 473489 - DNA, 201 bp, Homo sapiens
tgggtgtgtgctggtgtgcactggcatgctggcttgtgcagtgtggatgtgcatgtgtgtgcaggtaccatctgcccatgtgagggtgtgcacgtatacaygcgcgtgtgggagtgtgctcggcaccatctgcccacgtgagggtgtgcacacgtacgtgcgtgtgcgggcgtgtgctcggcgccacctgtccacgtgagg

SEQ ID NO: 473490 - DNA, 201 bp, Homo sapiens
cacacgtgccaccggggatggcccctgccccaagcccgtgcacacatgtgccaccggggatggcccctgccccgcgcctgtgcacacacacacgtgccacyggggatggcccctgccccgcgcctgtgcacacacacacgtgccactggggatggcccctgccccgtgccggtgcacacacctacgtgccactggggatgg

SEQ ID NO: 473491 - DNA, 201 bp, Homo sapiens
agtggtgcaatctcagcttactgcaatctccacctcccgggttcaagcgatcctcccatctcagcctcccgagtagctgggattacaggtgtgcaccaccmtgcccggctaatttttgtatttttagtagagatggggtttcaccatgttggccaggctgatcttgaactcctgacctcaggtgatccgccagcctcggcc

SEQ ID NO: 473492 - DNA, 201 bp, Homo sapiens
ataagattttgctctttaacaaataagttggctgggcacggtggctcatgcctataatctcagcactttgggaggcccaaggtgggcggatcatgaggtcrggagttcgagaccagcctggccaccatggtgaaaccccatttctactaaaaatacaaaacttagccaggcgtggtggtgcacgcctgtaatcccagctac

SEQ ID NO: 473493 - DNA, 201 bp, Homo sapiens
ggccacacagctggtaagtcaagaagcagattccagacttgactccagaatcttatttgtaatcactgtagtacatggccttccagttctgctcaagagayagtggaacagttaaattacagactcagacaaaaaaaatcaaaaattaaaaaaaaatttaaaaacaacaaaaaataaaaagtatagactcagctagctgct

SEQ ID NO: 473494 - DNA, 201 bp, Homo sapiens
ccactgggtgtgggcagaggaatggggtagttaacagtcacaaatctgtccaggcacagtggctcatgcctgtaataccagcactttgggaggctgaggcrggtggatcaagaagtcaggagatcgagaccatcctggctaacatggtgacaccccgtctctactaaaaataccaaaaaaaaaaaaaaattagctgggtgc

SEQ ID NO: 473495 - DNA, 201 bp, Homo sapiens
agggtcctccaaggacccaggtaagttcttccagccccaaaatgagtttccagctctgggactgaggccgctgcaccagcagccatcatttcccaatcagsaagaagtggggaaagagtaggggacaagcaacaactctttgtaaaggcgtcacccagagatggtacagagcacttctgcttatatcccattggccggagc

SEQ ID NO: 473496 - DNA, 201 bp, Homo sapiens
atcaagaagtcaggagatcgagaccatcctggctaacatggtgacaccccgtctctactaaaaataccaaaaaaaaaaaaaaattagctgggtgcagtggygggcacctgtagtcccagctactctggaggcagaggcaggacaatggcgtgaacctggaaggcggagtttgcagtgagccgagatcacgccactgcactc

SEQ ID NO: 473497 - DNA, 201 bp, Homo sapiens
gctgaatgaggcaggagaatcgcttgaacctgggaggcagaggttgcagtgagctgggattgcgccactgtactccagcctgagccacacagcaagaatcygtctcataaaaaaaagggctgatgctgtccacttccaggccccattatagagatgcagtagagatcaggtgtgtcctgtacctggcactgggtctgatgc

SEQ ID NO: 473498 - DNA, 201 bp, Homo sapiens
caggaggcggaggttgtggtgagccgagatcgttccattgcactccagcctgggtaacaagagcaaaactccgtctcaaaaaaaaaaaaaaaaagaaaagraaaaagaaatttctcattcaaacattcaaaccatgtggccaagccaggctggtaaggccactgtgatctatgcggtcattcaggtccccaggttattgca

SEQ ID NO: 473499 - DNA, 201 bp, Homo sapiens
aacatttgatgttagcgtataaattagtgttctgtgtcaaagaagtgcagaacgtactcttggcagaaaggatttaatacaggaaattaagtgcttttaaraatgtgggaaaggccaggcacagtggctcatgcttgtaatcctggcattttgggaggccgaggcgggaggatcacttgaggccaggagttcaagaagcat

SEQ ID NO: 473500 - DNA, 201 bp, Homo sapiens
tggtcccagctactcaggagcctgagatgggaggatttgcttgaacccaggcagttgaggctccagtgagccttgattacaccactgcacttcagcctggrtaacagagcaaggccctgtctcaaaaaaaaaaaaaaggttcaggtgtgagaggcagtgtggtattgtgacagagaagagcatcaagtctggtggaaacta

SEQ ID NO: 473501 - DNA, 201 bp, Homo sapiens
cctgttgtcctcctgcttcccactcccagccggaagggcacaggcagaactgccttggcgggaggcctcaggcaccctgagccccagccctgaaagggagmcagtccctggggcttccaatcaggccagggcagctcagagcaggcaggtgacctgcgggggagagaggccagggagggacaggacagtaggaacagaaca

SEQ ID NO: 473502 - DNA, 201 bp, Homo sapiens
gtttgccttgtgtcctcagacaaccagttctccctttctgagcctcagtttcctgccctggaaaataggggtgaccgcttgagtgcctccaaggcttactygattcaggcgaaggctggcacctaggaagcactccacaaatgccagctgctattgtggctgtgggtatgagtcagacagcccgtggattctcagctcagg

SEQ ID NO: 473503 - DNA, 201 bp, Homo sapiens
agacagggtttcgtcgtgttgaccaggctggtctcgaactcctggcctcaagtgatcctcccgccttggtcttcccaaaatgctgggattacaggcctgarccaccatatccagtggggcttgtggcaccttgaccgtccctcctcctttcctccccctctaggttgccatcaagattatcgacaaaacccagctgaatcc

SEQ ID NO: 473504 - DNA, 201 bp, Homo sapiens
aggttcaagtgattctcctgcctcagcctccagagtagctgggattacaggcgtgtgccaatgcctggctaatttttgtatttttttagtagagatggggktttcaccatattggccaggctggtctcgaactcctgacctcatgatccacccacctcagcctcccaaagtgctgggattacaggcctgagccactgcacc

SEQ ID NO: 473505 - DNA, 201 bp, Homo sapiens
gccaatgcctggctaatttttgtatttttttagtagagatggggttttcaccatattggccaggctggtctcgaactcctgacctcatgatccacccaccwcagcctcccaaagtgctgggattacaggcctgagccactgcacctggccacctggcccataatttttatatgcactgggaatccaaaagattcatgtgca

SEQ ID NO: 473506 - DNA, 201 bp, Homo sapiens
taggggtgataagagggcctattaccaggtcattgtgaggattgacaaagatgatgcatccaaaatgcttagtttgggctgagctatgggacttggtccarttatttccaccagcatcaacatcctcactgtcattatcattgggcagaggcgggagtgaggggtctttagtgagagaagcggagtttagctccgcctgga

SEQ ID NO: 473507 - DNA, 201 bp, Homo sapiens
ccaacatcaagattgctgactttggcttcagcaacgagttcacgctgggatcgaagctggacacgttctgcgggagccccccatatgccgccccggagctrtttcagggcaagaagtacgacgggccggaggtggacatctggagcctgggagtcatcctgtacaccctcgtcagcggctccctgcccttcgacgggcaca

SEQ ID NO: 473508 - DNA, 201 bp, Homo sapiens
tggagctgacattcttgtgagagagaaagtggaaagggtggctgggcgcggtggctcacgtctgtaatcccagcactttgggaggccgaggcgggtggatsacctgaggttgggagttggagatcagcatgaccaacatggagaaaccccgtatctattaaaaatacaaaattagccggatatggtggcgcatgcttgtaa

SEQ ID NO: 473509 - DNA, 201 bp, Homo sapiens
acttcagcctgggtaacagagcaaggccctgtctcaaaaaaaaaaaaaaggttcaggtgtgagaggcagtgtggtattgtgacagagaagagcatcaagtytggtggaaactatcgggcacggtggctcatgcctgtaatcccagcactttgggaggccgaggtgggcagatcacctgaggtcaggagttcaagaccagcc

SEQ ID NO: 473510 - DNA, 201 bp, Homo sapiens
gccgggcatgtcggctaggaagatgtgcaggtgtgagggtgtttctgccttgacgctgctgtcctgaactcaagggccataagccctggtgagttggggcrgcctgtctatctacaggtatgggatatccccatgggagtttccagatgtgaaggtcaagagaggctggtccccatgccttggttccgacatccctgggca

SEQ ID NO: 473511 - DNA, 201 bp, Homo sapiens
tggggtaagaggagatgcaggtatgaaggtgcccaggtgtggggtaagaggagttgcgggtgtgagggtgctggggcatgaggggtaagaagatgtgcgtktgtgagggtgccaggtgtgtggggtaagaggagatgcaggtgtgagggtgccggggcatgtggggtaagcagatgtgcaggtgtgagggtgccgggcatg

SEQ ID NO: 473512 - DNA, 201 bp, Homo sapiens
gccaggcgtggtgacgcatgcctgtaatcccagatattcgggaggctgaggcaggagaatcccttgaacctgagaggtggaggtcgcggtgagccaagatygcgccattgcactccagcctgagcaacaagagggaaactctgtctcaaaaaaaaaaaaagtttcactgcaaaagaagtataaggagagttcaatgacatt

SEQ ID NO: 473513 - DNA, 201 bp, Homo sapiens
gaggctcaggcaggcggatcacctgatgttgggcgttcaagaccagcttggccaacatggagaaaccccgtctctactaaaaatacaaaattagccaggcrtggtgacgcatgcctgtaatcccagatattcgggaggctgaggcaggagaatcccttgaacctgagaggtggaggtcgcggtgagccaagatcgcgccat

SEQ ID NO: 473514 - DNA, 201 bp, Homo sapiens
aaagggtggtagagggggctgaggagtttggaaaatcttgctgtcagtagggagccattgagtgttgagttggggtgggggtgttatggttggcacatttkcatagttactgaggacaggttaggaggggccctttctccctaatgccctacactgttcccaaccattatagtgaagctctttgaggtgattgagactgag

SEQ ID NO: 473515 - DNA, 201 bp, Homo sapiens
tgggatatccccatgggagtttccagatgtgaaggtcaagagaggctggtccccatgccttggttccgacatccctgggcatgggggtgtcctgggggagrcgtgtgtctgcccaggttccacgggcacctcttgctgtgactgaatcagggtgtgaggccccagatctcaggctgtgccttggggaggcctggggcccag

SEQ ID NO: 473516 - DNA, 201 bp, Homo sapiens
agtgctcatactcttaggggtttggttaccaagaacgaaacagggaggatggattctaagggagaagtaacagcctctgccacaatcaggattcttctctsagatccaggctgggcctggagtccctgggaggatagaaattggaggtctgggctgggcgcagtggctcacacctggaatcccagcactttgggaggccaa

SEQ ID NO: 473517 - DNA, 201 bp, Homo sapiens
gtcggctaggaagatgtgcaggtgtgagggtgtttctgccttgacgctgctgtcctgaactcaagggccataagccctggtgagttggggcggcctgtctrtctacaggtatgggatatccccatgggagtttccagatgtgaaggtcaagagaggctggtccccatgccttggttccgacatccctgggcatgggggtgt

SEQ ID NO: 473518 - DNA, 201 bp, Homo sapiens
ggtgtcctgggggagacgtgtgtctgcccaggttccacgggcacctcttgctgtgactgaatcagggtgtgaggccccagatctcaggctgtgccttgggsaggcctggggcccagctgtgagtggtttcacagtccactgagggaggctgagggttttgggagccacaaataaccaaccttccccttccctcccagattg

SEQ ID NO: 473519 - DNA, 201 bp, Homo sapiens
gctttgtggcctcaggtaagttcccgactctctatgggacaggtcacaatatctctgatgttcccagaaccacccccatgggaaaagagaactaatttcaygtatccctgaaattgccgggaaatctcagatcacaggcagtccaatgtgtgcgttgctaaggatgcatgtggcttttgtagataaacctgagctgtggcc

SEQ ID NO: 473520 - DNA, 201 bp, Homo sapiens
tctgatgttcccagaaccacccccatgggaaaagagaactaatttcatgtatccctgaaattgccgggaaatctcagatcacaggcagtccaatgtgtgcrttgctaaggatgcatgtggcttttgtagataaacctgagctgtggccggatgcattggctcacacgtgtaatcccagcactttgaaaggccaaggcagga

SEQ ID NO: 473521 - DNA, 201 bp, Homo sapiens
agtgagactctgtctcaaaaaaaaaaaaaaaaaaaattagccaggcatggtggcacacgcttgtaatcccagctactcaggagggtgaggcaggagaattraactcaggagatggaggtctggcccctgctgtcgactaggagggtccgaggggctggaggagggtcctgggacagtggaacccccactgcccagattacc

SEQ ID NO: 473522 - DNA, 201 bp, Homo sapiens
agtaattagctaatgagctcctaggatgattacagggtgccagggacccagatgatgcggaggagggagggtggcatcaggaggctccggcaggggacgtsggggagagagaggcccaggaggcgctatctcttaggaagcccgcaattctgggtgttaggcctcggaggtttggggcagggcagaagctgtatgatttct

SEQ ID NO: 473523 - DNA, 201 bp, Homo sapiens
ggaagggactcaacggggctccagcccagctacctgtaggagctgagccaggcagcctcctcgagtacctgtggccccagggtccgcattccacaccttcygctgtatgtctcagtcctcgcgctccaagaccaggtggctgaccgtttggttggctcaaatccggttgtcttgactgtcgttttgtgagcacctgtgtgc

SEQ ID NO: 473524 - DNA, 201 bp, Homo sapiens
tatggagccagactcgggggttcaaatggcagctctgccaagtgaccttgagcaagtcactcaaggtctctgggcctggttttcctcttctgtaaaatggktatagtaataacaatacctgtctcctagggttattgtgaggactaaatgaagtgacgtatggactgagcgtagaacattgccttggaaagtgctttacat

SEQ ID NO: 473525 - DNA, 201 bp, Homo sapiens
agatcgtgccactgcactccaacctgggtgacagagtgagactccatctcaaaaataaaaaataagaaaaagtaagccccgagcaagccagatgctattayattcaggtttagggaggagctctgtggtgtgtctttgtagggtttgggcctttattggggcaggagctggggaagagtggtccagaaataaaccaggaga

SEQ ID NO: 473526 - DNA, 201 bp, Homo sapiens
ttattcattgagcccctactgtgtgcctggcactgtcctaggccctgtagtagagggtgagcaaaatgtacaaaactcctgccctggcagacccaacattytactaagggatctagacaaaaaacaaagaaataagtaaaatatacttactatatagactgctaggtagtgtgaagtaactaagaagaaaaatagagtagg

SEQ ID NO: 473527 - DNA, 201 bp, Homo sapiens
cttgtttagattctagttgtgctgctttcttgcaatgggcatgagttgtggcctcccacagcttctgtttcctcccctgtgaaatggcaattgcaagaccrcatgccgcaaaaaaatagacaaaactttataacaatacaaaacgtttatttatttatttattcacttatttttgagatggagtctcgctgtgttgcccag

SEQ ID NO: 473528 - DNA, 201 bp, Homo sapiens
aaaactcctgccctggcagacccaacattttactaagggatctagacaaaaaacaaagaaataagtaaaatatacttactatatagactgctaggtagtgygaagtaactaagaagaaaaatagagtaggagccaaatttggtggcttatgcttgtaatcacagcactttgggaggctgaggcgaggggatcacttgagcc

SEQ ID NO: 473529 - DNA, 201 bp, Homo sapiens
tggccaggccgatcttgaactcctgacctcaggtgatccacctgccttggcctcccaaagtgctggtattataggcgtgagccactatgtctggcctgtgmtaggttttctatgtggattaactcataattctcaaactacgctatgaaataggaactaagattatccccattctatggatgaggaaactgaggctcagtg

SEQ ID NO: 473530 - DNA, 201 bp, Homo sapiens
acacgtgcgtgtgtctctctctttctctctgtggccacttatctatgtaagggtgtgtctctgcccactcccctccctttcatcttccacattcttcagtrtctttcctgtgacctgcactaaccatttcagaatgagccccgttatggggatggacaaggagatcaaatcctgactccaggccctcaccagcccggaggg

SEQ ID NO: 473531 - DNA, 201 bp, Homo sapiens
tttctttgttgtgcagggccctcttgcacattggagaatgtttatcattcctgacctaccccatccccaacctagtcagtgccagcagtgctcccatcctmagacatgtgacaatcaaaaagcccccagaggccgagcacagtggcttatgcctgtaattccaacaactcaggaggccaaggcaggaggatcacttgagcc

SEQ ID NO: 473532 - DNA, 201 bp, Homo sapiens
acgcctgtaatcccagtactttgggaagctgaggcaggtggattgcttgaggtcaggagttcgagaccagcctgaccaacatgatgaaaccctgtctctaytaaaaatacaaaaattagctgggcgtggtggcacatgcctataatctcagctgctcagtaggctgagccaggagaatcgcttgaacccaggaggcggagg

SEQ ID NO: 473533 - DNA, 201 bp, Homo sapiens
ttgggaggccaaggcaagtggatcacctgaggtcaggagttcaagaccagcctggccaacatggtaaaaccccgtctctactaaaaatataaagattagcytggtgtgatagcaggcacctgtaatttcagctacttgggaggctgaggcaggagaattgcttgagcccaggaggcagaggttgcaatgagccaagatggt

SEQ ID NO: 473534 - DNA, 201 bp, Homo sapiens
aggtgtggggtaagaatatgtgcaggtgtgagggtgcccaggtgtggggtaagaggagatgcaggtatgaaggtgcccaggtgtggggtaagaggagttgygggtgtgagggtgctggggcatgaggggtaagaagatgtgcgtgtgtgagggtgccaggtgtgtggggtaagaggagatgcaggtgtgagggtgccgggg

SEQ ID NO: 473535 - DNA, 201 bp, Homo sapiens
caggggcagggcggggcggggggccgatgggacctaacctgtcttccactctgctctgtctcctgtaccccaacatttcctcttcctcctcctcctcctcstcgtttcctcctcctcctcctcctttcctcctcccctgtcacccctcacctccctcctcacactgcagggttaccctcgatccctctaaacggcagaact

SEQ ID NO: 473536 - DNA, 201 bp, Homo sapiens
gggagacgtgtgtctgcccaggttccacgggcacctcttgctgtgactgaatcagggtgtgaggccccagatctcaggctgtgccttggggaggcctgggscccagctgtgagtggtttcacagtccactgagggaggctgagggttttgggagccacaaataaccaaccttccccttccctcccagattgtttcggctgt

SEQ ID NO: 473537 - DNA, 201 bp, Homo sapiens
tgcccaggagtttcaaaccagcctggacaacatagcaaaaccctgtctctactgaaaatacaaaaactgaggtgggaggatcagcagagcctggggaggcygaggctgcagtgagctgtgaccgtgccactgcactccagcctgggtgacagagtgacaccctgtctcaaaaaaaaagagaaatggatggaagttaaagtt

SEQ ID NO: 473538 - DNA, 201 bp, Homo sapiens
catcacctcagtttccctgaattatatttgggggcaaagattgtcccctctgctgttctctggggccgctcagcacagaagaaggatgagggggctcagcggggggagctggcaccttcctggagcctccagccagtcctgtcctccctcgccctaccaagagggcacctgaggagactttggggacagggcaggggcagg

SEQ ID NO: 473539 - DNA, 201 bp, Homo sapiens
aggtcaggattggccctgggtttgctttgtggcctcaggtaagttcccgactctctatgggacaggtcacaatatctctgatgttcccagaaccacccccrtgggaaaagagaactaatttcatgtatccctgaaattgccgggaaatctcagatcacaggcagtccaatgtgtgcgttgctaaggatgcatgtggctttt

SEQ ID NO: 473540 - DNA, 201 bp, Homo sapiens
cctcccagattgtttcggctgtgcactattgtcaccagaaaaatattgtacacagggacctgaaggtaagcccccgacccgctgtgatctcagggaccacrgctcagcccacagacttctccctgcccccacccctccatggtttccgtggcctccagcaaattcctccagcccttttctcctcctgctcttccctccaca

SEQ ID NO: 473541 - DNA, 201 bp, Homo sapiens
ttttctcctcctgctcttccctccacacccagcacccccttgaccctttcccaagcttttgtggcagaaacaaggccagcagatgggggagcggatggggrggaggggacaggaggagtgaacaaagcagggagaaacaaagtgtcccaaaatggccctggatgctacagggctgttggataaggacgctgggacatgata

SEQ ID NO: 473542 - DNA, 201 bp, Homo sapiens
tctccgaccttaggacattcaggactccttgaggatttaggttgcagagccccagagtcactctgcccacagggtcccagagtcacaggaatctgagaacttttttttttttttttttttgagacagagtctcactctgtcgccctggctggagtgaagtggcgcgatctccgctcactgcaagctccgcctcctgggttc

SEQ ID NO: 473543 - DNA, 201 bp, Homo sapiens
ggtctcgatctcctgaccttgtgatccgcccgcctcagcctcccaaagtgctgggattacaggcatgagccacggcacctggccgggaatctgagaacttragaaggcttcgtttttatttttatttttgacatggagtttcacactgttgcccaggctggagtgtagtggccccatctcagctcgctgcaacctccgcct

SEQ ID NO: 473544 - DNA, 201 bp, Homo sapiens
catggagtttcacactgttgcccaggctggagtgtagtggccccatctcagctcgctgcaacctccgcctcccgggttcaggcgattctcctgcctcagcytcccgagtagctgaggtcacaggcacctgtcaccatgcccagctatttttgtatttttagtagagacggagtttcaccatgttggccaggcttggtcttg

SEQ ID NO: 473545 - DNA, 201 bp, Homo sapiens
cgtgccactgcactccaacctgggtgacagagtgagactccatctcaaaaataaaaaataagaaaaagtaagccccgagcaagccagatgctattacattyaggtttagggaggagctctgtggtgtgtctttgtagggtttgggcctttattggggcaggagctggggaagagtggtccagaaataaaccaggagacata

SEQ ID NO: 473546 - DNA, 201 bp, Homo sapiens
aattgtaaagtcagggaaatacttgcagaggacagaccatcaaagcggaaccctgagtgatgaagaggagggagtcccttcttcacagtggccttggccawatagccaacccctctaagcctcagtctcacctgctgttcaatgaagatcataaaggtaccaaccctgtgggccgggcgtggtggctcacgcctgtaatcc

SEQ ID NO: 473547 - DNA, 201 bp, Homo sapiens
ttaccatgttgcccaagctagtctcgaactcctgacctcaggagatctgcctgccttggcctcccaaagtgctgagattacaggcgtgagctaccgcgccyggccatgaaatgtttactgatcactgactgtgctctaggggccgctgtgagcactttacgcttaaacccacaaccacgcttgaggcaggtgtcgagatca

SEQ ID NO: 473548 - DNA, 201 bp, Homo sapiens
ctgctaccacacctggctaatttttgtatttttagtaaagacagggtttcgtcgtgttgaccaggctggtctcgaactcctggcctcaagtgatcctcccrccttggtcttcccaaaatgctgggattacaggcctgagccaccatatccagtggggcttgtggcaccttgaccgtccctcctcctttcctccccctctag

SEQ ID NO: 473549 - DNA, 201 bp, Homo sapiens
ctgacacctgaaagatatgtaggagtgagtcaggggaaaaggtaggagtaatgttctaacaggtgagacagccagtgcacaggctagtcacagtgacagawtgtggcatgaataagtacattagcaaacgtttggtgtggctgggctggacctcaagaaggtgggcattgctgggagaagagcggtggacaaggatgcccc

SEQ ID NO: 473550 - DNA, 201 bp, Homo sapiens
cagaccacatggggtaatagtgatattacatagtactcgctgggtatgaaatactgttctagcttttctttttttttgagacaagttctcactctgttgcycaggctggagtgcagtggcacagtctcagctcagtgcaacctctgcctcccaggttcaagcaatttttgtgcctcagcctcctgagtacctgggactact

SEQ ID NO: 473551 - DNA, 201 bp, Homo sapiens
ctccctgtgttgcccaggctgttcttgaactcctgggctcaagcgatcctccggtcttggcctctacgcctggccaagaatttttttttttaaattgcagygtccatatgatgttcccattttatggacagggaactgaggtcaggagaaaggaatggggttttgcttacctcgtcaaggactgggactcagagcttctgt

SEQ ID NO: 473552 - DNA, 201 bp, Homo sapiens
gtgaggctggggagacgggggagagcaggagccaggcttccggcacagccgggtgacccacctgacccttcctgcgggggcccggctggggaaaggatccyccaagccacccaccctcactctcctctgtcttcctttctggccacgcccagctgttccgagaagtccgcatcatgaagggcctaaaccaccccaacatcg

SEQ ID NO: 473553 - DNA, 201 bp, Homo sapiens
ctacctaaggtcaggtagagagtaaaggacaggcccaagagttgatccctgtgggccagccctagagcctgtgctcctgtctgcctcccacgtccatgaarggctttggccttgagtcccactttccgccctctccttctctccctgcaggctgagaacctcttgctggatgccgaggccaacatcaagattgctgacttt

SEQ ID NO: 473554 - DNA, 201 bp, Homo sapiens
ccatccacgtgatctgagcggaaagaatgttctttcaaaggaaatcaatgtgctgttgggaagggaggatgggtactggacaggtcaaagagcagacaccrgtgaatgacacagaaatgagtggaagtgggccaggtgcagtggcttatgcctgtaatcccagcactttgggaggcccaggtgggtggattgcttgtgccc

SEQ ID NO: 473555 - DNA, 201 bp, Homo sapiens
ctgaggcaggagaatcacttgaacccaggaggcagaggttgcagtagccaagattgccccatggcccttcagcctaggtgacagagtgagactctgtctcaaaaaaaaaaaaaaaaaaaattagccaggcatggtggcacacgcttgtaatcccagctactcaggagggtgaggcaggagaattgaactcaggagatggag

SEQ ID NO: 473556 - DNA, 201 bp, Homo sapiens
attgcatagatagaccacattttgtttatccattcatgaacacgtggattgcctccactttttggctgttgtgaatgatgctgctgtgaacatttgtatcygtgtttttgtgtggctgtgttttgccgtcatttctcttgggtacgtatctgggagtggaattgctgagtcatctggtaaccgtgtgtttaataatagttt

SEQ ID NO: 473557 - DNA, 201 bp, Homo sapiens
ggattgcctccactttttggctgttgtgaatgatgctgctgtgaacatttgtatccgtgtttttgtgtggctgtgttttgccgtcatttctcttgggtacrtatctgggagtggaattgctgagtcatctggtaaccgtgtgtttaataatagtttgaggaactttcagggtgttttccaactctgttcgttttacagccc

SEQ ID NO: 473558 - DNA, 201 bp, Homo sapiens
tgctgtgaacatttgtatccgtgtttttgtgtggctgtgttttgccgtcatttctcttgggtacgtatctgggagtggaattgctgagtcatctggtaacygtgtgtttaataatagtttgaggaactttcagggtgttttccaactctgttcgttttacagccctgcttgtctgcaggggtgaagttcttactctgggac

SEQ ID NO: 473559 - DNA, 201 bp, Homo sapiens
aacaataaattctccccttttgaaacaagttatagtcctttggagatattcatatataagcaagtagatatagatacacacttttttgcttttgtagacamatgataacacattgttgacccatctcttgtcttgccttttctactttccagtccgtcatgaagatcattctgtactggtgcataaagtgcttccttattc

SEQ ID NO: 473560 - DNA, 201 bp, Homo sapiens
cccttttctcctcctgctcttccctccacacccagcacccccttgaccctttcccaagcttttgtggcagaaacaaggccagcagatgggggagcggatgsgggggaggggacaggaggagtgaacaaagcagggagaaacaaagtgtcccaaaatggccctggatgctacagggctgttggataaggacgctgggacatg

SEQ ID NO: 473561 - DNA, 201 bp, Homo sapiens
tgggacgctctgtcctgctctgcgttgcccgtgaggagcacgtactgtgatatgaaattgtaaagtcagggaaatacttgcagaggacagaccatcaaagsggaaccctgagtgatgaagaggagggagtcccttcttcacagtggccttggccaaatagccaacccctctaagcctcagtctcacctgctgttcaatgaa

SEQ ID NO: 473562 - DNA, 201 bp, Homo sapiens
tgacattgacattatcgattagttcaggccagttaattttgcagaacgtccctcaatttgggttgcctggtgtttcctctcgattggaatcgggggtgcaytggggcaggaattctgcagctgggacgctctgtcctgctctgcgttgcccgtgaggagcacgtactgtgatatgaaattgtaaagtcagggaaatacttg

SEQ ID NO: 473563 - DNA, 201 bp, Homo sapiens
ggccttggccaaatagccaacccctctaagcctcagtctcacctgctgttcaatgaagatcataaaggtaccaaccctgtgggccgggcgtggtggctcaygcctgtaatcccagcactttgggaggccgaggcgggcggatcacgaggtcaggagagcgagaccatcctggctaacacactgaaaccccgtctcttctaa

SEQ ID NO: 473564 - DNA, 201 bp, Homo sapiens
ttggcctcccgaagtgctgggattatagacataagccaccacgcctggcctattgcggttttttattcagatggaaagagctccccctggtctgccaagcyatggatttatcttatttttcacagctttggtagggcctctcataaaaggcccttaaagagaaagccagcagataaatccatgaatggccttgaggagtgt

SEQ ID NO: 473565 - DNA, 201 bp, Homo sapiens
tgtgggccgggcgtggtggctcacgcctgtaatcccagcactttgggaggccgaggcgggcggatcacgaggtcaggagagcgagaccatcctggctaacrcactgaaaccccgtctcttctaaaaatacaaaaaattagccgggcgtggtggcaggcgcctgtagtcccagccactcgggtggctgaggcaggagaatgg

SEQ ID NO: 473566 - DNA, 201 bp, Homo sapiens
ttgcatagatagaccacattttgtttatccattcatgaacacgtggattgcctccactttttggctgttgtgaatgatgctgctgtgaacatttgtatccrtgtttttgtgtggctgtgttttgccgtcatttctcttgggtacgtatctgggagtggaattgctgagtcatctggtaaccgtgtgtttaataatagtttg

SEQ ID NO: 473567 - DNA, 201 bp, Homo sapiens
actgcactccagcctggtgacagagcaagactctgtttcaaaaaaaaaaaaaaaaaaaaaaagcatgggtcaccacccacacagacacaaaatacttatarttatcctttaccataagattttgctctttaacaaataagttggctgggcacggtggctcatgcctataatctcagcactttgggaggcccaaggtgggcg

SEQ ID NO: 473568 - DNA, 201 bp, Homo sapiens
ctaccagtcaagtcccagccttgaccagggtgcacacaggtgtgagtctgagccaattgtgggcctaaacttttaaaagtatgggtcacctgccaggcgcrgtggctcacgcctataatcccagcactttgggagtccgaggagggtggatcatgaggtcaagagatcgagaccacctggccaacatggtgaaaccccatc

SEQ ID NO: 473569 - DNA, 201 bp, Homo sapiens
aagactctgtctcaaaacaaaacaaaacaaaacaaaaagtcataaaaattaagtttttagtcagacatggtggctcacgcctgtaattccagcactttgcraggctgaggtgggtggattgcttgagctcaggagttcgagaccaacctgtgcaaaatggtgagaccccttccctacaaaaaatagaaaaattagtccggt

SEQ ID NO: 473570 - DNA, 201 bp, Homo sapiens
gcccggacaacatagcaagactccatctctacaaaaaaatttaaaaatcagctgtgtgtggtggtgcactcctgtggtcccagctactcaggagcctgagrtgggaggatttgcttgaacccaggcagttgaggctccagtgagccttgattacaccactgcacttcagcctgggtaacagagcaaggccctgtctcaaaa

SEQ ID NO: 473571 - DNA, 201 bp, Homo sapiens
agcattcaccagccttgaccggctttgactgattgtgactggccttcactggcagtgcctgacagggccccactgaagctttgaccacaagtgtccacctkttaccagtggcagccagctgtggccagcattaaccagcctttactggcagtgtccagccatgaccagtattaaccagcagcaactgactgtgaccggctt

SEQ ID NO: 473572 - DNA, 201 bp, Homo sapiens
ttcccatctcagccccctgagtagctgggactataggcatatgccaccatgcctagctaattttttttttttaagtttttctagagatgggtgtctcgctycattgcccaggctggtctcaaactccctggcttcaagcgatcctcccgccttgtcaatgattttgttttattgtgattcactgaaggttcagatgattgt

SEQ ID NO: 473573 - DNA, 201 bp, Homo sapiens
cgtgtctcaaaaaaaaaaaaaaaaaaaaaaaagaatccagcccaagtgttagctagaatctccttggtccactcatcaggatcaggatggagctctgataycgagtccagttgggattaatctgctgtaatgggggcacaggaggacacattgcacaaagtggctgctgaaagcctgcgctctgacctcccctccacactg

SEQ ID NO: 473574 - DNA, 201 bp, Homo sapiens
cagcattaaccagcctttactggcagtgtccagccatgaccagtattaaccagcagcaactgactgtgaccggctttgaccagccttgactggccgtgacwacccttggccaacggtatctggctgtgaccagtggtgtctggctattaccacttatgaccagctttaactgtccctgactgttggtgactggccatgacc

SEQ ID NO: 473575 - DNA, 201 bp, Homo sapiens
ggtttcggcaaatagcaaggaagtcacccaaaaatgtctgtgcatctattcagttgctgcgtttagagagaggagagttgtgataggagatgatttggagygggtagagtttgaagaagggacagtttgaaggaggggtaataggagaggagagagtcagtaaaataatgctaggattgtatagtgcacagcctgcacaac

SEQ ID NO: 473576 - DNA, 201 bp, Homo sapiens
ctgtctctgcccacagctcaggcaccccacgggtgccccctgcctccccctccagtcacagcctggcacccccatcaggggagcggagccgcctggcacgyggttccaccatccgcagcaccttccatggtggccaggtccgggaccggcgggcagggggtgggggtggtgggggtgtgcagaatgggccccctgcctctc

SEQ ID NO: 473577 - DNA, 201 bp, Homo sapiens
cagatgattgttagcatcttttaacaagaaagtattatgaaattaaagtatgtacattgtttttatagctgtaatgctattattgcacactcagtagactrcagtatgatgtaaacacaatttttctttctctttttttttttttttttttgagatggagtcccactctgtcacccagactgtagtgcagtggcgcgatct

SEQ ID NO: 473578 - DNA, 201 bp, Homo sapiens
gtagtcagactgcagtgagggttgaagaaggggtgtgatgcctggggccctgaatgttgcagatttggaggacatgggggcttttgttcctggaggcgtcyttttgtagagaaagatgaaggatgcttggctctctggggcctgagtttgaaaagggccacggaggggccggtagccaggcctcaagttaagtgcactagc

SEQ ID NO: 473579 - DNA, 201 bp, Homo sapiens
gggaggatcacttgaggccaggagttcaagaagcatagcagacgccatctcaactaaaaatcaaaaaaattagccaggcatcatgttatgtacctgtggtyccagctactcgaaagaccgaggtgggagaatcacttgagcccaggaggttgaggctacagggagctgtgttcccgccactgcactccattctgggtgaca

SEQ ID NO: 473580 - DNA, 201 bp, Homo sapiens
ggagaacctgtctctaaaaaaaaaaaaaaaaaaaaaaaattgaacagggaggggaataaggggtgtggggaagggatggggtgcagcattaaatgggcagscctctggatgaggtggctcaggccagcaatcccagcactttggacagatgacttgagtccaggagtttgagaccagcctgggcaatgtggcaaagcccca

SEQ ID NO: 473581 - DNA, 201 bp, Homo sapiens
atttttagtagagacggggtttcaccgtgttagccaggatggtctcgatctcctgaccttgtgatccgcccgcctcagcctcccaaagtgctgggattacrggcatgagccacggcacctggccgggaatctgagaacttaagaaggcttcgtttttatttttatttttgacatggagtttcacactgttgcccaggctgg

SEQ ID NO: 473582 - DNA, 201 bp, Homo sapiens
ccagctacttcaggggccaaggcaggaagattgcttgagcctgggaggttgaggctgcagcgagctgagatcacgccactcctgcatgacagagtgagacwctgtctcaaaaaaagaaaaaagggcaggcctcacgaaggaggtgttgtttgagcaaagcatgaatgtatatgtgagcgagggagtgtgtgtgtgtgcaca

SEQ ID NO: 473583 - DNA, 201 bp, Homo sapiens
ggaggctagtcctgggatgctcatgtagagcagcactctcgtacttcaggcgggacgtttctttgttgtgcagggccctcttgcacattggagaatgtttwtcattcctgacctaccccatccccaacctagtcagtgccagcagtgctcccatcctaagacatgtgacaatcaaaaagcccccagaggccgagcacagtg

SEQ ID NO: 473584 - DNA, 201 bp, Homo sapiens
tgttttgggctttgcatgtaaggcgagaacaagagaggcaaaaactcctgcttggccgggtgcggtggctcatgcctataatcccagcactttgggaggcrgaggcgggaggctcacttgagcctgggagttcaagaccagcctgggcaacatagggagacgctgtctctacaaaaaatacaaaaattaaccgggcataat

SEQ ID NO: 473585 - DNA, 201 bp, Homo sapiens
gaaagtgtggtctctagctgggcagctctgtatccagttgaaactgtcgctggggtaacaggggaagatgttttttgaggggatggctaggaatgtgtccygaattgggaagagttgtcccttcagccctccaccacattcctcttcgctcccatctctgacccctgacatcttctcgcctcagttgccatctaccttggg

SEQ ID NO: 473586 - DNA, 201 bp, Homo sapiens
cttgaggagctgccgctgtcacctacggtttttaagttattacaccccgaccctcctcctgtcagccccctcacctgcagcctgttgcccaataaatttargagagtccccccctccccaatgctgaccctaggattttccttccctgccctcacctgcaaatgagttaaagaagaggcgtgggaatccaggcagtggttt

SEQ ID NO: 473587 - DNA, 201 bp, Homo sapiens
agaatcacttgaacctgggaggcagaggctccagtgagccgagattgcgcccctgcactccagcctggacgacagagcaagactccatctcaaaaaaatawaaagagtttgacaccagcctgggcaacatttcaagaccacatctctacaaaaaatattttttaaattagcctggcattgtggtgcatgcctgtagtccca

SEQ ID NO: 473588 - DNA, 201 bp, Homo sapiens
cccaatgctgaccctaggattttccttccctgccctcacctgcaaatgagttaaagaagaggcgtgggaatccaggcagtggtttttcctttcggagcctyggttttctcatctgcagaatgggagcggtgggggtgggaaggtaaggatggtcgtggaagaaggcaggatggaactcggcctcatccccgaggccccagt

SEQ ID NO: 473589 - DNA, 201 bp, Homo sapiens
atggggatggacaaggagatcaaatcctgactccaggccctcaccagcccggagggactggggttgaggcaggggctgcttggagtcccagaggcagtggrttgcgggaggtgggttccctatgtccagattagacactctgtccccctcccctcccctagggtcgcagacgaacctgagagaatcgggggacctgaggtc

SEQ ID NO: 473590 - DNA, 201 bp, Homo sapiens
cacaggtgtgagccactgtacccggcccatgttcgctttgatattaagacataaagagagaccaggcgaggtggttcatgctggtaatcccagcactttgkgaggtcgaggtagaagaatcacttgagcccaggagttggagaccagcctggccaacatagggagaccctgtctgtacaaaaaaataaaaataaaaaatta

SEQ ID NO: 473591 - DNA, 201 bp, Homo sapiens
gaggcggaagctacagtgagctaagattgcgctactgcactccaggataggtgacagagtgagactccatttcaaaaaaaaaaaaaaaaagccaggtgcamtggctcatgcctgtaatcccagcactttgggaggccaaggcgggcagatcatgaggtcaggagatcgagaccgtcgtggctaacacagtgaaacctcaat

SEQ ID NO: 473592 - DNA, 201 bp, Homo sapiens
ccccatgccttggttccgacatccctgggcatgggggtgtcctgggggagacgtgtgtctgcccaggttccacgggcacctcttgctgtgactgaatcagrgtgtgaggccccagatctcaggctgtgccttggggaggcctggggcccagctgtgagtggtttcacagtccactgagggaggctgagggttttgggagcc

SEQ ID NO: 473593 - DNA, 201 bp, Homo sapiens
gtgtccctccacacggccctggaggcagcaccttagaggcttccatgattcacctggaggtcgtatgtcccctggtggagggtccccaaagcagctaacaygagttttggggtcgtattagtacaccaggggtaccaaccaaggggaccaacccatgtgactttggggctggattgcggagcctcaaatggcaggaaaaga

SEQ ID NO: 473594 - DNA, 201 bp, Homo sapiens
gagacagaaagtggattactggttgcctgaggctgggggggaggagcaagttggaggttgattgctaaagggtactgaatttcttttgaggtgatgaaaartgttctaaaattcaatgtagtggccggcctgatggctcacacctatattcccagcactttgggaggccgaggcaggcagatcacctgaggtcaggagttc

SEQ ID NO: 473595 - DNA, 201 bp, Homo sapiens
gagaggcccctccccatctcctgtgtctctgatcactgatcacttccaaagacctgcccaccacccaatcctagacttctccccacctgggatctttgtgsctttctccaaatccttctgccaggtccctgttccccttccccctgtttccctcacctccgacagacccccccacacacacacaccatcagagagatttat

SEQ ID NO: 473596 - DNA, 201 bp, Homo sapiens
gtttgagaccagcctggccagcatggtgaaaccccatctctaccaaaaatacaaaaaattagctggatgtggtggtccacacctgtaatcccagctactcrggagactaaggcaggttcacttgaatctgggaggtggaggttgcagtgagctgagatcatgccattgcactccagcctgggcaaaatgagtgaaactctg

SEQ ID NO: 473597 - DNA, 201 bp, Homo sapiens
ggtgggagaattgcttgagcccaggagttccaggctacagcgaactatgatcacgccactgcactccagcttcggtgacagaacaagagcctgtctctttaaaaaaaaaaaaagcatctgcttgcagcccgtctgcatatgttaagcccttcactggagcttggcatctggccacagcatcatgcttgggagctgcgctgg

SEQ ID NO: 473598 - DNA, 201 bp, Homo sapiens
tggccagctggtttgccttgtgtcctcagacaaccagttctccctttctgagcctcagtttcctgccctggaaaataggggtgaccgcttgagtgcctccraggcttactcgattcaggcgaaggctggcacctaggaagcactccacaaatgccagctgctattgtggctgtgggtatgagtcagacagcccgtggattc

SEQ ID NO: 473599 - DNA, 201 bp, Homo sapiens
gacttctccccacctgggatctttgtggctttctccaaatccttctgccaggtccctgttccccttccccctgtttccctcacctccgacagacccccccmcacacacacaccatcagagagatttatatctgtcccttcctcatcttgcagatccctccctcacagagaccaccccgcatcatcactatgggccagaact

SEQ ID NO: 473600 - DNA, 201 bp, Homo sapiens
tgaaaccccatctctaccaaaaatacaaaaaattagctggatgtggtggtccacacctgtaatcccagctactcgggagactaaggcaggttcacttgaayctgggaggtggaggttgcagtgagctgagatcatgccattgcactccagcctgggcaaaatgagtgaaactctgtccaaaaaaataaataaataaataaa

SEQ ID NO: 473601 - DNA, 201 bp, Homo sapiens
gcggcggggggcggggtcccggcgccccgccctgcccgcccctccccctgacgtcccttcctccctccccagcccctccaccgcctccctccgccgccgcytgggccggctccgcgccccctccgcggcccccgcccgcccgcctgcccgccgcccccatggcgcccggggtccccgctgcacggggccactaggaccctc

SEQ ID NO: 473602 - DNA, 201 bp, Homo sapiens
ggcgtgggaatccaggcagtggtttttcctttcggagcctcggttttctcatctgcagaatgggagcggtgggggtgggaaggtaaggatggtcgtggaaraaggcaggatggaactcggcctcatccccgaggccccagttcctatatcgggccccccattcatccactcacactcccagccaccatgttacactggact

SEQ ID NO: 473603 - DNA, 201 bp, Homo sapiens
ctcacagcccagtatgggatggggacatatatgagaacagacattgacagcacagtgattgaagctgcagtggggagcccaggggcctgtgggaacccaamggaggaggcacgtgactcagcctggggccgggggtggtggtagattatgaactgacacctgaaagatatgtaggagtgagtcaggggaaaaggtaggagt

SEQ ID NO: 473604 - DNA, 201 bp, Homo sapiens
tttgccaaagtcaagctggctcggcacatcctcactggtcgggaggtgagtatgggcacagggtggggctcggggcaggtccctgtgggaccaggtcttcrgtgtatgttgatagaggtcaggattggccctgggtttgctttgtggcctcaggtaagttcccgactctctatgggacaggtcacaatatctctgatgttc

SEQ ID NO: 473605 - DNA, 201 bp, Homo sapiens
cctgtcacccaggctggagtgcagtggcgtgatctcaactcactgcaacctccacctcctaagagtttaagtgattctcgtgcctcagcctcccaagtagmtaggactacaggcagccaccaccacacccagctaatttttgtatttttagtggagatggggtttcaccatgttagccaggctggtctcgaactcctgacc

SEQ ID NO: 473606 - DNA, 201 bp, Homo sapiens
tcccacatgagcccctgacttattcatcgatggggagggcagagaagggaagagggagaagctcaggggcatgtcttcaccccctcactcccttcctggcygtgtctcctgcagaacaacctccctcctagcatgatgacccgcagaaacacctacgtttgcacagaacgcccgggggctgagcgcccgtcactgttgcca

SEQ ID NO: 473607 - DNA, 201 bp, Homo sapiens
actgcccccatggctttgtcactttccaccattcccaggcgccccctgcccctacactgcttcccagagaggcccctccccatctcctgtgtctctgatcrctgatcacttccaaagacctgcccaccacccaatcctagacttctccccacctgggatctttgtggctttctccaaatccttctgccaggtccctgttcc

SEQ ID NO: 473608 - DNA, 201 bp, Homo sapiens
agagaagccccagaatgtcacagcttcagcgtcatctggttggctggttttccggcttgttggcctgagtctgtgaggtctcttccagctggcaagggagrgaaaccagttcagactggctggagcagagagagggaagggattggttcacatcacaggtcaaggccagctagaatggggccagctccaggatgaggacac

SEQ ID NO: 473609 - DNA, 201 bp, Homo sapiens
aacgcctaatgaagacttgctgttccctgggttgttaagatgcgtgcatggtgcggatttgaggatggctaatccccttttctctcctccaactcttgtcrctaagacctgcctgtcagtcctggtggggagtcacttgcctgcctctggaatgggaggttgcagccccctctcctgttacctggttaccatggctacagc

SEQ ID NO: 473610 - DNA, 201 bp, Homo sapiens
cgggtaaatccctgtgcctctgtttcctcctcggtaaaatgggcttgatgctggccgggcatggtggctcacacctgtaatcccagcactttgtgaggccraggtgggcagatcacctgaggtcaggagttcgagaccagcctggccaacatgatgaaaccctgtctctactaaaaatacaaaaattagccaggaacgatg

SEQ ID NO: 473611 - DNA, 201 bp, Homo sapiens; identical to SEQ ID NO: 278103

SEQ ID NO: 473612 - DNA, 201 bp, Homo sapiens
ccagcccctcccagatgggacgagactcagggccagccacatgtgtgcatgtgacatgtgcaccctggaacacacatgctaagacacagggaccaggacckggagcaccacacgcatgctccacatatggggggtgtaagtggcttagtaaggcctggagggcgagtctggccatgtggccatcccaagcttggccgggca

SEQ ID NO: 473613 - DNA, 201 bp, Homo sapiens
ggctgcccactcccagctccacggcctgttgccccctcctctttctcagcccatgtggggctcatggacacggctcccctctccacggcctgttgcccccyctttctcagcccatgtggggctcatggacacggctcccccctccacggcctgttgccccctcccctttctcagccccagccccagccacaccaaggctca

SEQ ID NO: 473614 - DNA, 201 bp, Homo sapiens
gagagaaccagcccagagcctccctgtctgagagctcagggttcatctcagctccgtgaatagaaaagccctaggaagtcaaaagcacactcagaagactycaacacatacttgctggaagacgatgctccatgcatcttgtgttctgctcacctatgagcagaggcactgactgtcttggcttcacactatcttttcaaa

SEQ ID NO: 473615 - DNA, 201 bp, Homo sapiens
gagggctccccacacacagacacacacacacacacgcactaggagtgttgggcgccaatcaggtgatggtcaggcggttgttaactgtttccttaaagtartaatcattcacagctggtgccagggaacagcagtctcctaatagatacaaaacacctgaaactgatcagcagcttcccaataagatctcaggagttggga

SEQ ID NO: 473616 - DNA, 201 bp, Homo sapiens
cacacagatatcaaaccagaaagtgttacaacagtgggtagctaattaggtatgagcagggcaggagagggctccccacacacagacacacacacacacamgcactaggagtgttgggcgccaatcaggtgatggtcaggcggttgttaactgtttccttaaagtagtaatcattcacagctggtgccagggaacagcagt

SEQ ID NO: 473617 - DNA, 201 bp, Homo sapiens
gaggcataagaatcacttgaacctcagaggcggaggtggcagtgagccaagatcatgccattgcactctagcctgggcaacaagagtgaaactgcttctcmcaaaaaaaaaaaaaaaaaaaaattatcttaggtcctctcgtgtgtgcatcaagagtggcaagaagacaaaatgaagaaaatcaattcagttgactgaaaa

SEQ ID NO: 473618 - DNA, 201 bp, Homo sapiens; identical to SEQ ID NO: 224161

SEQ ID NO: 473619 - DNA, 201 bp, Homo sapiens
gactgcttttccccatagctgtgtctccccaacagccccaaaccccttgtccctgtctctttctccccatgctttcctgtcccacaggcctcttccttgcyggcttagagtttctgagaggccagacatgagttcacagtgaatcaaaggaaggagaaacagccaaccactcagtagtgatgtggaaccacaggacagatc

SEQ ID NO: 473620 - DNA, 201 bp, Homo sapiens
taggccaaggcaggaggattgcttgagcccaggagtatgagaccagtctgggaaacacagggagaccccatctctacaaaaaaaattttttaaaataaaawtttaggccaggtgcggtgacactgaggtgggcagataacctcaggtcagaagtttgagacccacctggccaacatggtgaaaccccatctctactaaaaa

SEQ ID NO: 473621 - DNA, 201 bp, Homo sapiens
gggcagattgcctgaggtcaggagtttgagaacatggagaaacccatctctactaaacccatctctactaaaaatacaaaaaaattagccgggtgtggcartgcattcctgtaatcccagctactcaggaggctgaggcaggagaaacacttgaacccgggaggcagaggttgcagtgagcagagatcctgccattgcact

SEQ ID NO: 473622 - DNA, 201 bp, Homo sapiens
ggctctctttttttttttttttttttttgagatgtagtctcgctctgtcacccaggctggagtgcagtggtgcaatcttggctcactgcaacccccacctmctgggttcaagcgattctcctgcctcagcctcctgagtacctgggactacaggtgcacaccaccacacctggctaatttttgtatttgtagtagagatgg

SEQ ID NO: 473623 - DNA, 201 bp, Homo sapiens
aactaccactggtaaaaaaagtactcattccctaagtcgggaattgaaccctggccaccactgtgaaaagacagagtcttatccactaagccacagcatcrggcagtttctgctgctcttcccagaagtagcctagagaggtcaattttgaacttcaaatggcttttaaatgttcaaaataattttcagagctgttacatg

SEQ ID NO: 473624 - DNA, 201 bp, Homo sapiens
accgtgattgtgaggcctccccagccatgtggaactgtaagtccaaaaacctctttcttttgtaaattgcccagtctcagttatgtctttatcagcagcaygaaaatggacaaatacaagggatttatctactctcagttcctggggtttcatgaggaaaaaaggtttttcccaaaatggggtctgtggcacttcttctga

SEQ ID NO: 473625 - DNA, 201 bp, Homo sapiens
gtcttggcttcacactatcttttcaaagagtttgtagagcaaatagtcttagaagagacagagatggtatctccctctcgacagtgccaccctgtggccasgagaggccagaaatcagcacacgccacatctgattctacagcaggatagggcctctgtgcagctcagagcaaaggttgtgcccacttcataagattcagc

SEQ ID NO: 473626 - DNA, 201 bp, Homo sapiens; identical to SEQ ID NO: 224159

SEQ ID NO: 473627 - DNA, 201 bp, Homo sapiens
ctgtccaaaaaaaaaaaaagctatcacttaaaaatagcagcaagtgaatgagtaagtcagcctcaccttcaaaatagtctaacctgaccaccattcacaaycctactgctttcatcctcttctaagccactagcatcccctggctggctgcaagtctcctcattggtctctctgcttctgctcttggcagtcttcagtata

SEQ ID NO: 473628 - DNA, 201 bp, Homo sapiens
ctgagatcatgccattgcactccagcctgggcaacagagggagactccgtcttaaaaataaataaataaggctgggcacagtggctcacacctgtaatccyagcagtttgggtggcagaggcaggcggctcacaaggtcaggagtttgagattagccggccaatatggtgaaaccctgtctctactaaaaatacaagccgg

SEQ ID NO: 473629 - DNA, 201 bp, Homo sapiens; identical to SEQ ID NO: 224162

SEQ ID NO: 473630 - DNA, 201 bp, Homo sapiens
tacagtttgtttatacttccatttaggccatagttcgtgatgtacagagaaacctttaggccaaacttaaaatatgtaaggaggcagctgtaggctaaatktgatttaacaatggagaaaatttaagattacatcacccaaacagaaagaagggcctgggcacctgtagtcccaacactctggtaggccaaggcaggagga

SEQ ID NO: 473631 - DNA, 201 bp, Homo sapiens
tctctcttcttctccagcccttccccatatccccaccttccagccctccctcctgcaggctggtggccagccacactccacacctcaccctcacccaagtrggagagaagtggcaccaaccttgtagtcatcgctcgtggccgcctctgcagatccaaaggtgttgtagttggcccagttgccatccccctctgggtagtc

SEQ ID NO: 473632 - DNA, 201 bp, Homo sapiens
acaatctgctcccatcttacctttgtgctgtcatgacctgctgctttcctccatacttatgcagcttctgctagccaaatctccctgcagctccctgaacrcagtgaagatactcccatctcaataccttggcagttgctattccctctgcctggtactttatggctcaatccctcaccttcttcagatccttcctcaatg

SEQ ID NO: 473633 - DNA, 201 bp, Homo sapiens
ccagggataagcagaagacagatgccttcctcttatctcaactgcaaagaggccttcctcttttactaatcctcctcagcacagaccctttgtgggtgtcrggctgggggacagtcaggtctttcccttcccacgaggccatatctcaggctatcacatggggagaaaccttggacaatacctggctttcctagacagagg

SEQ ID NO: 473634 - DNA, 201 bp, Homo sapiens
agaccaaggcaggtggatcacgaggtcaggagatcgagaccatcctggctaacacggtgaaacctgtatctactaaaaatacaaaaacttagccgggtgcrgtggcgggcacttgtagtcccagctactccttgggaggctgaggcaggagaatggcatgaacccgagaggcagagcttgcagtgagttgagtcgagatca

SEQ ID NO: 473635 - DNA, 201 bp, Homo sapiens; identical to SEQ ID NO: 224166

SEQ ID NO: 473636 - DNA, 201 bp, Homo sapiens
ctcattccctaagtcgggaattgaaccctggccaccactgtgaaaagacagagtcttatccactaagccacagcatcaggcagtttctgctgctcttcccrgaagtagcctagagaggtcaattttgaacttcaaatggcttttaaatgttcaaaataattttcagagctgttacatgaactccgaaattcctgttccctg

SEQ ID NO: 473637 - DNA, 201 bp, Homo sapiens
ctgtagtcccagcaactcgggaggctgaggcaggagaatggcatgaacccgggaggtggagcttgcagtaagctgagatcgcgccactgcactccagcctkggtgacagagcgagactctgtctcaaagaaaaaaaaaaagaaagaaaaggactcttcaaagaaaaaaaaagaaataaaaaataaattatattcataagac

SEQ ID NO: 473638 - DNA, 201 bp, Homo sapiens
aaattccaaacccagaatgtctttgtctttatttttcttttcttttctttttttttttttttttttgggtaaagttttgctctgtcacccagggtggagtrcaatggcgagatcttggctcactgcaacctctgcctccctggctcaagccaaccttccacctcagcctcctgaggagctgggactacaggcacgcattac

SEQ ID NO: 473639 - DNA, 201 bp, Homo sapiens
cctgtctgagagctcagggttcatctcagctccgtgaatagaaaagccctaggaagtcaaaagcacactcagaagactccaacacatacttgctggaagaygatgctccatgcatcttgtgttctgctcacctatgagcagaggcactgactgtcttggcttcacactatcttttcaaagagtttgtagagcaaatagtct

SEQ ID NO: 473640 - DNA, 201 bp, Homo sapiens
cactttgacagactgaggcaggtggatcacctgaggtcaggagttcaagaccagccttaccaacatagtgaaaccccatctctactaaatacaaaaattakccaggcacggtagcgcatgcatgtaatcccagctacttgggaggctgaggcataagaatcacttgaacctcagaggcggaggtggcagtgagccaagatc

SEQ ID NO: 473641 - DNA, 201 bp, Homo sapiens; identical to SEQ ID NO: 224155

SEQ ID NO: 473642 - DNA, 201 bp, Homo sapiens; identical to SEQ ID NO: 224156

SEQ ID NO: 473643 - DNA, 201 bp, Homo sapiens; identical to SEQ ID NO: 224157

SEQ ID NO: 473644 - DNA, 201 bp, Homo sapiens; identical to SEQ ID NO: 224158

SEQ ID NO: 473645 - DNA, 201 bp, Homo sapiens
atctcagctccgtgaatagaaaagccctaggaagtcaaaagcacactcagaagactccaacacatacttgctggaagacgatgctccatgcatcttgtgtkctgctcacctatgagcagaggcactgactgtcttggcttcacactatcttttcaaagagtttgtagagcaaatagtcttagaagagacagagatggtatc

SEQ ID NO: 473646 - DNA, 201 bp, Homo sapiens
tttgttttgtgttgtgttgttttgtttgagacgcagtctcactctgttgcccaggctggagtgcagtggcatgatctcagctcactgcaacctccgcctcyggggttcaagtgattctcctacctcagcctcccgagtagctgggatgacaggcacccaccaccacacccagctaatttttgtatttttagtacagacggg

SEQ ID NO: 473647 - DNA, 201 bp, Homo sapiens
tccaaaggtgttgtagttggcccagttgccatccccctctgggtagtctgctttgttgccctgctgactggaccagcgatcacccaccgtgcacttcccaygcatgtcattctcgtgcacgctggccaccagggtccagccgccacccccagaagtcatgtcacagaaggtctggtagacaacaccattcttggtgcggag

SEQ ID NO: 473648 - DNA, 201 bp, Homo sapiens
cgaatcctgcaacaaattcccctgaaaaagaagaggtgaagaaacagccaagtagtcaaaggatgaactagaagcagcatcccattggccagtccagggaytccctaagccaaaagctgaggctacagccaaacaccccaggctgtaggggtgcagcccagtacctttatggccagtggctggtgcacgtcagtcctaaac

SEQ ID NO: 473649 - DNA, 201 bp, Homo sapiens
tgcatttggagcaaagcactttttgtttgtttgttttgtgttgtgttgttttgtttgagacgcagtctcactctgttgcccaggctggagtgcagtggcaygatctcagctcactgcaacctccgcctctggggttcaagtgattctcctacctcagcctcccgagtagctgggatgacaggcacccaccaccacacccag

SEQ ID NO: 473650 - DNA, 201 bp, Homo sapiens
accctatctgagaggtaaaatcaccactacatctcctacctcccatcccatttgaaaaccaatgctctagtccacagggagcaatggagaaaaagtgtggkaatgggtttgggaaatgttatgattagatttgcatttggagcaaagcactttttgtttgtttgttttgtgttgtgttgttttgtttgagacgcagtctca

SEQ ID NO: 473651 - DNA, 201 bp, Homo sapiens
tatttctctcttcttctccagcccttccccatatccccaccttccagccctccctcctgcaggctggtggccagccacactccacacctcaccctcacccragtgggagagaagtggcaccaaccttgtagtcatcgctcgtggccgcctctgcagatccaaaggtgttgtagttggcccagttgccatccccctctgggt

SEQ ID NO: 473652 - DNA, 201 bp, Homo sapiens
atccattaaaccgtgagtcaacacagcacatgtctctgtgagcacagggttgggggtagggttacagattaacagcatctcaaggcagaagaatttttctyagcacagaccaaaatggagtctcttatgtctacttctttctacatagacacagtaacagtctgatctctttttcttttccccacaattataagagtatac

SEQ ID NO: 473653 - DNA, 201 bp, Homo sapiens
acaatacctggctttcctagacagaggtccctgcggccttccgcagtgtattgtgtccctgggtacttgagattagagagtggtgatgacctttaacaagyatgctgccttcaagcacttgtttaacaaagcacatcctgcacagccctaaatccattaaaccgtgagtcaacacagcacatgtctctgtgagcacagggt

SEQ ID NO: 473654 - DNA, 201 bp, Homo sapiens
gtgtctccccaacagccccaaaccccttgtccctgtctctttctccccatgctttcctgtcccacaggcctcttccttgctggcttagagtttctgagagrccagacatgagttcacagtgaatcaaaggaaggagaaacagccaaccactcagtagtgatgtggaaccacaggacagatctgccccctaccctagacact

SEQ ID NO: 473655 - DNA, 201 bp, Homo sapiens; identical to SEQ ID NO: 224160

SEQ ID NO: 473656 - DNA, 201 bp, Homo sapiens
gctcttgttgcccaggctggagtgcagtggtgtgaactcagctcaccgcaacctccgcctcccaggttcaagcgattctcctgcctcagcctcccgaggarctgggattacaggcatgcgccatcatgcccagctaatgttttgtatgcaccttttcttaactattattgaaggggtggcctgcccctccacacctgtggg

SEQ ID NO: 473657 - DNA, 201 bp, Homo sapiens
ggtggctcacgcctgtaatcccaacactttgggagaccaaggcaggtggatcacgaggtcaggagatcgagaccatcctggctaacacggtgaaacctgtmtctactaaaaatacaaaaacttagccgggtgcagtggcgggcacttgtagtcccagctactccttgggaggctgaggcaggagaatggcatgaacccgag

SEQ ID NO: 473658 - DNA, 201 bp, Homo sapiens
gacactgcacttcagcctggatgacaggagtgaaactctctctcaaaaaaaaaaaagaaaaagaaaggtatcggccaggcgcggtggctcacgcctgtaaycccaacactttgggagaccaaggcaggtggatcacgaggtcaggagatcgagaccatcctggctaacacggtgaaacctgtatctactaaaaatacaaaa

SEQ ID NO: 473659 - DNA, 201 bp, Homo sapiens; identical to SEQ ID NO: 224163

SEQ ID NO: 473660 - DNA, 201 bp, Homo sapiens
ggtggaggttgcagtgaaccaagattgtgacactgcacttcagcctggatgacaggagtgaaactctctctcaaaaaaaaaaaagaaaaagaaaggtatcrgccaggcgcggtggctcacgcctgtaatcccaacactttgggagaccaaggcaggtggatcacgaggtcaggagatcgagaccatcctggctaacacggt

SEQ ID NO: 473661 - DNA, 201 bp, Homo sapiens; identical to SEQ ID NO: 224164

SEQ ID NO: 473662 - DNA, 201 bp, Homo sapiens; identical to SEQ ID NO: 224165

SEQ ID NO: 473663 - DNA, 201 bp, Homo sapiens; identical to SEQ ID NO: 224167

SEQ ID NO: 473664 - DNA, 201 bp, Homo sapiens
agcgcttgtacccaggaggtggaggttgcagtgaaccaagattgtgacactgcacttcagcctggatgacaggagtgaaactctctctcaaaaaaaaaaaagaaaaagaaaggtatcggccaggcgcggtggctcacgcctgtaatcccaacactttgggagaccaaggcaggtggatcacgaggtcaggagatcgagacc

SEQ ID NO: 473665 - DNA, 201 bp, Homo sapiens; identical to SEQ ID NO: 224168

SEQ ID NO: 473666 - DNA, 201 bp, Homo sapiens
ggaggctgaggcaggagaatggcatgaacccaggaggcagagcttgcagtgagccgagatcgcgccactgcattccagcctgggcgacagagtgagactcygtctcaaaaaaaaaaaaatacaaaaattagctaggcacagtggcgggtgcctgtagtcccagctactcaggaggctgaggcaggagaatcgcttgaacct

SEQ ID NO: 473667 - DNA, 201 bp, Homo sapiens
gggaggctgaagcggggggatcatttgagcccaggagttcaagaacagctgggcaacataaggagacctggtttaaaaaaataaaaataaataaataaatwaaaacttgacattctattatttatttttatagcatattgtatatttcctggtactagggtacaatctccagaaaggcagaaatgtgtacctgacttgttg

SEQ ID NO: 473668 - DNA, 201 bp, Homo sapiens
agctcagggttcatctcagctccgtgaatagaaaagccctaggaagtcaaaagcacactcagaagactccaacacatacttgctggaagacgatgctccaygcatcttgtgttctgctcacctatgagcagaggcactgactgtcttggcttcacactatcttttcaaagagtttgtagagcaaatagtcttagaagagac

SEQ ID NO: 473669 - DNA, 201 bp, Homo sapiens
gagaatcacttgaacctgggaggcagaggttgcagtaagccaagatcacgccattgcactccagcctgggcaacaagagagaaactccatatcaaacaaamaaaaaaaaaaagtcttaaatgctgggcacggtggctcacacctgtaaccccagcactttgggaggctgaggcgggcagattacctgagatcaggagtttg

SEQ ID NO: 473670 - DNA, 201 bp, Homo sapiens; identical to SEQ ID NO: 224332

SEQ ID NO: 473671 - DNA, 201 bp, Homo sapiens; identical to SEQ ID NO: 224397

SEQ ID NO: 473672 - DNA, 201 bp, Homo sapiens; identical to SEQ ID NO: 224358

SEQ ID NO: 473673 - DNA, 201 bp, Homo sapiens; identical to SEQ ID NO: 224362

SEQ ID NO: 473674 - DNA, 201 bp, Homo sapiens; identical to SEQ ID NO: 224365

SEQ ID NO: 473675 - DNA, 201 bp, Homo sapiens; identical to SEQ ID NO: 224440

SEQ ID NO: 473676 - DNA, 201 bp, Homo sapiens; identical to SEQ ID NO: 224442

SEQ ID NO: 473677 - DNA, 201 bp, Homo sapiens; identical to SEQ ID NO: 224280

SEQ ID NO: 473678 - DNA, 201 bp, Homo sapiens; identical to SEQ ID NO: 224375

SEQ ID NO: 473679 - DNA, 201 bp, Homo sapiens; identical to SEQ ID NO: 224341

SEQ ID NO: 473680 - DNA, 201 bp, Homo sapiens; identical to SEQ ID NO: 224376

SEQ ID NO: 473681 - DNA, 201 bp, Homo sapiens; identical to SEQ ID NO: 224380

SEQ ID NO: 473682 - DNA, 201 bp, Homo sapiens; identical to SEQ ID NO: 224345

SEQ ID NO: 473683 - DNA, 201 bp, Homo sapiens; identical to SEQ ID NO: 224346

SEQ ID NO: 473684 - DNA, 201 bp, Homo sapiens; identical to SEQ ID NO: 224385

SEQ ID NO: 473685 - DNA, 201 bp, Homo sapiens; identical to SEQ ID NO: 224347

SEQ ID NO: 473686 - DNA, 201 bp, Homo sapiens; identical to SEQ ID NO: 224349

SEQ ID NO: 473687 - DNA, 201 bp, Homo sapiens; identical to SEQ ID NO: 224348

SEQ ID NO: 473688 - DNA, 201 bp, Homo sapiens; identical to SEQ ID NO: 224351

SEQ ID NO: 473689 - DNA, 201 bp, Homo sapiens; identical to SEQ ID NO: 224353

SEQ ID NO: 473690 - DNA, 201 bp, Homo sapiens; identical to SEQ ID NO: 224355

SEQ ID NO: 473691 - DNA, 201 bp, Homo sapiens
aggaagttgtccgtagcttagccagttgatagtccaagatagatactagcatgagtgagcaagcaaaaaatcaaagcatctactcccagtgtcaaatcatyaattatttctgaggcactgtagccaagcccaagaagcgtgaattgggagggtgaatagttctagacagagcataggagccagtgtgtttcctccctgcag

SEQ ID NO: 473692 - DNA, 201 bp, Homo sapiens
tctagagcagaagggacttggctttggccactacccatccttcctgctgccactggaggtgggagccaggcactgatctgtctatgcagaaccatcccccrtaggatgaggcctgtccttactcatttctcaagaaacaagatgcttccaaaaggtctgtcatcctccagttgaagtctgtgtgcctaccaagaatggccg

SEQ ID NO: 473693 - DNA, 201 bp, Homo sapiens
agtcactatccacatgccagtgtgaaatgggcatctatgacgtggtcagggtgtccattcctaatcatggggcagatgccacaagcattcagaaaggagtytgaaagggtggccacagccccacgtggtgtgccctggaggcttaggttggtctgaggttggcacctcaatctacaccagagcccagggagtcccagaggc

SEQ ID NO: 473694 - DNA, 201 bp, Homo sapiens
acgtgcacggtgagggcaaaagatactgggtggtgaagggtgcctcttccatggtgttcccatgtttccattcttcttcctgactccagggccacttgacycctaagggcccttctttcactctggtcttccagagtgtctcagccttcacttccctttgtgtctctagaaatttacttacactcattattttccatctgg

SEQ ID NO: 473695 - DNA, 201 bp, Homo sapiens
tgacaaccctaagttggataaggagctgcgggcaatgctgagagagaagtttcctgagttctgcagctcaccctccccacctgtggaaggtatgaggcccrcccattccatcacctgtgtcaaaagaggggcaagacaaccaggccttcaggccagagcccctttcaggatgtcccacacagttctccacttccgtgacac

SEQ ID NO: 473696 - DNA, 201 bp, Homo sapiens
tttggaaagatattatccataatcctcaggccttgagtcctcagttcacaggtaagtagggtcttaggcatcctgtccttgagagctgggagttcaatgtstatgtcttgcttgaatcaagaaggtagaggttggtgggtaggagagtctttggtggtcagatttaggaagcctgggacagggcaagctttgccaagtaca

SEQ ID NO: 473697 - DNA, 201 bp, Homo sapiens
atattttttcctgtcgttaacatctgcttattctgcccttcccccaacgtgacttacaaatgagcagctcccctgggatctgggcttcctctcgactttasccccctgcccaccaggagctgccctcggaggtggggaggtggggaccggacatccctgtttcctgctgccacagcagttctaatccctggtggctcctgc

SEQ ID NO: 473698 - DNA, 201 bp, Homo sapiens
ttgtaaccaagtccatgagagttcttatccagaagagcatggcctgtagtttgcagattctgccattggcaggtgaatagaaagcaggcttaaaattttartaggtaggatttagatgagacagcttaatgttacatgattgatgcagtaaataatgtagtgattaggagaacactggagtatactggagtcagacttcct

SEQ ID NO: 473699 - DNA, 201 bp, Homo sapiens
tgtcagtcctgtgtattttacactatcaggaaagctggttctggggctgggaagttaaggggagagaattgtactccaccctggtgcggtctggggcagtrtctttctggatctgtcctacctctgtaacatccctgcttggggtgctggtagtcagtggattgggggtgtgtgtgtgtgtgtgtgtgtgtgtgtgtgtgt

SEQ ID NO: 473700 - DNA, 201 bp, Homo sapiens
ggagaacactggagtatactggagtcagacttcctgaggaatattgtatgaaaacttgtctggggttcttcacaaactgaagagtcccctttatgtggaayggttcaagtaggttccctccttgaggtgagggactaggcagggtgatctctttgaattctgtgagataacttggatgtcagagatggtgtcatttgttca

SEQ ID NO: 473701 - DNA, 201 bp, Homo sapiens
aagaggcagaaacttaggggtttccctcctttcttagggtcagacgctcttagggtccacttcttcaggggcggaagcctctcctacccttcccatagggrcacaggcctttaccccactgtacttcggagccaacgcctttccctcagcactgccaccccagagtcaggacccagaggactgtgccttcgcccccaacgc

SEQ ID NO: 473702 - DNA, 201 bp, Homo sapiens
tcctgacaacgtgcacggtgagggcaaaagatactgggtggtgaagggtgcctcttccatggtgttcccatgtttccattcttcttcctgactccagggcsacttgacccctaagggcccttctttcactctggtcttccagagtgtctcagccttcacttccctttgtgtctctagaaatttacttacactcattatttt

SEQ ID NO: 473703 - DNA, 201 bp, Homo sapiens
acatctgtggggtagtccacccttctaatgaagtactgagttcagatatcttgccccggtgggccatcattggttggctcctgacaacgtgcacggtgagrgcaaaagatactgggtggtgaagggtgcctcttccatggtgttcccatgtttccattcttcttcctgactccagggccacttgacccctaagggcccttc

SEQ ID NO: 473704 - DNA, 201 bp, Homo sapiens
tttaatgcagctattttcatccttgtttaactggagaccctggtactttttttttggacagagtctcattctgtagcccaggctggagtgcagaggtgcartcttggctcactgcaacctctgactcccaggttcaggcgattcctctgcctcagccttccaagaggctaggactacaggtgcgcgccaccacacctggct

SEQ ID NO: 473705 - DNA, 201 bp, Homo sapiens
gcttcaactccgaagagaaaagtgagttccacttctggggctcttcagccctcaattttaacatcccaagagctgctgtggtctaaagggcttctgtcctsctccttattgccatattttttcctgtcgttaacatctgcttattctgcccttcccccaacgtgacttacaaatgagcagctcccctgggatctgggcttc

SEQ ID NO: 473706 - DNA, 201 bp, Homo sapiens
taatccaccctccctctgcctcccaaagtgctgagattacaggcgtgagccaccgcgcccagtccaattgtctttcattctttttttttttttttttttttgagacggggtctccctctgtcgcccaggctggagtgcagtggcacaatctcggctcactgcaagcttcgccgaccgggttcacaccattctcctgcctca

SEQ ID NO: 473707 - DNA, 201 bp, Homo sapiens
ttctataaaggggagagtgaaagtgttcacgctaagaaacccacgattgctccaggagaaccatgaggtctcaggaagaaagctatgtatgtttccagacytgactgaataatggcagaattacttgagcatgttaaagatgcagcttcctggatcccactctcctagataatttgattgaggaatttgtggggttttttt

SEQ ID NO: 473708 - DNA, 201 bp, Homo sapiens
agtttatctaaagtagtcactaaaccaataattatatagaaatactagtatcatttacaagtgtgaaatattctataaaggggagagtgaaagtgttcacrctaagaaacccacgattgctccaggagaaccatgaggtctcaggaagaaagctatgtatgtttccagacttgactgaataatggcagaattacttgagca

SEQ ID NO: 473709 - DNA, 201 bp, Homo sapiens
agctcctggtttttcttctgccaaagagggaccaatcacttttaaatcaggctgaaagcgggaggcccaagagcgtcctctttttttttttttttttttttgagatggagtctcactctgtcgcccaggctggagtggtgcagtggtgggatcttggctcactgcaagctctgcctcccgggttcacaccattctcctgcc

SEQ ID NO: 473710 - DNA, 201 bp, Homo sapiens
ccacttctggggctcttcagccctcaattttaacatcccaagagctgctgtggtctaaagggcttctgtcctcctccttattgccatattttttcctgtcrttaacatctgcttattctgcccttcccccaacgtgacttacaaatgagcagctcccctgggatctgggcttcctctcgactttacccccctgcccaccag

SEQ ID NO: 473711 - DNA, 201 bp, Homo sapiens
tacagccaaaaatatctggttggcagaaagtgttctggatatcctgacagagcaaaggtagcatccaccacgaagggtggggtacaggccagataatggccattaggagtgtgggtgtgggaaatggggatgaaaggattgtgtggcccaagaacaccttaagttagagagggggaggcaaggagagggagagacaagtgt

SEQ ID NO: 473712 - DNA, 201 bp, Homo sapiens
cctaatctcatgagccttggtagctcctggtttttcttctgccaaagagggaccaatcacttttaaatcaggctgaaagcgggaggcccaagagcgtcctytttttttttttttttttttttgagatggagtctcactctgtcgcccaggctggagtggtgcagtggtgggatcttggctcactgcaagctctgcctcccg

SEQ ID NO: 473713 - DNA, 201 bp, Homo sapiens
tatcctctttcctggcacttcttccctgtttggcacttccagcccctgcttcttatcccaagactggtatggcattgctgtgtgttaattctgccccacaragtttcatagcaagcactaaagactgttacctggaaataagaaactcttggcctgttgggggcctcagtgcaggactcaggacatccagttgctagactg

SEQ ID NO: 473714 - DNA, 201 bp, Homo sapiens
aagaccttagggtccagggttgaagaaaaagaaggcctaggcctgggggcagagaagaggatgggaggtgccgtaggagcagcaggctcccactcaaagarctaccgctccttttccttagattcagtgatctcttctccctggcggaggaatatgaggactcttccaccaagccacccaagagccggcgaaaagcagctc

SEQ ID NO: 473715 - DNA, 201 bp, Homo sapiens
atgaagaaatctgcctgggcctgtttactctcatcctcactgaacctgcccaagcccagaaggtaaggcaccctgctctggacccataaaccctcctcatrtatgatctgggatatggtggaacttacagtttaactggggtagtatgaaactcttcgaccagagctggatcaccttgttctccaaatatagttacaagtc

SEQ ID NO: 473716 - DNA, 201 bp, Homo sapiens
gtcgcccaggctagacccaggctagagtgcagtggcgcgatctccgctcactgcaaactccgcctcccgggctcacaccattctcctgcctcagcctcccragcagcagggactacaggtgcccgccaccgtgcccggctaatttttttgtatttttagtagagacggggtttcaccgtgttagccaggatggtctcgatc

SEQ ID NO: 473717 - DNA, 201 bp, Homo sapiens
ccctttactggggccagaatgagggacaaactatgtcacagaacagaccctgacatttaggttttattctcatcttggcatcggtgacatctgtctgagcyatcgcatattcaagcggctactcccaagattgcatgtgtttgtttaaaagtgacctgctactacctcaccattagcccactgggacttgcttcctcttta

SEQ ID NO: 473718 - DNA, 201 bp, Homo sapiens
ggaacctgttttctctgttaccaagcctgcggagcagcaggaagtttgccttttgggtagggaaggagcaggctggtgtctagcctccagctggtcctccrtatgtgccagcagcccccctcacatggattctcaaatataaccctcttcttgtaggtccctggaggagtctgtaggaaagcctctgtacctaatatttag

SEQ ID NO: 473719 - DNA, 201 bp, Homo sapiens
caggtaagtagggtcttaggcatcctgtccttgagagctgggagttcaatgtgtatgtcttgcttgaatcaagaaggtagaggttggtgggtaggagagtytttggtggtcagatttaggaagcctgggacagggcaagctttgccaagtacaactgcgaatggcagaggtacagaacaattcatgtagttcctagacagc

SEQ ID NO: 473720 - DNA, 201 bp, Homo sapiens
cacagtcagggagatgcttcaggcactcacacagcattgaggaaacaggtgcacacttagggcatgtgaggaaggggataagtcattgaggggactgtctytgttgctggcatctgggcaaactgacttctttcccaaatcactccctttaggaaagaagagggagtttcgcttccaccctatcaaggagacagttgtgga

SEQ ID NO: 473721 - DNA, 201 bp, Homo sapiens
tcgtggctgttattgactctgcacaggtgaacattgagctctgacctccccagaagatctgggaggcagcattagggacatagggcctctgctctccctcmaggcctgcagacagggagcccatgcctcccaggcaccctccctcctggctacagtggtgtgcgctttcagccatggggcctgggaaggaaaagtggaaca

SEQ ID NO: 473722 - DNA, 201 bp, Homo sapiens
ttaggtgcctgggagaggagaggagggcagggtgtcagtcctgtgtattttacactatcaggaaagctggttctggggctgggaagttaaggggagagaaytgtactccaccctggtgcggtctggggcagtatctttctggatctgtcctacctctgtaacatccctgcttggggtgctggtagtcagtggattgggggt

SEQ ID NO: 473723 - DNA, 201 bp, Homo sapiens
taacaataatgttctgttgcccaggctggagtgtagtggtaccatcatagctcactatagccttgccctcctgggctcaagtgatcctcccacctcagccycctgagtaactgggaccacaggcatgcacaaccatgctcagctaatttttttcttatttatagagatgggggtctccctatattgcccaggctggtctcg

SEQ ID NO: 473724 - DNA, 201 bp, Homo sapiens
catttgcccaggctacccagctgggcgatctgcacacctgcctgatgatggacatgaaggcctgccaggaggacgatgtgcggctcctgtgccacctcacrccctccatctacacagaggtcagtgcctgcatccgtatctgtgccggggggctcacaggaacacacctcagtgaacactctgagtacacacaaccctgaa

SEQ ID NO: 473725 - DNA, 201 bp, Homo sapiens; identical to SEQ ID NO: 201850

SEQ ID NO: 473726 - DNA, 201 bp, Homo sapiens
tcccctgttctaggcacacctttctcacccaaccccagccctcccaggctgcctatcctgttccccatgtaggctgcctctgtcttaagggggccctggcrggtggagggtgtctcgcactctggaaccctcccacactcagactctggctctggtgattcctgcacagcctgaggagctctagcagcaagctggcccagc

SEQ ID NO: 473727 - DNA, 201 bp, Homo sapiens
tactctgtgccaccttatgctcttacacaggatagacataggcaacctgaggataatggtaaaggagaagcatgattgtcttttatcctttttttttttttgagatggagtcttgctctgtcacccaggctggagtgcagtggcgcaatcttggctcactgcaacctctgcctcccagattcaagcaattctcctgcctca

SEQ ID NO: 473728 - DNA, 201 bp, Homo sapiens
tgacacttcctaagatgggaagtgggggggacagggatagtactaggagccttgcccagcaggcttttctctcccctgcccccgagacagagtttcgctcygtcgcccaggctagacccaggctagagtgcagtggcgcgatctccgctcactgcaaactccgcctcccgggctcacaccattctcctgcctcagcctccc

SEQ ID NO: 473729 - DNA, 201 bp, Homo sapiens
tgtatctgactgggtcagtactggtctaaaaacctctttgggatcctttttggcttgttcaaccaaacccattttgcagtgaccttttactgactggcagrtgaaaagcagatggcctccacctggttttgctcagcctgtggcatcaaacagtatgacacttcctaagatgggaagtgggggggacagggatagtactag

SEQ ID NO: 473730 - DNA, 201 bp, Homo sapiens
ttttacttttctttgagactctccacttctcttttcctcactgagggtgtgcatgtgcgtgtgtgtgtgtgtgtgtgtgtgtgtgtgtgtgtgtgtgtgtttcatctgctgcttttccaagctggtcagcaaaccgacacagaggtcggtaacacaactggcagccttaggtgtatgaaactctcggttctcatttgttac

SEQ ID NO: 473731 - DNA, 201 bp, Homo sapiens
acttttacttttctttgagactctccacttctcttttcctcactgagggtgtgcatgtgcgtgtgtgtgtgtgtgtgtgtgtgtgtgtgtgtgtgtgtgtgtttcatctgctgcttttccaagctggtcagcaaaccgacacagaggtcggtaacacaactggcagccttaggtgtatgaaactctcggttctcatttgtt

SEQ ID NO: 473732 - DNA, 201 bp, Homo sapiens
tcacttttacttttctttgagactctccacttctcttttcctcactgagggtgtgcatgtgcgtgtgtgtgtgtgtgtgtgtgtgtgtgtgtgtgtgtgtgtgtttcatctgctgcttttccaagctggtcagcaaaccgacacagaggtcggtaacacaactggcagccttaggtgtatgaaactctcggttctcatttg

SEQ ID NO: 473733 - DNA, 201 bp, Homo sapiens
tgagtttatttattttctatttggtgtctgaactaaacagctgggagcaggcctggctggggaactgtggcaaggagggaggctaaggtagagtcctaagytgtgcaggtgctggcagtcaatagataaaggtaatgggaaagggtctaatgtcaaggtctgtcttcatcaaagggtcaaggactcaggcccaggcagctc

SEQ ID NO: 473734 - DNA, 201 bp, Homo sapiens
agtatagaaagtcaataatggactgcctttgatccctccatcagtttgagtggagggcaaaagacccaggggttgaaatccccaccctgattcttagaggygtcattgtgtctctgctttaattcaattcactgaatagtacagcatcctgttcttctgagcagtgacgtgtttgctactaaatgaaatgatgcagcagga

SEQ ID NO: 473735 - DNA, 201 bp, Homo sapiens
ccattcccatcccaatttggggagggaatgagataaaaatagtgccagagattgaaggagtttagaacatgtagttcctaatctcatgagccttggtagcycctggtttttcttctgccaaagagggaccaatcacttttaaatcaggctgaaagcgggaggcccaagagcgtcctctttttttttttttttttttttgag

SEQ ID NO: 473736 - DNA, 201 bp, Homo sapiens
tgaacaggtgaacaagagaattcagttaaggagaaagcaggtcagtattgggaaagagtagaggatgcatggggtggattttgtctcacttgtaccttcttgatttgcatcagccctcttggcagcccttaggaatgtttatatcctttgagtttatttattttctatttggtgtctgaactaaacagctgggagcaggcc

SEQ ID NO: 473737 - DNA, 201 bp, Homo sapiens
caaaaataatgtggggaagtgagactcaggctaagatacctctggaggtttatgcagtggagtcagaaataccttgttagagatgaaggtgcatcaagatstggtgttttccatcattcatcaacagatgagggtagaaaggagggggagttagtgtaaaatagccctaattcctagaaatgctacctgttaagctggcat

SEQ ID NO: 473738 - DNA, 201 bp, Homo sapiens
ttgaacaggtgaacaagagaattcagttaaggagaaagcaggtcagtattgggaaagagtagaggatgcatggggtggattttgtctcacttgtaccttcttgatttgcatcagccctcttggcagcccttaggaatgtttatatcctttgagtttatttattttctatttggtgtctgaactaaacagctgggagcaggc

SEQ ID NO: 473739 - DNA, 201 bp, Homo sapiens
attgaacaggtgaacaagagaattcagttaaggagaaagcaggtcagtattgggaaagagtagaggatgcatggggtggattttgtctcacttgtaccttcttgatttgcatcagccctcttggcagcccttaggaatgtttatatcctttgagtttatttattttctatttggtgtctgaactaaacagctgggagcagg

SEQ ID NO: 473740 - DNA, 201 bp, Homo sapiens
tgaacagcctctgcccttccctcacagagcacccagaggccctgtcctgcctactgcttcaactccgaagagaaaagtgagttccacttctggggctcttyagccctcaattttaacatcccaagagctgctgtggtctaaagggcttctgtcctcctccttattgccatattttttcctgtcgttaacatctgcttattc

SEQ ID NO: 473741 - DNA, 201 bp, Homo sapiens
tcatagtttcttcaaccctctttccttccctccctagaacatgttgttcctttgtcctccctccagcaggtaaacaatccatgtttttattctctttcctrtcccccacttcctcttccctatcaagttcatggaatgtctgatgattggtcgggatctcgtaagactacttcagaatgttgctaggataccagaatttga

SEQ ID NO: 473742 - DNA, 201 bp, Homo sapiens
gccttcactcttgattttaactgacatgtcagttaaatgctactgcattccagcctgggtgacagagcaagagtctgtctcaaaaaaaaaaaaaaaaaaaaccaaaaaataaaaaataaaaacataaaaataaaatcaagagtgggatggctgttgcccacaagactgacattagcaggactgctgacatccatcctatcc

SEQ ID NO: 473743 - DNA, 201 bp, Homo sapiens
tcacggtggagccacgccttctaggtaagcaacgtgtatgaagatgctgcattggcccacagaaggcaaaaggtgagaggattttgaattaaagggaccarcctcgcaaaggaacagtacatagtggaaaagggaagagatagacgtgatatcacatctggctagacgtgataaactccgctttttaaaaaaatttccccg

SEQ ID NO: 473744 - DNA, 201 bp, Homo sapiens
ggccttcactcttgattttaactgacatgtcagttaaatgctactgcattccagcctgggtgacagagcaagagtctgtctcaaaaaaaaaaaaaaaaaaaaccaaaaaataaaaaataaaaacataaaaataaaatcaagagtgggatggctgttgcccacaagactgacattagcaggactgctgacatccatcctatc

SEQ ID NO: 473745 - DNA, 201 bp, Homo sapiens
ggaagcggaggttgcagtgagccaagattgtgccattgcactccagcctaggcaatagagcgagaatccgtctcaaaaaaaataaaaacaaaaacacacacacacacacacacacacacacacacacacacacacacacagacacacaaccagtccacccagcaattccaccctgggaatctgtctcagaaatagtcactc

SEQ ID NO: 473746 - DNA, 201 bp, Homo sapiens
ccaggaagcggaggttgcagtgagccaagattgtgccattgcactccagcctaggcaatagagcgagaatccgtctcaaaaaaaataaaaacaaaaacacacacacacacacacacacacacacacacacacacacacacacagacacacaaccagtccacccagcaattccaccctgggaatctgtctcagaaatagtca

SEQ ID NO: 473747 - DNA, 201 bp, Homo sapiens
aacccaggaagcggaggttgcagtgagccaagattgtgccattgcactccagcctaggcaatagagcgagaatccgtctcaaaaaaaataaaaacaaaaacacacacacacacacacacacacacacacacacacacacacacacagacacacaaccagtccacccagcaattccaccctgggaatctgtctcagaaatag

SEQ ID NO: 473748 - DNA, 201 bp, Homo sapiens
gaacccaggaagcggaggttgcagtgagccaagattgtgccattgcactccagcctaggcaatagagcgagaatccgtctcaaaaaaaataaaaacaaaaacacacacacacacacacacacacacacacacacacacacacacacagacacacaaccagtccacccagcaattccaccctgggaatctgtctcagaaata

SEQ ID NO: 473749 - DNA, 201 bp, Homo sapiens
ttcggacagtctaagcttctaagagtcttcgattctttccctctcgcagaagaagctccgtctacagcctcctcaactcctgattccacagaaggtaagtkgtggggagcatgtgaaggggctcagggctgggcagctcagggacctgctgagggaaacaaggctctccttcacccactgcaggagggaacgacgactctg

SEQ ID NO: 473750 - DNA, 201 bp, Homo sapiens
aaagagtgtcagctctaggagggcagggattttgtctgttttcttcacagctgtatccccaggacctagaacagtgcctggcacatagtaggtgctcaatmagtggttgttgaacgaatgaatgaattgaaacctcctaagattcctactttgaagactctaagattaagattcctggatttggacttcaaagactctgag

SEQ ID NO: 473751 - DNA, 201 bp, Homo sapiens
tgaacccaggaagcggaggttgcagtgagccaagattgtgccattgcactccagcctaggcaatagagcgagaatccgtctcaaaaaaaataaaaacaaaaacacacacacacacacacacacacacacacacacacacacacacacagacacacaaccagtccacccagcaattccaccctgggaatctgtctcagaaat

SEQ ID NO: 473752 - DNA, 201 bp, Homo sapiens
aaagatctttctcttgcttcttgtggaaataagaactgttatggtcttactagtaagcagtgtttcaaaatttatgacattaaaaaaatatatatgaccgrgcgcggtggctcatgcctgtaatcccaacactttgggaggccgaggtgggaggatcacttgaagccaggaattcaacctgggcaacatagcgagacccta

SEQ ID NO: 473753 - DNA, 201 bp, Homo sapiens
aggggccagacgggccagaacagctgcggggaggccccctccccccagcgtgcctaaacttagcccccgcctcaggcgacctggcccctcccccatccacyggcgccggccactaggagcctgcctgggagggccctgctatggggagggaggggctgccctatttggaggtaaatgagaggagatgcattggaaggagac

SEQ ID NO: 473754 - DNA, 201 bp, Homo sapiens
ctgggacttgtagttgcctagacagggcaccaccctgcacttccggacccgccgctggaggcgccgtgaggcgttggtgtctcctggatgctactagcccmaacgccggggctttgcatggggcccaggggaggcctgagcttggatttacactgtaataaagactcctgtggaaaacccgaggcctcttgtgcttccaga

SEQ ID NO: 473755 - DNA, 201 bp, Homo sapiens
cagggcaccaccctgcacttccggacccgccgctggaggcgccgtgaggcgttggtgtctcctggatgctactagccccaacgccggggctttgcatgggkcccaggggaggcctgagcttggatttacactgtaataaagactcctgtggaaaacccgaggcctcttgtgcttccagaaccctccagttgttcacctttc

SEQ ID NO: 473756 - DNA, 201 bp, Homo sapiens
cctggtagaagacctcgtggattccctcaaggtggcctggagctctcagcccctcctgggttcccccattcacctctgcatggctagggggtgggagggcsactgttgggtaaattcacagcatgagagggaattcccggtgggctctgctgaccctgaccttcacccccagctggccctcctcttctacatcttgacctt

SEQ ID NO: 473757 - DNA, 201 bp, Homo sapiens
cgcgcacttggctctgttgctgctctgcggcaccatctctctcagggtttaccgcaaagtgctgcaggccgtgcaccggggggatggagccaaccctttcmagtgagaacccccggcccctgacctgagcccctgtcctgaccctaaagcatgacccacgacctcaaatcaggcaccgactcccacccggaccccgactca

SEQ ID NO: 473758 - DNA, 201 bp, Homo sapiens
ccgagccttttcccggtgggtgtcaggatcactcccactagggactctgcgctaattacctgagcgaccaggactacatttcccaagaggctctgctccargagtccaggaaagacgaggcaccttggccgcggggcctgctgggacttgtagttgcctagacagggcaccaccctgcacttccggacccgccgctggagg

SEQ ID NO: 473759 - DNA, 201 bp, Homo sapiens
acagagtatggcccaactcactgaccctataactggcatctctggcatctaatgtattctatgaagtttagagccgggggtggcgtggtgggccactcttmacaactcctaatttggaggttggggaggaagcagcctcctatgtgactaaagagaagaaacccctccaatcccttctttcacctttctttggtctcccca

SEQ ID NO: 473760 - DNA, 201 bp, Homo sapiens
gcggaggttgcagtgagccaagattgtgccattgcactccagcctaggcaatagagcgagaatccgtctcaaaaaaaataaaaacaaaaacacacacacacacacacacacacacacacacacacacacacacacagacacacaaccagtccacccagcaattccaccctgggaatctgtctcagaaatagtcactccagg

SEQ ID NO: 473761 - DNA, 201 bp, Homo sapiens
aagcggaggttgcagtgagccaagattgtgccattgcactccagcctaggcaatagagcgagaatccgtctcaaaaaaaataaaaacaaaaacacacacacacacacacacacacacacacacacacacacacacacagacacacaaccagtccacccagcaattccaccctgggaatctgtctcagaaatagtcactcca

SEQ ID NO: 473762 - DNA, 201 bp, Homo sapiens
tgagtggtggtgcacacctgtagtcccagctactgaggaggctgacgtgggaggatcacttgagcccaggagatcgaggctgcagtgagctatgattgcaycactgcctccagcctgggtgacagagtgagaccctgtctctcaaaaaaaaaaaaaaaaaaaggaaatcaggttatgctcaaacaggtgtgtcgagaagtc

SEQ ID NO: 473763 - DNA, 201 bp, Homo sapiens
accaggtgagtgtgacaccctcagttgtcagcaccccagctaaacatgggggtctgaccatctccttccagaaccggggtcccattgacagatgtcccggscagacacaggtgtcctggctgcagcaccttcccaatacaaccagagtctaagtaacatgtcttatcagcatcagccagggacaggctttttgtttgtttt

SEQ ID NO: 473764 - DNA, 201 bp, Homo sapiens
gcctcacacgtataatcccagcactttggagggctgatgcaggaggataacttgaggccaggagttcgagactagcctgggcaacacagtgagagccaccyacctctaaaaacagaaacaaaaacaaaaattagctgagtggtggtgcacacctgtagtcccagctactgaggaggctgacgtgggaggatcacttgagcc

SEQ ID NO: 473765 - DNA, 201 bp, Homo sapiens
agcaccaggtgagtgtgacaccctcagttgtcagcaccccagctaaacatgggggtctgaccatctccttccagaaccggggtcccattgacagatgtccsggccagacacaggtgtcctggctgcagcaccttcccaatacaaccagagtctaagtaacatgtcttatcagcatcagccagggacaggctttttgtttgt

SEQ ID NO: 473766 - DNA, 201 bp, Homo sapiens
aaaaaaataaaaataaaataaaataatttttaaaaaattgcaaatcgggctgtgtgctgtgcctcacacgtataatcccagcactttggagggctgatgcrggaggataacttgaggccaggagttcgagactagcctgggcaacacagtgagagccacctacctctaaaaacagaaacaaaaacaaaaattagctgagtg

SEQ ID NO: 473767 - DNA, 201 bp, Homo sapiens
ccgaagagccattgctggaagaggaagaaaagcagtgggggccactggagcgagagccagtaaggggacagtgcctcgatagcacggaccaattagaattmacggtggagccacgccttctaggtaagcaacgtgtatgaagatgctgcattggcccacagaaggcaaaaggtgagaggattttgaattaaagggaccaac

SEQ ID NO: 473768 - DNA, 201 bp, Homo sapiens
tcagctgcccctgcaccagtctgagctggtcacccactgagtcgccccacactcctttgtccccgcagggcctacctggatgtggacctcaccctgactcrggagcagacggaacgtttgtcccaccagatcacctcccgcgtggtctcggcggccacgcagctgcggcacttcttcctggtagaagacctcgtggattcc

SEQ ID NO: 473769 - DNA, 201 bp, Homo sapiens
gctggacgggggctgaggtcggcggaacggggtccaaactcgcccttatctcctgcacatccggagcatttttattactgatctgcttccgcagcgctgcmggctggggctagggggccgaggggcagtatagggaggacccagagggagcatggggtcccttctccttcgagccagcactttggggcccaggagcaggga

SEQ ID NO: 473770 - DNA, 201 bp, Homo sapiens
cgcttgaatctgggagatggaggttgtagtgagccaagattgcgccactgcactccagcctcggcgacagagcgagattctgtctcaaaaaaaaaaaaaagaaagaaatgattgaggggaagatgctgacagaccacccattccagggttagccaagccttggcagccacttcccatgcctgtgctcaaggcagacatcac

SEQ ID NO: 473771 - DNA, 201 bp, Homo sapiens
ccgcgtggtctcggcggccacgcagctgcggcacttcttcctggtagaagacctcgtggattccctcaaggtggcctggagctctcagcccctcctgggtycccccattcacctctgcatggctagggggtgggagggcgactgttgggtaaattcacagcatgagagggaattcccggtgggctctgctgaccctgacct

SEQ ID NO: 473772 - DNA, 201 bp, Homo sapiens
aaacaaactgaatgacccagcaataggtacatggttaaataaaatgaatgagagcacaggagcacagccacaacacagaatactatgcagctctttaaaakaatgaattaaggccaggcgcggtagcacatgcctgtaatcccagcactttgggaggccaaggcgggtggaccacgaggtcaggagttcgagaccagcctg

SEQ ID NO: 473773 - DNA, 201 bp, Homo sapiens
tggtggggagcatgtgaaggggctcagggctgggcagctcagggacctgctgagggaaacaaggctctccttcacccactgcaggagggaacgacgactcygattttcgagagctgcacacagcccgggaattctcagaggaggacgaggaggagaccacgtcgcaggactggggcaccccccgggagctgaccttctcct

SEQ ID NO: 473774 - DNA, 201 bp, Homo sapiens
gtatataaatcaatccactcagggactcggtgaccaatgccagtgccttctgttctcaccctaccccacaacacacacgtatgcaaactcactcaaagatyaaccatcgtgcccaggacacggcctcactgccagatacttgtgcgttccacctgacatcactctccatacagagtatggcccaactcactgaccctataa

SEQ ID NO: 473775 - DNA, 201 bp, Homo sapiens
agctactcgggaggctgaggcaggagaatcgcttgaacccgggaggcagtggtggcagtgagctgagattgcaccactgcagtccagcctgggccacagarcaagactccgtctcaggaaaaaaaaaaaaagaaagaaagaaaaagaaaaaaaaaagaacaagaaaaaaataaataaataatccaaaaattagccgggcat

SEQ ID NO: 473776 - DNA, 201 bp, Homo sapiens
ctgattgccttatttaagtatgaagcctcctgtctttccagagttttaaggttcagaactggcagggtagatagtctgctaaagaattgtcctacattgtrctgagggtaggacttgtccttttaagatcccctttcccctttacgtatattgctaaaaattgagtaaatctttatggagctaaaattttatctggccttc

SEQ ID NO: 473777 - DNA, 201 bp, Homo sapiens
aaagaaatgaggaatcaaagatatactcaaatgtttgggcagggaaatgcattggatctgattgccttatttaagtatgaagcctcctgtctttccagagktttaaggttcagaactggcagggtagatagtctgctaaagaattgtcctacattgtactgagggtaggacttgtccttttaagatcccctttccccttta

SEQ ID NO: 473778 - DNA, 201 bp, Homo sapiens
atcccagaatcgcgatttttaatggcattctaaaaatggaaatttccacagatttttatctgtgcctgagtatctttcttcatagattttcttttcttgcyatgaaaaatatattctctagctcttggccagtaaacagactatttctactgtcaatcaagatagaaatgaaacaaggcatgaaagcaatttgactcttgt

SEQ ID NO: 473779 - DNA, 201 bp, Homo sapiens
ttttcatcaagaaaagaatttggctttctaccagtagattaagcattattttcatacttggagctaattgtttacctacttctctccctatatgcaatcayagaacctatatattgatttctgcgaggagtcccaacattgaagtggtgatcacgtttaaaccaaccattttggaacagttagtttccctgttatacttgc

SEQ ID NO: 473780 - DNA, 201 bp, Homo sapiens
aaatagtagccattgtagggttattaattggccttatttcaatgtagttgtgtctcaaggaacagggaggcccaagaagagggagaaacattgcgggggtsggggagggcaggagcagtcagaacacacagaacatttcttgattaagtttgcccatattatttgggcatcctttgtggcactccaaaataattaaaatac

SEQ ID NO: 473781 - DNA, 201 bp, Homo sapiens
cagcctgggcgacagagtgagactccatctcaaaaaaaaaatagtttaaatgatagctaataaggttaccatatgtaagggaagaaaacacaatttaaagytattttgtatgagaccagttaggatgagttttaattgatgaatatgaaaataaactgcaggcagataaatagaaaagcccttaaggttgtgagataatgg

SEQ ID NO: 473782 - DNA, 201 bp, Homo sapiens
actgatagccttcagctacaaaaagataggactgacctggtttaaagtgttctattttgtaaatcattccatttgagtctttctgatgaacttggctataytgaaatctgttattttagtgaggctccaaaatgagcaaagctaggcctgattagagtagagtgactattaaaaaacataactttctaggagctataaatc

SEQ ID NO: 473783 - DNA, 201 bp, Homo sapiens
tttaagcagacgatgctgtaaaaactaacggcttctctgatatttattgtaagttttagtactgatctccttttccagtgctgcacactcctggtttggamctttaatagcgttgcaacgaaatcctatatccagtttcctgtaatttaattgaagaaaaatacatccaaataaagactttattattaacagaccagatag

SEQ ID NO: 473784 - DNA, 201 bp, Homo sapiens
taattataatgttatattgtgttgctaatagcaatttcaaaagaaaaccagactatagacagaaagacttaaaatttcatgtaatgcattttcatcaagaraagaatttggctttctaccagtagattaagcattattttcatacttggagctaattgtttacctacttctctccctatatgcaatcatagaacctatata

SEQ ID NO: 473785 - DNA, 201 bp, Homo sapiens
cactctgtcttttcaggatattcgatattcagggaatttataggtaaggacagagaaatgtatgtgattataaggcaactttaaaggaaaaagataaaaaraagactatgaatggcacgaaatgcaggttttggaatatgattaatgttttattcataggtgaaaatggcattacggacatcaggacatctcttactggga

SEQ ID NO: 473786 - DNA, 201 bp, Homo sapiens
ttgcctatttttaatggcaaataagcatcagtcagggcaatgcccaaatattgtttactgatctgttcctcagaggagcttttatttgagaccctgtctcaaaaaaaaaaaaaaccgacgtggaagtgctgtaaatgcgtattacttagtataataagccaatctaaaaaggctacatattatatgattgcagctatagga

SEQ ID NO: 473787 - DNA, 201 bp, Homo sapiens
gcatgagcctcagtttgattctttgaaacagtcttaaattgccattttttgtattcttgaatatgttctaaaatagcaatctttctgctgtttcacatcasactttaattttttagggtcaattgaaaaaaactgcttgccgctttagaaaaaaatgattctcaaatcatgaaatgctaagttgtgctctggtatcaaatg

SEQ ID NO: 473788 - DNA, 201 bp, Homo sapiens
agaaacaaattattagccattaattataatgttatattgtgttgctaatagcaatttcaaaagaaaaccagactatagacagaaagacttaaaatttcatrtaatgcattttcatcaagaaaagaatttggctttctaccagtagattaagcattattttcatacttggagctaattgtttacctacttctctccctatat

SEQ ID NO: 473789 - DNA, 201 bp, Homo sapiens
gcttttctgcattttaaaaaagtgaggcaatacaacctacttgtaagttgtaaggattagaaatgactcttaaaatgtctaggatggagttaacaggtctrtctgactgggcttgggcttgtttcattctatcaagcagcttccacaactgccatatgtgaattacaacttttctaataaaaataacagtatttacaatca

SEQ ID NO: 473790 - DNA, 201 bp, Homo sapiens
aagcaaggaatacaatttatgagcatggaaaaagagaagtacttgtgcttcaaggtattttgcatatgttatcaacctttctatgagaatataaacttagraagttatacctacttatctccctctgatccctagataatttatgggtagctagatatttaagcttagcatttcttttctaggtgtggttgacctgcctga

SEQ ID NO: 473791 - DNA, 201 bp, Homo sapiens
aggtcctatttctggtttttgcctgtctactgatctgctactgttgtattagataactaggcttcttgcttttttctgtttttttggcctgtctactgatstgctactgttgctttagttaactagcttcttgcttttatgtcacagtcatctgtcatagagtctttcttctatccaattataattttgagtattttgtag

SEQ ID NO: 473792 - DNA, 201 bp, Homo sapiens
cttgaacaaatagtagccattgtagggttattaattggccttatttcaatgtagttgtgtctcaaggaacagggaggcccaagaagagggagaaacattgygggggtgggggagggcaggagcagtcagaacacacagaacatttcttgattaagtttgcccatattatttgggcatcctttgtggcactccaaaataatt

SEQ ID NO: 473793 - DNA, 201 bp, Homo sapiens
ttcttaaaataagacaacagtgaagtttgctgcatcaattgactctttcatgggagatttctttgtagcgtacaatgctacccgatagcgttttacccgcrgtagaacttctttcaaaattagagctaatcgtctgaaaccctaccactgctttatcaaccaagtttatggaatattctaaaccctttgtagttgtttcag

SEQ ID NO: 473794 - DNA, 201 bp, Homo sapiens
ttcttctgtaagaaaatcatgtggatgtcagctttaacacagctaagatgtgagagttttgacaagcttaggccaaagcttacgtaaactgaaacagataygcttgttatataatgatagcagggaatgtaaactgttgcttcatgatatttttcagagttatatattaaagtcagctactggattggccaggctatactc

SEQ ID NO: 473795 - DNA, 201 bp, Homo sapiens
ttagtttccctgttatacttgctattcaaaaacaggtattcaaaactagttagcaaggcatattgttttttaagaggcggggtctctgctgtgttatccakgctggagtgccgtggctcttcacaggctggattatagcacactacagcctcgaactcttggattcaagtgatcctcccacttcagcctcaagtagctggg

SEQ ID NO: 473796 - DNA, 201 bp, Homo sapiens
ttctcatgttttttgtgttactgtagctaaacacattttctaaatctacatgctttgttttaattgaaatacgaggaacccttcaaagatagagcaaggcytggggaggcagtgcttcaagggaggaaacctacttgcgtctgttctccctgtgaagtaatggagctcacccccatttgttcttcctttggagctgccttt

SEQ ID NO: 473797 - DNA, 201 bp, Homo sapiens
tttaaatctagatctaagtttgaatttgctagtcatgccccagtgttgtaactgtgtgtaattgagtcattttaaaaaattcagatgctaaagaattaaagtttaaactagatattttaacatttgaagtaagacttcagtaagcaaatgtgacataattagaataaatcattagcagttttcttttatcacagtgctatt

SEQ ID NO: 473798 - DNA, 201 bp, Homo sapiens
taaacttgtttggtttttgttgttgttgtttactttggagtttctcatgttttttgtgttactgtagctaaacacattttctaaatctacatgctttgttwtaattgaaatacgaggaacccttcaaagatagagcaaggcttggggaggcagtgcttcaagggaggaaacctacttgcgtctgttctccctgtgaagtaa

SEQ ID NO: 473799 - DNA, 201 bp, Homo sapiens
taataaaatgtataacaccacgtgtgaaccctgatgtaaactacggacttttggtaatgatgtgttaatataagtttatcgattttaataaatgaaacacygatgggaggtgtcaattgtggggaagattatctgtgtgtgaggaagggggtgtttataagaaatctgtgccttttcgtaagttttgctctatttcctgga

SEQ ID NO: 473800 - DNA, 201 bp, Homo sapiens
gaaaggcttgtgtttatcggcttctttttgcaagggaaagttaatctttgttgtcattatactggttagaagagtaattggttttcaggcaaaaatttctrttttcttaaattgggtgtaaatgccagcgggcagtgcgagtctatagaattttggagacaggcaggagaaggtttctcaaatcgtgaagtcattaaatac

SEQ ID NO: 473801 - DNA, 201 bp, Homo sapiens
tatcctgaagttctttaagaggggccagtaaccaaaacctccatgatcagcagcagtccacagaccacatagtgtgtgtagatagcatccttatagcgcartatagaagcatactttcagccaaatgtttgcttgcacatagaggactttgccttgtaatttaagaaaaacagactcttcagtttgtactctaaatgctaa

SEQ ID NO: 473802 - DNA, 201 bp, Homo sapiens
gggaaagttaatctttgttgtcattatactggttagaagagtaattggttttcaggcaaaaatttctattttcttaaattgggtgtaaatgccagcgggcwgtgcgagtctatagaattttggagacaggcaggagaaggtttctcaaatcgtgaagtcattaaatacctttgttaatgtcggaggcaactaattattttt

SEQ ID NO: 473803 - DNA, 201 bp, Homo sapiens
aagcttatagtcatggtggaaggcaaagggggagcaggtgtgtcacatggcaagagagggcatgagagagatggctaggcgcttttaaacaagcagctctygtgttaactaacgagcaagaattcactgattgccacagggagtgattgataagggatccaccaccacccccatccccaccccatgacacaaacacctcac

SEQ ID NO: 473804 - DNA, 201 bp, Homo sapiens
ctttctgtaaagcctgagagaagatataggaagtggacccagaaaagcaatgtcctcactcctattatttgctgccgtgagacattcaagactctcagagwgaaagcttatgatttataagttacaatataataaccttacagaagctttagtagttaaaaagcatttgactcctaaaaagtaagtatgaaaatgaaacat

SEQ ID NO: 473805 - DNA, 201 bp, Homo sapiens
tttttaaaacgtctaaaattttttacatatgccaattatgagatcacttggtggatcttacttacttattcattaagcacatatttagtaattgtcatgcsacagatagtattctagaagcttaatattaaggagttttttgtttaggatacagttgcttgcttccatagtggaacttggggcttgtcctgtacaacagcg

SEQ ID NO: 473806 - DNA, 201 bp, Homo sapiens
tgggaaaaaaaaatcacttttgaaactcagacttcagtgtatacccaataatttaaaattatgtgaaatgttttaaatttgtgaactcgtaattactgttwtaatgattcagtttcttcagagtggtaattgtataaaattgctattgcagctttacattcaatatgatgtgcctgtaaaccaaggagttttccccgtttg

SEQ ID NO: 473807 - DNA, 201 bp, Homo sapiens
tgattatacacatctgcatatgtgacaaaatggtataaaagtctgtagacacattgaatcaatgtcagtgccctggttttgatactatattgtagttattkaagatgtcaccattgggagaaactaggtttaaaaaagtacatgggacctgctatctatgactccctgtgactctatttcaaattaaaattttatgtattg

SEQ ID NO: 473808 - DNA, 201 bp, Homo sapiens
tttaaacattaagcaaatgtttaaaagctttttttgttaccttagaacttgttgtgctttatggcgtggtttgggaaagtatctggggatgtttgagttcwtattgccttgttctttcagtaaattttccttatggctagaggaattttgaatacttgtgtttagatggagtcttatctcattgttttatcaactactgct

SEQ ID NO: 473809 - DNA, 201 bp, Homo sapiens
gaaaggcattgatgaggacatacgccatatctgatcttcaaataagttaacagtttgtatagttgaggtgacagcagtgcataactaatagacatagtgcttttttttatacacaagtcagaattacaaaagaatttctggtgaattattttgtgaaacatacaaattctaagaaacgcttttacagtttggtacagaatg

SEQ ID NO: 473810 - DNA, 201 bp, Homo sapiens
aactgctagttaatgacaatagcaggattatgtctttacttctgagatagtagtttttactttgaataggtggtgtacatttatgtcccgagttaaaatatgtgtgtgtgtgtgtgtgtgtgtgtgtatgtatatatatatatcaaacagtacaaaaaggtaggcctcacttgccctgcatacctactttccagaggtaac

SEQ ID NO: 473811 - DNA, 201 bp, Homo sapiens
acttaacctggagattttccatgttagtacaaatgttgtattcttgtttaaagttgtactgtacaattgtcccttgatattaaaggggaattggttccagraccaaaaccacgaatgctcaagtcgcttatatgaaatagtgtagtatttgcatataacctactaacatcccatatacttcaaatcatctccatttatgat

SEQ ID NO: 473812 - DNA, 201 bp, Homo sapiens
actgctagttaatgacaatagcaggattatgtctttacttctgagatagtagtttttactttgaataggtggtgtacatttatgtcccgagttaaaatatgtgtgtgtgtgtgtgtgtgtgtgtgtatgtatatatatatatcaaacagtacaaaaaggtaggcctcacttgccctgcatacctactttccagaggtaacc

SEQ ID NO: 473813 - DNA, 201 bp, Homo sapiens
tttttttcctaagtaaatattcttcgtagttttttgttattttgttttaggtaatgattggttataaaactggagtctgccaaccacaccaccatctaagwagataattaatatttaaattcacatatctttctataatttttaaaagcattgatgaaatttttattctaattaaaataatgtgtattttattaagaaatg

SEQ ID NO: 473814 - DNA, 201 bp, Homo sapiens
ccttcttgcagactgtaatgaagcattcattaagataaagatggcttttcggccaggtattgttaaacttgtttggtttttgttgttgttgtttactttgragtttctcatgttttttgtgttactgtagctaaacacattttctaaatctacatgctttgttttaattgaaatacgaggaacccttcaaagatagagcaa

SEQ ID NO: 473815 - DNA, 201 bp, Homo sapiens
ctagttaatgacaatagcaggattatgtctttacttctgagatagtagtttttactttgaataggtggtgtacatttatgtcccgagttaaaatatgtgtrtgtgtgtgtgtgtgtgtgtgtatgtatatatatatatcaaacagtacaaaaaggtaggcctcacttgccctgcatacctactttccagaggtaaccagta

SEQ ID NO: 473816 - DNA, 201 bp, Homo sapiens
ttgcttcctagcttccttcatgtttgtgttaattcgtgaatttccagtcactctgtcttttcaggatattcgatattcagggaatttataggtaaggacasagaaatgtatgtgattataaggcaactttaaaggaaaaagataaaaagaagactatgaatggcacgaaatgcaggttttggaatatgattaatgttttat

SEQ ID NO: 473817 - DNA, 201 bp, Homo sapiens
acccttttttggttttatttcagcgtgctcttgctaaaactggagctgaatctatcagtttgcttgagttatgtcgaaatacgaacagaaaacaagctgcygcaaagttctacagcttcttggttcttaaaaagcagcaagctattgagctgacacaggaagaaccgtacagtgacatcatcgcaacacctggaccaaggt

SEQ ID NO: 473818 - DNA, 201 bp, Homo sapiens
ttaatatagttgttatagttttttattagtagtattttttattattgtgtttttttgtccccccctccaacaatttttgatcctgggttggtttagtccayggatgcaagaagccatggataaggaggaccgactatattccgttgtttgggtttattaatttttcatatcacttattgatggccaagtaggttatttcga

SEQ ID NO: 473819 - DNA, 201 bp, Homo sapiens
caaaatagttttagcttttttagtttatttgcttttctatataaatttgataatcttgcctataaatataaaaaaactcattttgataattgtattaaagwttctttaaaaactaaacatatacttaacaatacttgtcagcagtcacattcgggacagttgtcctagagaaatgaaaacttaatgttcaccaaaagtctg

SEQ ID NO: 473820 - DNA, 201 bp, Homo sapiens
tctactgatctgctactgttgtattagataactaggcttcttgcttttttctgtttttttggcctgtctactgatctgctactgttgctttagttaactagcttcttgcttttatgtcacagtcatctgtcatagagtctttcttctatccaattataattttgagtattttgtagaatgtctgtgcaagttgctgtgaaa

SEQ ID NO: 473821 - DNA, 201 bp, Homo sapiens
taacaactggaaaacattggaaagcttttttcaataaagtacaattctaaatgctgtgcagttggtctacgagctggaaaaaactaaaagtattctttttaaaaaaaaaacaaaactagaggctggtgtggtggctcacacttgtaatccagtactttgggaggcccaagcaggaaaaccacttgaggccaggagtttgag

SEQ ID NO: 473822 - DNA, 201 bp, Homo sapiens
caccaccgctagccaatttcttccttccttaactccaaatttgggaggaagagtttacaacattagacagttgacaaagcctggttttttttcttttgagraaaagtttttttagtatgaattaataatcctttgggaacattagattcagagaatgagaatttcaagactctttactcttaagtgatggaaatggagata

SEQ ID NO: 473823 - DNA, 201 bp, Homo sapiens
gccaccaccgctagccaatttcttccttccttaactccaaatttgggaggaagagtttacaacattagacagttgacaaagcctggttttttttcttttgwggaaaagtttttttagtatgaattaataatcctttgggaacattagattcagagaatgagaatttcaagactctttactcttaagtgatggaaatggaga

SEQ ID NO: 473824 - DNA, 201 bp, Homo sapiens
ttcgggacagttgtcctagagaaatgaaaacttaatgttcaccaaaagtctgtacatgaatatttatagcaggtttatttgtaatagccaaaaactggaarcaactaaatgtccttctataggtgaatgtccaagcatatggtggtatatgaatctcacggaatgctgtccaacagtaaaagggaatatactattgataaa

SEQ ID NO: 473825 - DNA, 201 bp, Homo sapiens
tgagacagtaaaaagatggtaggttggggagagaatggagggttgagtaggcagagcacagactattctttttagagcagtaaaactgttttgcatgatartataatagttaaatgccatttacatttgtacaaactaataaaatgtataacaccacgtgtgaaccctgatgtaaactacggacttttggtaatgatgtgt

SEQ ID NO: 473826 - DNA, 201 bp, Homo sapiens
tttaggattataattgataggccaagtgatggacatgtttttgagatttgtgatatgcactaacagtttgttctggtgagatcataccagtttgcactgcyggtcaaattgtatgagaacattggtattttcaattttttttataggtatgcttactgggataagttaatggaaaacgtagaaatcgtactcctttctgga

SEQ ID NO: 473827 - DNA, 201 bp, Homo sapiens
cagattaatcgacttttttaaagattggatgaagtttggtattatcaaggaaaaaaaaataggcttaaaaggcaattataattacactttctccttattcrgatatacaccaggagtcgatccaccactgctcctttggcttcctttagttattagagtgatttcctcttgctaattgtttcccacattaattttagcatc

SEQ ID NO: 473828 - DNA, 201 bp, Homo sapiens
gtaagaggtgttttaggaatcaatttctttttcctggggcatgtttacactgttgaaggtcttttttcttctttttcttcctaatttctggatcattgagkttgttgtttaagacttagaatttattcttctgtttgatactctatcggatatgttacttaaacctttaaatttaaaataaggtgtcctttaggtagcatt

SEQ ID NO: 473829 - DNA, 201 bp, Homo sapiens
gtgtgtgtgtgtgtgtgtatgtatatatatatatcaaacagtacaaaaaggtaggcctcacttgccctgcatacctactttccagaggtaaccagtatcascagtttcatgtgtacgccacaggtattttaagcttattcaagaactcgtaaatatatagagaaagagcattcttttttaaaactccaacttttttgcact

SEQ ID NO: 473830 - DNA, 201 bp, Homo sapiens
attttaagcttattcaagaactcgtaaatatatagagaaagagcattcttttttaaaactccaacttttttgcacttaacctggagattttccatgttagkacaaatgttgtattcttgtttaaagttgtactgtacaattgtcccttgatattaaaggggaattggttccagaaccaaaaccacgaatgctcaagtcgct

SEQ ID NO: 473831 - DNA, 201 bp, Homo sapiens
ggttttcttctgttttcatagccagccagaacaatgttctacgcacattttgttctcagtaaaagagggcctctggccaaaatttggctagcggcccattrggataagaagctaaccaaagcccatgtgttcgagtgtaatttagagagcagcgtggagagtatcatctcaccaaaggtatgtttgatgttgacattttta

SEQ ID NO: 473832 - DNA, 201 bp, Homo sapiens
atgtttttgagatttgtgatatgcactaacagtttgttctggtgagatcataccagtttgcactgctggtcaaattgtatgagaacattggtattttcaattttttttataggtatgcttactgggataagttaatggaaaacgtagaaatcgtactcctttctggaaagtatatgtgtggctaatctttaacatccgtaa

SEQ ID NO: 473833 - DNA, 201 bp, Homo sapiens
gcccatattatttgggcatcctttgtggcactccaaaataattaaaatactagcatcaaagatcactgggccaggtatagtggttcacacctatgatcccrgtgctttgggaggcttaggtgggagaatcacttgaggccaggggtttgagactagcctgggcaatatagtaagatcccgcccccccatgtctactaaaaa

SEQ ID NO: 473834 - DNA, 201 bp, Homo sapiens
gaatgaaatgtgaatatgataaaagccatgctaaattatacacttatatttattagaacatacctttggaagatagaaatcagtggtgactttttaattakatttattttataattgaaatttttcttttttttttttttaatagctctttacacgctgtcttacaccgcttgtaccagaagaccttagaaaaaggaggaa

SEQ ID NO: 473835 - DNA, 201 bp, Homo sapiens
attgagtggcttaaaaggataacagatttttttcatgatatgtaccgagtactttgtgccactttagggacactacaaacgagtatgagacaatctgatarttgaacatatacacgaacagccacaaaggaaagcagacagttcaggaataatgtaaaagattgtaatgtgtttatgagagaaagtgatttctcttcaaat

SEQ ID NO: 473836 - DNA, 201 bp, Homo sapiens
aggatcatttaaatctagatctaagtttgaatttgctagtcatgccccagtgttgtaactgtgtgtaattgagtcattttaaaaaattcagatgctaaagaattaaagtttaaactagatattttaacatttgaagtaagacttcagtaagcaaatgtgacataattagaataaatcattagcagttttcttttatcacag

SEQ ID NO: 473837 - DNA, 201 bp, Homo sapiens
tgacgatatggatgaggatgataatgtatcaagtaagcatttcatgttcagtgattctggggatgattgtatggcatccagaaagatacttaccatagaakatgacaaactaaaagttgtagtttttagtgaattataaatatctttaagtacagtgcttatgattactggttctgattctatgtttaatcttgcacccct

SEQ ID NO: 473838 - DNA, 201 bp, Homo sapiens
ggatcatttaaatctagatctaagtttgaatttgctagtcatgccccagtgttgtaactgtgtgtaattgagtcattttaaaaaattcagatgctaaagaattaaagtttaaactagatattttaacatttgaagtaagacttcagtaagcaaatgtgacataattagaataaatcattagcagttttcttttatcacagt

SEQ ID NO: 473839 - DNA, 201 bp, Homo sapiens
gatcatttaaatctagatctaagtttgaatttgctagtcatgccccagtgttgtaactgtgtgtaattgagtcattttaaaaaattcagatgctaaagaattaaagtttaaactagatattttaacatttgaagtaagacttcagtaagcaaatgtgacataattagaataaatcattagcagttttcttttatcacagtg

SEQ ID NO: 473840 - DNA, 201 bp, Homo sapiens
cagatgacaaacttattagtaataatgatggcggtatctttgatgatccccctgccctctctgaggcaggggtgatgttgccagagcagcctgcacatgaygatatggatgaggatgataatgtatcaagtaagcatttcatgttcagtgattctggggatgattgtatggcatccagaaagatacttaccatagaagatg

SEQ ID NO: 473841 - DNA, 201 bp, Homo sapiens
atcatttaaatctagatctaagtttgaatttgctagtcatgccccagtgttgtaactgtgtgtaattgagtcattttaaaaaattcagatgctaaagaattaaagtttaaactagatattttaacatttgaagtaagacttcagtaagcaaatgtgacataattagaataaatcattagcagttttcttttatcacagtgc

SEQ ID NO: 473842 - DNA, 201 bp, Homo sapiens
cgtagttttttgttattttgttttaggtaatgattggttataaaactggagtctgccaaccacaccaccatctaagaagataattaatatttaaattcacrtatctttctataatttttaaaagcattgatgaaatttttattctaattaaaataatgtgtattttattaagaaatgccttaaacagtttctactgaggat

SEQ ID NO: 473843 - DNA, 201 bp, Homo sapiens
taaaactacataggcaaaaatgtgttggcccttgcgtcattttgcttattttgtgctaaaagtctatacatactcattcagcaaatttttgttgaatgccygttgtgttccagcctctcttctgaatggtggttggaaaacatgagttaaaacgttctatcctcatgaagtttaacttctctgctagagtctgtgtgtaga

SEQ ID NO: 473844 - DNA, 201 bp, Homo sapiens
aatttgaaaatccagaggttcctagagaggaccagcaacagcagcatcagcagcgtgatgttatcggtttgttctgttggaatagttccttgatgaagttyacatgagtatttggcttaaaatttacctttatactgtcagagtgaaagaaatgaggaatcaaagatatactcaaatgtttgggcagggaaatgcattgga

SEQ ID NO: 473845 - DNA, 201 bp, Homo sapiens
ttcgatattcagggaatttataggtaaggacagagaaatgtatgtgattataaggcaactttaaaggaaaaagataaaaagaagactatgaatggcacgaratgcaggttttggaatatgattaatgttttattcataggtgaaaatggcattacggacatcaggacatctcttactgggagtagttcgaatctatcacag

SEQ ID NO: 473846 - DNA, 201 bp, Homo sapiens
tcatttaaatctagatctaagtttgaatttgctagtcatgccccagtgttgtaactgtgtgtaattgagtcattttaaaaaattcagatgctaaagaattaaagtttaaactagatattttaacatttgaagtaagacttcagtaagcaaatgtgacataattagaataaatcattagcagttttcttttatcacagtgct

SEQ ID NO: 473847 - DNA, 201 bp, Homo sapiens
agccaagccgcctccaggagtcagtgatggaggccagcagaacaaacatagatgagtcagctatgcctccaccaccacctcagggagttaagcgaaaagcyggacaaattgacccagagcctgtgatgcctgtaagtaagcaaatctatccattaagtcatttgaaggtattcatacagtcagtagcaagtggtatttagg

SEQ ID NO: 473848 - DNA, 201 bp, Homo sapiens
aatttataaagaagtttatttggctcacagttctgcagactatacaagaagcaaagcaccagcatctgcttctggtgaggcctcagaaagcttatagtcawggtggaaggcaaagggggagcaggtgtgtcacatggcaagagagggcatgagagagatggctaggcgcttttaaacaagcagctcttgtgttaactaacg

SEQ ID NO: 473849 - DNA, 201 bp, Homo sapiens
taaagactttattattaacagaccagatagcatcagaaatcatgtgactgttatgattatcagaatgtcttaactttttagggcaaagttaacactgaaasttctagcttaagtgttgaaacttttgtgggaaaaaaaaatcacttttgaaactcagacttcagtgtatacccaataatttaaaattatgtgaaatgtttt

SEQ ID NO: 473850 - DNA, 201 bp, Homo sapiens
ctgttttaatgattcagtttcttcagagtggtaattgtataaaattgctattgcagctttacattcaatatgatgtgcctgtaaaccaaggagttttcccygtttgtaaaaagacattgtagataattgaatgtttgattttagaaaggtcattagtttcttgttacacattttgttagtctggtttttgttgcttatcgg

SEQ ID NO: 473851 - DNA, 201 bp, Homo sapiens
ccagcaatctgaatgagaaaattaaccatttagaatatgaagatcaatataaggatgataattttggagaaggaaatgatggtggaatattaggtatgtgrgaatgatggttattccagcataaacagaatttctttattaagttgtaaagttttggaaacagttgctaattctgagtcttgaacagcttttagatatata

SEQ ID NO: 473852 - DNA, 201 bp, Homo sapiens
ctcagcatctgcgaaactcagtaaaacaaagtgcagtaaaacaaggtatgcctatatgatagccagtcagcattcaaatgtccccagttgacatgtcggcttttttttttttttttttctcccagttcgagttgaggctaaacaaagtctacaaactgcatctggttgatatagcttatgggtctcctgagaatctattac

SEQ ID NO: 473853 - DNA, 201 bp, Homo sapiens
ttgggagacgaaggctggcgggttgcctgaggtcaggagtttgagatcagcctggacaacatactgaaaccccatctctactaaaaatacaaaaaaattarccgggcatggtggcacgtgcttgtaatcccagctacttgggaggccgaggcaggggaaccgcttgaacccgggaggcggaggttgcagtcagccgaaatc

SEQ ID NO: 473854 - DNA, 201 bp, Homo sapiens
cttaaaatgttgtaacaaaacctaaatatgcttatctcagaatgctaaattttattagtacttaaaactgttctgtttgtgtttgatagctgtgttaagtaaaatattttttaaaatagataaataaactagaaaatacaaatgaagaatgagaatttttttttatataccaagtgttttatacttttataaactacctgg

SEQ ID NO: 473855 - DNA, 201 bp, Homo sapiens
aatttttaaagcctccatgacccatcacacctttaaaaaaattatcagttattccttaatatagacataccttggagatactgtgggtttggttccaccasagtaaagcaagttacacaaatttttgggtttcacagtgcctataaaagttatgttcacactgtactgtagtctattaagtgtgcagtaatagcattatgt

SEQ ID NO: 473856 - DNA, 201 bp, Homo sapiens
aatttctgtgaaaattggttttgagaatagaatatgaattcttagagtttctaaacatacagttcctgtaaactttggtaagtgtgtgttattttgcttasaaaacaaaggggccgggcacagtgtctcacgcctgtaatcccagcactttgggagacgaaggctggcgggttgcctgaggtcaggagtttgagatcagcc

SEQ ID NO: 473857 - DNA, 201 bp, Homo sapiens
aattatgtgaaatgttttaaatttgtgaactcgtaattactgttttaatgattcagtttcttcagagtggtaattgtataaaattgctattgcagctttayattcaatatgatgtgcctgtaaaccaaggagttttccccgtttgtaaaaagacattgtagataattgaatgtttgattttagaaaggtcattagtttctt

SEQ ID NO: 473858 - DNA, 201 bp, Homo sapiens
ttttgccattgttccctgaaaaaaaaaaagttagatgctggaaacagaaagcatacctttgtcaaactttttccaaaactacatttttatttatttatttwttttttctggagggagagttttcttttcttttttttttttattatagtttaagttttaattaaatacataaactgttaggccaagagtaagccggaaaag

SEQ ID NO: 473859 - DNA, 201 bp, Homo sapiens
tatcttgaatgtctgcaaaatgccaagcaagttgctcaaggtttcttaaaataggacagttgacatgtgtttattaattttttactttaaaaactataagygctagattttactactatattacattagctgtctaaagaaattggttattttaataatacatgtcagaacaattttgctggtttcttggactttcttatt

SEQ ID NO: 473860 - DNA, 201 bp, Homo sapiens
ccttgccccagacgggcccaccgcctgcgcgggccgagggcggcgcacctgcccctgcgcttccgcatcgaaggtgaggtcggaggaagagaagaccgcarcccccaagctcccgcggcgtggggtccggggggggacacgaggcggggccaccaggacgccgacagcctcacgtctctgggcccgcggcgcgcaaggcat

SEQ ID NO: 473861 - DNA, 201 bp, Homo sapiens; identical to SEQ ID NO: 109309

SEQ ID NO: 473862 - DNA, 201 bp, Homo sapiens
ctgagtagtctgtccttacagtgtgaaccaggggttcatgggaattcttcaccatccagtagtctgtaaatgttgcccatgctgagtagtgtgtccttacrgtgtgaaccaggggttcatgggaattcttcaccatccagtggtctgtaaatgttgcccatgctttagttttgttacctggttgctctgtttttatgggat

SEQ ID NO: 473863 - DNA, 201 bp, Homo sapiens
gtttttatgggattgtgagaaactgaaaaactgtgactgctggagccattttcccacaatccccattttttaaaaatcccataaaggctctctcgtgagcrccgcacgttttcccttgtagtcacgagggtaggggctggagaaagcagcagagatagtcaaaaacccacagctacaaaaaatgcactcctaagagcaagt

SEQ ID NO: 473864 - DNA, 201 bp, Homo sapiens
ggccgacagtttccaaaatgttagtattcagcctaacatgagaaaagtcaccatataaaagtgaggggggaaaagcaaatacaggataatctcaattgtayataaaatttatatacgtaaggacaaagatacatagtaaaaaaaaaattctggcaggtattaaggctgaaaaaattaaaacagtccagagcggtctggctc

SEQ ID NO: 473865 - DNA, 201 bp, Homo sapiens
ggaattcttcaccatccagtagtctgtaaatgttgcccatgctgagtagtgtgtccttacagtgtgaaccaggggttcatgggaattcttcaccatccagyggtctgtaaatgttgcccatgctttagttttgttacctggttgctctgtttttatgggattgtgagaaactgaaaaactgtgactgctggagccattttc

SEQ ID NO: 473866 - DNA, 201 bp, Homo sapiens
tttaccaatttcattttcaacctgatttgacactctgatgaggggggaaggttgagtacatcataaaaacttcagtttacctctaacttgtgattgtgtgkgaagaaagagcacaggatatagaagagggaaaaatgctttgaaaactctaaaagtgggttgcaaatgttagtttgttttcacacaatggacacaaaaatc

SEQ ID NO: 473867 - DNA, 201 bp, Homo sapiens
ctctgctccatggcgcccagtcccatcgaccacccaagggctgaggagtgcggttacacagcgtgggactgacaggcagctccacctgcggccctggtgcrggatccactgggtgaagccagctgggctcctgactctggtggggagttggagaacctttatgtctagctaagggattgtaaatacaccaataggcactct

SEQ ID NO: 473868 - DNA, 201 bp, Homo sapiens
ggccttagctgcctccccgtggggcagggcttgggacctgcagcccaccatgcctgagcctccctcgcctctgtgggcttctgtgtggcccgagccccccygacgagcaccaccctctgctccatggcgcccagtcccatcgaccacccaagggctgaggagtgcggttacacagcgtgggactgacaggcagctccacct

SEQ ID NO: 473869 - DNA, 201 bp, Homo sapiens
tgtgttttttggctgcataaatgtcttcttttgagaagtatctgttcatatcctttgcccgtattttgatggggttgtttgtgtttttcttgtaaatttgwttgagttcattgtagattctggatattagccctttgtcagatgagtagattgcaaaagttttctcccattctgtaggttgcctattgactctgatggtag

SEQ ID NO: 473870 - DNA, 201 bp, Homo sapiens
cccctgctccacggcacccagtcccatcgaccacccaagggctgaggagtgcgggcgcacggcatgggactggcaggcagctccacctgcggccccggtgygggatccactgggtgaagccagctgggctcctgactctggtggggaccaggagaacctttatgtctagctaagggattgtaaatacaccaatcggcactc

SEQ ID NO: 473871 - DNA, 201 bp, Homo sapiens
ctgtgcagaagctctttagtttaattagatcccatttgtcaattttggcttttgtcgccattgcttttggtgttttagacatgaagtccttgctcatgccwatgtcctgaatggtattgcctagattttcttctagggtttttatggttttaggtctaacatgtaagtctttaatccatcttgaattaatttttgtataag

SEQ ID NO: 473872 - DNA, 201 bp, Homo sapiens
ttgttaagaactgaattgtgttcctgtcacatttatatgttgacatctttacccccagtacctcagaatgtgactgtatccgtggacagagcctttaaagwggttaactaaggtaaagtgagatcatttgggtgggccctaatccaatcttgtagtaagagattaggacacagacaatacacagaggccaagtgaagagaa

SEQ ID NO: 473873 - DNA, 201 bp, Homo sapiens
tcaggtgatccacctgccttggcctcccgaagtgctgcgattacaggtctgagccactgcacccagccatttgggttgttgtaagccttcaagtttgtgayaccttgttagagaagcaataggaaactaatacaagttctattcactgcatcttaagagaagaaagctgggcaggtaaggcagggacagtttgttgattcc

SEQ ID NO: 473874 - DNA, 201 bp, Homo sapiens
aggtgtaagaaagggatccagtttcagctttctacatatggttagccagttttcccagcaccatttatttatttatttatttatttttatttatttatttwttttttttttgagacggagtctcgctctgtcgcccaggccagactgcggactgcagtggcgcaatctcagctcactgcaagctccgcttcccgggttcac

SEQ ID NO: 473875 - DNA, 201 bp, Homo sapiens
gactgcagtggcgcaatctcagctcactgcaagctccgcttcccgggttcacgccattctcctgcctcagcctcccgagtagctgggactacaggcgcccrccaccgcgcccggctaattttttgtatttttagtagagacggggtttcaccttgttagccaggatggtctcgatctcctgacctcatgatccacccgcct

SEQ ID NO: 473876 - DNA, 201 bp, Homo sapiens
gcgctttttccaccaagaaacctttacgtcatcacgtatccttgcaacgtcactacgctctgagcaggccgacagtcatagacgagtagaccttaggcgarggaaggcatgtactttccctaagaagcgggaggagagaaataaatagagggcagtgggatgagaagaacctcgcgggatgggaagccgcggagggaaggg

SEQ ID NO: 473877 - DNA, 201 bp, Homo sapiens
cgttttcaaagagaatgcttccagtttttgcccattcagtatgatactggctgtggatttgtcatagatagctcttattattttgagatacgtcccatcartacctaatttattgagagtttttagcatgaagggctgttgaattttgtcaaaggccttttttgcatctattgagataatcatgtggtttttgtctttggt

SEQ ID NO: 473878 - DNA, 201 bp, Homo sapiens
caaaaccgcaggcggttttgtctttcagatgggaaacactcaggcatcagcaggctcacccttgaaatgcatcctaagccactgggaccaatttgacccamaaaccctgaaaaagaggtggctcatttttttctgcactacggcttggccccaatattctccttctgatggggaaaaatggccacctgagggaagtacaaa

SEQ ID NO: 473879 - DNA, 201 bp, Homo sapiens
cactgtggtctgagagacagtttgttataatttctgttcttttacatttgctgaggagtgctttacttccaagtatgtggtcaattttggaataggtgtgrtgtggtgctgaaaaaaatgtatattctgttgatttggggtggagagttctgtagatgtgtattaggtacgcttggtgcagagctgagttcaattcctgta

SEQ ID NO: 473880 - DNA, 201 bp, Homo sapiens
gaaaaatggccacctgagggaagtacaaattacaatactaccctgcagcttgaccttttctgtaagagggaaggcaaatggagtgaaataccttatgtccragctttcttttcattgagggagaatacacaactatggaaagcttacaatttacatcccacaggaggacctcagcttgcccccatatcctagcctccctat

SEQ ID NO: 473881 - DNA, 201 bp, Homo sapiens
gactgtggtgtttcaacctagtctagggaaggctgcaggaaggttatacctgatggaagaaattgttttgtttggggttatgagaaagtttaatacagttyttctgcttctgttaattcacctaaaaatctcccagacagataacgagtgtttcagtaaaaatataactggaagaaattcatgacaattcctttatgtgtt

SEQ ID NO: 473882 - DNA, 201 bp, Homo sapiens
ctctctggctgccctcaacattttttccttcatttcaactttggtgaatctgacaattatgtgtcttggtgttgcccttctcgaggagtatctttgtggcrttctctgtatttcctgaatgtgaatgttggcctgccttgccagattggggaagttctcctggataatatcctgcagagtgttttccaacttggttccatt

SEQ ID NO: 473883 - DNA, 201 bp, Homo sapiens
tcagctgcaggcatcaggagaaagctccaaaagcaagccctgggccctggacaaaatctagagacatttttaaacctggcaacctcggtgttctataatasggaccaagaggaacaggcccaaaaggaaaagcaagatcagagaaaggccgcagccttagtcattgccctcggacagacaaaccttggtggttcagagagg

SEQ ID NO: 473884 - DNA, 201 bp, Homo sapiens
tgagggccaggaaattgacttcctcctggacaccggcacggacttctcagtgttaatctactgtcctggatgactgttctcaaggtccattaccatctgargaatcccaggacagcctgtaaccaggtatttctcccacctcctcagttgtaattgggagactttgtttttttcacttgcctttcttgttatgcctgaaag

SEQ ID NO: 473885 - DNA, 201 bp, Homo sapiens
gttcgaacttcctcctttagctcggagtagtttgatcttctgaagccttcttctctcagctcgtcaaagtcattctccatccagctttgttccattgctgrtgaggagctgtgttcctttagaggaggagaagcactctgatttttagagtttccggtttttctgctctgttttttccccatctttgtggttttatctacc

SEQ ID NO: 473886 - DNA, 201 bp, Homo sapiens
ttaatctactgtcctggatgactgttctcaaggtccattaccatctgaggaatcccaggacagcctgtaaccaggtatttctcccacctcctcagttgtamttgggagactttgtttttttcacttgcctttcttgttatgcctgaaagtcgcacacccttattagggagggatatattagccaaggctggagctattatc

SEQ ID NO: 473887 - DNA, 201 bp, Homo sapiens
atttaatttgaagatttccagtattttttcatgttttaattaattgttttgagacaaggtctcactgtctcacccaggctagagtgcacaggtaaaatcakagctcactgtagcctcaatctcctggcctcaagtagaatctcccaccttagcctcccaaatagctatgactacaggcatgtgccaccacacccaggcaat

SEQ ID NO: 473888 - DNA, 201 bp, Homo sapiens
gggaaggcatgtactttccctaagaagcgggaggagagaaataaatagagggcagtgggatgagaagaacctcgcgggatgggaagccgcggagggaaggrccgtctttggttacctggagagcgggagcagctgcggatcccttatgaagtgcccggatgaagctccagcgctcacgcgctttccgcattgagtgcagcg

SEQ ID NO: 473889 - DNA, 201 bp, Homo sapiens
cctgcagtccaatgctgtgtgattttcactgtggccagctatacaagacttagcgtatacttctctctgtgtaactgtaaaaaattttgtaagtctaagagggtaatatattctttcataaaacctcaatctagtgagttctaatcattcttgatctttctcaaataaatactagtcaaatctttcccaataactaagtaa

SEQ ID NO: 473890 - DNA, 201 bp, Homo sapiens
gactcgtgggacaaccccacaaccaatggcgtacctaagtaaggaaattgatatagtagaaaaaggctggcctcactgtttaagggtagttgcagcaatgsccgtcttagtgtcagaggctatcaaaataatacaaggaaaggatctcactgtctggactactcatgatgtaaatggcatactaggtgccaaaggaagttt

SEQ ID NO: 473891 - DNA, 201 bp, Homo sapiens
tgtatcccattcctttaaaagccagagtaaatttctgtctacccagccaaggcatgtttttcttaggtggaacatcaacctatatctgcctccccactaaytggacgggcacctgcaccttagtctttctaagtcccaacattaacattgccccaggaaatcagaccttatcagtacccctcaaagctcaagtccatcagt

SEQ ID NO: 473892 - DNA, 201 bp, Homo sapiens
gtgcaaacagctcccatgtttgagcagaccaattattaggcaattttcctaactctgcttccgcaagagtctccctatcaattactgcatacccattgtgtttttttttttttccctcagtcacccgggaggaaccatctatcatcctgccttgaaggtagtttctgctggatctggtcagacctttgtatggtaatgagg

SEQ ID NO: 473893 - DNA, 201 bp, Homo sapiens
tatgtccccttcaagctgtagggtgagaggaatttggcccaacccgggtacatgtccccttctccctctgtgatttaaagccaatcaaggcagacctgggkaagttttcagatgatcctgataggtacatagatgtcctacagggtccagggcaaacctttgacctcacttggagagatgtcatgctactgttagatcaaa

SEQ ID NO: 473894 - DNA, 201 bp, Homo sapiens
attgcaaccatgtgtgtcagaagaaaggattaggtttccttgtccaagaacatcaaggggaacctccacctctgcagacacacctctattccttagtaatrgagagtttatacctagttagatttaaatgggataagggaagagtttaaatccattcttagctcaagcagtataatcagccctcaagtctcaaagtatcca

SEQ ID NO: 473895 - DNA, 201 bp, Homo sapiens
tgccctacacatttattcacttaaagaagaattttgcagactgcaaagactagatggcaattgtattcaaaacttacttaaagcacaattcattcacccctgacctttcatttatattgagtatgttttttcaaatatagaagagattccataataaaagcaaacaaacctctctcttcataattatggactatagttctc

SEQ ID NO: 473896 - DNA, 201 bp, Homo sapiens
ttcatttatattgagtatgttttttcaaatatagaagagattccataataaaagcaaacaaacctctctcttcataattatggactatagttctctgtacrtgttctctgaccatgccatcttatgctggacctattataaggacccaaattaaagtgaggcagatcctgcttttgagtgagataacctccaagagtcata

SEQ ID NO: 473897 - DNA, 201 bp, Homo sapiens
tcatcagtcttaggacatgtatcccatagaggaaatacaactttaaaattagcaaaattcaacttttgaaagtgtattttactttgttgtctctctttgcrtggtgtatcttttccacttggtatggtcctaaagacaagatccttatgctatctgtacacttactctattttaaaatcaccatcttttgctcccagctac

SEQ ID NO: 473898 - DNA, 201 bp, Homo sapiens
aggcaaggagagctgaaatagaagaaataaaattatagcctctaatatgaaaggaaatacttttagtgtggttgctgctaagcagtagtttttttcaactrtatttaaaaaaaataaaaagaagcacttgattgctggtgatagtgcaagcttgtataaacccaatgaagtgaatttaacaataccagcatttactctttg

SEQ ID NO: 473899 - DNA, 201 bp, Homo sapiens
tatctagtatgatgctatgatcctaggtgtgactactgaaagtaaaacataatgcttagatcttgatatttataaaaacatgattaaaagatatctctgcctctctaaaaatagggtcttgacctcactgtctcagtcaaattccatttcagccagtgagatttcactggacttccccagatgcattaacaactgcaatca

SEQ ID NO: 473900 - DNA, 201 bp, Homo sapiens
aaatgcaagcgctgttggggaggttggccgatgaccgctgtaactgcttcctgctgaattggggcatagtgggggtcgtgcagttgagatttcctcaggargggtgcctttgatgtcatcaacattggagcatgggctagcaggctggtccaggggtctgcggtagatcttagtcatggactacatctggggctccatttg

SEQ ID NO: 473901 - DNA, 201 bp, Homo sapiens
atctagtatgatgctatgatcctaggtgtgactactgaaagtaaaacataatgcttagatcttgatatttataaaaacatgattaaaagatatctctgcctctctaaaaatagggtcttgacctcactgtctcagtcaaattccatttcagccagtgagatttcactggacttccccagatgcattaacaactgcaatcaa

SEQ ID NO: 473902 - DNA, 201 bp, Homo sapiens
ggccgatgaccgctgtaactgcttcctgctgaattggggcatagtgggggtcgtgcagttgagatttcctcaggaagggtgcctttgatgtcatcaacatyggagcatgggctagcaggctggtccaggggtctgcggtagatcttagtcatggactacatctggggctccatttgaagatttgtagttttacagcttcga

SEQ ID NO: 473903 - DNA, 201 bp, Homo sapiens
ccctggaagcattttttaattctctaatatatgcttgctttcttgtggtttgctctttccgctaaaaagcagaatgcataaaacattgtgattagttaagsattattacttaggttccaagtaattcgtatataaatctaaattactactcttcctccgttctgcttccccttctgtttggtcaaatccctgtgggagaga

SEQ ID NO: 473904 - DNA, 201 bp, Homo sapiens
gcaaacagctgtatttggatgaggcagaggaatggtgggaggaactgtttcttgttgcactgagcattcagttgttctgggctttgcccaaggaaaaacaratggttttccttgctggaattggtcagggagggcaggggaagtgcccaggctttgctttcccataattgacagtacagagttttaagaaatatttgaaca

SEQ ID NO: 473905 - DNA, 201 bp, Homo sapiens
ttgcagtaaccaaatattaaacatctattgtcaagtttatccctgtttcatactttttgatgttttgtacatttacaaatttaatagtatttatatacaayagaagcaattagaaattgaaattttttattttaaaaattgaaatttttgtattttagtagaggtgaggtttcaccatgttggccaggctggtcttgaact

SEQ ID NO: 473906 - DNA, 201 bp, Homo sapiens
gccgatgaccgctgtaactgcttcctgctgaattggggcatagtgggggtcgtgcagttgagatttcctcaggaagggtgcctttgatgtcatcaacattrgagcatgggctagcaggctggtccaggggtctgcggtagatcttagtcatggactacatctggggctccatttgaagatttgtagttttacagcttcgat

SEQ ID NO: 473907 - DNA, 201 bp, Homo sapiens
tttgaaaaggcctggtccagtaaataataatttggccatctgatgggtgctatcaatgcctaagtgaaaggttaggtgaagggttttaagtaatttccatyggttagctgcaggcaaaagtatttttccttcttcggtggctagccatcctgaggggaggaaactatgtccttgtgaggttccccattctatttctcctgc

SEQ ID NO: 473908 - DNA, 201 bp, Homo sapiens
tgctcgtcaagatctccgtttaatgaaggagaaggcaaacaacaaacagaatttcaagacataagatgttggctgtgggtttgtcaaaaaaaaaaaaaaaraagaaaattcaagagaaacatctttgtatcaggaagcccttgtgatttccttagaatcacactttgtcagcaatcctagcctcactgcttgctgttcgta

SEQ ID NO: 473909 - DNA, 201 bp, Homo sapiens
gctggctccctctgcttgcagggaggtgtggagggagaggcgcgagcgggaatcggggctgcgcgcggcgcttgtgggccagcgtgagttccaggtgggcrtgggcttggcgggcccccaaactcagagcggccagctggccccacctgccccaggcagtgaggggcttagcatctgtgccagcagctgctgtgctctact

SEQ ID NO: 473910 - DNA, 201 bp, Homo sapiens
gactgatcttggctcactgcagcgtccatcttccgggttcaagcgattctcctgcttcagcctctcaagtagctgggattacaggcgcccaccacacccgrctaattttttttttttttaatactttaagttttaggttacatgtgcacaacgtgcaggtttgttacatatgtatacatgtgccatgttggtgtgctgcac

SEQ ID NO: 473911 - DNA, 201 bp, Homo sapiens
ttggtggaacagtgtgtagtaatatgaggtaaagaacataatttgtgctctcagaagcttactagttagcagctacagctatggctagtgaatggccagcsttgaattcaagggggtaggatttgcacctgactcgagaccaatgcttagacttccagatgcaacagctgggagcctccttccaggatttgatctcaacac

SEQ ID NO: 473912 - DNA, 201 bp, Homo sapiens
ctccaagactctgttaccttctttaggcacccgggctcaccaatcagaaagacataatttttgcccaaagccccatcgtagtggggactacctggaatttyaggatcccttctcagactaacaggcctaacaaaagctgttcctgaagctaggatatggggagccttagaaattgtatccttcctattcatataagtgagg

SEQ ID NO: 473913 - DNA, 201 bp, Homo sapiens
tcactgtctcacccaggctagagtgcacaggtaaaatcatagctcactgtagcctcaatctcctggcctcaagtagaatctcccaccttagcctcccaaayagctatgactacaggcatgtgccaccacacccaggcaatttattttattttatttttttattttagaaaagggttctcactgtgtttcccaggctgatca

SEQ ID NO: 473914 - DNA, 201 bp, Homo sapiens
tttttgagaatgcgtcggtaagagccactaaatccgatttttctcggtcggtcctccttgtggtctaggaggacaggcaagggtgcaggtttttgagaatkcatcagtaagggccactaaatccaaccttcctcggtcctccatgtggtctgggaggaaaactagtgtttctgctgctgcgtcagtgagcgcaactattct

SEQ ID NO: 473915 - DNA, 201 bp, Homo sapiens
cttcaaccctgcttggaggacagtactggggtggagagggtcaagtagagattcccaaaagtaacatctcaactgagcagtctgatccttagcaaggttcrggccctttggccttgcctaccctggccttggttgttttgctaaccagagccagctgtgttgtgggtgtcttttcctctctcctggtgtccccgcctggac

SEQ ID NO: 473916 - DNA, 201 bp, Homo sapiens
gagaatgcgtcggtaagagccactaaatccgatttttctcggtcggtcctccttgtggtctaggaggacaggcaagggtgcaggtttttgagaatgcatcrgtaagggccactaaatccaaccttcctcggtcctccatgtggtctgggaggaaaactagtgtttctgctgctgcgtcagtgagcgcaactattctgatca

SEQ ID NO: 473917 - DNA, 201 bp, Homo sapiens
gggaggaactgtttcttgttgcactgagcattcagttgttctgggctttgcccaaggaaaaacagatggttttccttgctggaattggtcagggagggcakgggaagtgcccaggctttgctttcccataattgacagtacagagttttaagaaatatttgaacagtagcactgttctggtacctacttgggaaagccaat

SEQ ID NO: 473918 - DNA, 201 bp, Homo sapiens
gggttcttgggcaggggttgtttctgctgctgcatcagtgagtgcagctattccgatcagcagggtccagggaccgttgtgggttcttgggcagggggagmaacaaaccaaaaccgcaggcggttttgtctttcagatgggaaacactcaggcatcagcaggctcacccttgaaatgcatcctaagccactgggaccaatt

SEQ ID NO: 473919 - DNA, 201 bp, Homo sapiens
tttactgtgctttaagcatctttgcatattagtaaacatatacacctcagttaaaaaaaatcaacagctgggtgtagtggtgcatacctgtagtcccagcwatttgggaggcagagaggcaggaagatcccctgagcccaggaattctaatctaccctgggcatcttggcaagaccctgtctcttaagaaaaaaactatcg

SEQ ID NO: 473920 - DNA, 201 bp, Homo sapiens
actcttaatgtgacacatcctgtcattataaaggttctcaggaagccttcttatggcttcttttatgtcttcatcctcatatattgtatcatctctcattwaccccagtttattgaatcctgcagtattgtaataccattttcgaataccatccagccacttgcctgatgctgaaatggcctgcttgccagccattttgac

SEQ ID NO: 473921 - DNA, 201 bp, Homo sapiens
aagcctaaagtgccccaacattatacatatatatgtgtgtttgtgtgtgtatatatatatatatatatatatatatatgtatgtatatatatatatttttatatatatatatatagagagagagagagagagagaaactgtctctcacttttatttctctgaagctgtttcaaagctgcttcaggaaccaaagacaaaaga

SEQ ID NO: 473922 - DNA, 201 bp, Homo sapiens
caacattatacatatatatgtgtgtttgtgtgtgtatatatatatatatatatatatatatatgtatgtatatatatatatttttatatatatatatatakagagagagagagagagagaaactgtctctcacttttatttctctgaagctgtttcaaagctgcttcaggaaccaaagacaaaagaccaaatactttaaca

SEQ ID NO: 473923 - DNA, 201 bp, Homo sapiens
gtggttattgaatggctttattgaatgttatatgcaatattttttctccatttattttactctgtaacttttttttttcgtggcttatcagggcatttaaraaacagttttattaaagttgattatatatcaattagggattattaagtcattattttaagaagatcatttctcttttgcatcatatgttttaattttctt

SEQ ID NO: 473924 - DNA, 201 bp, Homo sapiens
acattatacatatatatgtgtgtttgtgtgtgtatatatatatatatatatatatatatatgtatgtatatatatatatttttatatatatatatatagakagagagagagagagagaaactgtctctcacttttatttctctgaagctgtttcaaagctgcttcaggaaccaaagacaaaagaccaaatactttaacaag

SEQ ID NO: 473925 - DNA, 201 bp, Homo sapiens
ctttcttcaccattaatatcacagtgtgaccatgtgataaattacaataatcaattttctaatgtatttcttgcttttgctttcatcgagcctcgtcattkgatatttggttcctattttaatcattttgacttttatttttatattgaactttcttctactttccttttattgttctttttctaatttattgagttgaat

SEQ ID NO: 473926 - DNA, 201 bp, Homo sapiens
tgaggtcaggagttcgagactaggctgtccaacatggtgaaaccctgtctctacaaaaaattagcggacttggtggtgcatgcctataatcccagtgaatmtggaggctgaggcatgagaatcacttgaaccaggaggcgggggttgtagtgagccgagattgcgccactccactccaccatgggtgacaaagtgagactc

SEQ ID NO: 473927 - DNA, 201 bp, Homo sapiens
atcagataggcccaagcagcaggtgtgaaactggagcatcctgggtcaagctgcttaaaaagggaccccactttggggtaggggtagataaagtccccttrggatccttgtccttgtgtgatgccatgagaatctggtgtgtggtggccttccccagccaacctgtgccaccctcctctcacccttgcctgtgtgaaagca

SEQ ID NO: 473928 - DNA, 201 bp, Homo sapiens
cccagtcctgcagcagaaccttgtgtaagccagctgggtgaccagcaccttgtcctggggcagtagccctatgatcctagtcctcctgtggtgtcccagtratgatcatgttttttgttgtttactttctgcacgggcaagagccatgaaacctgcagagagccaaaggaagggcaaaggctggctccctaaacaggattc

SEQ ID NO: 473929 - DNA, 201 bp, Homo sapiens
atcagaggttgccctatgtaatatcacactttttaccttgagcaggtggatagcctgggagttcttgttatacctcaatcttggtccattctatttgttcscctgtccttcagcagtgcccttaggcttgctttaaacattaacagcattcataagcatggtttctagggtcagagcccagcctccctccacccacccggc

SEQ ID NO: 473930 - DNA, 201 bp, Homo sapiens
agatggcaatgtggctccacaaacagcagtcttgtctttcccttcccccattttctttccctctttctgtttttggtgccaaaaaccaaaacaaacaccaaaaaaaaaaaaaaaaaaaaaaaaagaaactggcctaggagcacccatctcacctacagcagggcttcccatctatgtggtcactttgggggaaccggcaac

SEQ ID NO: 473931 - DNA, 201 bp, Homo sapiens
gttgtttcctaactcctttttttccagtcaagccatgtgaacacatcaatctgaatttcagtgtgtgcaggcagggtgtctctgccacgtgttcatttgcycacatttcagtgtgtgcaggcagggtgtctctgccacgtgttcatttgcccactctcactcacacagggaggcacacacagacacacatgcaggcactta

SEQ ID NO: 473932 - DNA, 201 bp, Homo sapiens
atagtgatatcttatcttcttttaatttcatggtttttgagtctttttttattgagttgtttttgagtggttattgaatggctttattgaatgttatatgmaatattttttctccatttattttactctgtaacttttttttttcgtggcttatcagggcatttaagaaacagttttattaaagttgattatatatcaatt

SEQ ID NO: 473933 - DNA, 201 bp, Homo sapiens
tggggcagggtagctctttgcagttggctgatgacattctcagggcaatgttcaacctgcacctgtgtcctctgtagcttctgtaggcctatttgtggatmaaagttttgattccactcaggaaagatcccaacgaaaagaagcttcctgattatttgtcctttaagcggaacatgaccagtggctccttgttcctcatta

SEQ ID NO: 473934 - DNA, 201 bp, Homo sapiens
ataatttccagggatataaaaaaataaagcttctacctttgaattgtaataataaaagataaacagacttgaaagcatatattatatctgaaaatgtcagrtaaacttggcttataaattaaaatataaaataataatacaatttgttcaaataagtaattaaagcttacattgtaaaatgaatatttagagagattgtga

SEQ ID NO: 473935 - DNA, 201 bp, Homo sapiens
taaatataggaaaactaaaatggccaggcacagttgctcactcctgtaatctcaatgttttgggagggcaagctgggcggatcacttgaggtcaggagttygagactaggctgtccaacatggtgaaaccctgtctctacaaaaaattagcggacttggtggtgcatgcctataatcccagtgaatctggaggctgaggca

SEQ ID NO: 473936 - DNA, 201 bp, Homo sapiens
aaattttcctcttcatatttggtccactgctctttaggcaagatctgatgcttcatggtcaggtccaatgcactcttaatgtgacacatcctgtcattatraaggttctcaggaagccttcttatggcttcttttatgtcttcatcctcatatattgtatcatctctcattaaccccagtttattgaatcctgcagtattg

SEQ ID NO: 473937 - DNA, 201 bp, Homo sapiens
gatggcaatgtggctccacaaacagcagtcttgtctttcccttcccccattttctttccctctttctgtttttggtgccaaaaaccaaaacaaacaccaaaaaaaaaaaaaaaaaaaaaaaaagaaactggcctaggagcacccatctcacctacagcagggcttcccatctatgtggtcactttgggggaaccggcaaca

SEQ ID NO: 473938 - DNA, 201 bp, Homo sapiens
actctcactcacacagggaggcacacacagacacacatgcaggcacttacaagagacccccagaagaagaaataaaatcacaaacacacacacagagatamatgcacacccagacaaaaacacgcttacacatacccacacaaacacacacatacacacacataaagtaagctcacaaaatcaaaggggtaggggcccaag

SEQ ID NO: 473939 - DNA, 201 bp, Homo sapiens
gcaaccaacacagaaagcttgtgaacaaatgtattgggattttttctcaccgacaggcaagtaaacaattctgcagtggacaccagctgggtgttctccartccaattcaattctgaagctatctccctacagaaagtatcagatcccacagattgagggcttagtcccacgagactgcctcaactttagacatcagtttc

SEQ ID NO: 473940 - DNA, 201 bp, Homo sapiens
atggcaatgtggctccacaaacagcagtcttgtctttcccttcccccattttctttccctctttctgtttttggtgccaaaaaccaaaacaaacaccaaaaaaaaaaaaaaaaaaaaaaaaagaaactggcctaggagcacccatctcacctacagcagggcttcccatctatgtggtcactttgggggaaccggcaacag

SEQ ID NO: 473941 - DNA, 201 bp, Homo sapiens
ccctgtctccactggccaaggtcggagccggctccctcagcttgcggggaggtgtggagggagagccgcgggcggtaacacgagctactcgccgcgcttgygggccaccgggagttgccggtcggcatgagctcggcgggccccgcactccgagcagccagttggacctgcctgcccagggcagtgaggggcttagcaact

SEQ ID NO: 473942 - DNA, 201 bp, Homo sapiens
tgattttgtatcctgcaactttactgaatttatcagttcttatagtttttgtggaatctttatgcttttccaaacacaagatcaaatcctctgcaaacaayggtaatttgacttcttcctttccaatttggatgcccttaatttctttctcttgtctgattgctctaactaggacttgcagtactatgttgaataacagtg

SEQ ID NO: 473943 - DNA, 201 bp, Homo sapiens
gccatgaaacctgcagagagccaaaggaagggcaaaggctggctccctaaacaggattcccacaggatctccagcctactggtcctggtccttggtcacasggtcccatgagtttggtgatcaatctgggaccaggtgactgattcctttcactcctctgtctttttttttgtttctctttcctctttaccttttttcaca

SEQ ID NO: 473944 - DNA, 201 bp, Homo sapiens
tggcaatgtggctccacaaacagcagtcttgtctttcccttcccccattttctttccctctttctgtttttggtgccaaaaaccaaaacaaacaccaaaaaaaaaaaaaaaaaaaaaaaaagaaactggcctaggagcacccatctcacctacagcagggcttcccatctatgtggtcactttgggggaaccggcaacagt

SEQ ID NO: 473945 - DNA, 201 bp, Homo sapiens
ttcacttttttcttcttcactgtctttacttctcgtccacttctggtttggggaggtcaggattcgcctggaaggcagggtccggttggcaagcgaacatmtttagggagaacacgccttcttttcctcaggaaattagaaagacctcagttgactcctgccagatgtaatcggggtgcccctctcctttctgccctctct

SEQ ID NO: 473946 - DNA, 201 bp, Homo sapiens
ttctgattcttcttcctcttcctcctcctacccctcttctttaattcttctccttctcctccttctcctcttgctcctcctcctccaactccttcttatcytcctactcctcctttttctttttcttctttttcctccttctactcctcctccccctccccctgcacttccttctcctttgcctctttttctttttttgct

SEQ ID NO: 473947 - DNA, 201 bp, Homo sapiens
ccttcaggacagctacagtggcatggacctcccactttctgttcttgttctctttctggttattcttcctcttcctcctcctactcttttaattcctcttcctcttttttgttttcttactcttcctcctccatcttctcctcctcctcctccttcttctttccttctcctcttcttttgcctcttcttcttttttgtctt

SEQ ID NO: 473948 - DNA, 201 bp, Homo sapiens
cttcaggacagctacagtggcatggacctcccactttctgttcttgttctctttctggttattcttcctcttcctcctcctactcttttaattcctcttcytcttttttgttttcttactcttcctcctccatcttctcctcctcctcctccttcttctttccttctcctcttcttttgcctcttcttcttttttgtcttt

SEQ ID NO: 473949 - DNA, 201 bp, Homo sapiens
tattttttgcatacttcattgtcttctagtgttgtcatgtccccacatttgcatccttttttttttttttgagacagggtctcactctgacacccaggctygagtagagtgtcacagtcccatctcactgcagcctcgacctcccgggttcaagcgatcctcctgcctcaaccccccaagtagctgggaccacaggcacat

SEQ ID NO: 473950 - DNA, 201 bp, Homo sapiens
acctcaggcacgaaactgcccacaatgtcttccactcgggctgtaaatggggctgtaaatggtggcgtgtggccctcaaactgaggcgggacaagagaggwactccttgctggctcttggcctgccctcattcctaggatggcggcctgtctccacagctgtatgtaagaaagggcagtcggggcggccagccatggcttc

SEQ ID NO: 473951 - DNA, 201 bp, Homo sapiens
gattgggcacctaaggccttctcctgagaatgaatgcgggaagtctgttatcagataagccccagcagccagtgtgaaactggagcctcctgggtcaaccygcttaaaaagggaccacaccttgggtagaggcagacagtccccttgggacccttggccctctgtgatgccatgggaatctgtgttgcgtggtggccttcc

SEQ ID NO: 473952 - DNA, 201 bp, Homo sapiens
tttgtcattagttctgtttatgtgatggattaagtttattgatttgaatatgttgaaccagccttgcatcccagggatgaagccgacttgatcgtggtggrtaagctttttcaaatgctgcctaaaatcctctttctttgttgtgtctctgtcaggctttggtatcaggatgatgctggcctcataaaagttggggagtta

SEQ ID NO: 473953 - DNA, 201 bp, Homo sapiens
tcccatttccagagtccttccctcccttggccttatgtactagggacttgatggccccttgaagtgtgctgatgatattcagagggcaagattttgcctgyacctttgttctcttttgctcctgcaaggctacttgtggatcagagcccttgatcccactcagaaaggaccccatcaatgagaagcttttcagtggtgtgt

SEQ ID NO: 473954 - DNA, 201 bp, Homo sapiens
ttttcttggtgtccggtttctccccatttttcatctctcctcccatttccagagtccttccctcccttggccttatgtactagggacttgatggccccttraagtgtgctgatgatattcagagggcaagattttgcctgtacctttgttctcttttgctcctgcaaggctacttgtggatcagagcccttgatcccactc

SEQ ID NO: 473955 - DNA, 201 bp, Homo sapiens
tggaatttctcattataagtcaataaacttttgttctttctgtatctttcagtcttatgatgtaatcagcgcgatttcacttcctgaatttcgatgaattytaagacatgggcaagatcgggttgtaagacctctgagatttaaggccatgccctggatcatggtgaacttaccaaagcaaacaatgcctgtgagatggtc

SEQ ID NO: 473956 - DNA, 201 bp, Homo sapiens
tcacctttttcctgtctttatctgtgcttccatacatcctcaggcacatacatgtatcctcacccatagtcactcaaaagtgtaggcccaggcacctcccrtaaaacctggatcccattgtctagacaactctaactgggcagggttcctcagcttccaggttctcttttgttcatctttcttgtccctatctgtgtggct

SEQ ID NO: 473957 - DNA, 201 bp, Homo sapiens
ttcctgtcttcacctgtgcttccaaatgtcctcaggcacatatatgtgtccctactcatactcactcacaagcgtctgcccaggcacctccactcataccygggtcctgttgtgcaggcaactctcagagggcagggttcttcagcttcccggttccatcttgttcatcttcctcatcccttgttgtctggctgcccaata

SEQ ID NO: 473958 - DNA, 201 bp, Homo sapiens
ttctcctgaatgacaataatagttttctaactgatctcctgcctccagtactgtgtactgactcttggcacagcctttagaatagcctctaaaataaatayctgatcacattgctcccctacttaaaatcctttaatgattttttgcttcctatgaaaatcctttaatgatttcttgctttctatgataatgtctaaagtc

SEQ ID NO: 473959 - DNA, 201 bp, Homo sapiens
gtggatgaggggggaccactttagattcatcagggcatcaatttggctacatatggcttatctctttttctaaatactatatacatatatgtatatatacrtacacagatttttttgctgagccattgggaagtaacttgcagatatcatgacacttcaaccctaaacactaaatcatatatctcttaagaacaattaaat

SEQ ID NO: 473960 - DNA, 201 bp, Homo sapiens
atgaccatggaacaggagtcaccccctttctgtcacttgtcaacaaatgcggattcttttttcacatgtaggtagcatgcaccagggggtgcttctgcccyttcctagggacaaagggagaagaaaagaatgcaggaagatttggactgtgtctttggggtggcattgcgactctgagtgtcagaggacctcgtttttaac

SEQ ID NO: 473961 - DNA, 201 bp, Homo sapiens
aggatggtgccctggctccacagctgcatgtaagaaagggcagttggggcagcccaccatggcttcccctggcagtttccaggaactgccgggcatgagtygccccacactcagcaccccgtagctcctttttttttttttttaccaggaagataggggccttctggccttactgtggccccagccaaggagggcaagctg

SEQ ID NO: 473962 - DNA, 201 bp, Homo sapiens
cttgacacgggcacaagggtgtgggcccaagtgttcccccacacagacatgtacgcacatgcacccccacaggcataacactgcccacaaactctcccatrcaggctctgaatcaccacttgcgatgggcatgcttttttgtctccaggcctgggtcatcatgccattgattgggtaacttgggcgttcctttgagaatga

SEQ ID NO: 473963 - DNA, 201 bp, Homo sapiens
cttcagcttcccggttttctcttattcatttttgttctccctttctgtctggcttcccagtatttgctggtggagtgtgtgggatggtgtgggggtggggkcagtgtggagcagcgcagtctcttggctccactggcctctgtgtggacccagtacaaaccctggcctaagggtctgatgcttttctctggtaggtgactc

SEQ ID NO: 473964 - DNA, 201 bp, Homo sapiens
gggcctcctctgtgttcctgtgctgggcatggaagtgaaggttgaggctggcgtgtctttgcagatggtgaggtggctgttccttggtttgataccgagcwctctgggctcctcaagctgaattctattgcttgtcagattattcagcctggaaaatggatgagacagtggaggacaaattgtgccaccccttttgggtct

SEQ ID NO: 473965 - DNA, 201 bp, Homo sapiens
ggattaagtttattgatttgaatatgttgaaccagccttgcatcccagggatgaagccgacttgatcgtggtggataagctttttcaaatgctgcctaaawtcctctttctttgttgtgtctctgtcaggctttggtatcaggatgatgctggcctcataaaagttggggagttagggaggattccctctttttctattgt

SEQ ID NO: 473966 - DNA, 201 bp, Homo sapiens
ccgacaaccacaaatataatcacaaacacacatgcacagggagatacacacacagacacaaagacatacactaacacatgcacactcacaaactcatagacacacacacacacacacacacacacacaaatcctcacacaggcccaggggtgcgggctcaagcattcacccacacagacgcacacacacatgtgtcgccat

SEQ ID NO: 473967 - DNA, 201 bp, Homo sapiens
ccagggatgaagccgacttgatcgtggtggataagctttttcaaatgctgcctaaaatcctctttctttgttgtgtctctgtcaggctttggtatcaggaygatgctggcctcataaaagttggggagttagggaggattccctctttttctattgtttggaatagtttcagaaggaatggtaccagctcctctttgtacc

SEQ ID NO: 473968 - DNA, 201 bp, Homo sapiens
tcgcggatctctgtgcctggcagaaggcaagtgtccctgcagcctgttgtcatgttcagaaacaccttccgctggatggcactgtggctccacagatgacwgtcacgtcttttccttcccttcccttgcctttgtctttctccatttgttgcgaacagaataaaacaaaaacacacacacaaagcgaagaaacaaagaaag

SEQ ID NO: 473969 - DNA, 201 bp, Homo sapiens
gtcaacctgagaccaggtggctggctcctttttatcctccctgtcttttttttgtttctctttcccttttctttttttcacattggaaagggtggaggccrtcggattggaggggcagggttaagcttgtagttggcctttgtagagccatagtgccatcgagcggaatctgtttctggaaactggaggcagctgggcatg

SEQ ID NO: 473970 - DNA, 201 bp, Homo sapiens
tgatggtagtttgtatttctgtgggatcagtggtgatatcccctttatcattttttatcacatctatttgattcttctctcttttcttctttattaggctrgctagaggtctatctattttgttgatcttttcaaaaaacgagctcctggattcattgatttttttgatgggtttttcttgtctctgtattcttcagttct

SEQ ID NO: 473971 - DNA, 201 bp, Homo sapiens
tgtcttctatttttctgcatgagcatgagccatgaaacctggagagggccaaaggaaaagcaaaggctggcggcataaagaggatttccgcagtgtctccygcctactggtcctaggtcgtagggtcccttaagtttggtggtcaacctgagaccaggtggctggctcctttttatcctccctgtcttttttttgtttctc

SEQ ID NO: 473972 - DNA, 201 bp, Homo sapiens
ccagcaccttgtcttggaacggcagccctttaatcccaagcctcttgtgtcccagtgcccatgattatctgtcatttgtcttttactttctgcaggagcargagacatgaaacctggagaaggccaaagaagggcaaagactggctgcctaaacagtattcctgcagggtctccagcctactggtccttggtcattgggac

SEQ ID NO: 473973 - DNA, 201 bp, Homo sapiens
atctgtggcaacgtggtggcctttttgagtccccctaagccacatcctcccacccctgcctgtgtgaaagccaggacagcctgtgcagagtcagacttgcrcgagttgctgagtgtgctttctaagggatacacctgcctcaggtcctgtggctccctgttgagcagtctgcccgttctggtgacctccatctgccagccc

SEQ ID NO: 473974 - DNA, 201 bp, Homo sapiens
gatgacatcctcagggcactgttcagcctacacctgtgtcttctgtagctcctgcaggactatttgtggatcaaagcttttgatcccactcaggaaagatytcattgacaagaagcttctcggttgtgtgtcctttaagtgggacatgaccggtggctccctgccactcgttgtgtatgtcatcacacattcaggtccccc

SEQ ID NO: 473975 - DNA, 201 bp, Homo sapiens
ttgtctgtaaaggattttatttctcctttgcctatgaaacttagtttggctgaatatgaaattctgggttgaagattcttttctttaagaatgttgaatattggcccccactcttttctggcttgtagggtttctcccgagagacctgctgttagtctgattggcttcccttgtaacccaacctttctctctgtctgccct

SEQ ID NO: 473976 - DNA, 201 bp, Homo sapiens
gctttgttctagggctctaaaccctggtcggggaaaccctggctcaggcagagtccacccagccccgcatatttttgctgacctcggtgcctagcagaagrcaagtgtttccgcagcctgttgtcatgttcagaaacaccttctgctggatggcactgcgactccacaaatggcagtcatgtcttcttcttcccccactgt

SEQ ID NO: 473977 - DNA, 201 bp, Homo sapiens
cactggccaaggtcggagccggctccctcagcttgcggggaggtgtggagggagagccgcgggcggtaacacgagctactcgccgcgcttgcgggccaccrggagttgccggtcggcatgagctcggcgggccccgcactccgagcagccagttggacctgcctgcccagggcagtgaggggcttagcaactgggccagca

SEQ ID NO: 473978 - DNA, 201 bp, Homo sapiens
gggctcattcccaggatggcgccctggctccgcagctgtatgtaagaacgggcaggcggggcggcccgccatggcttcccctggcagtctccaggaactgscaggcatgggtcgccccacactcagcactccgaaacttttttatttcccggcaagatagaggctttctggccccactgtggccccagccaagggcatcgc

SEQ ID NO: 473979 - DNA, 201 bp, Homo sapiens
gtcattataaaggttctcaggaagccttcttatggcttcttttatgtcttcatcctcatatattgtatcatctctcattaaccccagtttattgaatcctrcagtattgtaataccattttcgaataccatccagccacttgcctgatgctgaaatggcctgcttgccagccattttgacctgctttaattttttttaatc

SEQ ID NO: 473980 - DNA, 201 bp, Homo sapiens
acccctaccctgctttggctgaccctccttgggctgcacccactatccaaccagtcccagtgagatgaacctggtacctcagtttgaaatgcagaaatcayccatcttctgcatcgatctcgctgggagctgcagactggaactgctcctattccaccatcttgccagcttcccacttttttttatcttcactgtctttac

SEQ ID NO: 473981 - DNA, 201 bp, Homo sapiens
tttgaatttctgcagtatcagttgtaatgtgtcctttttcatctctggttttatttatttggatcttccctctttttttcttagtctgggtaaaggtttgycaaatttgtttcacatttcaaaacaccaactttttatttcatttacttatttattttgtattgttttcttcattccaatttcatttatttcggctctggt

SEQ ID NO: 473982 - DNA, 201 bp, Homo sapiens
agtgcttcagggccttaaatgttatgctgagcatatacttcattccaatatccatcaagtgctactatttgtattttaagattcctattcttactatcagraaaggaatctctgatatttagatgaactttatagaatgcaaattataaaactgaatctgacccaagttttatagatccttttaattcaaaggagagaagc

SEQ ID NO: 473983 - DNA, 201 bp, Homo sapiens
ataaattacaataatcaattttctaatgtatttcttgcttttgctttcatcgagcctcgtcattggatatttggttcctattttaatcattttgacttttatttttatattgaactttcttctactttccttttattgttctttttctaatttattgagttgaatctttagcatcttaattttcaatgttcttctgtaaaa

SEQ ID NO: 473984 - DNA, 201 bp, Homo sapiens
aaagcaggtaaaaggagggcaggagaaagtcagagagagattctgttttgtgaagcctaaagtgccccaacattatacatatatatgtgtgtttgtgtgtrtatatatatatatatatatatatatatatgtatgtatatatatatatttttatatatatatatatagagagagagagagagagagaaactgtctctcact

SEQ ID NO: 473985 - DNA, 201 bp, Homo sapiens
gtttattgaatcctgcagtattgtaataccattttcgaataccatccagccacttgcctgatgctgaaatggcctgcttgccagccattttgacctgcttyaattttttttaatccttcttataacaagatacaaaaattatacactggctgctcatcccaacagaatttggcaatataaaacattttctttcattaaata

SEQ ID NO: 473986 - DNA, 201 bp, Homo sapiens
aagcaggtaaaaggagggcaggagaaagtcagagagagattctgttttgtgaagcctaaagtgccccaacattatacatatatatgtgtgtttgtgtgtgtatatatatatatatatatatatatatatgtatgtatatatatatatttttatatatatatatatagagagagagagagagagagaaactgtctctcactt

SEQ ID NO: 473987 - DNA, 201 bp, Homo sapiens
agcaggtaaaaggagggcaggagaaagtcagagagagattctgttttgtgaagcctaaagtgccccaacattatacatatatatgtgtgtttgtgtgtgtatatatatatatatatatatatatatatgtatgtatatatatatatttttatatatatatatatagagagagagagagagagagaaactgtctctcacttt

SEQ ID NO: 473988 - DNA, 201 bp, Homo sapiens
aggatttggttaaatatctactgtctataaaattgtacgtttctaaagtattttatctctatcgtaattttaatgtttgtaagttttgacttgtgttttayttgtagaatatatggaaataattctacatatcaataaattggcttgcttgtagtaaaaatgttgcaagcatattaaatatctttcaacagaatttgaaca

SEQ ID NO: 473989 - DNA, 201 bp, Homo sapiens
ccttctcttccaacatcctcttcttctccttctcctcctccttctcctccatcatctcctccctcctccttcttctttctcctccttctccttctttctgyttctttttcttcttcttcttcttcttgtgcctctgcctcctcctcctttgcctcttctttttttgcttttgcttctgcttcagctttttttccccccttc

SEQ ID NO: 473990 - DNA, 201 bp, Homo sapiens
tgtctgtaaaggattttatttctcctttgcctatgaaacttagtttggctgaatatgaaattctgggttgaagattcttttctttaagaatgttgaatattggcccccactcttttctggcttgtagggtttctcccgagagacctgctgttagtctgattggcttcccttgtaacccaacctttctctctgtctgccctt

SEQ ID NO: 473991 - DNA, 201 bp, Homo sapiens
cctctgtgcggatgtggtggagatctgggattatgggactgactctttctcctggctgatggctccctctctgtgagcccacaggaggccacttgggctgmcagctgcccacctggagcactctgcattccagttcactctcaacttcattgctcactctgattctttgtgtagttttggaggttttctcccttcactttt

SEQ ID NO: 473992 - DNA, 201 bp, Homo sapiens
ccttgggacatcgggtgaagtaaggaacgcaggaactttggtgttgttagttttagtgtcagaggttcttgtttttacctttgaacatcaatcacgtctgwactatatcctgtcttcatctgtggttgcataggtcctcaggcacatacaagtatcttctccagtaatgacaagcttctgcctagacaccttcattcacaa

SEQ ID NO: 473993 - DNA, 201 bp, Homo sapiens
tgtctgacttcccagtatttgttggcataatgttcaggatggggttggggtgggggcagcggggagcagggcagccccctggcctaacaggcctctgtgcrgatgtggtggagatctgggattatgggactgactctttctcctggctgatggctccctctctgtgagcccacaggaggccacttgggctgccagctgccc

SEQ ID NO: 473994 - DNA, 201 bp, Homo sapiens
cccatgggtaatgattcccacaatcaggggtgcgtgaaccactctcacaagaggaacgtcaatctcgtgtatgggcctgcactctctgggcattccgtggmgaagacccacatgaccatggaacaggcttcacccgatttcttttaattgtcaacaaatgcaggtccttttttcatatgtaggtagcatccaccacgggcg

SEQ ID NO: 473995 - DNA, 201 bp, Homo sapiens
acagacacaatgcacgcactcacaagggaacatgaaccagaaatgaaatcacaaacacacatgcacacagacacatgcacacacagacacaaacacacacrttaaacaagcccaagcagacacacgcacacacacacacaaacacacagaagtaagctcacactagcaaaggggcgtgggcttaagcattgttgtacacag

SEQ ID NO: 473996 - DNA, 201 bp, Homo sapiens
gaatgaattcgggaagtctgttatcagataggctcaagcagcaggcatgaaactggagcatcctgggtcaagctgcttaaaaagggcccccaagccttgtscctgtgtgatgccatgagaagctgtggtacttggtggccttccccagcctctctgagccaccctcctcccaaccctacctctgtgaaagccgagacagcc

SEQ ID NO: 473997 - DNA, 201 bp, Homo sapiens
aaatgaatgagatggtcgaggacaaattatgccggccctttagggtctccaggcagacataagaaagcctgacgtggtccatcatacaaagcccatgttgrgatgcgaagccatgaccgtgttgctctaaaggttacatatgctacccatgctgctcagtgcctgggcagcagcttggaacacaatgctctctgaatattg

SEQ ID NO: 473998 - DNA, 201 bp, Homo sapiens
acaaacaagcattcctggctgcaggtgtgggtcatcatgccatttattgggcaactaaggccttcttctgaacataaatgcaggaagtctgttatcagatwggcccaagcagcaggtgtgaaactggagcatcctgggtcaagctgcttaaaaagggaccccactttggggtaggggtagataaagtccccttgggatcct

SEQ ID NO: 473999 - DNA, 201 bp, Homo sapiens
tggccccagccaaggagggcaagctgtaactgcccacagaagaaaccagagtaaaccacttcattctctggctgtcagtggccagtggcttcccttatgcrtatctcaaaatggctggggggcagctccactgtgtggactgactcgtcttggggctgcctggctgccctgtgtcagggcctctagagtaactgcttctcc

SEQ ID NO: 474000 - DNA, 201 bp, Homo sapiens
agactgaagcaggatgagagaggagctcctcactggcccttggcctgggctcattcccaggatggtgccctggctccacagctgcatgtaagaaagggcakttggggcagcccaccatggcttcccctggcagtttccaggaactgccgggcatgagttgccccacactcagcaccccgtagctccttttttttttttttt

SEQ ID NO: 474001 - DNA, 201 bp, Homo sapiens
ttcctactgggaggtgtctcccagtcaggatacatgagtgtcagggattcacttgaggaggcagtctgtcccttatcagagctcaaacgctgtggtgggaratctgctgctctattcagaggtaccaggcagggacgtttaaatctgctgaagctgcacccccaactgttccttcccccaggtgctctgtcacaaggaggt

SEQ ID NO: 474002 - DNA, 201 bp, Homo sapiens
cagcatggaacacacagctcttcaaatattgcaaatgttttctgtctttgcttgttacaaatcttcctggatgtgtaggccgcactgggaatgagcagagyttcataggacagaaaattcatgccacgggtaatgattctcacactcatgagagtgtgaaccactctcacaagaggaacatcaatctcgggtgtgggcctg

SEQ ID NO: 474003 - DNA, 201 bp, Homo sapiens
ttttattgagttgtttttgagtggttattgaatggctttattgaatgttatatgcaatattttttctccatttattttactctgtaacttttttttttcgkggcttatcagggcatttaagaaacagttttattaaagttgattatatatcaattagggattattaagtcattattttaagaagatcatttctcttttgca

SEQ ID NO: 474004 - DNA, 201 bp, Homo sapiens
gcaggtaaaaggagggcaggagaaagtcagagagagattctgttttgtgaagcctaaagtgccccaacattatacatatatatgtgtgtttgtgtgtgtatatatatatatatatatatatatatatgtatgtatatatatatatttttatatatatatatatagagagagagagagagagagaaactgtctctcactttt

SEQ ID NO: 474005 - DNA, 201 bp, Homo sapiens
caggtaaaaggagggcaggagaaagtcagagagagattctgttttgtgaagcctaaagtgccccaacattatacatatatatgtgtgtttgtgtgtgtatatatatatatatatatatatatatatgtatgtatatatatatatttttatatatatatatatagagagagagagagagagagaaactgtctctcactttta

SEQ ID NO: 474006 - DNA, 201 bp, Homo sapiens
gaagcctaaagtgccccaacattatacatatatatgtgtgtttgtgtgtgtatatatatatatatatatatatatatatgtatgtatatatatatatttttatatatatatatatagagagagagagagagagagaaactgtctctcacttttatttctctgaagctgtttcaaagctgcttcaggaaccaaagacaaaag

SEQ ID NO: 474007 - DNA, 201 bp, Homo sapiens
ggagatggctgatggctacgctgtagaccgggccattacccacctcaacaacaacttcatgtttgggcagaagctgaatgtctggtaggtgctcaggctcrggagggcagcagaggtacaggggagagaaaaggaggggaatggggcccagcagaggagcacagtgaggccgaggtgttgactcacacagaaatgggatgt

SEQ ID NO: 474008 - DNA, 201 bp, Homo sapiens
tctcaggcaaaagtgagtcgagtgtgcccacctccttgccctaattgcatggtggttggtgggcagctgcctagttcctattgggtgagtctaaaaccttkacttttccccttggtttgcaatcaggtgagcgcagctcctctggactgctggagtgggaatccaagagcgatgccctggagactctgggcttcctgaacc

SEQ ID NO: 474009 - DNA, 201 bp, Homo sapiens; identical to SEQ ID NO: 278307

SEQ ID NO: 474010 - DNA, 201 bp, Homo sapiens; identical to SEQ ID NO: 278331

SEQ ID NO: 474011 - DNA, 201 bp, Homo sapiens
cgccctggggactcggatgactcccggagcgtgaacagtgtgcttctctttaccatcctgaaccccatttattcgatcaccacggtacgtgccagcaggcrtttcttgtgaggtctcccttccttttctccccttattccctcccccaagccagactgatctgccagtgccccttcatcttgcctgtgtttgcttttgcag

SEQ ID NO: 474012 - DNA, 201 bp, Homo sapiens
cccgccctggggactcggatgactcccggagcgtgaacagtgtgcttctctttaccatcctgaaccccatttattcgatcaccacggtacgtgccagcagkcatttcttgtgaggtctcccttccttttctccccttattccctcccccaagccagactgatctgccagtgccccttcatcttgcctgtgtttgcttttgc

SEQ ID NO: 474013 - DNA, 201 bp, Homo sapiens; identical to SEQ ID NO: 278312

SEQ ID NO: 474014 - DNA, 201 bp, Homo sapiens
ttgcagaggagttcagaggccatggaggagtcagttctcaaaaaatcaaatgataccctcctcctgtctacattttcctgagaggattgaaacctgtgttytctctgccagctatgtggtggtaatgcctaaaaagagacaagcactggtggagtttgaagatgtgttgggggcttgcaacgcagtgaactacgcagccga

SEQ ID NO: 474015 - DNA, 201 bp, Homo sapiens
ttgtctctcctttgcagatggtccatacccttacactctgaagttgtgtttctccactgctcagcacgcctcctaattaggtgcctaggaagagtcccatytgagcaggaagacatttctctttcctttatgccattttttgtttttgttatttgcaaaagatcttgtattcctttttttttttttttttttttttttaaa

SEQ ID NO: 474016 - DNA, 201 bp, Homo sapiens
tgcaggatgttctttacactatctgtaatccttgtggccctgtccagagaattgtcattttcaggaagaatggagttcaggcgatggtggaatatcctttsctggaaaacaggtgttccttagggtagggactcttgcagggcttgacagtggccattctttgagccagcatgtgtctgctgaccacgggagtggctgcca

SEQ ID NO: 474017 - DNA, 201 bp, Homo sapiens
gggcccagcagaggagcacagtgaggccgaggtgttgactcacacagaaatgggatgtggcaggtgtgttcccagacgtgtctctgacaccacaggagaamgtgagtcagccttgcctcaggtgtagagcaatgccccaaggcacacagggcaagctaagcctctggaggccacaggggaaagcttcagggacaactttgg

SEQ ID NO: 474018 - DNA, 201 bp, Homo sapiens
cgctggaggtgaccgaggagaacttctttgaggtgtgtgccgtggagctgcgcaggcagtcgggtccttgccacggccgtctgagtaggccattcatttcrgtcttttctgcaaatagctgttgaactcctgtcctgcctggccctgggttgagtgctagggacacagcagaggccaggacagataggaatctgtgctctc

SEQ ID NO: 474019 - DNA, 201 bp, Homo sapiens
ggggaatggggcccagcagaggagcacagtgaggccgaggtgttgactcacacagaaatgggatgtggcaggtgtgttcccagacgtgtctctgacaccayaggagaaagtgagtcagccttgcctcaggtgtagagcaatgccccaaggcacacagggcaagctaagcctctggaggccacaggggaaagcttcagggac

SEQ ID NO: 474020 - DNA, 201 bp, Homo sapiens
gcgttgagtccatcaacaccgttttggtctcttaacctgaggctagtggctgggcagtgagctaatcccaaagcttccgtctgtaccacagtcttggggtrctaccttgtccttatcacactctggggtaacttgaagcccttctcaaagatctcctgtgatgggactttccttaacttgactcacatttgactcagttca

SEQ ID NO: 474021 - DNA, 201 bp, Homo sapiens
gtgagactccatctcaaaaaataaataaaagacttttcttgtctggtttttcttagtctgacctaggcagtaatttccaaagcagattttggtgggagggygattcaagactagaaggggtcaagactggcctggctgccccagtttctggggcatgtgttgttttttgccctgactgaacctgggtgtgagtggtgggga

SEQ ID NO: 474022 - DNA, 201 bp, Homo sapiens
cgttttggtctcttaacctgaggctagtggctgggcagtgagctaatcccaaagcttccgtctgtaccacagtcttggggtgctaccttgtccttatcacwctctggggtaacttgaagcccttctcaaagatctcctgtgatgggactttccttaacttgactcacatttgactcagttcaaagtgcccagcgggccaag

SEQ ID NO: 474023 - DNA, 201 bp, Homo sapiens
cttgagcctgggaggcggagattgcagtgagccgagactgtgccactgtattccatcctgggcaacacagcgagactccatatccaaaaaaaaaaaaaaaaggtggggcatgtgtgaaggttgctgaggaggtgatgtcctatgagcaaataggagcttatactcaaggtggaggaaacagcctctgcaaaggttgtaaag

SEQ ID NO: 474024 - DNA, 201 bp, Homo sapiens
aggtcaggagttcgagaacagcctggtcaacatggcaaaactccgtctctactaaaaatacaaaaaaattagccaggtgtggtggcgagggcctgtaattscagctactcgggaggctgaggcaggagaatcgcttgaacctgggaggcggaggttgcagtggactaagatcacgccatagcactccagcctgggtgacag

SEQ ID NO: 474025 - DNA, 201 bp, Homo sapiens
catgttggaagcatttcgaccccctgtaatcagtccctccgaaaacaccagtcgttgcttttggagtggggcccagtccccactctttccaaaatcttgargtcttacagggccgcctatttgcagggttttccagggtttaggggttacgagttgctagcgttttaatcttggccttgtcccacacattttaaagacatc

SEQ ID NO: 474026 - DNA, 201 bp, Homo sapiens
atccttctgggctgattggcttcaattgctgcccctagtctttcctgtgcatccttcacggatgacctccaactgttttatctgactgggtctacaacagyacagaggccagtggggcgtcatcttgtacagcaagaaaataattcttgtttttgcttcctttctcaggagaactacgatgacccgcacaaaacccctgcc

SEQ ID NO: 474027 - DNA, 201 bp, Homo sapiens
ggcttcaattgctgcccctagtctttcctgtgcatccttcacggatgacctccaactgttttatctgactgggtctacaacagcacagaggccagtggggygtcatcttgtacagcaagaaaataattcttgtttttgcttcctttctcaggagaactacgatgacccgcacaaaacccctgcctccccagttgtccacat

SEQ ID NO: 474028 - DNA, 201 bp, Homo sapiens
ttaatccttaatgagatggacaggggaagtggaggacggggcttaaataacgcgcccaggttcacatagcctttatgtgaagcaggactcagagccagacygcctggctccagagccggcactgctctgttgtaacccagctgaaggagtattttaccttgtgactgtagacacagccatccatagatcacacacgtctgt

SEQ ID NO: 474029 - DNA, 201 bp, Homo sapiens
ttttgcatctagtctaaaaaaaacagcacttcaaaaagcacttcattcagtgcttctctaattttagttatttctcttctgccagctttggagttagtttrttctttttttctagttcccttaagtgcaaagtaggaaagttaatttgagatatttctaacttcttgatgaaggcatttcgtgtgtaaactttcctcttaa

SEQ ID NO: 474030 - DNA, 201 bp, Homo sapiens
cactgcatgcgatgtttgcctcacataagtgagtttttcttccctgattttgtcctttgctaaggaaactgaactgaactgaagtccaggtcttctgtaayagagtgtctctccttcaacagggaacaacactacagtcgcccgtagttttgtttctgttcagtctccattgtggcatgccacactctcctggtttgggcc

SEQ ID NO: 474031 - DNA, 201 bp, Homo sapiens
ctgattttgtcctttgctaaggaaactgaactgaactgaagtccaggtcttctgtaatagagtgtctctccttcaacagggaacaacactacagtcgcccrtagttttgtttctgttcagtctccattgtggcatgccacactctcctggtttgggccctgctcatttctttactgccttcctgcctgccctttttgtgca

SEQ ID NO: 474032 - DNA, 201 bp, Homo sapiens
ctgccttaatttagattttcacccaggagttattcaggagcaaattatgtaattaccatgtatttatgtagttttgagagatcttcttgatactgatttcwatttttgtctcactgtggtcagagtgtgtgcttggtatgatttcaaactttttgaatttattgaggcttgctttatggccaagcatgtgcttgatcttag

SEQ ID NO: 474033 - DNA, 201 bp, Homo sapiens
gattttgtcctttgctaaggaaactgaactgaactgaagtccaggtcttctgtaatagagtgtctctccttcaacagggaacaacactacagtcgcccgtmgttttgtttctgttcagtctccattgtggcatgccacactctcctggtttgggccctgctcatttctttactgccttcctgcctgccctttttgtgcagg

SEQ ID NO: 474034 - DNA, 201 bp, Homo sapiens
ttttgtcctttgctaaggaaactgaactgaactgaagtccaggtcttctgtaatagagtgtctctccttcaacagggaacaacactacagtcgcccgtagytttgtttctgttcagtctccattgtggcatgccacactctcctggtttgggccctgctcatttctttactgccttcctgcctgccctttttgtgcaggta

SEQ ID NO: 474035 - DNA, 201 bp, Homo sapiens
tgaactgaactgaagtccaggtcttctgtaatagagtgtctctccttcaacagggaacaacactacagtcgcccgtagttttgtttctgttcagtctccaytgtggcatgccacactctcctggtttgggccctgctcatttctttactgccttcctgcctgccctttttgtgcaggtaggtcatcccattcatgctcagc

SEQ ID NO: 474036 - DNA, 201 bp, Homo sapiens
gaactgaactgaagtccaggtcttctgtaatagagtgtctctccttcaacagggaacaacactacagtcgcccgtagttttgtttctgttcagtctccatygtggcatgccacactctcctggtttgggccctgctcatttctttactgccttcctgcctgccctttttgtgcaggtaggtcatcccattcatgctcagcc

SEQ ID NO: 474037 - DNA, 201 bp, Homo sapiens
tgccccctaaagcagatagagattagatcacagtatccaagttctttcaaatatctggaaagccttcccaagaacgatgggcacaaacaagccctgacagkgaaaactacaataaatacagtgaaaactacaaccaatacctaactcttcaatgcccagacaccaaagaacatatgctagcatcaacactatccaagaaaa

SEQ ID NO: 474038 - DNA, 201 bp, Homo sapiens
atctattttagaagagaagaaattcagaaatgactttcccagttggggaatcacctataaataatcttgaaaaagcttaaaacttggtaatctcagtagckttttgagagtagcgaaaaccatagttctttgtagcttatcatgtttagttggttggtaccactgcatgcgatgtttgcctcacataagtgagtttttctt

SEQ ID NO: 474039 - DNA, 201 bp, Homo sapiens
tacagtcgcccgtagttttgtttctgttcagtctccattgtggcatgccacactctcctggtttgggccctgctcatttctttactgccttcctgcctgcyctttttgtgcaggtaggtcatcccattcatgctcagccctcctcgctgtctacactgtcttcttgggcaatcgtatccagtcccaagccttttaaaaaaa

SEQ ID NO: 474040 - DNA, 201 bp, Homo sapiens
tatacagaaaaatgcagaatgttataacactgtaactatgatgtataaactactcttattctaagtagagagactaaactatgagccaatcaaaaatactractacaacttttcaagacatagatggtataatacgatataaatagaaataacaaaaagttaaaaaatagggagacaaagttaagttgtagagtttttatt

SEQ ID NO: 474041 - DNA, 201 bp, Homo sapiens
acagtcgcccgtagttttgtttctgttcagtctccattgtggcatgccacactctcctggtttgggccctgctcatttctttactgccttcctgcctgccstttttgtgcaggtaggtcatcccattcatgctcagccctcctcgctgtctacactgtcttcttgggcaatcgtatccagtcccaagccttttaaaaaaac

SEQ ID NO: 474042 - DNA, 201 bp, Homo sapiens
atgccacactctcctggtttgggccctgctcatttctttactgccttcctgcctgccctttttgtgcaggtaggtcatcccattcatgctcagccctcctsgctgtctacactgtcttcttgggcaatcgtatccagtcccaagccttttaaaaaaacaagctatacccatcctggtggaattcctgcctataaaagggcg

SEQ ID NO: 474043 - DNA, 201 bp, Homo sapiens; identical to SEQ ID NO: 451878

SEQ ID NO: 474044 - DNA, 201 bp, Homo sapiens
cactctcctggtttgggccctgctcatttctttactgccttcctgcctgccctttttgtgcaggtaggtcatcccattcatgctcagccctcctcgctgtmtacactgtcttcttgggcaatcgtatccagtcccaagccttttaaaaaaacaagctatacccatcctggtggaattcctgcctataaaagggcgcacctt

SEQ ID NO: 474045 - DNA, 201 bp, Homo sapiens; identical to SEQ ID NO: 451880

SEQ ID NO: 474046 - DNA, 201 bp, Homo sapiens; identical to SEQ ID NO: 451884

SEQ ID NO: 474047 - DNA, 201 bp, Homo sapiens; identical to SEQ ID NO: 451887

SEQ ID NO: 474048 - DNA, 201 bp, Homo sapiens; identical to SEQ ID NO: 451889

SEQ ID NO: 474049 - DNA, 201 bp, Homo sapiens
tagcagggcatggtggcacacacctgtaatcccagctactcgggaggccgaggcaggagcattgcttgtacccaggaggcagagattgcagtgagctgagrtcacgccattgcactccagtctgagcaacaagagcaaaacttcgtctcaaaaaaataaaaaattaaaaaataacaaaaaatgagacagaaaacaaatatt

SEQ ID NO: 474050 - DNA, 201 bp, Homo sapiens
aaaaaaaaaaatttaaaataattaacaggagcattcactacaaactgacttaagagcctttgggccttatgagaacattggtggtggtctggcagtacccsctccatggcctgtgtttgaggtggccatggattgatgctcctctgcctttggacaggggtggaaagagtgggagggactgcatcttgtggtttgagtgac

SEQ ID NO: 474051 - DNA, 201 bp, Homo sapiens
tatttttgtctcactgtggtcagagtgtgtgcttggtatgatttcaaactttttgaatttattgaggcttgctttatggccaagcatgtgcttgatcttakaatatgttctgtgtgcacataagaatgtatcttctgtgtttgttgggcaaagtgttctgtagatgtctatcaggtccaattggtcaactgtcaagtgcga

SEQ ID NO: 474052 - DNA, 201 bp, Homo sapiens
gtacagagtttgttagttttctgcctcaatgatctgtctattgctgtcagtgggttgttgaagtctcctgctgttattgtgtgtctaaatctttttgtagrccaagaaaaacttgttttatgaatttgggtgctccaatgttgggtgtgtacatatttaggctaggtcttctggttgaattgtgtcctttatcattctata

SEQ ID NO: 474053 - DNA, 201 bp, Homo sapiens
gaagtctcctgctgttattgtgtgtctaaatctttttgtaggccaagaaaaacttgttttatgaatttgggtgctccaatgttgggtgtgtacatatttargctaggtcttctggttgaattgtgtcctttatcattctataaggaatgctcttctttgtccttaatttttattcgttaaaaatatgttttatttggccag

SEQ ID NO: 474054 - DNA, 201 bp, Homo sapiens
ccaatgttgggtgtgtacatatttaggctaggtcttctggttgaattgtgtcctttatcattctataaggaatgctcttctttgtccttaatttttattcrttaaaaatatgttttatttggccaggcgcagtggctcatgcctgtaatcccagcactttgggaggccgaggcgggtggatcacgaggtcaggagttcgag

SEQ ID NO: 474055 - DNA, 201 bp, Homo sapiens
attgtgtcctttatcattctataaggaatgctcttctttgtccttaatttttattcgttaaaaatatgttttatttggccaggcgcagtggctcatgcctktaatcccagcactttgggaggccgaggcgggtggatcacgaggtcaggagttcgaggccagcctgaccaacatggtgaaaccctgtctgtactaaaaata

SEQ ID NO: 474056 - DNA, 201 bp, Homo sapiens
ggtgtggtagagcacccctgtaatcccacttactcgggaggctgaggcaggagaattgcttgaacccaggaagcagaggttgcagtgagccgagactgcaycactgcacttcagactggcaagagactgagactccatattaaaaaaaaaaaaatcaaccacttagaatagtaacacacattaagcagatcatacatctag

SEQ ID NO: 474057 - DNA, 201 bp, Homo sapiens
tgtcttcttgggcaatcgtatccagtcccaagccttttaaaaaaacaagctatacccatcctggtggaattcctgcctataaaagggcgcaccttcagacytccaggcatgtccagcgaacactgctatgcacacggaaccaaattcagttgtgtgggacctgcagctgcaattgggtttccaacttccattgctgatgat

SEQ ID NO: 474058 - DNA, 201 bp, Homo sapiens
ggagaattgcttgaacccaggaagcagaggttgcagtgagccgagactgcaccactgcacttcagactggcaagagactgagactccatattaaaaaaaawaaaatcaaccacttagaatagtaacacacattaagcagatcatacatctagaatgggttaagcaaccatttgtaagcatcttcataagaaatgatcacct

SEQ ID NO: 474059 - DNA, 201 bp, Homo sapiens
ttttaaaaaaacaagctatacccatcctggtggaattcctgcctataaaagggcgcaccttcagacctccaggcatgtccagcgaacactgctatgcacamggaaccaaattcagttgtgtgggacctgcagctgcaattgggtttccaacttccattgctgatgatcaagttaaaatacgaatgtgctggattaaatgct

SEQ ID NO: 474060 - DNA, 201 bp, Homo sapiens
gcgcaccttcagacctccaggcatgtccagcgaacactgctatgcacacggaaccaaattcagttgtgtgggacctgcagctgcaattgggtttccaactyccattgctgatgatcaagttaaaatacgaatgtgctggattaaatgctttattcagcttatctgcatctaggttatctaaattacacacccacttaaaac

SEQ ID NO: 474061 - DNA, 201 bp, Homo sapiens
gcaattgggtttccaacttccattgctgatgatcaagttaaaatacgaatgtgctggattaaatgctttattcagcttatctgcatctaggttatctaaaytacacacccacttaaaacattctgtcacctcttctcttggaataattaattattttaatgtaattcagatctcattttatcctagcccagcagtacctgg

SEQ ID NO: 474062 - DNA, 201 bp, Homo sapiens
cagtgtgtgtgtcttttggtagaatggtctttttcccattgggtatatatccaatagtgggattactgggtcgaatggtagctcgttttaagttctttgaracatctccagactgctttccacagtggctgaactaatttacactcccatcaacaatgtataaatgttcccttttctctgcagccttgccagcatctgttg

SEQ ID NO: 474063 - DNA, 201 bp, Homo sapiens
ggtttccaacttccattgctgatgatcaagttaaaatacgaatgtgctggattaaatgctttattcagcttatctgcatctaggttatctaaattacacasccacttaaaacattctgtcacctcttctcttggaataattaattattttaatgtaattcagatctcattttatcctagcccagcagtacctgggagagaa

SEQ ID NO: 474064 - DNA, 201 bp, Homo sapiens
ctagcccagcagtacctgggagagaatgactcaatcatagtaaaatcatattaaattatattccactgattcagaattggagataatctggcaattaaagkgagaagtgtgtcattcctctcctggaagaaatgaacagtaatgatgggatcacagagatcatacatataagggcccaatacaggttcaaaacatgcccat

SEQ ID NO: 474065 - DNA, 201 bp, Homo sapiens
atgtcttcttttgagaagtatgtgtcatgttctttccacatttttaatggggttatttggtttctgcgtgtggatttgtgtaagttccttatagattctgsatattagacctttgttggatacatagtttgcaaatgtttcctcctgttctctgggttatctgtttgctctgtcgatcatttctcttgctgtgccaaagcg

SEQ ID NO: 474066 - DNA, 201 bp, Homo sapiens
cttacatacctggctcccaaccatactgttacaatttctatctttcaaactcactgtaaattacaaatgtggtacccaaatacctgtatgcacataaatakgaaaaggtaaactcttttttttttttttttttttaggtggattcttgctctgtcacccaggctggagcgtaatggcacaatcttcgctcacttcaacctc

SEQ ID NO: 474067 - DNA, 201 bp, Homo sapiens
aattctttcccaaggccaatgtcaagaagggtatttctgaggttttcttctaggacttttatcacttgaggtcttacatttaaatctttaatctatctccrgttaatttttgtatatgatgaaaggtatgggtcgagtatcattattctgcatattgctagccagttaccccaacaccatttattgaatagggagtccttc

SEQ ID NO: 474068 - DNA, 201 bp, Homo sapiens; identical to SEQ ID NO: 451882

SEQ ID NO: 474069 - DNA, 201 bp, Homo sapiens
tcaaactcactgtaaattacaaatgtggtacccaaatacctgtatgcacataaatatgaaaaggtaaactcttttttttttttttttttttaggtggattyttgctctgtcacccaggctggagcgtaatggcacaatcttcgctcacttcaacctctgccttctgggttcgagcaattctcctgcctcagcctcctgagt

SEQ ID NO: 474070 - DNA, 201 bp, Homo sapiens
ataggagtgatgagagtcggcatcattgtcttgctccatttctcatggggattggttccaacttgtgcccattcagtaggttggtggctgtgagtttgtcrtagatggctcctattattttgaggtatgttcccttgatgccgagtctgttgaggtttttaatgtgaagggatgttggattttatcagaagttgtttctgc

SEQ ID NO: 474071 - DNA, 201 bp, Homo sapiens
cagcgaacactgctatgcacacggaaccaaattcagttgtgtgggacctgcagctgcaattgggtttccaacttccattgctgatgatcaagttaaaataygaatgtgctggattaaatgctttattcagcttatctgcatctaggttatctaaattacacacccacttaaaacattctgtcacctcttctcttggaataa

SEQ ID NO: 474072 - DNA, 201 bp, Homo sapiens
aaactcactgtaaattacaaatgtggtacccaaatacctgtatgcacataaatatgaaaaggtaaactcttttttttttttttttttttaggtggattctygctctgtcacccaggctggagcgtaatggcacaatcttcgctcacttcaacctctgccttctgggttcgagcaattctcctgcctcagcctcctgagtaa

SEQ ID NO: 474073 - DNA, 201 bp, Homo sapiens
tgagaagtgtgtcattcctctcctggaagaaatgaacagtaatgatgggatcacagagatcatacatataagggcccaatacaggttcaaaacatgcccaycggcaactgccttacatacctggctcccaaccatactgttacaatttctatctttcaaactcactgtaaattacaaatgtggtacccaaatacctgtatg

SEQ ID NO: 474074 - DNA, 201 bp, Homo sapiens
cccaaatacctgtatgcacataaatatgaaaaggtaaactcttttttttttttttttttttaggtggattcttgctctgtcacccaggctggagcgtaatrgcacaatcttcgctcacttcaacctctgccttctgggttcgagcaattctcctgcctcagcctcctgagtaactgggattacaggcgtgtaccaccacat

SEQ ID NO: 474075 - DNA, 201 bp, Homo sapiens
cctgttctctgggttatctgtttgctctgtcgatcatttctcttgctgtgccaaagcgctttagctttattaggtcccacttgtcaatctttgttgttatwgcaattgcttttggggacttagttaaaaattctttcccaaggccaatgtcaagaagggtatttctgaggttttcttctaggacttttatcacttgaggtc

SEQ ID NO: 474076 - DNA, 201 bp, Homo sapiens
acaaggacaagtatcaggtctcctggcgaaactgactgatgctcaggtaacataccccaattccatgcttggttaactcttagtacacggatgggtcagcrttgaggcctgagatggccagacagatgcaaccatggagacagaggtggccacagctttgcagcttcacctgggcagtggcaagagcaccaaccttgaggt

SEQ ID NO: 474077 - DNA, 201 bp, Homo sapiens
gcaccaaccttgaggttggagactggtttataatattagtactgcccagggtggttatgaagattgaattagataagggaggtataagtactttgtaaaasttcacgttatacaaatttaagggaggattactatgagtaatagacaagttatctgtgctctatttgggacacaaagttgctgtgttactgttctctttcc

SEQ ID NO: 474078 - DNA, 201 bp, Homo sapiens
ctcttgttcccaggctctaagaacacaaggttttgtttggtagcccaggtctacgcctgggtcttgccaagtacaagaagctctagtgagggttgtatttygtttggtcactgaggtgtcgagggctggcccacatgaaccagcaggcctccagctgagtggcaaccccttacggtggggagaagacaggccaaacacaat

SEQ ID NO: 474079 - DNA, 201 bp, Homo sapiens
ggtcactgaggtgtcgagggctggcccacatgaaccagcaggcctccagctgagtggcaaccccttacggtggggagaagacaggccaaacacaatctacstctttttttcttttttcaactttctcattcttaagcattttaatagccccgattcttcctttaccatgtttttattaaacatagcagttaagtctgggag

SEQ ID NO: 474080 - DNA, 201 bp, Homo sapiens
aggtggattcttgctctgtcacccaggctggagcgtaatggcacaatcttcgctcacttcaacctctgccttctgggttcgagcaattctcctgcctcagmctcctgagtaactgggattacaggcgtgtaccaccacatctggctaatttttgtatttttagtagggacggtgttttaccatattggccaggctggtctt

SEQ ID NO: 474081 - DNA, 201 bp, Homo sapiens
tagccccgattcttcctttaccatgtttttattaaacatagcagttaagtctgggagcttgtctaatcccagaatagattcaaaatgctgagggagatggyaagaacaggtaaatgcatttgcattcacagcagtggggtgtgatggtgtttgctccctgcaggtatggtttctgtggattctctgctctttgtgctctcc

SEQ ID NO: 474082 - DNA, 201 bp, Homo sapiens
gattcttgctctgtcacccaggctggagcgtaatggcacaatcttcgctcacttcaacctctgccttctgggttcgagcaattctcctgcctcagcctccygagtaactgggattacaggcgtgtaccaccacatctggctaatttttgtatttttagtagggacggtgttttaccatattggccaggctggtcttgagct

SEQ ID NO: 474083 - DNA, 201 bp, Homo sapiens
tggcacaatcttcgctcacttcaacctctgccttctgggttcgagcaattctcctgcctcagcctcctgagtaactgggattacaggcgtgtaccaccacrtctggctaatttttgtatttttagtagggacggtgttttaccatattggccaggctggtcttgagctcctgaactcaagtgatccactcgcctcagcctc

SEQ ID NO: 474084 - DNA, 201 bp, Homo sapiens
gatacagaactgagcccaagagcattcacatgctggtgagaggtggtggccaggggcaggcagatggttgcaccactctcagggtcagcatcctccccagwgtggcatgggggaggggaggggagggggcacggggcctgggaggctgtagcctaaaggcacgcagcgggcaagagactactgggcggacccctgccagcc

SEQ ID NO: 474085 - DNA, 201 bp, Homo sapiens
gattaagaaaattgtgcattcaattatatcatcctttgcatttgggtatgtgagacatagaaaacaccatgtattaaatatatctgagacttggctgggtkcggtggctcacgcctgtaatcccagcactctgggaggccgaggcgggcagatcacatgaagtcaggagttcaagaccagcctggctaacatggtgaaacc

SEQ ID NO: 474086 - DNA, 201 bp, Homo sapiens
ttgctcttctcggaacaatttctttttcacaactgagcaaatgactgatgaggtgaccacactcatgaccatactcatctgttggtggtgggtggggggtrgactggatgaggacagcattgggcaacactctttctggcctccccactgcagggagccacaattactgtgggaggccagggtagtccagggtttcccttt

SEQ ID NO: 474087 - DNA, 201 bp, Homo sapiens
tctggcctccccactgcagggagccacaattactgtgggaggccagggtagtccagggtttccctttgggccatcagcattccaactgctcctcctacttstggcctctggagaactaaattaccaccatgcacttcccattccacctgtgcctcagcccgagggtcctgctcttcctgcatattcaagctgatctttcta

SEQ ID NO: 474088 - DNA, 201 bp, Homo sapiens
tccccactgcagggagccacaattactgtgggaggccagggtagtccagggtttccctttgggccatcagcattccaactgctcctcctacttctggcctytggagaactaaattaccaccatgcacttcccattccacctgtgcctcagcccgagggtcctgctcttcctgcatattcaagctgatctttctagggagta

SEQ ID NO: 474089 - DNA, 201 bp, Homo sapiens; identical to SEQ ID NO: 451885

SEQ ID NO: 474090 - DNA, 201 bp, Homo sapiens; identical to SEQ ID NO: 451888

SEQ ID NO: 474091 - DNA, 201 bp, Homo sapiens; identical to SEQ ID NO: 451891

SEQ ID NO: 474092 - DNA, 201 bp, Homo sapiens
gattttttatcctgaaactttgttaaagttattagttctagtagccttttggcagagtctttgcttttctggatatagaatcatgtcatcagtgaagagarataatttgacttcttcttttgctatttggatgcctattctttctttctcctgcttgagttctctaggtaggacttccagtgctatgttgaataggagtga

SEQ ID NO: 474093 - DNA, 201 bp, Homo sapiens; identical to SEQ ID NO: 451896

SEQ ID NO: 474094 - DNA, 201 bp, Homo sapiens
attggtagtttgatagaaatagcactgaatctgtcaattgctttgggcagtgtggccatttgaatgatactgattcttccaatccatgagcatggaatgtktttccatttaattgtgttatctctgatttctttccgcagtgttttatagttcttgtagagatctttcacatcctttgttagttgtattcctagttatttc

SEQ ID NO: 474095 - DNA, 201 bp, Homo sapiens
tgtggccatttgaatgatactgattcttccaatccatgagcatggaatgtttttccatttaattgtgttatctctgatttctttccgcagtgttttatagytcttgtagagatctttcacatcctttgttagttgtattcctagttatttcattttccttgtcgctaccataaatgggattctgttcttgatttaactctc

SEQ ID NO: 474096 - DNA, 201 bp, Homo sapiens
ttgtgttatctctgatttctttccgcagtgttttatagttcttgtagagatctttcacatcctttgttagttgtattcctagttatttcattttccttgtygctaccataaatgggattctgttcttgatttaactctcagcctggacattattggtgtatagaaatgctgttgatttttatacattgattttttatcctg

SEQ ID NO: 474097 - DNA, 201 bp, Homo sapiens
agatggtaagaacaggtaaatgcatttgcattcacagcagtggggtgtgatggtgtttgctccctgcaggtatggtttctgtggattctctgctctttgtrctctcctccccacattggtggctccacctggcacagggaagcttctggattccagaaggtaacatgttggcaggcagttgatagcaccccaccctccagg

SEQ ID NO: 474098 - DNA, 201 bp, Homo sapiens
ttattagttctagtagccttttggcagagtctttgcttttctggatatagaatcatgtcatcagtgaagagaaataatttgacttcttcttttgctatttrgatgcctattctttctttctcctgcttgagttctctaggtaggacttccagtgctatgttgaataggagtgatgagagtcggcatcattgtcttgctcca

SEQ ID NO: 474099 - DNA, 201 bp, Homo sapiens
gccttttggcagagtctttgcttttctggatatagaatcatgtcatcagtgaagagaaataatttgacttcttcttttgctatttggatgcctattctttstttctcctgcttgagttctctaggtaggacttccagtgctatgttgaataggagtgatgagagtcggcatcattgtcttgctccatttctcatggggatt

SEQ ID NO: 474100 - DNA, 201 bp, Homo sapiens
aggacaggggctgaagcagtacatcccaaactttcttactggaataaggtttgttaatttttctagatctattttagaagagaagaaattcagaaatgacyttcccagttggggaatcacctataaataatcttgaaaaagcttaaaacttggtaatctcagtagcgttttgagagtagcgaaaaccatagttctttgtag

SEQ ID NO: 474101 - DNA, 201 bp, Homo sapiens
tttgttaatttttctagatctattttagaagagaagaaattcagaaatgactttcccagttggggaatcacctataaataatcttgaaaaagcttaaaacytggtaatctcagtagcgttttgagagtagcgaaaaccatagttctttgtagcttatcatgtttagttggttggtaccactgcatgcgatgtttgcctcac

SEQ ID NO: 474102 - DNA, 201 bp, Homo sapiens
tgaaaccccatctctactaaaaatacaaaaattagccaagcataatggtgggtgcctgtaatcccagctactcaggaggctgaggcagaagaattgcttgraccgaggaggcataggttgcagtgagctgaaattgcaccattgcaccgcagccttggcgacacagcaagactccatgtaaaaaaaaaaaaaagaaaaaat

SEQ ID NO: 474103 - DNA, 201 bp, Homo sapiens
attcagaaatgactttcccagttggggaatcacctataaataatcttgaaaaagcttaaaacttggtaatctcagtagcgttttgagagtagcgaaaaccrtagttctttgtagcttatcatgtttagttggttggtaccactgcatgcgatgtttgcctcacataagtgagtttttcttccctgattttgtcctttgcta

SEQ ID NO: 474104 - DNA, 201 bp, Homo sapiens
aataacaaaaaagcatttccactgtccatcagttgctaagtagccatgtgccccatctaatgtaatctaatttatcatggaattttggtttaagctggacwttaagaattgcaaataaatggcttttgcctaagattaatagtaacattaatattgtttttcttccatctgcagaagtaacattaatgaaaatcaaatgtt

SEQ ID NO: 474105 - DNA, 201 bp, Homo sapiens
gaatcacctataaataatcttgaaaaagcttaaaacttggtaatctcagtagcgttttgagagtagcgaaaaccatagttctttgtagcttatcatgtttwgttggttggtaccactgcatgcgatgtttgcctcacataagtgagtttttcttccctgattttgtcctttgctaaggaaactgaactgaactgaagtcca

SEQ ID NO: 474106 - DNA, 201 bp, Homo sapiens
tcatagactgagttagggaggagcccctcatcctcagttctttggaatagtttcaatagaactagtaccagttcttttgtacatctggtagaattcagctsttgcttcatctggtccagggcttttccttgttggtagattttacattaatgatttgattttggaactcggtatttgtctaaggtttcaatctctttctat

SEQ ID NO: 474107 - DNA, 201 bp, Homo sapiens
ataatcttgaaaaagcttaaaacttggtaatctcagtagcgttttgagagtagcgaaaaccatagttctttgtagcttatcatgtttagttggttggtacsactgcatgcgatgtttgcctcacataagtgagtttttcttccctgattttgtcctttgctaaggaaactgaactgaactgaagtccaggtcttctgtaat

SEQ ID NO: 474108 - DNA, 201 bp, Homo sapiens
attgcaaataaatggcttttgcctaagattaatagtaacattaatattgtttttcttccatctgcagaagtaacattaatgaaaatcaaatgttaaaattmtataattattagtaaagtgttttattagtaccttatacatctggaattactctttaattctggaaacaatttacttagactacataagagtaagatttca

SEQ ID NO: 474109 - DNA, 201 bp, Homo sapiens
accatagttctttgtagcttatcatgtttagttggttggtaccactgcatgcgatgtttgcctcacataagtgagtttttcttccctgattttgtcctttrctaaggaaactgaactgaactgaagtccaggtcttctgtaatagagtgtctctccttcaacagggaacaacactacagtcgcccgtagttttgtttctgt

SEQ ID NO: 474110 - DNA, 201 bp, Homo sapiens
atacatctggaattactctttaattctggaaacaatttacttagactacataagagtaagatttcatactataatatagatttatgcaatataattgtttycttctgaattaatatttgaatttgagctgcaagtttttaaaaaagtacttcaaagactaattcaccttcatagattaggcaaatagtctaatcaatttat

SEQ ID NO: 474111 - DNA, 201 bp, Homo sapiens; identical to SEQ ID NO: 451876

SEQ ID NO: 474112 - DNA, 201 bp, Homo sapiens
gtaccactgcatgcgatgtttgcctcacataagtgagtttttcttccctgattttgtcctttgctaaggaaactgaactgaactgaagtccaggtcttctrtaatagagtgtctctccttcaacagggaacaacactacagtcgcccgtagttttgtttctgttcagtctccattgtggcatgccacactctcctggtttg

SEQ ID NO: 474113 - DNA, 201 bp, Homo sapiens
attcaccttcatagattaggcaaatagtctaatcaatttatggagaatgtatttagaatatgtaacagcaagtggcaggaggtactttagagttcaagackcatgtgcccatcactctgctagaagcacccataaatatgaaatcatgtacttgttgaaaatgtcactgatgaaaaatcttggtcttttaagagcttatgt

SEQ ID NO: 474114 - DNA, 201 bp, Homo sapiens; identical to SEQ ID NO: 451877

SEQ ID NO: 474115 - DNA, 201 bp, Homo sapiens
tttaagagcttatgttactcatgctttcatttggtttttattaataaattctttagaattatccagattaatgagggtttattttttatgagaaattggtrtaaacttcttatgaaattctcaaattttaagaagagtttgtaaacagacacaggtgattttaattcagttttacttttctctcttgaggtgttggtctga

SEQ ID NO: 474116 - DNA, 201 bp, Homo sapiens; identical to SEQ ID NO: 451879

SEQ ID NO: 474117 - DNA, 201 bp, Homo sapiens; identical to SEQ ID NO: 451881

SEQ ID NO: 474118 - DNA, 201 bp, Homo sapiens; identical to SEQ ID NO: 451883

SEQ ID NO: 474119 - DNA, 201 bp, Homo sapiens; identical to SEQ ID NO: 451886

SEQ ID NO: 474120 - DNA, 201 bp, Homo sapiens; identical to SEQ ID NO: 451890

SEQ ID NO: 474121 - DNA, 201 bp, Homo sapiens; identical to SEQ ID NO: 451892

SEQ ID NO: 474122 - DNA, 201 bp, Homo sapiens; identical to SEQ ID NO: 451893

SEQ ID NO: 474123 - DNA, 201 bp, Homo sapiens; identical to SEQ ID NO: 451894

SEQ ID NO: 474124 - DNA, 201 bp, Homo sapiens; identical to SEQ ID NO: 451895

SEQ ID NO: 474125 - DNA, 201 bp, Homo sapiens
gttggattttatcagaagttgtttctgcatctattcagatgatgatatgatttttcttttagttctgtttatgtggtgaatcacatttagtgatttgggtrtgttgaaccagccttgcatccctgtactgaagccttgattgtggtggattaacttactgatgtgctgctggattctgtttcctagtatttggttgagaat

SEQ ID NO: 474126 - DNA, 201 bp, Homo sapiens
gactgagttagggaggagcccctcatcctcagttctttggaatagtttcaatagaactagtaccagttcttttgtacatctggtagaattcagctgttgcktcatctggtccagggcttttccttgttggtagattttacattaatgatttgattttggaactcggtatttgtctaaggtttcaatctctttctatttcaa

SEQ ID NO: 474127 - DNA, 201 bp, Homo sapiens
tgattgtacttatttggctcttctctttttttctttgtttagctatcaggctatccatcttgtttattttttgaaaaactaattattggtttcattgatcwtttgtgtggatttttgcatctagtctaaaaaaaacagcacttcaaaaagcacttcattcagtgcttctctaattttagttatttctcttctgccagcttt

SEQ ID NO: 474128 - DNA, 201 bp, Homo sapiens
gctatcaggctatccatcttgtttattttttgaaaaactaattattggtttcattgatcttttgtgtggatttttgcatctagtctaaaaaaaacagcacytcaaaaagcacttcattcagtgcttctctaattttagttatttctcttctgccagctttggagttagtttattctttttttctagttcccttaagtgcaa

SEQ ID NO: 474129 - DNA, 201 bp, Homo sapiens
gaacccggttttctcccacgctccctctccaggcgaggccagcaccaggtcccccagcaccgcgggcacgtctgctacctgggcgtatgccggacccaccrcctggcggagatcatatactggattcgctgtctccaccaaggagccctcggggaaggccagccacgagccccaggacccctacagctatgggcgccgccg

SEQ ID NO: 474130 - DNA, 201 bp, Homo sapiens
atggttatatcccttgcccaaggtcacataacttaattggcagtaaggagacttcatttaaagtgtacctaacagcactgcatcaccttctacaatacaastggatccttaggaaggcctgtgcacacccttctcccttccctgcttcataaataccatttgcatcccctagcttaatgctttgctttacaaatccctctg

SEQ ID NO: 474131 - DNA, 201 bp, Homo sapiens
gcagcccctatactttaactttcctgaacatataagcatttaaaatgaataccatatatttgctcactcacacctgtcccccactgtcttgaattctgcaytgatacattgttcccacttcaagccaagaacttgtttgtattgagtcctgaaacacaaagtaggcacctagtaggcacttaataagttttggctgattta

SEQ ID NO: 474132 - DNA, 201 bp, Homo sapiens
agtttgtaagctcctgaaagacagaacccaatgcttctttatataatgtgtccttgtattcccaacagcaccttttgcatagtaaatactggattaattgkttagttgataacttcatgtttgaggagagtcatagttgaacagaatggaaaaggaagactcatagttggatattgacaagaatgaaattatgtggggacc

SEQ ID NO: 474133 - DNA, 201 bp, Homo sapiens
atattgataactgatgttcgtttaagtccatgaccaccaaattcaagtgggcccttagagctgccttgcagtcctgccacatttccctagttcatgccttstccttgctctcctaactgatcatgtcacaccttatttctccacaaacctccagtaactccttcatgttcttattctcagttgataaccttgattcttgtt

SEQ ID NO: 474134 - DNA, 201 bp, Homo sapiens
aatattttataaacattactcttatttcagacacagcactagttgttgggaatttgaggatagctgagacaaaacctcttattttgggtctagtaaaaatrcatatgaccataagcaagtaaatttacatttgttaatgctgtaatagtattgccttgggagtgcagttgagtgattgatttgggaaatgaagaagtagaa

SEQ ID NO: 474135 - DNA, 201 bp, Homo sapiens
ctcaacatgatgtgatgcaaaatcactttgcagtggtagtgataaaaattggttttggtaccgcctctaatccaaatttggataaccttgagaaaagtaamttcacttctgtggagcctcagtttcctcatcgtgtaaaatggggatgaaaacaaaacacctggcccaactcagagggttgttgggaggatcaggtggcaa

SEQ ID NO: 474136 - DNA, 201 bp, Homo sapiens
aggcccatgttgcattcatttctgtgtttccagcatgttgcaccatggcatagtcagcaatcaacaaattgcctgatttatctctaaaaaattgcctcatygatttactgaaccgatgagttgtcagtggaacaagtagactgatttgagttctttgtcctttgtgcatctacgtaattgattgctaagggtgccactggg

SEQ ID NO: 474137 - DNA, 201 bp, Homo sapiens
tcgctgccaggtgtgtatgaaaagcctgtagggtggcacctgccactctgccccttgccctcccctgcccctcacaacagtcacctcacaaacctgaatgrtctgaagaaggaaggcctgagcccctttgcctgtcaagttgtacattggagtctcatttgggctagactaccggacactcgtcaccccagccctcgggtc

SEQ ID NO: 474138 - DNA, 201 bp, Homo sapiens
tgggctattgtggttcttttcccttcaaaatattgttatttccctgcttcctacctgtgaaaggtgtatgtcttacaaacatattcccttgaaatagattmtttctcttccttccatctgggtctttccttggtgttttgtgtattctgttgccttctctttccttgtctctgcttcccctcttctctctaccctttctcc

SEQ ID NO: 474139 - DNA, 201 bp, Homo sapiens
aatctcatctactttggaggctttttgtttttttagagagggtctcactctgtcactcaggctgggtgcagtggcacgatcagcctcaaactcctgggctycagtgatcctcctgcctcagcctcctgagtagctgggactacaggcacatgccatcacacctgtctaatttttttgtagagatggggtatcaccatgttg

SEQ ID NO: 474140 - DNA, 201 bp, Homo sapiens
ttcatatatcagtagtttgctacttcttattgtaggcatttattccactgtttgaatctatcagagtttatccttgtatcattggacaactggaacatttscaatttttgactattatgaataaagttgctatgaacattcttgtacagttctcgtggacatacatattttcatttttcttggaaaactgccttgcttttt

SEQ ID NO: 474141 - DNA, 201 bp, Homo sapiens
cctcctccctgtgtatcccctcatgtccctctcctgactacccactacaacacacaccaatgtctttgtcctctactgctccaacatgaaagctcatattktatatcacctccttgggtggccaggcctttctccagctgcctgcacttaagttttgtgccttatttcatgacaaatatttgccctctcactcctcagaca

SEQ ID NO: 474142 - DNA, 201 bp, Homo sapiens
ccctgtcaatctctgccccaattcaccccaaaggcaaccacaatcctgatttttctcctttatgccagtcctagaacttcatgtaaagggaatgatataamctctagccttttgggtctggcttttcacttaacacagtgattttgagattaatccacattgtttcatatatcagtagtttgctacttcttattgtaggca

SEQ ID NO: 474143 - DNA, 201 bp, Homo sapiens
ttcttagagtacaatgcatggttgagagagggctctgagaaccgcagtccagaagcctattgaattttccttcactcagcttttctcagatccatttgtcygaggaaattttgcaagggggtacctaacacacctctgaacccagtgggacagtagcagtttgggaattgctgcttgacatgtagtcattgcccacataat

SEQ ID NO: 474144 - DNA, 201 bp, Homo sapiens
cctcggggatccccgagaacagcacccgttcccacacacagccatccctgcagcgccatcacccacccgtggctgggaggtgacctcccagggtcagtggygaggccgcccagggagagggcccggaggccaggcgggaaacagagcagaagcgacagaaattccccctgccagcccaggctgccaaggtagccctggaca

SEQ ID NO: 474145 - DNA, 201 bp, Homo sapiens
ccacttggcttcctcacccaacagttcacaacttgaatatgacttactgtaaaagttacccttgtattagacctccttagatactagcctccctcagacaygtaatcccttagcaccatgtatctttgcagccccaggcatttatttgtagtacttaataacttgtaattatttagagtttttgtcttcctctagatataa

SEQ ID NO: 474146 - DNA, 201 bp, Homo sapiens
tcttacagaggtcctctgttaacccaatatgtatacagtagataaattactctgcataaagctttctacttttaacagaagctgggactgaaagtgcttcmctgggtagtagaggtagctagatgatagatctctctattgcacccacctccggcttttaccttctcctacttcagaacagtgtcctggcagacaataatc

SEQ ID NO: 474147 - DNA, 201 bp, Homo sapiens
catagagtaaacactctaaagatattgcggtggaggctgactccaacctctagtgcctagcaatagttcttagactgtcagggctcccccagacagaaaarcacagacaccataggcctagtcagactgattattttgttcaactttcagtaacacatattaagcaatttggctgaaaccaacagctttcccaacacatct

SEQ ID NO: 474148 - DNA, 201 bp, Homo sapiens
aattaaattggaatctctagggtggaatctggatgattcgaatgtgtaggtaaaactgagaatcactggtctaagaagtggagcacaggaatctcatttgrggacctcatcagaaagattttattgttctttgtctatagatttagtccctgagttagtctagtagcttcagcttgatattagatggtagaactgcttctg

SEQ ID NO: 474149 - DNA, 201 bp, Homo sapiens
aggtttgggagtcattagtatgtagattaaagcccttcaggaggaaaaataaacactgagaagccaagtaccaaggagaaccaggacaccattgctatgtraaaggagaaatgctctcacagatgtggggtactggcatacatgctcatctattcccaagcacacatctctgcccccaaagagggtcgctcaatgatgtct

SEQ ID NO: 474150 - DNA, 201 bp, Homo sapiens
tgtctatgataatccatgattatatggcaggctatgccagagtaccagcaggccctaccattttagcaggctcttgtgcctgtgggcatgtgtgtttggaktggaatgtgtatccctttatcagcataggtgtgcatattaatgctcctctggttctaaatgaatacagggatgtgagtttgcatgggaacaacactgaaa

SEQ ID NO: 474151 - DNA, 201 bp, Homo sapiens
accagaatctgtcattcatgatgtttgtggtggtctcatgaattatcctggacttagtaaacattggctgcaatcactcacccatgcttttaaacaaatgsttatggaatgtaccttaatgtttgtgaaatgtagattccaatatcttctactagtctaaagaaaggtttttgatgagggtttgtttatttttaaaaaaat

SEQ ID NO: 474152 - DNA, 201 bp, Homo sapiens
ttcctaaagggtctaataagagtggcatggcaggacctgagaaataaattagaatgctgtctcatctttatagcaaaggtggtggaaattgtaggagatgratgaagtcaccatgagagagacaagagcctttgggcaaaatggaaggggccagtgaagacgatgatgaagggacaaaggactgaagagcccatagtatag

SEQ ID NO: 474153 - DNA, 201 bp, Homo sapiens
gagtcagggaagtcatcaggcttatacaagttgctaatcctttatcttttttttacccaaaggtccagaatttgagactgaaactctacacaacaaagagycagggttccctggtctccgaggagaacaaggtccaaaaggaaacctaggcctcaaaggaataaaaggtgattttgtccccttgagtttcttggtcctcca

SEQ ID NO: 474154 - DNA, 201 bp, Homo sapiens
caataagtcaattaattatggttgtggcttaggccaggggaaggaagaagtgaaactactgactgaagaggggttttgggatggcctagggttcagttatkcaagatctctaggaatgaactgctttcctcagcctcaaacagagatgttctaacttactcctctcctttctcattgctccatcataaaatgtcattacct

SEQ ID NO: 474155 - DNA, 201 bp, Homo sapiens
ctttccccattgcttctttttctcaggtttgttaaagatcagatagttgtagacatgcggcgttatttctgagggctctgttgtgttccattgatctatakctctgttttggtaccagtaccatgctgttttggttactgtagccttgtagtatagtttgaagtcaggtagcgtgatgcctccagctttgttcttttggcc

SEQ ID NO: 474156 - DNA, 201 bp, Homo sapiens
tggcctagggttcagttattcaagatctctaggaatgaactgctttcctcagcctcaaacagagatgttctaacttactcctctcctttctcattgctccrtcataaaatgtcattacctaagtatatagagtctggttaagaaatgcctgaaagcttgttctctgctattcaggtcccaggaaaactatttgatggaaaa

SEQ ID NO: 474157 - DNA, 201 bp, Homo sapiens
aacgtttcagtctttaatccatctcgaattaatttttgtataaggtgtaaggaagggatccagtttcagctttctacatatggctagccagttttcccagyaccatttattaaatagggaatcctttccccattgcttctttttctcaggtttgttaaagatcagatagttgtagacatgcggcgttatttctgagggctc

SEQ ID NO: 474158 - DNA, 201 bp, Homo sapiens
cttataatgcaaattgttcatctcccttttttttggtataatcttagccactgtcctcttttcttttcactcaagaacatgggtatccagtgtcaaattcmgtgccttgccatgccatgctgtggtcatacatctttggcatgctgtcagggactagcaaggccagcctgcttgtatccgtgtctagccttatggcccttg

SEQ ID NO: 474159 - DNA, 201 bp, Homo sapiens
tttgagttcattgtagattctggatattagccctttgtcagatgagtaggttgcgaaaattttctcccattttgtaggttgcctgtgcactctgatggtaktttcttttgctgtgcagaagctctttagtttaattagatcccatttgtcaattttggcttttgttgtcattgcttttggtgttttagacatgaagtcttt

SEQ ID NO: 474160 - DNA, 201 bp, Homo sapiens
cagatagaagccacatataccctgcaatgtcatccaagatccctgtgccatttgccctggcttaatccaaagaccagactctcttatgctctcatactttscacttagtggtaactatgtttctgtcacagggcaagaaagggaccctgggatttcctgggcttaatggattccaaggaattgaggtaatgttgggaagtg

SEQ ID NO: 474161 - DNA, 201 bp, Homo sapiens
tcgcccactttttgatggggttgtttgtttttttcttgtaaatttgtttgagttcattgtagattctggatattagccctttgtcagatgagtaggttgcraaaattttctcccattttgtaggttgcctgtgcactctgatggtagtttcttttgctgtgcagaagctctttagtttaattagatcccatttgtcaattt

SEQ ID NO: 474162 - DNA, 201 bp, Homo sapiens
gaattttcacccctaaatacttaagcatgaatctcctaagaacaaagacactctgatacacacacacacacacacacacacacacacacacacacacacamtatactcattgctcttgggaaatataacattgataaaatatacaggtttagagtctgtagtcaaacttccccgttatcccaatgatgtccttataatttt

SEQ ID NO: 474163 - DNA, 201 bp, Homo sapiens
ggcacaaggataaaatggtcccggcaataaagctggcttgctgttttgctagacaattattgaagtggaaatcatggcttttttttttttttttttttttttgcttttttccttctctttcctttcttttttttttttttttcctaagagacgggatctcactgtgtcatccaggctggagggtagtggcatcatcataac

SEQ ID NO: 474164 - DNA, 201 bp, Homo sapiens
acactgctagaaatatggcctaatcactcagcatttttcttggttttataggcacaaaaggaagagatggactaataggcaatataggcttccctggaaasaaaggtgaagatggaaaagttggtgtttctggagatgttggccttcctggagctccaggtaccatgccacatgataaccttattctgaaagagtttggat

SEQ ID NO: 474165 - DNA, 201 bp, Homo sapiens
atacatgtgaaaacactttgaaatctgaagcacttcaccaacgtaaacttgtaactcttagacctgatgccaccaacagctctagagcttctactctaacrataccacagctgccaccacctccactgcccatctttcctgttgcacacagaacttgatctcatctcagcttccaactgtccatgatggaaagggaaaata

SEQ ID NO: 474166 - DNA, 201 bp, Homo sapiens
cccttttctcctttgttccttaaggaattgatggctttggtgtccctagcaactgccatcctcctgcctacctacaccacatacacacacacacacacacmaaaaaaaaaaaaaacacaattgccctaacaaaatttattctcagctagtgacattagtttgcaatgaagatcttaaacacttataaaaccttaatttgtt

SEQ ID NO: 474167 - DNA, 201 bp, Homo sapiens
ggcaatgcctcgccctgcttcggcttgtgcacccactgtcctgcgcccactgtctggcactccctagtgagatgaacctggtacctcagatggaaatgcasaaatcacccgtcttctgcatcgctcacgctgggagctgtagaccagagctgttcctattcggccatcttcgcctctatacctttcaaccagtggtacttc

SEQ ID NO: 474168 - DNA, 201 bp, Homo sapiens
attcctgaggggaacctgatcccgccctgggatcagcatgggctcttcacagcatccccgaaagatccttgctcctcggggatccccgagaacagcacccgttcccacacacagccatccctgcagcgccatcacccacccgtggctgggaggtgacctcccagggtcagtggtgaggccgcccagggagagggcccggag

SEQ ID NO: 474169 - DNA, 201 bp, Homo sapiens
gtggggacaaacaggatagaaagctgttgattgcaagttagtaaagaaggcttctggggcccccgtcacctccctctgcctcagcctgatgttcttatttyccccacctgcccacaggctcttctggcctccaaggtgatcctggacaaacaccaactgcagaagctgtccaggttcctcctggacccttgggtctaccag

SEQ ID NO: 474170 - DNA, 201 bp, Homo sapiens
gctgctatcaacattggcgtagaagtttttgtttggacacttgttttcaattcttttgggtatacacctagcaatgcaattgctgagtcatatggcaattytatgtttaatttactgaggaacttttaatgtaaatctgtcatattacttaaaaacaagggctttcaactttgagttgaatcctggctttgttacttgcta

SEQ ID NO: 474171 - DNA, 201 bp, Homo sapiens
aggccagcagctgggttgggggtggtggtcattaatggcatatggtcctagacaaaccatctcctccttgccggctccccctccagccagagacagaggaygtggcctggttcaaagtaaagcagaggatgcaacaaatgtggccaagcctatcaaaggaaatgagaatgacagccttttttcctgggccagaagtagagg

SEQ ID NO: 474172 - DNA, 201 bp, Homo sapiens
cagaatggaaactttgttttttctgctgcttagatgctttctttcagtggttttctctattcctgaatacacacacacacacacacacacacacacacacagagagagagagagagagacccaaactagtgatttgatgatgtgacctagtcttcactttagatgaatgtatgacattttaatttttaaaaaattagctgg

SEQ ID NO: 474173 - DNA, 201 bp, Homo sapiens
acagaatggaaactttgttttttctgctgcttagatgctttctttcagtggttttctctattcctgaatacacacacacacacacacacacacacacacacagagagagagagagagagacccaaactagtgatttgatgatgtgacctagtcttcactttagatgaatgtatgacattttaatttttaaaaaattagctg

SEQ ID NO: 474174 - DNA, 201 bp, Homo sapiens
cctgcagtcttgttttaatgggagctggaaggaagtgaatcctgtgaggctaaggctgtttccaattctgagctggaaacggccccagagtccagctggayactcttgcctccaacctgtggccaagagagccctagagcttgcaggagttgatcacttctcttcgaggcttcattgcttggcagaatgagttgcagctgt

SEQ ID NO: 474175 - DNA, 201 bp, Homo sapiens
attggaacccctggggaaatggactagaagtataaagctttctgggatggctggacaggattgtgtttgctcaggctttttactctttgacacctggtttstagatcatcagcaataactaaagattccctgcttcatatgagtttcctcatttgccagtcaatagccttataattagtagaaatatgagaggactctata

SEQ ID NO: 474176 - DNA, 201 bp, Homo sapiens
agtggctactacctgttcacctgcccctcgcccctcttccgatcttatccctaggccgcccaggccccgctggacccccaggtccccctgggccatcctcraatcaaggcgacaccggagaccctggcttccctggaattcctggacctaaagggcctaagggagaccaaggaattccaggtttttctggcctccctggag

SEQ ID NO: 474177 - DNA, 201 bp, Homo sapiens
tcgtaggttttccaggaataccaggtctgcctggtattcctggaacaagaggattaaaaggaattccaggatcaactggaaaaatgggaccatctggacgygctggtactcctggtgaaaagggtgagctggggaattgaattctggaactgctgcccatgcttttcaatatatatattttgtttgttgacttggttattc

SEQ ID NO: 474178 - DNA, 201 bp, Homo sapiens
tatgcaaggtgcaatgctaaatgatttacaacagggattctccaagtgtggtctttgatcctgtagagtcagtaccacctgagaacttgttagaaatgcaratttttagacccagccggcactactgaatctgaaactccggagctgaagcccagcaatctgtgttttaatcacctctgcgtaagtctgatgcatgctaag

SEQ ID NO: 474179 - DNA, 201 bp, Homo sapiens
ggtgtggggacgagatgggatagaaaggagaagacaggagaggggagggaagggaagagaagcagaggggaggggagggactgcatgcaagcctgagccarggaacttgtgagcaggaacactaattgcagtgcaaacaaaaatatctttgagtgtaagttgcccctcactctagagaccagattttcttcccacttccca

SEQ ID NO: 474180 - DNA, 201 bp, Homo sapiens
ccacaccctaatccccactcagagagaccccaaggccaggtggctatgggaaggaagcctaacaatgtactttgaaaaatggggcgtctgtagctggatayatctgagatagagttgtagctctaccacttactagctgtaggacatctgagcctcaatttcttcatctaaaaattggggtggtaataccattttccaggg

SEQ ID NO: 474181 - DNA, 201 bp, Homo sapiens
tccctgtgctgaaggaatcaatcattcaataaatgcttcagtccacaaagcttagccctaccccacatactaatcctgacttccccttaggtgtagggacrttgattatccccaggtgtacaaactctaacagatattagccagcatctgccagtaagacagcaaaaaatctagttgaaagattggaattgtgtactttga

SEQ ID NO: 474182 - DNA, 201 bp, Homo sapiens
aacttcaatttatttatctgtgacttgagaataatattacctatctttcagggttgttaagataattaaataggctaatacctttaaagcaattaacataktgcctggcacaaagtaagcactccattaattattagatttgagtattatcaaaccctcccttaactccaccatctcctatagttaccatcctatttccct

SEQ ID NO: 474183 - DNA, 201 bp, Homo sapiens
cagaggagactgatagataaactatggtgatgatagataattttaacaaaacacaaagcattggtcacactggctacctctttcttgtagtcagaggactrtccagataaatctctgagttgaattttcattctttgttttatatgttgtctagggtgatggtggacagggcttcccaggtgaaaaggggttacctggact

SEQ ID NO: 474184 - DNA, 201 bp, Homo sapiens
catgtccctattcaggaaggtagtataatatgtaataaataagagtttggtaatgactaagactttggaattagagaaacctgggtttgaattccttctckgcaacttccttgctgtatgactttgggcaagttactcaacctccctgagcctccatttcctggtatgtaaaatgggagtgataataaaagttcttgtttt

SEQ ID NO: 474185 - DNA, 201 bp, Homo sapiens
aacaccaagtgtttgttagcatgaggagaaaaaatgatttttcatgtattgctgatggaagtgtaaactgttacagcttacaatctgacagcactcattgrtattaaccatgtattcctatacccagaaacctcagtgctgcatatatatcctgcagaacctctccatggtttgaaaataggacacttacggggatgtttt

SEQ ID NO: 474186 - DNA, 201 bp, Homo sapiens
agaatacctagtataacctggacttgtacagtgtcaggttgggtataacctgcctgagtaaaccaagtagcctcagcagacctgtatggttgggtagaatycgaagtcccaaatatagttcagattataacccatgggctattttagagttagcaggttgggatgagaatctggaatagatttcaagccaggttatcattt

SEQ ID NO: 474187 - DNA, 201 bp, Homo sapiens
gggtcttaatctttgcctccagctttcagagctcctttactaccaccagaaagacttgaagtaaaaggcagtactctatagagaacagctacattaaagcraattggaaattgtttagaaatttatagtttcccaacttggccagctgttttgctttctctgatcctccagacttcctgctgaacagagatgggacttgga

SEQ ID NO: 474188 - DNA, 201 bp, Homo sapiens
gggagcctatgcacacaaaggaatggtgctttagggagaggttgacagccttgtcatcaatgtccatgaacttctctagatcatctaagtgatgacaaggrggctagaattaattatttcatagactttggccaagaggaattgagataaataaagagttcatctcaggatgtttgcccgatgctcattcgccactttgta

SEQ ID NO: 474189 - DNA, 201 bp, Homo sapiens
agacttacatgttttccaggcatctgtgtccagtgccacctgattagaagaaagaaatagcagcccattaatttaaacgatgggattaactgtggggtctkactgaaagaggagctgcttatcaggatctgctggaatgtgtagctctgattaacaaatgcagtttccattattataatgagcaactttctggatgtttgc

SEQ ID NO: 474190 - DNA, 201 bp, Homo sapiens
tgggggcaatttcaagaaagaattgattacaatagtaaattcagactatggcatctattgattgttcctttttaaatgaaccattttaaatacagtaaaarccctcctccctggcctctgcttaacttcctttatggagtaagtcgatgtttttccttcctattggaatatacactggccaatgctcagggcacaatggaa

SEQ ID NO: 474191 - DNA, 201 bp, Homo sapiens
tgtccagtgccacctgattagaagaaagaaatagcagcccattaatttaaacgatgggattaactgtggggtctgactgaaagaggagctgcttatcaggrtctgctggaatgtgtagctctgattaacaaatgcagtttccattattataatgagcaactttctggatgtttgcctctgttaatgtgttgttctccacct

SEQ ID NO: 474192 - DNA, 201 bp, Homo sapiens
actcatgactgttttgcctgatggttggcaacatagtattggcacagttgtgggctctagagtacctgggcctgaatctctattgatatgtgccatttggyaaatttctaaactctaagtcttagctgtctcatatacaaaatgggcataatacatcctccctcatatggttgttgtgaggattaataaaacagtgtttat

SEQ ID NO: 474193 - DNA, 201 bp, Homo sapiens
aaccacactggctaatatttaaaagagttttttttttttttttttttttatagagacagagtatttccatgttacccaggctgatctcaaactcctggtckcactcaagtgaaaattaaagtatatacagttgtgtttagaatttttttaatgttttaataagctacaatacatatataagttctaatatatatgtgcaaa

SEQ ID NO: 474194 - DNA, 201 bp, Homo sapiens
agaatacaaaagatttacccgtgtggtttgtgtattcctctttgcaaaaactctgatttcactatataattcttcttttttcaaataaggaaactgagatmcagaaaagggacttgcttatgatcacagaaagttggtggtagagctgagactaggtctcctgtctccctggctagtatactttacgtaccacctcttgaa

SEQ ID NO: 474195 - DNA, 201 bp, Homo sapiens
gatatttattttatcagtggaaatactggcctgacacaaattttgaagtaaattgtgaagcataggatcatctttagtcagcccaatgggatttttaagtrccactgtccctctcccttgggggagtcttgtaccacaaacaatggtgtgagatcctgctttccatcaagagtttattggttaatgaagcttgtggctggt

SEQ ID NO: 474196 - DNA, 201 bp, Homo sapiens
ggctgtgagggtctccccagctacccttctaacatacacatagatatacacaggcatacacacatacacacacacacacacacacacacacacacacacasagagagagagttacctccttttttaatactgtttatttgtatgtttaaagactgaattttataaattaaaaattaaattatacacattgctacaatgatt

SEQ ID NO: 474197 - DNA, 201 bp, Homo sapiens
tatttactcttcatctgactgaatccatttaatattatttcttaaaatacccctgcctgcactcatatttacttatacttttcttgccaagattttctaartatcctttctgatatttattttatcagtggaaatactggcctgacacaaattttgaagtaaattgtgaagcataggatcatctttagtcagcccaatggg

SEQ ID NO: 474198 - DNA, 201 bp, Homo sapiens
ggtcatcgtgaggattgagtgagataatacatgtgtataacatgccttggacaatgtgtggtacaatgtgagtagctgatgttgtcattagctgcaccacwctcaccttttatgatctgtctctctcaggagctccagggcagcaaggccccttcgggatgcctggaatgcctggccagagcatgagagtgggctacacgt

SEQ ID NO: 474199 - DNA, 201 bp, Homo sapiens
ccagatgactctaatgcaaagccgaggttgataaccattggcagatagaagtagagagtgctatctcgaattaaagttgtcctactgaaataaaaaatgaragatgggttaaaaaaaaaaagcatttctggagaagccactgataaccaaacagtaagaagactgggaatcctactgcttatctcgcttttgttgttgttg

SEQ ID NO: 474200 - DNA, 201 bp, Homo sapiens
gggctaaatattggtgcaggcactgtggggaatggaaacatttcataagtaccagacttctacttagggcggctacacacacacacacacacacacacacacacgccaatgtttgactacccatcactgcatctgattaaaagtctaaatggtaaatcacgaaacctcaaatggatagactggtatggtctgtagtaatta

SEQ ID NO: 474201 - DNA, 201 bp, Homo sapiens
cttattaaaatatattaatataaaataattctgtgctatggaagacaagattctaagactcccacccccgcctatatgacctgtataattccctcctcttsagtgtgggtgggacctgtgaatatgatgggatattgctctcctgattaagttatgttacatggcaaaggtgctagaatagtcattcccatgattatatta

SEQ ID NO: 474202 - DNA, 201 bp, Homo sapiens
tgaacttaatatatgactttcacttttctttcttaggagttaggtgttattatctggaagaactattctttcgggttgttctcttccctggtattttttttcccctgccacttgatcaaacaaaacattttaggttgacatttccaacacttctctttttttccctactagatctgaaagctatctctgcattatactcca

SEQ ID NO: 474203 - DNA, 201 bp, Homo sapiens
ttcccggaactctttcactctctgcacaaactcatccttgcataattctacgttctatcccaaatctgtcttccaagctccaagcccatatatatatataactgtttagacatattttcctggctattcacagatatttcaaactcagcatgtccaaaaccgaactcattttctacacacgcacatgcacacacatacaca

SEQ ID NO: 474204 - DNA, 201 bp, Homo sapiens
ttttcccggaactctttcactctctgcacaaactcatccttgcataattctacgttctatcccaaatctgtcttccaagctccaagcccatatatatatataactgtttagacatattttcctggctattcacagatatttcaaactcagcatgtccaaaaccgaactcattttctacacacgcacatgcacacacataca

SEQ ID NO: 474205 - DNA, 201 bp, Homo sapiens
ttttccaaaatccagaggtaaacatggctaacatattggtgtacatatttctaatgttttttccttcctatatgcagatagaatttttttccaaaaaaaaatagccctacaataaaggaaatccatttgcaaaatgaaaagctatcacagattattatcttccatgtacaggtcctgccattctattcatattcacggaaa

SEQ ID NO: 474206 - DNA, 201 bp, Homo sapiens
agaagacctggcttgtcactgcttctaggagtagaacccaggccttagggggaaagatatggagacctagaaacactgaggacagtgaacttgtctagccyttttttcttcttataaccactaccctgtatagctcagccacgctggcgttgccttcaccatcacctcatcaaacagtgtcctgtcattctgttgccaagg

SEQ ID NO: 474207 - DNA, 201 bp, Homo sapiens
taataagagattgtctaacccaggccctagatacttctcaaagagaccattgtttggtgacttcaaggtgggttccctgtcagactttcaggttgccataragatgacatgtttttcttcctaaatgatatttgcttgtaatctcagaactctgttcaggaaattagcacaggttatttgggagtgagaaaggagtgacta

SEQ ID NO: 474208 - DNA, 201 bp, Homo sapiens
ctcacgcctataatcccagcactctgggaggctgaggagggcagatcacctgagttcaggagttcgagaccagcctggccaacgtgaagaaaccccatctytaataaaaatacaaaaattagccaggtgcagtggctcacgcctgtggtcccagctactcgggaggctgaggcaggagaattgcttgaacccaggaggcag

SEQ ID NO: 474209 - DNA, 201 bp, Homo sapiens
ggcacaaaggatttcttggagactctggccttccaggactcaagggtgaatctttttgccccaattatttaacaatctacagaaagccttatattaattcrtatacttccatgaatacttgcatgaatctggggtgatggtttaattaaggggttaaaatgaaatattttattctgtccctcccttttgtgaaattttcct

SEQ ID NO: 474210 - DNA, 201 bp, Homo sapiens
tgagcccgggaggcggaggttgcagtgagccgagattgtgccattgcactccaacctgagtgacaagagcaagacttcatctcaaaaaaaaaaaaaaaaaaggttaaagtgtcaactctcatgaaactgccctgactatactaatcgcaaaacatcaatctctctactcctttttctgaaatcctgtactcctctctgcat

SEQ ID NO: 474211 - DNA, 201 bp, Homo sapiens
actcaataaatggtagtcattcatagcttccaattactgtagccctcgtttgcctggactgttttgctagacaaattagcctacacaaaggggactctttrgctcctccttagagactgagcttttatcatcttgaaatcgaggtcttccatgtcagtttacacaacagcaaccccctccctctgacactcttagacttcc

SEQ ID NO: 474212 - DNA, 201 bp, Homo sapiens
cttcctctcttggatggctgagtagttcctttaatctatttaccacaagtgttcattgctctgaggctctgggattcttcaggatgaaagccctctataartatttgttattgttatgataaccagtatggcttcctgagtcagataaatttgtcttctggcttctgcttttcatagcttccctccctatccttttatttc

SEQ ID NO: 474213 - DNA, 201 bp, Homo sapiens
agtccagaaagatcactgacccaaaagatctgctttggctctatataattacaatttgtcacatagataacagcttctccaggttcctgtctttaagacacgagggtatgttctgcaggtacttccaagcttacctttgtgctcttttcagagtaagtgtaagagtgagtgagagaacaccagccaccatttactgagcac

SEQ ID NO: 474214 - DNA, 201 bp, Homo sapiens
gtcagggacaagtgggaacaggaataattacagcaagcatttattggtgcctgctactatgattgttgagaatgatctcatctaatcctaacgacagcccyatacggaaagtattattataatcattattttacagatgaggaaatggaggctcagaaaagttaggtaacttgcctgaggtcccacagatgctaataaatg

SEQ ID NO: 474215 - DNA, 201 bp, Homo sapiens
ttactcaggggcttcctggtcagaaaggatcaaaaggtgaccctgtccttgctccaggtagtttcaaaggaatgaaggtaagaacctgtaagtcagatagytgagtaggctataagctgggttccccagcattgggccccacctccagtgaaaacatttccagaactagcatctgtgtctctatttaaggagcagaccaag

SEQ ID NO: 474216 - DNA, 201 bp, Homo sapiens
atttaattctctattttcattcatttcataattatgcattttccccacaattatgttttgtgtgtctactgcacaccaaatactgcatctccggggatatrgtggtgaacaaacctcactctgtttcctcaaatcttcctgttttgtgggaaaaatgtgctaaacatctccctagatgtttgcccaggcatcttaaattcc

SEQ ID NO: 474217 - DNA, 201 bp, Homo sapiens
atctcagccagacatgatcgctcacaccttaatcccagtgttttgggagacctggatgggaagatcacttgagcccaggagttcaagaccagcctgggcarcatagtgagactttgtctctacaaaaattttaaaaattagccaggtgtggtgatgtgcacctgtagtcccagattcttgggaggctgaggctggaggatc

SEQ ID NO: 474218 - DNA, 201 bp, Homo sapiens
tgtccacagatgaatttttcatatcctcctttaggttctgcctcatattttggacactttgacctcagcaacatcctgtctcatgcaagcatgctcaggarcaagtgttgagatatgtatggtgaggtttaaagggcagtggtcacacacaattgcccttggattcaggcacaagcagccctatgtcggatgattggagag

SEQ ID NO: 474219 - DNA, 201 bp, Homo sapiens
gaacctgtccacagaggcatgatagaatatgcccaataaacacactcactgacctgctgtgccctatctgatttgatttcccactgggcacccagtagacscagagtatacagcctgggccgcttgggaaagaacaggtggtttttgacttgacaaaatgctgtttgtcaggtacaatttcgttttcagtaagaccttgct

SEQ ID NO: 474220 - DNA, 201 bp, Homo sapiens
agacactgatattatcctcacttgacagctgaagaaatttgaagatgccatttgtcccaaagtcctacggtggtgaagagggaatttgaatcctagacttytgaactctgaaccctgtacacttagctagcatatcatctcacttcactaaattctgaaccaaactggaagccaaactaaagtttaaaacaaaacatgcta

SEQ ID NO: 474221 - DNA, 201 bp, Homo sapiens
tgctgttctctgtaatcaaggatgtcagatctcacatgatcagctttaggtactgaagagaatagaaagatagtctttgagactcattccactccccgcawccccgccgccaaccccccccaaaaaaaaacttagggggatcaccctctggccaaaggagaatgttcatcttaaggtacagatgctctaaggcaaacatta

SEQ ID NO: 474222 - DNA, 201 bp, Homo sapiens
agactgattattttgttcaactttcagtaacacatattaagcaatttggctgaaaccaacagctttcccaacacatcttactaaactggatcactgcacasatctgcttcccctcttaatattagctgattgttaacatatgtgtcactagctttgttctcaaaactccatttttgctgtcatgtagacaatctcaacatg

SEQ ID NO: 474223 - DNA, 201 bp, Homo sapiens
gaacgactaactcaaagctacccctagacccgaaaggggaaaaaatggaatggtaattactggagtcctctgagatctggaaccatgaaaaagctgttgcygaataggaactaagactatggaaaaatttgtccatttccttggaatatagccaaggagggagggcatgggagaaataaataacctgtgtctttctcgtcc

SEQ ID NO: 474224 - DNA, 201 bp, Homo sapiens
tttctcaagtgtgacccttcttcagatgttgtcctctatcaccagagcatcttttcaaacagcaaattagtatccatcaatcttcctcccccacagcccaycttttattaaagaggctctaccttcctcccaagccctctttttttcttggaagaccattttttcttggaagaccatgtctaatacattcttgtcactttg

SEQ ID NO: 474225 - DNA, 201 bp, Homo sapiens
gacgcagagtatacagcctgggccgcttgggaaagaacaggtggtttttgacttgacaaaatgctgtttgtcaggtacaatttcgttttcagtaagacctygctgtttggataaaaggaaggataggggtagaaagttgaggtaaagggaagataacctgtgggattggccaggtgtttctataaagaggaaatggacact

SEQ ID NO: 474226 - DNA, 201 bp, Homo sapiens
tgctctcataatgccaaagtggatgccattcttctcaagagatggtaggtgggcatacagttgatctgtttttatcaggcaagactgtattgctgaaaaayggcagtttttgcaaggtgccatacaaaccaagtgtcatggctggctcactgagtgttcctgcagagcattttgcactagctctgtgtgctgtcttgagca

SEQ ID NO: 474227 - DNA, 201 bp, Homo sapiens
tcttgttacttcagtactctgcctctggtgtctgtcagtcaggcttctcaggccacaggcgagtgagttaggcaggaaggcctcacctccactgaggtctrccccctacccctgcatctcctcctaggacctagtatcaccggtgtgcctgggcctgctggtctccctggacccaaaggagaaaaaggatatccaggaatt

SEQ ID NO: 474228 - DNA, 201 bp, Homo sapiens
tgaaaaatgaacatgggcaagcaaagagtcagagtttgttaacagggtgaggttggcagaaccagtgacaagagaggactgaaaaacagattcagggtacrtacagaacttggctctaaacaaaattaggggaaagaaaagagaagaatgaggaggaaaaatgagcctctgaatgctgcattttttgtggcagaccttggg

SEQ ID NO: 474229 - DNA, 201 bp, Homo sapiens
acacaagttccttcagcccccaaggtcatcctgaccttccctttgagaaatgctgctttacgttttaaagttactaaagtgtggagcactaacacagactyttctagataatgtagcctctctccttggtccaattcaaacagcaggctatcagagcagaactttggagaaagctctcttcaggaagtagccccccccctt

SEQ ID NO: 474230 - DNA, 201 bp, Homo sapiens
caagttccttcagcccccaaggtcatcctgaccttccctttgagaaatgctgctttacgttttaaagttactaaagtgtggagcactaacacagactcttytagataatgtagcctctctccttggtccaattcaaacagcaggctatcagagcagaactttggagaaagctctcttcaggaagtagcccccccccttcca

SEQ ID NO: 474231 - DNA, 201 bp, Homo sapiens
agccaagaaaatcctaagcaaaaagaacaaagcttggaggcctcatgctgcctgacttcaaactatactacaaggctacagtaacaaaaacagcatggtawtggtaccaaaatatatatagaccaatggaacagaacagaggcctcagaaataacaccacatatctacaagcatctgatctttgacaaaccagacaaaagc

SEQ ID NO: 474232 - DNA, 201 bp, Homo sapiens
atgggcaactattattcaagattacaacataatcagtgtctagaacagtgccaatatgtacccaaggttctgctctaagtcataatgctaggtgccggaaytctatgaagtctacatcttctgactactccctcttctctcttttctttgtcagggcttagttgggcctctgggtccttcaggacccaaaggaaagaaggg

SEQ ID NO: 474233 - DNA, 201 bp, Homo sapiens
gtctctgataaaacagactttaaaccaacaaagatcaaaagagagaaagaaggtcattatataatggtaaagggatcaatgcaaaagaagaggtaactatsctaaatatatatgcacccaatacgggagcatccagattcataaagcaagttctttgacacctgcaaagagacttagactcacacacaataatagtgggag

SEQ ID NO: 474234 - DNA, 201 bp, Homo sapiens
gcatctagaagaaattaaagggtaaacttactatcataatcatcaatcttatctgtcttttccttatatttttaaggtattgtccacttgccaagtgaaaagtagctcttacaaaagacatgatttctgtatgtaattatgatttactggcaagatttttaaaagaagacattaactagtgcctgccttggcctacctctg

SEQ ID NO: 474235 - DNA, 201 bp, Homo sapiens
ttcccatgttaactaggctcccttttaattcagtgaagttggtgcctgaggtggttgggtaccggaaggcaacagaagagacaaagacattcagttattttgtcaaattggtgggaacatcagtagagtggagtgctagctttacagatctcctacaaacagaaaatggcccctgaaatggcatgtgatgacagcgatgca

SEQ ID NO: 474236 - DNA, 201 bp, Homo sapiens
accagtgcacagcacttgataaggagctccagagagagaccagaatgttgcaaaaaatgctgagtagtctagtatagctaatgttaatataataataatasctgacacttagtgcatactataagccaggtactatgttttgcatgcttaatcttattgagtcctccaatcaaactctgtacagtagatactgttgccatc

SEQ ID NO: 474237 - DNA, 201 bp, Homo sapiens
caatccatcagcaaatcctagcagctctacctttaaaacatacctagaatcattttacttctgtcagactctataactgcctctctgttataaacatccakcatcctgctgaactaccgcaacagcctcctaggtggcctttctgcttctgtgcttgccccactacagttcacatggcagcttgagtaatcctccttaaaa

SEQ ID NO: 474238 - DNA, 201 bp, Homo sapiens
actgactaaggcatcttccttgaattccagacttccatagccagctcctcaactcctccatttgaatatcttatacacatctcaaaaccagaattcctgaygcttcccaagcaagcttctccaacagttttctccatctgaataaatggcaattgcatccttgtagttgcctagtacagaaactttggagtcattcttgac

SEQ ID NO: 474239 - DNA, 201 bp, Homo sapiens
ccaagaacttccttctgaaaatccacattttcaatatttccaactaaccttcttcctctcaatggactctctctttccttagatatgataataacattgtytgggttactgtctggactggctttcagcctggaacctctgctgtatcttttaaggtgactttgcacctttagtcttatctaatgtgttttaattttattc

SEQ ID NO: 474240 - DNA, 201 bp, Homo sapiens
acccattcccactccatctttcactgttctcagcccttaagcctttgttttttcagctcctaaagaagcaggattggttcttttgagcttgccctggtccrcaaggctccaatggggtgggctgagagactgagaaaaaaagaagccaagcctggaccctcgaggtggctgctaaaagcctacacagggcttatccttctt

SEQ ID NO: 474241 - DNA, 201 bp, Homo sapiens
tagcagtttgcatgtgctattgttaaagggccatttacaaaacctaacaagccaaaccaatcagaagctatgatataggcagtggcccagatctggccagrgcctcacttgacagctgtcctgtgttctctcctgtgcttattcaggacatcctggaaagaaaggaacaagaggcaagaaaggtcctcctggatcaattgt

SEQ ID NO: 474242 - DNA, 201 bp, Homo sapiens
aattctaatttggaagtatgggggtagaatacaagaatctgtattttttaaaaccacacaggaagatgttgatgggaaccacggtcctaagctattctcawtgcctcaaatgaatgagaactttgagcagaaccttgtactctaggacaaaagttttcaaccctaactgtacattggtatccccttggaaacttttttaaa

SEQ ID NO: 474243 - DNA, 201 bp, Homo sapiens
actgtgactttctaagattcccattttgataagcagtggaatcgaatccttcccctacaaaccctaagtatgtgctctgccctttgttcatcaccttcccrtttgcaggacataacatccccacttccagcccacagtccacccttgccacagaatacatgatggacatctctcaggcagtggctcagtgaggggtgaggg

SEQ ID NO: 474244 - DNA, 201 bp, Homo sapiens
gcttatacaagttgctaatcctttatcttttttttacccaaaggtccagaatttgagactgaaactctacacaacaaagagtcagggttccctggtctccraggagaacaaggtccaaaaggaaacctaggcctcaaaggaataaaaggtgattttgtccccttgagtttcttggtcctccaaactccttagagaaggctt

SEQ ID NO: 474245 - DNA, 201 bp, Homo sapiens
atttcccccacctgcccacaggctcttctggcctccaaggtgatcctggacaaacaccaactgcagaagctgtccaggttcctcctggacccttgggtctmccagggatcgatggcatccctggcctcactggggaccctggggctcaaggccctgtaggcctacaaggtgaggagggtgccagaaaaaggagatttgttg

SEQ ID NO: 474246 - DNA, 201 bp, Homo sapiens
tagtaacagagtttgtggctacactcccacatcataacccttggttatggtattgataaggtatttattggattccagtgtcaccacttttatttaattcyattcatccagatagggctcagatattttgatctaagggatctctagtaaatacaatgcccttccaggctgattttacaagtggctggaaagagtaaaata

SEQ ID NO: 474247 - DNA, 201 bp, Homo sapiens
accaaattgtaaagaccatcgacgctgtgaagaaactgcatcaactaatgggcaaaacaaccagctagcatcataacgacaggatcaaattcacgtataaygatattaaccttaaatgtgaactagctaaatgccccaattaaaagacacagactgacaaattggataaagagtcaagacctatcagggtgctatattcag

SEQ ID NO: 474248 - DNA, 201 bp, Homo sapiens
aaaataacacatttcagactcattgtcaacctcccttgaaataatctaaactcatgagggcactgatctgagatatttaactagaaatcactccattcatkagacatgttttatagctacatgaattaattgacacttcattggaagagcagcaccaccaccttcagtgaccaggttggggtgtgggtatatgtgtgagaa

SEQ ID NO: 474249 - DNA, 201 bp, Homo sapiens
cctgggatcacgttgttgttttatgataccaataatccctgtgctgaaggaatcaatcattcaataaatgcttcagtccacaaagcttagccctaccccamatactaatcctgacttccccttaggtgtagggacgttgattatccccaggtgtacaaactctaacagatattagccagcatctgccagtaagacagcaaa

SEQ ID NO: 474250 - DNA, 201 bp, Homo sapiens
acaaggtgaggagggtgccagaaaaaggagatttgttggggagttgagacagtttggctgagaggctggcttggatgtccacctccaagggtgtgtcttcrtcaagcgttgcctctcttccttcacaaagctcccaagcttcctgttggggagaagaagggccagcaggaccagcagggtggttgtacttggtacttggct

SEQ ID NO: 474251 - DNA, 201 bp, Homo sapiens
gccccttagtacagccaattttgccatagaaaaagccacatggtttcaggctcttgctgtcccatcctctatctgatcagataatgcaattaaaaagactrtaagtgtgtgtatttcttcaattttttaaactattttactcaggggcttcctggtcagaaaggatcaaaaggtgaccctgtccttgctccaggtagtttc

SEQ ID NO: 474252 - DNA, 201 bp, Homo sapiens
actcttctagataatgtagcctctctccttggtccaattcaaacagcaggctatcagagcagaactttggagaaagctctcttcaggaagtagcccccccmcttccatttgaggatgcctttccttttttttttttttttttttttttgccccctgtgggactcagagtggcttgagcaatcagcaaaactaatactgggg

SEQ ID NO: 474253 - DNA, 201 bp, Homo sapiens
tcattaaatacattatcagtcattaatgctttacccctcaaatacatttaataaattagtctcagcaaaaattggaacccctggggaaatggactagaagyataaagctttctgggatggctggacaggattgtgtttgctcaggctttttactctttgacacctggtttctagatcatcagcaataactaaagattccct

SEQ ID NO: 474254 - DNA, 201 bp, Homo sapiens
ggtagtgtccagggatcctcagtcacttagtctccctcctatacctcttatacctgcagtctcagacaatggaaaataatctactggaaaataacttggcracacagctagtcctcaaatagcaaagaaagattttctgtcatctccacttgactgtaccttgtgaggcaggaaggttgtgtctgacagtttagaaagatt

SEQ ID NO: 474255 - DNA, 201 bp, Homo sapiens
gtttgcaggacataacatccccacttccagcccacagtccacccttgccacagaatacatgatggacatctctcaggcagtggctcagtgaggggtgaggragtaagagggtgggcagtcctgagctctgggcagaaatgatgattcccatattgcttcgaagggttcacaaggtatcagagggtcgcctggactcccagg

SEQ ID NO: 474256 - DNA, 201 bp, Homo sapiens
atactgctgttagagtctaggtgagaaataatgagtgcctaaaataggaaaataaaaaagagggtaaaaaagaaaattaaaattcaagagaaaaatcaatrtgagctgagatgttagtcataaagagagagagataggaagaaaatagagaatgaaaagtccttattttgtgctaagcttaggaagaaagagtagattcaa

SEQ ID NO: 474257 - DNA, 201 bp, Homo sapiens
attgcaagttagtaaagaaggcttctggggcccccgtcacctccctctgcctcagcctgatgttcttatttcccccacctgcccacaggctcttctggccyccaaggtgatcctggacaaacaccaactgcagaagctgtccaggttcctcctggacccttgggtctaccagggatcgatggcatccctggcctcactggg

SEQ ID NO: 474258 - DNA, 201 bp, Homo sapiens
tctataacctactcttccaaattccacagcaaggtattaccttcagctttcttcaaacaagagcaaatgagtcaaatgatatagactgtagagcaatgacyaacaagaccttttgaaagaaactcacttcctcacctttgattctttggcatgcataccccaaatcaattacatgggactccaggctgtgttgattttttt

SEQ ID NO: 474259 - DNA, 201 bp, Homo sapiens
tttaggatttccaggagttgccggcatgagaggagaaccaggacttccaggttcttctggtcaccaaggggcaattgggcctctaggatcccccggattartaggacccaaaggtatgtgtatttgggagcaggcagtggggaaaagtctttccctcgatgaaggacaccaactactttatcttagaagatactagctagg

SEQ ID NO: 474260 - DNA, 201 bp, Homo sapiens
gacctggaccaccaggcctacctggagctcctggcctcccaggcattatcaaaggagttagtggaaagccagggccccctggcttcatgggaatccggggyttacctggcctgaaggggtcctctgggatcacaggtttcccaggaatgccaggagaaagtgtaagtgtgaccagatctttgtctttataccagaaaaggc

SEQ ID NO: 474261 - DNA, 201 bp, Homo sapiens
caagggaataagatctagactgatgacatcagggagaagcattccagctaatatccgaaggatgtgtaggaccagtaaatcgagatagtagtactgataaytgtttcctttcttggttgatgaaaatggagcttggaaacatgtaaattagtattttttcaatctgaaggttgaaacccattttgaaaaaatcaattatat

SEQ ID NO: 474262 - DNA, 201 bp, Homo sapiens
gcatgtgatgacagcgatgcatccttacctctcacctatgcttcttccttctttatgaattcatggcagtcttggatttagtagaatgcgtctttgcacartaagtttagacttgttaagcgtgagagactatatgttcaaatttccagtgagagggatataggaactccagccagtgaactatactgatgtatctaatat

SEQ ID NO: 474263 - DNA, 201 bp, Homo sapiens
cacatgataaccttattctgaaagagtttggattagcttcaagccatgccccattctgaacctctgccttggtttcacatttaggatttccaggagttgcyggcatgagaggagaaccaggacttccaggttcttctggtcaccaaggggcaattgggcctctaggatcccccggattaataggacccaaaggtatgtgta

SEQ ID NO: 474264 - DNA, 201 bp, Homo sapiens
tcgcaagccattgctgtgcacagccaggacatcaccatcccgcagtgccccctgggctggcgcagcctctggattgggtactctttcctcatggtaaggtyctgcactgtctcctcccccagttggaggcaaagggccccttggactggttcccaggctcaagggacaccaggtagaaagcatagagtttgaaaagaagag

SEQ ID NO: 474265 - DNA, 201 bp, Homo sapiens
tgaggaagcaatggaatctttcaagtgcccttcaatccccccagttacttttctaaagcacatacaagagagatgggattaaaacaaagttttggggtttwgatctacaacatgaaatctgactatagagtctcttaaagtcctttctgctttaacctacctattttcccttttctctttccacaatttcttccttccaca

SEQ ID NO: 474266 - DNA, 201 bp, Homo sapiens
catgcagtaactaaacatgcagcaaagtaattaaaacataatcagagagtgtatgctctgttgattttcccttgaaatgaccgatttgcatcgtatacatrtgggcacagaatctttggggatgaaggcacacaggaaggtagctttgctttcctccaaaaggagtaggaaaatcactagcccacagaagtagtttctaat

SEQ ID NO: 474267 - DNA, 201 bp, Homo sapiens
gcataggcatctaagattgttatgtcttcttgataaattgacctattttatcattttgaaatgtccttctttatctctgataatattatttgtctcgaagyctaccttatctgatattaatataacttttgcttttttaaaaaattttttgtttttttataacattctaataggaaaaatttcaaatatagagcaaagtag

SEQ ID NO: 474268 - DNA, 201 bp, Homo sapiens
ggcaaagtccctgaacttcaaaagtgtcagtccatctgatggagagaacttggtgtgtgcgtgcacacacacacacacacacacacacacacacacacacytgaagcaattgaaaataaatagttctagactggatagtcctgactacttacattctagggggatgaaaacaaagtgggaatgcattctaggagaagtccc

SEQ ID NO: 474269 - DNA, 201 bp, Homo sapiens
tgagaacaagaactaccttacatgcttttttctctgcaccccactgccagcatttcatgttgagcctggcacattgtaagaattcgtaaaaacttcttgaygttttgctagaaaggtctttgaagctccacaaggtgcaacgactagcaaagaatcaagtccagcttatctgggctcatacaaggcaaggtggaagaggtg

SEQ ID NO: 474270 - DNA, 201 bp, Homo sapiens
ttgtctctgtttgtagatgacatgattgtatatttagaaaaccccataatctcagaccaaaatccccttaagctgataagcaacttcagcaaagtctcagkatacaaaatcaatgtgcaaaaatcacaagcattcctgtacaccaataacagacaaacagagagccaaatcatgagtgaactctcattcacaattactaca

SEQ ID NO: 474271 - DNA, 201 bp, Homo sapiens
ctgtctaaggccttaggtagaggtaaatggtcacttcgaactgcagtaggaatcaagggggaggggggtacgaaacacttcttaaaaatgtaggccattgwctctcataaacctactgagtctaacaaacatcagttggattgtgtcttacattcctctccctactcctttttttagggtcccatgggagttcctggcttt

SEQ ID NO: 474272 - DNA, 201 bp, Homo sapiens
ctggacaaccaggccccagaggcccacctggtctggatggctgtaatggaactcaaggagctgttggatttccaggccctgatggctatcctgggcttctyggaccacccgtatgctgccagatatttgcattttatttcaaatggctttgcttgtctctacgtgtgccctttttctgcctctctggaaacctcaagattt

SEQ ID NO: 474273 - DNA, 201 bp, Homo sapiens
gggctttctctcctgcaggctccaaaggtttacctggcatccccggtaaagatggccccagtgggctcccaggcccacctggggctcttggtgatcctggwctgcctggactgcaaggccctccaggatttgaaggtctgatgatgccacattaggaggcgggcggggcggggatggtggtctgggagggtttgaggctgg

SEQ ID NO: 474274 - DNA, 201 bp, Homo sapiens
ttcacagtagccctggggaataaatatttattttaaaccccattttgcagatgaggtaacatttacagaggttaaatgatttgcaaagctcccatagcacrtaagtggtggaattcagagtcaaagacagatctctctggaccccaaaccgaagcgtctctttctacctccctgatggttctttatttgtgccatggtcta

SEQ ID NO: 474275 - DNA, 201 bp, Homo sapiens
ccccttttctcctttgttccttaaggaattgatggctttggtgtccctagcaactgccatcctcctgcctacctacaccacatacacacacacacacacamcaaaaaaaaaaaaaacacaattgccctaacaaaatttattctcagctagtgacattagtttgcaatgaagatcttaaacacttataaaaccttaatttgt

SEQ ID NO: 474276 - DNA, 201 bp, Homo sapiens
ggacctaagaaacctagagagacttttctcaaaatttattttttctttgtctaaatttcaagattcaattaattaatgagctatttaaaaacacccaaatmtaccatcacttttataaattttcatggatttaccttaataagagaaattcagcatatttttgcatttttcttgtcacaaaagataaaattcgatattaac

SEQ ID NO: 474277 - DNA, 201 bp, Homo sapiens
ggaaagacagcagtttgcacccagtggttcaggggctagaatatctgtgagtcataggtcaatgccccgccgtctccatgcccgcttcagttatgccacayccaagggaagagcaaaacacactaagatctgggaggacagtgagggagaggctgtcaccacttggggccaggacacagtttcactaatcagtccagccat

SEQ ID NO: 474278 - DNA, 201 bp, Homo sapiens
caattaaaggttgaaatcctcagtatcctgattctagtgatccacttccccatgccacctagcagccaagcagcaaacacctttaaaatggcagagtggcytgctgccttaggaagagccacctgccttaggagcaggaagaagttgcctttggttatcctgagccaggtgctcaggtctgcattactctaggaggtcaaa

SEQ ID NO: 474279 - DNA, 201 bp, Homo sapiens
tcagtgcaatatgatgatttactcctaagaaaacatcacagagtggttgggtgcagtgactcatgcctgtaatcttagcactttgggaggccatggcaggyagattgcttgagcccaggagttggagaccagcctaggtaacatggtaaaaccctgtttctacaaaaaatacaaaaattagcagggcatagtggtgtgcgc

SEQ ID NO: 474280 - DNA, 201 bp, Homo sapiens
aaaaagaagatgtggtattagggcttgtttaagacataggtctggaaaatacaattctttgctttgcctctcataatctgactggcataaatgagggagayaattgtcataagggatggttgtttttcttggataaattccattcttgagaaatcacgaatgaaatttcctcacttggaactaacatttgtatacattgct

SEQ ID NO: 474281 - DNA, 201 bp, Homo sapiens
tttttcctccctatatccctattccctaggggaatatggggctaggttttcaaggagagaaaggagtcaaggtaaacagcttttaaaaaatacagtctgcmttccatatgctgcaagaaatgtgtctgattacacacatgtgcctgcttgtgtaagaggatttgttttttcgccttgggaaatgaatatttcccaacccac

SEQ ID NO: 474282 - DNA, 201 bp, Homo sapiens
cctgaagtccctttctgagtctccctttccccacctctcagaaagtaagaatgacttgtgttcttcaacttttcctcaggaaagttccaaaaacccgtgtrcattccactccatgttaaccaggaaatgaattcaccatagcatcatggttaagagtatgggctctgaaatcagactagctgggttcaaattcaagctata

SEQ ID NO: 474283 - DNA, 201 bp, Homo sapiens
cagccataaaaaagaatgaaattctgttatttgtgacaacatggatgaacctagaggacattatgttaagtgaaataagccaagcacagaagggtaaatamcacatgaactcactcatatatggaatctaaataagttgatcttgtagaagtagagggtaaaatagtgattaccagagtctagggagagtagggagaaggg

SEQ ID NO: 474284 - DNA, 201 bp, Homo sapiens
agagaggacagatacaaatggtatttcaaaggaagcataggcagatctcaatgatcaatagtggatgaagggagaagggagggaagagaatcaatggcaastctgaggcctcaagttgggggtggtgggggaagggtaattattaactggttcagatgacagcccagcaccccagcagacatggtctgagggcagggggaa

SEQ ID NO: 474285 - DNA, 201 bp, Homo sapiens
aactaagaactagcccaggcggctgcagccttgatgtgcagtgtgcacaccaagtcgacagccaagtgcatcgtctcctagtgagtcttgggcatgacacrtaagtcccctttcctggggaaggtgcctggggaccctctacattgagtaccctcctttgggctttctctcctgcaggctccaaaggtttacctggcatcc

SEQ ID NO: 474286 - DNA, 201 bp, Homo sapiens
ttgtactctgctaattcccccttagattatacattgcatcccctcttctttcaattgctttatctcctttgagcagtgatcctgatttattaaaggttaarcagtttaccccaattgcccagttagaatgtggcaagagccaagaatagaaactaggtaatatgactctagaatttgggagcttaacctctatactctatt

SEQ ID NO: 474287 - DNA, 201 bp, Homo sapiens
ccttgcctcctggccctaggctttttttttttttcctgtatcacacatgagctataactcggtgaatcataagagaggggcccaattttttttttttttttgacagagttttgctctttcgagtgaagtggcacgatctcagctcactgcaacctctgccccccaggttcaagcaattctcctgcctcagcctcccgagta

SEQ ID NO: 474288 - DNA, 201 bp, Homo sapiens
ctcactgcaacctctgcctcctgggttcaagcgattctcctgcctcagcctcctgagtagctgggattacaggcaccctccaccacacctggataattttygaatttttagtagagacaggctttcaccatgttggccaggctggtctcaaactcctgacctcaagtgatccacccgcgttggcctctcaaaatgctggga

SEQ ID NO: 474289 - DNA, 201 bp, Homo sapiens
aggttaaaacttgataattcaagattctttaaaccgagtcaatatatcatttcacaaattattgtgaaggttgtaaggacattttccttttttttttttttctgaaatgaagtcttactctcacccaggctgtagtgcagtggcatgatcttggctcactgcaacctctgcctcctgggttcaagcgattctcctgcctca

SEQ ID NO: 474290 - DNA, 201 bp, Homo sapiens
cgcttgaaccctggaggcggaggttgcagtgagccgagattgtaccactgcactccagcctgggtgacagagtgagactccatctcaaaaaaaaaaaaaaagtcgttaagctaggtctaggaacattcgcttacctgattttaggagctgctaaatcctgaactcagttggataactttgttatataagtctagtggcttt

SEQ ID NO: 474291 - DNA, 201 bp, Homo sapiens
aggaaaacacaggataaatatgggccagggtacttggcttgtcttgaatataggattgcttgaaggaggtattggtagataattccttgaacatagttgamagtatcttatggagaaactgttttgatagaatgaactatgcttagttttggaagcaatagaaggttcttcctttcttccttatttaccttttcttccctt

SEQ ID NO: 474292 - DNA, 201 bp, Homo sapiens
aattccttgaacatagttgaaagtatcttatggagaaactgttttgatagaatgaactatgcttagttttggaagcaatagaaggttcttcctttcttccktatttaccttttcttcccttccttcatttccatttttcttcctttcctcccaagtaatacaagtgctttatagaataaaaactataaaatttcaaaatag

SEQ ID NO: 474293 - DNA, 201 bp, Homo sapiens
tactggggagtgactctcaacatgccgtgttctttttgactgaaactaacaagtgctaactctttcttatttttaaaaaaaatctagggtcctccagggcstcctggtcctcttggtcctgatgtaagtatactttgtcttagggcattttgcttcctactcctaagtactctggatttcccagagagatactggtttggt

SEQ ID NO: 474294 - DNA, 201 bp, Homo sapiens
gggtctgacttcctcaatgagattgttacagcttgagaacaagaactaccttacatgcttttttctctgcaccccactgccagcatttcatgttgagcctsgcacattgtaagaattcgtaaaaacttcttgacgttttgctagaaaggtctttgaagctccacaaggtgcaacgactagcaaagaatcaagtccagctta

SEQ ID NO: 474295 - DNA, 201 bp, Homo sapiens
tggagagggcagtgtggggaggtgagacaaggagaggctctccaagagactgggattcttgactgaacatcacaaatcatacctagcacaccgactttccyttcccctcattgcttacatttgggttttcaggccctaaagggtctcgaggcctccctgggaccccaggccagcctgggtcaagtggaagtaaaggagagc

SEQ ID NO: 474296 - DNA, 201 bp, Homo sapiens
cagcccaggcaccatctcctccaggagtccctgagctcccacccagctgccactctatacttatcactgctgacatcaattctagttgcttctgtgtgggkctgacttcctcaatgagattgttacagcttgagaacaagaactaccttacatgcttttttctctgcaccccactgccagcatttcatgttgagcctggca

SEQ ID NO: 474297 - DNA, 201 bp, Homo sapiens
tcaaaatgtaaaaatgttcaaccttgttattagggaacatttcaaacatttacaaaagcagagagaatgtcataatgattcctcgtgtacccatcacacarttttaataattagcaatttatggccaatctgaagcaaatcatatcatttcatcacaaatacctctgaatatttaaaaggtaagggctttttaagacatag

SEQ ID NO: 474298 - DNA, 201 bp, Homo sapiens
tcagtccagaaagatcactgacccaaaagatctgctttggctctatataattacaatttgtcacatagataacagcttctccaggttcctgtctttaagamacgagggtatgttctgcaggtacttccaagcttacctttgtgctcttttcagagtaagtgtaagagtgagtgagagaacaccagccaccatttactgagc

SEQ ID NO: 474299 - DNA, 201 bp, Homo sapiens
  misc_feature (1)...(201): n = A,T,C or G
gtttctccaaacctaacttctcctctcctcacctactcccatacctccaccccagccaccacattcctggcatgtactcacctctgacctctattccattncacacaattcccccaagataagcaaaactaatacaagtaggtatatttagagtgcctactggtatcaccacatctattgatgcaagatttagataagtgt

SEQ ID NO: 474300 - DNA, 201 bp, Homo sapiens
tttgtttcctcattggcatgagggtgaagaggccaaagtaagagacagtttatttgtgagttacatccagaggacaaacccccactctggaaaaacggtcrgtgtgattgtcactttgcttaatgttccatttgatcttacagggggatgttggcctccctggcccagcaggacctccaccatctactggagagctggaat

SEQ ID NO: 474301 - DNA, 201 bp, Homo sapiens
tactatggaatactcagggcctcatgtaggtgattccatgtatgcttgagcttgacaatttcataggaagtggaaaagtacctttagttaggggagcaagyggctgagagccctcaagagtgtgatgcttagaaagtctgtcttcacctctccttgtcctagttattttgtgtgcccaactcttccctttaccttctccaa

SEQ ID NO: 474302 - DNA, 201 bp, Homo sapiens
tggtgttttatttttaatgtaatgggaagccgttcaaaggctctgacttgtattgttaagatcactctggctgtgggaggaaggggagagggaatgggaarggtggaagagcaaacacagagggtattgcagtagtccaggcaagagatggtggtggtgacttagactatagtgacagcaatggaaatggaaagaagtgga

SEQ ID NO: 474303 - DNA, 201 bp, Homo sapiens
ttgtccccttgagtttcttggtcctccaaactccttagagaaggcttcctggggaatgagaaaaccaacagcctcgggaacctaaacagaagcaactgtgratcttgtttggggctttgattataggattgttagaagtgctatatttgggtctctaagactgaggctggcaatggaggtcacacaggaccaagttgctca

SEQ ID NO: 474304 - DNA, 201 bp, Homo sapiens
atcattgtctcatttgataaatgctagtaacacctgaccatatgacttaaaaatacttcagcttctcagtgacttttctcctcaagtaatctagccacttyctgtgatctctggggttgttattatcctgctcatttcttgccctgtctcctcacccctatccagaaacttttgtgttgttagatcacccagagtagacaa

SEQ ID NO: 474305 - DNA, 201 bp, Homo sapiens
atcatcatcagtaatttgtgatcagtaattaatatcagttaacaaggcagaattcaaatttttgattgtcttataggtatatatatatttttacagttgcyttgtttcaatgagaggccaaacaagaccaatacattacatttgtttaatgtgtcttttaaattacaagatatgttttgaaacagctgacaagattttcat

SEQ ID NO: 474306 - DNA, 201 bp, Homo sapiens
tgttttcatacggtgggaattaagaaaccagagttctcagcccactttggcacagattcaatgtgtgaccttggccaaatcaggtaactccttcagtcctmatatctctatctgtttaatgggaacattcgtaggtactttatatgaatggcttatgacagaaaagttatgaggagaaaggtggtaatgtatttgtgatac

SEQ ID NO: 474307 - DNA, 201 bp, Homo sapiens
acagttttgttctcttggccattattccattcagttcaacaagtatttactggaccaccttgtatgtgttcagactgtagtaatgggccttggagaaagayaaaagagagtgtaatataggtctcatgcttacaaaactttcatatgcaaccattctttgcactttaagagtttcgggcagcatgggctgccacagatttc

SEQ ID NO: 474308 - DNA, 201 bp, Homo sapiens
agacatggtctgagggcagggggaaatgtggggataaagctagggagaataattggataggagacacagattggggtgttgatatggtgagagtagaaagkttatgagaagagagagaataaaaatagtaaacacttatgcactaggcgttgttctaagtgctttatatcaattgatgctgttaatcctcattatcatctc

SEQ ID NO: 474309 - DNA, 201 bp, Homo sapiens
tgtgggaatgtctaaagagataagagaccatctgagaaattcacagtgctctctaggaattaggaaaaggcacacagtacacagaggcaagaatgattaartgtgaggtcagctcataaatatgcctttctctttggaaaaaacatccaacattaaacaaaaaagttggatggtactaaatccatcccagagataaagttc

SEQ ID NO: 474310 - DNA, 201 bp, Homo sapiens
gaaagagtgaaccttaggaaattgttagatattttcatgatcatttcttgattatctgcatctgggaaagaagtggtggttaggacagttgaaccaacctraagcttactcattccaaccatttcagcaccctcaaacattctcatgacctaatcatcatgctatggtcttgttcacgaagtactgaatccttttctaaag

SEQ ID NO: 474311 - DNA, 201 bp, Homo sapiens
agtgatgcatctttgacattgcattcagttcaactactatttagagcagaggttcccaaaccttagctgcacattagaatcaccttaagagcttttaaaawccccaatgtccaggccatgccttatcttagtcagattgaactgccataacaaaattccatagactaggtggcttaaacaacagaaatttattttctcaca

SEQ ID NO: 474312 - DNA, 201 bp, Homo sapiens
gggcttcaacatatgaatttgaagggaacacaattcagttcataacataccctaaaataattaattaaatcagactgtctggaaatgggacccaaatctcytaggtgattccaatatgcagccaagttaagaactactattttatatccttgctgttcaatgtgaagtcgcttcagcagcatcaacatcacctgggagctt

SEQ ID NO: 474313 - DNA, 201 bp, Homo sapiens
actacttaaactgtttccatttatttagatattaaaaaatgctccatgtggctatttagcctgatggattagagcttagaaagaagtcattaggccaggcrcggtggctcatgtctgtaatcccagcactttgggaggccaaggcgggtggatgacttgaggtcaggagttcgagaccagcctggccaatgtggtgaaacc

SEQ ID NO: 474314 - DNA, 201 bp, Homo sapiens
actaaatgcagaaaagagaacaggtaagtacgggaccaaagcctgctttgaattggatcctacacacacacacacacacacacacacacacacacacacamtcctcccaataaaaagacaatgaaaacaacccacattaaagaaacaaaaacatgactagccaaaaggaaacagaaatgaaaaaccctgggcccagaaagc

SEQ ID NO: 474315 - DNA, 201 bp, Homo sapiens
gcgaagaccttgaggttaagaaaacctcagtacttttgaggaacagtaagaaggtgagtaagtggaacagagtaagcaaggctaataattccagacagagragtaggaaccagatcttggctaccttcataggtcaatgtggtgttttatttttaatgtaatgggaagccgttcaaaggctctgacttgtattgttaagat

SEQ ID NO: 474316 - DNA, 201 bp, Homo sapiens
tacagaaacacaaaatatccagcacccaaccagataaaattcacatctgacttacaaacaaaaacgaccaggcatcaaaaagagcagggaaataggactcytaatgagaaaagtcaaccaaccaaaactgacccagaaataacacagattataggattacaagacaaagacgtttaaacagttattataacttttggtgtt

SEQ ID NO: 474317 - DNA, 201 bp, Homo sapiens
taagcgctattttctctgttttagtgttgcagattcaatttttgatatgatgaataacataaacattaaatagttgtgtttttcctcctaactcccaaccctctcaatacttatggtgtccccaaagtactgtgacagaacacatagggtatgaatggttgctcttgaattatctttttaaagaagttatttgctcttaaa

SEQ ID NO: 474318 - DNA, 201 bp, Homo sapiens
acaaaggtacaattacagtaggagtataataattctacataaaaaattaagttgtatgccttatattgggcatagatatattctatacagtgattaaaaaraggcctctgctatatcatgtttgtcatctaaatctaaaatgccacctacaataaacaatacaatacacattgactaagcatttcattaacaattttgttt

SEQ ID NO: 474319 - DNA, 201 bp, Homo sapiens
gccatggtggtttgctgcacctatcaacctgtcacctaggttttaatcccagcatgcattagctatttttcctgatgctctcccttcccctaccccacccmccgacaggccccaatgtgtgttgttcccctccctgtgtccatgcattctcattgttcagctcccacttataagtgtgaacatgcggtgtttaatccatcc

SEQ ID NO: 474320 - DNA, 201 bp, Homo sapiens
aatatggattgtagttagggaaggcgtcacagaagtatgattcttgctgggtcttaaagaaatagtagaaaatgagtaattaatatctatattatatattstagattttccaggacatccttgattttatgatttcttctaaagaaaacttctagaaaaacaagtaaatacacaaatatatttgtatttatctggattgat

SEQ ID NO: 474321 - DNA, 201 bp, Homo sapiens
cctctccttataagggcaccagttctattggatcaaggtgccactcttatgacctcacttaaccttaatcacctccttaaaggcctcatctccaatacagtcacatgggggaggggggcttcaacatatgaatttgaagggaacacaattcagttcataacataccctaaaataattaattaaatcagactgtctggaaat

SEQ ID NO: 474322 - DNA, 201 bp, Homo sapiens
aaataacatgttatggcagcccagccttgcttggtgtgatcagagaagagtgatagctctcttatcattctcctgtgaattaagcaaaaaaaaaaaaaaaattggtgaacatacctgaagggttattcttcacaggattttccatatgcccactcagaaaaaaggatcatatgtcttggttaagaaaatacaaataataac

SEQ ID NO: 474323 - DNA, 201 bp, Homo sapiens
tgactttttaatgatcaccattctaactggtgtgagatagtatctcattgtggttttgatttgcatttctctgatggccagtgatgatgagcattttttcrtgtgtctgttggctgcataaatgtcttcttttgagaagtgtctgttcatatccttcgcccacttttagatggggttgagaacacttggacacaggatggg

SEQ ID NO: 474324 - DNA, 201 bp, Homo sapiens
gaggaatcgccacactgtcttccacaatggttgaactagtttacagtcccaccaacagtgtaaaagtgttcctatttctccacatcctctccagcacctgytgtttcctgactttttaatgatcaccattctaactggtgtgagatagtatctcattgtggttttgatttgcatttctctgatggccagtgatgatgagca

SEQ ID NO: 474325 - DNA, 201 bp, Homo sapiens
ttcgagatcagcatggccaacatggcaaaaccccatctctactaaaaatacaaaaattagctgggtgtggtggcaggtgcctgtaatcccagctactcagraagctgaggcagagaatggcttgaacctgggaggcggaggctgcagtgagcccaggtcgcaccactgcactccagcctgggtgacagagtgatactccat

SEQ ID NO: 474326 - DNA, 201 bp, Homo sapiens
gggcacccatcccccagcctcgctgccaccttgcggtttgatcacagactgctctgctagcaatcagcgagactccatgggcgtaggaccctctgagccakgtgcgggatataatctcctggtgcgccgttttttaagcccaccggaaaagcgcagtattggggtgggagtgacccgattttccaggtgccgtctgtcacc

SEQ ID NO: 474327 - DNA, 201 bp, Homo sapiens
gagaacaatcacaaccgccaatagagtatgatttttttccctttatagacccccaaggtagaactttctaggtccatatctggttatgatttgtgtttttsgctggggttcaggccttggcatgtgacatgtaagctggtcactcatacctggagcagcagatggttgttcctccctcccttttatggctgagtctgctct

SEQ ID NO: 474328 - DNA, 201 bp, Homo sapiens
acttactaaagaaaagttgcttttgaaaactgccatattgttaaaaataaaacaaaactgaaagtggaaatcaaatgtgatgcattaggaatgtaacttaygtgaaaaagagtctgtgaaatcccagggtgtggcctcacgctcaaagaaaaggccttggccttacaacacatcaccagagtggtgaatgaatgtactttg

SEQ ID NO: 474329 - DNA, 201 bp, Homo sapiens
ccaggactccttcctgcagtcctgtgaagagaggccggtggctgatgttcttccctacctcacccctgcctatcctccacccctaccacccctaccatgcygggacctgacttgcttcctttgggctttgtcaggcatgagaggtgagcctggcttcatggggactccaggcaaggttgggccacctggagacccaggatt

SEQ ID NO: 474330 - DNA, 201 bp, Homo sapiens
caggggaaggaagaagtgaaactactgactgaagaggggttttgggatggcctagggttcagttattcaagatctctaggaatgaactgctttcctcagcstcaaacagagatgttctaacttactcctctcctttctcattgctccatcataaaatgtcattacctaagtatatagagtctggttaagaaatgcctgaaa

SEQ ID NO: 474331 - DNA, 201 bp, Homo sapiens
atccactaactaaagtcagaggagactgatagataaactatggtgatgatagataattttaacaaaacacaaagcattggtcacactggctacctctttcytgtagtcagaggactgtccagataaatctctgagttgaattttcattctttgttttatatgttgtctagggtgatggtggacagggcttcccaggtgaaa

SEQ ID NO: 474332 - DNA, 201 bp, Homo sapiens
atggctatcctgggcttctcggaccacccgtatgctgccagatatttgcattttatttcaaatggctttgcttgtctctacgtgtgccctttttctgcctytctggaaacctcaagattttgtggggcagccactacacacccttgtccaatgtaggagtcaatactggcagcaccacaacagtaaaagtctaaagaagaa

SEQ ID NO: 474333 - DNA, 201 bp, Homo sapiens
cttttgggtttccacaacttctatgcttccattagtgacaccacacttataataatctgaagtttaaaattttgagattatctcttatttcctttgcaatycctcttatattctttccttctcttattgctactaaactctcattatctcatgcctagtttttcaaatacctatatgcttgttggaataagtggatggttg

SEQ ID NO: 474334 - DNA, 201 bp, Homo sapiens
cctcttggttcgattacctgaaaaagaaaagaaaagcactgttatctggagaaaaatagagttggattgctaccctatatcacatacaaaggtgacctctrgatagattacaaacctaaatgtgaaaggtaaaactgtaaatgtaggagaatttctctataacctgaaatagtgtagaacttcttaaataagaccccaaac

SEQ ID NO: 474335 - DNA, 201 bp, Homo sapiens
ttttttccccatctttgtggttttatctatttttggtctttgatgatggtgatgtacagatgggattttggtgtggatgtcctttctgtttgttagttttycttctaacagacaggaccctcagctgcaggtctgctggagtttgctagaggtctactccagacactgcttgcctgggtaccagcagcggtggctgcagaa

SEQ ID NO: 474336 - DNA, 201 bp, Homo sapiens
catctaaaatatctatttcagatttgtggtggaaaatcaaatgagattttatgtgaaagacattttgaagaaacctgaagttattaaaaggggatagtttyattatgctgtatgaaaccaggaatgagcagccatttcaacaaccatttactgtgctaattcaagacaaatttattatattccaaggactgtcttgttttg

SEQ ID NO: 474337 - DNA, 201 bp, Homo sapiens
actataactatttctttggaacataaagtgcctatcttctagctttgtggctcccaattattctataagcaaagacaatgagaatctgtgaatcagaatcyaggtccaaagtttacctggtttaccagctaaatgtcaatttcatgtcagttggtgggatcaaggaacagccttaacttgccagagagcttggcatgcttt

SEQ ID NO: 474338 - DNA, 201 bp, Homo sapiens
gtatttcctgaatctgaatgttggcctgccttgctagattggggtagttctcctggataatatcctgcagagtgttttccaacttggttgcattctccccrtcactttcaggtacaccaatcagacatagatttggtcttttcacatagtcccatatttcttggaggctttgtttgtttctttttattcttttttctctaa

SEQ ID NO: 474339 - DNA, 201 bp, Homo sapiens
tgtaattgtaaataataccagctgacatagattgagcgtattctcaatataccaagcacttgacaaagagcatcatcttatttaacctcactaaaccctayaaagtaaaatatccctattttatagtgcaggaaattgaggcttaaaggatttccattgatttgtcttatagtgaacccaagatcttcatctcaaaggaac

SEQ ID NO: 474340 - DNA, 201 bp, Homo sapiens
ctcagatatgttaggcaaagatctgtttggtgattagttttgattagataggagtttcacacaaaagggggcttgtgcatttattgtagttactgagattwagggagctaggtactgctgtgggaagctgccccattgaaaagaggggccattctttgatgttgagaggcccggccttccccagtgagaaaaatgactgtt

SEQ ID NO: 474341 - DNA, 201 bp, Homo sapiens
tctttgtggcattctctgtatttcctgaatctgaatgttggcctgccttgctagattggggtagttctcctggataatatcctgcagagtgttttccaacktggttgcattctccccgtcactttcaggtacaccaatcagacatagatttggtcttttcacatagtcccatatttcttggaggctttgtttgtttctttt

SEQ ID NO: 474342 - DNA, 201 bp, Homo sapiens
atcagttgactatatatatgtggctctatttctggactctattctgtttcattcatacttttgtctgtctttacactctcttgattgctgtagcttcacartaagtcttgaagtaggtcctgtacgtcttacagctttttctttttctaagttgtttgggctatgctaggtcctttggattttcatatacatgttcaaatt

SEQ ID NO: 474343 - DNA, 201 bp, Homo sapiens
cagtccagaaagatcactgacccaaaagatctgctttggctctatataattacaatttgtcacatagataacagcttctccaggttcctgtctttaagacmcgagggtatgttctgcaggtacttccaagcttacctttgtgctcttttcagagtaagtgtaagagtgagtgagagaacaccagccaccatttactgagca

SEQ ID NO: 474344 - DNA, 201 bp, Homo sapiens
gagtttctgccgagagatccgctgttagtctgatgggcttccctttgtgggtaacccgacctttctctctggctgcccttaacattttttccttcatttcmactttggtgaatctgacaattatgtgtcttggagttgctcttctcgaggagtatctttgtggcattctctgtatttcctgaatctgaatgttggcctgcc

SEQ ID NO: 474345 - DNA, 201 bp, Homo sapiens
gatcttcctccatccttttattttgagcctatgtgtgtctctgcacgtgagatgggtttcctgaatacagcacactgatgggtcttggctctttatccaayttgccagtctgtgtcttttaattggagcatttagttcatttacatttaaggttaatattgttatgtgtgaatttgatcctgtcatgatgatgttagctgg

SEQ ID NO: 474346 - DNA, 201 bp, Homo sapiens
catatcatcaatgaacacagataatttgactttctcttttccaatttggatgcctttttttccttctattgcttaaatgctctagctaggacttccagtaytatgttgaataggagtggtgaaagtgggcaaacttgtcttgttctcattcttaaagggaattcttttaactttttcctgttcaatatgatgttggctgtg

SEQ ID NO: 474347 - DNA, 201 bp, Homo sapiens
tttcctgctttctcctgtgggcatttagtgctataaatttccctctacacagtgctttgaatgtgtcccagagattctggtatgttgtgtctttgttctcrttggtttcaaagaacatctttaattctgccttcatttcgttgtgtacccagaagtcattcaggagcaggttgttcagtttccatgtagttgtgcggtttt

SEQ ID NO: 474348 - DNA, 201 bp, Homo sapiens
caccataacaaaagctgttcaagactctgtaatctcaaatgcatcctttgagtatcctgattacgcttagtctctgttggtagttacatttttctaagagraattaactttccatctgcacagaacagtaccatatagtatttgagctgaaagggaaaatgacagtgaaaggagttaatatctgtgatactctgcactcag

SEQ ID NO: 474349 - DNA, 201 bp, Homo sapiens
ttatcagcttaaggagattttgggctgagacaatggggttttctagatatacaatcatgtcgtctgcaaacagggacaatttgacttcgtcttttcctaaytgaataccctttatttccttctcctgcctaattgccctggccagaacttccaacactatgttgaataggagtggtgagagagggcatccctgtcttgtgc

SEQ ID NO: 474350 - DNA, 201 bp, Homo sapiens
taggaagaggaagagaacatggagggagcaaatgtggtatagaagagtagatcaaaaaggaaaggaggatgaaaagggcgaaggtcagccaaaaatcgaayacaatgagaggggacgttgtgcaggtcttaatattggttttcagttaattgtagagttatttctataaacttaaaagccagcaggaatgtgatgtgggat

SEQ ID NO: 474351 - DNA, 201 bp, Homo sapiens
ccttcacatcccttgtaagttggattcctaggtattttattctctttgaagcaattgtgaatgggagttcactcatgatttggctctctgtttgtctgttrttggtgtataagaatgcttgtgatttttgtacattgattttgtatcctgagactttgctgaagttgcttatcagcttaaggagattttgggctgagacaa

SEQ ID NO: 474352 - DNA, 201 bp, Homo sapiens
acatggtagccattaaccacatgtgaccatttaaattaaaactttaattaattaaaatttaaaaataaaatagtatttaaatttcagctcctcagtagaastagccatatttcaggtgtccaatagccatagatggctagtggctactgaattgaagcacacagatatagagcatttccatcatcacagacattctaatga

SEQ ID NO: 474353 - DNA, 201 bp, Homo sapiens
gctcaaaggagacaaaggctctcaaggctcagccggatccaatggatttcctgggccaagaggtgctggggcaggggatggataggagaaatgctcaagaraggcttcataaccaaacttggcttccttcttgagcaaaggccctcaagtacagccccccatcgccaacctcagagcagcagtgtggctggcagcaaggaa

SEQ ID NO: 474354 - DNA, 201 bp, Homo sapiens
agtggtttgtagttctccttgaagaggtccttcacatcccttgtaagttggattcctaggtattttattctctttgaagcaattgtgaatgggagttcacycatgatttggctctctgtttgtctgttattggtgtataagaatgcttgtgatttttgtacattgattttgtatcctgagactttgctgaagttgcttatc

SEQ ID NO: 474355 - DNA, 201 bp, Homo sapiens
tcagttgaataaaatcaaacccttaagcctaacactaaaaccctttcaagatctatctttctagcttactttcccactacttccataatatacgctaatcycagacatcctggagtacttatcttgcatttcctgtatatgccctgtgctcttttggtttgatctttcccaccacctcctcctccactgaatgtttgctta

SEQ ID NO: 474356 - DNA, 201 bp, Homo sapiens
caaattatcacttactctaagggctattcaagaaagcttctactgtatagtcaatgttctatgttaagtactttacgtgctgtgggcttacaagaagggarcacagtccagtagaatgtatttaccgatttatggattggagcttgtggtaggcagaataatgcttccccttctcaaagatgtccacattcctaatcccca

SEQ ID NO: 474357 - DNA, 201 bp, Homo sapiens
tccaggcctatggccatctgttcacctctggaaatataactgtagaaacctgaagtctggaaggcagaaagtgctgcccagactacaagcagtgtcactarcctgaggatggccttgcaggagctctactgagtactcattcttacataagataatagttcaagataataagaactattattaattgagcatgtaccagag

SEQ ID NO: 474358 - DNA, 201 bp, Homo sapiens
ttctcaggtttgttaaagatcagatagttgtagacatgcggcgttatttctgagggctctgttgtgttccattgatctatatctctgttttggtaccagtrccatgctgttttggttactgtagccttgtagtatagtttgaagtcaggtagcgtgatgcctccagctttgttcttttggcctaggattgacttggcgatg

SEQ ID NO: 474359 - DNA, 201 bp, Homo sapiens
caagaatgaaattatgtggggacctcagccattgagatgaaggaaaactggatagatccctggagtttcggattatttagcagttgggtaagaagattagwtggtagtactgcacagaccaaaacatctggttgcctccaaatatgatcaacacagctgttggtgtacttagaattacttctcttccaaggttaatgactt

SEQ ID NO: 474360 - DNA, 201 bp, Homo sapiens
atgatgctgaatgtccaggaatcatcttttgaagaaggctaatatggattttgaatgggatgtcaaagcagtatagggacctctcaaataataatatcaastaccactgatggttactgtttgtttgccaggtactgatctaagaagctttatagaaagacattacctaatttaatcctttcttctagcctatgaggaagg

SEQ ID NO: 474361 - DNA, 201 bp, Homo sapiens
cttagtctctgttggtagttacatttttctaagaggaattaactttccatctgcacagaacagtaccatatagtatttgagctgaaagggaaaatgacagwgaaaggagttaatatctgtgatactctgcactcagcttgtcttatttgatcattataacaactctgttatgaggtaaatatccttattcccattttggaa

SEQ ID NO: 474362 - DNA, 201 bp, Homo sapiens
tacaaacaagaacatagaggatcccatcagggatttgaggtaaacattaagtgaactcctttcatgtttggcctttcctgtacacttggtgttaggaggtyttacagaggtcctctgttaacccaatatgtatacagtagataaattactctgcataaagctttctacttttaacagaagctgggactgaaagtgcttccc

SEQ ID NO: 474363 - DNA, 201 bp, Homo sapiens
tataggcacaaaaggaagagatggactaataggcaatataggcttccctggaaacaaaggtgaagatggaaaagttggtgtttctggagatgttggccttyctggagctccaggtaccatgccacatgataaccttattctgaaagagtttggattagcttcaagccatgccccattctgaacctctgccttggtttcaca

SEQ ID NO: 474364 - DNA, 201 bp, Homo sapiens
tttttacagatgaggaaaatgaggcccatatcactttggtaatttgtgcaagaatacacagctactttttgattcaatgactctgggcttctgattctggytcagagccctttatagtgtagtttcagaaagtgctgaaaatcttcatagtttccatattctctaagaagaatttgtaaactgagtaagtaacagtgttgc

SEQ ID NO: 474365 - DNA, 201 bp, Homo sapiens
cctccatttgtgggtcaaatcatcaagttcctagatgatagaaggcagcttgttttaatggaaaagtccccggaatgaaaaacacaagatatggctttctyattcatttttaacccatctagatgttggtttcctcatctgtaaaatcaacaaggttagatatttaatcatttctatactgttagcccatgatactataaa

SEQ ID NO: 474366 - DNA, 201 bp, Homo sapiens
acagtcccctttggactatctctagggccaggcaagagccctacagtcccagtacaggagctgcagggtttcagtccgtgcctagatagaaatacttcttmccactgaaaaggatgttgtgctcattatgtctccaaaggggaaaagctcttgctcttccccctagtatcaacccccaagaatttgcataatcctccattt

SEQ ID NO: 474367 - DNA, 201 bp, Homo sapiens
atccccccagttacttttctaaagcacatacaagagagatgggattaaaacaaagttttggggttttgatctacaacatgaaatctgactatagagtctcytaaagtcctttctgctttaacctacctattttcccttttctctttccacaatttcttccttccacaacattgtttacctttgcctagcaatgtgctggcc

SEQ ID NO: 474368 - DNA, 201 bp, Homo sapiens
ccacttcctcctccttttcctttttgtcctcctctctctctgtatctctctctctctcctctatctctcttctttaacctctctttcaccattctcttttmtttccctccttctctcatttctctctttacaaattgcattgtgatttcagagcctcaagcgaggctgagaacttgccattcccacccttctgttacaatt

SEQ ID NO: 474369 - DNA, 201 bp, Homo sapiens
cctgtagggtggcacctgccactctgccccttgccctcccctgcccctcacaacagtcacctcacaaacctgaatggtctgaagaaggaaggcctgagccyctttgcctgtcaagttgtacattggagtctcatttgggctagactaccggacactcgtcaccccagccctcgggtccatagagatgagcccaccctgctg

SEQ ID NO: 474370 - DNA, 201 bp, Homo sapiens
gaagccgggcctgagagggcaaaaaggtgatcgaggtgagtccaagtcaggccttgtagaggctgagtgaggccttgctgggagagtcaggtttagggtayagcagggccatgtggctcacagggttgggctgtgagtgtcttcacatctctgggagtctcacaacccagtgggaatgactgctgagaaagagaggttagg

SEQ ID NO: 474371 - DNA, 201 bp, Homo sapiens
ccacgcagctggttagcagcagaactaggataccagctaaggtctgtctggcttcagagcccaacttgttaaccaatacattatactgttcaattcccaaycttgatttaagaaaatagaagtgggatcaggggaggatgccagcgagttcagtaagcagtttgaatcataggatgtgtacatatttttcagaaatgtaat

SEQ ID NO: 474372 - DNA, 201 bp, Homo sapiens
gtttttcaacaggagagaaggggtctgttggattcgtaggttttccaggaataccaggtctgcctggtattcctggaacaagaggattaaaaggaattccwggatcaactggaaaaatgggaccatctggacgcgctggtactcctggtgaaaagggtgagctggggaattgaattctggaactgctgcccatgcttttca

SEQ ID NO: 474373 - DNA, 201 bp, Homo sapiens
gccacgcccccaggcccagtcccgcccacaacatcctgagccaatcagatcataggctttccagaccctcagggcggcgtggattgtacccctgaggaggmatggatgtggagccggggctctggtgatgggcccctctcctttcagcaggagaagcttggggacatctgcttctccctccgctatgtccccacggccggg

SEQ ID NO: 474374 - DNA, 201 bp, Homo sapiens
cctgagccaatcagatcataggctttccagaccctcagggcggcgtggattgtacccctgaggaggcatggatgtggagccggggctctggtgatgggccyctctcctttcagcaggagaagcttggggacatctgcttctccctccgctatgtccccacggccgggaagctcaccgtcatcgtcctggaggctaaaaacc

SEQ ID NO: 474375 - DNA, 201 bp, Homo sapiens; identical to SEQ ID NO: 206299

SEQ ID NO: 474376 - DNA, 201 bp, Homo sapiens
atgtccccacggccgggaagctcaccgtcatcgtcctggaggctaaaaacctgaagaagatggacgtaggaggactgtcaggtgtgtgggaagcaagggartggggtgtgtggggatggcgtggggtgggttctcgttctgacagtttctgagcctcgagggtttcttcggggacagggaggacctggctgctgtggaagg

SEQ ID NO: 474377 - DNA, 201 bp, Homo sapiens; identical to SEQ ID NO: 206257

SEQ ID NO: 474378 - DNA, 201 bp, Homo sapiens
tctgagcctcgagggtttcttcggggacagggaggacctggctgctgtggaaggcatggattttggcatagagctagggagacccgaagggtgtaggcagkgtttctatgttggtccaacaacccagcagtggggagctataagactcctccttcctctccccagatccatacgtcaaggtccacctgctgcagggcggca

SEQ ID NO: 474379 - DNA, 201 bp, Homo sapiens
ccctcgctgcctcactccatgccttccttctggttgtgctgtgcctcaccctatctctgacttcctgctctctactgcggattctctgtgcactccaggtmccctacgtggagctggggggcagggtgctggtcatggcggtgtacgacttcgaccgcttctctcgcaatgacgccatcggggaggtgcgggtccctatga

SEQ ID NO: 474380 - DNA, 201 bp, Homo sapiens
aatacgggcacacacaatacacaccacacacgcgcgcacacgcacacgggcacacacgcgcgcacgggatcctgctccgctccgcggctcccccgccccgsagagctccgcgatcagcacccgggacagcgccaccgcccacgtgcagggggtggggtccgggcggggctggcgcctcggcgtctcccgggagtgtcccgt

SEQ ID NO: 474381 - DNA, 201 bp, Homo sapiens
gggtccctatgagctccgtggacctggggcggccagtgcaggcctggcgggagctgcaggcggctccgcgggaggaggtgagcatgcgcggtcgcgccccragccacgcccccaggcccagtcccgcccacaacatcctgagccaatcagatcataggctttccagaccctcagggcggcgtggattgtacccctgaggag

SEQ ID NO: 474382 - DNA, 201 bp, Homo sapiens
tctcccgggagtgtcccgtccagccgccgagcaggtaggagctgctgggacccccgccctcagcccatccgcatccgcatccctagaggaaaggggtgtgsgagtgggggctggggcactggggagacaaccagagggagggcagcagcctgaagcggagagacagggatctggggacgcgagacaggtatggagaagaca

SEQ ID NO: 474383 - DNA, 201 bp, Homo sapiens; identical to SEQ ID NO: 206324

SEQ ID NO: 474384 - DNA, 201 bp, Homo sapiens
tgggcgctcggaccacaggctgcccgctccccacctcgcgggacctcaggatcccagtcgggctattggggggttcccaggcaccggtgggccccggagcragcctgccccgccgggactccgcgtctgtgcgtcagccccgcccgttgtcctggcaacaacccgttgcccgggcaaccagctttgctctcaccccgcttg

SEQ ID NO: 474385 - DNA, 201 bp, Homo sapiens; identical to SEQ ID NO: 206326

SEQ ID NO: 474386 - DNA, 201 bp, Homo sapiens; identical to SEQ ID NO: 206267

SEQ ID NO: 474387 - DNA, 201 bp, Homo sapiens
ctgagggacagagttaactgagaccagagagaaggacattctagtccaagttggagcatgtgttgaggccccatatccagattcaggccccatatccagawtctgaggcttatttggggaacaaagagtcatttctcacaatagctgcactctggagtgaagtgtctggagaactcagcagtatccatgtcatgaaggtga

SEQ ID NO: 474388 - DNA, 201 bp, Homo sapiens
aggcttatttggggaacaaagagtcatttctcacaatagctgcactctggagtgaagtgtctggagaactcagcagtatccatgtcatgaaggtgatgaargctacaaatatgttttgagcatgagagggacagggtcagatggtgttaggatgactcctctggaaccctgtgtaggacagatctgcggcgagggatccag

SEQ ID NO: 474389 - DNA, 201 bp, Homo sapiens
gcactctggagtgaagtgtctggagaactcagcagtatccatgtcatgaaggtgatgaaggctacaaatatgttttgagcatgagagggacagggtcagawggtgttaggatgactcctctggaaccctgtgtaggacagatctgcggcgagggatccagggacgaggccagtgcagcagcagcctggagaggataaaaga

SEQ ID NO: 474390 - DNA, 201 bp, Homo sapiens
ctcctctggaaccctgtgtaggacagatctgcggcgagggatccagggacgaggccagtgcagcagcagcctggagaggataaaagacatttgcattggaygaggccgttggaatggaaagtggtcactgcagggtctgaaaattaagtctctcagtgcagagtgcagtggttgcctgggagccagacagccctaggtttc

SEQ ID NO: 474391 - DNA, 201 bp, Homo sapiens; identical to SEQ ID NO: 206269

SEQ ID NO: 474392 - DNA, 201 bp, Homo sapiens
tcaaagaccgtctgcagcagaatcacactgggtacttgttgaaatgcaaattctggcactagcacctgacctatcaagtcagaatccctgaagaggtgacytcagacattttgccacaggattcaggggaattcaggttcacattgaattttaagaattgctggcctaggttaaggagacaccttctgctttttcattcaa

SEQ ID NO: 474393 - DNA, 201 bp, Homo sapiens
gcaagggagtggggtgtgtggggatggcgtggggtgggttctcgttctgacagtttctgagcctcgagggtttcttcggggacagggaggacctggctgcygtggaaggcatggattttggcatagagctagggagacccgaagggtgtaggcagtgtttctatgttggtccaacaacccagcagtggggagctataagac

SEQ ID NO: 474394 - DNA, 201 bp, Homo sapiens
accgtcatcgtcctggaggctaaaaacctgaagaagatggacgtaggaggactgtcaggtgtgtgggaagcaagggagtggggtgtgtggggatggcgtgrggtgggttctcgttctgacagtttctgagcctcgagggtttcttcggggacagggaggacctggctgctgtggaaggcatggattttggcatagagctag

SEQ ID NO: 474395 - DNA, 201 bp, Homo sapiens; identical to SEQ ID NO: 206346

SEQ ID NO: 474396 - DNA, 201 bp, Homo sapiens
cctgcggaggggcgaggacgaggcagaagtcagcgggatgcctgtggggccgtggaggaagagggtatccctttaggatggaactaggtcctggacacccyctctcaagtgcggggaggctgatactacaactcccagcatgactcgcggtggctgtccggtttctgcgcggctgttcgcgcaaaggcctcatgggagttg

SEQ ID NO: 474397 - DNA, 201 bp, Homo sapiens; identical to SEQ ID NO: 206350

SEQ ID NO: 474398 - DNA, 201 bp, Homo sapiens
atgagctccgtggacctggggcggccagtgcaggcctggcgggagctgcaggcggctccgcgggaggaggtgagcatgcgcggtcgcgccccgagccacgyccccaggcccagtcccgcccacaacatcctgagccaatcagatcataggctttccagaccctcagggcggcgtggattgtacccctgaggaggcatggat

SEQ ID NO: 474399 - DNA, 201 bp, Homo sapiens; identical to SEQ ID NO: 206288

SEQ ID NO: 474400 - DNA, 201 bp, Homo sapiens
ttcccacgtctgccttcgcccgcttccggttcagaccctgcggaggggcgaggacgaggcagaagtcagcgggatgcctgtggggccgtggaggaagaggstatccctttaggatggaactaggtcctggacaccccctctcaagtgcggggaggctgatactacaactcccagcatgactcgcggtggctgtccggtttc

SEQ ID NO: 474401 - DNA, 201 bp, Homo sapiens
ttgggttccactgacccgtgatttttttccgcatggatccctggactttcccatttgagttcccccaactgttcgcttcgaccctcgctgcctcactccaygccttccttctggttgtgctgtgcctcaccctatctctgacttcctgctctctactgcggattctctgtgcactccaggtcccctacgtggagctggggg

SEQ ID NO: 474402 - DNA, 201 bp, Homo sapiens; identical to SEQ ID NO: 206290

SEQ ID NO: 474403 - DNA, 201 bp, Homo sapiens; identical to SEQ ID NO: 206293

SEQ ID NO: 474404 - DNA, 201 bp, Homo sapiens; identical to SEQ ID NO: 206294

SEQ ID NO: 474405 - DNA, 201 bp, Homo sapiens
gaggtgcgggtccctatgagctccgtggacctggggcggccagtgcaggcctggcgggagctgcaggcggctccgcgggaggaggtgagcatgcgcggtcrcgccccgagccacgcccccaggcccagtcccgcccacaacatcctgagccaatcagatcataggctttccagaccctcagggcggcgtggattgtacccc

SEQ ID NO: 474406 - DNA, 201 bp, Homo sapiens
acctggggcggccagtgcaggcctggcgggagctgcaggcggctccgcgggaggaggtgagcatgcgcggtcgcgccccgagccacgcccccaggcccagycccgcccacaacatcctgagccaatcagatcataggctttccagaccctcagggcggcgtggattgtacccctgaggaggcatggatgtggagccggggc

SEQ ID NO: 474407 - DNA, 201 bp, Homo sapiens
cgagccacgcccccaggcccagtcccgcccacaacatcctgagccaatcagatcataggctttccagaccctcagggcggcgtggattgtacccctgaggrggcatggatgtggagccggggctctggtgatgggcccctctcctttcagcaggagaagcttggggacatctgcttctccctccgctatgtccccacggcc

SEQ ID NO: 474408 - DNA, 201 bp, Homo sapiens
ttgaatctactctttcttcctaagcttagcacaaaataaggacttttcattctctattttcttcctatctctctctctttatgactaacatctcagctcayattgatttttctcttgaattttaattttcttttttaccctcttttttattttcctattttaggcactcattatttctcacctagactctaacagcagtat

SEQ ID NO: 474409 - DNA, 201 bp, Homo sapiens
gcaacactgttacttactcagtttacaaattcttcttagagaatatggaaactatgaagattttcagcactttctgaaactacactataaagggctctgarccagaatcagaagcccagagtcattgaatcaaaaagtagctgtgtattcttgcacaaattaccaaagtgatatgggcctcattttcctcatctgtaaaaa

SEQ ID NO: 474410 - DNA, 201 bp, Homo sapiens
tcagggaagggaaggttctgctggggtcctggaactgtgactgatggcctcagggatgcaggaataggccttctagcacagcagctagtaggctcccccargccatccgctggcgtgtggaggtgcaggacctgggggaggcagtcctcaccccagctaggccaaggggtagggtttttaggtctgtttttaacagaactc

SEQ ID NO: 474411 - DNA, 201 bp, Homo sapiens
ggcggtgtttcagggaagggaaggttctgctggggtcctggaactgtgactgatggcctcagggatgcaggaataggccttctagcacagcagctagtagsctcccccaggccatccgctggcgtgtggaggtgcaggacctgggggaggcagtcctcaccccagctaggccaaggggtagggtttttaggtctgttttta

SEQ ID NO: 474412 - DNA, 201 bp, Homo sapiens
ggattgaattttccttgtctgatggtagcccatccccctcccccgccgccccccgcagggataacattctcaggaatttctcttgtcctagcccctttcayttcaaaaacaatattagtcttttgttttcctttttcattcatttgtttttttacagcttttgtagagaccaacccaagtagatgccagtgggtattaaac

SEQ ID NO: 474413 - DNA, 201 bp, Homo sapiens
agagcccgtctcttccgccctctcccttaccctaggagggctgagtcaggcctccctacccaggcccaagggcagatgcacctgagccattgtgtcccatsgttgatacgggacggggctgatttcctgacctggacccctgagacccagtgctcttagctgtgagcctctgggaagaggttctggcaggtggaggggatg

SEQ ID NO: 474414 - DNA, 201 bp, Homo sapiens
ggcagccaacaaggcggtgcctgaactatgtctgtggatgacggagccacgacctgtccctcagggctcagcgctgcggctatgtccagggacccctggcygtgcccacgtcggggcttcccgttccttacctgccatgagaatgagatgtccagggacctccctgctccagctgggacctgtggggctttgtctgttgtc

SEQ ID NO: 474415 - DNA, 201 bp, Homo sapiens
ggacaaatagctgagcgccagccgcagtccgggggacgggagcctcgtgcgactctcggagtgctggccagattggcagaggggaggagagaggaaaaacycaggctctgaggaaaaacctctccagcccagcgcgtggcctggcattaacccactgcagccccaggaagtggttccaccccaggcagccaacaaggcggt

SEQ ID NO: 474416 - DNA, 201 bp, Homo sapiens
gagcccgtctcttccgccctctcccttaccctaggagggctgagtcaggcctccctacccaggcccaagggcagatgcacctgagccattgtgtcccatgsttgatacgggacggggctgatttcctgacctggacccctgagacccagtgctcttagctgtgagcctctgggaagaggttctggcaggtggaggggatgg

SEQ ID NO: 474417 - DNA, 201 bp, Homo sapiens
agcccgtctcttccgccctctcccttaccctaggagggctgagtcaggcctccctacccaggcccaagggcagatgcacctgagccattgtgtcccatggwtgatacgggacggggctgatttcctgacctggacccctgagacccagtgctcttagctgtgagcctctgggaagaggttctggcaggtggaggggatgga

SEQ ID NO: 474418 - DNA, 201 bp, Homo sapiens
cacatgctgggccttggggctgccttggacctcaggccgttgacaaggaaaagcggagagttgggaaaaaaggacaaatagctgagcgccagccgcagtcygggggacgggagcctcgtgcgactctcggagtgctggccagattggcagaggggaggagagaggaaaaacccaggctctgaggaaaaacctctccagccc

SEQ ID NO: 474419 - DNA, 201 bp, Homo sapiens
gatccccaaccccctggtgatggaccaatactggcctgcggccccttaggaactggactgcacagcaggaggtgagcggcaggtgagcgtgcattcccgcsggagccccgcctcccgtcagatcagcggcggcattagattctcataggagcgggaaccctcctgtgaaccctgcataccagggttctccatgcaacaatc

SEQ ID NO: 474420 - DNA, 201 bp, Homo sapiens
cccgtctcttccgccctctcccttaccctaggagggctgagtcaggcctccctacccaggcccaagggcagatgcacctgagccattgtgtcccatggttkatacgggacggggctgatttcctgacctggacccctgagacccagtgctcttagctgtgagcctctgggaagaggttctggcaggtggaggggatggacg

SEQ ID NO: 474421 - DNA, 201 bp, Homo sapiens
tcagagagcccgtctcttccgccctctcccttaccctaggagggctgagtcaggcctccctacccaggcccaagggcagatgcacctgagccattgtgtcccatggttgatacgggacggggctgatttcctgacctggacccctgagacccagtgctcttagctgtgagcctctgggaagaggttctggcaggtggaggg

SEQ ID NO: 474422 - DNA, 201 bp, Homo sapiens
ctcttccgccctctcccttaccctaggagggctgagtcaggcctccctacccaggcccaagggcagatgcacctgagccattgtgtcccatggttgatacgggacggggctgatttcctgacctggacccctgagacccagtgctcttagctgtgagcctctgggaagaggttctggcaggtggaggggatggacgttaca

SEQ ID NO: 474423 - DNA, 201 bp, Homo sapiens
tcttccgccctctcccttaccctaggagggctgagtcaggcctccctacccaggcccaagggcagatgcacctgagccattgtgtcccatggttgatacgggacggggctgatttcctgacctggacccctgagacccagtgctcttagctgtgagcctctgggaagaggttctggcaggtggaggggatggacgttacag

SEQ ID NO: 474424 - DNA, 201 bp, Homo sapiens
agaaacatgttcttactctgccaggacccagggataggtgaggctctcctattgggataccatttcaccagcagagagattaattggagaatgtgtaattytttcccctttggaaataatttgttcttttttttttttgacagagtttctttctgtcatccaggctggagtgcagtggtgtgatcatagctcactgcagcc

SEQ ID NO: 474425 - DNA, 201 bp, Homo sapiens
tgtgatcatagctcactgcagcctcgacctcctgggctcaagtggtcctcccacctcagcctcccaagtagctgggactacaggcatgcaccaccatgccyggctaatttttacatttttggtagaggccgggtacggtggctcatgcctgtaatcccggcactttgggaggccgaggtgggtggatcacgaggtcaggag

SEQ ID NO: 474426 - DNA, 201 bp, Homo sapiens
tcacgaggtcaggagatcgagaccatcccggctaaaacggtgaaaccccgtctctactaaaaatacaaaaaattagccgggcgtagtggcgggcgcctgtmgtcccagctacttgggaggctgaggcaggagaatggcgtgaacccgggaggcggagcttgcagtgagccgagatcccgccactgcactccagcctgggcg

SEQ ID NO: 474427 - DNA, 201 bp, Homo sapiens
acctttcctgaatgtgttggttcggcatggtgacaggtgtttccctgcggcagaatgttggggccacaccaacgtccccagagtcttctccctagagtctytgaaaggaagcctgggttcctggtggtgctcccctccatgtgtgctcacccgcctggatggaggcagcccaggggagcggctgagactcttggcagagag

SEQ ID NO: 474428 - DNA, 201 bp, Homo sapiens
ggcttgcatggacgtaattaacctaaaagtctttaaacgtttctcccgagtgttggagtgactgtttgcacacatctgttgtgttttgcctgtgtgcattyctcctcctggtcagagagcccgtctcttccgccctctcccttaccctaggagggctgagtcaggcctccctacccaggcccaagggcagatgcacctgag

SEQ ID NO: 474429 - DNA, 201 bp, Homo sapiens; identical to SEQ ID NO: 111372

SEQ ID NO: 474430 - DNA, 201 bp, Homo sapiens; identical to SEQ ID NO: 111347

SEQ ID NO: 474431 - DNA, 201 bp, Homo sapiens
cccagcagcccctctgctgcagcttccggatgagttccagcaggttcatctgcagcatcagctcctgggatacagaggggccccatgaaggccagagtgayccccaggcccctttcatcccggcccaaaggtgccaggcagtgagcccacggggcgaccatcctgtgaagcctggtcatggcctgctacgacagggtggaa

SEQ ID NO: 474432 - DNA, 201 bp, Homo sapiens
ccgggaacacaaaggaggcaggagcagccagtcacccctgccaaatcagcaggagaagcagaaagtcaacgcaggcatgcctgctgctggtggaaccaggrcctggcccaaaccttctgaagcacaaacagcattgggcccaggcagttactgaaactccccatcctgctagaaagaactacaactctgtggaaaaatggc

SEQ ID NO: 474433 - DNA, 201 bp, Homo sapiens
gaagagccctgatgttgcagctcttctctggtggcaagtctccagggaactccacggcccctgaggctcccctgcaggtagcctggctccagctgtgcctrcagccttccccaatctcctgtttcttggcattctgtacacacctcgacgatggtatttaccaaaagcccccctcaagacagctccataacacagggaagc

SEQ ID NO: 474434 - DNA, 201 bp, Homo sapiens
ggaaggggcccccaggtagaggcctctgctgcaacagaggtgggggccctaccagggccccggttatggcagaacctgcagctatcacacaagccacatgygggccacactgaggcatctttatttctctgggtcacacagagcttgggcctgggagcctcttctgcatgggggctgcagctgccaagggagcggctgaga

SEQ ID NO: 474435 - DNA, 201 bp, Homo sapiens; identical to SEQ ID NO: 133612

SEQ ID NO: 474436 - DNA, 201 bp, Homo sapiens
gtgggccacactgaggcatctttatttctctgggtcacacagagcttgggcctgggagcctcttctgcatgggggctgcagctgccaagggagcggctgaraccagaacaagcgctcgagtgggccccagtgcaggttgggatgtgcccggtggagtaaggtgtgagaacccccagcctcactctctgcctggccctgaag

SEQ ID NO: 474437 - DNA, 201 bp, Homo sapiens
tgtgcaactagaatgaggccctgcaggcctgagagggaactgaccctgaagggcgcgcacagctgtcaacagacctccaactacccaagggcgctgctcasctgtcaacagaactccaattaccggagggcaacgcagtcagatctaccaccagagtcagcctgccggccaaccaagcacggaggcctagggccatcaggc

SEQ ID NO: 474438 - DNA, 201 bp, Homo sapiens
ccacactgaggcatctttatttctctgggtcacacagagcttgggcctgggagcctcttctgcatgggggctgcagctgccaagggagcggctgagaccaraacaagcgctcgagtgggccccagtgcaggttgggatgtgcccggtggagtaaggtgtgagaacccccagcctcactctctgcctggccctgaagcagac

SEQ ID NO: 474439 - DNA, 201 bp, Homo sapiens
aggcatctttatttctctgggtcacacagagcttgggcctgggagcctcttctgcatgggggctgcagctgccaagggagcggctgagaccagaacaagcrctcgagtgggccccagtgcaggttgggatgtgcccggtggagtaaggtgtgagaacccccagcctcactctctgcctggccctgaagcagacagcagcag

SEQ ID NO: 474440 - DNA, 201 bp, Homo sapiens
catctttatttctctgggtcacacagagcttgggcctgggagcctcttctgcatgggggctgcagctgccaagggagcggctgagaccagaacaagcgctygagtgggccccagtgcaggttgggatgtgcccggtggagtaaggtgtgagaacccccagcctcactctctgcctggccctgaagcagacagcagcaggct

SEQ ID NO: 474441 - DNA, 201 bp, Homo sapiens
catcgcccgctgctcctcacggatccggtgctccaccgcctgccgtggggccgggggcggcgggggaggtgagggcagctcaaacacatgctcctgctgcygtccccaacagcaccagctctgacaccaccaatgcatcctcaccacaccgaggcctctcctcggccaagtgaacccctgaagggggccccaaggggcttc

SEQ ID NO: 474442 - DNA, 201 bp, Homo sapiens; identical to SEQ ID NO: 133616

SEQ ID NO: 474443 - DNA, 201 bp, Homo sapiens
ccgggggcggcgggggaggtgagggcagctcaaacacatgctcctgctgctgtccccaacagcaccagctctgacaccaccaatgcatcctcaccacaccsaggcctctcctcggccaagtgaacccctgaagggggccccaaggggcttccacgaatgctttgacttgggactgccttgggaccacacacacatctccgc

SEQ ID NO: 474444 - DNA, 201 bp, Homo sapiens
aagtgccaggtccactacgagattccactagatagacaaccaaaaggcaagaagagagccacgccggctgcctgggcagaaggggcctggccttagacacraccgggaacacaaaggaggcaggagcagccagtcacccctgccaaatcagcaggagaagcagaaagtcaacgcaggcatgcctgctgctggtggaaccag

SEQ ID NO: 474445 - DNA, 201 bp, Homo sapiens
caaaaaggaaactgccaaaatccaacatccattcttgatagaaacacaccaatcctggagcagatggacactgcctgccttctggggaagggggccttgcmccgctaggaggaatttttgccacattaaacctgcctctaatcaggctcctaccagcagtccagtgtacagtaaacccagagagtggagaagcaggttaaa

SEQ ID NO: 474446 - DNA, 201 bp, Homo sapiens
ccaatcctggagcagatggacactgcctgccttctggggaagggggccttgcaccgctaggaggaatttttgccacattaaacctgcctctaatcaggctyctaccagcagtccagtgtacagtaaacccagagagtggagaagcaggttaaatgcacgaggaagcatttcctctgatagatccagagcagggcattctaa

SEQ ID NO: 474447 - DNA, 201 bp, Homo sapiens
acaagttaggtaccatgatgtggccatgcactgaaagtcaggagacacctggaacagttaatttctcagggggctaccctctgcagctgtgtaggagaccrctcttgttctagagcacttgctcccaatccaaggccaaggttgaccccaccacccaggttgtctggaggcattcttggttttcaggactagggagggtac

SEQ ID NO: 474448 - DNA, 201 bp, Homo sapiens; identical to SEQ ID NO: 133526

SEQ ID NO: 474449 - DNA, 201 bp, Homo sapiens; identical to SEQ ID NO: 133598

SEQ ID NO: 474450 - DNA, 201 bp, Homo sapiens
caagacagcatctcaccataaagacttacccagccacaaatgtcagcatggctgggttgaaaatcctggtctccaggaatgctgaagactcttggtgaatkctatgctgtcacatgtatgtattttgggatgtcaagaactagagcaaaatgttaactactgaactttcggtggagagcacaagcgtatgcactacactgt

SEQ ID NO: 474451 - DNA, 201 bp, Homo sapiens
aagcgctgctggaatgagctgcggggtagaggagcgcggtgagccccggcgggacacgatgcggcctcggcaggccgccgcccgccccgcccgcgtacctsggcaactccttcaccaggctctgtaacgccgacagcagctggtagtgtcgctcctgctgccgggcaccgtccgccacctcctccaaggcgcccgcgtagc

SEQ ID NO: 474452 - DNA, 201 bp, Homo sapiens
cgtacctgggcaactccttcaccaggctctgtaacgccgacagcagctggtagtgtcgctcctgctgccgggcaccgtccgccacctcctccaaggcgccsgcgtagcgctccatggcgcggacgcccgctagccgccggctgcagcgacgagcgcccccagctcacgtcatcccgaccgcggcgcgtcccgcccctttta

SEQ ID NO: 474453 - DNA, 201 bp, Homo sapiens; identical to SEQ ID NO: 133634

SEQ ID NO: 474454 - DNA, 201 bp, Homo sapiens
ggggattccagaaggtgcggggcactgaaagagagtgggggtggggaagactggccaggtggggccaaagctgcagccccagacccagggcagctggaggrggcaggcgggagggaggctgcagtctgagggcttcagggcccccgtggccacaggccataggacatctactcaagtgttggagaccacctcaggcaaagg

SEQ ID NO: 474455 - DNA, 201 bp, Homo sapiens; identical to SEQ ID NO: 133635

SEQ ID NO: 474456 - DNA, 201 bp, Homo sapiens; identical to SEQ ID NO: 133636

SEQ ID NO: 474457 - DNA, 201 bp, Homo sapiens; identical to SEQ ID NO: 133637

SEQ ID NO: 474458 - DNA, 201 bp, Homo sapiens
cagctccataacacagggaagcagggaaatgtcatcttcttcactctactgatcaaacattgctacaagtgccaggtccactacgagattccactagatakacaaccaaaaggcaagaagagagccacgccggctgcctgggcagaaggggcctggccttagacacgaccgggaacacaaaggaggcaggagcagccagtc

SEQ ID NO: 474459 - DNA, 201 bp, Homo sapiens
agctccataacacagggaagcagggaaatgtcatcttcttcactctactgatcaaacattgctacaagtgccaggtccactacgagattccactagatagrcaaccaaaaggcaagaagagagccacgccggctgcctgggcagaaggggcctggccttagacacgaccgggaacacaaaggaggcaggagcagccagtca

SEQ ID NO: 474460 - DNA, 201 bp, Homo sapiens
ggagcagatggacactgcctgccttctggggaagggggccttgcaccgctaggaggaatttttgccacattaaacctgcctctaatcaggctcctaccagsagtccagtgtacagtaaacccagagagtggagaagcaggttaaatgcacgaggaagcatttcctctgatagatccagagcagggcattctaattatagaa

SEQ ID NO: 474461 - DNA, 201 bp, Homo sapiens
aagaactacaactctgtggaaaaatggccgattccaggactgagacacggagaaaacaagaaaagatgagcctgaacacatacctgaaccagaaagcaagraagtgctcacagaatgatgaggcggcatctaaaggtgcctggagcgcccccaactggccacacatggcacagtctgagcattaaggaataatgagccatg

SEQ ID NO: 474462 - DNA, 201 bp, Homo sapiens
aaaatggccgattccaggactgagacacggagaaaacaagaaaagatgagcctgaacacatacctgaaccagaaagcaaggaagtgctcacagaatgatgrggcggcatctaaaggtgcctggagcgcccccaactggccacacatggcacagtctgagcattaaggaataatgagccatgcacttgggattagtaaactg

SEQ ID NO: 474463 - DNA, 201 bp, Homo sapiens
gacccagtaggatggaattcaagtgactgtaattcactgtagtaatagaaaatgattcaccacgtgatcatctcaagagctgccaaaaaggaaactgccamaatccaacatccattcttgatagaaacacaccaatcctggagcagatggacactgcctgccttctggggaagggggccttgcaccgctaggaggaatttt

SEQ ID NO: 474464 - DNA, 201 bp, Homo sapiens
tcaagttcttagaagacagggatcatatctcatgtaccttctgtattcctcataaggctcaaatatttgttgcataggtatttgactctagaatccaaacrataactcacttgactcaactgacttaagagttaaatcaattcgtggctgggcacagtggctcacgcctgtaatcccagcactttgggaagccaagctggg

SEQ ID NO: 474465 - DNA, 201 bp, Homo sapiens
agggggctggggagcccagagcccgcacacccaggtgccagcagcatggggattaggggtggagagggtgtctggaggctcaaggcgggggtgcggaggcrgtggggaagagcggggcagctagctcccagcgagggaaagttggggagtagaccgggctgataacagagcagaggggtcgccggggttgcaggcttggga

SEQ ID NO: 474466 - DNA, 201 bp, Homo sapiens
agctccttcatgggaaacttccccaaggggaaactgggggccttgccatccccactccctattctgagggccagatcccggcctcaaacccacccagctgsatagtaactgtggccccaggacgcttgtttccccctctataaaagggacacattttttggtagaaacagcagctgtggctgagggacagtcatgactggc

SEQ ID NO: 474467 - DNA, 201 bp, Homo sapiens
acacagcagggagcgcctgcccaaggccttgcctcccagtcctgccacctccagaagagatgctgagctccttcatgggaaacttccccaaggggaaactrggggccttgccatccccactccctattctgagggccagatcccggcctcaaacccacccagctggatagtaactgtggccccaggacgcttgtttccccc

SEQ ID NO: 474468 - DNA, 201 bp, Homo sapiens
ggacagagccccatctgtgagcttgtgacagcagggagccccctgagccccagcctcacctggtcccccactttgtgggcgatgaccgcggctccctcctycagttctgcgtcattgagcgggtggattcgaagtgccacctgcaggcagtcaccagggcggctgctctgggatctgctcagtctctgtgaagaggtgaag

SEQ ID NO: 474469 - DNA, 201 bp, Homo sapiens
gaatttctctcccccccatagagcaatgcctctttgatgaaaggtagccaggtaggtgcccttaggagaccaacgcacatacgtctctgtccatctctgcrgaaaaaggcagtgccaacgttaatacaacaaaatggcaaacacaaagacccctcctacaatgaatttatcctacaatgaatctgttctacaaactttttt

SEQ ID NO: 474470 - DNA, 201 bp, Homo sapiens
acgctatgtgctgttttgcattttttgagaaccaacgtcctggtcttttcattttataagccataattttgcccaagaatgtaaaaacgaaagaagaaacrtcaatgtccttggattgttggaagttcactgccgtgatactgaccagtcccaagttttgcgataaataaaaacgtgcccattctttgctggtgaaaatga

SEQ ID NO: 474471 - DNA, 201 bp, Homo sapiens
ggccatcgctcacttccatcagccgaggccacaccccattcataggcgagtcccggcctgcccagcagtggtcctaggccagtcaaatgctcactgttggrcagcgactgggtcatcatctgtgctgacctactcagaagaggaaagggaccaggttacttactgatgagttcaatcttcccgttgtttttgacgtggtag

SEQ ID NO: 474472 - DNA, 201 bp, Homo sapiens
gctggaccacctcggaaaacaattttacaaagtccatcgccaagtaccccctaagtcatgatccatactttaaatgggaaaaaaaagaagatgcgacaggrgtatttcaaaacaatactatcttatttcctgaggtaactggacaaagaattccctttacagcaaatgttcactgctgcagggaccccaacagagagatgt

SEQ ID NO: 474473 - DNA, 201 bp, Homo sapiens
aatttaaaaattagccaggtatggtagtatacacctgtagtcccagctactcaggaggctgaggtgggaggatctcttaagcccaggaggctgaggctgcwgtgaactatgatcacaccactgtactccagccctccagcctggatgacagagtgagatctcatctcaaaatttaaaaataaataaataaataatttaaaa

SEQ ID NO: 474474 - DNA, 201 bp, Homo sapiens
aaaagtctctgcagaacaggaaaataaaatgttaaagcaaagaccaagtgatgacgaaactgaaaagcagaagagaatagaacaactcatttgctatataraagctcaatgctgtcacagctgacgctgagcgctccctctgcacagccactgctctgggcatgccgcgcagcttcataggtcctcgccaggaccctgtgg

SEQ ID NO: 474475 - DNA, 201 bp, Homo sapiens
gaactgctgggctcaagccatcctcctgcctcagcctcccaaaatgtcaggattacaggcgtgagccaccatgcctggcctcaaatagctcatatacaccrgttaatccactcactgtcttcctgcactgacttaaaagggaggtcctcgtcctgcctcacagcgggtattctcaaggcttacagtagcatctggcactca

SEQ ID NO: 474476 - DNA, 201 bp, Homo sapiens
agacaaactctgattgcctaatttctgaaacttggggacaggtgaaggatgatgtataatactgctctctctactggtcggtatgttttaaaacccccttrgaaaacgacgaaagaaagcgctcggccgggcgtggcggctcaggcctgtaatcataattgcttgaactcaggaaacagaggctgcaatgagatcatatca

SEQ ID NO: 474477 - DNA, 201 bp, Homo sapiens
atttttaaattttgttgtagagatgggggtcttgctatgttgcccaggctggtcttgaactcctggcctcaaacgatcctctcacctcagctttgaagctsttactattcagctgctgacttcctgatctgatcctttccgtttcttttttctctcatttgccacctcgttgcttttctgttctactttctgagggagttc

SEQ ID NO: 474478 - DNA, 201 bp, Homo sapiens
ggctaatttttaatttttaatagaaacgggggtctcactatgttgcccagggtggtcttgaacccctagactcaagcaatcctcctgcctcagcctcccaragctctgggattacaggcgtgagccaccgcgccaggcccagtcattttttttttaaattatggtaaaatatatagaacataaaatttaccatcttaacct

SEQ ID NO: 474479 - DNA, 201 bp, Homo sapiens
aattactaataaaatgtgcactggagggacacaggatgaacggcaggactgcgacaattctagaactgtagaatcgcagatgagagaaatgtagggctccyaaaaaagcaaacgcaccaaggcgccctcctcacacctgggagacccagtgtgacctgaggctctaggccactcctccagggtggcaggagcccgggtcct

SEQ ID NO: 474480 - DNA, 201 bp, Homo sapiens
agaaagaccggtttttcatacaagtttgcttttatttccatgttcaacctgcggagaaaaccggccacaacctgcacggtgggggtacaaggcatggcggygccctcccggtgggtctccgggacacgtccagcactgcccgcaatggggatgcaagtccttcaacggaaatgctgctcggctgtgtacaggcaccgtgga

SEQ ID NO: 474481 - DNA, 201 bp, Homo sapiens
gtggctggtctttgggctccatctctcaacgccgggctgccccgggccggggagggacctgcagcctggcaggagggtatgggcagcgggatgcgctcccbatcacagcagagatgagacctgcctgcgctcagccccgctctgctctgcctaggtgacatcagctgggccttggggagccgggctggcaccactcatgtg

SEQ ID NO: 474482 - DNA, 201 bp, Homo sapiens
tctgttctacaaactttttttttttttgagacggagtctcgctgtctcccaggctggagtgcagtggcgcaatctcagctcactgcaagctccacctcccwggttcatgccattctcctgcctcagcctcccgagtagcggggactacaggtgcctgccaccatgcccagctaatttttttgtatttttagtagagacggg

SEQ ID NO: 474483 - DNA, 201 bp, Homo sapiens
cctcctcaggcccgccaacaccacgaactgtccttgggggctccagaagatggtgttcgcctgctgcttgtcgaacatctctgaaaggaaagagcgcgccygtcacgagctgcgagggcttccacagtgccggggcagccaaggctggaggacttggccgtgctcatgctgcccatgagggcagagctggtaatgctggac

SEQ ID NO: 474484 - DNA, 201 bp, Homo sapiens
gagagcaagcaacagcaggaaaggtgcacattcctggagtttcagagacagctgcttccacttgtgtggagtgacctacgtgaaactgctcccttcctgaragcaggacacccacagcaggaccgcaggagcccgacattgtcagcagctgtggatgccgcttccctcgcacccagtgtgcacctacagtgggatcctgac

SEQ ID NO: 474485 - DNA, 201 bp, Homo sapiens
aaagcatctgggagcgcttatttcactctgtgcgggcttggcctgagtcctggagtaccgtgggtctgcagaggttcaatgaagtcctatccactgacacyggggcaaccctttcagcgcacaatactctctctaccaagaagccgggtgcaggcgcctgaggggtctctgccacagcagagcgctactcacagggcggac

SEQ ID NO: 474486 - DNA, 201 bp, Homo sapiens
atacccttcccactagaagacaagggactgacccccggggggaggttactggatggctggaaggcacttgtttaaccacagagaaccacaacccgcagacrggtctgcctggtcacttcacgaaagcatctgggagcgcttatttcactctgtgcgggcttggcctgagtcctggagtaccgtgggtctgcagaggttcaa

SEQ ID NO: 474487 - DNA, 201 bp, Homo sapiens
ctctgattgcctaatttctgaaacttggggacaggtgaaggatgatgtataatactgctctctctactggtcggtatgttttaaaacccccttggaaaacracgaaagaaagcgctcggccgggcgtggcggctcaggcctgtaatcataattgcttgaactcaggaaacagaggctgcaatgagatcatatcactgcact

SEQ ID NO: 474488 - DNA, 201 bp, Homo sapiens
cagctgagaccgacaccgtgacaccaaccacaaaggtaaggcagcctcacagctgtgtaacgaatacccttcccactagaagacaagggactgacccccgkggggaggttactggatggctggaaggcacttgtttaaccacagagaaccacaacccgcagacaggtctgcctggtcacttcacgaaagcatctgggagcg

SEQ ID NO: 474489 - DNA, 201 bp, Homo sapiens
gacacactgctggaacacagctgagaccgacaccgtgacaccaaccacaaaggtaaggcagcctcacagctgtgtaacgaatacccttcccactagaagayaagggactgacccccggggggaggttactggatggctggaaggcacttgtttaaccacagagaaccacaacccgcagacaggtctgcctggtcacttcac

SEQ ID NO: 474490 - DNA, 201 bp, Homo sapiens
aatcccagccactcaggaggctgaggtgggagaatcgcttaagcctgagaggtcagctgggcttgttggctcacgcctgtgatcccagtgctttgggaggygtaggcgggcagatcacgagatcaggaattcgagaccagcctggccaacacatgatgaaaccctgtctctactaaaaatacaaaaaattagccgggtgtg

SEQ ID NO: 474491 - DNA, 201 bp, Homo sapiens
ctgtctctactaaaaatacaaaaaattagccgggtgtggtggcaggcacctgtaatcccagttaggaggctgaggcaggagaatcgcttgaacgcaggggytggaggttgcagtgagccgagaccgcgccagtgaactgtagcctgggcaacaaagtgagactccgtctcagacaaacaaacaaaaaacctgagaggtgga

SEQ ID NO: 474492 - DNA, 201 bp, Homo sapiens
ggaagcttctccatgatttcgacacactgctggaacacagctgagaccgacaccgtgacaccaaccacaaaggtaaggcagcctcacagctgtgtaacgartacccttcccactagaagacaagggactgacccccggggggaggttactggatggctggaaggcacttgtttaaccacagagaaccacaacccgcagaca

SEQ ID NO: 474493 - DNA, 201 bp, Homo sapiens
gtggcaggcacctgtaatcccagttaggaggctgaggcaggagaatcgcttgaacgcaggggctggaggttgcagtgagccgagaccgcgccagtgaactstagcctgggcaacaaagtgagactccgtctcagacaaacaaacaaaaaacctgagaggtggaggctggaagcggagatcatgccactgcaccccagcctg

SEQ ID NO: 474494 - DNA, 201 bp, Homo sapiens
acaaagtgagactccgtctcagacaaacaaacaaaaaacctgagaggtggaggctggaagcggagatcatgccactgcaccccagcctgggtgacagagtsagactctgtctcaaaaataataaataaataaataaataagtaaaatggttacttttgtgttatgtcaacttcacctcttacatcagcaacattttgaata

SEQ ID NO: 474495 - DNA, 201 bp, Homo sapiens
acagccttgagacttcctgggccagggcctcagctcggccctggagacacctcactgtgatgatttttatctcctcctcttctaggctccaggctccttcwggctggctgcccatccccctccccagcagctccattggctgccacccatcttcagggaccctgggcccctctgcaaagtctgtggtctccccggagctga

SEQ ID NO: 474496 - DNA, 201 bp, Homo sapiens
ttttctttttttagagacaaggtcttgctctgtcacccaagctggagtgtgcaatggtgccatcatggcttactatagcctcagcctcctgggctcaactycctgagtagctgggactacaggtgcacaccaccatgccttgctaatttctttagtttttttgtagagatggaggtctcgctacgttggccacgctgctgc

SEQ ID NO: 474497 - DNA, 201 bp, Homo sapiens
agcgtccatgccaaacctcaggagaggcgtgtcacgcagcatgtttggaaggtacaaggtgcctctgcttgcctatgttttatgacctagaagacttacamaagtctctggacagtctgcaattgcccatatgtttctatcaaccagaattaatgaaacagccaatcttgtaatccactgccaactgagggcaccacgcac

SEQ ID NO: 474498 - DNA, 201 bp, Homo sapiens
cttttcattttataagccataattttgcccaagaatgtaaaaacgaaagaagaaacgtcaatgtccttggattgttggaagttcactgccgtgatactgaycagtcccaagttttgcgataaataaaaacgtgcccattctttgctggtgaaaatgagccgaaggctccccaaaccctgcctcggatggaagagtaccagg

SEQ ID NO: 474499 - DNA, 201 bp, Homo sapiens
ttgaaccagggaggtggaggttgcagtgagccaagatagcaccactgcactccagtctgggtgatggaatgagaccctgtctcaaaaaaaaaaaaaaaaaagaagttaaaggtagggtgcagaggacatggggagccctgattttacccttcatcacaggaagggaagtcacttggctgcagggcctggagagagcatgaa

SEQ ID NO: 474500 - DNA, 201 bp, Homo sapiens
acaatgacaactagtacatttaaaacagtggaaagttaattttttttagaatatctgttaaaaatctgtcatatggtagaactgtgtgcctttcttctttygatgaaatcagaaaaactttctcggcacactagaatttaagcagcaagagtataaacaagaattactaataaaatgtgcactggagggacacaggatgaa

SEQ ID NO: 474501 - DNA, 201 bp, Homo sapiens
gaaagatcacctgtagaaggctggcatggggtgaaatgcatagactcccctgtgtttttctagcagcttacctttcacaaggtgagaagtcaataagctgraccccttggtggctgaatctctgaatttgcttgaatttctctcccccccatagagcaatgcctctttgatgaaaggtagccaggtaggtgcccttaggag

SEQ ID NO: 474502 - DNA, 201 bp, Homo sapiens
acagatgcagagtgtgcagtgagtattacatacgactgccatcatattatttttactggaaatgttatctgaggctaagtaagcctccaaaaatacagtarcaagtgtggacaatgaagcaagggagagcagcaacaaaagggtattcttttaactcagagcagaaagctggaagcttctccatgatttcgacacactgct

SEQ ID NO: 474503 - DNA, 201 bp, Homo sapiens
gcctcggcgttaacatggaaacaagcacagcaacagcctctggtggccgctgtgagacttaccaaatcacagatgcagagtgtgcagtgagtattacataygactgccatcatattatttttactggaaatgttatctgaggctaagtaagcctccaaaaatacagtagcaagtgtggacaatgaagcaagggagagcagc

SEQ ID NO: 474504 - DNA, 201 bp, Homo sapiens
ggacacaggctgtgatcaacatatcctgattcgaatgcgaagatttctaactctagacacttgcagtaacatttgggaagttgatattcctacaaattctstatctcattaaacaaaattacccgcgtttggtttcacaggctctattggcatggactagttcaagtatcagtgcctccatcaatgtttttacaagtcact

SEQ ID NO: 474505 - DNA, 201 bp, Homo sapiens
tctgcctcctgaagtgctgggattacaggtgtgagccactgtgcctggcctaaagtgatttcaagtgtcaaggcaggccccaccgcagtgacatctgaacrtacctggacacaggctgtgatcaacatatcctgattcgaatgcgaagatttctaactctagacacttgcagtaacatttgggaagttgatattcctacaa

SEQ ID NO: 474506 - DNA, 201 bp, Homo sapiens
ttgtcttaaaaaaaaaaaaaaaaaaaaatcaaaaaagggtagcggactgctgaaggctggtttgcgtcgacatggcggttaccgtgagtctcttgctgggygggtgtgtttgcgctgctgtccctcgctgcaggttggcgccctgtgggatagcgggcccaggccctatcggctgggagcaggaccccgattcctgccgga

SEQ ID NO: 474507 - DNA, 201 bp, Homo sapiens
tttaatggggctagggtttcgctatgttgctcaggctagtctcaaactcctgggttcaagtgatttttctacctctgcctcctgaagtgctgggattacargtgtgagccactgtgcctggcctaaagtgatttcaagtgtcaaggcaggccccaccgcagtgacatctgaacatacctggacacaggctgtgatcaacat

SEQ ID NO: 474508 - DNA, 201 bp, Homo sapiens
gcgtgggcaggggacgcgtactccaggaaaatatacctgagtgagagagggccgttggcacatacccacactgtaaggctaggcaggtatgcgctgtccgycccacccctctccacggacaagccctcggtgccaggagtatctgtgctgctcttcctgcctcgagcctaaggcagtcacacgggggacagatccacagcc

SEQ ID NO: 474509 - DNA, 201 bp, Homo sapiens
acctctgcctcctgaagtgctgggattacaggtgtgagccactgtgcctggcctaaagtgatttcaagtgtcaaggcaggccccaccgcagtgacatctgmacatacctggacacaggctgtgatcaacatatcctgattcgaatgcgaagatttctaactctagacacttgcagtaacatttgggaagttgatattccta

SEQ ID NO: 474510 - DNA, 201 bp, Homo sapiens
tagtctcaaactcctgggttcaagtgatttttctacctctgcctcctgaagtgctgggattacaggtgtgagccactgtgcctggcctaaagtgatttcargtgtcaaggcaggccccaccgcagtgacatctgaacatacctggacacaggctgtgatcaacatatcctgattcgaatgcgaagatttctaactctagac

SEQ ID NO: 474511 - DNA, 201 bp, Homo sapiens
acaatggtggccacagggcatggatccccagaggcactcatctccgtcagaggccagatcctatctctttctttctagatgtttgagcagggccatctcakaggcccttttgggggtggagggtaaaaggtgaatatgaaatatatccattttcagtggctatgacctggtctggggtttctggaagagcccaacagtctg

SEQ ID NO: 474512 - DNA, 201 bp, Homo sapiens
atggctcaggaaaaaatatctgtataggagatgatgacgtaaatgcaaccaaatgtgagaagatctcagtaaaaagcttattagcgttctgcatactcccktatttttctactaagtttgaaatgctacaaaatgaaagatcacctgtagaaggctggcatggggtgaaatgcatagactcccctgtgtttttctagcagc

SEQ ID NO: 474513 - DNA, 201 bp, Homo sapiens
tactcagaagaggaaagggaccaggttacttactgatgagttcaatcttcccgttgtttttgacgtggtagaaagacacagatatccgcggagcctctccrtgcagcacagcaaacttacttccatttggttcccaggcaaaggctatgatggtttctaaaatgcacaaaacagacccctccctttttggtcaattcagaa

SEQ ID NO: 474514 - DNA, 201 bp, Homo sapiens
agcctgggtgacagagcgagactccatctaaaaaaaaaaaaagaagaagaaaatgatagagtcactcacaggacaaatacaccaaggagatggaagggaakaaataaagaagtccaggacccggaggagagctttgtgcctgctgctgcacccctaggtcatcagagagagctgcagaagtactccagtgattctgagagc

SEQ ID NO: 474515 - DNA, 201 bp, Homo sapiens
ccgtggaaacatcactgggcgcaggagaaggtgccgccagtggcgtcgctaagtcttcggagccaacgccggcggttccaacagaaaactccaaacaagamagaagtggaagcgggtgccttaaatcccccactgcagacaccaggggctgaaaggcacaaaaatgtgtcgcaatggcagaatccaggcgcagtcacagtc

SEQ ID NO: 474516 - DNA, 201 bp, Homo sapiens
catacaccaccatgtccagctaattttttgtatttttagtagagccagggtttcaccatgttagccaggacagtctcgatctcctgacctcgtgatctgcmcgtctcggcctcccaaagtgctgggattacaggcgtgagccacagtgccgggccgatacttgcaatatatgtttgagaggaagtgaaaagtttgccttct

SEQ ID NO: 474517 - DNA, 201 bp, Homo sapiens
taattttttgtatttttagtagagccagggtttcaccatgttagccaggacagtctcgatctcctgacctcgtgatctgcacgtctcggcctcccaaagtkctgggattacaggcgtgagccacagtgccgggccgatacttgcaatatatgtttgagaggaagtgaaaagtttgccttctgacctcatttccttcttgat

SEQ ID NO: 474518 - DNA, 201 bp, Homo sapiens
aattttttgtatttttagtagagccagggtttcaccatgttagccaggacagtctcgatctcctgacctcgtgatctgcacgtctcggcctcccaaagtgytgggattacaggcgtgagccacagtgccgggccgatacttgcaatatatgtttgagaggaagtgaaaagtttgccttctgacctcatttccttcttgatc

SEQ ID NO: 474519 - DNA, 201 bp, Homo sapiens
cgtgagccacagtgccgggccgatacttgcaatatatgtttgagaggaagtgaaaagtttgccttctgacctcatttccttcttgatcagtgaacactaasagttttgggacaacttagtcgattggttttccttacaagcaaaataaaggaaaatgtagcagtcaaaataaataaataaataaataaacaggaaaaaaag

SEQ ID NO: 474520 - DNA, 201 bp, Homo sapiens
ctcccaagtcacaccctaacctcaagtcaagacaccgtctagcatttcttttttttttgagacagagtcacgctgttgcccaggctggagtccagtggcayaatcatagctcacggcagcctcaacctcccaggctcaacctcccaggctcaagtgatcctcccccctcagcctcccaggtagctgggaatacaggtgcat

SEQ ID NO: 474521 - DNA, 201 bp, Homo sapiens
cctcccaaagtgctgggatcacaggcgtgagccaccgcgcccagcccccgttttcttagtctataggtggagaaaacagttcacctccccgccacgtggcrtaagtgtgtttttgttctgtgttgagacagggtcttgctctgttaccgaggctggagtgcagtggcacgatcaggccttgtattcctgggctcaagagat

SEQ ID NO: 474522 - DNA, 201 bp, Homo sapiens
ggagaaaacagttcacctccccgccacgtggcataagtgtgtttttgttctgtgttgagacagggtcttgctctgttaccgaggctggagtgcagtggcaygatcaggccttgtattcctgggctcaagagatcctcccatctcagcttcccaagtagctgggacttacaggcatgtgccacaatgcccagctaattaaaa

SEQ ID NO: 474523 - DNA, 201 bp, Homo sapiens
tgcagtgaactggtatcgtgccactacattccagtctgggcgacgcatgaaactcagtttcaaaaaaaaaaaaaacaaaacaaacaaacaaacaaacaaacaaaaaaacaagtcccatccagttcgaaagccagcacaggtctgatagaaacttcagagcctgggggctcctcccagccatgatttacctgactgctggct

SEQ ID NO: 474524 - DNA, 201 bp, Homo sapiens
ccctccgcaggctctcgctgacaccacatgtgctcacaacgcgcctgcttctccatttggtcggcccccctgccaggatgtgggcgtgtaggcagggctgygctccagccccacggaacacagggccactttgtggaatgaagggctgagtacatgaatgaaagagcccgtgcaaagccgcaacctggcggccactgcact

SEQ ID NO: 474525 - DNA, 201 bp, Homo sapiens
agttgggggcctgcacccaccccccggcccggcaccctctccacttgcttctgaggagcagcatttaccgctattgcaccctcaaagcacagcaggaagcycccccaggcctgctgggctctgcagcccagcacccacactgggaaacgctgccttggtcaaaacacatcgaggacagcggcccagcacccaccagcctcc

SEQ ID NO: 474526 - DNA, 201 bp, Homo sapiens
cagggtttctgcgagtgaccctgagtgtttccgctcctggccctgtctcctgtggctcactggggctgaaccatacacaggaaacgggagaacaaaggacygagccgggtacagtgaataacacctgtaatcccagcagtctgggaggccaaggcgggtggatcacctgaggtcgggagttcgagaccagcctggccaaca

SEQ ID NO: 474527 - DNA, 201 bp, Homo sapiens
tactttttgtagaggcgggggtctcactttgttgcccaggctggtcttgaattcctgggcttaagcgatcctcccacctcagcctccctaagtgctgggaytgcaggtgtgacccaccacacccagcagcatttctttaaaccactgagatgtaggtttcaggccactcaccaggtctttgaaaggctgtttctctggaat

SEQ ID NO: 474528 - DNA, 201 bp, Homo sapiens
acagaactggtaagacaagtgcctccccatcgcgaagagcccacacccaggcggacggtgccagaaggacagcatacagaggcactcaagcaggaatggcyagtccattcattctcacttttcccccaacgctgccccccacccacaaggcagcagtgaggtcaccaactccaagtccccgtgccaaccccagttccccag

SEQ ID NO: 474529 - DNA, 201 bp, Homo sapiens
cgctgtctcccaggctggagtgcagtggcgcaatctcagctcactgcaagctccacctcccaggttcatgccattctcctgcctcagcctcccgagtagcrgggactacaggtgcctgccaccatgcccagctaatttttttgtatttttagtagagacggggtttcaccgtgttagccaggatggtctcaatctcctgac

SEQ ID NO: 474530 - DNA, 201 bp, Homo sapiens
aaggacgggagagcaagcaacagcaggaaaggtgcacattcctggagtttcagagacagctgcttccacttgtgtggagtgacctacgtgaaactgctccyttcctgagagcaggacacccacagcaggaccgcaggagcccgacattgtcagcagctgtggatgccgcttccctcgcacccagtgtgcacctacagtggg

SEQ ID NO: 474531 - DNA, 201 bp, Homo sapiens
tgtaatcccagctacttgggaggctgaggcaggagaatcacttgcacccggaaggtgaaggttgcagtgagccgagatcatgccactgcactccagcctgrgcaacagagtgagactctgtctcaaaaaaagaaaagaaaagcaaatccaagagggccaggcacgatggctcacacctatgatcccagctctttgggaggc

SEQ ID NO: 474532 - DNA, 201 bp, Homo sapiens
gtgagactctgtctcaaaaaaaaaaattaacacagaattatcatataaaattaccatatgaggggccaggtgcagtgactcacgcctgtaatcccagctamtcaaggaggctgaggcagaattgcttgaacccaggaggcagaggttgcagtgagctgagattgtaccactgtattccagacttggtgacacagtgagact

SEQ ID NO: 474533 - DNA, 201 bp, Homo sapiens
cccagagcagaaaggaccttctcccgcaggacggatagggttacggtcagttggagtttgcggggtcttccaggcacgggcaggggacagaaagggatggygtagacaaaggcatcagcacagcagagctgggaaacatgaaggcagctggcagagtgccctgagcatctctgaaaggtcctgtgatctgcctggctctgc

SEQ ID NO: 474534 - DNA, 201 bp, Homo sapiens
tgctcttaaagatatgacaagttcagtccacatcttaactcccaagtcacaccctaacctcaagtcaagacaccgtctagcatttcttttttttttgagasagagtcacgctgttgcccaggctggagtccagtggcacaatcatagctcacggcagcctcaacctcccaggctcaacctcccaggctcaagtgatcctcc

SEQ ID NO: 474535 - DNA, 201 bp, Homo sapiens
agtgagccgagatcatgccactgcactccagcctgggcaacagagtgagactctgtctcaaaaaaagaaaagaaaagcaaatccaagagggccaggcacgrtggctcacacctatgatcccagctctttgggaggccaaggcaggaggatcatttgcactcaggagttccagaccagcctgggtaacaaggtgaggccctg

SEQ ID NO: 474536 - DNA, 201 bp, Homo sapiens
ttgaacccgggaggtggaggttgcagtgaactggtatcgtgccactacattccagtctgggcgacgcatgaaactcagtttcaaaaaaaaaaaaaacaaaacaaacaaacaaacaaacaaacaaaaaaacaagtcccatccagttcgaaagccagcacaggtctgatagaaacttcagagcctgggggctcctcccagcca

SEQ ID NO: 474537 - DNA, 201 bp, Homo sapiens
atagcttgaacccgggaggtggaggttgcagtgaactggtatcgtgccactacattccagtctgggcgacgcatgaaactcagtttcaaaaaaaaaaaaaacaaaacaaacaaacaaacaaacaaacaaaaaaacaagtcccatccagttcgaaagccagcacaggtctgatagaaacttcagagcctgggggctcctccc

SEQ ID NO: 474538 - DNA, 201 bp, Homo sapiens
cactgcaacctctgctcctgggctcaagtgatcctcccgcttcagcgtctcaaacagctgggactatcggtgcgcaccaccacacctggctaatttttttwatttgttttttgtacagagagggtctcactatgttgcccaggctctaaacacgttctgtgacctggagatgactattcatggtgagggctcacagtcctg

SEQ ID NO: 474539 - DNA, 201 bp, Homo sapiens
aatcaccgaatcgattccatctgcttcctggggccgatctttgagtacatctcccagtaattctgaacaagagagatttttcaaatgatcatttttaccargaaaaacattaatacattaactgagcacactaaacaagtcttcaagaagagacaatgaattgtctaaatgctttcactgtgagcaaaagaaatcctaacc

SEQ ID NO: 474540 - DNA, 201 bp, Homo sapiens
gggagggggacacaggacaattagaaaccacattcgccctcagctggttaatccagcaagcagttccctggccgggaggatcttggggaccccagtggccragaggagccacggggtctagggaggcaccaatgggtgggaccaagcaccccaccatcggacagcccaccccaccccacgctggctcacaaatttgtaaac

SEQ ID NO: 474541 - DNA, 201 bp, Homo sapiens
cccggactaaatgcacggtttcctctcccagaggggcagggctgcggcttctggagtgagaggtcatttaagggataccctgagcgacctgccggtgctgmtggcgtctgcaggctccagggctgcggtcggcggggccggggagccccgttcaggtgacagcaggcacacgggggccctcgggagctggggatcctggaa

SEQ ID NO: 474542 - DNA, 201 bp, Homo sapiens
cctcgcttcttgggttccattaatttactgcagcagcttacagaattcagagagctaggtttgccagcttattataacggacgttacagaggatatagacraaaaggcagatggaggagaagcgcagagcctccctgtgctctccaggccaccaccctgcagaagcctccacctgttccgctgcatggagcccctgaacct

SEQ ID NO: 474543 - DNA, 201 bp, Homo sapiens
agtgcagtggcgcaatctcggctcactgcaggctccgccccctggggttcacgccattctcctgcctcagcctcccgagtagctgggactacaggcgcccrccacctcgcccggctaattttttgtatttttagtagagacggggtttcaccgtgttagccaggatggtctcgatctcctgacctcgtgatccgcccgcct

SEQ ID NO: 474544 - DNA, 201 bp, Homo sapiens
atcttggggaccccagtggccgagaggagccacggggtctagggaggcaccaatgggtgggaccaagcaccccaccatcggacagcccaccccaccccackctggctcacaaatttgtaaactgagatcccaggagaccagggccagccactggttctcgggagtcagtggcagggctggggctgggtccctggggcttcc

SEQ ID NO: 474545 - DNA, 201 bp, Homo sapiens
attaatttactgcagcagcttacagaattcagagagctaggtttgccagcttattataacggacgttacagaggatatagacgaaaaggcagatggaggasaagcgcagagcctccctgtgctctccaggccaccaccctgcagaagcctccacctgttccgctgcatggagcccctgaacctggtccttttgggtttcta

SEQ ID NO: 474546 - DNA, 201 bp, Homo sapiens
ctcgatctcctgacctcgtgatccacccacctcagcctcccaaagtgctgggattacaggcatgagccaccgcgcctggtccatttcatcttctttttttwttttattttattttatttttttttttgagacggagtctcgctgtcgcccaggctggagtgcagtggcgcaatctcggctcactgcaggctccgccccctg

SEQ ID NO: 474547 - DNA, 201 bp, Homo sapiens
tcttggggaccccagtggccgagaggagccacggggtctagggaggcaccaatgggtgggaccaagcaccccaccatcggacagcccaccccaccccacgytggctcacaaatttgtaaactgagatcccaggagaccagggccagccactggttctcgggagtcagtggcagggctggggctgggtccctggggcttcct

SEQ ID NO: 474548 - DNA, 201 bp, Homo sapiens
aagtaagtattatacagaacattattaggtcaagtaacaaaatcagaatatggcaatacattgaagtattaaatgaatggtaaatccctgaagtcagtacmcacactatggtcacactaacaaaatcctatttctaggaatacacattcagggctaaagggacatgttatttcaactcactcccaaatggctcaggaaaaa

SEQ ID NO: 474549 - DNA, 201 bp, Homo sapiens
cctgttccgctgcatggagcccctgaacctggtccttttgggtttctatgaagatctcattatagaggcgtgattaatgacatcactgagcaccggtgatmaactcaactttcagccctcttccttctgggtggcagggggagacctaaaaggtcccaccctctaatcacgtggttggttccctggcaaggagccccagcc

SEQ ID NO: 474550 - DNA, 201 bp, Homo sapiens
gagacggagtctcgctctgtcacccaggctggagtgcagcggcgcaatctcggctcactgcaagctccatctcccgggttcatgccattctcctgcctcarcctcctgagtagctgagactacaggcacctgccaccatgcccacccaatcttttttatttttagtagagacggggtttcaccgtgttagccaggatggtc

SEQ ID NO: 474551 - DNA, 201 bp, Homo sapiens
cacactgccttccacaactgtccctttccctagagtggccccagctcgcctcacactgcctcccacaaccgcccctttccctagcaggcctccgacagccrgattagctagatcaaaaatcacggctcggccaggtgcggtggctcacgcctgtaatcccagcactctgggaggtcaaggcaggagatcacttgagcccag

SEQ ID NO: 474552 - DNA, 201 bp, Homo sapiens
aatcattaaaccaaaagttttgatttttaaaccataataacaattgaagcgttagaaagaacactgttctgagcaggagagtctggtgggccaagcagtayagacccactgggaattctcagcagcctactccaccttcagggacaagtttcctcaggactgaggggcgtagactagatgttcccaaagtctttagtttgt

SEQ ID NO: 474553 - DNA, 201 bp, Homo sapiens
acaacaccagaggggaaggcagacacaacccatgagggcgaaaacagagcggccccagctcgcctcgcactgccttccacaactgcccctttccctagagyggcccccgttcgcctcacactgccttccacaactgtccctttccctagagtggccccagctcgcctcacactgcctcccacaaccgcccctttccctagc

SEQ ID NO: 474554 - DNA, 201 bp, Homo sapiens
ggggctcctcccagccatgatttacctgactgctggcttgtctggagctactgcacctgcttactcagttcacacaaagtgtgtaacagacggtcccttayaacaccagaggggaaggcagacacaacccatgagggcgaaaacagagcggccccagctcgcctcgcactgccttccacaactgcccctttccctagagtg

SEQ ID NO: 474555 - DNA, 201 bp, Homo sapiens
tcgcttgaacctgagaggtagaggctgcagtgagccaagattgcactccagcctgggcaacagaaggagactcttgtcttaaaaaaaaaaaaaaaaaaaaatcaaaaaagggtagcggactgctgaaggctggtttgcgtcgacatggcggttaccgtgagtctcttgctgggcgggtgtgtttgcgctgctgtccctcgc

SEQ ID NO: 474556 - DNA, 201 bp, Homo sapiens
gccattctcctgcctcagcctcccgagtagcggggactacaggtgcctgccaccatgcccagctaatttttttgtatttttagtagagacggggtttcacygtgttagccaggatggtctcaatctcctgacctcgtgatccacccaccttggcctcccaaagtgctgggattacaggcgtgagccaccgcgcccggccta

SEQ ID NO: 474557 - DNA, 201 bp, Homo sapiens
ttttcccaaacttggaaaagatcttgtggatgacatttttgagtttctcaagtcggtcgggtcccacctgagggacattgtccactacaatcaccgaatcrattccatctgcttcctggggccgatctttgagtacatctcccagtaattctgaacaagagagatttttcaaatgatcatttttaccaagaaaaacattaa

SEQ ID NO: 474558 - DNA, 201 bp, Homo sapiens
aggtgtgagccactgtgcctggcctaaagtgatttcaagtgtcaaggcaggccccaccgcagtgacatctgaacatacctggacacaggctgtgatcaacrtatcctgattcgaatgcgaagatttctaactctagacacttgcagtaacatttgggaagttgatattcctacaaattctgtatctcattaaacaaaatta

SEQ ID NO: 474559 - DNA, 201 bp, Homo sapiens
atcgcttgaacctgagaggtagaggctgcagtgagccaagattgcactccagcctgggcaacagaaggagactcttgtcttaaaaaaaaaaaaaaaaaaaaatcaaaaaagggtagcggactgctgaaggctggtttgcgtcgacatggcggttaccgtgagtctcttgctgggcgggtgtgtttgcgctgctgtccctcg

SEQ ID NO: 474560 - DNA, 201 bp, Homo sapiens
cgtgtccatcagggggctaaaggtcaccaggtacctagaagagaagggcaacactgtacactatcctcctctcacgagaggatcacagtctgtctgtgcgkccagaacacgccgtcagaactcgcggaaccagctctctccccaaaccccacactgcccggccccaagagacccaagcggaagcgggaagcagcggcgctt

SEQ ID NO: 474561 - DNA, 201 bp, Homo sapiens
gaagcagaggtcacagtgagctgagatcatgccattgcactccagcctgggtgacaagagtgaaactctgtctcaaaaaaaaaaaaaaaaaaaaaaaaaaagccagatgtggtggtgcatgcctgtagacccagctacttgggaggctgaggtgagagattgcttgagcccaagagttcaaggctggggtgagctatgacc

SEQ ID NO: 474562 - DNA, 201 bp, Homo sapiens
ctgcggcatggggtccccagggagccagcctcggcgttaacatggaaacaagcacagcaacagcctctggtggccgctgtgagacttaccaaatcacagaygcagagtgtgcagtgagtattacatacgactgccatcatattatttttactggaaatgttatctgaggctaagtaagcctccaaaaatacagtagcaagt

SEQ ID NO: 474563 - DNA, 201 bp, Homo sapiens
tccctaaagaagctgaaagcctcaagttactatcctaaagctgttctattccattcagttctcactgttcctgcgtctcttcaaagaatccttgcaaatgycacgtttttatcccccagtcaccaccctaacaataacagaaaaaactgacaccttttcaacgccacaattgcctccatgtgccctgcacccgggggtggg

SEQ ID NO: 474564 - DNA, 201 bp, Homo sapiens
tccaagagttggaggctgcagtgagctctatgactgcaccactgcactccagcctggactacagggagagaccatgtttcttaaaaaaaaaaaaaacaaamaaaaaaaaacaaaacaacagtgcagtggctcatgcctgtaatcccagcactttgggaggccgaggtgggtggatcacctgaggtcaggagtttgagacca

SEQ ID NO: 474565 - DNA, 201 bp, Homo sapiens
agtccaagagttggaggctgcagtgagctctatgactgcaccactgcactccagcctggactacagggagagaccatgtttcttaaaaaaaaaaaaaacamacaaaaaaaaacaaaacaacagtgcagtggctcatgcctgtaatcccagcactttgggaggccgaggtgggtggatcacctgaggtcaggagtttgagac

SEQ ID NO: 474566 - DNA, 201 bp, Homo sapiens
attctaaccccctggggtgacggcatggggtggggccttttggggggtgggaggtcctgagggggaagcccttgggaatgagatgagagactttacagaasaggccacggaggccttcctccagggaaggctggaccgaggggctgtccactaggagggaggtgggccgtcaccagacagtctgcaggcaccctgacctca

SEQ ID NO: 474567 - DNA, 201 bp, Homo sapiens
tgagtccaagagttggaggctgcagtgagctctatgactgcaccactgcactccagcctggactacagggagagaccatgtttcttaaaaaaaaaaaaaamaaacaaaaaaaaacaaaacaacagtgcagtggctcatgcctgtaatcccagcactttgggaggccgaggtgggtggatcacctgaggtcaggagtttgag

SEQ ID NO: 474568 - DNA, 201 bp, Homo sapiens
tgttaccaccaggagaccaagaaaagtctctgcagaacaggaaaataaaatgttaaagcaaagaccaagtgatgacgaaactgaaaagcagaagagaataraacaactcatttgctatatagaagctcaatgctgtcacagctgacgctgagcgctccctctgcacagccactgctctgggcatgccgcgcagcttcatag

SEQ ID NO: 474569 - DNA, 201 bp, Homo sapiens
tcggctcactgcaagctccacctcccaggttaacaccattctcctgcctcagcctcccgagtagctgagactacaggcgcccgccaccacacccagctaakttttttgtttttttagtagagatagggtttcaccatgttagccaagatggtcttgatctcctgatctcatgatccacccgccttggcctcccaaagtgct

SEQ ID NO: 474570 - DNA, 201 bp, Homo sapiens
aaaccactgaaccagttcaccactctaaaggggtgttttcaggcatgtgaactacatgtcaattaaagctttcttaacataaaagaaagaagaatacttcyattagagggaaaactcaggaatttctttttttttgtgagacgcagtctggctctgtcgccaggctggggtgcagtggcgcaatctcgctctgttcactgc

SEQ ID NO: 474571 - DNA, 201 bp, Homo sapiens
aactgtggcttctgggcaagaggccagccaggaaacattagctgctactgatagtaacagctatggaattccgggaggtttttttgtttttggtttgtttktttttttttctttttctttttttctttttttagagacaaggtcttgctctgtcacccaagctggagtgtgcaatggtgccatcatggcttactatagcct

SEQ ID NO: 474572 - DNA, 201 bp, Homo sapiens
gggactacaggcacccgccaccacgcctggctaattttttgcatttttagtagagacggggtttctactaaaccctcgatctcctgaccttgtgatgcccygcctcagcctcccaaagtgctgggattacaggcgtgagccaccgtgcccggcctttttcctatcttttaaaaattatctgtggagatggggtctcactgt

SEQ ID NO: 474573 - DNA, 201 bp, Homo sapiens
tgagaggtggaggctggaagcggagatcatgccactgcaccccagcctgggtgacagagtgagactctgtctcaaaaataataaataaataaataaataartaaaatggttacttttgtgttatgtcaacttcacctcttacatcagcaacattttgaatacactaaagacccctgaattgttcattttaaaatggttact

SEQ ID NO: 474574 - DNA, 201 bp, Homo sapiens
ggagtgcagtggtgcaatctcggctcactgcaagctccgcctcccgggttcacgccattctcctgcctcagcctcccgagtagctgggactacaggcaccmgccaccacgcctggctaattttttgcatttttagtagagacggggtttctactaaaccctcgatctcctgaccttgtgatgccccgcctcagcctcccaa

SEQ ID NO: 474575 - DNA, 201 bp, Homo sapiens
tcttgaacccctagactcaagcaatcctcctgcctcagcctcccagagctctgggattacaggcgtgagccaccgcgccaggcccagtcattttttttttwaattatggtaaaatatatagaacataaaatttaccatcttaacctttgttgttgttgttgttgttgttgttgtcgttgttgttgttgttgagacagagtc

SEQ ID NO: 474576 - DNA, 201 bp, Homo sapiens
gctggagtgcagtggtgcaatctcggctcactgcaagctccgcctcccgggttcacgccattctcctgcctcagcctcccgagtagctgggactacaggcrcccgccaccacgcctggctaattttttgcatttttagtagagacggggtttctactaaaccctcgatctcctgaccttgtgatgccccgcctcagcctcc

SEQ ID NO: 474577 - DNA, 201 bp, Homo sapiens
tcatttgccacctcgttgcttttctgttctactttctgagggagttcctcaactttatctttcacccactaactgattttcttatttctgcttttattttwtttttttacatccgagagttctctttttggatattcgaatactccttttggtggcttttttttagagcttcctgttcttgcctcatgttcgcgatatttt

SEQ ID NO: 474578 - DNA, 201 bp, Homo sapiens
tgttgcccaggctggagtgcagtggtgcaatctcggctcactgcaagctccgcctcccgggttcacgccattctcctgcctcagcctcccgagtagctggractacaggcacccgccaccacgcctggctaattttttgcatttttagtagagacggggtttctactaaaccctcgatctcctgaccttgtgatgccccgc

SEQ ID NO: 474579 - DNA, 201 bp, Homo sapiens
tcagcgtctcaaacagctgggactatcggtgcgcaccaccacacctggctaattttttttatttgttttttgtacagagagggtctcactatgttgcccargctctaaacacgttctgtgacctggagatgactattcatggtgagggctcacagtcctgactcagctgctcagacaacccctcgcatggaagtgttaaag

SEQ ID NO: 474580 - DNA, 201 bp, Homo sapiens
ggtagggagctgcatcagggttaccctggctggaatatctttgtcttcaggcacccagaaggcgattatgttaccaccaggagaccaagaaaagtctctgyagaacaggaaaataaaatgttaaagcaaagaccaagtgatgacgaaactgaaaagcagaagagaatagaacaactcatttgctatatagaagctcaatgc

SEQ ID NO: 474581 - DNA, 201 bp, Homo sapiens
agcgcaagagataaagaaaaatcaaactggaatttcacagggtgcctgtcccactaaggaagtctctggagatggacaattctgaggggcaggaggacaaratcaccggctctgccacaagctgttcctccgatccagaccttgggaggtctgactggtcagctctggggacacgtagacccgcaaacctgccaccgggtc

SEQ ID NO: 474582 - DNA, 201 bp, Homo sapiens
aaatttgtgacaacaccctgtttaaaaaaaagggggaaggggtgacattctggacagtgaaaatatgagaaaaggtttaaatcaaagatcaacgtcacaaygaaagattcagtgtgcatgcctggttcacacacgagcatgtgcagtgatgaaagccacagccctcaggatggaagacggttctaaggctggagaactgcc

SEQ ID NO: 474583 - DNA, 201 bp, Homo sapiens
gtggctcacgcctgtaatcccagaaccttgggaggccgaggcgggtggatcacctgaggtcaggagttcgagaccagcctgaccaataacggagaaaccckgtctctactaaaaatacaaaataagccgggcatggtggcacatgcctgtaatcccagctactcgggaggctgaggcaggagaatcgcttgaacctgggag

SEQ ID NO: 474584 - DNA, 201 bp, Homo sapiens
ggggaaaagttaacatgacaaacaacttgagagggaagttgccaattaagatgaagactaacgaggagagtgaagctgcaggggagtcagtcacatcgccracataggcagacgccagaggccagggatgctgccgccgtccacgaattctgtacctaagaactagataagggcgttactgagccaacctaagcacttctg

SEQ ID NO: 474585 - DNA, 201 bp, Homo sapiens
atttgtgatttgtttttactttctcctcttgttctgagatttcacaacagtatgtcctggagagggtacgcaaggatctttttttttttttttttttttttgagacggagtctcacccttgttgcccgggctggagtgcaatggcatgatctccacttaccgttacctccgcctcccaggttcaagcaattctcctgtctc

SEQ ID NO: 474586 - DNA, 201 bp, Homo sapiens
cagtctctctcagtctagacttactgcctcatctggggagactacatctgccaatcacctccttaaagcatgaggaacaaatctgggagcaagtctgaagktgtctttaccctaccctcccttgcctgagtgtagacttccaggctgcaaatgcatccttcagaatttctcaagcaaggccctcccgtctcctgccaccca

SEQ ID NO: 474587 - DNA, 201 bp, Homo sapiens
tgctgcagcatgtcaggtgtcctgctaatttcatcttctcccaaagaatctcctcttggagcctctgaccagctggggtcaggacatgtctgctcttcacrccagcacctggctgggatttcccttcagcaggttcttctcacctctcacctgggggaaatcctgttcccaccagccagtctctctcagtctagacttact

SEQ ID NO: 474588 - DNA, 201 bp, Homo sapiens
acaggctcaatctcttttctcttttttttagacagggtcttgctccgtcacccaggctggagtgcaggggcgcaatctcagttcactgcaacctctgctcytgggctcaagtgatcctcccgcttcagcgtctcaaacagctgggactatcggtgcgcaccaccacacctggctaattttttttatttgttttttgtacag

SEQ ID NO: 474589 - DNA, 201 bp, Homo sapiens
aatggcgtgaacccgggaggcggagcttgcagtgagccaagatcgtgccactgcactccagcctgggcgacagagcgactctgcctcaaaaaaaaaaaaaagaaaaaagaaaagaaattgccatagccactccagccttcagcaaccaccgccctgatcaatcagcagctatcaacatcaagacaagaccctccaccagca

SEQ ID NO: 474590 - DNA, 201 bp, Homo sapiens
  misc_feature (1)...(201): n = A,T,C or G
agacagctgcttccacttgtgtggagtgacctacgtgaaactgctcccttcctgagagcaggacacccacagcaggaccgcaggagcccgacattgtcagnagctgtggatgccgcttccctcgcacccagtgtgcacctacagtgggatcctgacctccggtctccctgcctggaagggcggccatgtttcccattttct

SEQ ID NO: 474591 - DNA, 201 bp, Homo sapiens
gctgaggtgagaggattgcttgagcccaagagtttgaggctgcagtgagctatgatgttgccactgcatcccagcctgggcaacataccaagacccttctytacaaaaaaaatgtaaaaaaaaaaaaaaaaaaaaaagaattagcaggacatggtggtgtgcacttacagtcccagctactcaggaggctgaggcaagagg

SEQ ID NO: 474592 - DNA, 201 bp, Homo sapiens
tcacttgagctcaggagtttgaggacagcctggccaacatggcaaaaccctgtctctactaaaaataaaaaaattagcctggcatggtggtgtacacttgyaatcccagtttcttgagaggctgagatggaaggaccatttgaacctggcaggtggaagttgcagtgagccaagatcgcgtcaccgcactctagcctgggc

SEQ ID NO: 474593 - DNA, 201 bp, Homo sapiens
ttggaaatactcgcttaaacgtgagggctcaacggggctcagagagacaccctgcaaggaggcggcacctccaggccatcgctcacttccatcagccgagsccacaccccattcataggcgagtcccggcctgcccagcagtggtcctaggccagtcaaatgctcactgttgggcagcgactgggtcatcatctgtgctga

SEQ ID NO: 474594 - DNA, 201 bp, Homo sapiens
agcctcccaaatagctgggaccacaggcacgcaccatgcccggctaatttttggatttttagtagagaggggctttctccatgttggccaggctggtctckaactcctggcctcgagtgatccaagtgcctcagcctcccaaagtgctggaatgacaggcgtgagccactgcagcctatttttaaaactagatcctaagta

SEQ ID NO: 474595 - DNA, 201 bp, Homo sapiens
tcctggctaccacacacacacaccccacgcctatgaagcaacaagcaatggctcattcaatccccgcgggcaccgggctctgtgctgagcagagaccccasgatgaagtgaggagctgagggcacaggcagcaggtgccgtgagacaggcgagggcccacgcaccactgtgaggagcgagccccaggtgggtgcagtgtgg

SEQ ID NO: 474596 - DNA, 201 bp, Homo sapiens
cacgcaccctgccaagctctagcaaagtgaaaactaaactcctcacagaatcatgctgcgaaaggtgcggccaggagattccaaccccttcctggtacagrgccaaacccatggctctgcaggagggcagctggcagccagagtcctgtgtgaggaacacagcccatcgccacctcctggctaccacacacacacacccca

SEQ ID NO: 474597 - DNA, 201 bp, Homo sapiens
cccaaaaaaataaagatcaaatagacagcatgggagaagacctgcaagttggatacaagaggaaaagggacaagcttgacaaaagacaaaaaaaaaaaaaagcaaatgcagtgctattttgcatttgaacacacacacatctgcagatgtgggccccctgcacctgtcccgcgtgtgggccttacaggtgactcaccacct

SEQ ID NO: 474598 - DNA, 201 bp, Homo sapiens
cctatgttttatgacctagaagacttacacaagtctctggacagtctgcaattgcccatatgtttctatcaaccagaattaatgaaacagccaatcttgtratccactgccaactgagggcaccacgcaccctgccaagctctagcaaagtgaaaactaaactcctcacagaatcatgctgcgaaaggtgcggccaggaga

SEQ ID NO: 474599 - DNA, 201 bp, Homo sapiens
gggctcccaaaaaagcaaacgcaccaaggcgccctcctcacacctgggagacccagtgtgacctgaggctctaggccactcctccagggtggcaggagccygggtcctctgccctgtgaattacagcccctcccagtctccaaacgttgccttaggtttgtaaatggcccttggctgtgagttctgagggctgcctcaggt

SEQ ID NO: 474600 - DNA, 201 bp, Homo sapiens
tgtattcaacacctaaaggctgtgctccttttccactgcaagcccggggaaaggcaccgcaccgtgaacctgctccccaaggtcacctgacccgtccaggmtgagctaaccagagtgcaggacgacactgcccagagccagggtcggtgccaagcacagaaacccgctcctgcactgacagagatcacgccaaagccaggc

SEQ ID NO: 474601 - DNA, 201 bp, Homo sapiens
tgatctgcccgccttggcctcccaaagtgctgggattacaggcgtgagccacccgcgcccggcccgcgaccacgtctcctcccctttcccagtaagcgctygattggctctcaggtgtattcaacacctaaaggctgtgctccttttccactgcaagcccggggaaaggcaccgcaccgtgaacctgctccccaaggtcac

SEQ ID NO: 474602 - DNA, 201 bp, Homo sapiens
attgcttgaacctgagaggcagaggttgcagtgagccaagattgcaccattgcactccagcctgggcaacagtgtgagactccatctcaaaaaaaaaaaaataataataataaataggccaggtgcagtggttcacacctgtaatcccagcaatttgggaggccaaggcgggcggatcacaaggtcccgagatcgagacca

SEQ ID NO: 474603 - DNA, 201 bp, Homo sapiens
agccccagggagcaagtccatgccggctgcccacgcaaggccactggtccaaatactcatgctgactgtgggcaaaacactagagaaagaaaaggcagctrgcacagacagctatggccttagctcactcgtgttcagctgtgtgtcaccgtgacgtgaccacagccatcctgctctggaagacactgccacatggccaga

SEQ ID NO: 474604 - DNA, 201 bp, Homo sapiens
tgcccacgcaaggccactggtccaaatactcatgctgactgtgggcaaaacactagagaaagaaaaggcagctagcacagacagctatggccttagctcaytcgtgttcagctgtgtgtcaccgtgacgtgaccacagccatcctgctctggaagacactgccacatggccagatctatattaagccccccagaagcgcat

SEQ ID NO: 474605 - DNA, 201 bp, Homo sapiens
caacagagcaagactctgcctcaaaaaaaaaaaaaaaaggtagagtaagagaatcaactctctctgcctgcctgtctttgagctgggacattggtcttcgyctttggactccgtctcagactggagtcataccattggctctccagggtctgaatttctcagcctccgtaattgtgtgagccaatttcttatcatcaatct

SEQ ID NO: 474606 - DNA, 201 bp, Homo sapiens
tcttattattaaaggaatacattttgtaaggctaaagctgccatagtgattcctctgtaggatctgggcaaagtaaactgaaaacctggaaaggattcacyattctaatgcctttaagaacattcgggattcacaggaagagatcaaaatagcaacattaatagaagtttgaagaggttggttccagtcctcatggatgac

SEQ ID NO: 474607 - DNA, 201 bp, Homo sapiens
ttattattaaaggaatacattttgtaaggctaaagctgccatagtgattcctctgtaggatctgggcaaagtaaactgaaaacctggaaaggattcaccawtctaatgcctttaagaacattcgggattcacaggaagagatcaaaatagcaacattaatagaagtttgaagaggttggttccagtcctcatggatgactc

SEQ ID NO: 474608 - DNA, 201 bp, Homo sapiens
agaacaaactaggcctttctgctaaccagagctaccgagagcacaaaaatgagaaaacacagctaagtggttgataaaatagtaaagcactttctttagamtctgccccggccttacttatctctctgtcttcatcaggctcaaatatttgttacacaaatatgtgttatttttattattactcatgctttctaccaagag

SEQ ID NO: 474609 - DNA, 201 bp, Homo sapiens
agagcacaaaaatgagaaaacacagctaagtggttgataaaatagtaaagcactttctttagaatctgccccggccttacttatctctctgtcttcatcargctcaaatatttgttacacaaatatgtgttatttttattattactcatgctttctaccaagagccagttatcaagtcaaaaaaaaaaaaactgtctattt

SEQ ID NO: 474610 - DNA, 201 bp, Homo sapiens
gccctggccctgtgctgcccgggcaggtccccaggctcaggggctgagaggctgcttactgctgcaggtggaggccccatgccggagggagagcggggttycccccatgcctctccagccctcctgctgcccacggcccaagcccaagcttgtgccggtcattacggccttgcctagctggcagggacagctgcgtgtgat

SEQ ID NO: 474611 - DNA, 201 bp, Homo sapiens
agggatcaatacccaatatacccaacaactggaattgtttacacatgacctacattttggacggtttatcaataaacatgtgtgaacaactgttattaaaygtgtatgaaagttgggcaggggaggggactagcctatgaggcgttcaacctgggttttagcccagagcccttggccgagcctcagcttcccacactgtgc

SEQ ID NO: 474612 - DNA, 201 bp, Homo sapiens
ctggaggagctgggaggccagaaacaaagagcagacatggtgagtcagacgcgggagtggctgggattcagggcacctggaccctgggtctgggcagggaygcctgtccccataagcctttaggctgcaggcgccagtgcatggctgcctcttctgtcgtcggaagctgcgttgagcggggaagggtgtgtgaggagcctg

SEQ ID NO: 474613 - DNA, 201 bp, Homo sapiens
ttgctgtgtctgtcatctctgactgagcacagagcttttgagacccatcaacgttgtatcagcagttcatttacttttattacaaaataattctctatcckgagactctaccaaaatggtctcgtctgttcacccactgaccaataccagggtggtttcccattcttgccagctgggacagagctgctgtgaatatctgcg

SEQ ID NO: 474614 - DNA, 201 bp, Homo sapiens
agccttattgaaatatgatttatactcagtaaaatcccccagctttatctgtatgatttgatccatgttgaccgtcagtttcctgccacccctggctcgtrgagacaccggtctggggcctgtgactgttgttttgggctttcttggaacttcacgtaaacagagtcctgcagttgctgtgtctgtcatctctgactgagc

SEQ ID NO: 474615 - DNA, 201 bp, Homo sapiens
ccatcacagatgcggtttcctggaggaaccctaccgagaccagcctggagttgcgctgtctgaggccctgtgggagctgctctccaatgcacacacgggcygtgccagctcctcgcccttgtgagtgtggttctccccgagctctggggattccatgttttaaaggcagccttattgaaatatgatttatactcagtaaaa

SEQ ID NO: 474616 - DNA, 201 bp, Homo sapiens
agggtggcacctgtgtccctggctcaagagacggcaggagagccccagacgtggcggcctgagctccagggtcttctgagagagcaggccggggtttcctsagcccctgcagcctcgccctcctcgcctgtgggggatagaccgagggcctggcaggggccaggcagtcatcagtgctggggagcactgggtcggtctctc

SEQ ID NO: 474617 - DNA, 201 bp, Homo sapiens
cccacccactgcctccatcacagatgcggtttcctggaggaaccctaccgagaccagcctggagttgcgctgtctgaggccctgtgggagctgctctccartgcacacacgggctgtgccagctcctcgcccttgtgagtgtggttctccccgagctctggggattccatgttttaaaggcagccttattgaaatatgatt

SEQ ID NO: 474618 - DNA, 201 bp, Homo sapiens
gcagggcggacaggcaggagaaggtcgccagcctgcgcctggaatctgctccatccagactcagcgtctgagaccagaagggtccgggggctgtggttcargcccacacctggggcagggagtgcaggcaatgggaggccagagggaagaccacacttccccgcagcagcacgtcctttttgggggccatcttggcagctc

SEQ ID NO: 474619 - DNA, 201 bp, Homo sapiens
tcccagttgccattgaagaatgtggttacaggcatgggtgtattatgagctccaatgtgcgttaggggagtggggctgtccagaggctctgctgactgcayggctgatggcacgtggaaaggctgcccctgaccagtcctttgtctgtccccggaaggaaagcaaccatggaagacctgggggaaaacaccatggttttat

SEQ ID NO: 474620 - DNA, 201 bp, Homo sapiens
cagcttaattatttaaaactgatgataaaaacagaatgagctgccaagatgaagtgatgatttgcggccaggacctggggcttgggtggacgcggctcccrctctccctgcttgctgtgtgctggcccagtgcggccgtttccaaggacgccttccggtttgcagccagggcccaggacacggacagcatctctgctctca

SEQ ID NO: 474621 - DNA, 201 bp, Homo sapiens
gggggcttgctgtgtccctgggcagccgccactcccacctgtactcggcttcctccctgccctggccgctcccgggtccccacccctccggcctggtgccrcactcactgtctccttccgtccctcccgcagagctgaagaagcaggtggagagtgccgagctgaagaaccagcggctcaaggaggttttccagaccaaga

SEQ ID NO: 474622 - DNA, 201 bp, Homo sapiens
ttctctcgggggtctgcctgggactgggcctgctggatcacatggtaaccgtttcaccattggaggaactgccagactgttctccagggctgccgcacacyagggttccagtttatccccatcctcaccaacgtgttgttgcgtgacttcccagccgtcctgggggtgcaaagtgatacctggctgtgatttcactttctg

SEQ ID NO: 474623 - DNA, 201 bp, Homo sapiens
taagttgagggaagaagcgtctttgttctttactggctctcagggtccaggtgcacagcctcctggatggaggccctttaggaatggagccccagtctcaygccaggcacccggatggagaccctttaggagtggagccccagtctcctgccacccacctggatggagaccctttaggagtggagccccagtctcatgcca

SEQ ID NO: 474624 - DNA, 201 bp, Homo sapiens
cctgggccatgcgtcaggctggcctgggtcacaggcagagctgctgtcggcgttgtacggaccccagggcctgcagcccaggtcgaggctcccgtcgggcrtccttgcttgccagctcgtgactgtgagccggtgtcctggctctcagggcctcagggccttcctctccacccggcaggggtgtgctgagggttcattgct

SEQ ID NO: 474625 - DNA, 201 bp, Homo sapiens
gcttcaggaagagaatagggagatgggagaagggcccttgctggggttggtccctaagtattttggtgccctgaacttctgtttccttgcttattttgaakgggtttgtgtgagcctaaccccaggagagcagcccacaccccacagcggagcctagagcagggtcagggctgccaggagctgctatctggggagactgag

SEQ ID NO: 474626 - DNA, 201 bp, Homo sapiens
cgtcttcaaaactaatccagtgtctttgctgttctgtgggtctactcaggttgtctgtgtttctcttgagtcagttttggtagcttttgtcttttcaggartttgttcatttcacctccgttattaattttcggcatgcagctgttcgtagtattcctttacagcctttatctctggaaggtcagctagtgtctctttcac

SEQ ID NO: 474627 - DNA, 201 bp, Homo sapiens
tgctcggtcttaagcaaaggccagtctcagaatgaatattagccagagatttcctgagatacctagaactggtgagtccttgatgaggagctccggtgcaygctgggccaggtggtggccactctgcctttgccctcatttcctgcttgctcagagcttcaaggtgagcaggagggagaacccagggccttcacaggcctt

SEQ ID NO: 474628 - DNA, 201 bp, Homo sapiens
ctttaggctagatgctcggtcttaagcaaaggccagtctcagaatgaatattagccagagatttcctgagatacctagaactggtgagtccttgatgaggrgctccggtgcacgctgggccaggtggtggccactctgcctttgccctcatttcctgcttgctcagagcttcaaggtgagcaggagggagaacccagggcc

SEQ ID NO: 474629 - DNA, 201 bp, Homo sapiens
gtcgtaaattaaccatggccatcaagtctctgtgatctgtggacagttttttgtttgcctctaatgcttgtctggaagttcggcatgctttaggctagatrctcggtcttaagcaaaggccagtctcagaatgaatattagccagagatttcctgagatacctagaactggtgagtccttgatgaggagctccggtgcacg

SEQ ID NO: 474630 - DNA, 201 bp, Homo sapiens
acaaaacctcactagacatttcacatttgaaaactctcagtcgtaaattaaccatggccatcaagtctctgtgatctgtggacagttttttgtttgcctcyaatgcttgtctggaagttcggcatgctttaggctagatgctcggtcttaagcaaaggccagtctcagaatgaatattagccagagatttcctgagatacc

SEQ ID NO: 474631 - DNA, 201 bp, Homo sapiens
taaggtggtatctcactgtggttttgatttgcatttccctgataattaatgatatttagcattttttaaatcttatgtgctttttaatttgtatttctcayggctaacgtgtggaaacgtcagtggctgcatagaacagagacacaaacattacagaattagttcagaaaagtcatgaaacaagtaaaaaacaactacagc

SEQ ID NO: 474632 - DNA, 201 bp, Homo sapiens
tttagtagagatggggtttcactgtgttggccaggatggtctcgatttcctgacctcgtgatccacccgcctcggcctcccaaagtgccaggattacaggygtgagccactgcgcccggctgagttctttcttttgcttaatagctttgttttttatttttatttttatttttatttttttattattattatactttaagt

SEQ ID NO: 474633 - DNA, 201 bp, Homo sapiens
tgtggactggagggagtttcccgcgtgctctgtgttctgatctggtgcacgcaccggaacttgtttattgccagcagtgtggactggagggtgtttgccgygtgctctgtgttctgatccggtgcatgcagcgggacttgtttcgctgcgtgatctccccgcggccggccgcgccctgctgtgccccgtcattgggttttc

SEQ ID NO: 474634 - DNA, 201 bp, Homo sapiens
taacactttaataatttttgccaaattacgttccaaaattatacttctgttaacagtacttaagattgcccatttttctgataacattcattgatgttgtyagtgtttccgatttttgccctttacttaaagtcagctgctgtattcttagcacagtgctttctgtgacagatgtttcagatgacagtgcttcctgcctgc

SEQ ID NO: 474635 - DNA, 201 bp, Homo sapiens
gtacaggataatgtaaatccatcctcactacaaagaaagctcaaacagtacagaattaaagtgaaactttcttggatttctctgctttttcaaattctgcygtatcccaggttaacattagcagtttgctataagtccttacataatttttatgtgcatggacgtcttacgtacataacaaatggcatcatacggcctgta

SEQ ID NO: 474636 - DNA, 201 bp, Homo sapiens
caggaggcaggggaacagcaagtccggagtcattacaaggcctgtgccgacaccgggtgatttagcggtatgattacttcctaatgcagtatctcgcaaarctttttattagatttctccccttttccttccaaagtctctttggaaataaacacctggggctgttatacttcataccactcagtttaattaacttttaaa

SEQ ID NO: 474637 - DNA, 201 bp, Homo sapiens
tgcatgttgacctggcggtcggggtggagtctggtcaccagtgttagcggtgcgttgggggatgctccttcctggaccatgggaggctgtgctaccactgygcttaggagcctcagtgaagctcaccctcttcagccacgtgcactggggtcacttgtgtttctgtcacccttgccacccatcgtgtcaggaggcctccgt

SEQ ID NO: 474638 - DNA, 201 bp, Homo sapiens
ctgtgagctcctggcgttgaggtcagacgtcctttgtgtgggcccttccctaaggacagggtgctgacgtcctgcagtcctcagagggctcttcagcctcrccccgggcttggataaaccctggctgagccccaggagagagtggcctggtcaccctcttccccatgtagggcttcttatgtcttaggagaggaggctggg

SEQ ID NO: 474639 - DNA, 201 bp, Homo sapiens
aggagctccccggggccagctttgcctgaatgtggaagatggagggaagagtgttaccgtttagttgatttactgccgaagaacctgtaaggcccaggaaracagagaaagacgccagaaagagcatcattctgcagggttcaaggtgaacctggctcgctttcagaggagtagggcaacgagggcacccagaccctaatt

SEQ ID NO: 474640 - DNA, 201 bp, Homo sapiens
accttcctttggatgggatgcattttggggaggaggacggagaatctgagcttcttccctaccaggcatcttgtcctcactgggcctgtggggagggaggkgctcatccttaggagctcagttgcttgtctttaggagctccttggggctgctggccaggagggagggaggtgacgggtcttgccgtcctcccccgcagcg

SEQ ID NO: 474641 - DNA, 201 bp, Homo sapiens
ataagcctttaggctgcaggcgccagtgcatggctgcctcttctgtcgtcggaagctgcgttgagcggggaagggtgtgtgaggagcctgagtcccatctstactagtgacaggtggcatgcgccgggggggagcacagcccctcgggccccaccaccgtgtttgtggcagggggccagtgacatgtttgccgcatgaggc

SEQ ID NO: 474642 - DNA, 201 bp, Homo sapiens
ggctgccgccgcgagtctgccatcgtccaaggaggtggcaggtaggcaccccccacccccggtccctgccatcctcgaccttccgtgggtaggtccatccrtgcgcctttggggcagcctcaggcgcccctgcctgtcatccccagagggtttgtcctcccctgtgggcagccgggtctggtggttgctggggcagagcac

SEQ ID NO: 474643 - DNA, 201 bp, Homo sapiens
cctgtgctgtgtgtgttcctgcagggtgactatgaccagagcaggaccaaagtgctgcacatgagcctgaaccccaccagtgtggccaggcagcgcctgcrcgaggaccacagccagctgcaggcggagtgcgagcgactgcgcgggctcctgcgcgccatggagagaggaggcaccgtcccagccgaccttgaggctgcc

SEQ ID NO: 474644 - DNA, 201 bp, Homo sapiens
caaacatggaagaccaaccatcgcactttagtatgcaccagaaatgtcttacatgtgctttctatttcttcacacagaatgttgagatcttatcaaggggwtaagatttaatgaagtgaatattttaactgggcccagtactcctgtagttccagctgctcggaaagttgaggtgggaggatggcttgggcccaggagttt

SEQ ID NO: 474645 - DNA, 201 bp, Homo sapiens
ctaaaattcattggtctcttgcactttgaatggacctttatccatgcatggttatgtaacatcatacattgctcatttgaaaatatcgacgcactgaattrtgtaggtcttttattatgccttattaaagaaattacaagctaatcaccacaagttattgaaaagtctttaaacgttaggaatccatcaagcttgtggtgg

SEQ ID NO: 474646 - DNA, 201 bp, Homo sapiens
tagatggctttgggcggtgttgacatcttaacagcaagtgttccacacgtagtggtttctggaaggttagttgtggtacggaataatcttttcaaactgtygtactaaaattcattggtctcttgcactttgaatggacctttatccatgcatggttatgtaacatcatacattgctcatttgaaaatatcgacgcactga

SEQ ID NO: 474647 - DNA, 201 bp, Homo sapiens
tcctttttctgtgccaggatctggcctgggatccccatggcgtttggtggccctgtcctgccctgcactctgggacaggagagaatctgctcctcggtctytcctgtcgtcgtgaccccgcctcttcgagagcacgggctggtgttttgtggatgttcctcagttggagcgagtctgatgttatacatgattaggttgaag

SEQ ID NO: 474648 - DNA, 201 bp, Homo sapiens
atgcttttcttttccccgatttgttgtattgggtcaaatacatatacaataaaattgactgttaactgtttttaagtgtacagttcagtagctttaagaayattcatattgctgtgcaaccatcaccaccatccacctccaaaactttatcttcccaaagccaaactctgtacccattaaacgctcgctccctgtgctccc

SEQ ID NO: 474649 - DNA, 201 bp, Homo sapiens
acttaacttgacggccatatatcttcttttgtgaagtgtcttttcaaagtcttttccccattttttaattggactgtcatcttctgagttggcagagtacyatatatattcatgacagagtcttttgtcagatgtatggtgaatattttctcccggtacgtggcttccttttcattttcttagtgtcttttgaagggtaaa

SEQ ID NO: 474650 - DNA, 201 bp, Homo sapiens
ttgcttgtatcggttgtccttgttatatcgaacggatataccataatttttaatccggttttttgctcttgcagataaagattctgtgaacatttgtattsaagtctctttatgtatgttttcctgtctcttgggataatacctaggagtggggcctctgggtgatatggtatgttttaattttagaaaaagctgatgagc

SEQ ID NO: 474651 - DNA, 201 bp, Homo sapiens
ttagcctccaccctagttttagatacatttgtattattaaaaaagtaaaaacaaactctaaatgaccattaggtgaaataaacaagaaatttccaaagggycatgttcctgttctttgagaaatcccacttttccaggagggctgtttgctattgtgtctggactcatgctgcctgttgcgacttcctagtggcaggtgga

SEQ ID NO: 474652 - DNA, 201 bp, Homo sapiens
gacggggtttcaccatgttggccagactggtctcgaactcctgagctcaagtgatccgcctgcctcagcctcccaaaatggtgggattacaggtgttagcctccaccctagttttagatacatttgtattattaaaaaagtaaaaacaaactctaaatgaccattaggtgaaataaacaagaaatttccaaagggccatgt

SEQ ID NO: 474653 - DNA, 201 bp, Homo sapiens
acctgtcagcctcagtttgggctccctgtggggcgtgtgagtccctgttctgactgagggttgggttagggtttccagcctccctgcccctgggaagaggytccaccctcctccacgagtgctgagctccgggtctatttgtactgtgaggagttgcttttgtctccatcaaaaacatgaaccactgtttggagcacttcc

SEQ ID NO: 474654 - DNA, 201 bp, Homo sapiens
cctggatggagaccctttaggagtggagccccagtctcatgccacccacctggatggagaccctttaggagtggagccccagtctcatgccacccacctgratggagaccctttaggagtggagccccagtctcgcgccaggcacagtggctgtggcccttccccccagggcagaccccatagcacaaaagcccgcatcct

SEQ ID NO: 474655 - DNA, 201 bp, Homo sapiens
cacccaggtggaatggctgtctcctgacccagaggagggtggggcagggtgggcctggccctcccggggtgtgtgagaacccagcaggtctgcccctgggkaggcgtggagccccatacgctccttgccgagctcagagcgggggcttcgtgacctcctctctgccagagtcttcctagccatcctgccctcactgcaccc

SEQ ID NO: 474656 - DNA, 201 bp, Homo sapiens
gatagaccctgtctccaaaaagaaaaaaaaaaaaagaattagtcaaattcaaaaaaaaggtatcaaggttttattttttactgaaattacactgaagttayaggttaatctagtggaagaatctttggctttccagcgtctgtgtctgagcagggaagggcgcctcagggccgcctccctcaccgataccacgtctcagac

SEQ ID NO: 474657 - DNA, 201 bp, Homo sapiens
tagagaggttgagaaagctgcccacagttgcacagctggagctgggtctcagtcagggcatctgactcaagctcaggctgtgccatttccctgcggaggaygtgccagggagacgttgactccagatccctctcctgcctcctgttgcctggagagcagcctccagaccctgtgctctggccgtgccctctcagcccttat

SEQ ID NO: 474658 - DNA, 201 bp, Homo sapiens
ctccaattaaaggtcactggcagcacttcccctaattaccatgccataaggacttggcaggttttgtggctgtggtgtgagcgagggcgtgcctgtgcttyagtgatgcgttacccagtgctgagttgttgagctgcaccttcctttggatgggatgcattttggggaggaggacggagaatctgagcttcttccctacca

SEQ ID NO: 474659 - DNA, 201 bp, Homo sapiens
tctggctgctgttggtgaggagtcctggaggttcccagagcctcgggcaccgagggggagaccctgacactgtcctgcctgccccaccagtctgctccccrcagctcctcgtcctcacccgagtgctgctggagggttggcaggaggcgtgaccagcagggtccagcacagtcagggtttcctggggggtccaggaaacag

SEQ ID NO: 474660 - DNA, 201 bp, Homo sapiens
tgcagtgatgcagggagcgccccccgcctcctgtgtggggtgggttccggcccgatgcggggatttttggcagtccctgagacccacagtccctccacagkctggtgtcctccagctgagatgtgtcctgaggtttcccgggtcgcacgatggcgttctggaaattggagaagtgttggtggagtgggactgatacgtgga

SEQ ID NO: 474661 - DNA, 201 bp, Homo sapiens
tggagggccttgctgttctaggacaaggaccgtcctctgggcggggacgctttctctccaggacgtggtggctgtcggagctgggtggcccttgtctcacsccggttgcttgggcaagtgagtatgctggggcgtggcttgggccgatggtttgtgagcctgcacctgtcagcctcagtttgggctccctgtggggcgtgt

SEQ ID NO: 474662 - DNA, 201 bp, Homo sapiens
gggcggaggcggggaagggctttgaggaccaagagttggagggccttgctgttctaggacaaggaccgtcctctgggcggggacgctttctctccaggacrtggtggctgtcggagctgggtggcccttgtctcaccccggttgcttgggcaagtgagtatgctggggcgtggcttgggccgatggtttgtgagcctgcac

SEQ ID NO: 474663 - DNA, 201 bp, Homo sapiens
ggcttatgacgtaccgtggtgtatactggctgggagatgcagcagagagcaggacgcacggtccctgtgctgaaactcagcacagcaatgtggtgctgggkgcggaggcggggaagggctttgaggaccaagagttggagggccttgctgttctaggacaaggaccgtcctctgggcggggacgctttctctccaggacgt

SEQ ID NO: 474664 - DNA, 201 bp, Homo sapiens
tgctgccttttccctgcagcttttctttcccatgcagagccttttgctgcccacacagcatcatggtggtttcttcctttccagatttgggacagttgggygacggtgtggccttgcctgagggtggttgtggaagagagcctagggtgagactggcgtctcccggatcgcggctcagcacctgctctggctggagccttg

SEQ ID NO: 474665 - DNA, 201 bp, Homo sapiens
ttatttagtgttgaggaaacagagggatattcgggttagggagtgtggttaagtggtgggcagtggggctgggccccattcccactgagccttatcccccctccaccgtctccggcagcgcagccgcattctgtgtttaggtggtggggtgctggcaggagagggtgtgggcctggggcaggaggaaggggaagtgggaca

SEQ ID NO: 474666 - DNA, 201 bp, Homo sapiens
agtgtggggagggtgggcggtgtttcctgttgtcagttgagagcctcatggagtaggagccgtggagtcagccgcgttgtagtgagagttagaattgagcygcactgttcctgtgagcagggagcccgaggccttctgacttctgaagagggttcgtgttgaaggccagactctccctgtttttctgtttcctcttcaggt

SEQ ID NO: 474667 - DNA, 201 bp, Homo sapiens
tcttagccttgaagctggccactgccggctcctttccatgccgagctgggattcttggtgtgcaggtgtggagagcagctccggtgccatcaggcgattgkagtacgctttccttccttgtttggcagaacataaaatcagtctcaggccctcccaccatggcctccactgctgagccccgaggagatgccaagagatggg

SEQ ID NO: 474668 - DNA, 201 bp, Homo sapiens
aaaaatataaagataacccttcctccaaaaaaaaaaaaaaaaacccaaactcatggtggaccttgggatgagcgggggcgcttgtggggcagaactgggtrtggttgccccgtcctgggcctgttcccaggcctgctcttagaggaggggctgatgggccctgtgggtgcagggagatggggtcagtcacaggctggggcc

SEQ ID NO: 474669 - DNA, 201 bp, Homo sapiens
acgcctgttggcctgcagcctggagagggggcctgaagtgtgtgttccatgctcttgacccccaggaagcactcgcctctgttgaaagcctcgtgccgcakagcgcgattgctgtcccgggtggacggccatcacgggctccttgctccggcgatgccagcgctcctggtgttgtgtgtggctggctcccccttgtctcag

SEQ ID NO: 474670 - DNA, 201 bp, Homo sapiens
cctggccctcgtctggtttccgttgtctgggaggcacccctgcccgtgccaggcggggcactgcgggggcgcggatgcggagtggaagactgctgatttakgaatcgaaactccagggacatccgtgtagcagagtgattctaagatgattaagaaaaccatcaatgatttaaagaaagtgttcactgcagtccttattga

SEQ ID NO: 474671 - DNA, 201 bp, Homo sapiens
gctgaggagcagggctccgagccaggccagcgaaccttccttagaccccctgtgtgcaggcctggtgcctggtgtcgggggcccagtggagaacaagatcmggctgttgccatgggactttcgtctggtggggagtcctgaggaggatgtggatgaggtggagaagaggttccaggtgaacgcaagtgtccaccctgcatt

SEQ ID NO: 474672 - DNA, 201 bp, Homo sapiens
tggctgtgcacggcctggcgtgggagctgcagtgatttatgtgacctgtgctcagataattaaagtgggatttggcagtgaggtctttcatggcaaaggcrttagggatgtcacaatgaggcatgtaagtataaaacagttatgttttcaggttaagaatttaacgaggagtaaattcatttaaaccgaagagctggctta

SEQ ID NO: 474673 - DNA, 201 bp, Homo sapiens
cctgccccctccgccgggcctgggccgttgtgctccgccgaccacgggggctggaacagtgacggcggacccctgtgtggaggacagagcccggaagagasaagtcctggggcctgctggctggtcgagggagtgaaggggtgcatgatggtgtcctgggctgcagtgatgcagggagcgccccccgcctcctgtgtgggg

SEQ ID NO: 474674 - DNA, 201 bp, Homo sapiens
cagcattgctgctgtccacctcgcctccttgcgttttctgtttagcaacagccacagcacgcactatctcccctctggttacgctgcccttctctttaacrgcgaccgcggcttcagcactgcccatctccgtttgcagcctgggagccgcgctaacccactcaggctgctttgcatctcttctgctatttgaagttaagg

SEQ ID NO: 474675 - DNA, 201 bp, Homo sapiens
tggatgcttggaaggaggggagatcccagatcagagtcctggaccccagcgaggagccagcaggaaagagcctaggggtctggaacagttgtcgtgggacrtgtgtggctgccatctgtgtgagctgtatgggtgcagccaggactgtgctgaggggtcccctgctggactggcaggctctccctcctcaggagcactctg

SEQ ID NO: 474676 - DNA, 201 bp, Homo sapiens
ttgacgcctcccatgcgtgcccttggcggggctggctcctcctgggtgctccctgggtggactggggtgctctcctgcttgacagggaaggaaaccctacygtcaccagctcaagcgcaaacagagcccaccgggtgtcagccgccctcacacacaggaccagggcctcaccagcgccctctctccgtcctgcaccccagc

SEQ ID NO: 474677 - DNA, 201 bp, Homo sapiens
tgaaacaggcttaattgcctccgactcgcttcctggtatcgcatgtccccgtgagtcctcgcttgagggctgctgccctccagcggattgacgcctcccaygcgtgcccttggcggggctggctcctcctgggtgctccctgggtggactggggtgctctcctgcttgacagggaaggaaaccctaccgtcaccagctcaa

SEQ ID NO: 474678 - DNA, 201 bp, Homo sapiens
ctcccgtgctgatgagcgagtgtttcatgaactctgaactgcctaggtctttcacggtggtctggcctcctccgccctctctttctggcaccagggctgcrtttcggggactctaggcatggatggccctgccaggtttcagtagtgctgtttgggagatgagaggtggctgagctgctgatgacaaatgcgattcagtga

SEQ ID NO: 474679 - DNA, 201 bp, Homo sapiens
gaagtcagtggatgttaacatctgattcattgaaatgggtgaacataatttttatgaagaaaacagtcttgagatgtacaatgttgagacaaaatattccyggaatataccaaagcatatcaaatgaagagactgggtaagtctgagatagagtgaaccatttttaatttcataaaacctcatgaatacatctgctgtaca

SEQ ID NO: 474680 - DNA, 201 bp, Homo sapiens
ggttccatgatgtcaggcagacctgctgtcctggaggctgccagaggggctgctggctttgctcaggggccgcctccccaggggcgctcctgcccgtgccrcgtgctcccgttccaagcgcacggcctccccagcaggtaccgccctgccccttgcacagcctccgtctttgtcctgttggttggccagtgccttgctgtg

SEQ ID NO: 474681 - DNA, 201 bp, Homo sapiens
tttgccagggtttcagtcagtgctgatcagttgtggaaatgctgccaaggttcaggcagagtattgggcggaaagtctccctggcctccgtgccctctctyggcgggtggatgtccagccccgccctgacatcatgcggtgtattcacacactctcctgggccctagaaaaatagctcacgtcttccggggtgtgatgctg

SEQ ID NO: 474682 - DNA, 201 bp, Homo sapiens
gcactgctttttgtctcgtgtacctgctccaggccaccagttagaattcactgctccccgctgggtcgcagccctcccaaccgctggctcagccaagcccstgcacttgctctcttcctgagagacacatggaacgtgtcacctgtgtggcagtgctgttgcttggcccgactggggcgtctccccccagccctatggggg

SEQ ID NO: 474683 - DNA, 201 bp, Homo sapiens
ctgcagcggaaccttggggcaccctccacagtgttttctgttgagagtgtcgaaaatccaaaagagggaagcaagccactcgtcatcttcccgcgaaaggyggccgctgtcctgcttcgccgtgtttcctttcggtgtttcatacgtaggcacatgcctaggcatgttcatttacacctgggaactcgggatcctggggtt

SEQ ID NO: 474684 - DNA, 201 bp, Homo sapiens
gggctggcctcagcttgccagtggccggactttcagcccccatggcctgggcaggaacccctgccctcctttccgccttggagccctctcagcccccaggytcctgaggtcagggagaggcaggaagggggccccaggaggaggaggcaggcggacagagagcccaggagctggccagctccccagccctgctcgccccag

SEQ ID NO: 474685 - DNA, 201 bp, Homo sapiens
acagcgtacgggaggccgggctcgccctgaggagccgtggttcctgcaggggtctggcctgggccccgcagctcttgccaggcatcctgcccgccttcctrgactcttgtgatctggagccttggcgcctccccaggccgccccctcactgcccatcctccagcccttgctgtcccttctttccagtggcaggcctggcct

SEQ ID NO: 474686 - DNA, 201 bp, Homo sapiens
acagacggtccactggcccagtgctccaccagcaaggcctggtgcccgcagaggccccgctccccacccttccggccacccaccatgcctgctctgggccrtgttccgggggctggctcaggtggacagtgtcagggaacgaggttgcttttagcttacccactttccccatgtgtgacatgcactgtgttttcatgcttg

SEQ ID NO: 474687 - DNA, 201 bp, Homo sapiens
ccagcaaggcctggtgcccgcagaggccccgctccccacccttccggccacccaccatgcctgctctgggccgtgttccgggggctggctcaggtggacartgtcagggaacgaggttgcttttagcttacccactttccccatgtgtgacatgcactgtgttttcatgcttgaagctcacaggatcagggagattaagta

SEQ ID NO: 474688 - DNA, 201 bp, Homo sapiens
gccactcccacctgtactcggcttcctccctgccctggccgctcccgggtccccacccctccggcctggtgccgcactcactgtctccttccgtccctccygcagagctgaagaagcaggtggagagtgccgagctgaagaaccagcggctcaaggaggttttccagaccaagatccaggagttccgcaaggcctgctaca

SEQ ID NO: 474689 - DNA, 201 bp, Homo sapiens
gggaacctgctgcctctgctcctctccctcctgagaggggatagagattccagagtccctagagcttcctgggaaggccatactctgcctgggcctggagyggggaggctcagctcctggtctctccatcccggctgcactcctcccagtggttctcacggaattttccccacctcccttttcccctcttctcaaaaccca

SEQ ID NO: 474690 - DNA, 201 bp, Homo sapiens
ctagagcttcctgggaaggccatactctgcctgggcctggagcggggaggctcagctcctggtctctccatcccggctgcactcctcccagtggttctcayggaattttccccacctcccttttcccctcttctcaaaacccagggaaggaagccttctgttacgagagggagaaaatcagtggtaagaagaagtggagtg

SEQ ID NO: 474691 - DNA, 201 bp, Homo sapiens
ccgtcagcccagccccgaccccgggccttgggaagctctctctccatcccaccatctccgcatcagaacaggctgcaccctacactgccttgcggagccarcctgagcttggggagctcttgtctcagaggtgaggacgctgtggccagggcctgggggctccacccggtcacccagagagtgagaggtgtctgtgtcccc

SEQ ID NO: 474692 - DNA, 201 bp, Homo sapiens
tggtgccgctgtggctcagcgtgctgggtcccggtgccctgcagggcctgaggggtgggaggcagaggccatcttgccggagcgcctctacctgcacgcckgggtgggcagcaccacttgttggcggtgtctgaaacgctagatggggggcctttaggctgcactctggggccgtccactttgtgccggcccttcctgcac

SEQ ID NO: 474693 - DNA, 201 bp, Homo sapiens
gaatgttccaaaatccacagctttttttattgtgggtctgtcactcaaaggaaatgcttaatggagcgtttccgataccagattttcagattagggatgamtatttgcatgagatgcttactcaaccagtaagcacgtaatacagatattctgacaacctgaaaatctggaaatcccagacacttggtcccaagcgtttcc

SEQ ID NO: 474694 - DNA, 201 bp, Homo sapiens
aaaatcatacttgtgggtgggtcttgatctatgttcctcagatagctaagaataaaggtgcttttagagattttgccaaggttcgaatacaattttattartattttcctagtttcatgccagacgtcatcactgaggatcaccgtgcatgcggctgtgtttacatcttaacccttgaggccactggcaggctcaccgtgc

SEQ ID NO: 474695 - DNA, 201 bp, Homo sapiens
aatggagcgtttccgataccagattttcagattagggatgaatatttgcatgagatgcttactcaaccagtaagcacgtaatacagatattctgacaacckgaaaatctggaaatcccagacacttggtcccaagcgtttccaataagggatactcagcactcacctgtgtgtatatgtgtaagtctagtacggtctcgct

SEQ ID NO: 474696 - DNA, 201 bp, Homo sapiens
cctgcccattcgcagcgaggggcctggtggcctcagttccatccaagaggaaggagaaggccagaggtggatggagcgctcagagcctccggatagtgggktgacgtgggggatcctgcaggtaggcgggaccctctcaaccctgtaggtcccagggcagttgtttccctgcctctctgcagaggcagctattgattccca

SEQ ID NO: 474697 - DNA, 201 bp, Homo sapiens
tgtcatcgttcatagcagcattgctcatagtagccaagagatggggccaacccaaatgcccctcagctgtgactaaaaacaacacggctgtccacccagcraggagttattgagccataagagatggaggctgatgtatgctgcagcagggactggccttgaagacatgatgccaagtcaattcaacagtatgaaaggcca

SEQ ID NO: 474698 - DNA, 201 bp, Homo sapiens
tccaacccccttcagggccagcttaattatttaaaactgatgataaaaacagaatgagctgccaagatgaagtgatgatttgcggccaggacctggggctygggtggacgcggctcccactctccctgcttgctgtgtgctggcccagtgcggccgtttccaaggacgccttccggtttgcagccagggcccaggacacgg

SEQ ID NO: 474699 - DNA, 201 bp, Homo sapiens
gttctcagaaaacctgtgaagagctgcgcggatcctctcctgccccggcccagcggcagggctgccgcctccctctcccctgggcctgagtgggtggattycccctcccctcctccttcccaggagaagcacagagggagcggccaagcgagccgtgtctgcaaaccccgcttccctctgcggcggcctctgccatcgtgc

SEQ ID NO: 474700 - DNA, 201 bp, Homo sapiens
accgatgcctgcttgtcggcctcccgctcccccctgccaccccacccccccacccaccttacttgccctcatccaaaccaaagaagtttagtctaagatgraagttatactactctgcaaaatagttcgtttcatctgttcttatcagcctgcccagctacttaggtcataagtcaaataactgaagagcccctgagctga

SEQ ID NO: 474701 - DNA, 201 bp, Homo sapiens
gttttcagcagtttcgtttggatgtgtctgggtgtggatttctttgggtttattctgtttggagtttgctcagcttcttgaatctctaaggattttttttktttttttttttttttgccaagtttgggatatttcagccatttatttccttaaatactttttcagcaattcacttttctgtgaatttgctgagacctttgg

SEQ ID NO: 474702 - DNA, 201 bp, Homo sapiens
agcactggctgccaggcctggggaggggaaggagagtggcagaggggccgtccccaccacctgctcaccaagcattggtgctgggagcccctccgaagccrgagttggcttttcctttgcagagatgagcaaaatatgcctcccacacacaccctgacttgcaagagcagccccacctggggagaaagacccttgccacac

SEQ ID NO: 474703 - DNA, 201 bp, Homo sapiens
gactgagacagctccaggggacatcaaatggccctgcagtgagatgggggtggcagtggggagagagcacccttcctaggccacacagctttggtgtgtgkgcccctggaccccccgcggcagcagcctctgcttcgtccgtcacacccactccctggggttccagttttcacctgtggatggcccctctttctcagggtt

SEQ ID NO: 474704 - DNA, 201 bp, Homo sapiens
tgggcatccagggtttctcctggtcatcagaggaactgagaacaggggactgagacagctccaggggacatcaaatggccctgcagtgagatgggggtggyagtggggagagagcacccttcctaggccacacagctttggtgtgtgggcccctggaccccccgcggcagcagcctctgcttcgtccgtcacacccactcc

SEQ ID NO: 474705 - DNA, 201 bp, Homo sapiens
tctttgagtagaggctggctcagagagccattgattgataaacatgcctggcttctccttgaggaactaagaacttcattctgaactcccagaggctcacrgaaatgccagtgacctcagagttcagtccaagcatggaactagaggcttaattttttgagttttctcttctgtacctcagaagaaaggccgggattgaac

SEQ ID NO: 474706 - DNA, 201 bp, Homo sapiens
ctggctccgcagtgcgggggccggcggcagctggaacgggggtccctggactggcgtgtggttccaagctggactggcgtgtggttccaagctgcagcagaggttggtgctgagctgaggggtcacacaggtgcatcacacgtacttgaagccgcatctgtggcagacagaacatttgctcttaggaaaactcacggtgtc

SEQ ID NO: 474707 - DNA, 201 bp, Homo sapiens
ccggcagtggctggtcacagcgcagatggatgctcagaagctcagagcttgttctttgagtagaggctggctcagagagccattgattgataaacatgccyggcttctccttgaggaactaagaacttcattctgaactcccagaggctcacggaaatgccagtgacctcagagttcagtccaagcatggaactagaggct

SEQ ID NO: 474708 - DNA, 201 bp, Homo sapiens
agcgaggacagaagtgaccaccgtggctgccgtgcattcatcgcctgtgtatgcgggttccgtgtgcctggttttctgtgccatgctgcatttgaacttcrcagtgaggctgaggcgttctctgccctctcctgtgtggttgagtgtcctcacactcagagaggctctttgtttttcccaaggtcacacatctagttacgg

SEQ ID NO: 474709 - DNA, 201 bp, Homo sapiens
gggggctggcctgggcatgcacacctcaagtgaccgctgcttgggggccacggggccggtctctgcccactgcggtgcctccgtccatatctcccctgccygcagcacctccaacagggccggcgtcctgcagtctcccgctcctgtgggtgctctcaccacccgcagccctggtctctgtctcggcttcctggtctcgct

SEQ ID NO: 474710 - DNA, 201 bp, Homo sapiens
ggtgtcctgccccctgctatggcgttctcagcctctttgggaatctgtctctcattgcgtgggaatcatcggcatgcttggggcttatactcaaaagctcygtggtaattagcgcgccggagcacctgctgatgagggaatgagcgtcattatctctcttgctctttcgcaagggtcctctgggcgcctactcaacgctgt

SEQ ID NO: 474711 - DNA, 201 bp, Homo sapiens
gcgcgttggtactgacaactccggtaactggcttgaaacgataaaagtcaatgggaagatataggatttcaataagattatgacacacgataaaccttcckgtgcaaacaaattttccacagatacgtgacccgttctagttggatttgtaactttaatttctcacttattgaattttgaattttttgtcatcagctaatt

SEQ ID NO: 474712 - DNA, 201 bp, Homo sapiens
ccttccggtgcaaacaaattttccacagatacgtgacccgttctagttggatttgtaactttaatttctcacttattgaattttgaattttttgtcatcarctaattatgaagtccacaccagggtggcacctgtgtccctggctcaagagacggcaggagagccccagacgtggcggcctgagctccagggtcttctgag

SEQ ID NO: 474713 - DNA, 201 bp, Homo sapiens
tgtacgtgcagactcaggaggccgcacggaagggaccctggcagttttgtgcactccgcttctgggtgggggtcttgctccccaggctgcctgagtgagcyggtctctatcagggccatgaatttgccctttcagccagtactggtgggggcggtccccacagctctcctgccctcacctggtggggagcacgctggccac

SEQ ID NO: 474714 - DNA, 201 bp, Homo sapiens
acgctggccacaactcaatgaggtggtgcagggctgtgccggagcattggccccttgcgcagcatgtgtgttgggaaggggtgtgggccagtggagaccgyttcccgggtttgtgaggtcctggctctcgcttcttgagcacctgttgtttccagggcagctggctggacagttcattcctgacagcatcagtcttcacgg

SEQ ID NO: 474715 - DNA, 201 bp, Homo sapiens
cgtttcccgggtttgtgaggtcctggctctcgcttcttgagcacctgttgtttccagggcagctggctggacagttcattcctgacagcatcagtcttcayggccaccccatttcccatcttatcaacaaaggaactgagacttggggagggaggttgaatagctggcctcaggacagagctggggcttgaacctgcatct

SEQ ID NO: 474716 - DNA, 201 bp, Homo sapiens
agccctggacctcctgggtgcagaagaccctaggctgtccccctgactttctcagcctctgtctgtcgcaacttgggcttcgttccatgagggctgcggcygtaggcgtgtgtgtcagtgtgtccagaggcagcggtgcctggggaggactgaagtccgtgtggggccggggcaggggacgccttccaagatgccaggctg

SEQ ID NO: 474717 - DNA, 201 bp, Homo sapiens
tcgtcaccccctgaggcttctcagccttgggccaaccctatgtggctttgcagccctggacctcctgggtgcagaagaccctaggctgtccccctgacttyctcagcctctgtctgtcgcaacttgggcttcgttccatgagggctgcggccgtaggcgtgtgtgtcagtgtgtccagaggcagcggtgcctggggaggac

SEQ ID NO: 474718 - DNA, 201 bp, Homo sapiens
gcatggctgcctcttctgtcgtcggaagctgcgttgagcggggaagggtgtgtgaggagcctgagtcccatctctactagtgacaggtggcatgcgccggsggggagcacagcccctcgggccccaccaccgtgtttgtggcagggggccagtgacatgtttgccgcatgaggccacggtgtcggggcaaagcaggtgtga

SEQ ID NO: 474719 - DNA, 201 bp, Homo sapiens
tggagggctgggcgggaaggaggtgcactggcccgtcctcgtcaccccctgaggcttctcagccttgggccaaccctatgtggctttgcagccctggaccycctgggtgcagaagaccctaggctgtccccctgactttctcagcctctgtctgtcgcaacttgggcttcgttccatgagggctgcggccgtaggcgtgtg

SEQ ID NO: 474720 - DNA, 201 bp, Homo sapiens
cagccagcccctgagctccaggcagtgtaccctccccatccgggaaccagccgcaaggcagcccgtgtgctgagccacagggagggccagctgggcgaggrgctgacatgtgggacgcagctgtgcagcactcagaggccctgcccaccctcccctccaggacacagcctgaccgtgccctgggcctcggctgccttgcag

SEQ ID NO: 474721 - DNA, 201 bp, Homo sapiens
gctgacctcgctgtacgccgagcacccaggcgactgcctcatcttcaaggtgggtcctgcgtgtgacggctctccggctgtctcgctctctgtctcctccygtggggagatccgaccgtagccctcagcaaaggagcagcctcgcgtccaaaggggatggtgtggagggctgggcgggaaggaggtgcactggcccgtcct

SEQ ID NO: 474722 - DNA, 201 bp, Homo sapiens
tgaatgagggtgagtgagtgtgaaggcctaggacatgagtgtgcacaactggagactataaatgccgtaccacttaggctacactcaactattaaaaataytgttcttttcttcaataataaatgaatggctgggcacagtggcctgtgcctataatcctaacatttggggaggctgaagtggggggatcgcttgagccca

SEQ ID NO: 474723 - DNA, 201 bp, Homo sapiens
agatggagggaagagtgttaccgtttagttgatttactgccgaagaacctgtaaggcccaggaagacagagaaagacgccagaaagagcatcattctgcarggttcaaggtgaacctggctcgctttcagaggagtagggcaacgagggcacccagaccctaattacacaggatcccggcactgtgccatcggggcctcat

SEQ ID NO: 474724 - DNA, 201 bp, Homo sapiens
gaatagtcacttagagccatgtcaggggcagtgggcctgggggtgccggctgtcgtctcacgatggcctgacctcagaggtggctggcaggtaaagccccrgggcagtaggatccggaacgtcccggtggcctcctgcctgcctccctgtttgtcggtgctggctcctgtggggtaggcgtccagcctcagaaaggaccca

SEQ ID NO: 474725 - DNA, 201 bp, Homo sapiens
cctggtggtcctgtgaagctgcatctgccgtgagcgtccagtgggtcttcagaggttaggcggtcactggatgacccagcaacttcccttctaagtgcgcrcccaagagaattgataacatgtttgcacgaacactcgtgtcatcgttcatagcagcattgctcatagtagccaagagatggggccaacccaaatgcccct

SEQ ID NO: 474726 - DNA, 201 bp, Homo sapiens
caccctttctggggccttcagactcatctctaactcaggaccagcctccccccgggcgctgcctggagttggaacccttgttctctccaaccatatggccrtggttgactttaacatcctctttctcagcctagccagggagctgaccatcccgtgcctggttgtgggcgcctacagcagtcctgtgattcagtccctcgt

SEQ ID NO: 474727 - DNA, 201 bp, Homo sapiens
tccccgcccctagccatggagtggccgtggctgaagtggaagagattcagaggctgacagccgaggggaggtttgaacctcactaaaatcgttcggagctsacgctcgtttcagcattgcccacgctgtctgggtaggaggtgaattcgcctccacgtggcctgccgtggggcttcttcttgcagcgggctctcctgggtg

SEQ ID NO: 474728 - DNA, 201 bp, Homo sapiens
tccactgttctgtggccatgcacgtgggcccccatatttccactcagcctgtgcgggtgctttgtgtgtagacttttaaaggggagaagtcagtgtggtcygagtcccagtcttcttcttctctaactctcctagagcctcaagcctcgatctgctgggaaacggatccagttagctgtgagaggggaagtggcagctttg

SEQ ID NO: 474729 - DNA, 201 bp, Homo sapiens
gagtgtcccctccccgcccctagccatggagtggccgtggctgaagtggaagagattcagaggctgacagccgaggggaggtttgaacctcactaaaatcrttcggagctgacgctcgtttcagcattgcccacgctgtctgggtaggaggtgaattcgcctccacgtggcctgccgtggggcttcttcttgcagcgggct

SEQ ID NO: 474730 - DNA, 201 bp, Homo sapiens
gctgaagtgctgctcaggggtcagcctcagtactggctcccgggccttcagccaggccgtgctgtgcgggggcttgttccagaccctccccaggactgaartgctgtctcatctttctcctcacagaggccctcagtggaccgcgaggtctccccgcccaggccttgtgacggccgtgccgctggccccgggcctgccggt

SEQ ID NO: 474731 - DNA, 201 bp, Homo sapiens
gttcagtggagctcagactgccatggtgggacggagcggggcgggggctgtggtgggaataggtggctcagtgtgggccagaaggttggagggctggcgcygacacggaaccagggtagcacgagaccaccgtgctggtaaccagatggcgcagcctgtgatgggggcctggattgtgttccagcggcaacaggcccgtcg

SEQ ID NO: 474732 - DNA, 201 bp, Homo sapiens
ggttttggcaggggggcctgtgggaccaccacacttctccccaagggcacaccggggatggcagagggtcgtgggaaagtgttgaccctcgtcaggtcccyggggagcccctggcaggccgttctgtggctggatgtgagttaagcggttcagccgtgtgtgaggctccgtgacaccagccaggacacacctggagttgtg

SEQ ID NO: 474733 - DNA, 201 bp, Homo sapiens
acgcctcacgcatgtgcccccttccgggagtcccagacaggatgggcctggtcacctgctctggacagggcagactggggacagggatgctcccggaaggrtgtcactagacaagtgagagcgtggtcagtgggcgtgaggtggggacttgagctgcgggcgtggtaggtgtctcagtgcttcagtgtggctatactagag

SEQ ID NO: 474734 - DNA, 201 bp, Homo sapiens
atcttcattgcctctggctcatgccgggcagctatcgggtgtggtagtgcgctcccttgggcctcctggagcagtggcagcaggcggctcttgcatgtgcygtgtcctccgtgaccagggctgtgctggatggacgtgtctgccgtgctgtgctccctgcccatttgtttgagggggccgtccttagcgtagccttcctga

SEQ ID NO: 474735 - DNA, 201 bp, Homo sapiens
gggactgtggatggcaggacgttcaccccgtggtcagtggctgggcctttctcatgaagcagcttgattgagatgtcatctacagagcgtgcagccatcaycacagtctatcttggaatgaatgcctttatcaccctggaaggaaacgtgccccatagccatcctctcccagtcccagccgtcggcagccgctgtctgtgt

SEQ ID NO: 474736 - DNA, 201 bp, Homo sapiens
ttgtgcacgcctcacgcatgtgcccccttccgggagtcccagacaggatgggcctggtcacctgctctggacagggcagactggggacagggatgctcccrgaaggatgtcactagacaagtgagagcgtggtcagtgggcgtgaggtggggacttgagctgcgggcgtggtaggtgtctcagtgcttcagtgtggctata

SEQ ID NO: 474737 - DNA, 201 bp, Homo sapiens
cacgtgcactggggtcacttgtgtttctgtcacccttgccacccatcgtgtcaggaggcctccgtgtccatgccagggtgccctccatccccagacattcyggcaccttcctgttgtttcctctataagaattcccacctgccctcttggcttagcaaattccagctcagcctttgaggtccagttcgagtagcgtctttt

SEQ ID NO: 474738 - DNA, 201 bp, Homo sapiens
agctgtggcagcaggccccccagctctgagctttggagtctcatgggtggctgggcctctgcctgggtggggtgaggggaaggaattagctgggtctggarccaccatgcttgcttagaaggtgaggaagggccaagccacaaacatggcaggctcagctgacagcagcatccggcctgcagaggggacgtggcccaggtc

SEQ ID NO: 474739 - DNA, 201 bp, Homo sapiens
gcacagtgcaccctcgtgtctctgccccagagactggaaccgtctggagggtggagctcgctctcatctcttgcttcagccctttgttcctgggagcatgytacggcctcagcctgcagtgggggcacagggagctttacagaaccagttagggttccaggagcaggctctgcaaggctccacccttgtcttggagggcag

SEQ ID NO: 474740 - DNA, 201 bp, Homo sapiens
gtctttggcggtgtcactgctagtcagcccccgtcgggtggtgggagggactggacccgggccagaactgccttggtgtggatgtcgcttgcctctgccarccccgggacctggacacatggcttcacctcctcaagccttgtcttcctttatgtgggccaggatcatcgcatctgcccaagggtcgtggtgacagtgacc

SEQ ID NO: 474741 - DNA, 201 bp, Homo sapiens
ggatcatcgcatctgcccaagggtcgtggtgacagtgaccttggccagtatgtatgcaagtgccaggcacgttggggaccccgtatgcctgccacattgcsctgagtggatccctgccactgtctgccgacatcaggccacgaggatctgcaggtcagtgagtgcatcatggaagctttcatggctcatcagtgagaactg

SEQ ID NO: 474742 - DNA, 201 bp, Homo sapiens
atgcttcttactatctgtcagaaggctcaaggtcaaaaggccgtgctttctgccatagagtttcaagagtaaaggagaacgcggagatctagtcagctggkattcctagctctgctcagaaacaggctgggctttgagaccttttcctcctcattttccctgctggtctggaacagaaagtacttgcagctgactgcgctg

SEQ ID NO: 474743 - DNA, 201 bp, Homo sapiens
ccagatctgtcccaattcctgcggcccccagaggaagctgctgccaccgcctcatccagacctggagctcaggctgcagtgccgccttccatgctggaccygcttctctcctctacatcttccggggggggtcctgcggaggcagccagcacctcttccttgtcccacacttccttgtcccggcattcccctcctccatta

SEQ ID NO: 474744 - DNA, 201 bp, Homo sapiens
ctgccactgtctgccgacatcaggccacgaggatctgcaggtcagtgagtgcatcatggaagctttcatggctcatcagtgagaactgcagggtgattgcrggaggagcaggtcgacctctcgtgtcctaggccctgccctcgcactggcatcatgcacgctcccactgacacatggacacaaatacatgcccacgcatgc

SEQ ID NO: 474745 - DNA, 201 bp, Homo sapiens
gcagcatggactcatgacagctggggaggggcagccctgcagaagggactgaatggtgactttcctctctcaggtttcgtggaggccctacagcccatgcrggacaacacgttccagtgcagctgcaggcgtcttttgcgggatgggccgagagtgtgacgggctatgctagcctgggtctggtgggctggagaggaggga

SEQ ID NO: 474746 - DNA, 201 bp, Homo sapiens
tgccttctccttgagacccaaccccgccccatgccggcagccatgggggcgggcgatggtgcctgggcatggatcgttgctcggatgttcccgtcccgggyctcaccgtccacgtgtggcctggaccagttgcgtcggtgccattcgggccccaccccagcctgccgagccagagcctgcctttcacagagccttggggga

SEQ ID NO: 474747 - DNA, 201 bp, Homo sapiens
tcactgcagggttgacgacaggtgtaaagctgcccagcggtcactctgcttccttgcagaaggaacctactaagctgcatgtttaaaaactctgagtgacmgaagaggccggtccccagagatgctcctgggcctcctcacactgcctttcagagctgggctgggcctgggttgtgcttggtcccaaggaaggctggcggc

SEQ ID NO: 474748 - DNA, 201 bp, Homo sapiens
gcccacgctgctgtaccccaagaaggcagtagacacgtgataccagtgggctgggggcgtcttctcagctggtgccctctccacgtccttctgcgggggckccttgcccccctgccccatgcacactctccctgtgtgcagagtgggtcttccttcctggtgtggggctccctgagtgccctgcctgtcctcgcctgttct

SEQ ID NO: 474749 - DNA, 201 bp, Homo sapiens
accctggctccgcagtgcgggggccggcggcagctggaacgggggtccctggactggcgtgtggttccaagctggactggcgtgtggttccaagctgcagbagaggttggtgctgagctgaggggtcacacaggtgcatcacacgtacttgaagccgcatctgtggcagacagaacatttgctcttaggaaaactcacggt

SEQ ID NO: 474750 - DNA, 201 bp, Homo sapiens
agcactgtgctgtgtgtgacccgtgctgtgtgtcttcctgggccatggtgacccatgctgtgtgtgacccgtgctgcgtgtgtgcctgggccatggtgacytgtgctgtgtgtgttcctgcagggtgactatgaccagagcaggaccaaagtgctgcacatgagcctgaaccccaccagtgtggccaggcagcgcctgcgc

SEQ ID NO: 474751 - DNA, 201 bp, Homo sapiens
cagcacatttgtgaggatgagctgggaggccttgagcaaggacaccatcagtgcctgcgcagaggtcccctgggactgacaagctcgtcggggaacagaarcagcgctttgaattttaaattggttaaattccttttcctgtcacagtctcagctgctccctgtttccttagagagccagggagtttagtgtcctctcatc

SEQ ID NO: 474752 - DNA, 201 bp, Homo sapiens
tgatggggttgggggctgtgtgtgagtgtgggtgtggggtgggggaagctggagaccgggcaggtgccatggtgagcatgcagtctctttcctagcagcartgggaggcactagaggctttaaagtggaagaatgtgactggagaaagcactggctgccaggcctggggaggggaaggagagtggcagaggggccgtcccc

SEQ ID NO: 474753 - DNA, 201 bp, Homo sapiens
ccctggccgtgagggacgtctgcgcaggagctccccggggccagctttgcctgaatgtggaagatggagggaagagtgttaccgtttagttgatttactgmcgaagaacctgtaaggcccaggaagacagagaaagacgccagaaagagcatcattctgcagggttcaaggtgaacctggctcgctttcagaggagtaggg

SEQ ID NO: 474754 - DNA, 201 bp, Homo sapiens
catcctggctccaggggaaagcctgggtcatcagcaggcatggtcgggtgtcatggctgtgccccgcagcacgcggtgtctgcctgcttggaggggcctcygcagtggggcactgcgtggccctgtaggatgcaggcaggctttggcaaggctggccctgctctaggtgggtgtctgaacctgttccctccccaggcagag

SEQ ID NO: 474755 - DNA, 201 bp, Homo sapiens
ttctacctttgagcttctttgaggacagtcaccattgtgtctgctttgcctggaatggtggctgatacacagtgggtgcttgaggtgagcgtggagttacrgttctgagacccgtggctagcatgtgagctgcagtaacgaacagtgtagtcactgtcaggactgagcaagaccggcgttgaattcttgctcatcactgac

SEQ ID NO: 474756 - DNA, 201 bp, Homo sapiens
aactgccagactgttctccagggctgccgcacactagggttccagtttatccccatcctcaccaacgtgttgttgcgtgacttcccagccgtcctgggggygcaaagtgatacctggctgtgatttcactttctgtctctggatgccggatgatgccgagcagcttttcatgtgtctattgaactcatagaagtctgtctt

SEQ ID NO: 474757 - DNA, 201 bp, Homo sapiens
ctggagtgggtgtctctctgctgcccacgccgtccctcagccgggaatgtgtgttgctctggttcacttctcccatctccgttcatgatgtggatttcacygccaggaaggagaggtttgcttcacaacctggcggatgagcttttccagcctgtgctcagccccacgcccctatgcctctgtctaccctctggggtgctg

SEQ ID NO: 474758 - DNA, 201 bp, Homo sapiens
tgaccctggctccgcagtgcgggggccggcggcagctggaacgggggtccctggactggcgtgtggttccaagctggactggcgtgtggttccaagctgcagcagaggttggtgctgagctgaggggtcacacaggtgcatcacacgtacttgaagccgcatctgtggcagacagaacatttgctcttaggaaaactcacg

SEQ ID NO: 474759 - DNA, 201 bp, Homo sapiens
tgtccacagggcacagggaaggagccactccttccaggagagatggctgccaggcaggctcaagaagacaaaagaactgagcactgtgctgtgtgtgaccygtgctgtgtgtcttcctgggccatggtgacccatgctgtgtgtgacccgtgctgcgtgtgtgcctgggccatggtgacctgtgctgtgtgtgttcctgca

SEQ ID NO: 474760 - DNA, 201 bp, Homo sapiens
agaaagacgccagaaagagcatcattctgcagggttcaaggtgaacctggctcgctttcagaggagtagggcaacgagggcacccagaccctaattacacmggatcccggcactgtgccatcggggcctcatgtgtggtcttggtggagaatgaccagggctgctctctagcccccgtcctccagatggtccccagaggga

SEQ ID NO: 474761 - DNA, 201 bp, Homo sapiens
tgctcctgaaaagactgggtctcctgctcttaagagtcgaagcatttatccaggtgaaataggtcaagttggctgatcatgtggtccttgtcctcctgatwttttgcccgttgttctatcagctattgagagagggatactgaagtctcagattgtcattgaggacccgtctatttctccctgcatttctggctggttttg

SEQ ID NO: 474762 - DNA, 201 bp, Homo sapiens
cctgaccctggctccgcagtgcgggggccggcggcagctggaacgggggtccctggactggcgtgtggttccaagctggactggcgtgtggttccaagctrcagcagaggttggtgctgagctgaggggtcacacaggtgcatcacacgtacttgaagccgcatctgtggcagacagaacatttgctcttaggaaaactca

SEQ ID NO: 474763 - DNA, 201 bp, Homo sapiens
tggggattatgggagctacaattcaagatgagatttgggtggggacacagccaaaccctatcaggtatcatagctaagaaatctttggctgtcccaaattyacaagattttctcctgtattttcttttaataactttgtaacttttggttcaggattgagcaggattttcatttattgtacaagattttaattctttattt

SEQ ID NO: 474764 - DNA, 201 bp, Homo sapiens
cagcagtggcgctctggtggggcaggtgctcaggcacccagcggtgctcgtgaggccagcagtggcgctctggtggggcaggtgctcaggcacccagcggygctcgtgaggccagcagtggcgctctggtggggcaggtgctcaggcacccagcggtgctcgtgaggccagcagtggcggccctgggcacgctgcagccct

SEQ ID NO: 474765 - DNA, 201 bp, Homo sapiens
gaggtgccccgtgaacgtgtggtctggtgcccgcagacgctgggtgaggtgccccgtgaacgtgtggtctggtgcccgcagacgctgggtgaggtgccccrtgaacgtgtggtctggtgcccgcagacgctgggtgaggtgccccgtgaacgtgtggtctggtgcccgcagacgctgggtgaggtgccccgtgaacgtgtg

SEQ ID NO: 474766 - DNA, 201 bp, Homo sapiens
ataaaatcagatcttgtgagacttattcacgaccacgagaatggtatgtgggaaaccatccctgtgattcattatctcccaccgtgtccttcccacaatasatgagaatggtatgggggaaaccgccctatgattcattatctcccaccacatcactcccacaacacgtgagaacggtatgggggaaaccgccctgtgatt

SEQ ID NO: 474767 - DNA, 201 bp, Homo sapiens
cagcagtggcgctctggtggggcaggtgctcaggcacccagcggtgctcgtgaggccagcagtggcgctctggtggggcaggtgctcaggcacccagcggygctcgtgaggccagcagtggcgctctggtggggcaggtgctcaggcacccagcggtgctcgtgaggccagcagtggcgctctggtggggcaggtgctcag

SEQ ID NO: 474768 - DNA, 201 bp, Homo sapiens
gttttctgagcccttcctcactctctggcaccacagggtgctccagactcacctcgtgtcctctgccccagctttccaatcatccgttcctccagggagcscggagccttctcttggcagcacagtcctgagcagcccaggtcagggtctgggtatgcctgtggctcctgggacggcactgcttctacaccctcccgccag

SEQ ID NO: 474769 - DNA, 201 bp, Homo sapiens
tgtgcgtgtgtgtgcgcctctggtcccggccctggcccgtgtgtgtgcgcctctggtcccggtcctggcctgtatgtgtgtgtgtgtgtgtgtgtgtgtgygcgcctctggccccggccctggactgtgtccgtgtgtgtgtgtgtgtgtgtgtgtgtgtgcctctggccccggccctggcccgtgtgtgtgtgtgcgcct

SEQ ID NO: 474770 - DNA, 201 bp, Homo sapiens
ttgtgtttcttactggtgacggcaacagcccccagcagcagcggtggccatgattgcagtgagaggcaagtgatgtttgtgcggggctcactgtgggcccygcatggcactgcgtgcatctccacgttgatcgagttctaactgcgggcctgagacggggtttaaggatattcactgtattgaggtggaactcgcacaccg

SEQ ID NO: 474771 - DNA, 201 bp, Homo sapiens
gtgtgtgtatgtgtgtgtgtatgtgtgtgcgtgcaccgctggccccggccctggcccatgtgtgcgcgcgcctctggtcccggccctggcccgtgtgtgtrtgcctctggccctggcccgtgtgtgtgtgtgtgtgtgagcgcctctggtcctggccctggcccgtatgtgtgtgtgcgcctctggtcccggccctggccc

SEQ ID NO: 474772 - DNA, 201 bp, Homo sapiens
gggtacgcatccccactctaggggcccagttcacacctgcctgtctgtcgcccttgtgagcaggtgcacgtccgcactccgcgtgtaccaggatggtgtcygccaggtctgtgcggtggcagaactcccactctgcccccaggtctggcactcctagatgtacacaagccaaataacagttagaaaacccaggacgcagaa

SEQ ID NO: 474773 - DNA, 201 bp, Homo sapiens
tggctgatgagctccagcccaagtgaggtccccagggtacagcccaagccaggcctcgccgtccttcggggacttggagagcagtggcccacagcagcctragctcttgggaggctggaggcttactgcgcccggtctcttcaccccgtggggtgtgtccacaccggcctctcctgagagcgtggggtgatctgaacacag

SEQ ID NO: 474774 - DNA, 201 bp, Homo sapiens
ctcctccttcccaggagaagcacagagggagcggccaagcgagccgtgtctgcaaaccccgcttccctctgcggcggcctctgccatcgtgccatggggcyggaggtccctggtccaggtcagcatgtccatctccactggcctcttccatgaggggggtggcagggccagcagttagcttgtgtgacgtgacgtcagggg

SEQ ID NO: 474775 - DNA, 201 bp, Homo sapiens
tcccctcccctcctccttcccaggagaagcacagagggagcggccaagcgagccgtgtctgcaaaccccgcttccctctgcggcggcctctgccatcgtgycatggggccggaggtccctggtccaggtcagcatgtccatctccactggcctcttccatgaggggggtggcagggccagcagttagcttgtgtgacgtga

SEQ ID NO: 474776 - DNA, 201 bp, Homo sapiens
ccctctcccgcccgtgccaccgtgctctcccactcagccgcccattcttgtcaccgagcccatgcagaggtgtcgactcatgaatcgaggacctgctgtcyagctggggcgtgttgacacaggctgagatttgcacaggatttatcactctcagatgaagcatccgctttgctgccaacgggtgtagacatgaccttggta

SEQ ID NO: 474777 - DNA, 201 bp, Homo sapiens
actgtgagccggtgtcctggctctcagggcctcagggccttcctctccacccggcaggggtgtgctgagggttcattgcttgacaggctctggggctggcrgcacagcctgtggcggttgtgggtgcggccatggttacaggcccttctcatgggacagggttggatggggttggaaatcaccgtcttgagaggtacgggc

SEQ ID NO: 474778 - DNA, 201 bp, Homo sapiens
gtccctgtgctgccctgggtgtggcggtggcacgtgcaaagccagtgtgtgctgttgctcaccatgtcatgagtacacacttgttgtttacacagattatscccctgtgatcctggcagcaaacccacaagctggttgtggccccagatactcagacgaggaacaggggcagccaggattagtgacctgcccgtgttggca

SEQ ID NO: 474779 - DNA, 201 bp, Homo sapiens
acaggcccaggctcaggccttccttcctgccaggctggcccagggtcctgctgacccctgctgtcctggaagtgttgagagcagagaacctgcacacgccyacacgcctgtttgcagacacagtgtggtgtgcgagccccaggtgggccctctcccgcccgtgccaccgtgctctcccactcagccgcccattcttgtcac

SEQ ID NO: 474780 - DNA, 201 bp, Homo sapiens
tggttgcattgtggctcccccagaagccctgtgccctccctgcactgtgggtcctgcccactgcttactagggttattcctgggtggtttagaatctcagwcacctgcatgtcactgctgtctgcacacttgccatatgacccatgggggcatcttttgggcgttgggggcggggatgaggagaaggtgggcacttcagac

SEQ ID NO: 474781 - DNA, 201 bp, Homo sapiens
ccagatcacaggcccaggctcaggccttccttcctgccaggctggcccagggtcctgctgacccctgctgtcctggaagtgttgagagcagagaacctgcrcacgcccacacgcctgtttgcagacacagtgtggtgtgcgagccccaggtgggccctctcccgcccgtgccaccgtgctctcccactcagccgcccattc

SEQ ID NO: 474782 - DNA, 201 bp, Homo sapiens
agcatccatctgcaatcgtttttcttctgtctgcaaaataccccttgtttcctttgatacagatttaatgctgaggaattatctaattttcttggggtccrgaacatatttaattcacttttatttttgaagaacagttttgctgggtataaaatcataggttatcaatgcctgtcctatccaccagcctacaaccctttg

SEQ ID NO: 474783 - DNA, 201 bp, Homo sapiens
ttagaaaaagagatgtggagtcttcttcctgttctccctgccgctgccatgcggtcactgacagccctgaagccttctcaccaggaacctgcggggcaggrctgtgtgagagaagcagcttgcggcaccaccttctggagtccggctgcacaccccaactgtccccagggagctgctggcctgggccaggaagggtgcagg

SEQ ID NO: 474784 - DNA, 201 bp, Homo sapiens
cccccctagcctgagtgagtgtttcaagggctgtgaaggcccatggtatgcaaagcgccatgttagaaaaagagatgtggagtcttcttcctgttctcccygccgctgccatgcggtcactgacagccctgaagccttctcaccaggaacctgcggggcaggactgtgtgagagaagcagcttgcggcaccaccttctgga

SEQ ID NO: 474785 - DNA, 201 bp, Homo sapiens
tccaggcactggacagggactggggccgggcgtcccgcatgaatgaggggtcagggagctgatgcatggaaactccttggcacaaggcccggagtgtgccyggcaccctgggcactggctgcctgcctgttacccgtcggtggagaaagccacctagactttgcagcactgtaagatttttgaactgtagaagaccaagtc

SEQ ID NO: 474786 - DNA, 201 bp, Homo sapiens
cagttggcctctgtctctcccaggcgtcccatgtggcacctgcttccgtgatctggatccagaggaggcagggaaagcaagtcaggcagcatgggcccagycggagcccccctagcctgagtgagtgtttcaagggctgtgaaggcccatggtatgcaaagcgccatgttagaaaaagagatgtggagtcttcttcctgtt

SEQ ID NO: 474787 - DNA, 201 bp, Homo sapiens
aattcatctttgggttctgaagcccgtgctccagccgttcctcgatgtggcctcatcatggtgcttgtttgggcaggttggtggtcagggctggtggagcyccccagtgcggctccctccccgccccacctgcctgctcctccctggcgggggcctgggtggggtttgtggccggggccaacctcaatgtcccaagtgctg

SEQ ID NO: 474788 - DNA, 201 bp, Homo sapiens
atgcacacacacacacatgcacaggcagccacatacatgcatgtacacgcatgcacagccacccacacacatgcatgctcacacgtacacaggcagccacscatgcgcatgcatgcacacacatgcccacacacaggcagccacatacacacatgcatgcacacatgcccacacatgcacagccacccccacatacacatg

SEQ ID NO: 474789 - DNA, 201 bp, Homo sapiens
ggcacagggctgtcgcctctcaccctgggggtctctgccactggcttctggggtctctgagaggagcctgcccaggatccaggcccatagaacccagtccrgaggaaccccgggctcttggctcacttgggaggagaccacgtgagagcaaccgacaagaaagcaatgacatttccaaggcggaaaacccatcttttattt

SEQ ID NO: 474790 - DNA, 201 bp, Homo sapiens
agggctggtggagccccccagtgcggctccctccccgccccacctgcctgctcctccctggcgggggcctgggtggggtttgtggccggggccaacctcartgtcccaagtgctgttcaggaaagagaccagacaagagccctgtgacgtttaaataagtgcatctgttttgggaaggagtgggtagaagattgccgggtt

SEQ ID NO: 474791 - DNA, 201 bp, Homo sapiens
ccacatacatgcacacatgcgcccacacgggcagccacatgcatgcacatgtgcacgcacacacagaggcagccacatgcacgcatgcacacacacacacatgcacaggcagccacatacatgcatgtacacgcatgcacagccacccacacacatgcatgctcacacgtacacaggcagccacccatgcgcatgcatgca

SEQ ID NO: 474792 - DNA, 201 bp, Homo sapiens
cctgagaacagcctgggcagtgcctatgtggtcccagggctggggtcgggcacagggctgtcgcctctcaccctgggggtctctgccactggcttctgggrtctctgagaggagcctgcccaggatccaggcccatagaacccagtccagaggaaccccgggctcttggctcacttgggaggagaccacgtgagagcaacc

SEQ ID NO: 474793 - DNA, 201 bp, Homo sapiens
agagcgtcttctgtaggccactgggtcctcgcttgcctggaacagtgcttcatcaatcatgagttccacaagaacgtcttccataggccactgcatcctcrctgcctggaacagtgcttcatcaatcatgagttccgcaagagcgtcttccataggccactgcatccttgctgcctggaacagtgcttcatcaatcatgag

SEQ ID NO: 474794 - DNA, 201 bp, Homo sapiens
gaggttggagagaaggggaggcagcaaaggcgccgggaagagggccctggggaggtcacctgctcccagctgcacgtgggctgagctcttgcaggccatcsctgtgcccaaccctgggctggggatttaaggaaacctggggagtttaggaacctggacttggttcttgcccttgagagcctataaggtggagttcaggga

SEQ ID NO: 474795 - DNA, 201 bp, Homo sapiens
gtgcttcatcaatcatgagttccgcaagagcgtcttctgtaggccactgggtcctcgcttgcctggaacagtgcttcatcaatcatgagttccacaagaaygtcttccataggccactgcatcctcgctgcctggaacagtgcttcatcaatcatgagttccgcaagagcgtcttccataggccactgcatccttgctgcc

SEQ ID NO: 474796 - DNA, 201 bp, Homo sapiens
gctggaacatggttatgttccgttttgtcacgtttttcagtgttttttcccgggtccctgtgatactgaggttggagagaaggggaggcagcaaaggcgcygggaagagggccctggggaggtcacctgctcccagctgcacgtgggctgagctcttgcaggccatccctgtgcccaaccctgggctggggatttaaggaa

SEQ ID NO: 474797 - DNA, 201 bp, Homo sapiens
cctggaacagtgcttcattaatcatgaattccacaagagtgtcttccataggccactgcattctcgctgcctggaacagtgcttcatcaatcatgagttcygcaagagcgtcttctgtaggccactgggtcctcgcttgcctggaacagtgcttcatcaatcatgagttccacaagaacgtcttccataggccactgcatc

SEQ ID NO: 474798 - DNA, 201 bp, Homo sapiens
gtgagagagcacatcgggatggccagttctggcctgcccttgaactgaccatggcctcagccatgtgttcccagcaagtctcatgctcaacctgaccaccygctctcggcataagggggcccctggggtttgacatggccagaggccttgttgcgtccgttcggctttggcgccactcgatgtaaatggtctttggcagaa

SEQ ID NO: 474799 - DNA, 201 bp, Homo sapiens
agccgcctgttggaccccgttgcttcctgggctcacagcctgccttgtgggacgagcctgggtcctccgtcagcagctggacctgaacctgcctgccccayggaggcacttgcgggagcccagtctaggtgtggtgtggcatcacctcctgcagggacagtcgtgatgtgttccatggagcccacgcacgtgatctccatg

SEQ ID NO: 474800 - DNA, 201 bp, Homo sapiens
atcaatcatgagttccgcaagagcgtcttccataggccactgcgtgcttgctgcctggaacagtgcttcatcaatcatgagttctgcaagagcgtcttccrtaggccactgcgtcctcgcttgcctggaacagtgcttgatcaatcatgagttccgcaggagcgtcttcaataggccactgcgtgcttgctgcctggaaca

SEQ ID NO: 474801 - DNA, 201 bp, Homo sapiens
gtggtgcttccaggtgcctgggcctggcctgtttcatctactgctgccatcaggggcctgggcagcgtcaggaggagtcaggcccttgtcaagcataaggractcgagagtcattgggtgtgatgagtggatatcaccatgttttctgtcacagacggtgcttttctgagcctcttcctgcctcaggtttctgtcacctcc

SEQ ID NO: 474802 - DNA, 201 bp, Homo sapiens
gtgcctgcctccttggctaaggccctctcactaactctgggacatccagacgccttcctccccgttgggtctggtggcctgtcctgcttcttcctcaggcwtcttctctggtttttctgctccagtccgatggacctgggccccctgcaacagtatgacacatggcctgttactgcttttccgctgaccgccacctcctgc

SEQ ID NO: 474803 - DNA, 201 bp, Homo sapiens
gcttctcagggtgcggctccactgccctgttcctcgtagcccagtgcccggtgctccctcttcgaggcggtgccctgttcctcgtagcccagtgcccggtrctccctcttcgaggcggtgccctgttcctcgtagcccagtgcccggtgctccctcatcgaggtggtaccctgttcctcgtagcccagtgcccggtgctcc

SEQ ID NO: 474804 - DNA, 201 bp, Homo sapiens
gactgtaactgttcccattttcctgaggtggggggttgaggtttggagagctcagagtcacagattcgcaatgaatggacttagaattgagtgcttgactractgcagacactaaggtgttaactctgctgcctctttatgcttgggatggtttgcagaacctgctttttgaaaacaagactatttacatgcacgtttctg

SEQ ID NO: 474805 - DNA, 201 bp, Homo sapiens
gggaggaggctctctgcaaggtagagtaagagcagtaattacttgggagaggaagcgtttaacttctgaggctgcaacacaatactatcttgttcgcggargtggctgagttagaagattagcaattaattttttatcaggtgcaaactactcttcagtttcatggaatcaaacagtcctcccacagcaagggaggggcag

SEQ ID NO: 474806 - DNA, 201 bp, Homo sapiens
agtgggaggaggctctctgcaaggtagagtaagagcagtaattacttgggagaggaagcgtttaacttctgaggctgcaacacaatactatcttgttcgcrgaggtggctgagttagaagattagcaattaattttttatcaggtgcaaactactcttcagtttcatggaatcaaacagtcctcccacagcaagggagggg

SEQ ID NO: 474807 - DNA, 201 bp, Homo sapiens
tctgccttggggttgtgttggttttccgtaaacgcatcctctcaatcctgagcattgtgagttaagagctggggtctccctttagcgcccctgagccagaygtgcagtaggcgtgtgctgagcctttgaagagtggaggaccgagcgagggcgtctctgtgccttgcagttggtggtgatgtatgggcggagcctccagtg

SEQ ID NO: 474808 - DNA, 201 bp, Homo sapiens
ctcgctcaccaggctgcggagacatcactacccattgttttgagctgtcgcccgggggacacatggggccagcatgaggaggaaggatgcgtgggtggctyggctcagggctgctgcttgtgtcctctttgtccccacctgggcatctgtccagtcatcagaaggggcaccacccccacccaccttgtcagcacctgcctc

SEQ ID NO: 474809 - DNA, 201 bp, Homo sapiens
gccacatacatgcacacatgcgcccacacgggcagccacatgcatgcacatgtgcacgcacacacagaggcagccacatgcacgcatgcacacacacacacatgcacaggcagccacatacatgcatgtacacgcatgcacagccacccacacacatgcatgctcacacgtacacaggcagccacccatgcgcatgcatgc

SEQ ID NO: 474810 - DNA, 201 bp, Homo sapiens
tcacacacacaggcagccacatacacgcatgcttgcacacatgcacaggcagccacatgcacacacacacgcacaggcagccacatacatgcacacatgcrcccacacgggcagccacatgcatgcacatgtgcacgcacacacagaggcagccacatgcacgcatgcacacacacacacatgcacaggcagccacataca

SEQ ID NO: 474811 - DNA, 201 bp, Homo sapiens
catgcccatgcacaggcagccacatacacgcatgcatggtcacacacacaggcagccacatacacgcatgcttgcacacatgcacaggcagccacatgcasacacacacgcacaggcagccacatacatgcacacatgcgcccacacgggcagccacatgcatgcacatgtgcacgcacacacagaggcagccacatgcac

SEQ ID NO: 474812 - DNA, 201 bp, Homo sapiens
acatgcacacatggacacatgcacaggaagccacatacatgcatgtatgcacacacatgcctatgcatgcacagccacccacatgcattcatgctcacacmtgcacaggcacccacatgcatgcatgcacacacatgcccatgcacaggcagccacatacacgcatgcatggtcacacacacaggcagccacatacacgca

SEQ ID NO: 474813 - DNA, 201 bp, Homo sapiens
agccgcaaccatgcatgcacacacatgcacaggcagccacatacacgcatgcttgcacacacacgcccaggcagccacacacacacgtgcacacacacacrcacaggacgccacatacatgcacacatgcacacacacacaggcagccacatacatgcacacatgcacacacacaggcagccacatgcacacatggacaca

SEQ ID NO: 474814 - DNA, 201 bp, Homo sapiens
catgcacacacacatgcataggcagccacatacacatgcatgcacacacatgcacaggcagccgcaaccatgcatgcacacacatgcacaggcagccacayacacgcatgcttgcacacacacgcccaggcagccacacacacacgtgcacacacacacacacaggacgccacatacatgcacacatgcacacacacacag

SEQ ID NO: 474815 - DNA, 201 bp, Homo sapiens
ggtggccagagacactgtaaggaagtggcccttcctctgtttggaggaggagctgggtgctggaagaccgggggaggggctgtgtgagcgctggatgagcygatgagggtttcgggggcccatgggtagggtgctcaagtgacaggaaaggtcagtggctgtctcagggcagagtctggtcgggcccagtgcgtgaggttt

SEQ ID NO: 474816 - DNA, 201 bp, Homo sapiens
cacacgtacaggcagccatatacacacatgcatgcacacacacatgcataggcagccacatacacatgcatgcacacacatgcacaggcagccgcaaccaygcatgcacacacatgcacaggcagccacatacacgcatgcttgcacacacacgcccaggcagccacacacacacgtgcacacacacacacacaggacgcc

SEQ ID NO: 474817 - DNA, 201 bp, Homo sapiens
cacacacacgtacaggcagccatatacacacatgcatgcacacacacatgcataggcagccacatacacatgcatgcacacacatgcacaggcagccgcarccatgcatgcacacacatgcacaggcagccacatacacgcatgcttgcacacacacgcccaggcagccacacacacacgtgcacacacacacacacagga

SEQ ID NO: 474818 - DNA, 201 bp, Homo sapiens
ccctttatgttgtagtagtcctatgtacttactctctatatgtggaaaaccccaccaagaaatattacaattcttgctcttaactgtcatgcctattttawaaaacataagaggcaaaaagtagtttgtggttttgcctcttccttctttcctggcgttcctgggttcccctgggatcatttctggtttggcaggacttcc

SEQ ID NO: 474819 - DNA, 201 bp, Homo sapiens
atgcataggcagccacatacatgcatgcatgcacacacatgcacaggcagccacatacatgcatgcacacacgcacaggcagctgcacacatgcacacacrtgcacaggcagccacatgcacacaatgctcacacacaggcacaggcagccccatgaacatgcatgctcatgcatgcacagccacccacacggatgaaggc

SEQ ID NO: 474820 - DNA, 201 bp, Homo sapiens
gatgcataggcagccacatacatgcatgcatgcacacacatgcacaggcagccacatacatgcatgcacacacgcacaggcagctgcacacatgcacacacatgcacaggcagccacatgcacacaatgctcacacacaggcacaggcagccccatgaacatgcatgctcatgcatgcacagccacccacacggatgaagg

SEQ ID NO: 474821 - DNA, 201 bp, Homo sapiens
ctggaacagtgcttcatcaatcatgagttccgcaagagcgtcttccataggccactgcgtgcttgctgcctggaacagtgcttcatcaatcatgagttctrcaagagcgtcttccataggccactgcgtcctcgcttgcctggaacagtgcttgatcaatcatgagttccgcaggagcgtcttcaataggccactgcgtgc

SEQ ID NO: 474822 - DNA, 201 bp, Homo sapiens
tttttggtagagacagggtttcaccatgttggccaggatggtcttgaactcctgacctcagataatctgcctgctttggcctcccagagtgctgggattayaggtgtgagccactgtgcccagccccaggttcctcttaaaatcatcccaggacacagatgggggtcaggccggcctcactcacgggagaggtcccagagg

SEQ ID NO: 474823 - DNA, 201 bp, Homo sapiens
ttccagggttgggttacgcgtggaacgtggaggcacgcggggtgcgcgtgggccctgccgctggcaggaagcagggactggtctggagcgtggcggggctrtgccatcttcggggctgtgccatcttcccttctgggtttgtggaggagccgcgagcagctcctcctgaacttttctttattaatgaatcttatctctgct

SEQ ID NO: 474824 - DNA, 201 bp, Homo sapiens
gtttttctgttttaagttgaaatgtttgagatacacgcatcatttgattcctcacttagccaacttctgggatccattacgttttttttttttttttttgkgagtggtggattatagataactttatttttattctttgtgttttcctcttttaatggattttttttaagatatcatttacccctttaagttggttttttg

SEQ ID NO: 474825 - DNA, 201 bp, Homo sapiens
gccccgtggggcccccgtgtcacccagcagtgatgggagcagcattcagactcaaccctgttgggttttttcagcatttgatgatgaacatttaaagataygttgtgaagctgagggaagtttgcggcgagcgcctggtcacccgccaccaaggctccaccacggatgttccgccgcggggcttcctgacatctctttatc

SEQ ID NO: 474826 - DNA, 201 bp, Homo sapiens
ggctaatttttgtatttttggtagagacagggtttcaccatgttggccaggatggtcttgaactcctgacctcagataatctgcctgctttggcctcccasagtgctgggattataggtgtgagccactgtgcccagccccaggttcctcttaaaatcatcccaggacacagatgggggtcaggccggcctcactcacggg

SEQ ID NO: 474827 - DNA, 201 bp, Homo sapiens
ttcccaacacccagagtctcccagcctgtggacaaggcctctctctctccctgtgtggaggttgccctggagctctcttcacagtgctcggagcttgtcaygtgcaggtttttcttggcctgttccgttccatctctgtgtatttcatggtgttggatgcttttgtcagtagtattttccagatgactttctggtgctgat

SEQ ID NO: 474828 - DNA, 201 bp, Homo sapiens
ccgcaccaagggtgagcgtgacaggcggacgatctctgcagactcctgggactgaacgataggaggaggtccctgtccttgctggggaggggccggatcayggcggcatgggccggagggaactgccctgctggcaagagccgccagagcctggggtgacccagagacaggacgggtgttggaaggatcagtgcccctgcc

SEQ ID NO: 474829 - DNA, 201 bp, Homo sapiens
ccatctgccccgcgagggaagcagcgcccaccttccttggtggtccgggaaggccggactggccccttgggtccccaccggcctcagccactgtgggctcrtccagcttcaggcaggcgcccggccactcacctgggaggctctgagaacgacagcttctgtctcgtgagtgacgtggtgcccgctttcatcctggggccc

SEQ ID NO: 474830 - DNA, 201 bp, Homo sapiens
cagtctatcttggaatgaatgcctttatcaccctggaaggaaacgtgccccatagccatcctctcccagtcccagccgtcggcagccgctgtctgtgttgwctctagactccgctacctgcagtgttgcagggagatgggctcagcggcgagtggtctctggcatctggcatctttcgctgagcgtaaggttttcacggtt

SEQ ID NO: 474831 - DNA, 201 bp, Homo sapiens
gcgtgggagaagcaagtgcagagcagtgaagcggggaggccactggggttcggcctgtggagtgttggaaacttccagacagccctccagctgccaccacytctgacaccccctgcgattacacccttagtggggggacgtccagggtggccctggggaaggtgaggcctcacaggccctgtggtggctcaggctgcccct

SEQ ID NO: 474832 - DNA, 201 bp, Homo sapiens
ggggaaaccccttataaaatcagatcttgtgagacttattcacgaccacgagaatggtatgtgggaaaccatccctgtgattcattatctcccaccgtgtscttcccacaatacatgagaatggtatgggggaaaccgccctatgattcattatctcccaccacatcactcccacaacacgtgagaacggtatgggggaaa

SEQ ID NO: 474833 - DNA, 201 bp, Homo sapiens
agatgcataggcagccacatacatgcatgcatgcacacacatgcacaggcagccacatacatgcatgcacacacgcacaggcagctgcacacatgcacacacatgcacaggcagccacatgcacacaatgctcacacacaggcacaggcagccccatgaacatgcatgctcatgcatgcacagccacccacacggatgaag

SEQ ID NO: 474834 - DNA, 201 bp, Homo sapiens
acatacatgcgtgcacacacatgtacaggcagccacatgcatgctcacatgcacaggcagccacacgcatgcacacacacgtataggcagccacatacacrcatgcatgcacacacatgcacaggcagccgcacgcatgcacacacacacataggcagtcacatagacgcatgcatgcacacacatgcacaggcagctgca

SEQ ID NO: 474835 - DNA, 201 bp, Homo sapiens
cacacatgaacaggcagccacatacatgcgtgcacacacatgtacaggcagccacatgcatgctcacatgcacaggcagccacacgcatgcacacacacgyataggcagccacatacacacatgcatgcacacacatgcacaggcagccgcacgcatgcacacacacacataggcagtcacatagacgcatgcatgcacac

SEQ ID NO: 474836 - DNA, 201 bp, Homo sapiens
gcatgcatgctcacacatgcataggcagccacatgcacgcatgcatgctcacatgtacagccacatgcatgcatgctcacacgcacaggcaaccacacacrcatgcacacacacgaacaggcagccacatacatgcatgcacacatgaacaggcagccacatacatgcgtgcacacacatgtacaggcagccacatgcatg

SEQ ID NO: 474837 - DNA, 201 bp, Homo sapiens
catgcacgcatgcatgctcacacatgcataggcagccacatgcacgcatgcatgctcacatgtacagccacatgcatgcatgctcacacgcacaggcaacyacacacacatgcacacacacgaacaggcagccacatacatgcatgcacacatgaacaggcagccacatacatgcgtgcacacacatgtacaggcagccac

SEQ ID NO: 474838 - DNA, 201 bp, Homo sapiens
tagatggggggcctttaggctgcactctggggccgtccactttgtgccggcccttcctgcacctccagggcttggctcctaattgccacttcctcgggtcytcaggacagggctgcctctgctggaccttcccctcctctcgagacgccggcacctcatggacacatgccagcctgctccttgccttcctgcccctctggc

SEQ ID NO: 474839 - DNA, 201 bp, Homo sapiens
tccacatgcacgcatgcatgctcacacatgcataggcagccacatgcacgcatgcatgctcacatgtacagccacatgcatgcatgctcacacgcacaggyaaccacacacacatgcacacacacgaacaggcagccacatacatgcatgcacacatgaacaggcagccacatacatgcgtgcacacacatgtacaggcag

SEQ ID NO: 474840 - DNA, 201 bp, Homo sapiens
gatggagcaggtgtgccctaccaccatatgtttctacaattgatttttttttggtgcaactgtcaaaaaatttatttttcctctaccacccgcaacccccmcccccccatttttcctgcttcttagtgtggttttagactctgattctgtcacttaacatatctgctgtctccatttgatgtgacctacaacctgataggc

SEQ ID NO: 474841 - DNA, 201 bp, Homo sapiens
tcacgccactgcactccagcctgggtgacagagcgaggccccaggagccggctgccgcccctgcacccactatgcgatgccctctcctctccctgctcccrctccctctggagaagccttcaagttgggccgcttcaaggaagattgattaaaatcagctgcagtctgacttaattgggaacatatgcttggagaggggct

SEQ ID NO: 474842 - DNA, 201 bp, Homo sapiens
tgcaatgtctgtcttcatctcttaaatattcttgttctgaagtctgacttgagtaatattaatatagccactcctgctttcttacaattttaatatttatrtatacctatctatatttctaatcttttaatctacctgtgtctgtatatttttaatggattttttgaagataacatctaattgaatcttgctttttttatt

SEQ ID NO: 474843 - DNA, 201 bp, Homo sapiens
ccgagatcacgccactgcactccagcctgggtgacagagcgaggccccaggagccggctgccgcccctgcacccactatgcgatgccctctcctctccctsctcccactccctctggagaagccttcaagttgggccgcttcaaggaagattgattaaaatcagctgcagtctgacttaattgggaacatatgcttggaga

SEQ ID NO: 474844 - DNA, 201 bp, Homo sapiens
gagtgcagtggcgcgatttcggctcactgcaacctctgcctccctggttcaagcgattctcctccctcagcctcctgagtacctggcattacaggggtgcrccaccacacccagctaatttttttgtacttttagtagagacggggtttcaccatgttggccaggatggtctcaatctcctgacctggtgatcctccctcc

SEQ ID NO: 474845 - DNA, 201 bp, Homo sapiens
agtttgttgtaactttttgagtttataaactttttaattttatttatttatttgagacagagtcttgttctgtcaccaggctggagtgcagtggcgcgatktcggctcactgcaacctctgcctccctggttcaagcgattctcctccctcagcctcctgagtacctggcattacaggggtgcgccaccacacccagctaa

SEQ ID NO: 474846 - DNA, 201 bp, Homo sapiens
gattacagatgtgcgccaccacgtccggctaatttttgtatttttggtagagacagggtttcaccatgttggccaggatggtcttgaactcctgacctcarataatctgcctgctttggcctcccagagtgctgggattataggtgtgagccactgtgcccagccccaggttcctcttaaaatcatcccaggacacagatg

SEQ ID NO: 474847 - DNA, 201 bp, Homo sapiens
agcctgggtgacagagtgagatcccatctctaataataataagaataaagtttgttgtaactttttgagtttataaactttttaattttatttatttatttgagacagagtcttgttctgtcaccaggctggagtgcagtggcgcgatttcggctcactgcaacctctgcctccctggttcaagcgattctcctccctcag

SEQ ID NO: 474848 - DNA, 201 bp, Homo sapiens
ggggctggtctcctcagggcagtgctgcctggtgcctgcgggtgcttggtaaacagctaggccccggctctttttttttttttttttttttttgagatggrgtcttactgtgtcacccagcgtggagtgcagtggcgcaatctcggctcactgcagcctctgcttactgggctcaagcaattctcctgcctcagcctcccg

SEQ ID NO: 474849 - DNA, 201 bp, Homo sapiens
cgtgatgtccgtagacagccaagtggttgttgacgacacagggatgtgttgttttaagaggaacacgttattgccgagagggttttcgcctccactgtctyactgacccgggggcaggtgatgtttcccccactcctgccacacccagggaggaaagggggcttagagagatgaggtgacttgtccgtgaacgcacaggca

SEQ ID NO: 474850 - DNA, 201 bp, Homo sapiens
ttatcagattatttgctttccaaatattttctcccagtctgtgtcttgtcttttcgttctttcatcaggtattttgaagagaagtttttttatgataaagyccaatttttcaatgttttctgttatatatgatcctttggatattagtccattttcatgctgctgataaagacatacccggactgagtaatttataaagaa

SEQ ID NO: 474851 - DNA, 201 bp, Homo sapiens
ctccacacctggactcaggcccgccactcagatcccgcgccgagcacccgtgatgtccgtagacagccaagtggttgttgacgacacagggatgtgttgtwttaagaggaacacgttattgccgagagggttttcgcctccactgtctcactgacccgggggcaggtgatgtttcccccactcctgccacacccagggagg

SEQ ID NO: 474852 - DNA, 201 bp, Homo sapiens
cggctgtcccatgtggggaaggtggagtcctgactcaccctctccctgggacagcctctcctctctgcgcctcactgtgcccttcctgggagcccctcccrtgaggaggtggagtcctggggttcccggaatcacagaaagccgttgcatcatgggtgggttctgcagtcagggtcagtggacgctgtcatttgtccggtc

SEQ ID NO: 474853 - DNA, 201 bp, Homo sapiens
gctgtggtccctgttagcttttctctatcccagtgctgtgttttatttccttgagatttagttaagatttcctttggaaagaagtttgtggtactcaatasagtcgtgtgcagctcccgtgttccagcgccgttccgctctgcgcctgcctgggctgtctgagtagggatgggccctccctccgcggactcgcaccctccc

SEQ ID NO: 474854 - DNA, 201 bp, Homo sapiens
ccagccccctccctgcctgctgtgcctgggccctagtgagctgtccggcgccctccctgcctgctgtgcctgggccctagtgagctgtccggcgccctccwgggtgctgttgcttgctgtctgttgggcattctgtctgtgtggtcttcctgaggctgttaccaactgtggtggcggcaggcctggggctcctactacgcc

SEQ ID NO: 474855 - DNA, 201 bp, Homo sapiens
aaaggtttaattaactcacagtttatcatggctggggaggcctcaggaaaatgacaatcatagtggaaggggaagcaaacacgtccttctttacatggtgrcaggaaggagaagtgccgagcaaaagggggaaaagtcccttataaaacagtcacctctctcgagagctcactatcacgtgagcagcagtatgggggtaac

SEQ ID NO: 474856 - DNA, 201 bp, Homo sapiens
tagcctgggtgacagagtgagatcccatctctaataataataagaataaagtttgttgtaactttttgagtttataaactttttaattttatttatttatttgagacagagtcttgttctgtcaccaggctggagtgcagtggcgcgatttcggctcactgcaacctctgcctccctggttcaagcgattctcctccctca

SEQ ID NO: 474857 - DNA, 201 bp, Homo sapiens
caccgtgcatgcggctgtgtttacatcttaacccttgaggccactggcaggctcaccgtgctgcgagctcaccatgtcgtaaccatctcgggctcaccatrccgcgggctcaccaagtcgtaactctgtcttgggctcaccatgccgcgggctcaccaagtcgtaactctgtctcgggctcaccgtgccgtgagctcactg

SEQ ID NO: 474858 - DNA, 201 bp, Homo sapiens
ctagcctgggtgacagagtgagatcccatctctaataataataagaataaagtttgttgtaactttttgagtttataaactttttaattttatttatttatttgagacagagtcttgttctgtcaccaggctggagtgcagtggcgcgatttcggctcactgcaacctctgcctccctggttcaagcgattctcctccctc

SEQ ID NO: 474859 - DNA, 201 bp, Homo sapiens
tctagcctgggtgacagagtgagatcccatctctaataataataagaataaagtttgttgtaactttttgagtttataaactttttaattttatttatttatttgagacagagtcttgttctgtcaccaggctggagtgcagtggcgcgatttcggctcactgcaacctctgcctccctggttcaagcgattctcctccct

SEQ ID NO: 474860 - DNA, 201 bp, Homo sapiens
ttgtttccctgcctctctgcagaggcagctattgattcccattctcaggcggctcctcagatacacaaggagcctgcgtctgtcgtgccggtctccaggcyggagctgggggcttcgatggcagagacggctcctctctgtggtgagtgggggcccttccccggtgttccctcttagcaaggagcgaatgtggatgcctga

SEQ ID NO: 474861 - DNA, 201 bp, Homo sapiens
gcgccaccgcactctagcctgggtgacagagtgagatcccatctctaataataataagaataaagtttgttgtaactttttgagtttataaactttttaattttatttatttatttgagacagagtcttgttctgtcaccaggctggagtgcagtggcgcgatttcggctcactgcaacctctgcctccctggttcaagcg

SEQ ID NO: 474862 - DNA, 201 bp, Homo sapiens
gcagcgcggcccgcggccctcgcctcccagcacgccacgattgcggcgttcctcctcctcaccgcggttcctgcctggggagagatttgcagacgctcgartcgctgttccctttgaggtcacacagtttttttctgttttcaccattttttttgccttcagttttcagcagtttcgtttggatgtgtctgggtgtggatt

SEQ ID NO: 474863 - DNA, 201 bp, Homo sapiens
tatgaaaggccaccacctgtatgatgacattaatatgaagtgcccagaataggcaaagtcccgaactcaaagcagggcattcctgagacactgccgtggcmtcatgtgctcactgtgggcagaaatatcagagtggccactgccctgggagaaccaggtggccgagaggcaatggcggctgcaggcagggacagctacatg

SEQ ID NO: 474864 - DNA, 201 bp, Homo sapiens
cgcgccaccgcactctagcctgggtgacagagtgagatcccatctctaataataataagaataaagtttgttgtaactttttgagtttataaactttttaattttatttatttatttgagacagagtcttgttctgtcaccaggctggagtgcagtggcgcgatttcggctcactgcaacctctgcctccctggttcaagc

SEQ ID NO: 474865 - DNA, 201 bp, Homo sapiens
actcgaggctggggcggtgttccctggaggcaagcggggagcctctctggggttcagtggagctcagactgccatggtgggacggagcggggcgggggctrtggtgggaataggtggctcagtgtgggccagaaggttggagggctggcgccgacacggaaccagggtagcacgagaccaccgtgctggtaaccagatggc

SEQ ID NO: 474866 - DNA, 201 bp, Homo sapiens
gtttttgcttattttgtgtatactgtcaaatttattggcataaaatcattcataataattcattattatccttgtattacccatagcatctgtagtgccawcccttcttccatttctgattttggcaatacatatcatctcttttttcgtcatcactctaagttttatcgatttttttatctctctcctttcagatctgtc

SEQ ID NO: 474867 - DNA, 201 bp, Homo sapiens
catcgggtcagtttctaaaccatcatggcaatctctgtcttttcattgctaccattttattatttgtttgtgtgtctcctccatttttgtttttccttttyatgcttcctgctttctgttgagttacttgaatggtttttagtatttcattttaatttagcagatgggcatctgactatttctcagtctgatgttttgagt

SEQ ID NO: 474868 - DNA, 201 bp, Homo sapiens
tcctgcctcagcctcccgagtagctgggactacaggcgcccgccaccacgcctggctaattttttgtatttttttagtagagatggggtttcactgtgttrgccaggatggtctcgatttcctgacctcgtgatccacccgcctcggcctcccaaagtgccaggattacaggcgtgagccactgcgcccggctgagttctt

SEQ ID NO: 474869 - DNA, 201 bp, Homo sapiens
gcctgtggctcctgggacggcactgcttctacaccctcccgccagctgcctttaccgtagtgtttgcgtgctgtaaatatttctgtccttttacttgcagygtacctgtacccgttctttgagtttctgtatacatgatgtcatcgggtcagtttctaaaccatcatggcaatctctgtcttttcattgctaccattttat

SEQ ID NO: 474870 - DNA, 201 bp, Homo sapiens
aggcgttgacagtggacctgaccgctggactgaggcgttgatgtggacaagaccgctggtgttgacggtggacctgaccgccggactgaggcgtcgacggyggacctgaccgccggattgaggcgtgctctgccgggtgcctcgtccgcgaagctgtttgcactttctccagtctcttccttggaagcgaatccctcaggg

SEQ ID NO: 474871 - DNA, 201 bp, Homo sapiens
gatagaattcactagtgaggtcatctgggcttggcattttctctgtgggaagctttttaaattatgaatttaatttaatagatatagaactactcagatgwtttttgagtcagttttggtcatttgtatcttcttgagtttttgcttattttgtgtatactgtcaaatttattggcataaaatcattcataataattcatt

SEQ ID NO: 474872 - DNA, 201 bp, Homo sapiens
ccctgctagcctcctggatccttgtctcctgctcccgcgcgcctcctgcagaacggcactgctttttgtctcgtgtacctgctccaggccaccagttagarttcactgctccccgctgggtcgcagccctcccaaccgctggctcagccaagcccgtgcacttgctctcttcctgagagacacatggaacgtgtcacctgt

SEQ ID NO: 474873 - DNA, 201 bp, Homo sapiens
tgaacgtttaaagcattcaaaagatcagcttttccaaagagtgaggaaacagggagagaaaattatggcatttgtttgaaaggttctgagggcttttttttagcttgaacagttcaaacagcgcctcttgttaatcaggaatgttctggcatccctggggtggtcacacgggcttaattggaacccaggctgctttgaagc

SEQ ID NO: 474874 - DNA, 201 bp, Homo sapiens
gaacctgggaggtggaggttgcagtgagccgagatcgtgccactgcactccaacctgggtaacagagtgagactgtctcaaaaaaaaaaaaaaaaaaaaaagtaaaaattaaaattatatagtaaaattaacttttttcttataggatacagctctatgaactctaatcaccctgtaatcagagtgcaaaataacatcaac

SEQ ID NO: 474875 - DNA, 201 bp, Homo sapiens
gtttgccctgtgcttctccgaggaatccggctgggtcttccactggggagcccttgggaggggcctctgatctttcctctccagcctgggtgactctggcktgggggcctgtgctgccagctcctgggggctgagcagggaagtgtgtcgccaatgcaggactcctcttgcggtggggcaccctgtccgtgccttacctaa

SEQ ID NO: 474876 - DNA, 201 bp, Homo sapiens
gaatttgtgtgagatatttcttccctaaatatctgatagaattcactagtgaggtcatctgggcttggcattttctctgtgggaagctttttaaattatgmatttaatttaatagatatagaactactcagatgttttttgagtcagttttggtcatttgtatcttcttgagtttttgcttattttgtgtatactgtcaaa

SEQ ID NO: 474877 - DNA, 201 bp, Homo sapiens
ggtcaaggatggcaaaatcaatgggaaaataaacaggccgaatgtgcttcattacccaggtagcgctgaagcagctggagtggtcgtgcggcgcacaggcrtgggcggaggctgggccgagtgcaggcgccgggctccatcaattgtcatgggcactagagcctcagcttcagagctgctaattgggctatcgggtgattc

SEQ ID NO: 474878 - DNA, 201 bp, Homo sapiens
ggctggtcgagggagtgaaggggtgcatgatggtgtcctgggctgcagtgatgcagggagcgccccccgcctcctgtgtggggtgggttccggcccgatgyggggatttttggcagtccctgagacccacagtccctccacaggctggtgtcctccagctgagatgtgtcctgaggtttcccgggtcgcacgatggcgttc

SEQ ID NO: 474879 - DNA, 201 bp, Homo sapiens
ttttcttgtaatgtgtttgtttgccttggtatcaggatgatgctagcctcaaaaatgaattgggaagggttccctcctcctcttttttctggaagaatttstgtgagatatttcttccctaaatatctgatagaattcactagtgaggtcatctgggcttggcattttctctgtgggaagctttttaaattatgaatttaa

SEQ ID NO: 474880 - DNA, 201 bp, Homo sapiens
gtccactgcttgctttctgtgcctggcagggtccccgggtgcgctgtcattcctggcagtcctggagggtgcccgcctgtgggtggcagcctggaggtacrgtggcagacctgctggccgggggtcaccggctatgagggtggggcccacgcctgggccagcgtcctctgctgtcgggctgtaccatgggtctgtgccccc

SEQ ID NO: 474881 - DNA, 201 bp, Homo sapiens
ggaggacagagcccggaagagagaagtcctggggcctgctggctggtcgagggagtgaaggggtgcatgatggtgtcctgggctgcagtgatgcagggagygccccccgcctcctgtgtggggtgggttccggcccgatgcggggatttttggcagtccctgagacccacagtccctccacaggctggtgtcctccagctg

SEQ ID NO: 474882 - DNA, 201 bp, Homo sapiens
ttatacaattgatagattcaatttcctaatttttagtgagaatttttgcatctatgatcttgtgcaatattcatctgtggtttagtttttcttgtaatgtgtttgtttgccttggtatcaggatgatgctagcctcaaaaatgaattgggaagggttccctcctcctcttttttctggaagaatttgtgtgagatatttct

SEQ ID NO: 474883 - DNA, 201 bp, Homo sapiens
ttgaaagctgcacagagctcacccagccagcgcctgccaggtggtgggccagggagcggctcctccgtgtgtaattccagggcgagtgtcttctcactggmgcagagtgtgcagtttctgcccagcaggggaactcatggctcatcatggaggccgtgtctcaagggccgtctggtaccagcagagttgaagcgaccatct

SEQ ID NO: 474884 - DNA, 201 bp, Homo sapiens
ctctgacgctgaacagaggttgggagaggcggaggagccgcatctgggcttgtcctcttggcagcacccagcgcctacacctcacatggaaatggggctcrccagtgagtggagactcagatcgtgaggcctcaggcgggaagggccccagagccacctggtccagctcgtcctggtgaatgctgtggcggggcgcctgcc

SEQ ID NO: 474885 - DNA, 201 bp, Homo sapiens
gtgcaagagggcccctttgctaatgtgcacagctctttatgccttttttcctatgcctttttggattggagcaagagattttttttttccaagtaaagaayaatttatgttcctaaatactttttttccttgacatgacgaagttgagcaaggtggctatagaactttttttcttaattttattgcacaagtaatgttctt

SEQ ID NO: 474886 - DNA, 201 bp, Homo sapiens
cggcatcaccatcacccggtcaggaaacagcgtgatcagctgagtccctcctgcccccccacttcctgttcctggaactcccacccagttcccatcgcccygggtcacttttgccgtgtttggtctctatgtagatgggtcatgtggtttcgttggttggagtccttcccccttgctgctttgcacctgcgagctgtgctc

SEQ ID NO: 474887 - DNA, 201 bp, Homo sapiens
gtgctgacgcgtcggacggctgctgcgaccagccctccctgtagtcctgttgctggccagagaccgtggagctggattctggcctcctgcaggcatctctmtgtccattcagcaggtgccacgtccccccacatatgcagggtgtccggaggatcactgacacgggggccaatgtccctccttccgccaaggttccgctgg

SEQ ID NO: 474888 - DNA, 201 bp, Homo sapiens
cctgcagtgcccagacttggacgtgagatggtgcctgtggcatgtgcagccgcccgctcctctgtgctcagcttagaacctcctcgtggggcctcctcagygggggtgggtgggtaccaggcctgtacattttgtggccaattagagggagagagagaaggggggcatggcatggagatgtctgggtgagcgggcgtctgt

SEQ ID NO: 474889 - DNA, 201 bp, Homo sapiens
cttgtgcccttactagtggcctgacctctgcgctgtggagaagggtggatattgtcgccaactctcagacttcttgtgtgtgttcagaaagtacccaaackgattcaaaggaataattagcgtatcctgtaagatatgaatcttaattcctaaattacatatttagcagattgtccaaaatagcacttgtaatggcaacat

SEQ ID NO: 474890 - DNA, 201 bp, Homo sapiens
cttttctgaactgaagcctgaatgaccaatggagacagctgctcagcccccagggcagtgcccagcgtgggctccagctttggctccgcggcgggtgttcraggggtcccctcaacagtgctggcatcgcagaggtggccctgtgctgacgcgtcggacggctgctgcgaccagccctccctgtagtcctgttgctggcca

SEQ ID NO: 474891 - DNA, 201 bp, Homo sapiens
ggctcccgtgctgcttctccgtgcaagcctctctgagagctcacagtccacccctgtggactcctccgcgtgcccagagcctcctgggctcctcctccccrccccgcttggttcaagggtatgtcctttactccagatggtggcctccgtccttctccacaggctgctgttaatacgagaagagggcgccggaatgcttcc

SEQ ID NO: 474892 - DNA, 201 bp, Homo sapiens
tctgcctgtgcctcttggtgggcctggttctgcaatgccctggcccaacaggcacagcccgagctgcctcgctctcctccgtgagccatttccttcagccrggagaggtattgattgaattttgacgccggacgatctataaatatgcataaggactggtggttatttaactgtgttttccattcccctcttgtcgctgct

SEQ ID NO: 474893 - DNA, 201 bp, Homo sapiens
gcctgttattctgaggtctgtggtttctaatgaagcctgacccatggggacagtgtcagtgagcacctgcctggtggtacacctctggccaccgggactcygttaacgaccctcccgtgggggctgtgaggtcgtgcctgccactgcccgggaggctccagctggaccgagtgtgtgtggcgtatccgcagcctccctcat

SEQ ID NO: 474894 - DNA, 201 bp, Homo sapiens
caggttgcttcatctcagtcaaacatacagttgagttccgtaaatgagaccaaaatctgtttctgtgagataaaattgataaacctctagccagactaatmgtaactaagaggacacaaatgaacgctcctgggcgtgagagaagtgacagtggtgccgccattttccacgtttcgttagagccgtcctggcgggtgtgaa

SEQ ID NO: 474895 - DNA, 201 bp, Homo sapiens
tgtgttttatttccttgagatttagttaagatttcctttggaaagaagtttgtggtactcaatagagtcgtgtgcagctcccgtgttccagcgccgttccrctctgcgcctgcctgggctgtctgagtagggatgggccctccctccgcggactcgcaccctccccggtgtggcctctcttctttcctggctgtgtccttt

SEQ ID NO: 474896 - DNA, 201 bp, Homo sapiens
accacacggagccgtgatttaaagcacttgtgaacgttcccacctgaattcagtgattcaagagtagattttacagcccttgagtattaaattggcccatsagtagtttaaaattgaactgggtcccaaagtagcctcataatatgtgtttcccatgagctttgtgcctgctttttattttgtcttgcgtttttggttatg

SEQ ID NO: 474897 - DNA, 201 bp, Homo sapiens
cggtttttatggctgcctctcagtgccgcccgccccccgtccagggagagtggcctcaggtgtcgggcgccgcgccgtcctgcttccgctgccgctgccctgactgcggggtcaccttccctccacagcccctcagggccctcccagagccggcgtctgctgatccagcctcccctgtaccccagggggctctttacacct

SEQ ID NO: 474898 - DNA, 201 bp, Homo sapiens
ccggtttttatggctgcctctcagtgccgcccgccccccgtccagggagagtggcctcaggtgtcgggcgccgcgccgtcctgcttccgctgccgctgccctgactgcggggtcaccttccctccacagcccctcagggccctcccagagccggcgtctgctgatccagcctcccctgtaccccagggggctctttacacc

SEQ ID NO: 474899 - DNA, 201 bp, Homo sapiens
aaaaagaatatctgtaaatttaaaacaaaaattagcaagtaagatgaggctagagagagctgtcccaggggtcagattgagacaaaatgcagttggggccrgcttcctcctgagtcagcctcactgactgcttggagaagagagggaccacgctgagcgtcaggaggcagcgccgcggcgggtctacgaggcacatctttc

SEQ ID NO: 474900 - DNA, 201 bp, Homo sapiens
caagtccatctaattccctgttttgctgataggaacgctggaggcctagagaggaaaggaacccgtctgactgctcaggctgagtagtggccccagagccrtgactccactgtgctgtctgtttcccacgttgccctgctctcctttctccctgtcctgtcaaataaactgcactcaaaatagagccatgcggcacagggc

SEQ ID NO: 474901 - DNA, 201 bp, Homo sapiens
ggtcgggccagggtggaagcctggctgccccagcctctccgcccagggagcggggcattgccccatctcagcctcagggatcctgagcctggactcccccyagtgcaaggtccattgagggggacccttggaggggcagtggtagctcctggggctctgagtctaagggtggcagagacaccagccccaagccaggtcctc

SEQ ID NO: 474902 - DNA, 201 bp, Homo sapiens
gacccagggcagccttgagctgtcctcagtgcagtgcccttgtgctcgggatgctcacggcatcccttcctgaggccgagagagagcacttcagagaatcytgagatgtgagcggaggtcaggccccggggtgatgcccaggatgatgcccaggggatccttattccctgaggccggcagccatgtgggtgcagtcgccag

SEQ ID NO: 474903 - DNA, 201 bp, Homo sapiens
caagggcttcagggaacctgggatgacgatcagatatgtatttcttcttatcccacagcccggctcttctctggtttcgctcgtggctgtgaggggccatycaggctccggcatcacacccagaggcggaaatgagaggcctcttttttggatcttttctgtacaagaaagcgtttcctaggacccccactgccagcaagg

SEQ ID NO: 474904 - DNA, 201 bp, Homo sapiens
ggatctcacttgctcacgctcaccggctccagggcacccagcgtgcagggagagcagaggggtaggcctcgggctccaggccaaagttggggaaagagagwgtcagacctgggcttgggggatgactctgatgtcgtcctcatgggggatggttgaggaaagggtggggtgtggctcactcgtctggccctcacccatgtg

SEQ ID NO: 474905 - DNA, 201 bp, Homo sapiens
cccgaaagaaaaccagtgcttcctaaacagaaacggacaatcgtcagttggaaaagatgtgtggccttcaaacaaacaccctggaccagggaggaactccytgttcccaggacagacgggaaagtcagaggcctttaaaacatcatttccaaaatgaaatcacagaaagatacctgatggttgtgagcagattatctgtat

SEQ ID NO: 474906 - DNA, 201 bp, Homo sapiens
aacagtcagttgtcaaaaaaaaaaacctcgtttaggggcagcaggcccaggaaagagaagcgagggacagacaggaggcgaagcgttctgtagttggttgkgggggccagggcatccggcccaggagcaggcgtgggccgagcacagggacgccgcctcatgtgcactcagcactgtggcgtggcgaggcgtggccttgcg

SEQ ID NO: 474907 - DNA, 201 bp, Homo sapiens
ggccgtgctgtgcgggggcttgttccagaccctccccaggactgaaatgctgtctcatctttctcctcacagaggccctcagtggaccgcgaggtctccccgcccaggccttgtgacggccgtgccgctggccccgggcctgccggtagctgcctttctgcagccagactgttaacaggctctctgcggaccctcaccagt

SEQ ID NO: 474908 - DNA, 201 bp, Homo sapiens
ctggaccagggaggaactccttgttcccaggacagacgggaaagtcagaggcctttaaaacatcatttccaaaatgaaatcacagaaagatacctgatggwtgtgagcagattatctgtattccattcttggggccaaggagcaaatcagctgcagaacatgttttgaaatgtctctttgtaatgaatgtggtcaatgaaa

SEQ ID NO: 474909 - DNA, 201 bp, Homo sapiens
tagttggttgtgggggccagggcatccggcccaggagcaggcgtgggccgagcacagggacgccgcctcatgtgcactcagcactgtggcgtggcgaggcrtggccttgcgttgggggtggtgaggcgtggccttgcgtgggtggagggtggcgaggcgtggccttgtgtggggggtggctggggctgggccgggcagccc

SEQ ID NO: 474910 - DNA, 201 bp, Homo sapiens
gagtctcattctgttgcccaggctggagtgcagtggcgcgatcttggctcactgcaacctctgcctcccgggctcaagcgattctcctgcctcagcctccygagtagctgggattacaggcgcccgccaccatgcctggctttttttgtatttttagtagagacggggttttgccatgttggccaggctggtctggaactc

SEQ ID NO: 474911 - DNA, 201 bp, Homo sapiens
ttgggcagtgggcagcagccaggttatcgggacgtgctcaggcccaacaggacccccagagccgcacctgccccccacagagtagagccggcccgggagcrgccttggtcacatctaatcccaccagccgccggcagtggagagctgtgcctggcccagagatttgggcatcacatccaggctgcaaacgcacggggacca

SEQ ID NO: 474912 - DNA, 201 bp, Homo sapiens
gcagagggtgagggctcacccaggagcaggtgctgtggggaggcctggtgcacctggaccaggggcctcacttcctggggctcagggccatcggccaggcygctgggcatgacctgtcatctgggaaacggtgcggcagccccagtgtggccccgatcctctctatagagtgtttgagtcccaggcctgcagcaccccgtg

SEQ ID NO: 474913 - DNA, 201 bp, Homo sapiens
agcaaggcaccagcattgtaatgtctggagtgtggcaccccctccaggaagcaggtgcttcacgctcagaagcgcctggctgtggcatgcttcttactatytgtcagaaggctcaaggtcaaaaggccgtgctttctgccatagagtttcaagagtaaaggagaacgcggagatctagtcagctgggattcctagctctgc

SEQ ID NO: 474914 - DNA, 201 bp, Homo sapiens
acggaagcagctcctgaggccctgctgtcccccgagttcctcccatgggggctcgcaggctgcctcccgcctcctgtcccgcaccccctgtctttcttggyatatactcttgtttacaagtctctctcgaagtgatactctcagataattattatgtttctgaaacgccttggttttgtgttgttggggaaacagagcaac

SEQ ID NO: 474915 - DNA, 201 bp, Homo sapiens
aaactctgagtgacagaagaggccggtccccagagatgctcctgggcctcctcacactgcctttcagagctgggctgggcctgggttgtgcttggtcccarggaaggctggcggcatcggcctgtgtcgattcttagtggccatatggtgcacaatcattgtgcctggcctgggctgtcaggtcaggtgtccccgctgccc

SEQ ID NO: 474916 - DNA, 201 bp, Homo sapiens
gttctgaggccccagcaactccaccctaggctttctcattcctagcaggcgtctgctcccctgacgcccacagtgccggctgctcttgcacgtttcccggmgtgcaggggtctttggtgggcgtgagattgtaattgcaggtgggttcctgcgggttcctcctctccgcaggtgggttcctgtgggtccgctcctctctgc

SEQ ID NO: 474917 - DNA, 201 bp, Homo sapiens
cagcagtgaatcccttaggggactagagagcgttgggccgcgtggtcctgatcatggccacgcttcccaaatgcctggctgcttgtgagttatatggcgawaagagcctgaaaatagagatccttggactcacctccaaaggctcagattcaggtctctgctgaggccgttgctcccttcatgagtgtactttcccttggg

SEQ ID NO: 474918 - DNA, 201 bp, Homo sapiens
catttatcaggctgagaaagttcccttctgttctacttgctaagagtcgaattttgtcagtttttttttttacatctattgagatgttcatatgaacttamttattctgttgatattgtaagtaatactggttgattttttttaatgttaaacctaacttgcattcctaggataaaccgcactgggtccctttttatacaa

SEQ ID NO: 474919 - DNA, 201 bp, Homo sapiens
gcaagaagcttctggaactctcagtgtaggacttactgctttccagggttgcgaggagcctgcttgttagctttatgcgggtttgctcaggtgctgcactrgaattcctgtcttacagcagagagagtgtctgtggggctgcttgaggattcagcgggatgacgttggtaacgtgcctggtgcagcagctctcggcagtcc

SEQ ID NO: 474920 - DNA, 201 bp, Homo sapiens
atttccttatcttgcccttcagtactggctaggaatttcagtacagtgctgaataagaatggggggggggacatttttaccttgtttctgatgctagcgaraaagcatccagtattttgacattagtatgctgttaaatatgagtttttcatagataccatttatcaggctgagaaagttcccttctgttctacttgctaa

SEQ ID NO: 474921 - DNA, 201 bp, Homo sapiens
agcatccggtgtgtgcgttcgcggtgtgtgcgtttgcggtgtgtgcaggtccactccgcacaggcctgctcctgctgggccacgccagggttttgggcttrgctgcccccacagggctgtgtgggctgtgtgttgcgttttccagcgtgcggctgctggccccaacctggcgtcagacagttgctgtggtgctttctgcag

SEQ ID NO: 474922 - DNA, 201 bp, Homo sapiens
tatgtcttccttttcaacttttatgccttatatttccttatcttgcccttcagtactggctaggaatttcagtacagtgctgaataagaatggggggggggacatttttaccttgtttctgatgctagcgagaaagcatccagtattttgacattagtatgctgttaaatatgagtttttcatagataccatttatcaggc

SEQ ID NO: 474923 - DNA, 201 bp, Homo sapiens
acattgccttgtgggtctccacagcgggaagcatccggtgtgtgcgttcgcggtgtgtgcgtttgcggtgtgtgcaggtccactccgcacaggcctgctcstgctgggccacgccagggttttgggcttagctgcccccacagggctgtgtgggctgtgtgttgcgttttccagcgtgcggctgctggccccaacctggcg

SEQ ID NO: 474924 - DNA, 201 bp, Homo sapiens
gtcttccgtaggccactgcgtccttgctttctggaacggtgcctgctgctgggtcctccttcccactgcaggacgtacagcgaggctggagcctgagacagggttccctgcaccctgaggctcacgtagcccggccgacctggttctgcatgggtatagctcaggccccggggaagggcggaagtggacaggcagtgccct

SEQ ID NO: 474925 - DNA, 201 bp, Homo sapiens
cgtcttccgtaggccactgcgtccttgctttctggaacggtgcctgctgctgggtcctccttcccactgcaggacgtacagcgaggctggagcctgagacagggttccctgcaccctgaggctcacgtagcccggccgacctggttctgcatgggtatagctcaggccccggggaagggcggaagtggacaggcagtgccc

SEQ ID NO: 474926 - DNA, 201 bp, Homo sapiens
ggctgtgtgaatcgcagcgctgcttttcgttgctgagtgatgctccaggcacggctgctctgggacttgtttattcgttcactggttgaaggacatctgtrttgtttctgggtttggtgaaatggagtaaagctgctggaaatgttggctttgtatgatctaaactcttacttttccttgagcacatacttaggagtggga

SEQ ID NO: 474927 - DNA, 201 bp, Homo sapiens
cctggaacagtgcttcatcaatcatgagttccgcaagagcgtcttccataggccactgcgtgcttgctgcctggaacagtgcttcatcaatcatgagttcygcaagagcgtcttccataggccactgcgtcctcgcttgcctggaacagtgcttgatcaatcatgagttccgcaggagcgtcttcaataggccactgcgtg

SEQ ID NO: 474928 - DNA, 201 bp, Homo sapiens
ggggctgacttgcggccccaccaccccagactcccctccctggccaccccagcatgctttctgtctggtgattttgccttttccagaacgtcatacaaatrtggcatctttggctcatggaggtgcatttgggactcaccgcgtggctgtgtgaatcgcagcgctgcttttcgttgctgagtgatgctccaggcacggctg

SEQ ID NO: 474929 - DNA, 201 bp, Homo sapiens
gctgtgcaggggctggtctcctcagggcagtgctgcctggtgcctgcgggtgcttggtaaacagctaggccccggctctttttttttttttttttttttttgagatggagtcttactgtgtcacccagcgtggagtgcagtggcgcaatctcggctcactgcagcctctgcttactgggctcaagcaattctcctgcctca

SEQ ID NO: 474930 - DNA, 201 bp, Homo sapiens
ctgcagtgatgcagggagcgccccccgcctcctgtgtggggtgggttccggcccgatgcggggatttttggcagtccctgagacccacagtccctccacakgctggtgtcctccagctgagatgtgtcctgaggtttcccgggtcgcacgatggcgttctggaaattggagaagtgttggtggagtgggactgatacgtgg

SEQ ID NO: 474931 - DNA, 201 bp, Homo sapiens
tccttggcctaccgttcccagtggaagtggcgttttctcagcaccgtgggtgccgttgtgtttcccactgcctggtgttgtgttctttgtttgtggttccyttaggtttaccgcttagagctggtgtttcattttgagtctttttcattctggttgattaaaaaaaactgtctatacagcctcatttgcccttctgctgtg

SEQ ID NO: 474932 - DNA, 201 bp, Homo sapiens
tcttgggccctcaggtggggtgggtgtggccgcccctggagtgctggcttctccagatatctggttctggtcagggggctgtgaggtgcgcttggtgcagygctgggctggaggtttggctgcttttcaacctgtgttttttctcttttttagcccatataatttctgttccttattcatcgtacgcagcaccgtttaagc

SEQ ID NO: 474933 - DNA, 201 bp, Homo sapiens
tagggacacagaggccgccccaccagatgtcaggtctagggacacagaggccgccccgcaggatgtcacatctagggagacagaggccgccccgccagatrtcaggtctagggacacagaggccgccccgcaggatgtcaggtctagggacacagaggccgccccgccagatgtcaggtctagggacacagaggctgcccc

SEQ ID NO: 474934 - DNA, 201 bp, Homo sapiens
agctgtgcaggggctggtctcctcagggcagtgctgcctggtgcctgcgggtgcttggtaaacagctaggccccggctctttttttttttttttttttttttgagatggagtcttactgtgtcacccagcgtggagtgcagtggcgcaatctcggctcactgcagcctctgcttactgggctcaagcaattctcctgcctc

SEQ ID NO: 474935 - DNA, 201 bp, Homo sapiens
ctctcctggtgcccacacctgccgcctgcctcacctctcccaaacaggaggagtcacctctgaccccaactgcttccttttaccagagtttctcagctcaygttccccaaaaggataggttaagttttccttttgagccacacatgcccccatttgctgtctgtctctcagatggccatccttcatccagtcgacagggct

SEQ ID NO: 474936 - DNA, 201 bp, Homo sapiens
tggtgcccgtggatggccggctgtggctgtgggtgtccgcacctcctgctgcctgggttctcaccctcatagcttctctaggtgtgagaagcactttctcwttcactgcctggctcccagcttgggttccttggcattctcggacccattgttcctcggccccattgctttctcagtggtgtggactgagatgaattggag

SEQ ID NO: 474937 - DNA, 201 bp, Homo sapiens
caccaggttcctgacgtctggaccttggtctttcctaccggtcggtgtggtcgggcccgctcccccgtgtgcagctgctcctccgtggcacagcacgaagyagcttcccaagaggctgtgtgtccattgccctcaggagaatcccctctggagcaagtgtgctgggctgtccctgctgccctctccttgccccttgggtgc

SEQ ID NO: 474938 - DNA, 201 bp, Homo sapiens
tcggctcactgcaacctctgcctgccaggttcaagcgattctcctgcctcagcctcctgagtagctaggattacaggcgcctgccaccacacccggctaaktttttatttttagtagagatggggttttaccatgttgaccaggctggtctcgaactcctgacttcaggcaatccacctgcctgtaatacaggcatgagcc

SEQ ID NO: 474939 - DNA, 201 bp, Homo sapiens
ccctctgtgggctggcatctccgtgcagggcctgcagtctctgcagtggccacccattcttatctctcctggtgcccacacctgccgcctgcctcacctcwcccaaacaggaggagtcacctctgaccccaactgcttccttttaccagagtttctcagctcatgttccccaaaaggataggttaagttttccttttgagc

SEQ ID NO: 474940 - DNA, 201 bp, Homo sapiens
cgccccacacactcctggcttaccgcctgcagggaaggtgcttgcgactcctctgtgttgctagggatgttggccctgcctccttccacgcctcccggtgygctgccatcctcaggccctccggctgtcccaggcagccaggtgctgagtgatgctgtatgtgggtgcccttcctgtccttgggagccaggctgtggggcc

SEQ ID NO: 474941 - DNA, 201 bp, Homo sapiens
ggtagtgaacgctgttctcgccatctgaggagcttctcagggtgcggctccactgccctgttcctcgtagcccagtgcccggtgctccctcttcgaggcgktgccctgttcctcgtagcccagtgcccggtgctccctcttcgaggcggtgccctgttcctcgtagcccagtgcccggtgctccctcatcgaggtggtacc

SEQ ID NO: 474942 - DNA, 201 bp, Homo sapiens
caggggccaccacaggatgtcaggtctagggagacagaggccgccccgcaggatgtcacatctagggagacagaggccgccccgccagatgtcaggtctarggacacagaggccgccccgcaggatgtcaggtctagggaacagaggccgccccgcaggatgtcatgtctagggacacagaggccgccccaccagatgtca

SEQ ID NO: 474943 - DNA, 201 bp, Homo sapiens
cactccacacctggactcaggcccgccactcagatcccgcgccgagcacccgtgatgtccgtagacagccaagtggttgttgacgacacagggatgtgttkttttaagaggaacacgttattgccgagagggttttcgcctccactgtctcactgacccgggggcaggtgatgtttcccccactcctgccacacccaggga

SEQ ID NO: 474944 - DNA, 201 bp, Homo sapiens
ggaggctgaggcaggacaatggcttgggcctgggaggtcaaggccacagtgagctgtgatcgcacccctgttcgctaccctgggcaacatagtgagacctygtctcaaaaaaacaaaccaaaaactcaacacgatgtgatctcgggttctggaagtcacacgtttccctgggctaaaggccaggggtcatcagggccggtt

SEQ ID NO: 474945 - DNA, 201 bp, Homo sapiens
acctggtccccagggagagctggagggcctgatctgaggatggagagcatgaactggggctcctccacctggggcattgctagggatgccttgggcgcatsctgggaggaggtggagtgaggaggatgctgagggcggctttcagggaataaggagctcctggttggatgcttggaaggaggggagatcccagatcagagt

SEQ ID NO: 474946 - DNA, 201 bp, Homo sapiens
ttatcatggccagtcagtggcagcgtcagctgggtgtcctcagcccacgctgctgtaccccaagaaggcagtagacacgtgataccagtgggctgggggcrtcttctcagctggtgccctctccacgtccttctgcgggggcgccttgcccccctgccccatgcacactctccctgtgtgcagagtgggtcttccttcctg

SEQ ID NO: 474947 - DNA, 201 bp, Homo sapiens
tttgggtgggcagaggaggcctctctgggggacgtggaagggagaaggccgtggcgtgctctgtgtgaattggctgtggtcagagggagggcttatgaccrgccctgggtgtgtgtgagggctcagggcctgggccaggccgcaggacatctgctcacaggctcttggtagctttgttccagtgatggaagacactccaga

SEQ ID NO: 474948 - DNA, 201 bp, Homo sapiens
agacaggggccaccacaggatgtcaggtctagggagacagaggccgccccgcaggatgtcacatctagggagacagaggccgccccgccagatgtcaggtstaaggacacagaggccgccccgcaggatgtcaggtctagggaacagaggccgccccgcaggatgtcatgtctagggacacagaggccgccccaccagatg

SEQ ID NO: 474949 - DNA, 201 bp, Homo sapiens
tgcctaggtctttcacggtggtctggcctcctccgccctctctttctggcaccagggctgcgtttcggggactctaggcatggatggccctgccaggtttyagtagtgctgtttgggagatgagaggtggctgagctgctgatgacaaatgcgattcagtgacagaaaatgcagaataattagtctgggaccagagaactc

SEQ ID NO: 474950 - DNA, 201 bp, Homo sapiens
gggaggtgttgggcacggctgcccctgtggttggagggctctggaatagcaagccctgcagcttcagtcctccctatgatgggggcctggtcgcatggggrctgagagccggcagggatctgggggcctagggatgtggccagcaagtatccaggctgagagcccatcacgtgacagtgctcccgagggctggggtctgtg

SEQ ID NO: 474951 - DNA, 201 bp, Homo sapiens
agcacctgcctgtaatcccagctactctggaggctgaggcaggacaatggcttgggcctgggaggtcaaggccacagtgagctgtgatcgcacccctgttygctaccctgggcaacatagtgagaccttgtctcaaaaaaacaaaccaaaaactcaacacgatgtgatctcgggttctggaagtcacacgtttccctgggc

SEQ ID NO: 474952 - DNA, 201 bp, Homo sapiens
accctggctgagccccaggagagagtggcctggtcaccctcttccccatgtagggcttcttatgtcttaggagaggaggctgggcaggctggctggggtgrgtcagtgaaaccatgggaagaccctgtggaacgaggtccttatgtgtcacacaggcctgggcacatgtgacatgtgcagcacacgggttcacgcaggctg

SEQ ID NO: 474953 - DNA, 201 bp, Homo sapiens
tgtcctaggccaccctcaccccagctcctgcttgcacacggcgcccctagagcagggtctgcaggccgggctgcttttctagagctctctgcctctccccygccttgtggacccatcagggtcctcaggcaagaggtttccaggcagatgcaggtggagctccgggctccgctttggtgcctgtgttggcgctgccccatc

SEQ ID NO: 474954 - DNA, 201 bp, Homo sapiens
cataaagaattgcctttggtaacttgcccagaaggctgtagggttattttctgcttagactttcccctatttctttcttttcttttcttttccttttctttctttctttttttttttttttgagatggagtcttgctcttgttgcgcaggctggagggcaataccgtggtctcagctcactgtaacctccacctcccgggt

SEQ ID NO: 474955 - DNA, 201 bp, Homo sapiens
agggggtgctctgccgcccacccactgcctccatcacagatgcggtttcctggaggaaccctaccgagaccagcctggagttgcgctgtctgaggccctgygggagctgctctccaatgcacacacgggctgtgccagctcctcgcccttgtgagtgtggttctccccgagctctggggattccatgttttaaaggcagcc

SEQ ID NO: 474956 - DNA, 201 bp, Homo sapiens
tctcccccgccttgtggacccatcagggtcctcaggcaagaggtttccaggcagatgcaggtggagctccgggctccgctttggtgcctgtgttggcgctrccccatccagtgcggattgaaagtggctgtggggcaacccgagtatcctgccagaatccaatgtgggaggcggtggctgtgggcacagggtggggtggca

SEQ ID NO: 474957 - DNA, 201 bp, Homo sapiens
tataaaaataataataataataataattagccgggtgtggtagcacctgcctgtaatcccagctactctggaggctgaggcaggacaatggcttgggcctrggaggtcaaggccacagtgagctgtgatcgcacccctgttcgctaccctgggcaacatagtgagaccttgtctcaaaaaaacaaaccaaaaactcaacac

SEQ ID NO: 474958 - DNA, 201 bp, Homo sapiens
tctgggctgtgagctcctggcgttgaggtcagacgtcctttgtgtgggcccttccctaaggacagggtgctgacgtcctgcagtcctcagagggctcttcrgcctcgccccgggcttggataaaccctggctgagccccaggagagagtggcctggtcaccctcttccccatgtagggcttcttatgtcttaggagaggag

SEQ ID NO: 474959 - DNA, 201 bp, Homo sapiens
tgctctggcgtgtgacttgctcctctctctataccgcccagcgtgctgtccccgcctcgtgccatgacgtgtgttttgctcctctttctgtactgcccagmgtgctgcctagcacagacggaccacaattcactcatccagtcctcagctgagggacgtctgggtggttccactttttggctgtcatgagtcatgctgtgg

SEQ ID NO: 474960 - DNA, 201 bp, Homo sapiens
tgacataaagaattgcctttggtaacttgcccagaaggctgtagggttattttctgcttagactttcccctatttctttcttttcttttcttttccttttctttctttctttttttttttttttgagatggagtcttgctcttgttgcgcaggctggagggcaataccgtggtctcagctcactgtaacctccacctcccg

SEQ ID NO: 474961 - DNA, 201 bp, Homo sapiens
tcgcaggcgactgttggatgccagacatgggctagacatgaacaggaggagctgcctgccctgaggctcagggcctgggagcagagacagacggggaagcygcagcgcagagggtgagggctcacccaggagcaggtgctgtggggaggcctggtgcacctggaccaggggcctcacttcctggggctcagggccatcggc

SEQ ID NO: 474962 - DNA, 201 bp, Homo sapiens
cctggtgacataaagaattgcctttggtaacttgcccagaaggctgtagggttattttctgcttagactttcccctatttctttcttttcttttcttttccttttctttctttctttttttttttttttgagatggagtcttgctcttgttgcgcaggctggagggcaataccgtggtctcagctcactgtaacctccacc

SEQ ID NO: 474963 - DNA, 201 bp, Homo sapiens
aggagtccgcagccaggaggacagccctggagacctgcccgtgtgagtgtgagccggcgggagcagagagcggcctctgccctgggctgcgtcctggaggygattttcagcctggatcctgttctggaaagaaaggcctctcgttcagctgagcccagttcggtgtcgcaggcgactgttggatgccagacatgggctaga

SEQ ID NO: 474964 - DNA, 201 bp, Homo sapiens
ccccaccgcccctcgcatcctccaggactcagcccaaatgccaccttccttgaggcctccccaacctcctcccagagccctgcccctgctcccaccctctygctgtaattacaaccccatttagggctggcgctctctagcccattgaggccccaggacaggacccggactcgcgccccagcccgtgaggtccagagggga

SEQ ID NO: 474965 - DNA, 201 bp, Homo sapiens
tcactaaccctgtgtggtaggcaggcttctgagagggcccccagattccaggctccttgtgcacactcaccttcctactgcctcccaggtttcagtccaayactgagtaggtttcattgctgtgggattgtgcagatgtaattaaggtctaagatctgttgaccttgagatagggagattacgtgggtgggcttgatccac

SEQ ID NO: 474966 - DNA, 201 bp, Homo sapiens
ctgcggcccttgtcagggcacatcctgcacccggggtgcccactcccccatggtggtcgggggttacagtgagggaggcagcagtgggcagctggtgtgtyccctgccaggatctcccactacccctccatccaccgcagagccccctgcccagccccagaagagccccttggcccccatccgtagagagcccaggtgctt

SEQ ID NO: 474967 - DNA, 201 bp, Homo sapiens
ggtcaatgaaaacgcggagccatcagcaggaggcgaccgtcccaccgcaagatgaagaacctcccgtgataccattcaagccccacgagctggcagagagsaaacagcagcttcatacaggctgcgggtgctgatgaaatggaaaaggcacttcacacatcttgcacacgcaaattgcatcaggcggagtattctttgcaa

SEQ ID NO: 474968 - DNA, 201 bp, Homo sapiens
cagtttcagggccaggagtccctcagcatctggaggcaggataagccctgcctgctccccaaacacacgtctccccactgggcttcagggccagcttgggyttcggtgggggtgtccatcaggggtgagctgcggcccttgtcagggcacatcctgcacccggggtgcccactcccccatggtggtcgggggttacagtga

SEQ ID NO: 474969 - DNA, 201 bp, Homo sapiens
ccacggtctcaaaaccaacgtggctgggcctgctgtgggattgggagcggatgagctttaacaggagggctgggaccctggacacggctgccaccctcagygatgggagagtgtggagagctggtgtctgtattcgctgggtgcagtttaggccagatccatccaggagacagctgaaggcagatggagactgggcccaag

SEQ ID NO: 474970 - DNA, 201 bp, Homo sapiens
gccactcactgggcacaggtgcagggtgcctatggccaggcctggggtgtggccggtctccatgctgcagagccggaggcctctgtgttctctccctgccytcccctcctccctatacctgcccctcctctctaccatcctacccaacctctctctcctggagccctccagccccacccctccccgtgtacactaagtgcc

SEQ ID NO: 474971 - DNA, 201 bp, Homo sapiens
ggcctgggtccccagtctcacagggagcttgtcctgattgtacctgcccagcctgccctgcagaggggaaggaggcccttggctcggagtatgcctgcccyggagctcccaggcccagccggggcccggggtgggggccactcactgggcacaggtgcagggtgcctatggccaggcctggggtgtggccggtctccatgc

SEQ ID NO: 474972 - DNA, 201 bp, Homo sapiens
ggtgcctgggcttgcaggagaggagaggtggacaggcgtgctggggggggagacctgcccacgctgccctgggagcttgtctaccctctcctcccccagcrtggcgtccagcaggacatggggcgttccctccagcgtggccacccaggactccaagcagggcccaggaggaactgtgagggggcatgactgagtctgtgg

SEQ ID NO: 474973 - DNA, 201 bp, Homo sapiens
gggcagcagcagggcccctgggaacagctgagtctgaagggtcagaagccatggcccctgtggggggctctggggcagccaggggagctgctcgttagtcrtctctggggcagaaggaagggaccttcacctggattgggactgggcctgggtccccagtctcacagggagcttgtcctgattgtacctgcccagcctgcc

SEQ ID NO: 474974 - DNA, 201 bp, Homo sapiens
cttagtttgctgagagtgtttatcatgtaggatgttggcgtctgtcagatgcttttcctgcatcaattgatgggatcgtatgttttttttcccttacaccrttagtgtgattgacagtgtgtcattgtgatttttttgggaagtttccaacgttgagccaactctgcattcctggaataaaccccccttggttatggcata

SEQ ID NO: 474975 - DNA, 201 bp, Homo sapiens
ccggggttcctggagtggcgtcttctcttttgctgggaaccttgccgcctttcctctccctgcccctcccagcccgtgtgggccacctgctgtgttccacrccttcctttctcctctgcttgtgcagcggaaggttctgccagcaggggagttagtgagcagccagtggagggtgtgcccagccttcctgctgcagacccg

SEQ ID NO: 474976 - DNA, 201 bp, Homo sapiens
tcctgggaggcgttgaggtcacgtgggctccaccttggtgagtggattcgtgctgttgtaaaaggggcttctgttagttggctctctgtatctgccctcckgccgtccaccatgtgatggcgcctcaggaaagcccttgccagaagctggtgccttgatctcggacttgccagcctccagaactgtgagcctataaacttc

SEQ ID NO: 474977 - DNA, 201 bp, Homo sapiens
gtgatcaaatttgtcactgcctgtgtgggcacagctgatcctagaggtgtctttggggaggagggaggcagggggaggatggaggagcgaggaagagggaraagagataccagggaggagaagggaggaggtggaagaaaagaggggaggcccgggaggggaggagggaggggaagatggttggccacagagttgctctgc

SEQ ID NO: 474978 - DNA, 201 bp, Homo sapiens
ggttacatcatagatgttcgcacacgtctgtgcacgtgaactacctgttatctgttgcacatgcagcgttactaaacagggttcccttatacctcccgggkttcctggagtggcgtcttctcttttgctgggaaccttgccgcctttcctctccctgcccctcccagcccgtgtgggccacctgctgtgttccacgccttc

SEQ ID NO: 474979 - DNA, 201 bp, Homo sapiens
gaggtttggtaataaggagctggttcctggagtcgtttgtgacaccaggtttggtgttaaagagctggttcctggggccgtttgtggcacgaggtttggtrataaggagctggttcctggagtcgtttgtgacaccaggtttggtgttaaagagctggttcctggggccgtttgtggtgcagggtttggtgtttctcaaga

SEQ ID NO: 474980 - DNA, 201 bp, Homo sapiens
accaggtttgctgttaaagagctggttcctggggccatttgtggcacgaggtttggtaataaggagctggttcctggagtcgtttgtgacaccaggtttgstgttaaagagctggttcctggggccgtttgtggcacgaggtttggtgataaggagctggttcctggagtcgtttgtgacaccaggtttggtgttaaagag

SEQ ID NO: 474981 - DNA, 201 bp, Homo sapiens
ttcctggaattgtttgtgacaccaggtttgctgttaaagagctggttcctggggccatttgtggcacgaggtttggtaataaggagctggttcctggagtygtttgtgacaccaggtttggtgttaaagagctggttcctggggccgtttgtggcacgaggtttggtgataaggagctggttcctggagtcgtttgtgaca

SEQ ID NO: 474982 - DNA, 201 bp, Homo sapiens
ggttcctggaattgtttgtgacaccaggtttgctgttaaagagctggttcctggggccatttgtggcacgaggtttggtaataaggagctggttcctggartcgtttgtgacaccaggtttggtgttaaagagctggttcctggggccgtttgtggcacgaggtttggtgataaggagctggttcctggagtcgtttgtga

SEQ ID NO: 474983 - DNA, 201 bp, Homo sapiens
gaggtttggtgataaggagctggttcctggaattgtttgtgacaccaggtttgctgttaaagagctggttcctggggccatttgtggcacgaggtttggtrataaggagctggttcctggagtcgtttgtgacaccaggtttggtgttaaagagctggttcctggggccgtttgtggcacgaggtttggtgataaggagct

SEQ ID NO: 474984 - DNA, 201 bp, Homo sapiens
gatggacatttggagtttttctggtttttggctattctgaaactgctggatattataaataaagtcccatgtagaaatcgacttcgttttctttcaggtaracgcctagtgtggagtggctggcggtcacgtgtgtaacgtgttccgaggttgcccgtcttccagagtagttggtgtgcagcttctcctcaccagcatgca

SEQ ID NO: 474985 - DNA, 201 bp, Homo sapiens
gtcgagtcctggaactcggagctgggagttggcatctggtttgaagctgtctgggtaatagagacacatggtgccttccttttaatacggcctggggcacrcagactgccctctgagcctggacctgcaccctctgcctcggcctccgtgaaatcaggctttggaccccgcgaccccagccacggtaccctctttgccgcc

SEQ ID NO: 474986 - DNA, 201 bp, Homo sapiens
ctggccctgccccaagtggagactggcccagccgccaactctggcttgcggtcccagtgctgcctcctgttggccacatgctctctcgaatgagctgctcrctctggcgtggttgtgaggatggagcggtcagatgctggggagtccccagctggctctgcactgtgcagcgcggggcctgcggttcctcctccaggcttc

SEQ ID NO: 474987 - DNA, 201 bp, Homo sapiens
caggcccatgggctgcccttccctgggcctcttctgtttgaggcccttgtcactgggttcgcctggcatgatgatggaggccctgcagctccctgccaggygtggttccgcccaggtcattctcccggcccagctgctgtggacagtggacacacgctgtcacagcctcaggccggccgggccacgcctcccggaagcggg

SEQ ID NO: 474988 - DNA, 201 bp, Homo sapiens
tcatgaaaacacttctcatcagagcctgtgggaaccacctaaattcacaagtttaaatatttatatcattgaacaagaaagcatgtaaatatatggattaraccttcaacccaagaagtcagagaacaaaaggaaagtaaaccttagtgaaacaaaaaggtaggaatttgtaaagatcaaagcagaagttaataggaaagt

SEQ ID NO: 474989 - DNA, 201 bp, Homo sapiens
tggcggtggggctctgaggctgagggcacaccccagccctctacgttcccagcagctcctgggctggggggccaggagtccctccaaccagggggcaggcrgagcagtgtccctccaaccagggggcaggcggagcagtgtccctccaaccagggggcaggcggagcagtgtccctccaaccagggggcaggcggagcagt

SEQ ID NO: 474990 - DNA, 201 bp, Homo sapiens
gagttttgaccacgcttgggagctgtgactgcttacttccagagtggccacacgaggacataagagtgtgttgtgagccggctgctcagaggccctggtcsttgctcagcccagtgcagccggggcgggcattaggcgtgctgagcaggcggtaaagccgatggtcgtgcacttggcgcttttcgggacggggtgccttat

SEQ ID NO: 474991 - DNA, 201 bp, Homo sapiens
tgtcaggtaatagcagtgcactgtacctgtgccgtagggttttggaagtgagccttaggaagcccagccgagcaggtagggagttgagcctggaggggtcrgggctggggctgagacccaggttttctcccatgggtccatctccttttcctttaaggatgtcctggccttccctctgtctctgcaagtagagtagactgg

SEQ ID NO: 474992 - DNA, 201 bp, Homo sapiens
ccacccacccttcccgccctccacctaccctgcgtggcctgggttcttgggaggaacaggagatcctgagctgttgaattcctggaacccacggtcactcrgcacccgcatcccgctcctcccagctcctgcacgcttctcactggtgtggtcacctggaatcaggtgccctgattctgctggacaggcgggaggggaggc

SEQ ID NO: 474993 - DNA, 201 bp, Homo sapiens
gcactcttttgaagacgttccagtatatatcaaatgatcaaaagtccataaccttgtcctacgtagaagccaaaggtgtcatgcagtttcaggtgttcgartttccagaattcttgtgatgacatttgtaggattcttcttttagacttggaccaaattctgtaacctaatatttgtccttcagattgacagagaaccgca

SEQ ID NO: 474994 - DNA, 201 bp, Homo sapiens
ctatcccagcgagacccccaaagcaaggccagcagagagcttcctgacagctgcctcgctttggcgacggccctggctggggtgcagcctgtgcccctctycgcccccttgtgaagtttcggatgggcgttcccagcagtgctgacaggctcacgccgcccttgggcttcattccaggtacggtcgggcaggctggagact

SEQ ID NO: 474995 - DNA, 201 bp, Homo sapiens
tcctcttccccacttaagacctctcctcagcacagtgcaccctcgtgtctctgccccagagactggaaccgtctggagggtggagctcgctctcatctcttgcttcagccctttgttcctgggagcatgttacggcctcagcctgcagtgggggcacagggagctttacagaaccagttagggttccaggagcaggctctg

SEQ ID NO: 474996 - DNA, 201 bp, Homo sapiens
gaggaagctgctgccaccgcctcatccagacctggagctcaggctgcagtgccgccttccatgctggacctgcttctctcctctacatcttccggggggggtcctgcggaggcagccagcacctcttccttgtcccacacttccttgtcccggcattcccctcctccattagccccgaaggcctctggagcttgggctggg

SEQ ID NO: 474997 - DNA, 201 bp, Homo sapiens
tcagctctgacatgtggctcactccaatcacggtcattgtggagggtgtgtttatagcagaggcaccgctggcccatgatgtgtgctcagcatgatggtgwtggcgacgatggcggctgtggcctgagcccattggcctctgggcccgtgcaggagcccatttggtagaagctgagccaggctggtgggtagagaaacaaa

SEQ ID NO: 474998 - DNA, 201 bp, Homo sapiens
tcgctgggtccacaacacagtgtgaggctgccacggcagccgagtctccccgactttctctgcccctgctcctcccacacactgtcgctgctccatctgcrgacaacacagccccgggcgagcttactgggcagggttctgccgaaacacagaactcgtagaatgtgtgtacacacgcacatgcacacgcacgcacgcacg

SEQ ID NO: 474999 - DNA, 201 bp, Homo sapiens
ggcacacggactggaaaggcaggaccgacccttttcctcttcacaggtggcgtgattatgtcgaaaatcacaagataaaaacgagtcgagcgagttcaccmgggatttctgtgtgtggctcttgtatcctgcaaccttgctgagctcactttatgagaaatatgtccgtgtgtctgtgtagttctgtaaatattacacaat

SEQ ID NO: 475000 - DNA, 201 bp, Homo sapiens
atcagtgcttttgtatcttcagttcaaatgtcagcacagttagaagaaaaaaggcaaataatagcttattattattattccttgtttttttggagacagagtcttgctgtgtcacccaggcttgagtacagtggcatgatcttggttcactgcaacctcaaccttctggattcaagtgattctcccacctcagcctcccca

SEQ ID NO: 475001 - DNA, 201 bp, Homo sapiens
ggcagaggccttccctctcaccgccttggtccatgtcccagagccccagatgggcagcagggtgaggaggtcgaaggcacacggactggaaaggcaggacygacccttttcctcttcacaggtggcgtgattatgtcgaaaatcacaagataaaaacgagtcgagcgagttcaccagggatttctgtgtgtggctcttgta

SEQ ID NO: 475002 - DNA, 201 bp, Homo sapiens
catcagtgcttttgtatcttcagttcaaatgtcagcacagttagaagaaaaaaggcaaataatagcttattattattattccttgtttttttggagacagagtcttgctgtgtcacccaggcttgagtacagtggcatgatcttggttcactgcaacctcaaccttctggattcaagtgattctcccacctcagcctcccc

SEQ ID NO: 475003 - DNA, 201 bp, Homo sapiens
aaattagacaaaatattactaaggataataattcagcctgtttcaaagaagtcagtggatgttaacatctgattcattgaaatgggtgaacataatttttrtgaagaaaacagtcttgagatgtacaatgttgagacaaaatattcccggaatataccaaagcatatcaaatgaagagactgggtaagtctgagatagagt

SEQ ID NO: 475004 - DNA, 201 bp, Homo sapiens
atcactcctgagttttgtaaacactgtggtgctcactcagtcctgctccctggaggccttggccgcccatccttaatgtgccggtttgtgcctgttgcacrtcattgtaattacatcatttaattaaatatggaagctgatgaaaaataattatgtgtagagcaatgtttctgtgaagacaaagctgaatgctttggaaag

SEQ ID NO: 475005 - DNA, 201 bp, Homo sapiens
cccacccttatgaccttcatcagacttaacttccctccttaaaggtcctatttccaaatacagtcacatggggattaggttagtatctaaatttgggggayacagttcagcctgtaacagttgctctgcacagccccgctcggttacatcatagatgttcgcacacgtctgtgcacgtgaactacctgttatctgttgcac

SEQ ID NO: 475006 - DNA, 201 bp, Homo sapiens
gccccttgtattcctgtgtgacctttccactgtgcacttggagagctctggtgcccctgctggatcaggacccacccttatgaccttcatcagacttaacktccctccttaaaggtcctatttccaaatacagtcacatggggattaggttagtatctaaatttgggggacacagttcagcctgtaacagttgctctgcac

SEQ ID NO: 475007 - DNA, 201 bp, Homo sapiens
ggggttttaccatgttgcctaggctggtctgaaattcctgggctcaagtgatctacccacctctgcctcccaaagtgctgggattacaggcatgagccacwgcgcctggccagacttcttttgtgcaaaaatgaatcaacacagccatgcaggttttgacttttctgcacacggcagcatagcatacttatagtccgcttc

SEQ ID NO: 475008 - DNA, 201 bp, Homo sapiens
tcctcccgcataagtacgttacagagatctatggagccaaggggctagttcaccaaaataagacctggccgtgtccaccactctgctggtctggctggggytgccgtcacagagccccacggcggggggctgagaccgcaaacgtgtgtctcacacaattctggaggctgaaatctgagatcaaagggcaccggagttggc

SEQ ID NO: 475009 - DNA, 201 bp, Homo sapiens
tgtataattctgtatactttgaataattcacagaggtgtttaatgcattatacgaattccataggtttctaaaatgattaggtattaataaaggtgtaccrtgaacagttatcacttaacatatcactcgttacatcaacatttacaaattaagaggcagcgttttccccggatccctgcgtgtgctgtagttgaagcgaa

SEQ ID NO: 475010 - DNA, 201 bp, Homo sapiens
gcgaggcacccgcccagaaggattgggggtctccccatttcacaggtggggacactgaggctgagctcacagccaggacggggacagcagagtgacggccragaccatctgccccgcgagggaagcagcgcccaccttccttggtggtccgggaaggccggactggccccttgggtccccaccggcctcagccactgtggg

SEQ ID NO: 475011 - DNA, 201 bp, Homo sapiens
gctgtccccctgactttctcagcctctgtctgtcgcaacttgggcttcgttccatgagggctgcggccgtaggcgtgtgtgtcagtgtgtccagaggcagyggtgcctggggaggactgaagtccgtgtggggccggggcaggggacgccttccaagatgccaggctgcgcagtgggacagcgcagtcccagaagccagca

SEQ ID NO: 475012 - DNA, 201 bp, Homo sapiens
gcacctgattcccagcagagatggaatcccagctcaggaaggggagactcatgcgagggcagaagcgaggcacccgcccagaaggattgggggtctccccrtttcacaggtggggacactgaggctgagctcacagccaggacggggacagcagagtgacggccaagaccatctgccccgcgagggaagcagcgcccacct

SEQ ID NO: 475013 - DNA, 201 bp, Homo sapiens
atggtgacgccggagggtaagtggcgtccacaggaagatggcggccgagcgcggcgagcaggcagggtctggctgagggctggggtggtgacggcgtgatwgtgcctggctaccgggttctcagccagggagcacctgattcccagcagagatggaatcccagctcaggaaggggagactcatgcgagggcagaagcgagg

SEQ ID NO: 475014 - DNA, 201 bp, Homo sapiens
gtccctcctggccactggccctgccccaagtggagactggcccagccgccaactctggcttgcggtcccagtgctgcctcctgttggccacatgctctctcgaatgagctgctcgctctggcgtggttgtgaggatggagcggtcagatgctggggagtccccagctggctctgcactgtgcagcgcggggcctgcggttc

SEQ ID NO: 475015 - DNA, 201 bp, Homo sapiens
ggtgtctgtgaaaagtgaaatctgtcgccgcttcctctggcttaattaccggcatggtagttgcagagttgaaatgcagctttaaaagcctttgtgagtarttagtgtcaaacacacaagatctacaaagccataaactcacagcttggtgatattaccaagtactaattaagaaaaaaaaagaaaattccctttcatgat

SEQ ID NO: 475016 - DNA, 201 bp, Homo sapiens
cgtccctcctggccactggccctgccccaagtggagactggcccagccgccaactctggcttgcggtcccagtgctgcctcctgttggccacatgctctctcgaatgagctgctcgctctggcgtggttgtgaggatggagcggtcagatgctggggagtccccagctggctctgcactgtgcagcgcggggcctgcggtt

SEQ ID NO: 475017 - DNA, 201 bp, Homo sapiens
gtgaacattcgtgtacaagcttgtgtgtggaaatgcatttttgtttctcttgggtgtacacccataagcggaagtgccagggtcacatggtaatttaactktgagctttgtaaggagctgcctgttctcccagcttctccccgtcctccccagcacgcgccactgtctgcttttatgatgcttttccatcccaggggctgc

SEQ ID NO: 475018 - DNA, 201 bp, Homo sapiens
ctcggctgcgtccctcctggccactggccctgccccaagtggagactggcccagccgccaactctggcttgcggtcccagtgctgcctcctgttggccacrtgctctctcgaatgagctgctcgctctggcgtggttgtgaggatggagcggtcagatgctggggagtccccagctggctctgcactgtgcagcgcggggc

SEQ ID NO: 475019 - DNA, 201 bp, Homo sapiens
aggcagtagctactcagtaaatgatgggcccagcgatggacgaaggacgaaggcctccctcggggacctgaagaagcatagctgtctgtccctcgccgggkctcaggtggctgcagttactcagctcgcctgggacaggcctggggggccagtgagcacgcggcattgtggcagctcaggcaggcatgcgccggaagggat

SEQ ID NO: 475020 - DNA, 201 bp, Homo sapiens
ctcaggaagcaggagctacagcggcccaccgtgggacagctccacgtgtcacacattcgcctgaaatctgcccttccgaccgcacccctgtggcccacacmcccgcagcccagccccctggacttctctcctgtctgagtgcactggcctctgcctggtgctcactgctgtgagtttgagcttcaaagccctcgttaagcc

SEQ ID NO: 475021 - DNA, 201 bp, Homo sapiens
gttgaaggccggacatttgggagcccgtaccctgcagggccactcaggaagcaggagctacagcggcccaccgtgggacagctccacgtgtcacacattcscctgaaatctgcccttccgaccgcacccctgtggcccacacacccgcagcccagccccctggacttctctcctgtctgagtgcactggcctctgcctggt

SEQ ID NO: 475022 - DNA, 201 bp, Homo sapiens
ccagagatgccgggcaggggtccctgctggggtgtctgcctgccctgctccattttcctcattcctttcctgaggagtgggcccacccggcctaggggccrggctggagggagagagacaggactggaagggccgagacagggagaggctctgggcgccgggctgccgagccctcggggatctgcctctgctccacggggc

SEQ ID NO: 475023 - DNA, 201 bp, Homo sapiens
aggaaatccataagagaaaaaatttgataaatttgccttgttaaagactcttgctctgtggaagatactgttaagaggacgaaaagacaaaccacagaatrggagaaaatatttacaagtcagatatttgacaaataactggtatccagaatatataaggccttcttaaaactcaataataggaaaacaggcaacctaatt

SEQ ID NO: 475024 - DNA, 201 bp, Homo sapiens
atcagccacgcatctgtcttctctggagaagtgtctgccccatccattgcccactttgtaaatgggttgttttgttggttagtggtaagtcttcatgtgtkctagacactagacccttctcaggtatgtgatataaggggctcctgtgaggcagcccaggaagggctctcagtcttgctgggcatcagggccttgtcaggg

SEQ ID NO: 475025 - DNA, 201 bp, Homo sapiens
catttgaaccagagtgactccattttgaataaggactgggtgaaataagactgagacctacagggctgctttcccagaaggttaggcgttcgtagtcacargatgagagataggaggtccgcacaagatgcaagtcacaaagacttggctgataaaacaggttgcagtaaagaagctgaccccaaacccaccaaaaccaag

SEQ ID NO: 475026 - DNA, 201 bp, Homo sapiens
ctttattaccctttagatgcctataggattagtagtgatggctcctctttcacttctgatgttagtaatttgtgtcttccttttttttattttttttttttaatgttggttaacctggctacagatttatgaattttaaggaaccagcttttggttttgttggtttttctctatggagttcctgttttcagcttcactgtt

SEQ ID NO: 475027 - DNA, 201 bp, Homo sapiens
gcccactcttgtcatggtcggcctcctcagcgagccactcagctctagctgccaaggactctgtctgtttgtccatgtagtgtccttgctgggcacacagyaggtgctcagttaaatttgttcactggatgcagattctgcaggcatcttcacagattatgctgatggagcaggtgtgccctaccaccatatgtttctaca

SEQ ID NO: 475028 - DNA, 201 bp, Homo sapiens
taataaactgaacttcccgctgctttgagccggagcctcctggactggaaaggcgtgggcctcatggccacctccggcctgcgcagctgggtctgcactctcacaactgtgctgagcccacgcttgtgcccttactagtggcctgacctctgcgctgtggagaagggtggatattgtcgccaactctcagacttcttgtgt

SEQ ID NO: 475029 - DNA, 201 bp, Homo sapiens
attaggcacatataaattgtgaattatcttcctggtgaattttgccttttgttattatgagacattctttatctctgcggattgttttgatttttaaatcycctttctgggatattaatacgggtatgtcagcttccagtgtttaatagcattggcaccttttactttttcacttttcattttgagcattgttaaattgtt

SEQ ID NO: 475030 - DNA, 201 bp, Homo sapiens
cctgttctgttccaggcactggacagggactggggccgggcgtcccgcatgaatgaggggtcagggagctgatgcatggaaactccttggcacaaggcccrgagtgtgcctggcaccctgggcactggctgcctgcctgttacccgtcggtggagaaagccacctagactttgcagcactgtaagatttttgaactgtaga

SEQ ID NO: 475031 - DNA, 201 bp, Homo sapiens
tttccactcttctccagatccggccactggatcaagccactgtcacctcctctgggccttggggatgtcacctgcccactcttgtcatggtcggcctcctyagcgagccactcagctctagctgccaaggactctgtctgtttgtccatgtagtgtccttgctgggcacacagtaggtgctcagttaaatttgttcactgg

SEQ ID NO: 475032 - DNA, 201 bp, Homo sapiens
ctgagatgagctttcagttgaggaaggaccctgatgtcagagctgtttgggtaatggcctgcccctggccatggatgtgcaccaaatcttttcaggactcrtggggtcactgctgcccgggggctttaggtagctattagagcccagggctgggcaagcgctttcccacctgcccgttagcatgatggccaagagcccagg

SEQ ID NO: 475033 - DNA, 201 bp, Homo sapiens
gttgggcagtgcggggtgttgggaggagagaatgggcagaggcccctgcctcagggctccctggggcctggcaggaggcctggggtggtgctgcccccacyctcgagaaaaaggctggcactccgcagggctgtttgtggtgggaaacaggcgctcagccagtctggatccccagcccccccaggccctccgcgtgcctcc

SEQ ID NO: 475034 - DNA, 201 bp, Homo sapiens
ggcttccctggatgtggccatgcgggaaccatgcagactgagtgtccacaggcccggcattgacacgccatgtggagcctctatccagcctcctgtgaccsgggaacacgcggggaccctgtccagcgcctcctctgatcccggaacacacggggaccctgtccagcgcctcctctgaccccggaacatgcggggaccctg

SEQ ID NO: 475035 - DNA, 201 bp, Homo sapiens
tctgcatccagagggagtgctggccactgggagccctttagggacacactcctccacactgaccatgggtgggtccctgctcagcctcctgggagggctgycccttgtggctggcgttgaggccacctgttcccagcagctcagcaagggctgtgagtttgctcatggctgggcgtgtgctcccagcgggctccccactca

SEQ ID NO: 475036 - DNA, 201 bp, Homo sapiens
gacttgcttgctgacactggggttttggtcgatggggatgtgaggggcttgtggccactgttcctgactgccttcaggggggcgcttctggctgtcccatrcctgccttgtttctgaccagtgtcctggggccctcaggcctgtgggctctgggctgtgagctcctggcgttgaggtcagacgtcctttgtgtgggccctt

SEQ ID NO: 475037 - DNA, 201 bp, Homo sapiens
tgtaatcccagctactctggaggctgaggcaggagagcggagattccagtgagctgaggtcatgtcactgcactccagcctgggcgacagagcgagcctcygtctcaaaaaagaaaaaaaaataggccgggggcggtggctcacgcctgtaatcccagcactttgggaggccgaagcgggcagatcacaaggtcaggagat

SEQ ID NO: 475038 - DNA, 201 bp, Homo sapiens
gctggatagggctctgggactgtgctccagaaggtgttgctaggtggcatctgtgacgatgggggcctttcctgctgccctaccctggagctggggagcgsggtgggtgaggagcgttgaggaggagagagctggagctggtggtactggggttttggctgggcgtctcacgtgcctggactttctggtctcatctggaag

SEQ ID NO: 475039 - DNA, 201 bp, Homo sapiens
tttgttcaacacctgctgtgtgcagcccactttaggtgcttcaggaatatgagatgagtcaggcctgagtcttgttcgtcctcccggcacttggcacacayacagccgcctgccctccagctgcacccacgcactccgctccctgggcctggctctcgctcccttctgtgctgggaaggggcacaagaggatcctggagct

SEQ ID NO: 475040 - DNA, 201 bp, Homo sapiens
gattgaggtgtgttgttggatgagtcatgacaagtggaacatgtgcactcgtccagataacacacttctatcagtccagagttcccggggtccccccagtscagcccttcatccccggcagctgtagcttagccttgtttgttgtagaacttcctataaattcttccctttctattttttttctttttctttttttttttg

SEQ ID NO: 475041 - DNA, 201 bp, Homo sapiens
ccacgtgtgggtacctgccttatccaggccctgcccacctggggtcttgctggggacacctcggtttccctgccctggcattcatcgtctgcgctggctcyctgggggctccccagtcctccctggcaaggctcttgtctcttagaggacagaggctccttgtcgctcccgttcaggaagcgtttgttcaacacctgctgt

SEQ ID NO: 475042 - DNA, 201 bp, Homo sapiens
gcgtgagccaggttcccagctccgtccgagcacggtgcctgccatctctcctcttctcaaccccagctcctcctgtggctgagtcctggccgctttctgcyttggggttgtgttggttttccgtaaacgcatcctctcaatcctgagcattgtgagttaagagctggggtctccctttagcgcccctgagccagacgtgca

SEQ ID NO: 475043 - DNA, 201 bp, Homo sapiens
cccacagagggagaggatacagaggcagacttttggagtctggaattggcgggtgagcagtgaaaggactgagtagacttgggaaaccggaatctaagccrgcggcgggtggagctgagaacccgcctgagttacacctcaaaactccaacgcagcccaggaactggctgcaagtggcgttaggggagggatgccactgac

SEQ ID NO: 475044 - DNA, 201 bp, Homo sapiens
agccaggggagctgctcgttagtcgtctctggggcagaaggaagggaccttcacctggattgggactgggcctgggtccccagtctcacagggagcttgtyctgattgtacctgcccagcctgccctgcagaggggaaggaggcccttggctcggagtatgcctgccccggagctcccaggcccagccggggcccggggtg

SEQ ID NO: 475045 - DNA, 201 bp, Homo sapiens
tccccagcatcctcaggttacccgaacactctggccggggcctgctctgtgcgctgcattgggcactccaggcctttccttctggcgtctcacgcccttcygctcttgagagctttcctggctctgttcactgatcatttcctctcctctgttttctgtgtcttctttctgaaactgttacttggatgttggattttcgaa

SEQ ID NO: 475046 - DNA, 201 bp, Homo sapiens
ctgtactccaggagggagggaccttgtaggcagaggaacatggggccagccggcctacactgaggctgggccatgccgaagccgggccacgctggggctgrtccatgctgaagccaacctgtgctgaggctgatccatgctgaggctggtccacgctgaggctggtccacgctggggctggtccacgctggggctggtcca

SEQ ID NO: 475047 - DNA, 201 bp, Homo sapiens
ccaggcctgtactccaggagggagggaccttgtaggcagaggaacatggggccagccggcctacactgaggctgggccatgccgaagccgggccacgctgrggctgatccatgctgaagccaacctgtgctgaggctgatccatgctgaggctggtccacgctgaggctggtccacgctggggctggtccacgctggggct

SEQ ID NO: 475048 - DNA, 201 bp, Homo sapiens
agaaatgaatactacttgaatgttgtttattgttgcttcaggaagagaatagggagatgggagaagggcccttgctggggttggtccctaagtattttggkgccctgaacttctgtttccttgcttattttgaaggggtttgtgtgagcctaaccccaggagagcagcccacaccccacagcggagcctagagcagggtca

SEQ ID NO: 475049 - DNA, 201 bp, Homo sapiens
cttcagccgccatccctggctccttagcgtgttcctcccgcttcagccacaatccctggctccttagcacactcggaataaaacctgagtcctcccggtgkcctctgggccccacgccccgtgtgtctgccccctgctccaggcttgtgttcttcctccaccctcccagagctccttggtgttccggcctcaggaccttga

SEQ ID NO: 475050 - DNA, 201 bp, Homo sapiens
cctgggagcctggaccccagctctgtcccgacttgtcagtgctcccgcgctcatgcctgggagcctggaccccagctctgtcccgacttgtcagtgctccygcgctcatgcctgggagcctggaccccagctctgtcccgacttgtcagtgctcctgcgctcatgcctgggagcctggaccccagctctgtcccgacttgt

SEQ ID NO: 475051 - DNA, 201 bp, Homo sapiens
ttcctcccgcttcagccgccatccctggctccttagcgtgttcctcccgcttcagccacaatccctggctccttagcacactcggaataaaacctgagtcytcccggtggcctctgggccccacgccccgtgtgtctgccccctgctccaggcttgtgttcttcctccaccctcccagagctccttggtgttccggcctca

SEQ ID NO: 475052 - DNA, 201 bp, Homo sapiens
cctgggagcctggaccccagctctgtcccgacttgtcagtgctcctgcgctcatgcctgggagcctggaccccagctctgtcccgacttgtcagtgctccygcgctcatgcctgggagcctggaccccagctctgtcccgacttgtcagtgctcccgcgctcatgcctgggagcctggaccccagctctgtcccgacttgt

SEQ ID NO: 475053 - DNA, 201 bp, Homo sapiens
aggagcagggctgggagtccagagtcactgtgcagtctgcacccccagcgaggctgtggggctcaggagacccctgccccctgtgttgctctctgctgttsgagggagctgggcactgccccacgctcctggttctggggggacctgggggagggttccctgtccagcccttagcagcagcctggagcgtggcccggcgtc

SEQ ID NO: 475054 - DNA, 201 bp, Homo sapiens
tgaaggccatgcctgctaactcctacctgaggatacagggctagccatttaattttggtttaaaaaatccatgcagaggctgggcatagtggctcacgccygtaatccccgcactttgggaggctgaggtggtaggcagattgcttgacctcaggagttcaggaccagcctgggcaacatagtgagacctcatctctgcaa

SEQ ID NO: 475055 - DNA, 201 bp, Homo sapiens
catgaaacttgtttagaaatctagaagcattaaaaaaaggaaaaaaaaaatctagaagcatgcacgtggcttagaaaatgcctttgtgttgccagatgcarttcccttgctttgacagtggcattcaatgtggtcttttaaaaaaagaaactatctattcctttaacatttttttgagataataattacatacagtgaaat

SEQ ID NO: 475056 - DNA, 201 bp, Homo sapiens
cctgggagcctggaccccagctctgtcccgacttgtcagtgctcccgcgctcatgcctgggagcctggaccccagctctgtcccgacttgtcagtgctccygcgctcatgcctgggagcctggaccccagctctgtcccgacttgtcagtgctcccgcgctcatgcctgggagcctggaccccagctctgtcccgacttgt

SEQ ID NO: 475057 - DNA, 201 bp, Homo sapiens
gcgtccagagagccctttgaggccaaggcctgtggcgtcccagggaagaatgaggcctccatgagggccagcagggcctgcccacaccctccaggtctacrtgaggcccacggcctttggaacgccagcctatcccctgatgtggggaggtggtgctggggtctgcccacgccaagcctcggagggtgctgccggggctgt

SEQ ID NO: 475058 - DNA, 201 bp, Homo sapiens
tagctgaagtggcatagataacccagtaggggtcactgctaagttatctgtaagttttctaagcttgagctttagattcaaatacttttttttttttttttgagacagagtcttgctgtgttgcccaggctggagtgcagtggcatgatctctgcttgctgcaacctcagcctcccaggttcaagcgattctcctgcctca

SEQ ID NO: 475059 - DNA, 201 bp, Homo sapiens
aggctgggggtgggggtgagtccggtggcttagatgacaaatggaggtagaggacgcattctcgcctgttatttcgatttttttctctcctcaccctgacygtcacgttctcaccttttccacctcaatccccagtcacactagcttcccaggattaaaatggtctctctctcatgaaacttgtttagaaatctagaagca

SEQ ID NO: 475060 - DNA, 201 bp, Homo sapiens
gtgtcatttttccttgccttgaagtttaactataaactacattcctctcatagttatcttggcctctgtattagaataagcaaaaaaaaaaaaaaaaaaaagaaaagatcctgtgaggttagaagcaaggtggagtcagtaatgtagatttctctcgttacttaaaattctgtaaaggcggtttcaagactgcagtgagat

SEQ ID NO: 475061 - DNA, 201 bp, Homo sapiens
ctttcaacctgctggatcctgtggttcaacttttaactattttaggagccactacattgctttccacagtggctgtaccattttacgttctcatcagcagygcacaggagttccagtttctccacatcatcaccatgtgatgtgattttttttttggtggtagccatcctaatgagtgtgaggtggtgtcttgttctggct

SEQ ID NO: 475062 - DNA, 201 bp, Homo sapiens
tggaggtgtttgcccggcttccccgtctagaggaggagcctgacctggctacagggggcttcccaggaagcagagttcttgcccccggggcctaagcccccgccccttgctgcctgggctgcctttgcttgtgtgcagccttgcaggactctggtgtatttggagaagctaaaaagcccttgccagagcggaaaagggcgc

SEQ ID NO: 475063 - DNA, 201 bp, Homo sapiens
tctttggtgggcgtgagattgtaattgcaggtgggttcctgcgggttcctcctctccgcaggtgggttcctgtgggtccgctcctctctgcaggtgggttsctgtgggtctcctcctctcttgccttttttccccaccctagaccccaggtcgtttctgctccctcattgcccacctacaccaggttcctgacgtctggac

SEQ ID NO: 475064 - DNA, 201 bp, Homo sapiens
gatgagtcctaacggctcaaggacccgaggctgctccctggggcacagtcaaccccaggatcctttctgaggctgtctgccttctccctccacagccacaygttgcttttagcttgctgggattcacacttgaatttacggggccaggaaggagtgaggcaggaagcgccagtgtggcttctgcagttggggaataataac

SEQ ID NO: 475065 - DNA, 201 bp, Homo sapiens
agagaggttgagaaagctgcccacagttgcacagctggagctgggtctcagtcagggcatctgactcaagctcaggctgtgccatttccctgcggaggacrtgccagggagacgttgactccagatccctctcctgcctcctgttgcctggagagcagcctccagaccctgtgctctggccgtgccctctcagcccttatg

SEQ ID NO: 475066 - DNA, 201 bp, Homo sapiens
tcctgtggtagtgatggtggtagtgctttgtcccaagaattccctgctgaccccagtgttgaatcgaccttagactaagccccttatcccgctggttctgytcgtggcgtgaggggaggtccacatctcactgtctccgtgtggacattgggtcgttttggccccgctggcggaaaagacttttctttccccgtggagttg

SEQ ID NO: 475067 - DNA, 201 bp, Homo sapiens
ggcgaagcgtgctggtctttctctgtcattccttccactgcttcggggcccacagcctttcagggccttgctccatggagtatccatcttgtttcctttagttctagtgcagtgaagcaggcgagggcaggggtgaccgggtcatctgggctggttcaaactggggctccgcacccaggtgttctgtgcccccggggtgcg

SEQ ID NO: 475068 - DNA, 201 bp, Homo sapiens
cccgcagcagtcccacgcagccgaccatcggtccttccttgactgtgagacttggaggcaggcagcgtgcgtcctccagcccgccgtggaacaccgctccrcgtacgtcccgcgtcggcctcctgtggcgttcctcgctgcccctgaccgtcctcagcacctctgcctgcgccgtcccctggccctgcagctttctgtccc

SEQ ID NO: 475069 - DNA, 201 bp, Homo sapiens
tctccttcccagccaggtgctgccaggacgccttttcggaccgcagccctccccctcccatctccccgtccctcccggctgcggttctctgtagcacttcygctccaaggtgctactgttgcacttcgtttattttttatctgtttccctagttgaaaagcaacatccattagggcagggggttcatctctccatacacac

SEQ ID NO: 475070 - DNA, 201 bp, Homo sapiens
ctcccgcttcagccgccatccctggctccttagcgtgttcctcccgcttcagccacaatccctggctccttagcacactcggaataaaacctgagtcctcycggtggcctctgggccccacgccccgtgtgtctgccccctgctccaggcttgtgttcttcctccaccctcccagagctccttggtgttccggcctcagga

SEQ ID NO: 475071 - DNA, 201 bp, Homo sapiens
cagcctcctccccgccccagggtgtgcctggaaccttaggtagtcttacctgtcagtcataccttcttctcggccagggactgtggatggcaggacgttcwccccgtggtcagtggctgggcctttctcatgaagcagcttgattgagatgtcatctacagagcgtgcagccatcaccacagtctatcttggaatgaatgc

SEQ ID NO: 475072 - DNA, 201 bp, Homo sapiens
gactgaagcacagtggatctggaggcttgattgctgaattaagagatgggtccccggaaccatctgtccatctgtgtgccctgggcagttgccgctccccrggaaagatgaagactccaaaacaagccagcagtttattcttggagcagtgatacttaaagtgcagtacccaggtcggccgctgcctccctgggagcctct

SEQ ID NO: 475073 - DNA, 201 bp, Homo sapiens
agctcaggccatatgagctgggactggcaggcagttcctggctgcctcaaatctggggtccagactctctgctgacctcccagagcccggcgtgtctttgyacactctgtccttgtccccagcctcctccccgccccagggtgtgcctggaaccttaggtagtcttacctgtcagtcataccttcttctcggccagggact

SEQ ID NO: 475074 - DNA, 201 bp, Homo sapiens
cggttcacgtttccccggtgcccagcgtcctggcatgagctcattggccgtgtgtggctcttctctggagaaatgttcaagggccccttgtttaattggcyctttcctcttcatggtggagttgtgggagttctgggcatattctgggtacaggacttttcagggacgtggtttcagagggagctttgtggtgggccgggt

SEQ ID NO: 475075 - DNA, 201 bp, Homo sapiens
cattcagcaggtcctgctaatgccggagcgttagaccgaggtggagcctcccaatgtggctgggtacgctgggggaaacggagtcagaggtgggctgcacrgcaggtcgacttgttcaccgggggctggtgttttgcaaacgctgggtctgccttcgtgtggggtttgagctgggagagtagcactggtcactcctgcctg

SEQ ID NO: 475076 - DNA, 201 bp, Homo sapiens
cagcctgcaagcggatgacagagggacagtgcccctttgactggttaggaccgcctcatgatgcctgccaaaggggcactcaaggtccttcccctgtgagkggcatctgccaaggagacctggtctccgggtgctcagagttgttgccagggctctagtccccgctgctggggaggctctgctggggcctgacgggcaggg

SEQ ID NO: 475077 - DNA, 201 bp, Homo sapiens
gcgatggcagagatggatgggcccggcgccactcattcagcaggtcctgctaatgccggagcgttagaccgaggtggagcctcccaatgtggctgggtacrctgggggaaacggagtcagaggtgggctgcacggcaggtcgacttgttcaccgggggctggtgttttgcaaacgctgggtctgccttcgtgtggggtttg

SEQ ID NO: 475078 - DNA, 201 bp, Homo sapiens
tcatggtgccacagcgggggtgccaacgctggggctgggtcccaggtcccgtcctggttctgcctatgacttggctcatgggtcctgctcggctcttttttgtgcctcggcatgttctgagagaggtgtgggggtgagggctccccgctgaccctcccgtgggcggcacgtggcatctgactcttgctctcttaacagcgt

SEQ ID NO: 475079 - DNA, 201 bp, Homo sapiens
taaattagttttgtgtgttcttgaattgtaaataaatggaattgtactgtgtttattcttaaattgctgtcatcttttgcccagggctgggactaggggggaggcgagagagtgtgggatctacactgcacaccccaagagtgagattctccgagcaatcacctcctgaaagtttgtacgccggcatctctcttgcttcac

SEQ ID NO: 475080 - DNA, 201 bp, Homo sapiens
tccttgcccgcagacacagctgcatgggaccccaggaacagtcagaaccagtagttttccaattgttccttggagttccacctggaaatacctattaggggcgagacttaagtgtctgaagtccaaagacctgctggctgccctgtctgcgctgggactggcagttccaggcccggtgccgcatctggctgtgatggtgct

SEQ ID NO: 475081 - DNA, 201 bp, Homo sapiens
gtctcaaaaaaaaaaaaagaatgctagttgctagcttgctcactgccctttcttgatgaggactgttttttattctgagattaggtcatatatatatatatgtgtgtgtgtatatatataatatttatgtaaatgttcttttgtgaaattatgaaggtaatagatggtagttgttttttatcactgacaaaatgagaagtg

SEQ ID NO: 475082 - DNA, 201 bp, Homo sapiens
ttttggattggagcaagagattttttttttccaagtaaagaacaatttatgttcctaaatactttttttccttgacatgacgaagttgagcaaggtggctrtagaactttttttcttaattttattgcacaagtaatgttctttacaaagtagggaaatacagatacataaaaagaagactgccaatcccccgtaatccca

SEQ ID NO: 475083 - DNA, 201 bp, Homo sapiens
tgtctcaaaaaaaaaaaaagaatgctagttgctagcttgctcactgccctttcttgatgaggactgttttttattctgagattaggtcatatatatatatatgtgtgtgtgtatatatataatatttatgtaaatgttcttttgtgaaattatgaaggtaatagatggtagttgttttttatcactgacaaaatgagaagt

SEQ ID NO: 475084 - DNA, 201 bp, Homo sapiens
cttcctaatactctttgaaagaacatagtaagccctccagctttttctttgtaagaattgtcttggctattttagtttttttattttcagataaattttasatttagctttcagtttgttttctttccccccatttactttttatttcgtttattttttcttgccttagtgcactcactgggacctccagtgcagttttac

SEQ ID NO: 475085 - DNA, 201 bp, Homo sapiens
taacgtgtgcttaagtcatatgtagcattagcatgctgtgctgatgtcaccaattaaaatctgcctgagtgaatcatacttgaaaacagtcagttgtcaaraaaaaaaacctcgtttaggggcagcaggcccaggaaagagaagcgagggacagacaggaggcgaagcgttctgtagttggttgtgggggccagggcatcc

SEQ ID NO: 475086 - DNA, 201 bp, Homo sapiens
tgagccgtcatgagggacccacccccatggcccaaacccctcctctcaggtcctgcttccaatcgtggggatcagttgtcaacctgagatttggaggggtygggaaccacacagtaacagtgtccttccatgggtgaatggataaaagatggtatgtccattcactcaaatactgttctgagctaaaaagaaatgagctac

SEQ ID NO: 475087 - DNA, 201 bp, Homo sapiens
cttgtcctccccgtggagagctgctcttgaagttgaaatcgtggcacatgcaaaggaagaggctggtttcagccccgcaggctctggcagctgcatccacrcttcctgctgtttctcactccccacccggcccgccatttctaacagctctattgaaatgcgacgcacattccacgtacctcgtccctttgaagggggcag

SEQ ID NO: 475088 - DNA, 201 bp, Homo sapiens
gggtgaaggagaagcacatgaggagatgctcagcattgaaaatgggtgagctctgaacaggtgcctcaccaaagcagacacgtgggtgacggagaagcacrtgaggagatgctcagcattgaaaatgggtgagctctgaacaggcgcctcaccaaagcagacgcaggaagggggagagcagggagacgccaggctccctgt

SEQ ID NO: 475089 - DNA, 201 bp, Homo sapiens
tgctcccgcgctcatgcctgggagcctggaccccagctctgtcccgacttgtcagtgctcccgcgctcatgcctgggagcctggaccccagctctgtcccsacttgtcagtgctcccgcgctcatgcctgggagcctggaccccagctctgtcccgacttgtcagtgctcccgcgctcatgcctgggagcctggaccccag

SEQ ID NO: 475090 - DNA, 201 bp, Homo sapiens
caccttcgtgggcgcgtggaagctcatgctgtggggggagctgtgggaggagcatgcggcaggtggaggtcttctgcgcgtgggtgggcacgcggaagctygtgctgtggggggagctgtgggaggagtgctggaggagccctgggaggagtgttcaggaggcggagcgtgcctcgtgcgcgttggtgggtatgagtggcg

SEQ ID NO: 475091 - DNA, 201 bp, Homo sapiens
ctcacatgccgtcttccctggccacggcaggccgcccgccctttctctgctatggaaccacagaggctgttatcaggggtgtcatgggaggagcccctgayccttgctggaaccaggacaggcatgacccctcccagctccctcctcccctggcctttcacgtggagctgcccagcagggtctcaggccgggaaggccagc

SEQ ID NO: 475092 - DNA, 201 bp, Homo sapiens
gccccagctgggctgttcctttgctgacaggtccagggaagccccacatggcgtcctggggcagcagctgtctgtccttcctcctggatcctgtgtgtgtktcgggcccagcccctcctgtgttgtacgagtgtctggcctgggtctccctccagagctatgcatctcgtctctgttcagggactgctccaggcaggtggg

SEQ ID NO: 475093 - DNA, 201 bp, Homo sapiens
ctggagacggttgggatgcccaagaggggcctgttctggaggtgacgccggactggagagggttgggatgcccaagaggggcctcatctggaggtgacgcsggagtctggccttgcagaagttcactggtgaagatcgtcccctggcagaaggcaaatgtgcccgccacattgtggcagcagaaatgagcaccatgcgttc

SEQ ID NO: 475094 - DNA, 201 bp, Homo sapiens
gcttagaagaatggtctccaactccatccacgttgctgcaaatgccattatttcattcctttttatggctgagtagtattctatgatatatatatatatakagagaccacattttctttatccactcggttgatgggcatttaggctggttccgtatctttgcagttgcaaattgtgctgctgtgaacatgcgtgtgcacg

SEQ ID NO: 475095 - DNA, 201 bp, Homo sapiens
ttgtgcagatgtgactgggcattttaaagggagtgtggggaacaggtgcccaaatggagtcagggaagtgaaaaattacagaaagcagcaagagggttggktagcatgaatgtgatgagctgactctgctacgagctggcaggttggggctggcagggatgggctcctgctccccttccccagccccagactaggagacag

SEQ ID NO: 475096 - DNA, 201 bp, Homo sapiens
gcctcaaggagcagggcccgggcagcgttgccccagctgggctgttcctttgctgacaggtccagggaagccccacatggcgtcctggggcagcagctgtstgtccttcctcctggatcctgtgtgtgtttcgggcccagcccctcctgtgttgtacgagtgtctggcctgggtctccctccagagctatgcatctcgtct

SEQ ID NO: 475097 - DNA, 201 bp, Homo sapiens
aggggcctgttctggaggtgacgccggactggagagggttgggatgcccaagaggggcctcatctggaggtgacgccggagtctggccttgcagaagttcrctggtgaagatcgtcccctggcagaaggcaaatgtgcccgccacattgtggcagcagaaatgagcaccatgcgttctgagtgtgcctggggtgtctggga

SEQ ID NO: 475098 - DNA, 201 bp, Homo sapiens
tcgcttagaagaatggtctccaactccatccacgttgctgcaaatgccattatttcattcctttttatggctgagtagtattctatgatatatatatatakatagagaccacattttctttatccactcggttgatgggcatttaggctggttccgtatctttgcagttgcaaattgtgctgctgtgaacatgcgtgtgca

SEQ ID NO: 475099 - DNA, 201 bp, Homo sapiens
ttctggaggtgacgccggactggagagggttgggatgcccaagaggggcctcatctggaggtgacgccggagtctggccttgcagaagttcactggtgaasatcgtcccctggcagaaggcaaatgtgcccgccacattgtggcagcagaaatgagcaccatgcgttctgagtgtgcctggggtgtctgggaggactgtgg

SEQ ID NO: 475100 - DNA, 201 bp, Homo sapiens
ggcaaatgtgcccgccacattgtggcagcagaaatgagcaccatgcgttctgagtgtgcctggggtgtctgggaggactgtggacttgtagcggcagaggrcagaacacctgggctgcacacgagtgactgtgctgggcaatggcgcttcccttccgaagctgggctctgactctgcaagtgactgcgccgggggcagtgc

SEQ ID NO: 475101 - DNA, 201 bp, Homo sapiens
agaaagaccccgagcagaggtggtgccagggagggttggtgaggacagagcgttgaaacctggtgtccagcgggtgttgagtgctgaatccaggaaggccraaggcaactcaagttgtctggctcgaggggtgcgggggatggagggagaggcggccgcccaggagcgggaactgtgggagtagcacttaggacatgaggc

SEQ ID NO: 475102 - DNA, 201 bp, Homo sapiens
cccacagcctggggtgggccacagctctgtctcccactggctgcagcctggccttagtgtgctcccaaggatgtggagggcacgggcctttcccgcaggckgtctttggagatctccggtgatggctcctggagggccctgcacatacctggtgaaccaggcctgcatggtggccattcctgttgtctgtcataataccgt

SEQ ID NO: 475103 - DNA, 201 bp, Homo sapiens
ccagggagggttggtgaggacagagcgttgaaacctggtgtccagcgggtgttgagtgctgaatccaggaaggccgaaggcaactcaagttgtctggctcraggggtgcgggggatggagggagaggcggccgcccaggagcgggaactgtgggagtagcacttaggacatgaggcacgcctgcagttatgaatcctcacg

SEQ ID NO: 475104 - DNA, 201 bp, Homo sapiens
cggggctcctggactgcaagccctcccatcccgtggtgggggtgggagagctcggggcacccacggacggtggctggccgggcttctggcgccccctctckagatggggaaagtgaggcccacagggagcctgcgtgtgaaggaggaaggagctcagactctccatgttgggaggcagaatgagtcttgaacgtgttgcag

SEQ ID NO: 475105 - DNA, 201 bp, Homo sapiens
catgaggcacgcctgcagttatgaatcctcacggctaatcagggctgtgggcacaggcagctgaggccacttgaaaggactgatgcgcccagaccaggccmcgccagggcctccggtcacgggatgggtgcagggttgggggtcaggagagagacactgtggccccacatcgccatgctggagcctatgtcccgcctgact

SEQ ID NO: 475106 - DNA, 201 bp, Homo sapiens
aggttttccagaccaagatccaggagttccgcaaggcctgctacacgctcaccggctaccagatcgacatcaccacggagaaccagtaccggctgacctcrctgtacgccgagcacccaggcgactgcctcatcttcaaggtgggtcctgcgtgtgacggctctccggctgtctcgctctctgtctcctcctgtggggaga

SEQ ID NO: 475107 - DNA, 201 bp, Homo sapiens
atgaggcacgcctgcagttatgaatcctcacggctaatcagggctgtgggcacaggcagctgaggccacttgaaaggactgatgcgcccagaccaggcccygccagggcctccggtcacgggatgggtgcagggttgggggtcaggagagagacactgtggccccacatcgccatgctggagcctatgtcccgcctgactg

SEQ ID NO: 475108 - DNA, 201 bp, Homo sapiens
agccacagggccgctatgtgcgcagactagacaggtggcagctcgggccggccaggcagagggagaggaagccagagcctgcgcgcaggcagcctcagaartatttccagccacagccaacgtgtcttactggcaatttgctttttaaaaaattgcagtttaattttaagtgagcagcccgtaattacagtgatttacgag

SEQ ID NO: 475109 - DNA, 201 bp, Homo sapiens
gcgagggtctggactagagtgcagtggccacagtggacgccgcgagtgtcttcattaagagtgagtgtctcagtctcccccagggcgcccgccagccacasggccgctatgtgcgcagactagacaggtggcagctcgggccggccaggcagagggagaggaagccagagcctgcgcgcaggcagcctcagaagtatttcc

SEQ ID NO: 475110 - DNA, 201 bp, Homo sapiens
aggtccccggccctccagggcaggccctctctgcttccagaggggcaggtgagccccaggccaggccagcgagggtctggactagagtgcagtggccacartggacgccgcgagtgtcttcattaagagtgagtgtctcagtctcccccagggcgcccgccagccacagggccgctatgtgcgcagactagacaggtggca

SEQ ID NO: 475111 - DNA, 201 bp, Homo sapiens
tcaggggatggtgggaccagcgcttagtaagactagtcagccctaggcaccgagtgagcactgctcacgtggcagagctggaatgggggccgggcacacamtccctggcccacgtgttccacggacatgctgcagaggtccccggccctccagggcaggccctctctgcttccagaggggcaggtgagccccaggccaggc

SEQ ID NO: 475112 - DNA, 201 bp, Homo sapiens
gtgtggagaaagtggtgtgtggagagagttggtggtgtgcgctgtctctgctctccaagccctttgtcagcccccacccctccctcactccgtgcctcttrtccgtgcccgctgggacaccatggggctcggctcaggggatggtgggaccagcgcttagtaagactagtcagccctaggcaccgagtgagcactgctcac

SEQ ID NO: 475113 - DNA, 201 bp, Homo sapiens
tgggcgtcggccaccagcctgggttcctcaccttgtgaaataaaatcttctcccctagacactcccactcgccctgtgtatctgtggcctagccctagcakggtgggcgggaggaggggaaggagctccctcagcagccgccgccatctgcagcccggacaacgttagggtgagtcaggcatctctgctcagggagtgcac

SEQ ID NO: 475114 - DNA, 201 bp, Homo sapiens
gtgtgggcgtcggccaccagcctgggttcctcaccttgtgaaataaaatcttctcccctagacactcccactcgccctgtgtatctgtggcctagccctakcagggtgggcgggaggaggggaaggagctccctcagcagccgccgccatctgcagcccggacaacgttagggtgagtcaggcatctctgctcagggagtg

SEQ ID NO: 475115 - DNA, 201 bp, Homo sapiens
ggctgggtgcacgtcctgcctctccagccccacagggcagcagcatgactgacagacacgctgggacctacgtcgggcttcctgctggggcggccagcacyctctccacgtgcagaccccatgcgtcccggagcctggtgtgtgggcgtcggccaccagcctgggttcctcaccttgtgaaataaaatcttctcccctaga

SEQ ID NO: 475116 - DNA, 201 bp, Homo sapiens
gtgatccccctacttcggcctcccaatcccaaagtgctgggattacaggcgtgagccactgtgtccggccttcaattccctgtttttttttttttttttttgtcgttgctgttttttgaaatggagtctcgctctgtcacccaggctggagtgcagtggcgcgatctcagctcactgcaacctccgtctcttgggttcaag

SEQ ID NO: 475117 - DNA, 201 bp, Homo sapiens
gggctgcgagcctccggctggtgggggctctgggcctctgcttcccattggaggctctccttgtgtgcttgacattttagtacacggtgcttggagtgtgyggttttatttcgagacctttattaaacggctctagtctaaggatttaattgttactgatagctaagagtataattaccttggtaaaatatcatgactatt

SEQ ID NO: 475118 - DNA, 201 bp, Homo sapiens
gaggttcacagggacctatggctgccccggcagatgccatccaggcacgcccctctcctctcccgcgggtcctggtgggggagcctctgtgggaagcctgkgggctccggggcctggcagacaaccagtcctgctgcagcgaggtggggacaaggccgggagcagctcacttcccagtagaggccatccgatggcgccagg

SEQ ID NO: 475119 - DNA, 201 bp, Homo sapiens
actttgggctcaggcctgatgaccccgggtgcctgcgaacgtggcctgatgaccccgggtgcctgcgaacgtggcctgatgaccccgggtgcctgcgaacrtggcctgatgaccccgggtgcctgcgaacgtggcctgatgaccccgggtgcctgcgaacgtgctgtgttcgggtggcacccccttgagtgcaccttgttg

SEQ ID NO: 475120 - DNA, 201 bp, Homo sapiens
gagacgcccggaaagtcttttgaagttgaaaacactttgatttcctgacagcctcaagacaaaaaaaaatctccccttcgctggctttgagagcaggtgtmttctacaagcgaggttcacagggacctatggctgccccggcagatgccatccaggcacgcccctctcctctcccgcgggtcctggtgggggagcctctgt

SEQ ID NO: 475121 - DNA, 201 bp, Homo sapiens
tgggagctgggcctttctctgggatctcagatgtccctcattctctctgggtctcagttctcctttctgctaaactttgggctcaggcctgatgaccccgrgtgcctgcgaacgtggcctgatgaccccgggtgcctgcgaacgtggcctgatgaccccgggtgcctgcgaacatggcctgatgaccccgggtgcctgcga

SEQ ID NO: 475122 - DNA, 201 bp, Homo sapiens
aggtcatcacaaagcgctgctgcagtcacctcgaggcctggagcgggaggagacagcggcttgggcccacaggccacagcacgcgggctgaccactgcggkggttcgggctgaccactgcgggggtttgggctgaccactgcgggggttcaggcaagtgcagcccgaccctgccgccgaggagaggcccgggaagcagagg

SEQ ID NO: 475123 - DNA, 201 bp, Homo sapiens
tcagcccctctccttccccagcttaggggtggggctgaagtcccgagcctctagtccggcctcgatcttcctggtgtcccgccccatcctgcagctgcccrggggctgcagccaccgtcagtcattggcacatggaaggcctcagtcgggaaagcccgagggttttaggagctgtgttctggtagatgggttgacgatcag

SEQ ID NO: 475124 - DNA, 201 bp, Homo sapiens
cagtttattatgaagcttactgcgaaggatgcagatgaatggatgcgcagggcgagatgtgggggaagggtgcagagcttgcgtgccctccccaccctccrggaacagtgggagctctcccagttcccgtgagaagcctttgggttttgatggaggccgccaccctccgggaagagtggaagctctcctagctctggtgga

SEQ ID NO: 475125 - DNA, 201 bp, Homo sapiens
taaatttgctggagtgtctcacagaactcaaggaaacgtatgttcaccagtttattatgaagcttactgcgaaggatgcagatgaatggatgcgcagggcragatgtgggggaagggtgcagagcttgcgtgccctccccaccctccgggaacagtgggagctctcccagttcccgtgagaagcctttgggttttgatgga

SEQ ID NO: 475126 - DNA, 201 bp, Homo sapiens
cggccagctgtaaactggggttcctaccacccagttgggattccccttgggtttgataaatttgctggagtgtctcacagaactcaaggaaacgtatgttyaccagtttattatgaagcttactgcgaaggatgcagatgaatggatgcgcagggcgagatgtgggggaagggtgcagagcttgcgtgccctccccaccct

SEQ ID NO: 475127 - DNA, 201 bp, Homo sapiens
aagagattgtggagagtagggtctgaagtttctaagtgcagggctgtgttttccagaagcccatccttcttggcgaaggtgactttcagcttcacggggtyggcctgtggcagcgtcctctggccctcagcagcactgccttgatgtggacgtggacgtggatgtggacgtggacgtggacatgtgtgtgcgtgaaggctc

SEQ ID NO: 475128 - DNA, 201 bp, Homo sapiens
ttagggcagagtctggtacgttttttctgtaaagggctgggtattaatagtaaatatttactttgtagctttgggggccataaggtctctgttacaattasttggctctgcctttctagcccagaatagggtgattagccctcacggcttgtctgagactgaggagttttgcttgggaggtgggacctttcatgtgaaaac

SEQ ID NO: 475129 - DNA, 201 bp, Homo sapiens
ctttggaggtttataccagagagaccgaggcttagagaggagcccagggaggctcctccagtgcccaggccaggcatcatccagctggcacaggtggcttyagcccagcctcggggggacacaagcagggcctgcagggtgtctgggaagggctggagggaccaggcccggaaccttgtcctgcctacccaggctttggcc

SEQ ID NO: 475130 - DNA, 201 bp, Homo sapiens
atgctggcactgaaaggattctgttgggagctgccatccatttagcctgagcggaactcagcacatgtgcgggcatgaagcccatcagctgatagcttctytttcagacctgatggctcccagccgaactttggcaagaaggacctaccagcctgctggagggctgacctgcctgcctttgctgggagccaagcacctcct

SEQ ID NO: 475131 - DNA, 201 bp, Homo sapiens
ggaggttgcagtgagccaagattgtgccaccgtgctccagcctgggtgacagaatgagtgagactgtgtctcaaaaaaaaaaaaaaaaaaaaaaaaaaagkcatcagcttcattatctcctaacagcatcagcttgtcctctgaaactttgaaggcagggatcgacttctcctctgtaactgtaaaagccctagacggcat

SEQ ID NO: 475132 - DNA, 201 bp, Homo sapiens
tggtgggaatgaaggccagacgttttccctggtttggaaacaggtggcttacaagagtttctagagtttatttgtttaaagacagagcctgttctcaagasggtcttcactttgctggcaggatggcactgttgacggtggtggttggctctggagagctgctgtgtagttgacaaagcctgttgataatcagcgtctcat

SEQ ID NO: 475133 - DNA, 201 bp, Homo sapiens
cctgggcttttctgcattaagtgtgagtttctaacataccacgttgaaacgtcttggatcttgcctgctgagccacgtggctcttcctgaaggacaaggtyagcgcccccctcgccaccacttcatccagatcccaggagccccttctgtcctgtaggccaaggctccacagcaccacgtgggttatggacgagaaacctg

SEQ ID NO: 475134 - DNA, 201 bp, Homo sapiens
cttgaggggaagcacaaagtaggaaggagttggaagtcaccatggtttcctttgtggcctcagtgtgagtggttgagcacccagctgtgctcagctagacrcggggctcagccagacgcggggcagctagagctgtggtgatggtggtacctgcggggcggcagaggggtggtgggagcaaagagccatggcctcctcttc

SEQ ID NO: 475135 - DNA, 201 bp, Homo sapiens
agaagtgtttaaaactatttagacccacgcagccgcagtgagctcttgctaaacttcctacgttaaccagctcttgacaatcttggattgtggggaagtcytctgatgtagtccctaaagctgacacgccagagcatctcgaggctgttgggggctgttgctgggatcctgaggccgcacacctccctgctatgagttctg

SEQ ID NO: 475136 - DNA, 201 bp, Homo sapiens
ctccccggctcgccccatgtgtgcatgaaagtgcctgggacgcgtcagattctcaacttgagacgcccggaaagtcttttgaagttgaaaacactttgatwtcctgacagcctcaagacaaaaaaaaatctccccttcgctggctttgagagcaggtgtattctacaagcgaggttcacagggacctatggctgccccggc

SEQ ID NO: 475137 - DNA, 201 bp, Homo sapiens
ctgactctcggcggacgctgctgagtcttctccccggctcgccccatgtgtgcatgaaagtgcctgggacgcgtcagattctcaacttgagacgcccggaragtcttttgaagttgaaaacactttgatttcctgacagcctcaagacaaaaaaaaatctccccttcgctggctttgagagcaggtgtattctacaagcga

SEQ ID NO: 475138 - DNA, 201 bp, Homo sapiens
gaggctgccggagacaggcactggtccagcccagtgtgagcttcgggtgccattttctgggtttttctctctaatgctccaggttttctcagcctctcacygagcactccagcgaactcagccctcctctgtggcactcttttcggcgccctggctccagctccagccctgtccctcaactcgggtcccgcgaggccctgc

SEQ ID NO: 475139 - DNA, 201 bp, Homo sapiens
agagagaagcaagacagatgtgggccttgccctgtggggccagggcacaggcaggaatcccacttggggttaagacgctgcagtcacccctccaggtgccrgggtcccctgtggccgtggcgttctaggagagatgggcagggagacgctggcgccctgtcgtgtagcttatccttgtatctgcttcacaggctcttccac

SEQ ID NO: 475140 - DNA, 201 bp, Homo sapiens
gctcacaccgccccttgctgcggggtgtccatctcagtgctgtgccctggagccgcctagttcgcaggctttcccgcgaggctgccggagacaggcactgstccagcccagtgtgagcttcgggtgccattttctgggtttttctctctaatgctccaggttttctcagcctctcactgagcactccagcgaactcagccc

SEQ ID NO: 475141 - DNA, 201 bp, Homo sapiens
tgcgcttttctttctttttctcatctgtttcatctcggacggtttccgtggttgtatctgcagcttcactgatcctgttttcgccatgtctgatctggcayggatccgtcccccgtacttgttgtcttcatccttagaaggtcaatttggctcttttttgtcccttttatgtctatcctcaattttttgggcatatggagc

SEQ ID NO: 475142 - DNA, 201 bp, Homo sapiens
tgaagcaagacagccactgtcctgtgggtgtgcgttactcacatctgctctgcgtggcggggggactccagccccacatgtgcccccacacagatgtgagygcaccctcactcaggatgcagggtgtgggtttgctgggcccccttcaaggctgcccagccatcctgtgctgagctgagggtgcttcccagcgcagcccct

SEQ ID NO: 475143 - DNA, 201 bp, Homo sapiens
ggcgctgatgcgggtggtgcctggaggtggggaccatcaggagccatttcagaagtgccaccagcctgcctccaggactcctgccctacgtgtcaggccaygtgacgtcgccccacagcccacgcccaatgtgctgcctcctttatgtctatctttccgttttttcctttttgtttgtatgcgcttttctttctttttctc

SEQ ID NO: 475144 - DNA, 201 bp, Homo sapiens
ttgcactgagccctggtcctcaagtgccgggagcctgggctctgaagcaagacagccactgtcctgtgggtgtgcgttactcacatctgctctgcgtggcrgggggactccagccccacatgtgcccccacacagatgtgagcgcaccctcactcaggatgcagggtgtgggtttgctgggcccccttcaaggctgcccag

SEQ ID NO: 475145 - DNA, 201 bp, Homo sapiens
gtacacccatgtggccgtcggaaggattctgcttctatccgtggttgggctgccgcgcttggtcctatggcagctcctcgccgtgtgggccgctcacgcayggcagctggcgggtcagagctctgagaaccagggtgggagccgcagaagtcacggctgctgtgacgtgactgcagaggggaagccagcacttgcgcccca

SEQ ID NO: 475146 - DNA, 201 bp, Homo sapiens
ccaggggagctgctcgttagtcgtctctggggcagaaggaagggaccttcacctggattgggactgggcctgggtccccagtctcacagggagcttgtcckgattgtacctgcccagcctgccctgcagaggggaaggaggcccttggctcggagtatgcctgccccggagctcccaggcccagccggggcccggggtggg

SEQ ID NO: 475147 - DNA, 201 bp, Homo sapiens
attgcactgagccctggtcctcaagtgccgggagcctgggctctgaagcaagacagccactgtcctgtgggtgtgcgttactcacatctgctctgcgtggyggggggactccagccccacatgtgcccccacacagatgtgagcgcaccctcactcaggatgcagggtgtgggtttgctgggcccccttcaaggctgccca

SEQ ID NO: 475148 - DNA, 201 bp, Homo sapiens
cgtggcttctggggtcaggaatccaagtgtggctgagctggctctctgctcagagacctcaccagccacagtcctcttggctctgctggggaaggtcccaygtccaggtacacccatgtggccgtcggaaggattctgcttctatccgtggttgggctgccgcgcttggtcctatggcagctcctcgccgtgtgggccgct

SEQ ID NO: 475149 - DNA, 201 bp, Homo sapiens
agtggcggagggatatgctagttctgctgagccactgttacaggccgagggccgggcttggggcgcctcggtgcctgccgtcctgcctcaccgaggcggcytaggctgcagagagtgggatgtgggcctgagggaagcagctcaggccacatccagttcctgggacccagtcttggcccctggctctattgcactgagccc

SEQ ID NO: 475150 - DNA, 201 bp, Homo sapiens
tctttgaacttctcagatctctcagtttacacttttccacacatttcagaaaattggggccactactttttcaagactctttgctgtccccaccactggcraccagtccttgaataacatcgctgcagaactcactggctcgtggcttctggggtcaggaatccaagtgtggctgagctggctctctgctcagagacctca

SEQ ID NO: 475151 - DNA, 201 bp, Homo sapiens
tgacctacagtcacaaagaccatctgaagtcagtacagatcccaggctctagttatgctaagggtaggggcaagaggagggggttgggtccaagaggtgaytgacgatcgtagagatctgggtgccagcaagggtccgaggggtcgggaactgctctgtccttggccaggccacagcactcctgcagatctttaacaaagc

SEQ ID NO: 475152 - DNA, 201 bp, Homo sapiens
ccaggaaggagaggtttgcttcacaacctggcggatgagcttttccagcctgtgctcagccccacgcccctatgcctctgtctaccctctggggtgctgcrgaacacacgcttcacgctacatcctgcagccactgcatttcctcagaccgggtctgtaaggaagcccaggttcagctgctcgatgcttgacagccagaca

SEQ ID NO: 475153 - DNA, 201 bp, Homo sapiens
tgctctggttcacttctcccatctccgttcatgatgtggatttcactgccaggaaggagaggtttgcttcacaacctggcggatgagcttttccagcctgkgctcagccccacgcccctatgcctctgtctaccctctggggtgctgcggaacacacgcttcacgctacatcctgcagccactgcatttcctcagaccggg

SEQ ID NO: 475154 - DNA, 201 bp, Homo sapiens
gcccgagtgcttgcacctggacggtcctggagtgggtgtctctctgctgcccacgccgtccctcagccgggaatgtgtgttgctctggttcacttctcccrtctccgttcatgatgtggatttcactgccaggaaggagaggtttgcttcacaacctggcggatgagcttttccagcctgtgctcagccccacgcccctat

SEQ ID NO: 475155 - DNA, 201 bp, Homo sapiens
taggagctccttggggctgctggccaggagggagggaggtgacgggtcttgccgtcctcccccgcagcgtggagtcctcccgggcagggtgggattcctgsgggtaggtggagctgcgcacggaggtgatgggtctcaccatcctccaggccttcatacatgcctgatgggcctgtgaagttggcgggagtgggcagtcgg

SEQ ID NO: 475156 - DNA, 201 bp, Homo sapiens
aattggatcaaaataaaaagcttagatcaggcacagtagctgatgcatggaatcccagcactttgagaggtcgaggtgggcggatcacttgaggtcagcaggagttcgagaccatcctggccagcatggtgaaaccctgtctctactaaaaatacaaaaaattagtgaggcgtggtggcacacacttgtaatcccggctac

SEQ ID NO: 475157 - DNA, 201 bp, Homo sapiens
ggagctgcaggagcagctggacctgcaacacaagtgggcggggccagggtgtggggtcgggggtcgggtcacgtgtgggggcatgcgtcccacctctctcytggtggctgggtgggatgtggatacactcccagatgctgtcctaattcacagacactcaagaggggcagatgctgaggcctctggagccaggaccgtgag

SEQ ID NO: 475158 - DNA, 201 bp, Homo sapiens
gtgactatgaccagagcaggaccaaagtgctgcacatgagcctgaaccccaccagtgtggccaggcagcgcctgcgcgaggaccacagccagctgcaggcrgagtgcgagcgactgcgcgggctcctgcgcgccatggagagaggaggcaccgtcccagccgaccttgaggctgccgccgcgagtctgccatcgtccaagg

SEQ ID NO: 475159 - DNA, 201 bp, Homo sapiens
taattggatcaaaataaaaagcttagatcaggcacagtagctgatgcatggaatcccagcactttgagaggtcgaggtgggcggatcacttgaggtcagcaggagttcgagaccatcctggccagcatggtgaaaccctgtctctactaaaaatacaaaaaattagtgaggcgtggtggcacacacttgtaatcccggcta

SEQ ID NO: 475160 - DNA, 201 bp, Homo sapiens
aggaccaaagtgctgcacatgagcctgaaccccaccagtgtggccaggcagcgcctgcgcgaggaccacagccagctgcaggcggagtgcgagcgactgcrcgggctcctgcgcgccatggagagaggaggcaccgtcccagccgaccttgaggctgccgccgcgagtctgccatcgtccaaggaggtggcaggtaggcac

SEQ ID NO: 475161 - DNA, 201 bp, Homo sapiens
gtaattggatcaaaataaaaagcttagatcaggcacagtagctgatgcatggaatcccagcactttgagaggtcgaggtgggcggatcacttgaggtcagcaggagttcgagaccatcctggccagcatggtgaaaccctgtctctactaaaaatacaaaaaattagtgaggcgtggtggcacacacttgtaatcccggct

SEQ ID NO: 475162 - DNA, 201 bp, Homo sapiens
tgcttgggtcaactgaagttggactccatcaagattaaaatttttgccccgtgaaagttcctgtgaagagatgaaaagacaaggtagagataaagaggaamtatttgcaagcttcatatctgacaaagacgatttgttatctgtaatagatgagaaaactctcaaaactcagtaatagaaaaacaaaacagacacacctaa

SEQ ID NO: 475163 - DNA, 201 bp, Homo sapiens
agggcaggtttcctcacgtgctgggttgcctgccatgcctgggccccttcagggctccccgctgctccttgtgttgtgctccacagggcgggtgtctgagkgtggttctgcatcaggccgtgatctcgggtgactcacgctggacgtcagtggggtggtgctcatgccgcagtccacgggaatgcgggctggcggtcccga

SEQ ID NO: 475164 - DNA, 201 bp, Homo sapiens
gacccgctgcaggtttcagcagccccgaagtgtggggagggtgggcggtgtttcctgttgtcagttgagagcctcatggagtaggagccgtggagtcagcygcgttgtagtgagagttagaattgagctgcactgttcctgtgagcagggagcccgaggccttctgacttctgaagagggttcgtgttgaaggccagactc

SEQ ID NO: 475165 - DNA, 201 bp, Homo sapiens
agccgatgtcaggcctgcatggctcctagaggagccctagggctggcctgcccagtgaggggcagggatgagccggcctaggggagtggcagagccagagragcagacagctggcccgagtctggagggattttggcgtttgcaggtggctttgagcctgagggccagtgcctcaccgggtcagagagctctgcagcccgc

SEQ ID NO: 475166 - DNA, 201 bp, Homo sapiens
cagtttcctcgctttgcaaatgccattttggcagggatctgctgtggggcatctccgtgcaggtggagctggagttgcgcatctttctcaggctggcatcrtacaggccccagtgcactctggcagggaggggcagccccctcctggatagccccgcccaaggccgggaggactgtgaaggggggatcccactgcctgacc

SEQ ID NO: 475167 - DNA, 201 bp, Homo sapiens
atgtagctcatgcctgtcccagccacagacaaggccgctgttcctccagctgagtgccacttcaagtcactggcttgcctttatttcaaagccctgatctyccctgatggtgtctgtttaagtcctgggatccggcacagcctggagtgaggacgcggagccagggactcccaggggcccaggactctgcccactcttgga

SEQ ID NO: 475168 - DNA, 201 bp, Homo sapiens
attcatcatttagggtttatctgcatcctgtctcgtctcaggaagccttccgcaacccctccacccagactgtggtccagcccctgctccgagtgcccccrgtgggcctttgtgctctcagtcctggccgacccctccacccagactgtggtccagcctctgctccatgtgccccctgtgggtctttgtgatctcagtcct

SEQ ID NO: 475169 - DNA, 201 bp, Homo sapiens
ctgtccggcgtcccctacaacacgggtgaccctgtgggcaggtgggctcggccctgcatctggccttgcccctggcacacggtgcgtattaattgagttcrgaagacctctgggaggatgtgtttattgttagtatgtttttaatacctttcttctttgttgactcccaggttgatgcttcactgttgtggtgaagtaaac

SEQ ID NO: 475170 - DNA, 201 bp, Homo sapiens
gggattacaggcatgagccaccgtgcccggtctagactgatttttcaaggccaccatggagttgtggtgtgggggctgggaccagggtgagttaaaatgcyccaggcgcactcttcttgagagccacctgattttcttgaccaaacgttcccggattgctgtaagcctttggttagttttcagagttcaaaaatctgattc

SEQ ID NO: 475171 - DNA, 201 bp, Homo sapiens
tgtactttacagaggtgatctcactgtcttcttaattccagtatttcctctgagaagtctgctgtcattctcatctttgttcctctgtcggtcagttgtcwtttcttcctctgactgcttttaagatttcatctgtactactggttttgagcagtttgattatgatgtactttgtgtactttaatgttgtttcctccccct

SEQ ID NO: 475172 - DNA, 201 bp, Homo sapiens
agatgtaaataataattgtaaatgttgtatatgtctgcccatgcagctcccacccctcattcatggaaggagtagagctgttcttccttcttcttgtgtargcccatgtttgtttttatttttatttattttttttgagacagagtctcactctgtcgcccaggctggagtgcagtggcacgatctcggctcactgcaacc

SEQ ID NO: 475173 - DNA, 201 bp, Homo sapiens
catcctcgaatgatacgacaccgccttatgtgtagtgtgagaacctgacagtcacatacttccagtcttctccttcctgccttagtcatctgcttataatrtattttatttatgcacatgataaaccccacaatactttgtttttatttctgtttagtcagctatctttgaaagagatgtaaataataattgtaaatgttg

SEQ ID NO: 475174 - DNA, 201 bp, Homo sapiens
gcacgctgtatctgcttcacgttacttttaatctactgcgtcttcatagttaaaatgtgcttcttaaaagcaggatatagctgagtcttaaatatgcataraatctgacattctctgccttttcactgggccatttacatttaaattgattactactttgattagataagtctatcatcttgttatttgttttctgtttgt

SEQ ID NO: 475175 - DNA, 201 bp, Homo sapiens
aatctcttcattataggccgtgtcttcctgctgctttaaatgtctggtaatctttgactggatggcaggcattgtgaattttagcttgttgtgttctagaygtttttgcatttgtatcaatcttcttgatcttttttcagagatgcagttaggtttcttggaaagagttgggtttcctcgggtcttgctgttgtggtgtgc

SEQ ID NO: 475176 - DNA, 201 bp, Homo sapiens
atgggcactgtttgtggagctccgaaaccattacaatggtgacatcaaagatcacagatgacagagtaccataaaagatatactagtaatgaaaaagttgraaatatatacgacacagacatgaagtgaatccacgcttttggaaaaatagtgccaatagacttgccagacacagaccttaaacttgtaaaaaatgcagtg

SEQ ID NO: 475177 - DNA, 201 bp, Homo sapiens
ttttgttttcagtcatacagtgttttgaaaagggcagtaagagacccgggtattatctgtaagcccagatagctgccatctgttcctccttcattgtcgaygctccaggtatccttcatgtcctctttccttctgaaggatttccggcagcctctcctggagagcaggtggctacgattcctcacggtttccctcgggtgg

SEQ ID NO: 475178 - DNA, 201 bp, Homo sapiens
tgtactccaggagggagggaccttgtaggcagaggaacatggggccagccggcctacactgaggctgggccatgccgaagccgggccacgctggggctgakccatgctgaagccaacctgtgctgaggctgatccatgctgaggctggtccacgctgaggctggtccacgctggggctggtccacgctggggctggtccac

SEQ ID NO: 475179 - DNA, 201 bp, Homo sapiens
atatataaatggacgcttttatcattatgaaatgacctttattgctagtaatattctttgctctgaaatctgctttgtttgatacagagttgcactgtcartaagcaaccttgggtatatcacgcatttggttccagatcactgtgattaaaccaatatcacaataaagcaagtgccatgcattttgtttcccagtgcata

SEQ ID NO: 475180 - DNA, 201 bp, Homo sapiens
gagaggcttcacagggacaggaggtggcctcagatgtcctaaaaaggcagatgtaggattggagctgataggagggagggaggccctttctgtagggagarctttcaaattcaggcttgtttctaagcaggggctctttatccagcatcccagggcaggtgctcagttctccacaaagcgcttgaggctgcatacacattt

SEQ ID NO: 475181 - DNA, 201 bp, Homo sapiens
atcgatgtcaagtagctgacatttttaataatgtttgcgaagcttttatatccttgccaattttctgtcttcctgttctatcagttattgatagatgaatrttgacatctctgactattattacagatttctctattccttcttgcattccagtttttgtttcatatataaatggacgcttttatcattatgaaatgacct

SEQ ID NO: 475182 - DNA, 201 bp, Homo sapiens
gcctcgaggctggcccacccgcctgctgcctgcctgttggccatgtggccccttggggcttctgtcctgtgcattaggcgagcaggcagccagcgctgacrgggttgacggacgcacggatggtctccttctctctgacctcgggagacggtagatgtgtccaggacacctgctgtgcctctctgcgtcactccaggcacc

SEQ ID NO: 475183 - DNA, 201 bp, Homo sapiens
caccacgcctggctaatttttgtatttttagtagagatggggtttcaccatgttggccaggctggtctcgaactcctgatctcaggtgatccacctgcctyggcctcccaaagtgctgggattacaggcgtgagccactgcatctggtcacatttcttgaaatttgttttaaggtccatccagaatgttactgccttggta

SEQ ID NO: 475184 - DNA, 201 bp, Homo sapiens
ttctctgtaaagagccgtatggtaaatacttttggctttttgagccacgggctctgtcacaggaaagcagccgtaagccatatgtcaatgaatgggagtgrctttgttccaggaaaactttccttacaaccataggtggtgggctgtttgctgagcagcagtgcagagaaagcccccagcctcgaggctggcccacccgcc

SEQ ID NO: 475185 - DNA, 201 bp, Homo sapiens
actcttcctttcatgaaagatttctctgtagcatgcaatgctctctaaaaccattttacctacagtagaacttctttctatcttggagccaagcctctcarcccctcaaactgctttatcaactaagttgatgtactttgctgtcatttttcaacaatgttcacagcattttcaccaggagcagattccatctcaagaaac

SEQ ID NO: 475186 - DNA, 201 bp, Homo sapiens
tagggtagtggtatagggtattggttggtaacctttctctgtaaagagccgtatggtaaatacttttggctttttgagccacgggctctgtcacaggaaarcagccgtaagccatatgtcaatgaatgggagtggctttgttccaggaaaactttccttacaaccataggtggtgggctgtttgctgagcagcagtgcaga

SEQ ID NO: 475187 - DNA, 201 bp, Homo sapiens
attgattgactcttcctttcatgaaagatttctctgtagcatgcaatgctctctaaaaccattttacctacagtagaacttctttctatcttggagccaakcctctcaacccctcaaactgctttatcaactaagttgatgtactttgctgtcatttttcaacaatgttcacagcattttcaccaggagcagattccatct

SEQ ID NO: 475188 - DNA, 201 bp, Homo sapiens
tccctccctggcagggaggttcagggtgtgtttgaagaaatggcagttccctttgcccaaccacacgcatcttcattgggaaaatctggctccgcacctcmtctgaatgcacggccctgtgcagccgacagcagggctgctctgcgacccgggagtttccagctgcctggggatggacttggcgtcagagcccagcgctgt

SEQ ID NO: 475189 - DNA, 201 bp, Homo sapiens
gaggcgaaaacgtctccctccctggcagggaggttcagggtgtgtttgaagaaatggcagttccctttgcccaaccacacgcatcttcattgggaaaatcyggctccgcacctcatctgaatgcacggccctgtgcagccgacagcagggctgctctgcgacccgggagtttccagctgcctggggatggacttggcgtca

SEQ ID NO: 475190 - DNA, 201 bp, Homo sapiens
cacagcagctctctcctctctcttcctgggctcaggcatcttctcacccttcaggaacggggaaccagggagagggggcacagagtctggaccttgggcaygctgagaggcagctgagggttaatgaggccaagatataatgtcacaaagtgcaggccacgtcccggcggtaccgcctgtgagccaggtcccctggaatgc

SEQ ID NO: 475191 - DNA, 201 bp, Homo sapiens
ggcctggctcctggaccatcacagcagctctctcctctctcttcctgggctcaggcatcttctcacccttcaggaacggggaaccagggagagggggcacrgagtctggaccttgggcatgctgagaggcagctgagggttaatgaggccaagatataatgtcacaaagtgcaggccacgtcccggcggtaccgcctgtga

SEQ ID NO: 475192 - DNA, 201 bp, Homo sapiens
ctcagagcctccccacctccccaccccggcccagcttgtctgtccatatctgtttccaaacacccttcccgctggctctgccattcccaccctgcgtcatycccagtcctgtccttggttcctggcctggctcctggaccatcacagcagctctctcctctctcttcctgggctcaggcatcttctcacccttcaggaacg

SEQ ID NO: 475193 - DNA, 201 bp, Homo sapiens
ggtcggcccagacagccccaggaagcaagggggctgtgcacggtacctgccaggttataagaaatcacatcctagtccctgggagcaagggggctgtgcayggtacctgccaggccgtaggaaatgagaacccagctggctggaagcctgacacgccctgtgtcatggttgccaggacattccttctgaggccactcatgc

SEQ ID NO: 475194 - DNA, 201 bp, Homo sapiens
tttacgcgtcagtttgagggaactcgatggactttcgctagaacctatgatccagatgaggaaggggcaaggagcccagtgtggcaaccctggccccaagygactcctctgcccacaggccgctttccaccaccggctcagagcctccccacctccccaccccggcccagcttgtctgtccatatctgtttccaaacaccc

SEQ ID NO: 475195 - DNA, 201 bp, Homo sapiens
agccgcagggcggtgcccggtggggtggggcatagtgaggggaagatggtggcgctgcaggtgctgctgctttggcctgtcatgtctaagccgaggtggcmgctcctcagggaagccctccctgcgcactaggccttgactgccttctcctgtcacagggtcctgattgtcacgctccttactctggaattatcttatgcg

SEQ ID NO: 475196 - DNA, 201 bp, Homo sapiens
cgggctgcttttctagagctctctgcctctcccccgccttgtggacccatcagggtcctcaggcaagaggtttccaggcagatgcaggtggagctccgggstccgctttggtgcctgtgttggcgctgccccatccagtgcggattgaaagtggctgtggggcaacccgagtatcctgccagaatccaatgtgggaggcgg

SEQ ID NO: 475197 - DNA, 201 bp, Homo sapiens
gcgtgtgtccgtgtgcctgtgtgtctgtgcacatctgcgtgtgtctgtgtccatgtgcgcgtgtgtgtgcatgtgcgtatgtgtgtctgtgtacgtgtgcrcatgcgcttgtgtgtgcacgtctgtgtgcgtgtctgtgtccatgtgcgtgtgtgtgtgcatgtgtatgtgtgtacatatgtgtgtgcatgtctgcatgtc

SEQ ID NO: 475198 - DNA, 201 bp, Homo sapiens
ctggagggaacgttggcaggagaggaggcgtgattggctcccgagaagctgctcttgccttgcccatgctctgggttccagttcccatgtgctgggctgtrctggagttgggccgggggctgtccccgctgcctgcgggcacctgtggttccatgggggagggtgagtcgtgccgagcacttcatgaggggcagaggagca

SEQ ID NO: 475199 - DNA, 201 bp, Homo sapiens
ccgggctgcttttctagagctctctgcctctcccccgccttgtggacccatcagggtcctcaggcaagaggtttccaggcagatgcaggtggagctccggsctccgctttggtgcctgtgttggcgctgccccatccagtgcggattgaaagtggctgtggggcaacccgagtatcctgccagaatccaatgtgggaggcg

SEQ ID NO: 475200 - DNA, 201 bp, Homo sapiens
tgtgcatgcccttgtgcctgtgtgcccatgtgtgtgtctgtgcgtgtgtccgtgtgcctgtgtgtctgtgcacatctgcgtgtgtctgtgtccatgtgcgygtgtgtgtgcatgtgcgtatgtgtgtctgtgtacgtgtgcgcatgcgcttgtgtgtgcacgtctgtgtgcgtgtctgtgtccatgtgcgtgtgtgtgtgc

SEQ ID NO: 475201 - DNA, 201 bp, Homo sapiens
ctgggtcgcagccctcccaaccgctggctcagccaagcccgtgcacttgctctcttcctgagagacacatggaacgtgtcacctgtgtggcagtgctgttscttggcccgactggggcgtctccccccagccctatgggggtgctcaaggcatggccctggagaccctggaggtcagtacagtggtgtcctgggggacacg

SEQ ID NO: 475202 - DNA, 201 bp, Homo sapiens
tgattctaagatgattaagaaaaccatcaatgatttaaagaaagtgttcactgcagtccttattgagcggtttgccgcgtgcagggcatgtgggggtggcrcaccaggctgcaggcgcccttcatgacggcaggcaggggacctcctaggagtcttggctgtgacacgtgaggtatgaaggccagaaaggtgaacgtgtgg

SEQ ID NO: 475203 - DNA, 201 bp, Homo sapiens
agcagagcagggcaggctgtccactggggctggagcctgtcctctgctccctgctagcctcctggatccttgtctcctgctcccgcgcgcctcctgcagarcggcactgctttttgtctcgtgtacctgctccaggccaccagttagaattcactgctccccgctgggtcgcagccctcccaaccgctggctcagccaagc

SEQ ID NO: 475204 - DNA, 201 bp, Homo sapiens
agtgttgggcagttacccctcccttgccctcgggcctttgtgagtgtggcttcctggaactctgggggatttgtcaccagtgactgcagggggctctcccrtccctttcatccaggcttcactgtctgccctaagctggggactggtccagctgacctggatggtgcggagtgtgggccctgctggccagcatggcgttgg

SEQ ID NO: 475205 - DNA, 201 bp, Homo sapiens
ccttcctgggagccctgacctcgcacagtgctcaccgtcatggtgccacagcgggggtgccaacgctggggctgggtcccaggtcccgtcctggttctgcytatgacttggctcatgggtcctgctcggctcttttttgtgcctcggcatgttctgagagaggtgtgggggtgagggctccccgctgaccctcccgtgggc

SEQ ID NO: 475206 - DNA, 201 bp, Homo sapiens
ctgctgtgacagggcccccctggggtcctgcactatcccagcgagacccccaaagcaaggccagcagagagcttcctgacagctgcctcgctttggcgacrgccctggctggggtgcagcctgtgcccctctccgcccccttgtgaagtttcggatgggcgttcccagcagtgctgacaggctcacgccgcccttgggctt

SEQ ID NO: 475207 - DNA, 201 bp, Homo sapiens
atgctgaattttagatttcccatgccccctctccctgcagaggcaactgctgagcagacggtgtgataaatgtgtgtgtgatctgtgccaagtgcccttcytgggagccctgacctcgcacagtgctcaccgtcatggtgccacagcgggggtgccaacgctggggctgggtcccaggtcccgtcctggttctgcctatga

SEQ ID NO: 475208 - DNA, 201 bp, Homo sapiens
ctggaggtcagtacagtggtgtcctgggggacacggtggcttctgagcccctttgtccttggggatgtggggactggggccggtgctgccgctgtcctccyagattctggtggagatttgaacccaagtcctcagcgaggcatgccacctctgagccccttcctcctcagggatgtggggtgggggtggcgctgctgcttt

SEQ ID NO: 475209 - DNA, 201 bp, Homo sapiens
cagtatttcctaactttctgcaaacagacactatacaagtttttgttagatgtatacccgagtatttaagatgttctgtaaattatattgccttttaattttgtttttcacttgtttgcaattgctttatagaaatgtggttaatttttgtatgttcatcttatttcctgcaaccttcgtggactcacttagtgttccagg

SEQ ID NO: 475210 - DNA, 201 bp, Homo sapiens
gggggctgagctggccacgtggacttgaacccgagtcttcagcgaggcattcaccccctcccaaccgctggctcggccaagcccctgcacttgccctcttctgagagacacatggaacgtgtcacctgtgtggcagtgctgttgcttggcccgactggggcatctccccccagccctatgggggtgcccaaggcacggccc

SEQ ID NO: 475211 - DNA, 201 bp, Homo sapiens
atagaagacatccagattggaaaggaagaagaaaactgtctctatttgcagaagacatgattttatacattaaaaaactgaaagaatacacatttacaaarttattagagctaataaacaagttcaacagagttgcaggatacaagatcaatatttaatattatatttaatataagataatgtttaatattatacgttagc

SEQ ID NO: 475212 - DNA, 201 bp, Homo sapiens
agtatttcctaactttctgcaaacagacactatacaagtttttgttagatgtatacccgagtatttaagatgttctgtaaattatattgccttttaattttgtttttcacttgtttgcaattgctttatagaaatgtggttaatttttgtatgttcatcttatttcctgcaaccttcgtggactcacttagtgttccagga

SEQ ID NO: 475213 - DNA, 201 bp, Homo sapiens
cccttccgagtctgaacctgccccccagggaggagggcttgcccctctctttcacctgcaagtgcccacctgtgccactgagtgcggctgcccggccccadcctcatgacggtgtgggggctgagctggccacgtggacttgaacccgagtcttcagcgaggcattcaccccctcccaaccgctggctcggccaagcccct

SEQ ID NO: 475214 - DNA, 201 bp, Homo sapiens
aattagttcagaaaagtcatgaaacaagtaaaaaacaactacagctggcagcaccagcagccagccctggcaagggcagagaatctgattccagagttgcygcaaaattcggaagacatgcaagaagcaagaaagtataattcatacatggtggagaaagcaatcaatcagtagaagcagaatatcaataaaaagaaacta

SEQ ID NO: 475215 - DNA, 201 bp, Homo sapiens
gtatttcctaactttctgcaaacagacactatacaagtttttgttagatgtatacccgagtatttaagatgttctgtaaattatattgccttttaattttgtttttcacttgtttgcaattgctttatagaaatgtggttaatttttgtatgttcatcttatttcctgcaaccttcgtggactcacttagtgttccaggag

SEQ ID NO: 475216 - DNA, 201 bp, Homo sapiens
tgtggttaatttttgtatgttcatcttatttcctgcaaccttcgtggactcacttagtgttccaggagttttctgcagattgctcaggattttccacgtgrgccgtcacgtcattctaggagttttctgcagattgcttagggttttccacgtgtgccgtcatgtgatttccgagtagggacagttctgttcttttccaat

SEQ ID NO: 475217 - DNA, 201 bp, Homo sapiens
attaagtgtggtattctctgtacgtcattcatagataccctttctcaggctgaggaagttctcttctaatcctagtttgctgagattttttttttttttttgaggaatgcctgttgggtttgatcagatgctttttctgcatttattgagttgatcatatggttttccttttgtactttgttaatatgtggaattactttg

SEQ ID NO: 475218 - DNA, 201 bp, Homo sapiens
cattaagtgtggtattctctgtacgtcattcatagataccctttctcaggctgaggaagttctcttctaatcctagtttgctgagattttttttttttttttgaggaatgcctgttgggtttgatcagatgctttttctgcatttattgagttgatcatatggttttccttttgtactttgttaatatgtggaattacttt

SEQ ID NO: 475219 - DNA, 201 bp, Homo sapiens
ttccagtagcttcttagtatatctgatgggattttctccttagacaatgatattatctgtaagtacacttgcacttccacttgcccacactggatgcttgygaagttccttgttcttgtgttatttcactagctggaaccttcaggatgatgctgaatacaagcagtgagagtgaacatccttgtcctgtttcagatctga

SEQ ID NO: 475220 - DNA, 201 bp, Homo sapiens
tctgcacaacccgcccgtcttcacagcctgcgctgcacgggggcaccgtgccgggcttgctctgcgttccttgtggatttcctgcttctcagatcacagtyatccatttctacactcttgaaactctcaaacctttgaataataaaaacacaccaagtctttaagctatcagaaatgtacttcttcgcttttgtataattc

SEQ ID NO: 475221 - DNA, 201 bp, Homo sapiens
gttaaacggggtatgtgagccccttgatcctcagagctcaatctcctcagcctggtccttccacttggcctgctgcctctctagagtgctgcactcccacrccagacccggcgacgccggccagagcccagctccatgcctcacggctctgattcactggccacatggtgctgaagtcacggctccgacagcagctccgct

SEQ ID NO: 475222 - DNA, 201 bp, Homo sapiens
aatcccagcactttgggaggtcgaggtgggcggatcaccaggtcaggagattgagaccatcctggctaacagagtgaaatcccgtctctgctaaaaatacraaaaattagccaggtgtggtggcaggtgcctgtagtcccagctactggggagtctgaggcaggagaatggcgtgaacccgggaggaggagcttgcagtga

SEQ ID NO: 475223 - DNA, 201 bp, Homo sapiens
gacagcgtttagaggctgtcagccctgggtacccaggacgtcacgcgcagggagggacggctcttccccctgggggcctgtgccacccgttcctgattgaygggcaggggagctctccctgcagcgcgagagacagcagaggccccatgaaggtgccacacctaacggggtattgacttctgtgctttgggtcaaggatgg

SEQ ID NO: 475224 - DNA, 201 bp, Homo sapiens
atgttgagggaacgcactttctacgattcactttctttgcaatttaaagtttatttggtagctgataatttgataacctcaaaatgtcccatgtgcacctrataggtatgtgtgttctgccgattaatagatgtgttttggccatttatagttaatgtaattttttatgcatttggatttaggtacattttatgattagtt

SEQ ID NO: 475225 - DNA, 201 bp, Homo sapiens
aacgttttgatcccctctcaaggaagcccgaaccctctagttatccatcaccctgctgtctcccgtgccctcaaaccctcagccaccagtcggctactgcstgcctctgtgggtctgtctgttgtgagcatttcctggaaagggagtcccgtggcctgttctgagcatttcctgggagggagtcccgtggcccattaccag

SEQ ID NO: 475226 - DNA, 201 bp, Homo sapiens
ctcgcatgctctgcccccttgcagtgctctgctcccagcaagtgaaggtcatggcccttggcattcctggcctcgcgctgcccgtggctgtctctgtggcrggtccggccacacctgtggacaggccctttctgtcccccctggactttgaggaaatgaagtcagtattcaccagcacagcagagctttatttttctacac

SEQ ID NO: 475227 - DNA, 201 bp, Homo sapiens
ctgcccgggcagcgccactcgcatgctctgcccccttgcagtgctctgctcccagcaagtgaaggtcatggcccttggcattcctggcctcgcgctgcccrtggctgtctctgtggcgggtccggccacacctgtggacaggccctttctgtcccccctggactttgaggaaatgaagtcagtattcaccagcacagcaga

SEQ ID NO: 475228 - DNA, 201 bp, Homo sapiens
agatgtccagaggtgcgaggcaagttctgagggaggttctccaatgcagggatcaagctggcggtaggtgacacattgagtggtgtgctggcggctgcagyggccgccaccgtggctcaggaagtaggttttctgggctaggactccgcactgagctgggtttcctgcctctaatctgctctccagcagtcaggcctgcca

SEQ ID NO: 475229 - DNA, 201 bp, Homo sapiens
cgcacccccctgtctgtggtcctcgtgtgtggggtacacattcccgctctaggggctgagctcgtacccagctgtctgcggccctcgtgagcaggtacacrttccccactgtaggggcccagctcgcatccacccgtccgtggccctcgtgagtggggtacgcatccccactctaggggcccagttcacacctgcctgtct

SEQ ID NO: 475230 - DNA, 201 bp, Homo sapiens
ggctctctgatgtcttctcagctgggccatctcgtctgtaaaggacatgatgatagtccttggcttggggtggtgggaaacacataaacgtgacgatgtaygttcaggaaacgatgacggcaatgataaggtctcttttacccacatgtggcgagtttcttactctacaaggctacagagtcgcaggctcttcacctggag

SEQ ID NO: 475231 - DNA, 201 bp, Homo sapiens
ggcatgaaccaccatgcctggtccatttcccgattatttattggtagtaaaattcactttgaggtgtgtggctctgtgggtcttgacagttgcactgagcrtcccccaccacagccatgattcagttccatcaccctaagagtttctcctgcctccccttggtcacagcgctcttcccctgccgccagcagccatgtgggt

SEQ ID NO: 475232 - DNA, 201 bp, Homo sapiens
tttctaacagctctattgaaatgcgacgcacattccacgtacctcgtccctttgaagggggcagttcagcgacttttatgtccacggctagtgcaaccacygtcacccttcgcagaacgttttgatcccctctcaaggaagcccgaaccctctagttatccatcaccctgctgtctcccgtgccctcaaaccctcagccac

SEQ ID NO: 475233 - DNA, 201 bp, Homo sapiens
ctgccaggcctgggtcagtggagctgtgcagactgtggtatagaagctgccttcaacagttgtattccatttgggcttctccatttcctgattagtagtaktattaataatattattttcaagacggagtctcacactgttgcccaggctggagtgcagtggtgcgatctcggctcactgcaacctccatttcccgggttc

SEQ ID NO: 475234 - DNA, 201 bp, Homo sapiens
gagccccagagtttctccttcaccctggagctccctccaggcagcccctctcagcccttgtcctccccgtggagagctgctcttgaagttgaaatcgtggyacatgcaaaggaagaggctggtttcagccccgcaggctctggcagctgcatccacgcttcctgctgtttctcactccccacccggcccgccatttctaac

SEQ ID NO: 475235 - DNA, 201 bp, Homo sapiens
ctttgctgagtttcactggatcttctcagaggcaccggctgttgaattctgtttcctctccccacacgctgttgtggttttcccttcagctgctagcgccstgctgtcttggatgctaaggggcgcctacggtgttccatgaagctgttctctgtggacaggcaggatctctctaaacatacagttggcgctagctttctt

SEQ ID NO: 475236 - DNA, 201 bp, Homo sapiens
ctgagttccccaaagcaagcgaccgcagaaccagattcaactggcagtggacctggcccctccccgagcgccggtgactcagtggacctgctttgtcttcyggcctacccttctctcacctccaccttagaaccccaggggtggtgcctgctcggcactagcctttgaggccccttaccgaccatttggatgtgtttggtg

SEQ ID NO: 475237 - DNA, 201 bp, Homo sapiens
gtaccctggatgaggacagcacaagctcgtactccacccggggctccgggagtgcttggtgcttcccgaggaaggcagggtgagagggtcccggagtgccrggctccaccaggactcaccgccttcacctcctgggacgccggtacctggcagtgaactctggagggcctgcgggtcattagagtcaggaggtctgagcgt

SEQ ID NO: 475238 - DNA, 201 bp, Homo sapiens
gcaaaggttcatgtgaataaggagaaagtaaagtcatagcattcctatttcagaagctggaatgtaattggagagttggtgatggacttagctgacttgaraaaaccaaatgctaatttgggagtggggaaagctgagagctagcttgatctgtgctgcagagttttgaccacgcttgggagctgtgactgcttacttcca

SEQ ID NO: 475239 - DNA, 201 bp, Homo sapiens
ctgacctcaagtgatccacccacctcagcctcccaaagtgctgggattacagctgtgagccactgtgcctggtcctagattttttttttttttttttttttgagacagggtctctctgtgtcacccaggctggagtacagtagtgtggtctcggctcactgcagcctcgacatcgcaggctccggtgattctcctgcctca

SEQ ID NO: 475240 - DNA, 201 bp, Homo sapiens
tcctgacctcaagttatgtacccaccttggccccccgaactgctgggattacagacgtgagccaccacgcctggcctagattcttttgtttttttttttttgagacgaactcttgccctgtcatccaggctggaatgcagtggtgtgatcttggctcactgcaaccttcgcctcctgggttcaagcgattctcctgcctca

SEQ ID NO: 475241 - DNA, 201 bp, Homo sapiens
ctgcatcacagaagggtctcttggttgttgtgaggcagcccttgcagctcacaagggctggagtccctccgaggtgcgcgggtcagcctctctcagaaggyggccacctctgtcacagctctcctgggttttgggctggagtaccctggatgaggacagcacaagctcgtactccacccggggctccgggagtgcttggtg

SEQ ID NO: 475242 - DNA, 201 bp, Homo sapiens
cttggcacgcttggcatttgggctgggtaattcttttttctcaggactttcttgtgcattgtgggctgtttaacaacttccctggcctctaccccctggaygccagccagcagcagacacatgtgaccacccccctgtgacaatcaggtgtctccagacagggccagatgttcccaggggcaaaactggaccccactggga

SEQ ID NO: 475243 - DNA, 201 bp, Homo sapiens
ggggaccctatgaaataggaagggagtgggtgtcaagtcctgtagccgagcccccacttcagggaggaaatcatttgctcgtggccaagatgccgctgttyttggctccttgcctgtcccgttgtgcctgaatctggccttgcttcccatcccggcgggtgggcattatacccgtcagcaagggcaggcctgagggggtga

SEQ ID NO: 475244 - DNA, 201 bp, Homo sapiens
ttctctgcagatgcagtaccagcagagcatgcaggtgagtggcatgtgcctgggtgggagtctgctctggggagaccctgggcccgggcaggacctcttcmagtcttctgtagttgaggtgggtcggtattagcagagcctagagacagctattcgtctcccaggtctcactatgggcactcctcattttggggtcgtagc

SEQ ID NO: 475245 - DNA, 201 bp, Homo sapiens
tagcagcagtgcgaggcgtgtgtctggaggcagcgatgtgatcagcttggtctcccaggagcatggtctgtctcggggagtgacttacgggtgaggaaagyggaggccagcacacaccctttgaggtacgtgtcatcctcggcaagacctcgggcacaggagggggaggaggagtaatacagagaggccagtgggaaagat

SEQ ID NO: 475246 - DNA, 201 bp, Homo sapiens
ccggctaccagatcgacatcaccacggagaaccagtaccggctgacctcgctgtacgccgagcacccaggcgactgcctcatcttcaaggtgggtcctgcrtgtgacggctctccggctgtctcgctctctgtctcctcctgtggggagatccgaccgtagccctcagcaaaggagcagcctcgcgtccaaaggggatggt

SEQ ID NO: 475247 - DNA, 201 bp, Homo sapiens
agtgtgtgggacccacatccccgtaggaaagtggttgctccctgtgggagtcacagcgtgacgagggtttgctgctgcgtgggcctttgggcttatggatkgggctggagagtagtggtggagcagccaggcctgaaaccacaccttgcctgggtccctttccatggggtaagagtgacctttcctctgtctgctgggaag

SEQ ID NO: 475248 - DNA, 201 bp, Homo sapiens
taactacaccattttacattcccaccagcagtatatgaagattccggtttctctgaatttttaacccttattatgatgtcttttttcttatggttagcctygtgggtgtggagtggtatcttaaagtggatttttttttttaatgactgcatgatttttcattggatggatataccataatttaaacaatgacttattgtg

SEQ ID NO: 475249 - DNA, 201 bp, Homo sapiens
agagacctgaatgtaagaaagatcctccctaaatgcagctgctgttccagccctcctggttctccgtgcagatctgggtgtatttgccccgccccgccctygtcctccctcacctgcaggccttacctgacatttctgtagagcaggtcggctgatgatgaattctttaagctttcgtgtctgatctgaaggcatctttat

SEQ ID NO: 475250 - DNA, 201 bp, Homo sapiens
gaggttttgaagtgttcaggacgcttgcctgagttccccaaagcaagcgaccgcagaaccagattcaactggcagtggacctggcccctccccgagcgccrgtgactcagtggacctgctttgtcttctggcctacccttctctcacctccaccttagaaccccaggggtggtgcctgctcggcactagcctttgaggccc

SEQ ID NO: 475251 - DNA, 201 bp, Homo sapiens
cagctgtccatctgtccatgtgcaactgagactcaattggtggcttgctggtggggatttggtggcatgcttccttgcttccattttttgtctggtaaatyggcagcatggctcccagttgccattgaagaatgtggttacaggcatgggtgtattatgagctccaatgtgcgttaggggagtggggctgtccagaggctc

SEQ ID NO: 475252 - DNA, 201 bp, Homo sapiens
gcttgcactgggaggctgggttcctgggaactcactgtactgtcctgacaacttttctgtacacctagtcgttccaaaatcaaaatcaaaatttactttaraaacccctgaggtaaggatcattgggaggttttgaagtgttcaggacgcttgcctgagttccccaaagcaagcgaccgcagaaccagattcaactggcag

SEQ ID NO: 475253 - DNA, 201 bp, Homo sapiens
agaggaaagcattcctgtggctgaaggcgaaacacttgcagcaagaaaatgaagtggagtgacttataacccgacgcgtcaaataaacgcgggtgaatcakgctgaccgaaataaatgatggcgtgactcaatggggcagatgcagctcctccctccggaaggattgcagataaaatggatgtagttctctgccctcaaga

SEQ ID NO: 475254 - DNA, 201 bp, Homo sapiens
acacaggagccagaggaaagcattcctgtggctgaaggcgaaacacttgcagcaagaaaatgaagtggagtgacttataacccgacgcgtcaaataaacgygggtgaatcaggctgaccgaaataaatgatggcgtgactcaatggggcagatgcagctcctccctccggaaggattgcagataaaatggatgtagttctc

SEQ ID NO: 475255 - DNA, 201 bp, Homo sapiens
ctgactggctcaacacaagtagacagattcagaaggaactgcaggcagatgcgtctgtgtatgcagggctggcacatacctgtactgctgcggggcccggrggcaggcacacccagcaacagggagctgaccggggcccagagcagggcttccaagcactgttctcggtaggaggacctgggcgtctttggaaagatacct

SEQ ID NO: 475256 - DNA, 201 bp, Homo sapiens
acaacaacatagatgaatctttttttttttttttgagatggagtctcgctctgtcgcccaggctgtagtgcagtggcgtgatctctgctcactgcaagctycgcctcctgggttcacgccattcttctgcctcagcctccagagtagctgggactacaggcgcccaccactaagcccggctaattttttgtattttttggt

SEQ ID NO: 475257 - DNA, 201 bp, Homo sapiens
cctgacctcaagtgatccacccacctcagcctcccaaagtgctgggattacagctgtgagccactgtgcctggtcctagattttttttttttttttttttttgagacagggtctctctgtgtcacccaggctggagtacagtagtgtggtctcggctcactgcagcctcgacatcgcaggctccggtgattctcctgcctc

SEQ ID NO: 475258 - DNA, 201 bp, Homo sapiens
atggttacctcacacagtcggaagagcgacctggagaaagaggccttcgggatggggagcaggaagtgtgtcggtgcgtgaggatgcaggggtccagcgargaggctgtgggtagttcagggggaggtggtggggtggcaaagaccaccctgcagtgaccacataatcctcgagggccagccccctctgccccagggctgc

SEQ ID NO: 475259 - DNA, 201 bp, Homo sapiens
atccagagggcaggtgtgtgaggggaggatgctcgggcggggcatggttgaaaacacagtcaccgatatccagagggcaggtgtgtgagggaggatgcttrggcggggcgtggttgaaaagacagtcaaccgatatccagagggcagatgcgtgagggaggatgcttgggtggggcgtggtcatgcacacctgtgatccta

SEQ ID NO: 475260 - DNA, 201 bp, Homo sapiens
gtcacacaggcctgggcacatgtgacatgtgcagcacacgggttcacgcaggctgggggcatgttagtttctacgactttgaagtcacaggcaaggagggrcacagtgcgtgtggatgagcctgcgtgaacacacgtggggaagggcaggatgccagtgccgggagtgtggtgtggacaccctcatccttagggtgctgga

SEQ ID NO: 475261 - DNA, 201 bp, Homo sapiens
gtggctcacacctgtagtcccagtggtttgggaggctgccgcagggggattgctcgagcctagatgtttgagatcagcctggggaacgcagttgagacccygtgtgtaccaaaacaaaaattagcggtgctcagtggtgtgcacctgtagtcccagctactcaggaggctaaggtgggaggatcacctgagcccaggagga

SEQ ID NO: 475262 - DNA, 201 bp, Homo sapiens
gccgaagttccctgttctcctttccccagcccctggcagtcactcctctgctctttgtctctgggtttacctgttctggacgttgtgtatcagtggaatcrcaccataggtggcctctgtgctggcgctttcctctcagcacgttctcaaggggcgtctaccctgtggcacggatcagcgctcccttccaccacatggcac

SEQ ID NO: 475263 - DNA, 201 bp, Homo sapiens
ttgtcagtcttatgtgatgatcctgtggcaggtgatgacagggtctgtgcttttgttgtcttttcagaggctgctggccaagctgcaaagctgggagagaytggaccagaccatgggcctgagcatcaggtagggaagggcaggtgtctccggggtcccgccttctttgaagggtcctgggtgaagagcagagcctgcttc

SEQ ID NO: 475264 - DNA, 201 bp, Homo sapiens
ggcagagtcttgccatgttgccctggctggtatcaaactcctggcttacacgatcctcctgccttggcctcccaaagtgctgggattacaggcatacaccrtcatgcctggtctaaaatattgtgtttttttttttaatttttttaagagatgaggttgcccaggttggagtgcagtgatgtgatcatagctcactactgc

SEQ ID NO: 475265 - DNA, 201 bp, Homo sapiens
gaggggctggtgcgagcgtcctctctgagcagccggaggctgatggccaggaaggtggatggagccgtcctcgctgtgggggtcgacccctagtctcctgygttggccttggctgtgggcctggtagagggcaggtttcctcacgtgctgggttgcctgccatgcctgggccccttcagggctccccgctgctccttgtgt

SEQ ID NO: 475266 - DNA, 201 bp, Homo sapiens
gggatccactcgaggatccaaacacttcccacggggccccactttcagcactggggattacaattcaacatgaggcatggggcagggacacagatccaaayggttctcacccaccatagtggaagacgattgtctggtgcttgtagcagcctcttcacgcagtctgtgccaagctgagtgccagcgcttgggtggtgggat

SEQ ID NO: 475267 - DNA, 201 bp, Homo sapiens
ctgccaacaccaggattccagctcggggagacccgttttggatttccgatctaaagtactataaaatattacatttgtgggctttttttttttttttttttgagatggagtctcgccctgtccccaggctggaatgcaatggtgcgatctcggctcactgcaacctccgcctcccgggtacaagcgagtctcctgcctcag

SEQ ID NO: 475268 - DNA, 201 bp, Homo sapiens
cagctgtacaggaagcatggtgctggcatctgctcggcttctggtgaagccgcagggagctttcagtcatggcggaaggtgaagggggaacaggcacgccrcaatgcaaaaacaggaatgagagagcgagagagtgagcgagcgtgagtagtgttgggagggaggtgccacacacttctaaatgaccagatctcatgagaa

SEQ ID NO: 475269 - DNA, 201 bp, Homo sapiens
tagagcttcctgggaaggccatactctgcctgggcctggagcggggaggctcagctcctggtctctccatcccggctgcactcctcccagtggttctcacsgaattttccccacctcccttttcccctcttctcaaaacccagggaaggaagccttctgttacgagagggagaaaatcagtggtaagaagaagtggagtga

SEQ ID NO: 475270 - DNA, 201 bp, Homo sapiens
acattcagagatgttaaaggtgacagccagcctcacctggccgttccgcacaggtgtgtttgctcctggcctgtgaggcacaggtgggtgggcctgctgasgactgagccgccctcgggggtactgggctgctccctccgcagcctctgccccttcagttgtccttggtgtcacggcacacccaagagccttgtaagttcc

SEQ ID NO: 475271 - DNA, 201 bp, Homo sapiens
gcgggtgcctgtagtcccagctacttgggaggctgaggcaggagaatggcgtgaaccccggaggcggagcttgtagtgagctgagatggagccactgcacyccagcctaggcgacagagcgagactctgcctcaaaaaaaaatatggggagatatatatatatatatttactatttaatgattgctcagtttgaaaaactt

SEQ ID NO: 475272 - DNA, 201 bp, Homo sapiens
atggccccggaggtccagcgcctccctcccccatgctccaggctggggccccagctccctcccggttcctctgtctgttccgggcagcagtctgtggcgcyagggccatgcccatgccagctgccgtagctgtgtcccagctgtttgctccaggtttattttgatggtgtacccctttataaaaactgtggaatttgcaca

SEQ ID NO: 475273 - DNA, 201 bp, Homo sapiens
gtggcagcctggaggtacagtggcagacctgctggccgggggtcaccggctatgagggtggggcccacgcctgggccagcgtcctctgctgtcgggctgtrccatgggtctgtgcccccagcctctgctgggcggggtggtggtggtcgtggggcagctgcagcctgccccctcccttatgtctgtggctgggcctcgtga

SEQ ID NO: 475274 - DNA, 201 bp, Homo sapiens
cgttccctcctcaggctggtggaggagcctccgctgtcccgggacttggggcagctctcccttctggatttcctcctcccacatgtcctgctggggacacrtggcttcctatctccccatggccccggaggtccagcgcctccctcccccatgctccaggctggggccccagctccctcccggttcctctgtctgttccgg

SEQ ID NO: 475275 - DNA, 201 bp, Homo sapiens
tcattcattcagccaatctatcagccaaccagtaagcactcacggacacccacgtgcgcaggtgccatggaggcagccgagtgtggggactgctgtggcaragctggcagccttgtgtgcttcctgcacttgtgacattttattgcagccagtgcctgtgccattaagcattccttgaaaataaaatcttttttggctgta

SEQ ID NO: 475276 - DNA, 201 bp, Homo sapiens
tgtctggactgagcacctgggtccccgtggcgtgtgctgcgcaggcctcatctgtggacggagggtgtttgccatgcgccttctgcgcagaggcctggtgygtgactggcgctctggtgctacggggctttggcagaggacggcgctgtgcagtcagccccagtcctggggcctcaaagactcaaggtcattttgagtcct

SEQ ID NO: 475277 - DNA, 201 bp, Homo sapiens
gggagcagctctcctgcctctgcctcacctgccctgtgctctgcccccgcccggaggactcttggtcccagcctcaccgtctgcatgggcctccgcggccyccaaactcaccggttttcaggaagggcctgctaccaggtagcagatcccgaggcttctgcttctgatgcctgagctaatgtcagcaatgtggaagagggt

SEQ ID NO: 475278 - DNA, 201 bp, Homo sapiens
ctcccttgttcaccggcggctggcacagttccttgcatacagcaggctctgagtaaatgcctggtgaatattggactccttcacctacaggaggtgctgargcctttggagtggccagggagcagctctcctgcctctgcctcacctgccctgtgctctgcccccgcccggaggactcttggtcccagcctcaccgtctgc

SEQ ID NO: 475279 - DNA, 201 bp, Homo sapiens
gctgtgcggggaagatgggccccacctctgcagcctcctctgcttccccgttgctttcctgccgcccgccagggccttggggccttcacacagcttctctmcttcccggaacccagatcatccccggcgtccggctcatagcattgaggcaggcccttttctcccttgttcaccggcggctggcacagttccttgcataca

SEQ ID NO: 475280 - DNA, 201 bp, Homo sapiens
ttggcatctgttgagagtctgccctgtgactggtgccaggacctagcctgcgttttcaccttatcctgtgctctcagcctcttctgctggggagactcagycctgagtcagacaggagggtccaaggtcagcgaggctgtgtgatctgcccactcccacccatggcagattcagacctccagtcagggtcttcccagctgc

SEQ ID NO: 475281 - DNA, 201 bp, Homo sapiens
gaacgcttttcttgagtttccctgtaacttgttgtaaactttgtaagctctgagccaagagcttccttcttagccttgaagctggccactgccggctcctktccatgccgagctgggattcttggtgtgcaggtgtggagagcagctccggtgccatcaggcgattggagtacgctttccttccttgtttggcagaacata

SEQ ID NO: 475282 - DNA, 201 bp, Homo sapiens
ccctgtctgcgggcacccgggtgcagccctgacccctcccgccctgcctccctctgcagaagggtgctggtggcaggtgtgtcatcagaaaccccgatgasggcatttctggatggtgctgctgagataaggctgtctcctcgggtctccgtgttgagggtggctagaatcgggtgcccctggagcactgtggaagccagg

SEQ ID NO: 475283 - DNA, 201 bp, Homo sapiens
actgggaggaggaaatgttggtcttcttggtacacagcctgctgcaggtcagtggcggaggccgggtttcaacccaggtctcccaggtcttcctagcgtcygatgccgttgcctcttccatcttggccacgggggacatcttgcagtctgttacgtctggagtctcccgacagcccgccctgcgctggcctccacccactg

SEQ ID NO: 475284 - DNA, 201 bp, Homo sapiens
acaggatgggcccagcagacactcacagtgaccaaccaggaggtcctggagatgggaacgggcgctcctgcagtatcaggaacagatctgtttcttcccaygtgcttttccctgaagaactgggaggaggaaatgttggtcttcttggtacacagcctgctgcaggtcagtggcggaggccgggtttcaacccaggtctcc

SEQ ID NO: 475285 - DNA, 201 bp, Homo sapiens
ccgtcggcaggtttcaggcaggggtgtgaggaggcgtgaagaggcgcgatgtgtgatccaaggtcgctttgctgcccgacctcgtccactgttctgtggcyatgcacgtgggcccccatatttccactcagcctgtgcgggtgctttgtgtgtagacttttaaaggggagaagtcagtgtggtccgagtcccagtcttctt

SEQ ID NO: 475286 - DNA, 201 bp, Homo sapiens
cgtagccttcctgacttgttaaccaggcaagagaccatacacatgatggcttgggtgactgctgctgcgtacggcatggttggtgggaccccaggcagcargggagagggaccctggctatttggatctctgcggtgagtgggagggactcttgcccactttgtgtctggttgtcacagggtttagggcccgaggtctctt

SEQ ID NO: 475287 - DNA, 201 bp, Homo sapiens
acctatgtccttatccatcaacaggtagttattaaatgcccatgtccctgagacggttttgggctttgtgtggctgggggcgaagtgtaaggaatgacctytacctgtaaggagctcacagccagccccttggcttgagctgtgagaagtttgaaaatccatgtgctaggttagcccagatgacaccaagagcattggtgc

SEQ ID NO: 475288 - DNA, 201 bp, Homo sapiens
tccctccttctcccctgtgggatcgagtctcagtgttctggctgtgctgcccggctcctgagaggccttcgcaggggctcccagggctgcctggtggtggkctttgccccagtgctggcccatctgcggttgccccgcccaacaaagagcacggtggtcgagagccccgccgctgtgcagtggcctcgggggcgggtgaga

SEQ ID NO: 475289 - DNA, 201 bp, Homo sapiens
gacccccaggaagcactcgcctctgttgaaagcctcgtgccgcagagcgcgattgctgtcccgggtggacggccatcacgggctccttgctccggcgatgycagcgctcctggtgttgtgtgtggctggctcccccttgtctcagccctgggcttagagcaggccaggtgctcaggcagtggttttgttgcttgaaggggg

SEQ ID NO: 475290 - DNA, 201 bp, Homo sapiens
gcctggagtctgcttgtgagctcagggctggctgtctcctaagcctgtgccctctcaccacgttgcctctcatcagggcgatgctttttcaagctcagatrtcacaggtcgcttccgcagggcatgaagcctcttaatgctgacccttttttaatactgtggccgagaaacacagttgcgcagagtctgcaggaggaacag

SEQ ID NO: 475291 - DNA, 201 bp, Homo sapiens
tggggaataataacccggccacttccaagcagacttggagcatgtagcgcccagctcagagatgagggcaggctctcctgagaggtcagggacttagcacygtgatcatgattgtcagtcttatgtgatgatcctgtggcaggtgatgacagggtctgtgcttttgttgtcttttcagaggctgctggccaagctgcaaag

SEQ ID NO: 475292 - DNA, 201 bp, Homo sapiens
tggtttcatactctgcctgttcagtgacttgctgctcacagatgccagctgtctgtgtcccaaggggactgggtaccgtagggaaaagcctgtcctcactrttggaaagactgagctgtcacacgtgctgctagagtggcagaagtgggcttgacacgggaggggtgggatgttttaccatggagtgccatcctggaccag

SEQ ID NO: 475293 - DNA, 201 bp, Homo sapiens
cctgtcctgtcaaataaactgcactcaaaatagagccatgcggcacagggcctgtctcaggcccatggccccatatccgcgtgggtcaggcatgctggcgrgaccttgcgagggtcacgtcctcctccctggtgaggggccgtctgcagccactgtggcttgggtatggcttcctgtcaggatggtcccagtgccctccca

SEQ ID NO: 475294 - DNA, 201 bp, Homo sapiens
ccctgtcctgtcaaataaactgcactcaaaatagagccatgcggcacagggcctgtctcaggcccatggccccatatccgcgtgggtcaggcatgctggckagaccttgcgagggtcacgtcctcctccctggtgaggggccgtctgcagccactgtggcttgggtatggcttcctgtcaggatggtcccagtgccctccc

SEQ ID NO: 475295 - DNA, 201 bp, Homo sapiens
ggaggaaggtggccgcccttccagcgcttgtcattcatcttggaggcaactgctgccgcgtgggctcttgttttattaaataaactccggtttttatggcygcctctcagtgccgcccgccccccgtccagggagagtggcctcaggtgtcgggcgccgcgccgtcctgcttccgctgccgctgccctgactgcggggtca

SEQ ID NO: 475296 - DNA, 201 bp, Homo sapiens
tttttccccttaaggtcactcactccactggaaaattaaccaatattttcctaatcaaagcggggctgtttcttccttggaggaaggtggccgcccttccrgcgcttgtcattcatcttggaggcaactgctgccgcgtgggctcttgttttattaaataaactccggtttttatggctgcctctcagtgccgcccgcccc

SEQ ID NO: 475297 - DNA, 201 bp, Homo sapiens
acagagctgttccggaaattagatttttccccttaaggtcactcactccactggaaaattaaccaatattttcctaatcaaagcggggctgtttcttcctyggaggaaggtggccgcccttccagcgcttgtcattcatcttggaggcaactgctgccgcgtgggctcttgttttattaaataaactccggtttttatggc

SEQ ID NO: 475298 - DNA, 201 bp, Homo sapiens
aagcccgtggaaagatgttcaacatcattagtcatgagggaaatgcaagttaaaaccacagtgaggtgtcactgcacacctgtcaaagttcagaaacggamaccatcagatgccagtcagtgtgtagagaaactccatctctggtgccttgctgatgggagagtgacagggtgcagccaccctggaaccagctcgagggtt

SEQ ID NO: 475299 - DNA, 201 bp, Homo sapiens
gtgctgcccggctcctgagaggccttcgcaggggctcccagggctgcctggtggtgggctttgccccagtgctggcccatctgcggttgccccgcccaacmaagagcacggtggtcgagagccccgccgctgtgcagtggcctcgggggcgggtgagatctgctgcactgctgtatcgcctcaccctctgtcctctcaggt

SEQ ID NO: 475300 - DNA, 201 bp, Homo sapiens
cctgtcggttccgtcctgttgccccagaaggggaggcctgcccaggggttcaggaccgaacaccaggtccaggggaagccgctgccccggccgccgctcayccacaaccactcagattaaggcgaacgagagtggtgagaacaaacgcctcacagagctgttccggaaattagatttttccccttaaggtcactcactcca

SEQ ID NO: 475301 - DNA, 201 bp, Homo sapiens
ggcctttcctgctgccctaccctggagctggggagcggggtgggtgaggagcgttgaggaggagagagctggagctggtggtactggggttttggctgggygtctcacgtgcctggactttctggtctcatctggaaggtggtctcttactggaccgtgcgggggtgaggagacaggccgaggccaccaggtaaagcaggg

SEQ ID NO: 475302 - DNA, 201 bp, Homo sapiens
aggccgggctcctgccgcccgctctggtctgggcatgggtcaccccacagggttgccgccatcagtcagcagttgggctgggagggctacatgagtgcctrtagattctggcacagacgcttgtggcctgtgggcttacttcctgccctccctgccaccttgttggctccagccgggctgccacggtggacgcagggtcac

SEQ ID NO: 475303 - DNA, 201 bp, Homo sapiens
tggcatctgtgacgatgggggcctttcctgctgccctaccctggagctggggagcggggtgggtgaggagcgttgaggaggagagagctggagctggtggkactggggttttggctgggcgtctcacgtgcctggactttctggtctcatctggaaggtggtctcttactggaccgtgcgggggtgaggagacaggccgag

SEQ ID NO: 475304 - DNA, 201 bp, Homo sapiens
ggggtttcccgtgacctcgagtcccatctccaggacgaacgtgcagacaccctcccccaccttctccatgggctcagccatcagcccccaaccctgtgccrgccgaggccaagctcttgctgccggctctggtctgggcgtgggtcacccccaccttccaccctgtgccggccgaggccgggctcctgccgcccgctctgg

SEQ ID NO: 475305 - DNA, 201 bp, Homo sapiens
gggagcctcggagagcctgctggcttggcacaggtttccaggagcgcatgtgggaagggcagggtggggccgggcctgggaaagggggagagtgagtgacyatggccgtctccagggatgggcatgtatatccgatagagaaggaagggcagggtggggccgggcctgggaagtggggagtgtgagtgaccatggccgtct

SEQ ID NO: 475306 - DNA, 201 bp, Homo sapiens
tgaacaggtttcgcgacactgtaagtgcctgttcctgagaaagcagaggtcgccggcactgaaggctgtgtccccagcaccttcccctgtgtggacctccygccgtcttcctcgccacgccttcactaactgttccattctagttttcttcttcttgggaccgttttggttggtgattggtgactttccaggaatcgtgca

SEQ ID NO: 475307 - DNA, 201 bp, Homo sapiens
ccctacagcccatgcgggacaacacgttccagtgcagctgcaggcgtcttttgcgggatgggccgagagtgtgacgggctatgctagcctgggtctggtgkgctggagaggagggaggcggtctcctaggagggatttgtgcccctggcctgccttctccccccacccctgggagagtggagctcacgtgtcctccttggt

SEQ ID NO: 475308 - DNA, 201 bp, Homo sapiens
ttgtgcacatggagcccactgtgcagaccctgtaggggcagggctcccgggctcttggccttatccctagggtgtgtggctatttgagcgactctttgtgrcactgccagggagatgagagagaccaacgggctgctccaggaagagctggaagggctgcagaggaagctggggcgccaggagaagatgcaggagacgctg

SEQ ID NO: 475309 - DNA, 201 bp, Homo sapiens
ggcaggcgactctagctccctgggcagcacctaggaggcctggcctttggcaggcaggcgtcacagatcagttaggcccttctgcgcctgcctgggatgcwgaacaggtttcgcgacactgtaagtgcctgttcctgagaaagcagaggtcgccggcactgaaggctgtgtccccagcaccttcccctgtgtggacctccc

SEQ ID NO: 475310 - DNA, 201 bp, Homo sapiens
ggaagtgcgttgaaattattgaaagcactgtgaaggaaatgctttgggtgttgtggaatgacagggtgggaaagacgtcactgggggccaggcagggcctyaccaggaggcagcatctgagcagaggcctgagggcagccgggggctgggcaggggtgaccaagcgggacagacgagctgctgggacgccagcagggctgg

SEQ ID NO: 475311 - DNA, 201 bp, Homo sapiens
cttcttctctgtccctggcctccatcaggatctggagcagaagctgtccctgcaagagcaggatgcagcgattgtgaagaacatgaagtctgagctggtayggctccctaggctggaacgggagctgaagcagctgcgggaggagagcgcgcacctgcggtgaggggttgcgggggatggggcagccgcctcgagtgagtc

SEQ ID NO: 475312 - DNA, 201 bp, Homo sapiens
gctcttcccaccattggtcccacccattgtttctgccactccagctcccgggcagcagccaggcgaaccagctgttggcaggcaggcgactctagctcccygggcagcacctaggaggcctggcctttggcaggcaggcgtcacagatcagttaggcccttctgcgcctgcctgggatgctgaacaggtttcgcgacactg

SEQ ID NO: 475313 - DNA, 201 bp, Homo sapiens
agcaagttttaaaacaggtgttttccgagcacctggatgggtttcatgtccccactgagcatcctgttggtggggggtgggggggtgccggtgtctcctgycccctgcctggactcttctgtggagagctatggtgtcacagcccgggacacagtccagcgacatgtgccaggcaccatccccatgggtgcccttgcaggt

SEQ ID NO: 475314 - DNA, 201 bp, Homo sapiens
ctgagccttgagtcctgcgggtgcctcggccgccctgcgctgtgagctggcatgtgctcagtgcttggtgcgtgctagaggagcacgtgaaggcccggatraatgatgcagacatgggctccagggacagcggcccgtcctcggaggcgccccttccaggctcagcacgtgcggctctcagagtctcatttgttggctctc

SEQ ID NO: 475315 - DNA, 201 bp, Homo sapiens
gcagatggagctgagtcacaagagggctcgagtggagctggagagagcagccagcaccagtgccaggaactacgaggtgggttcaggcggggcgagggtckgcccagacagccccaggaagcaagggggctgtgcacggtacctgccaggttataagaaatcacatcctagtccctgggagcaagggggctgtgcacggta

SEQ ID NO: 475316 - DNA, 201 bp, Homo sapiens
tgatttccgctttgggcgtggcttctgagccgggacctcgaggcgccaagggaacaggagcagccgggcagctgctcgcttggttgtgcctgctgtgtacygaggcgtggggcatggcggcacggctgtgagcgcacagtccagccacagaaggaggcttcaagaatctttgcggtgctgccatctggacatctgtgtcat

SEQ ID NO: 475317 - DNA, 201 bp, Homo sapiens
caggatgcctcatttcattaggctgagtggctctggactaagtgcacctgcagagctgaccgccccaccgccagcctgctgagcgctgccgcagccaggayggtggccagggagcacgtcccctggggcagcagatgcatccccttcctttctccttccctttggaccctgtatgcacccctgcattctctcaccctcttt

SEQ ID NO: 475318 - DNA, 201 bp, Homo sapiens
agtcacagccctgcggggtctgatttccgctttgggcgtggcttctgagccgggacctcgaggcgccaagggaacaggagcagccgggcagctgctcgctyggttgtgcctgctgtgtactgaggcgtggggcatggcggcacggctgtgagcgcacagtccagccacagaaggaggcttcaagaatctttgcggtgctgc

SEQ ID NO: 475319 - DNA, 201 bp, Homo sapiens
caggcaggctttggcaaggctggccctgctctaggtgggtgtctgaacctgttccctccccaggcagagcccgcaaggcgagcacacgctccttcatgackgggccgggtccagcgtccgctgccgctgggctctggggtctgtccggggtgcctccgcctgctgctttagccagcttgtgttgcttctttcagcaagatg

SEQ ID NO: 475320 - DNA, 201 bp, Homo sapiens
tgaaggcctcctctgggcagcccaccactacctgcccttctctccgaggacttcccagcagtgccatggccttcggagagctggggtctcaggcaggctayggggctccacagctccccacccaacattcctcaacgtcagctttggggctgtgaggtgtgacctctacaggatcacctggggtcactccctgcagccagc

SEQ ID NO: 475321 - DNA, 201 bp, Homo sapiens
ctttctgcagcccccagccgtgttggcttgcacagccctctggacttgtggtcatcatggagttgtagccccttttccccacctgatttcccacgtatcgrgatcaaatctaagctggtttcgttttgcttcctctcaagtcttttgtctttcctcccttcctcctttttcattgatctctgttctccggtgactttaggg

SEQ ID NO: 475322 - DNA, 201 bp, Homo sapiens
tcttacataagttcttgtgctttgacatctcttcttgtcacttcagtgtggccagacttcagagtctctatctttggctccaacctctctcctaatctccrtgatcagattttcctctgtccctggaagctgctaccttgctgttattgctcctgaccttggggccatgtcaggcgtgccctgctgtctccccaggggtcc

SEQ ID NO: 475323 - DNA, 201 bp, Homo sapiens
gcacagcagagctttatttttctacacatacgcagaaacttccattgtgtttcctgaattattttgacccaagtcttccagatcctgcggagtgtccaccrcacaccctgccagcagtgctgccttggaatgcctttcgggtgtccagaggaagccgctggttaactgatagcgagaaagggaatggcggctcggatgtga

SEQ ID NO: 475324 - DNA, 201 bp, Homo sapiens
gccgacctgacatcgtcacctgaggcttttcagctgatggagcctctccttgtctgttgccccgtgccccacagtggctttgtctgcgttcctgggttccrcgttccgtgctcctctggctgatggagcgcagctgtggactctcccgtgcgttgcccagccagtgccagtgtgtctcataggggtggatgagacggagct

SEQ ID NO: 475325 - DNA, 201 bp, Homo sapiens
tgcctggcctgggctgtcaggtcaggtgtccccgctgccccccaggcctgaggggggaagatagctccgcagctgtgcacaggacctccaggctcctgggrtccaggctgggggcctccagtggtctggtccacatctgctgccctggggttctgccctttctgtgcatgcccgagtgcctgtgtgtttattgaaaatgga

SEQ ID NO: 475326 - DNA, 201 bp, Homo sapiens
cccttgaggccactggcaggctcaccgtgctgcgagctcaccatgtcgtaaccatctcgggctcaccatgccgcgggctcaccaagtcgtaactctgtctygggctcaccatgccgcgggctcaccaagtcgtaactctgtctcgggctcaccgtgccgtgagctcactgtgtcataaccgtctcgggctcaccatgctgc

SEQ ID NO: 475327 - DNA, 201 bp, Homo sapiens
cctctgtgtccccgccaggatccctgcaatggccaaggccccagctgagccttcagccctcttgcagacacatcgtgttttctgctttgccgctcatcctwccatgttacacagcctctggtggcgtgcctgtgccctttgcgaggcctctgggtgtagggactcccgtcagggccttccctcaggcagggcaggtcacct

SEQ ID NO: 475328 - DNA, 201 bp, Homo sapiens
ccgtcttcctgcacgtgatttctctgccacccttgcttttagtcgcagaagataacagcaattgtgctgggcgcggtggctcatgcctgtaatcccagcamtttgggaggccgaggcaggtggatcaactgaggtcaagagttcgagaccagcctggccaacacagtgaaaccctgtctctactgaaaatacaaaaaaaat

SEQ ID NO: 475329 - DNA, 201 bp, Homo sapiens
gtggtcacacgggcttaattggaacccaggctgctttgaagcccttgagatccttcctgagctgggagaaagagtgcgagggcagcaactgtaaagccggyatttcttcattttatttacatgtgtctggggacccttgtaactcatgtccctgcagcagttgagccaagttgctgacttgtggacagctcagagagatgg

SEQ ID NO: 475330 - DNA, 201 bp, Homo sapiens
aactcttaggattcctggccacatctcccgtcttcctgcacgtgatttctctgccacccttgcttttagtcgcagaagataacagcaattgtgctgggcgyggtggctcatgcctgtaatcccagcaatttgggaggccgaggcaggtggatcaactgaggtcaagagttcgagaccagcctggccaacacagtgaaaccc

SEQ ID NO: 475331 - DNA, 201 bp, Homo sapiens
gagggattttggcgtttgcaggtggctttgagcctgagggccagtgcctcaccgggtcagagagctctgcagcccgccagtcctggtcgtgcctgtgtccsagcttgggcccgtgtgcagggagaaggtggctgtgcagtgcacgtcgtgtgtaccaggcgtcggcggagtgatgcgtgggtcggggcgggagatgagagg

SEQ ID NO: 475332 - DNA, 201 bp, Homo sapiens
tggtggcactcgaggctggggcggtgttccctggaggcaagcggggagcctctctggggttcagtggagctcagactgccatggtgggacggagcggggcrggggctgtggtgggaataggtggctcagtgtgggccagaaggttggagggctggcgccgacacggaaccagggtagcacgagaccaccgtgctggtaacc

SEQ ID NO: 475333 - DNA, 201 bp, Homo sapiens
cgtcctgatctccccggcctcccagggagatggatgtgcacgtgcagtggcagctccagagctgtcatggtggcactcgaggctggggcggtgttccctgraggcaagcggggagcctctctggggttcagtggagctcagactgccatggtgggacggagcggggcgggggctgtggtgggaataggtggctcagtgtgg

SEQ ID NO: 475334 - DNA, 201 bp, Homo sapiens
agggctgagccgaggcacagacgtgagagccttgtctggaggtgcagtcaggagactgtgggcatctcctgcagacttggacccttccatcagcagatgtsgttttaggagagttctagttccgtagtagagaggagaggtcattcctgggtggggccctaccgcagctgcaccagggctgggggttgccgcaggcaggtg

SEQ ID NO: 475335 - DNA, 201 bp, Homo sapiens
agaagctacttttaacacccagggtcttttccccagtgtcttggtgcgtcttggctctctagcccttctgtgcgcctttgccggtccctcaggtgtccacrtgtccccacatctggctgctgcacgggtctgtgttcctgctgtgccagcccctgcccggtgctggagagggtggagagcgaggcagacacacctcaccgt

SEQ ID NO: 475336 - DNA, 201 bp, Homo sapiens
gcatcatgtgccttggaggtggagggggcgtggctgggaagggatgtccaggcacagggctgagccgaggcacagacgtgagagccttgtctggaggtgcrgtcaggagactgtgggcatctcctgcagacttggacccttccatcagcagatgtggttttaggagagttctagttccgtagtagagaggagaggtcattc

SEQ ID NO: 475337 - DNA, 201 bp, Homo sapiens
cttgtagaacctgagaatctgggaagggagggccttagccgaagactgtttgcccaggagggtggcacgcagtaaacagttcaacccaggagttcaacccrggagctggcattggggcatggatgtgcgcgctggtggccattcattactgatcctccagtttcctttgtcgtctgtgagtgggtgcgctcagcccagggg

SEQ ID NO: 475338 - DNA, 201 bp, Homo sapiens
agcccctcgggctggtctccgggaatttggatttggggccggcagcccctgggatgagccaggtggggcgctgtggggcatgctggggtacggttctcacrggtgacatcccggggggtcccggccagcctacaggtgcgtccccacctcctacagtctcttgcagagccagccaggacccggatacaaatcgcacagcca

SEQ ID NO: 475339 - DNA, 201 bp, Homo sapiens
tgggtcctccttcccactgcaggacgtacagcgaggctggagcctgagacagggttccctgcaccctgaggctcacgtagcccggccgacctggttctgcrtgggtatagctcaggccccggggaagggcggaagtggacaggcagtgccctggggctgcactcctaagatccgtcggtacctttaaaaggttctctgctt

SEQ ID NO: 475340 - DNA, 201 bp, Homo sapiens
tgtttgtgctttgaataataatgtagaaatctaattggactttgattattaactttggtcctgcagcattgctaaatctacttattttaataatttatttktagattatattgacttttctatgttcataattgagtgatttaataatagctttcattgtcttcttgatcttcgtacctttcatgcctcttcttatctgtg

SEQ ID NO: 475341 - DNA, 201 bp, Homo sapiens
cgtcgaggcagccttgtctggaggatggacccttccctacgtggacaggagaccaggatcagggccccctcacctccgagggtctgtgtggcatggaggayggacccttcccctccagggccctgggtttgtctgtcagagggtgagagagtggccccaggagtgagtgcggcggcccatgctgctcccagccgcatgggt

SEQ ID NO: 475342 - DNA, 201 bp, Homo sapiens
taaatatttaaaaatgtaaaactgaaatagtttagaagcttgcaaaacatgaataattcagtcccgggaagcctggctcggcattgggcctgggcaggacyggggctgccagtgcctgccagggcccagagtactctctgcagggacactcgggcggctcccccagccctgggcctccactggcttcctgtgtccgcagcg

SEQ ID NO: 475343 - DNA, 201 bp, Homo sapiens
cttccctacgtggacaggagaccaggatcagggccccctcacctccgagggtctgtgtggcatggaggatggacccttcccctccagggccctgggtttgkctgtcagagggtgagagagtggccccaggagtgagtgcggcggcccatgctgctcccagccgcatgggtggtggtctcgcctctgagagggggccccaca

SEQ ID NO: 475344 - DNA, 201 bp, Homo sapiens
tccgcagcgtgcaggggatccttggtcgtctctcgtcgaggtcagacctcggcctgatgtggaggcctctgcgtcacctactagtacaccacgccggtgtygggctccttcagaggctggtcccgctgctccgagtctgggcacgttccctcctgccctgtgttcccactggcactgagcatctgagagtcatctctgacc

SEQ ID NO: 475345 - DNA, 201 bp, Homo sapiens
aagcagcgagtctctgtgagcctgggtgtcattgtgtgtggattggggatcggatcgtgttcatagctgtcatagccaggcagtgagtgagcttgcactcrgaacgggctgctcgactgagctcacgccatcgggggtgcccagcggccctgcgctctcggcggtggcctccggcacgtgatctggcctaacacctctgaa

SEQ ID NO: 475346 - DNA, 201 bp, Homo sapiens
ggcagctgcctgcctgtgtccgtgttgcaggcagaagtcctgggagatggggtgaaggggtaggttcagagtcacaggtcagggaggcagagccgagctgraaccgcggcccctcccgcgtcctccatcttcctctgcagacttgagggcttctggtttgcacctggctcccctgtccctgctcacctccaggaagcaacc

SEQ ID NO: 475347 - DNA, 201 bp, Homo sapiens
caataatggaaagaaaaacttaatggatataaggtcagcagcagaatggaggcgacaggagcgcgttcgtgaactcagagatggaccgataggaactgccyatctgcccattctgaacagcagagagaatacgatggaataaaatgagcaaagttcccgacaccgatgagacctgggaatacgatggaataaaaggaacaa

SEQ ID NO: 475348 - DNA, 201 bp, Homo sapiens
ccttgcaggcgagtcccagctgcctcctgtcattgggcggggatggaagggtgggacaggaaggaggcagtgtccttctgagctcagcctgggagaggcasggggcccccgtgcagagggaggcgtgtgggtgtgcagggcggcggggacagtgtttctgagctggtgatcagtctgctgtggtcaggcaggcagggtggg

SEQ ID NO: 475349 - DNA, 201 bp, Homo sapiens
tcgtttttgtttttttgacacagggtctcactctgttgcccaggctgaagtgcagtggcccagtcatggctcactgcagcctcaacctcttggtctcaagrgatcctcctgcctcagctccctgagtagctgggaccacagttgtgtgctaccacacccagctgatttttaaattttttatagaaacaggatctctgtatg

SEQ ID NO: 475350 - DNA, 201 bp, Homo sapiens
tccaggatggtctcaaactcctctgacaccagaccatctgcctgccttggctccccaaagtgctgagattacaagtgtgagccagtgtgccccgctgagaktttttctttctgcttttcttacagaagatcatcttgctggatgcagaattccaggctggtgctgttttgtttcagtacttggatacctccctcccctctc

SEQ ID NO: 475351 - DNA, 201 bp, Homo sapiens
tcgctgtcatcgctgctggagaaaacgagagcaaccctagggagagaaccctagggtgtggcccgcaaccgtttgatagggaggctcgtgtgggtgtgacytcaggccccgtctgccactgcggcagagacaccgccagctggaaccaaagaggagggagacgggaaggatgagggaggctgtcgacttggacttgacatg

SEQ ID NO: 475352 - DNA, 201 bp, Homo sapiens
catcgtcggtttccccatccagaaggtggggacaaacgtagccatgctccccagggcggggcccggctgggatgggtgcagcgaggctgcgtgttcctgcyccggacaggcacctactcaaagcccgagcaggctctcacctgacgaacgtgttccaggtggaagagaggccaggacacgggcaaacacgcgatctcagat

SEQ ID NO: 475353 - DNA, 201 bp, Homo sapiens
gcaagccttccctggaagcttgcccggccctgcgcatgcccctggggaaggcgcctctcggggcaggtgaggatctgctacctgaccgccaggtgggctcrgggtagtcgccagcgggaggatgcagcatcgctctgagagtggttcccttccacccacccgttagctaaaccagacaccagtctgttctcatctggacca

SEQ ID NO: 475354 - DNA, 201 bp, Homo sapiens
ggattaggaagtgcagcccttggactgggattagcactttatgaagaagccgagagctccctcaccgcaccccacgtgagcgcaccgcgaggaagtgcctsccctcagcagacaccacgtctgccggcgccttgagttcccacttccactccagaacctgagcagccaatgtctgctgctcataagccaccctgtctgtgg

SEQ ID NO: 475355 - DNA, 201 bp, Homo sapiens
ctgctggatcctggcatccttttaacttcagaagacattgccttgtgggtctccacagcgggaagcatccggtgtgtgcgttcgcggtgtgtgcgtttgckgtgtgtgcaggtccactccgcacaggcctgctcctgctgggccacgccagggttttgggcttagctgcccccacagggctgtgtgggctgtgtgttgcgt

SEQ ID NO: 475356 - DNA, 201 bp, Homo sapiens
aaaatccatacgttgaaattctaacgcccaagatgagggattaggaagtgcagcccttggactgggattagcactttatgaagaagccgagagctccctcmccgcaccccacgtgagcgcaccgcgaggaagtgcctgccctcagcagacaccacgtctgccggcgccttgagttcccacttccactccagaacctgagca

SEQ ID NO: 475357 - DNA, 201 bp, Homo sapiens
ttagcacccccgggccctggagctggtgcctacgtagcccctcagcctgcgccagcctgcctgaccaggcccccgtctgtgccctgctcttccttgagccygcagtccgttctggctcctggcctccccaccgtctgctgcccctgatgcctcccaccctaggtgtgtaggggcgagttagaatccacactcctggccggg

SEQ ID NO: 475358 - DNA, 201 bp, Homo sapiens
ggagtgcagtggtgtaatcttggctcactgcaacctctgcttcccgaattcaagcaattctcctgcctcggcctcccaagtagctgggaccacaggcgccygccaccacgcctggctaatttttgtatttttagtagagagggggtttcgccatgttagtcgggctggtcttgaactcctgacctcaggtgatccacccac

SEQ ID NO: 475359 - DNA, 201 bp, Homo sapiens
ccatgtccctattcagaggcacgtgtggagaggcgtcagaagcaggagggcgcggggccttgccacaggctgaaggtctgtgtccctctaaaatccatackttgaaattctaacgcccaagatgagggattaggaagtgcagcccttggactgggattagcactttatgaagaagccgagagctccctcaccgcaccccac

SEQ ID NO: 475360 - DNA, 201 bp, Homo sapiens
gcttccctggatgtggccatgcgggaaccatgcagactgagtgtccacaggcccggcattgacacgccatgtggagcctctatccagcctcctgtgaccgsggaacacgcggggaccctgtccagcgcctcctctgatcccggaacacacggggaccctgtccagcgcctcctctgaccccggaacatgcggggaccctgt

SEQ ID NO: 475361 - DNA, 201 bp, Homo sapiens
tagccagcagattagccgacagctggccagcgggggctgtgggggtgggcggtgctccgcgcgctggttcccccttcccatcccccaaccccggcaggggmcgctggaggcagggggcccccacagaggctggcctgtggggactggcgggttcttccccgagcacctgggacaggctgagcccagagcgtggccccacgt

SEQ ID NO: 475362 - DNA, 201 bp, Homo sapiens
cgagaccacgttccagggttgggttacgcgtggaacgtggaggcacgcggggtgcgcgtgggccctgccgctggcaggaagcagggactggtctggagcgyggcggggctgtgccatcttcggggctgtgccatcttcccttctgggtttgtggaggagccgcgagcagctcctcctgaacttttctttattaatgaatct

SEQ ID NO: 475363 - DNA, 201 bp, Homo sapiens
aacacgtccttctttacatggtggcaggaaggagaagtgccgagcaaaagggggaaaagtcccttataaaacagtcacctctctcgagagctcactatcaygtgagcagcagtatgggggtaactgcccctgtgattcactcacctcccatgacatgtgggcattatggaaactacagtttcagatgagatttgggtgggg

SEQ ID NO: 475364 - DNA, 201 bp, Homo sapiens
ggcccgcaggagtccctccagccgttgtggcccgagaccacgttccagggttgggttacgcgtggaacgtggaggcacgcggggtgcgcgtgggccctgcmgctggcaggaagcagggactggtctggagcgtggcggggctgtgccatcttcggggctgtgccatcttcccttctgggtttgtggaggagccgcgagcag

SEQ ID NO: 475365 - DNA, 201 bp, Homo sapiens
cagcaccagtgccaggaactacgaggtgggttcaggcggggcgagggtcggcccagacagccccaggaagcaagggggctgtgcacggtacctgccaggtyataagaaatcacatcctagtccctgggagcaagggggctgtgcacggtacctgccaggccgtaggaaatgagaacccagctggctggaagcctgacacgc

SEQ ID NO: 475366 - DNA, 201 bp, Homo sapiens
ggagcctgatggcagcacagggggaggtcctgctggtcaggagggagggttcacctgcacagtgtgccgtgtagatctgtgaccgccaaccacgtcctgcrtgtgtcaggctcaggccccgttctgcagaggagcccccagagcagggctggcactgtgccctggatgctgccccatccactccagtggagggtctgacag

SEQ ID NO: 475367 - DNA, 201 bp, Homo sapiens
ggctccctctccctcccccagggtgacagagcctgggagaggcccgcaggagtccctccagccgttgtggcccgagaccacgttccagggttgggttacgygtggaacgtggaggcacgcggggtgcgcgtgggccctgccgctggcaggaagcagggactggtctggagcgtggcggggctgtgccatcttcggggctgt

SEQ ID NO: 475368 - DNA, 201 bp, Homo sapiens
caggaactacgaggtgggttcaggcggggcgagggtcggcccagacagccccaggaagcaagggggctgtgcacggtacctgccaggttataagaaatcasatcctagtccctgggagcaagggggctgtgcacggtacctgccaggccgtaggaaatgagaacccagctggctggaagcctgacacgccctgtgtcatgg

SEQ ID NO: 475369 - DNA, 201 bp, Homo sapiens
tgtcactcagcacaggttaccctccagagctccagccctctgtcctgcagctgtagcccacctgccactaagtcaagggcttggaggcctctgatgtctgyatgtgggtcagagctcgggcacgtgctgtccccacagtcgggacctgagagctgcctggggtcaacttgcacagggccaggaggatgtaaagagctgctc

SEQ ID NO: 475370 - DNA, 201 bp, Homo sapiens
cgagtgctgctggagggttggcaggaggcgtgaccagcagggtccagcacagtcagggtttcctggggggtccaggaaacaggatgagctgctgtgtggcmgctcatggtcagctcggtctgaaggcctccctggggacacacaggcagcgaggtccaggctccctctccctcccccagggtgacagagcctgggagaggc

SEQ ID NO: 475371 - DNA, 201 bp, Homo sapiens
actacgaggtgggttcaggcggggcgagggtcggcccagacagccccaggaagcaagggggctgtgcacggtacctgccaggttataagaaatcacatccyagtccctgggagcaagggggctgtgcacggtacctgccaggccgtaggaaatgagaacccagctggctggaagcctgacacgccctgtgtcatggttgcc

SEQ ID NO: 475372 - DNA, 201 bp, Homo sapiens
acacattcccgctctaggggctgagctcgtacccagctgtctgcggccctcgtgagcaggtacacattccccactgtaggggcccagctcgcatccacccktccgtggccctcgtgagtggggtacgcatccccactctaggggcccagttcacacctgcctgtctgtcgcccttgtgagcaggtgcacgtccgcactccg

SEQ ID NO: 475373 - DNA, 201 bp, Homo sapiens
tcctggttggatgcttggaaggaggggagatcccagatcagagtcctggaccccagcgaggagccagcaggaaagagcctaggggtctggaacagttgtcrtgggacgtgtgtggctgccatctgtgtgagctgtatgggtgcagccaggactgtgctgaggggtcccctgctggactggcaggctctccctcctcaggag

SEQ ID NO: 475374 - DNA, 201 bp, Homo sapiens
caggagggagggaccttgtaggcagaggaacatggggccagccggcctacactgaggctgggccatgccgaagccgggccacgctggggctgatccatgcygaagccaacctgtgctgaggctgatccatgctgaggctggtccacgctgaggctggtccacgctggggctggtccacgctggggctggtccacgctgagg

SEQ ID NO: 475375 - DNA, 201 bp, Homo sapiens
ggacaggcaactggggaagggagactgtgttgggcaaagccagcaggtggagagggccaagagagggggaggtggccttaccatagacccagtgtggggcrtgggactgcaggaggctccacttcatttggaggagtgaaaaggcaggtgccacctggtccccagggagagctggagggcctgatctgaggatggagagca

SEQ ID NO: 475376 - DNA, 201 bp, Homo sapiens
ccgcagccagtctgtaaggaatggtcctgaaggacaggcaactggggaagggagactgtgttgggcaaagccagcaggtggagagggccaagagagggggrggtggccttaccatagacccagtgtggggcgtgggactgcaggaggctccacttcatttggaggagtgaaaaggcaggtgccacctggtccccagggaga

SEQ ID NO: 475377 - DNA, 201 bp, Homo sapiens
agcccactcggtcttcgtctccatcagttgtctccatcactgggctctcggcctcgcggggcagccacactggcccctgcccaccctctggctgcccactkcccagctcctgggtcccgttgctccccagagagtggaggctgcggggtggtgggggttgtgttccctgcagtcctagaaatggggcctggcccaccacag

SEQ ID NO: 475378 - DNA, 201 bp, Homo sapiens
ctctcccataagaaaagcagctgtgaaagcacagccgggcccggtgactggcccaagcctccgaggaggcggcaagcttggatggagtgtcctattcagcrtgagggcccggcatttccaccagtattcaaatggagccggaaacttcctgtttccattggcctgagaccccgggctgtccgtctgccctggcatgcacac

SEQ ID NO: 475379 - DNA, 201 bp, Homo sapiens
tggctttatcccaggttctcagttgtaatctgccgttgtttaaaatgccctactggatacatagaagcattgctgatcagctgatttgcctggcagtgtgrgagggggttattcattctgaggtctgtggtttctaatgaagcccgacccatggggacagtgtcagtgagcacctgcctggcggaggctcgtggctcactg

SEQ ID NO: 475380 - DNA, 201 bp, Homo sapiens
gacaccatcagtgcctgcgcagaggtcccctgggactgacaagctcgtcggggaacagaaacagcgctttgaattttaaattggttaaattccttttcctstcacagtctcagctgctccctgtttccttagagagccagggagtttagtgtcctctcatctccatgctctgccaattttactgcctttccgtatttcctc

SEQ ID NO: 475381 - DNA, 201 bp, Homo sapiens
acatttgtgaggatgagctgggaggccttgagcaaggacaccatcagtgcctgcgcagaggtcccctgggactgacaagctcgtcggggaacagaaacagygctttgaattttaaattggttaaattccttttcctgtcacagtctcagctgctccctgtttccttagagagccagggagtttagtgtcctctcatctcca

SEQ ID NO: 475382 - DNA, 201 bp, Homo sapiens
ggttgaggcctgctgcctcctttggttgtgtggcctcaggcaggttatggaactgcacccatgttttcatctttaaattggggagaatgagagtgcccttygctctgctggcacgatacgcaggaaacgttgcttctcttcagcagattattaggattctctgaaagttctccccagttctcttttctaccccattcatta

SEQ ID NO: 475383 - DNA, 201 bp, Homo sapiens
gaggcagcggtgcctggggaggactgaagtccgtgtggggccggggcaggggacgccttccaagatgccaggctgcgcagtgggacagcgcagtcccagargccagcacagggcaaggtagacagactagaagaggaaaggagagccagccgcatctctacactcgcgtcctgcgagccagcaggcgctcttctggtttgc

SEQ ID NO: 475384 - DNA, 201 bp, Homo sapiens
ttcctgccccggacaggcacctactcaaagcccgagcaggctctcacctgacgaacgtgttccaggtggaagagaggccaggacacgggcaaacacgcgawctcagatgctcgtgagctctagggagaaagcaaatgtggggtgcccagaagaccactggtgggggtggcccagggaggcttttctgaactgaagcctgaa

SEQ ID NO: 475385 - DNA, 201 bp, Homo sapiens
gccctggcgtgaggagctcccatgctgggttgaggatgagtggggaaagccagctctccgctgaccgaatgagggaaggcggccagactcttccgtgaagsagcgtgagctgagggttcttcgtggtgctttttaccaagtcggaggactttcccttgattcctgctttgcaagagttcttgtcaggaatggagattaaat

SEQ ID NO: 475386 - DNA, 201 bp, Homo sapiens
cttgcctggaacagtgcttcatcaatcatgagttccacaagaacgtcttccataggccactgcatcctcgctgcctggaacagtgcttcatcaatcatgakttccgcaagagcgtcttccataggccactgcatccttgctgcctggaacagtgcttcatcaatcatgagttccgcaagatcgtcttccgtaggccactgc

SEQ ID NO: 475387 - DNA, 201 bp, Homo sapiens
tagtggaaaggtgtttctctgtcttttgttaactgaaaaaggattgtgtaaaattggtattaattcatatttaatgttcggtaaaactttctagtgaaacyatctgggactggagattttgagtagcattttaattagaacaaacttgatttatttaatggttataggactaccgaggctattttatcttggcacgttttg

SEQ ID NO: 475388 - DNA, 201 bp, Homo sapiens
ccttgagcccgcagtccgttctggctcctggcctccccaccgtctgctgcccctgatgcctcccaccctaggtgtgtaggggcgagttagaatccacactsctggccgggcacaccggctcacgcttgtcatcccagcactttgggaggcggaggcgggtgaatcacccgaggtcaggagttcgagaccagcctggagaac

SEQ ID NO: 475389 - DNA, 201 bp, Homo sapiens
agttttgttgtagtattttttattgttattttaatagcttctggatctattataatatttccatttcatttctgatattggtcatttcactctcccccccsccttttttttttttgagatggagtctcgctgtgttgctcaggctggagtgcagtggcacgatctcggctcactgcaagctccgcctcctgggttcatgcc

SEQ ID NO: 475390 - DNA, 201 bp, Homo sapiens
cttctacctgtgtctcttccgagtctgaactgttgcatttttccagtagttttaacaactgtctaaatgtccctgtttgccagtgttgccgtctgtgcaaygctgcgtcttggtaggtattcgttgtttggttaatctcttcattataggccgtgtcttcctgctgctttaaatgtctggtaatctttgactggatggcag

SEQ ID NO: 475391 - DNA, 201 bp, Homo sapiens
gttaaggtggcggtttttatttctttcgttatttcagaaatttctccctcctcttttctccgttgcactgtttctcatgagaaccccgccttgtgcctctgtaggtaccacctctgcctttaagatggttttccgtgccgtggtcctgagcaggcttgtcctgttgtgctctggggctgccagcgtcttgtttcctgggcc

SEQ ID NO: 475392 - DNA, 201 bp, Homo sapiens
aggcaggaagattgcctgaggctgcagtgagccaagaccacaccactgcactccagcctgggtgacagaataagaccctctttccaaaaaaaaaaaaaaatatatatatatatatatatatgctgaggtttggacagcaattaccttaaaaccaaagatcaattttggaaaaattgatttactataagtcttccagttcat

SEQ ID NO: 475393 - DNA, 201 bp, Homo sapiens
tttttgccttcagttttcagcagtttcgtttggatgtgtctgggtgtggatttctttgggtttattctgtttggagtttgctcagcttcttgaatctctarggattttttttttttttttttttttttgccaagtttgggatatttcagccatttatttccttaaatactttttcagcaattcacttttctgtgaatttgc

SEQ ID NO: 475394 - DNA, 201 bp, Homo sapiens
gcaggaagattgcctgaggctgcagtgagccaagaccacaccactgcactccagcctgggtgacagaataagaccctctttccaaaaaaaaaaaaaaatatatatatatatatatatatgctgaggtttggacagcaattaccttaaaaccaaagatcaattttggaaaaattgatttactataagtcttccagttcataa

SEQ ID NO: 475395 - DNA, 201 bp, Homo sapiens
aggaagattgcctgaggctgcagtgagccaagaccacaccactgcactccagcctgggtgacagaataagaccctctttccaaaaaaaaaaaaaaatatatatatatatatatatatgctgaggtttggacagcaattaccttaaaaccaaagatcaattttggaaaaattgatttactataagtcttccagttcataaac

SEQ ID NO: 475396 - DNA, 201 bp, Homo sapiens
tggtttctagcccaggtcccagcgaccttctgtggggcgcggttcccatcccagttcaggttgtgaagccttggcagcgctcctggccttggcctgggacrttggcagtgcctgtcagcttagctatcatcagcttcagaggccagtgtggatgggacccaggcacaggccaacccagggacgccctcagctctcaccggc

SEQ ID NO: 475397 - DNA, 201 bp, Homo sapiens
cagcaattaccttaaaaccaaagatcaattttggaaaaattgatttactataagtcttccagttcataaacattgtatctatttatacaaacattcttttkattcctttcgattcctttcatcagtatttcctaactttctgcaaacagacactatacaagtttttgttagatgtatacccgagtatttaagatgttctgt

SEQ ID NO: 475398 - DNA, 201 bp, Homo sapiens
ctctcagcctgagcccgtgctgaggaaaagcaagcctaagaaattaaagcagcttttaaatgttagacctaccaattaaaaaaaagcagtcacatggaaaygtgcattttccagaactctgttgtttactccgtcataattaatacaggcagggaggaaagttcgggctctgtggacagcggttgccagcgtgggccacag

SEQ ID NO: 475399 - DNA, 201 bp, Homo sapiens
tcagtatttcctaactttctgcaaacagacactatacaagtttttgttagatgtatacccgagtatttaagatgttctgtaaattatattgccttttaattttgtttttcacttgtttgcaattgctttatagaaatgtggttaatttttgtatgttcatcttatttcctgcaaccttcgtggactcacttagtgttccag

SEQ ID NO: 475400 - DNA, 201 bp, Homo sapiens
accccaggacgcctgtccctcaggtgtgcagaggtgggggcaccacatgggagccggagacgccgtggacgccaccctctcacacgcagagcccctgggtrgaagggaggcctcagaaaccaaggatttcagagatctccaagccaggtggaggctgagccaaggcaaaaacaaaagccattcatcccctgtcatgcccag

SEQ ID NO: 475401 - DNA, 201 bp, Homo sapiens
tgctgtaacatacaggcggggctgttggggtaagcacacgccgcagccagtctgtaaggaatggtcctgaaggacaggcaactggggaagggagactgtgytgggcaaagccagcaggtggagagggccaagagagggggaggtggccttaccatagacccagtgtggggcgtgggactgcaggaggctccacttcatttg

SEQ ID NO: 475402 - DNA, 201 bp, Homo sapiens
tcccaagctgcgtcccctgcctgcgcctctccctgggccgcctctgccccctgcagggctccgtgtcaagctccttcagcggggtgggacctcgaatgccrtccatgtcccacacctcgcgtgtcagggtctgcagtggagcacccaaccggcgtctctccccaggtctccccccagcctggaggtggccccttgtgcccc

SEQ ID NO: 475403 - DNA, 201 bp, Homo sapiens
gtgggggaggaggcggatacgcccaggtgtgtcccacggaggaagaggcggacgtgctcaggtgtgtcctgtggggtggggggaggtgggcacgctcatgygtgtcccccaggaaggaagtggacatgctcaggcgtgtcccccagcggggaggtgcgcacgctcaggtgtgccctttccagaggaggggagtgcgggaga

SEQ ID NO: 475404 - DNA, 201 bp, Homo sapiens
accccaaggctgcgcccccaggctctccagggtgtggcggccagtcctaggctttctcagaaggtggtgctggctgtggaggcagaggctgctgcagcgcrgccttcgttatcagctgggaggaagtggtggcgggtgttgagctgggtcagactttaggaggtgccatttgctgtaacatacaggcggggctgttggggt

SEQ ID NO: 475405 - DNA, 201 bp, Homo sapiens
gcgcctctccctgggccgcctctgccccctgcagggctccgtgtcaagctccttcagcggggtgggacctcgaatgccgtccatgtcccacacctcgcgtstcagggtctgcagtggagcacccaaccggcgtctctccccaggtctccccccagcctggaggtggccccttgtgcccctgggcccctacctgtccagcag

SEQ ID NO: 475406 - DNA, 201 bp, Homo sapiens
acgtgtccccacatctggctgctgcacgggtctgtgttcctgctgtgccagcccctgcccggtgctggagagggtggagagcgaggcagacacacctcacygtctggagggacagtgagacagacctcacaggcctgcgagggaggtgggacatcatcaggctcgtagaaaggtgtgacctttccctccccacccaaccct

SEQ ID NO: 475407 - DNA, 201 bp, Homo sapiens
ccgtgttaggctggtctcgaactcccaacctcaggtgatctgcctgcctcggcctactaaacttttaggattacaagcgtgaaccactgcacccagccagkgattggctgttttaagtaacagttatcaaggtgctagataatattttaagacactttgaggtatgagattaggcaaggcacacgaggtggacaggtctga

SEQ ID NO: 475408 - DNA, 201 bp, Homo sapiens
gggtgggagtctgctctggggagaccctgggcccgggcaggacctcttccagtcttctgtagttgaggtgggtcggtattagcagagcctagagacagctrttcgtctcccaggtctcactatgggcactcctcattttggggtcgtagctggaggctagttggggccctgagccatcctggcttaaaggcctgccttgtt

SEQ ID NO: 475409 - DNA, 201 bp, Homo sapiens
gcctgcgaagtgcactctgaaacaggcttaattgcctccgactcgcttcctggtatcgcatgtccccgtgagtcctcgcttgagggctgctgccctccagsggattgacgcctcccatgcgtgcccttggcggggctggctcctcctgggtgctccctgggtggactggggtgctctcctgcttgacagggaaggaaaccc

SEQ ID NO: 475410 - DNA, 201 bp, Homo sapiens
catgtgcctgggtgggagtctgctctggggagaccctgggcccgggcaggacctcttccagtcttctgtagttgaggtgggtcggtattagcagagcctaragacagctattcgtctcccaggtctcactatgggcactcctcattttggggtcgtagctggaggctagttggggccctgagccatcctggcttaaaggcc

SEQ ID NO: 475411 - DNA, 201 bp, Homo sapiens
ggcctgtctgggtgggcttgcctcctctccatgtctcgacccttgtgggtcctgcaccgctgcccgatggcctgcccctcctgccttgctgctctgcgagktgagcaggggcgtggcgtggcctctgacctgtggagagctgggggctcccggctgcatctgtactgggggtactgagagccttcgccttgctcctggagg

SEQ ID NO: 475412 - DNA, 201 bp, Homo sapiens
cagctgagcaggggccgccacggactcccccatcctgtacttgtgtcgttttccaattttctcttgatgttatcgctggactctgagagcttcacagataygtatttagaaataaagctgtatagctgggtctcctaacctttcacctccttatcacccagagggtgggacttccccagcatggctggcctcggacacctg

SEQ ID NO: 475413 - DNA, 201 bp, Homo sapiens
ctgcagctgctcacagaggcagcagagggtggcgaagggcctgggtgcaggggaggaggtgagagctgcagctgggggcagacattgaggggctcccgtgyggggtcgactggcgctcagagccaggcctcagcccaagtcactgttgtccaacccttctgacgattggggtttttatcttctccctccaaattgtttaca

SEQ ID NO: 475414 - DNA, 201 bp, Homo sapiens
gaaggtctgtgtccccctctggcttttctcctcctccctgtggtccgtgtgcctgactgccgcgtgggaagcctgaaggtgtgggagcagagagactgcartgtgagctgaagatggggccttgtgctcctggggaggcgtggtgtggcctgacgggcttgagggtggccgaatgaaccttctgagggcaggtcccagcag

SEQ ID NO: 475415 - DNA, 201 bp, Homo sapiens
caggacgtggtgactgaaatatttcagcggggaggcacctgaatgctgctggcacagctccctggacctctcaggtgagctccatggctgcgcccagccargcacctgctgcgggccgaaggcagggcagggaaatccaagaggagggcatttgcctcctgacatgtggaggtgcttttgatgcagtgaggcgcatcgggg

SEQ ID NO: 475416 - DNA, 201 bp, Homo sapiens
tgggcttggggacttggcctcgaggtgctgtgtgtccaggctagcttttctctagccccaggacgtggtgactgaaatatttcagcggggaggcacctgartgctgctggcacagctccctggacctctcaggtgagctccatggctgcgcccagccaggcacctgctgcgggccgaaggcagggcagggaaatccaagag

SEQ ID NO: 475417 - DNA, 201 bp, Homo sapiens
gcttattcaagtgcaaggttcttccaggacggccaccagggaagcacagattccaaagaatggaagtcagtgttccgaagcgtggaagttccggatcattyatgtagacaagtttagggaagcttagcagatctcagcatccttctgcgagaggcttaatgcatcattagaaagatcggattcgatgcggtggcctttatc

SEQ ID NO: 475418 - DNA, 201 bp, Homo sapiens
agagagagaccctgtctcagaaattaaaaaataaaaagaggatgctcaggagtatttgtctttgggggattgcaaattagtacaaccatgagacatggccrcacactgtgggaatggctaaaaactgtaagatcactgacggcactaaatgctggtggagacgtggagccacaggaactctcacgcactgctgggaggagt

SEQ ID NO: 475419 - DNA, 201 bp, Homo sapiens
cctgaagtgcctgggatgagtgtttatcgtgtgcagggtccgctctggggcccgaagaaggctgacacgctgctcatccatctcttgaaggagctcatagygcagtatgtcaacccaaaatactccaaagcgtccgaatctagtttaaagagagcttattcaagtgcaaggttcttccaggacggccaccagggaagcaca

SEQ ID NO: 475420 - DNA, 201 bp, Homo sapiens
atggtcaggcccttgtggggggctcacaggacttgtgtgactgccagttgccgaaagaaggaagcaggtcccttgtcatgaccagagagaccccaggtgcratggctgtcacatcctgctgaccttcccagcctgagccagctcgggccagggtgaggacaagggctgatgggggctgaagggcacagagcacccctgggg

SEQ ID NO: 475421 - DNA, 201 bp, Homo sapiens
ttgaactgagcccggattgatagatgcaggtgtgggcctggatcgcacacccccgccacgtgccctgcagaacacgggcagcaggtgtgaccctgtaggcyatggtggaaagacctccctgtgtatccgagcagcccagaaggacctggcgttggcagttccccagctcgacagctcccatggatcgctccctggggaaaa

SEQ ID NO: 475422 - DNA, 201 bp, Homo sapiens
ggcctgggacatgtgcacacacgtcaccatgagaggtggcaggcaggactcccatatgtggccgtgagaggtggcgagagctggtgggcattgtcccgagsgtcgctgtgagagctggggggcaggaggcccggacattgcccaccacctgagccttcctctgcaccagcattgccctcacttgtcagtccaggccccttt

SEQ ID NO: 475423 - DNA, 201 bp, Homo sapiens
catgatgcctgccaaaggggcactcaaggtccttcccctgtgaggggcatctgccaaggagacctggtctccgggtgctcagagttgttgccagggctctrgtccccgctgctggggaggctctgctggggcctgacgggcagggtgtgaggcccagggcgcccagctccctgtggaactgggagaggtgttcctccttgt

SEQ ID NO: 475424 - DNA, 201 bp, Homo sapiens
tcccttcatgagtgtactttcccttgggcctgggacatgtgcacacacgtcaccatgagaggtggcaggcaggactcccatatgtggccgtgagaggtggygagagctggtgggcattgtcccgagggtcgctgtgagagctggggggcaggaggcccggacattgcccaccacctgagccttcctctgcaccagcattgc

SEQ ID NO: 475425 - DNA, 201 bp, Homo sapiens
ccaggctgcatccctctcctggctccagggttctcccaggagaggtggcctcagccttggcttctgccttttccctgccccatgggccaccgtgacgctcygtgcccttgtctagctctgagcagctctcacctgtgcagtgggaagaaggagctgggtatcgcagggcctgggcggaggccacgtccacactccccatcc

SEQ ID NO: 475426 - DNA, 201 bp, Homo sapiens
tgagctcagggctggctgtctcctaagcctgtgccctctcaccacgttgcctctcatcagggcgatgctttttcaagctcagatatcacaggtcgcttcckcagggcatgaagcctcttaatgctgacccttttttaatactgtggccgagaaacacagttgcgcagagtctgcaggaggaacagtgtggacgtggctgtg

SEQ ID NO: 475427 - DNA, 201 bp, Homo sapiens
cagccccgcctgggcgtggtgggatacctgccagggtcttctggcctcgctggcacacgccgccgccgggtgccttaccattctgctctgcctggcccttyacctgactgctcagtctcattgtcaccgtatcctatggagtgggtgccgttgtgatccgaatttcgctcacgaggaaacccaggcctgggggcgtcaagg

SEQ ID NO: 475428 - DNA, 201 bp, Homo sapiens
cacctgggccagaggtggtgtgtgcaaggtgcagaagggaaggaggaggcagtgtgggcccctcacttgcatgggccaagcagaccggtaacatgcctgcygctctgtgacgtttctgttagagagcggaaggtgtctgacctcagctccccaaatcagaaaacggcatctggagtgccatatacgtttgagaagagggtg

SEQ ID NO: 475429 - DNA, 201 bp, Homo sapiens
caggcagtgccatggcacaagcctgtctgcacctggggctagaggtggcacgtgcaagtcacagaagggaaggaggagacagcctgggcccctcactcacytgggccagaggtggtgtgtgcaaggtgcagaagggaaggaggaggcagtgtgggcccctcacttgcatgggccaagcagaccggtaacatgcctgccgct

SEQ ID NO: 475430 - DNA, 201 bp, Homo sapiens
ggctgcggctgcagctagggcctcggagggccattcggccctggtgcactctccgattctgaggcgtggagggtggcaccggcacccttcacccttcagggtcctttgagggtcctgtgtaagaacatgtgcagggcggacgggggctgctggaggggtgctggagtcactgttttacgtttgggcagtggtgaatgtggc

SEQ ID NO: 475431 - DNA, 201 bp, Homo sapiens
cccagcaggtggccaggccttgttcctgcacctgtccacagggcacagggaaggagccactccttccaggagagatggctgccaggcaggctcaagaagamaaaagaactgagcactgtgctgtgtgtgacccgtgctgtgtgtcttcctgggccatggtgacccatgctgtgtgtgacccgtgctgcgtgtgtgcctggg

SEQ ID NO: 475432 - DNA, 201 bp, Homo sapiens
gcgtgcaccatggaattccctgctcggaccgcactgggggcaggcggtgagtatcggtatagaagtagcttttattaattggtgaagcccgtcacagatcygaaagcatcttaatagtctgaaatgatggctcttcagcaagaaaaatttgatttgggacaaaagggagacacttgagacccaaaatgacttggctgtgtt

SEQ ID NO: 475433 - DNA, 201 bp, Homo sapiens
ggaattctgggaagcaccgcacttggctgagcaaaggccgcatgtcccctctcaccctgttcctgtggttaggcagaagggacccagcaggtggccaggcyttgttcctgcacctgtccacagggcacagggaaggagccactccttccaggagagatggctgccaggcaggctcaagaagacaaaagaactgagcactgt

SEQ ID NO: 475434 - DNA, 201 bp, Homo sapiens
ggcttcagaaaggcatcctcagggggctgagcatcactaggtgtgcccaggagggtcttccctgagctaccctcctgagatagggccacggagggcagagrccagtgtgggagggcagggagagcagggagacaggccccctgccccacccactccacctgggggctggcatacgtggctcccgtgctcctgaaagatctc

SEQ ID NO: 475435 - DNA, 201 bp, Homo sapiens
gggcaccttccaggctggtagggaagagatgggaacatggccacacgggctcccagtctcatcccagccaggaacctcagaggagaggaagcctccctccygggcactgagtgtggaattctgggaagcaccgcacttggctgagcaaaggccgcatgtcccctctcaccctgttcctgtggttaggcagaagggacccag

SEQ ID NO: 475436 - DNA, 201 bp, Homo sapiens
taccaggcctgtgtccctgcatccctgcaaggtggtagcaggtacctctaagagggccggttctgcccaaagcaggggtcccaggggtgtggaggaggggmccgaggagggccggtatctaggcagaggggagttgctgcttcctaggcaggtgctcctggtcagtgtggccagagttcaacatccccgggcagggaaggc

SEQ ID NO: 475437 - DNA, 201 bp, Homo sapiens
tcgaggagctggaaggcgagcggagtcggctggaggaggaaaagaggatgctggaggcacagctggagcggcgagctctgcaggtgagggcggggcagccyctgggtgaggcactgcctgggcctctcatttctttgggcgtcgtgaacgaccgtggttcctgctgccacagaacacccgttttctggctcgtctgtctga

SEQ ID NO: 475438 - DNA, 201 bp, Homo sapiens
ctgggaccaggtcaggctagggccagatgcagctgcagtggcagccaggccggggcacccagcagggcatgaatatcccaggagagagccctgcctcagcycaagtcttgctgtgggagcatggagatctgtctgcatggccggggttatcctggacggggtagcaggagcggtgttggcatacacaaccgaggccagcct

SEQ ID NO: 475439 - DNA, 201 bp, Homo sapiens
gaggcacagctggagcggcgagctctgcaggtgagggcggggcagcctctgggtgaggcactgcctgggcctctcatttctttgggcgtcgtgaacgaccrtggttcctgctgccacagaacacccgttttctggctcgtctgtctgaactctcctccctcccatgtgcacccccttgcctggcagggaggccatgccgct

SEQ ID NO: 475440 - DNA, 201 bp, Homo sapiens
ggagccggaaacttcctgtttccattggcctgagaccccgggctgtccgtctgccctggcatgcacacagcccacccacacttctgtctacccgagtggcygatggtcagccgcacacaccaggaagcctttgctggggccggtggtggtgatgcttccagcacgggctgcttgcttgttggcatctgtgagtcctgaccc

SEQ ID NO: 475441 - DNA, 201 bp, Homo sapiens
gagcttcctgttctccagggaggaggcggacacgctcaggtacgtcccccagagaggaggcggacacgcccaggtgtgtcccccagagaggaggcggataygcccaggtgtgtcctgcgggggaggaggcagatacgcccaggtgtgtcctgtgggggaggaggcggatacgcccaggtgtgtcccacggaggaagaggcg

SEQ ID NO: 475442 - DNA, 201 bp, Homo sapiens
gcagtcgccagtagcccctgccctcggttaggcacccaagggagcccccaggcagagctgggcagcttcgttttccagaccttcactggggaagaacaaarcgttttgtgagggacgagggacaggaaacagaggccaccctgcaggttgtcacatttagggaaacagaggctgccctgcaggatgtcacccctagggaga

SEQ ID NO: 475443 - DNA, 201 bp, Homo sapiens
cctcggaggcgccccttccaggctcagcacgtgcggctctcagagtctcatttgttggctctcctggccttagagggcagcccgagggtcccagcagggcrtcttggctgggtgggctcaggaggcaggggaacagcaagtccggagtcattacaaggcctgtgccgacaccgggtgatttagcggtatgattacttccta

SEQ ID NO: 475444 - DNA, 201 bp, Homo sapiens
ctccccgctgcagtcagggcctgcctcccgcgcccgccaggtggggccttggctgcacagaccctgtgcccactgtgagtccaggagcctcgggctcaggsccctcctccccgcacccctgtcctccttctgatggcgggacagtgaccctggctgtgcccactcactgaccagcagcatactgtctccgtcctggcagca

SEQ ID NO: 475445 - DNA, 201 bp, Homo sapiens
aggcgagcacacgctccttcatgacggggccgggtccagcgtccgctgccgctgggctctggggtctgtccggggtgcctccgcctgctgctttagccagyttgtgttgcttctttcagcaagatgagctgccgttaatatttcacacccagactgtttccctgaatgttttgcatttccatatttaaaatggcatttaca

SEQ ID NO: 475446 - DNA, 201 bp, Homo sapiens
gggtctggcaccatgcacttgaacatggacccctcagtgagtcaggtgccccagagtgcgctgctcaaggtgacaggggagcaggcccattctgtgctcayggctgtgcggtccacctgctggccggtgatggctgccccggcgaccctggcctggctggtggcctctgcctgtccttttggttctcagtccccctctctt

SEQ ID NO: 475447 - DNA, 201 bp, Homo sapiens
ggctaaacagctgggaggtggtgaaagcaggacgtgcgtccaggcctgtgggtctccagagctctgtgggatgtgtttgcaggtggctcctgggtccctgygggacacgttgtgtggctgccgtctcggctttggccttgcttctctgcctcagcagagaccctgggtcatggatcctgcctggtgctgttttgcctgttt

SEQ ID NO: 475448 - DNA, 201 bp, Homo sapiens
cagcgtgctctgagggctcgtgaagaacagggctgggaagctcgggcagggatgcgtggggccatgctcttggcggtttctctgctgtgctggaaataagrccgtgctttggagagggctggtggcgggagcggggcctctcaggaccccgtgagggctccagggttcaggtgtatcatctgtaatcccggcgatgaatga

SEQ ID NO: 475449 - DNA, 201 bp, Homo sapiens
ctttagccgtggacagatggggcgtcattggtcactggtgtgagcagagcgtgtcagagatcctgggcctctttaccttggagcaggagcttcatggcagygtaggggagcctggcctggtttacgctcaagcctcgtttcggctcttagaatctgagaatggacctcctggttgtggggctgaggacagggcatactgtt

SEQ ID NO: 475450 - DNA, 201 bp, Homo sapiens
gtcccacaggtcctcacaaggagccctctgcaccctccactctcggctgccgagcccgcaggagaaaagacgtggagccggggctgccgggcggccgtggmcctgccgtgcgggcccggcggctgggcgagggcactgcagttggtgccgagagcaccccgggaccatcctcgcatttgctcttcccccacctgcctctcc

SEQ ID NO: 475451 - DNA, 201 bp, Homo sapiens
cggggctggctgtggagccaggagcaggcagggctctcagtgggcagcggggcagcctacagggcactggccgtaaggcgctccaggagggtggggtgctygagtgcattgcagcctgggggttgggtcagaaccaccaaaccttgcctcctgtgtgtttctcccttcctttagccgtggacagatggggcgtcattggtc

SEQ ID NO: 475452 - DNA, 201 bp, Homo sapiens
gccctgccagcgagtcccacaggtcctcacaaggagccctctgcaccctccactctcggctgccgagcccgcaggagaaaagacgtggagccggggctgcygggcggccgtggccctgccgtgcgggcccggcggctgggcgagggcactgcagttggtgccgagagcaccccgggaccatcctcgcatttgctcttcccc

SEQ ID NO: 475453 - DNA, 201 bp, Homo sapiens
attccagcctgtttcagggaggatcctggagctctcccacccagaggagttccaaggtagggaaggccgcccagggagggtctgatgtcagcttgccgtgsaacctggtgcaggaaacagatcatcccgcagtgagcagatgccgagccggaagccatcacctcccttgtttgaggaagagaaaatgacaccatatctcgg

SEQ ID NO: 475454 - DNA, 201 bp, Homo sapiens
cctctgggaacgctgctgccccgggcctgtgccctgccagcgagtcccacaggtcctcacaaggagccctctgcaccctccactctcggctgccgagcccrcaggagaaaagacgtggagccggggctgccgggcggccgtggccctgccgtgcgggcccggcggctgggcgagggcactgcagttggtgccgagagcacc

SEQ ID NO: 475455 - DNA, 201 bp, Homo sapiens
gcctcagtttctctccatagttactgcagtagcattccagcctgtttcagggaggatcctggagctctcccacccagaggagttccaaggtagggaaggcmgcccagggagggtctgatgtcagcttgccgtgcaacctggtgcaggaaacagatcatcccgcagtgagcagatgccgagccggaagccatcacctccctt

SEQ ID NO: 475456 - DNA, 201 bp, Homo sapiens
cccgtgcctgggagcccgggtttcccacccagggacaggtggtggtatccccgtcgtcacggtgagggctggaggcacaggtgcctgtgagttacctctgrgaacgctgctgccccgggcctgtgccctgccagcgagtcccacaggtcctcacaaggagccctctgcaccctccactctcggctgccgagcccgcaggag

SEQ ID NO: 475457 - DNA, 201 bp, Homo sapiens
atatccgcatagagaattcctcatggcttaatgaagtatgtaggagaagatgccagtggctcatcacccgtcacctggagtgagggggcaccatgggcctsgggtcgtgtctgctgccttcccaccacctctgcctccccacatcttcatgtctgtttcctggtgaagtcgggtctgtgacagatcgttttgtttcctgct

SEQ ID NO: 475458 - DNA, 201 bp, Homo sapiens
cagcttaacacacaccaagagaaagcagtgagcagggggaaggcaaaagtagggaacagtgaatggaaatctaagaagatttgtaaagtaacgttgagaawgtctgaaagtaaagacaacgagatggaaaacaggagaagagaagtaagaacattagaggtacagcccactgtctgaacaacaggaacatggaaggaggga

SEQ ID NO: 475459 - DNA, 201 bp, Homo sapiens
ggcagtggccaatgaggtgtggatgagtcccgtcgtggccttggtgcttgcgttctggcctctgggctgctgctctcttccgtggcgggacaccgtgttcrtcgcggcctgccgtggcggggtcagggagcctcgcacggttgaacagctgagcacatttctacaagtctcttacaggcagttggacagaaattcagatga

SEQ ID NO: 475460 - DNA, 201 bp, Homo sapiens
ggcgtgagccaccgcgctcggcccagctcttgttctttcttacggccggatagcattccactgtgtgtacatccccattttctttatccattcgtctgtcratagacacaggttaattccgtatctttgccatctttgctgtgataaacatgggaatgcaggtatctttttgatacagtgatttcctttgagtaaataccc

SEQ ID NO: 475461 - DNA, 201 bp, Homo sapiens
cctcccttcccatggtggggtgtgggggcaggttactccccttcctgtctgtctcctggggtttcaggagaattaggcacatagaagagttgggcccagcwgggctagagcagggtcagactccaccagcactgactagtcctcactgtgggagttcacacggctggtcctccctgagccctcacagccttctctgcccat

SEQ ID NO: 475462 - DNA, 201 bp, Homo sapiens
ctcagcccccctgccacgtccaggctgggccagggagattgttaattgcagcttaattagggaatgcattaatattaaaataatcttagcagcacattgarggtgatcaaatttgtcactgcctgtgtgggcacagctgatcctagaggtgtctttggggaggagggaggcagggggaggatggaggagcgaggaagaggg

SEQ ID NO: 475463 - DNA, 201 bp, Homo sapiens
agttttccttttgagccacacatgcccccatttgctgtctgtctctcagatggccatccttcatccagtcgacagggctggccttgcggtttccactgctracacacacggagctggctggttctggggtctgtacccgcacgcagggcccctgccgccatctggacccctgccaccccagtttcccccacttcaggattt

SEQ ID NO: 475464 - DNA, 201 bp, Homo sapiens
tcatcccccgtcccgggtcctgatcagctgccctctgtgtccacaggagcgggacggtatgcgggccatcctggggtcctacgacagcgagctgaccccgkccgagtactcaccccagctgacgcggcgcatgcgggaggctgaggatatggtgcagaaggtgcacagccacagcgccgagatggaggtgaggggccgcgg

SEQ ID NO: 475465 - DNA, 201 bp, Homo sapiens
ttaaacgcgcttggctgttccctagttgtggctggtgggccggcctgccatgagcccatagtaagcgccggtgttgggggtgcaaagttctttactgcggyttgtcttcagccttccaaagccagacagacccaagttccaatctccgttctgtaactttttgaagcttcggtttcatcatctctagaatctgtgtaaaaa

SEQ ID NO: 475466 - DNA, 201 bp, Homo sapiens
gcccacaccggccaggcgggcagcactttgggttggtcctccatgcgtggcctgggtcttggcctgggctacaagtgtggcccccacaggagggcagcccygcccggcctcagctgaggctcatcccttgggaacctcctggtttcttaagtgaggccagcggttggaagctgatgggcagagttcccttgacaggtcacg

SEQ ID NO: 475467 - DNA, 201 bp, Homo sapiens
ttcatctctccatacacactgtgtcctcagggcctggggtgttaccaggcgcccagcacctctccacacatacctgctgggtgaatgaatagctgagcagygcttctgaggaccctggcaccagggttgctcccagtgagaccccagttcctgctgctctgtggcccagcagggagggctcggctctggaaaaccggaggc

SEQ ID NO: 475468 - DNA, 201 bp, Homo sapiens
gacagagcgagactctgcctcaaaaaaaaatatggggagatatatatatatatatttactatttaatgattgctcagtttgaaaaacttcattttgctcaygtttcactgtagtgtatgtagtgtgtatatagagagctgcacaaattatccatgaacacggcatcaccatcacccggtcaggaaacagcgtgatcagctg

SEQ ID NO: 475469 - DNA, 201 bp, Homo sapiens
ctcgttcctggggtggggcggggcttggtggggtggtcaccccaggcttcattgctttgccctcttgtctctcccatgcagcgcccgggggctggagaagrccaggcagcagctgcaggaggagctccggcaggtcagcggccagctgttggaggagaggaagaagcgcgagacccacgaggcgctggcccggaggctcca

SEQ ID NO: 475470 - DNA, 201 bp, Homo sapiens; identical to SEQ ID NO: 132162

SEQ ID NO: 475471 - DNA, 201 bp, Homo sapiens
ggagcttgtagtgagctgagatggagccactgcactccagcctaggcgacagagcgagactctgcctcaaaaaaaaatatggggagatatatatatatatwtttactatttaatgattgctcagtttgaaaaacttcattttgctcatgtttcactgtagtgtatgtagtgtgtatatagagagctgcacaaattatccat

SEQ ID NO: 475472 - DNA, 201 bp, Homo sapiens
tgtgatgatcctgtggcaggtgatgacagggtctgtgcttttgttgtcttttcagaggctgctggccaagctgcaaagctgggagagactggaccagaccwtgggcctgagcatcaggtagggaagggcaggtgtctccggggtcccgccttctttgaagggtcctgggtgaagagcagagcctgcttccggctcaccagc

SEQ ID NO: 475473 - DNA, 201 bp, Homo sapiens
gggcgggcggccgaggggcgcgtgctcgtggtcccagccccggggtcccgctgcctaccgtgtgggtccccgggctagggtgccggcgcgccgaggaaggrgcctgagctggcgcctggtggagaagtcggggctgcaggggctcttggcatcctggtggctcgcgccggtccgctctcaggaagggggcgtgtgggcccg

SEQ ID NO: 475474 - DNA, 201 bp, Homo sapiens
cttgagtcagttttggtagcttttgtcttttcaggagtttgttcatttcacctccgttattaattttcggcatgcagctgttcgtagtattcctttacagbctttatctctggaaggtcagctagtgtctctttcactcccaactgcagtgatctgcaccctctttcttgtttccttggttggcccagctaaaagtttctg

SEQ ID NO: 475475 - DNA, 201 bp, Homo sapiens
gaggggaaccacaggagaaggaggggagcgcagtgctatgtattaccctgtgcccctccgatgggacaggggcgtggatgcagacacattcgaaagtcagyggcagggtcgttttcttgtatttcctgaagtgtcttcgtggctgacttggatgttctccattcaggcccccccttacactgcataattgaatgcattctg

SEQ ID NO: 475476 - DNA, 201 bp, Homo sapiens
gcggtgtctcagggtccctttccacagttctcattgcctgctttgccttaggtcagctcatcagcagccctggggagctggggtgaacggaggaaagacaytgacttgtagaacctgagaatctgggaagggagggccttagccgaagactgtttgcccaggagggtggcacgcagtaaacagttcaacccaggagttcaa

SEQ ID NO: 475477 - DNA, 201 bp, Homo sapiens
tggggctcctactacgccgctgcctgtgctctgttgctcacatgaaggggccagggaagcctgttggcatatggagtcatgccatggctggctgtggcggrgctgtggctgtgcgcgtggcgaggacgatagggttctgcccttgtccgtggtcaccctgctcctgctctcgcttctctgaggccagcccctcctctctga

SEQ ID NO: 475478 - DNA, 201 bp, Homo sapiens
cgagggtcacgtcctcctccctggtgaggggccgtctgcagccactgtggcttgggtatggcttcctgtcaggatggtcccagtgccctcccagatgtgcrcggcacccacgtcgtcatagcgcaggtgtgagcagctgctgtaacaaggctggtgctggttcaggtggatgctggggaatgcatttatacagcgaacaca

SEQ ID NO: 475479 - DNA, 201 bp, Homo sapiens
tactcacctgttgatttatctttcgctgtgtaacaaagcatctcagcaatcatctgtccacacagatctttctctggctacttctttagattagggtcctygtagattgattattagtttggataaaattaattaattggataaattattaacccatttatgctggaggttgcaaatttttttgtgaaaaatcagaccttg

SEQ ID NO: 475480 - DNA, 201 bp, Homo sapiens
cttagtgttccaataatggaacactaggcataaatgggttaattcaaatgcgtgaccatttaaacccatatttgagttgttttgcatctatttcagccatrtaagacttccgggaatgagacttggctcatctcgtgtaattctgagactgcagagctgggaggactttgtcatggctcataatcttaatgaaaccccagg

SEQ ID NO: 475481 - DNA, 201 bp, Homo sapiens
atgcccctcactcaggaagtcccaagggcttcagggaacctgggatgacgatcagatatgtatttcttcttatcccacagcccggctcttctctggtttcrctcgtggctgtgaggggccatccaggctccggcatcacacccagaggcggaaatgagaggcctcttttttggatcttttctgtacaagaaagcgtttcct

SEQ ID NO: 475482 - DNA, 201 bp, Homo sapiens
cttttctggatcccaggctccccatcagcagtgagatccctgcctccacagggtcctgtgagtgactgggacgccctacagcttgcctgccctcaggggcygggtgctttctgctgaccacaccgtacttcctcttgctttggaaatggcagtgaagattgtatgtgagcatccttctggggtttggtgtggggcccctga

SEQ ID NO: 475483 - DNA, 201 bp, Homo sapiens
ggctcgggccgagctcagctgttgctgatcatcggggtgcactttgaactttgaagcggctgtttcacattggagtctgagtttcctcgtttaaaaaatgraaacggtgaacaacagggttgctggggcattcactgagacaatctggaatcgtcctggaaagtagaaagcgctacacctggagatcgctgattttactct

SEQ ID NO: 475484 - DNA, 201 bp, Homo sapiens
cccggtgccagctactccttctgcacccatcgctgtccccactagatgttcagcaaggggcctgttctttgggtgggcagaggaggcctctctgggggacrtggaagggagaaggccgtggcgtgctctgtgtgaattggctgtggtcagagggagggcttatgaccggccctgggtgtgtgtgagggctcagggcctggg

SEQ ID NO: 475485 - DNA, 201 bp, Homo sapiens
ggtgtggggcccctgagatgggacgcacgcaggttcaagaactacactgtttgccaaattgagggcccactgtgactgcaggaagtcagtttgtagtgagyggggaaaggccaggaggctcaaggaggggaggactttggggcagcctggccatggccctttgtcatcactgtgtcgagtggcctcccttccttctgaggc

SEQ ID NO: 475486 - DNA, 201 bp, Homo sapiens
gcgttgaccccatgacatgagacagaggccttcctgggtgacgtaggagactgcctggtgcgtgtgccatctgtgggcgcccagcacttcagaagagagckctgtcactgtcacttttcagttgatttgaaccactcccatttcccccctcattgctaaatggttgcatttatcatggtcttggcatcactgggaatcgca

SEQ ID NO: 475487 - DNA, 201 bp, Homo sapiens
gcatctacatcttggttgcagtgagtcttccgatacatgaacacaatgtagctctccatttatttacgttcttcttattttctttcatccacattttgtgrttttcaccgtacccacccaccccttttttgttagaaatacacatggttttgttggttttattgttagtgttggagctatgtaattatttgtaggcttgtt

SEQ ID NO: 475488 - DNA, 201 bp, Homo sapiens
cgtgtgacgttcttgaaggctgtcatcgagctcactgtgcttgtgcttttgagtggaagctgaaccctggtcatgagcaagaatggccagacagggctcgygaggcttggtttagccaaagtggtgactgcgggtttttcagcgcaagaggctgcgaagggagggattccttctggtgcccctgtgccctccagcggcttc

SEQ ID NO: 475489 - DNA, 201 bp, Homo sapiens
cttggttgcagtgagtcttccgatacatgaacacaatgtagctctccatttatttacgttcttcttattttctttcatccacattttgtggttttcaccgyacccacccaccccttttttgttagaaatacacatggttttgttggttttattgttagtgttggagctatgtaattatttgtaggcttgtttttatgggtc

SEQ ID NO: 475490 - DNA, 201 bp, Homo sapiens
cctcaagcagttgtcctgccttggcctccctaaatgctggtgtcacaggcatgagcacggtgcctggatgaaaccatttctctttatggtaacagaaccgyccttcttttcctccctaattcgtcccccagggtgctagagtatatgttttaatggaaatataacacaatacaccaaagtgcacagattgtaagttttcag

SEQ ID NO: 475491 - DNA, 201 bp, Homo sapiens
ccgtgtgacgttcttgaaggctgtcatcgagctcactgtgcttgtgcttttgagtggaagctgaaccctggtcatgagcaagaatggccagacagggctcrtgaggcttggtttagccaaagtggtgactgcgggtttttcagcgcaagaggctgcgaagggagggattccttctggtgcccctgtgccctccagcggctt

SEQ ID NO: 475492 - DNA, 201 bp, Homo sapiens
cacctgtgaatagggacagttttgcttattttgttaagatccatatgtcttctattttgttttcttgctgtgttgccctgtctaggaccttagtatggtgstgagtaggagatggggcaacagagatcctggcctttctcctcaccttgcagggagagcagtccatcctcctccatgaggcgtgctgctagctgcagttta

SEQ ID NO: 475493 - DNA, 201 bp, Homo sapiens
atctgctctgcatggtgtttctgttgttgggaatgagtaggtagcagagaagtcagaactggaggctcaagcctctttggggcattccagcatcctggcakctagtcttggggagcagccatgagttggggtactccgtggagggcaggtgcattcacagagccctggagaaggaagtgttttcaggggacagtcagactg

SEQ ID NO: 475494 - DNA, 201 bp, Homo sapiens
cactgccgaacaaagggtatacaaaatttcacaacttttaacatgctggttgatgattgtacttgaagtgttttctcctcatgtccccggcgacatccagrcaccgcctccacggtgcatgtcctctcccggcctcccaatgccagtgtgaaaatgggcttggattgcacaccctgaaaacagcctccagcctccctgtcc

SEQ ID NO: 475495 - DNA, 201 bp, Homo sapiens
ttttgattgacactgccgaacaaagggtatacaaaatttcacaacttttaacatgctggttgatgattgtacttgaagtgttttctcctcatgtccccggygacatccagacaccgcctccacggtgcatgtcctctcccggcctcccaatgccagtgtgaaaatgggcttggattgcacaccctgaaaacagcctccagc

SEQ ID NO: 475496 - DNA, 201 bp, Homo sapiens
ttttcaaatttccattaagatgtaccatagtttgaacgtggcctccaaagtccacgtgttggaaacttcatcccagagtgatggtgttgggaggtggggcytcctgggaggcgttgaggtcacgtgggctccaccttggtgagtggattcgtgctgttgtaaaaggggcttctgttagttggctctctgtatctgccctcc

SEQ ID NO: 475497 - DNA, 201 bp, Homo sapiens
caatgtcctgaagtgttttccttgttttctttagtattttttatatttttgggtcttaggtttcagcctgtaatccatctccagttgatttttgtatatgrggaacacattttcttttgattgacactgccgaacaaagggtatacaaaatttcacaacttttaacatgctggttgatgattgtacttgaagtgttttctc

SEQ ID NO: 475498 - DNA, 201 bp, Homo sapiens
acaatctgtgccctgcaggaaaagagcatgcggagaacaggagccagagactggagcgatggagaagcagggtgcaggagaggcagctggaaagggagggyggctcagggccctggggcggggctgggaccaggtcaggctagggccagatgcagctgcagtggcagccaggccggggcacccagcagggcatgaatatcc

SEQ ID NO: 475499 - DNA, 201 bp, Homo sapiens
attcagtcaccatccattgaactggactttttacccagttagcaaggtaatgagtttggatgactctgaaaactttgtgacctccaccccgggcgtcactrtgggctgggggaacctcctcaggctgtgtgtggaccttccgtggagcgcggggcggggcgtagcggacatgcacctgtacacagctctgggttccgcgtt

SEQ ID NO: 475500 - DNA, 201 bp, Homo sapiens
atctgtggttccgctcacccagacctttcaatccactagttcctgtcattctactctctgcctttaggaggtgaatttccacagctcccatgagtgaagaygtgcagtttctttctgttcctggtggtttcacctgacacggtcacctcccattccagccacgttgttacaaatgacaggctctcattctttctttttttt

SEQ ID NO: 475501 - DNA, 201 bp, Homo sapiens
caaggtaatgagtttggatgactctgaaaactttgtgacctccaccccgggcgtcactgtgggctgggggaacctcctcaggctgtgtgtggaccttccgyggagcgcggggcggggcgtagcggacatgcacctgtacacagctctgggttccgcgtttctggggcactctctgccagccaggggtgccctgcagaaatg

SEQ ID NO: 475502 - DNA, 201 bp, Homo sapiens
aaactttgtgacctccaccccgggcgtcactgtgggctgggggaacctcctcaggctgtgtgtggaccttccgtggagcgcggggcggggcgtagcggacrtgcacctgtacacagctctgggttccgcgtttctggggcactctctgccagccaggggtgccctgcagaaatgaggctaggattacacggggagcagctt

SEQ ID NO: 475503 - DNA, 201 bp, Homo sapiens
ccccgggcgtcactgtgggctgggggaacctcctcaggctgtgtgtggaccttccgtggagcgcggggcggggcgtagcggacatgcacctgtacacagckctgggttccgcgtttctggggcactctctgccagccaggggtgccctgcagaaatgaggctaggattacacggggagcagcttgggccaaagactcgatt

SEQ ID NO: 475504 - DNA, 201 bp, Homo sapiens
cctgctgctgccaggccagcagagaccgccccgtagggcactgcggtttctgcggcctgttctgccctgagtggccttcctcccctgctcttagctgggcsccctcactccacctcgctgctggctttgttgcctttcaggctgtgaccacctgaagccagctcgtgtgttagtgccctttgttagtaaccaaccccttgt

SEQ ID NO: 475505 - DNA, 201 bp, Homo sapiens
ttccttttacaacaaagaggatcctgtctcttcccaagtaccactgttcctttgcgatcggcacaggcaggagaggtccgccctgccaggcctgggtcagyggagctgtgcagactgtggtatagaagctgccttcaacagttgtattccatttgggcttctccatttcctgattagtagtagtattaataatattatttt

SEQ ID NO: 475506 - DNA, 201 bp, Homo sapiens
tcctgcagtccgccactttcccagtgagccctgtttcctcttgttgccgagtgctgcttagagatgagatgtgggtgtggggtgctgcctgctccgggtgygtcagggccccagggcccctcggtggacaccctgacactggctccatccagcacccctgggctgtcctcgcctcctgtgctgtctccttggtcttgagaa

SEQ ID NO: 475507 - DNA, 201 bp, Homo sapiens
ggggttcggcctgtggagtgttggaaacttccagacagccctccagctgccaccacctctgacaccccctgcgattacacccttagtggggggacgtccarggtggccctggggaaggtgaggcctcacaggccctgtggtggctcaggctgcccctggctctggatgcccagggctgtgccattgaaggaaatactgtaa

SEQ ID NO: 475508 - DNA, 201 bp, Homo sapiens
gggccaccaggataatgcaggaacgcccgtggtctcaccatccctgccccggacacatctgcagagtcccttcccacgtgcggtcctgggcccaggcatarccaccgcttgctgatgcctgtctggtctcctgccacccatcacagcgccatctcctccttccgactcccaggtcctgaggcctccaggccagcactggcc

SEQ ID NO: 475509 - DNA, 201 bp, Homo sapiens
tgactagttagaactttttgtaattagttcacagctggttggcgaggaaagagaatttcagttaccccttagagctgggcgcgagtgccgctgccctcccrcggtgctgaggccaggagaccaggcctgggaggtcttcgtgctgccttcctgggagggccgtcactgggccctgctgtggcactggcctttctgggtctc

SEQ ID NO: 475510 - DNA, 201 bp, Homo sapiens
aggtgcagagagctctgatctcccacgatcggaagtaccgtgtgcgtgtcttacctgggcagaatgcagagaccttcactggcagctgtgtgtggaccctrgggctctgttacacagccaggtgctgaggagcagggctccgagccaggccagcgaaccttccttagaccccctgtgtgcaggcctggtgcctggtgtcgg

SEQ ID NO: 475511 - DNA, 201 bp, Homo sapiens
tgcctgccatctctcctcttctcaaccccagctcctcctgtggctgagtcctggccgctttctgccttggggttgtgttggttttccgtaaacgcatcctstcaatcctgagcattgtgagttaagagctggggtctccctttagcgcccctgagccagacgtgcagtaggcgtgtgctgagcctttgaagagtggaggac

SEQ ID NO: 475512 - DNA, 201 bp, Homo sapiens
ggtgctagaaataccctttggcgtaatggatgtgatcgccgcacaggtgtacacgcagcaaagctcatgacactgctcttgtcaaactgttcacgtgcgcrgatcatacctcactcaagctggcctgtcaacagcagacggtcagctcttcggattagctgtgaggggaaggaaaattccttagtggcgacttggactgaa

SEQ ID NO: 475513 - DNA, 201 bp, Homo sapiens
ttgtggcctcagaaatgtccacatgttggcaaaaccatttcatcttttctttttctgatatggagtgctctgaaaccattgccttaaacccattctgtttycactagctaaagctcatacacttcatccccagagagcccattttcttttatttatttatttaccatttatttatttttatacataatattttacatattt

SEQ ID NO: 475514 - DNA, 201 bp, Homo sapiens
aggaggtgacctcctgacccgtttgatcggattccaccttgttcttgatgggacctcctttgtggcctcagaaatgtccacatgttggcaaaaccatttcrtcttttctttttctgatatggagtgctctgaaaccattgccttaaacccattctgtttccactagctaaagctcatacacttcatccccagagagcccat

SEQ ID NO: 475515 - DNA, 201 bp, Homo sapiens
aaattagacttcatcaaaattgaaaacttctgctctcaaaagatacagtgaaaaggcagaccatagactaggaaaatatttgcgagatattaacatgtatstgaccaaagatgtgctccaggatagagaaggaactcttacaaattagtaagattaccatagtttaaaaaatggtcaaaagacttttaacagatactttat

SEQ ID NO: 475516 - DNA, 201 bp, Homo sapiens
cattcttagagacggaaggtagtatggaggtggctggggctgggagcagaggggctgtgggagttcctctttaatgcgacagggtttcagttttgcaaaaktaagagttctggggataggtgtggtgctggttgcccaataacatgaatatgctcaacacgacagaactggggacttaaaaatggttaagatggtatattt

SEQ ID NO: 475517 - DNA, 201 bp, Homo sapiens
tgtagagacagggtttcgccatgttggtcaggctggtcttgaactcctgacctcaagtgatccacccgccttggcctcccaaagtgctgggattacaggcrtgagccactgtgcccggctgacaatttctaaaatttctatgggaatgtaaagtacctataaattgttatagccataacagtttcaaaaaagaacaagtta

SEQ ID NO: 475518 - DNA, 201 bp, Homo sapiens
gggaacctcctcaggctgtgtgtggaccttccgtggagcgcggggcggggcgtagcggacatgcacctgtacacagctctgggttccgcgtttctggggcrctctctgccagccaggggtgccctgcagaaatgaggctaggattacacggggagcagcttgggccaaagactcgatttccatctgctccctgaatgtggt

SEQ ID NO: 475519 - DNA, 201 bp, Homo sapiens
tgatgccaagtagagtgagcccgtcacagagaaatgctctatggctccactcatgtggctggagtggtcgcattcttagagacggaaggtagtatggaggyggctggggctgggagcagaggggctgtgggagttcctctttaatgcgacagggtttcagttttgcaaaattaagagttctggggataggtgtggtgctgg

SEQ ID NO: 475520 - DNA, 201 bp, Homo sapiens
ctcccaccatgggacttgcttgctgacactggggttttggtcgatggggatgtgaggggcttgtggccactgttcctgactgccttcaggggggcgcttckggctgtcccatgcctgccttgtttctgaccagtgtcctggggccctcaggcctgtgggctctgggctgtgagctcctggcgttgaggtcagacgtccttt

SEQ ID NO: 475521 - DNA, 201 bp, Homo sapiens
tgaatgtggtgagcccggtgtccacaggactgtgtaggaggggacagccagcatctgccctttccagagacctttctcctggcactcgtgtctgggcgctrgggatgatcttgtttctgttccttggatttttacttctcttcagctccatctgaagcttttcccctctctcatttcattgtaatcataactcgcacatca

SEQ ID NO: 475522 - DNA, 201 bp, Homo sapiens
aaccatgcatccactgccctcgccacacgcgccgtgaaaccatgcgcccgctcccctcgccacacgcgccgtgaaaccatgcgcccgctcccctcgccacrcgcgccgtgaaaccgtgcgcccgctcccctcgccacacgcgccgtgaaaccgtgcgcccgctcccctcgccacacccgccgtgaaaccgtgcgcccgctg

SEQ ID NO: 475523 - DNA, 201 bp, Homo sapiens
agtcttgctcttgttgcgcaggctggagggcaataccgtggtctcagctcactgtaacctccacctcccgggttcaagcaattctcctgcctcagcctccygagtaggtgggattacaggcacctgccactgcacccggctaattttttgtatttttagtagagacggggtttcaccatgttggccaggctggtcttgagc

SEQ ID NO: 475524 - DNA, 201 bp, Homo sapiens
gagcgtggttggtccgggcctcgcgcacagctctcagccctgctgcttccggacgaccctgcctcttctaagctgctcctgtaaagtgcctttgaccttgsaaggttgccatgtgaactgatgtaaatggggatgacgatgtgcctcacctgtagctgtcacctgaggccggtgcccatcgtgccagccgcctgtgtgccc

SEQ ID NO: 475525 - DNA, 201 bp, Homo sapiens
ttgtccttcagattgacagagaaccgcaggcagtgttttctctgtcacacgtgtggtgggtggcatcctggtgacataaagaattgcctttggtaacttgyccagaaggctgtagggttattttctgcttagactttcccctatttctttcttttcttttcttttccttttctttctttctttttttttttttttgagatg

SEQ ID NO: 475526 - DNA, 201 bp, Homo sapiens
gggaaatgacttctggcctcagctccccaaggacaaagtggggcccgtgagcaccccttctcaggtgctgagcgatggagagctgataaaacagcacaggyggccttggtttcggggctccctcctcctctccccgacatacctgtagtggccggcacagcctgggcctccgtggaaactggcaggatgggcttgcctggt

SEQ ID NO: 475527 - DNA, 201 bp, Homo sapiens
agcagcgcttctgaggaccctggcaccagggttgctcccagtgagaccccagttcctgctgctctgtggcccagcagggagggctcggctctggaaaaccrgaggcccacactatccttagatgccaccgcatgaggctcctgttgctgccatgacaaaccagcactgactgagttactcaacacagcagggccggcgcgg

SEQ ID NO: 475528 - DNA, 201 bp, Homo sapiens
tgcctggtttgctgctctgtaatccagcggctcctgcagtcctggcacgttcggttgtgtcccgaaagaaaaccagtgcttcctaaacagaaacggacaakcgtcagttggaaaagatgtgtggccttcaaacaaacaccctggaccagggaggaactccttgttcccaggacagacgggaaagtcagaggcctttaaaac

SEQ ID NO: 475529 - DNA, 201 bp, Homo sapiens
agaagctggtgccttgatctcggacttgccagcctccagaactgtgagcctataaacttcgggtcgttataaattaatctcaggtattctgtgatagcgcygccaatagactaggatgcctgctgtgatccatacagatttagaaggatgctttttaatttcaaagtgtctctccctgattttctgggtaatttctgttca

SEQ ID NO: 475530 - DNA, 201 bp, Homo sapiens
cctgccatgcctggtttgctgctctgtaatccagcggctcctgcagtcctggcacgttcggttgtgtcccgaaagaaaaccagtgcttcctaaacagaaamggacaatcgtcagttggaaaagatgtgtggccttcaaacaaacaccctggaccagggaggaactccttgttcccaggacagacgggaaagtcagaggcct

SEQ ID NO: 475531 - DNA, 201 bp, Homo sapiens
tttggcccagtcctgtgccaagctgagatcgtctgcctgggtcctgccatctagggacctgcaggtcatggggaacagtctcaggtgtggcaggagttccrtcgtgggctcctctagggaccggtgggtcgtggggagcagtgtcaagtgtggcaattctgtcgtgggctcctctagggactggtgggtggtggggagcag

SEQ ID NO: 475532 - DNA, 201 bp, Homo sapiens
acatcttcccaagtcacgtaacgctgcacaccctggtccgccccgtggtacctccgcgagcaccgcctgccatgcctggtttgctgctctgtaatccagcrgctcctgcagtcctggcacgttcggttgtgtcccgaaagaaaaccagtgcttcctaaacagaaacggacaatcgtcagttggaaaagatgtgtggccttc

SEQ ID NO: 475533 - DNA, 201 bp, Homo sapiens
gagtgtgtgtggcgtatccgcagcctccctcatccctgcctgtccccacggtgcctggcaggtgctgggggcctggtgcagagcctcgctctgacgctgarcagaggttgggagaggcggaggagccgcatctgggcttgtcctcttggcagcacccagcgcctacacctcacatggaaatggggctcaccagtgagtgga

SEQ ID NO: 475534 - DNA, 201 bp, Homo sapiens
catgcacacagcccacccacacttctgtctacccgagtggccgatggtcagccgcacacaccaggaagcctttgctggggccggtggtggtgatgcttccrgcacgggctgcttgcttgttggcatctgtgagtcctgacccttcctggggctgcagcaggcgtgagtgttgttgagggagggagagtggcctgcggaccc

SEQ ID NO: 475535 - DNA, 201 bp, Homo sapiens
aggtgctagataatattttaagacactttgaggtatgagattaggcaaggcacacgaggtggacaggtctgacgcgggcagtctgagcatttctccagccyccgcgggtttcctctgtcccagccctctggccacatgcggggtggccactgctccgacctctcttggtgatggcttttctgtggatgacatgagacagtg

SEQ ID NO: 475536 - DNA, 201 bp, Homo sapiens
ctggtagggtcttgaatcccaggagatcttgctctcccataagaaaagcagctgtgaaagcacagccgggcccggtgactggcccaagcctccgaggaggyggcaagcttggatggagtgtcctattcagcgtgagggcccggcatttccaccagtattcaaatggagccggaaacttcctgtttccattggcctgagacc

SEQ ID NO: 475537 - DNA, 201 bp, Homo sapiens
tcggaaccaggagcgcaaatcgctggtgctcggggtccatggtgccccttgagggctcacacagccttcccatgacccttgtcttctactcctggtagggycttgaatcccaggagatcttgctctcccataagaaaagcagctgtgaaagcacagccgggcccggtgactggcccaagcctccgaggaggcggcaagctt

SEQ ID NO: 475538 - DNA, 201 bp, Homo sapiens
cccttcctttcccagaacgtcctgtggttggatcctgcagtgtgtatagccgttgcagaccggcttccttctcttagccgtgtgcgtgtgattttctccargtctcttcgtggctcatttttcccttcttctctgtccctggcctccatcaggatctggagcagaagctgtccctgcaagagcaggatgcagcgattgtga

SEQ ID NO: 475539 - DNA, 201 bp, Homo sapiens
gccctaacaggaacaccgcagactgggctgcttaaagtagcagatgttggccgggcgtggtggcttacgcctgtaatcccagcactttgggaagctggggygggtggaaatcttgagcccaggagttcgagactggcctgggcaacagagtgagacctcgtctctgtttaaaaaaataaaataaaacaaaacccttgcaga

SEQ ID NO: 475540 - DNA, 201 bp, Homo sapiens
agcaactcagaattaagtgacatcttcgtccttctctggaccagttgttttccagagcaggtcagacagagctcagcttccccatctgccaggattcagcsctgggctctcggaaccaggagcgcaaatcgctggtgctcggggtccatggtgccccttgagggctcacacagccttcccatgacccttgtcttctactcc

SEQ ID NO: 475541 - DNA, 201 bp, Homo sapiens
gtgtgtgtgtacatgtacacccgtgctcacaaacaggctggagaactacatgccgtcgcctctgtgcccccgctggtgtgattctgagtgactgggtgatrggtgatgagtgttatttttatatttcaaaatagtgtgagaaggaggctgtcctattgaggcacagaccagtgggcaaggaccttggtggtggggggcaca

SEQ ID NO: 475542 - DNA, 201 bp, Homo sapiens
tttttcccattgtgtgtggagttgagctcccttccccctccctgccgtgttctgggatcaccctgggagtctatttgaaatccagaaactcctgaaaggcmttaagtagctattcagcagtgcggaaatggcagtgagggggttgcacgtgcagctctattttaggatgtcctggtgggctcgttcctggggtggggcggg

SEQ ID NO: 475543 - DNA, 201 bp, Homo sapiens
agatggcgccctctcactgtgtcctcacatggtgggaggggcgagggagctctggggtcccttttatgagggtgctaatcccccccccgaggctccgcccsgtggcctcctcacctccccgggctccctcctaggatttcagcatgagagcgggagcacacagtccatggcatgggcccacctccttcctgctgtgtgaga

SEQ ID NO: 475544 - DNA, 201 bp, Homo sapiens
aaccaggagcgcaaatcgctggtgctcggggtccatggtgccccttgagggctcacacagccttcccatgacccttgtcttctactcctggtagggtcttgaatcccaggagatcttgctctcccataagaaaagcagctgtgaaagcacagccgggcccggtgactggcccaagcctccgaggaggcggcaagcttggat

SEQ ID NO: 475545 - DNA, 201 bp, Homo sapiens
ggtttttatggctgcctctcagtgccgcccgccccccgtccagggagagtggcctcaggtgtcgggcgccgcgccgtcctgcttccgctgccgctgccctsactgcggggtcaccttccctccacagcccctcagggccctcccagagccggcgtctgctgatccagcctcccctgtaccccagggggctctttacacctg

SEQ ID NO: 475546 - DNA, 201 bp, Homo sapiens
cctgtgccggccgaggccgggctcctgccgcccgctctggtctgggcatgggtcaccccacagggttgccgccatcagtcagcagttgggctgggagggcyacatgagtgcctgtagattctggcacagacgcttgtggcctgtgggcttacttcctgccctccctgccaccttgttggctccagccgggctgccacggtg

SEQ ID NO: 475547 - DNA, 201 bp, Homo sapiens
aggcctcccacaggagagtcctgaggcatggaggctgctgaggacctggggcagtttagcgaaggaactttgtgacctcaatgactttaatttttaatggrtggtattttctagagcaattttaggttcacagcaaaatgagcagaaggtaaagctcctgtgtaccccctgcgcccgctcctacacacacagcctaccctg

SEQ ID NO: 475548 - DNA, 201 bp, Homo sapiens
agctgtcacacgtgctgctagagtggcagaagtgggcttgacacgggaggggtgggatgttttaccatggagtgccatcctggaccagacttgagacagasttttgctcctggagagctccccgagggcaggtggtgagcacagcagcccggcagtgtgcagtgtgaatgccagctcccagtacgcggagggctgggaggt

SEQ ID NO: 475549 - DNA, 201 bp, Homo sapiens
gtgacttgctgctcacagatgccagctgtctgtgtcccaaggggactgggtaccgtagggaaaagcctgtcctcactattggaaagactgagctgtcacaygtgctgctagagtggcagaagtgggcttgacacgggaggggtgggatgttttaccatggagtgccatcctggaccagacttgagacagacttttgctcct

SEQ ID NO: 475550 - DNA, 201 bp, Homo sapiens
ccgagctgaggctcctgaggcctctgaatgccttccactttgtagttggtgaagtgcgggtttcagaatggactgtcgggagttattcttaggccgtaatratacttggcacggctcctcctggttacgagcacttagctaatccccagagcacccttggtaaacatctctgagtagctttaaccacacacaggtcaggag

SEQ ID NO: 475551 - DNA, 201 bp, Homo sapiens
gggtgcagcaggtgcagcaggtgcagcctcaggcaggtggctcctgcagaacctgacccagggccgggtactgcacagcatggcattagtcccctgtcttyaggaaaacaccagctgctcctcccgtgttctggggccatgcatctctcccaacctggcgaccccacctttccacacaattgtgttgcatcagccagaaaa

SEQ ID NO: 475552 - DNA, 201 bp, Homo sapiens
acatccctgtggtggccttgactctcctgcccctgtcggcctttctgcgctggtgccgagctccgtggtccttctgtgaggttagctgctgccctgtgtgytgggcactgtgctgggcaccagggatgccatggtgaatgaggcagatgcttccgctcttgggagcgtgtattctagaggagggagactgaccacaaacac

SEQ ID NO: 475553 - DNA, 201 bp, Homo sapiens
taatcccagctactctggaggctgaggcagaagaatcgcttgaaccgggggggcagaggttgcagtgagccgagattgtgccactgcactccagcctgggygacagagtgagactctgtctcaaaaaacaaaaaacaaagaatacatactgtcgcctgtgtgcccattctcaagaaaaaggaaagtttctttgaaaacatg

SEQ ID NO: 475554 - DNA, 201 bp, Homo sapiens
tgagggctccaatttccccgtagccttccctgtcgtggatggtggtcttttctggaaatagctgttgttttgtcaggaggcttaaggaggcacgtctggawttgcatatctttgactgtctgcaaggtctacaggcatctgatggcgtcggataattgcctctgaactggagcctgtgtgaactgcagtcctggtgaaggt

SEQ ID NO: 475555 - DNA, 201 bp, Homo sapiens
gccaaggcgggcggatcatgaggtcaggagttggagaccagcctggccaacatagtgaaaccctgtctctactaaagatacaaaaaattagccaggtgtgktgtcatgcgcctgtaatcccagctactctggaggctgaggcagaagaatcgcttgaaccgggggggcagaggttgcagtgagccgagattgtgccactgc

SEQ ID NO: 475556 - DNA, 201 bp, Homo sapiens
caggctcaccgtgctgcgagctcaccatgtcgtaaccatctcgggctcaccatgccgcgggctcaccaagtcgtaactctgtcttgggctcaccatgccgygggctcaccaagtcgtaactctgtctcgggctcaccgtgccgtgagctcactgtgtcataaccgtctcgggctcaccatgctgcgggctcaccgtgccgc

SEQ ID NO: 475557 - DNA, 201 bp, Homo sapiens
gactttggacagacccctaggactgggttataaggtccctagcgatggcggtctctgcagccgttgtgctcagaggcctggctgagggctccaatttcccygtagccttccctgtcgtggatggtggtcttttctggaaatagctgttgttttgtcaggaggcttaaggaggcacgtctggatttgcatatctttgactgt

SEQ ID NO: 475558 - DNA, 201 bp, Homo sapiens
tttgtgtcagattcgcatggtgaggagggggcagctctgagaggagccaggcccaggctgcctccagggcgtccagtgctccccaggcttgcctaggagartgtcgattcctgctgcacagcaactctcatgaccaagtttaaaatgcattatacgtagaaaagtgtgcttctgtggctcacgcctgtaatctcagcactt

SEQ ID NO: 475559 - DNA, 201 bp, Homo sapiens
tggaggtcatggccccatcccacattcctgtttccaagcagcctcctggctctccctgatggttgcctcacagggctgtggtccctgttagcttttctctrtcccagtgctgtgttttatttccttgagatttagttaagatttcctttggaaagaagtttgtggtactcaatagagtcgtgtgcagctcccgtgttccag

SEQ ID NO: 475560 - DNA, 201 bp, Homo sapiens
gggtcattagagtcaggaggtctgagcgtggtgcttggtcatgtcccatcccaaccagtgagagccacgcggcctccctaaggccagtcgtggggggtggstctggaggtttgtggtttgtgtgagagggggtgcatgtgtggcagatttgagcccagtgtaaactgcttctgcccacagcctcctgtccacgctgcctgt

SEQ ID NO: 475561 - DNA, 201 bp, Homo sapiens
tttatacagcggttcgttatacaagtaacctattgagaagaggacataggtgtctgcatgcatccgcttctcagtgagtccatgctggactgtaactgttsccattttcctgaggtggggggttgaggtttggagagctcagagtcacagattcgcaatgaatggacttagaattgagtgcttgactgactgcagacacta

SEQ ID NO: 475562 - DNA, 201 bp, Homo sapiens
ggccggggagtccatactccgagcagggagggtcccacgctcctgaagctcagtggctttcttttccggcccccaggtgagtgctggaggacttcgccttsagctcctggtacagcagcctcaccactgcctggatggtggcacgaggttgaggtcaggggatgcgagagaagagccacgatgttccctacccaccagtgc

SEQ ID NO: 475563 - DNA, 201 bp, Homo sapiens
ggcctgcgggtcattagagtcaggaggtctgagcgtggtgcttggtcatgtcccatcccaaccagtgagagccacgcggcctccctaaggccagtcgtggkgggtggctctggaggtttgtggtttgtgtgagagggggtgcatgtgtggcagatttgagcccagtgtaaactgcttctgcccacagcctcctgtccacgc

SEQ ID NO: 475564 - DNA, 201 bp, Homo sapiens
ctttgcatcagtcggcactctggaacagtgcctgaggatgttagaatcaccttatgtctcctctggaaagaggccagtggatagagaaatatttatttctratcttgtagtctctgtttatacagcggttcgttatacaagtaacctattgagaagaggacataggtgtctgcatgcatccgcttctcagtgagtccatgc

SEQ ID NO: 475565 - DNA, 201 bp, Homo sapiens
actggatcaagccactgtcacctcctctgggccttggggatgtcacctgcccactcttgtcatggtcggcctcctcagcgagccactcagctctagctgcmaaggactctgtctgtttgtccatgtagtgtccttgctgggcacacagtaggtgctcagttaaatttgttcactggatgcagattctgcaggcatcttcac

SEQ ID NO: 475566 - DNA, 201 bp, Homo sapiens
tgggaaggagtgggtagaagattgccgggttccctgtgagcagaagctggaagcacacggagaccgttctgctcccgtctgcaccagcaggcaggtggtgyggtacctcacatccctggtccgtgtccctgggaccagggtggggcgggcccgtcacctctcctcagacctcctcaccccctccctgagatgccatccctg

SEQ ID NO: 475567 - DNA, 201 bp, Homo sapiens
aggcgtggttccgcccaggtcattctcccggcccagctgctgtggacagtggacacacgctgtcacagcctcaggccggccgggccacgcctcccggaagygggcctgcttgtgtgtggttgcatcccaagctctccacttgctgcccctgttctgagcttcttgccgaagttgtgtttggggccattatctagctttctt

SEQ ID NO: 475568 - DNA, 201 bp, Homo sapiens
gcagctgccctgggagagggccgcgtcccctcctggagccacagctgccccctttgtgctggcgtccatgcccaggtgtggtgggctggggtcgtgtccckgtaccggggcctcccggcgggtgctctgagccaacctcctcaggtctggcctctcccgctcgctggactcttagtaacgcatgtggctcatcagtgggac

SEQ ID NO: 475569 - DNA, 201 bp, Homo sapiens
acgtgcaggagggcggcagagccactggacggacggacagacggatggtgtgagtgtgcccgagttctcacttccctatcacatggtgaccattctcgccsctgggtgacatgagactgaggtcagggtgctggggactggcccagagtcacacagttgtggctggtggaactgggacccagctcgggctctgccagaccc

SEQ ID NO: 475570 - DNA, 201 bp, Homo sapiens
tttagtgatgtcccgtctctcctgtgttgggctgtgcgggtttaatgatgtcctctctcttctgtgctgggccgtgcgggtttagtgatgtcccgtctctsctgtgctgggccgtgcgggtttcggtgttttctttgtttttcttactttagctgtgttcttggaacaataaggtgagggaggagtggacgtttgccaaat

SEQ ID NO: 475571 - DNA, 201 bp, Homo sapiens
agaacgctccgctgtggcactgtcggctttggtatctggatccagcggggcagcagcacatttagccctggcttcaatctgtgtgtctccagtgactgacrtgcccagcgtttcccgtgcttctccacctcggcgcctcttctctggtggcgtctgttcaggtcccttccctctgtctggtgctggcctgccaggcccagc

SEQ ID NO: 475572 - DNA, 201 bp, Homo sapiens
gtttaaagcattcaaaagatcagcttttccaaagagtgaggaaacagggagagaaaattatggcatttgtttgaaaggttctgagggcttttttttagctygaacagttcaaacagcgcctcttgttaatcaggaatgttctggcatccctggggtggtcacacgggcttaattggaacccaggctgctttgaagcccttg

SEQ ID NO: 475573 - DNA, 201 bp, Homo sapiens
cagagcctcgggcaccgagggggagaccctgacactgtcctgcctgccccaccagtctgctccccgcagctcctcgtcctcacccgagtgctgctggagggttggcaggaggcgtgaccagcagggtccagcacagtcagggtttcctggggggtccaggaaacaggatgagctgctgtgtggcagctcatggtcagctcg

SEQ ID NO: 475574 - DNA, 201 bp, Homo sapiens
gagggtcccacgctcctgaagctcagtggctttcttttccggcccccaggtgagtgctggaggacttcgccttgagctcctggtacagcagcctcaccacygcctggatggtggcacgaggttgaggtcaggggatgcgagagaagagccacgatgttccctacccaccagtgcggtgggccttccagagccgggcacgtg

SEQ ID NO: 475575 - DNA, 201 bp, Homo sapiens
agacctgctggctgccctgtctgcgctgggactggcagttccaggcccggtgccgcatctggctgtgatggtgctgagcggagccccgtgccaaccccagytcttgtcctgcatcacagaagggtctcttggttgttgtgaggcagcccttgcagctcacaagggctggagtccctccgaggtgcgcgggtcagcctctct

SEQ ID NO: 475576 - DNA, 201 bp, Homo sapiens
accagctaatttttgtatttttagtagagacggggtttccccatgttggccaggctggtcttgaactcctggcctcaagtgatccacccgccttggcctcycaaagtactgggattacaggtgtgagccaccacacccaacctaaagagaagattctgactgagtaggtctggggtgtagtctgcgactctgcatttgtta

SEQ ID NO: 475577 - DNA, 201 bp, Homo sapiens
cctggggccttcctgggttctagccccgtgagctacaggcacttctttgtaaaaggggattccaccagttaggcagattccggttcagtctccagcagccyggggcccttcctggaagagtgctttgtgagcggagtgcgccgcccaggtgtgtagtggtgcttctcaggcccatgggctgcccttccctgggcctcttct

SEQ ID NO: 475578 - DNA, 201 bp, Homo sapiens
tcctttctttccgttgtagtcagctccaggcagaggtggcacacggatcaggtgtgtctgggactcctggtccctgccggtcgtgccccctgcaggcgggstgcccacccttctcgagaggctcaggcttgactgcagacacagaagtgagaccaggaaggctgctgagtttgaagggcagtcttaggaacgcccaaacag

SEQ ID NO: 475579 - DNA, 201 bp, Homo sapiens
acctccgttgcccagtgaagcatgctgccctggtcttactgtttcaccggcactctcctatctgcgatgccactgtccacagcggggttgctttagggttycgagctcacctggggccttcctgggttctagccccgtgagctacaggcacttctttgtaaaaggggattccaccagttaggcagattccggttcagtctc

SEQ ID NO: 475580 - DNA, 201 bp, Homo sapiens
atttttgttttaagaggcagagtcttgccatgttgccctggctggtatcaaactcctggcttacacgatcctcctgccttggcctcccaaagtgctgggaytacaggcatacaccatcatgcctggtctaaaatattgtgtttttttttttaatttttttaagagatgaggttgcccaggttggagtgcagtgatgtgatc

SEQ ID NO: 475581 - DNA, 201 bp, Homo sapiens
gggtttctcactgtagacacaactgcagaggattcaggcctcctgaaggacttcaggctccaaagagtgatgagcccagtcccagttggggctgcgataayggggcccccaagttgtagggagtggtggggagtggagtgctggctagtagtgtctccagccttgcctgggccctgtggctgcgcaggctcctctaggctc

SEQ ID NO: 475582 - DNA, 201 bp, Homo sapiens
cagaccctggtgacaggatcggaaagccagttcattcatctaattgaggacagaacccaaactgcctgggggagtgagcaccaggactgtcgggaaggctrtgttggaaacacagtgctgagagtgcctgggcagcccagagacaaagccacagcagtgagcagaaggactgggtgttttgtggtctcagactgtggaggg

SEQ ID NO: 475583 - DNA, 201 bp, Homo sapiens
taaaggcctgccttgttagcgccctgagtgggcctggcgctcagcattgcgttcacacaagtgcactcacagaccctggtgacaggatcggaaagccagtkcattcatctaattgaggacagaacccaaactgcctgggggagtgagcaccaggactgtcgggaaggctgtgttggaaacacagtgctgagagtgcctggg

SEQ ID NO: 475584 - DNA, 201 bp, Homo sapiens; identical to SEQ ID NO: 132163

SEQ ID NO: 475585 - DNA, 201 bp, Homo sapiens
aaagtggcaatgaaagcctatcgtctagaggaagggaggtccgtttcaacataattgactcaaataacttagagtgtttgcttctgaggctgggaactggkccaggagatgcagagtggagttggggatggctgcttgccataacaagccttgtagtttgactatgtacactttgtttatgtaacttcacgaggaatacgt

SEQ ID NO: 475586 - DNA, 201 bp, Homo sapiens
acggttctgcaggctggaagtccaggatcaggaactggccggtctggtgtttgctgaggcttcctggttccagatggcgccctctcactgtgtcctcacayggtgggaggggcgagggagctctggggtcccttttatgagggtgctaatcccccccccgaggctccgcccggtggcctcctcacctccccgggctccctc

SEQ ID NO: 475587 - DNA, 201 bp, Homo sapiens
atggctggtggcaccggggttctgtatggctgctggcagcctcctggtccctggaaacctgttcagttcacgctgcaccagcatgtatgtccccgcgcgcsctggtgtgcaggtgtcctgagcttggagaggctctttggggccagggatgtgtctggggcaggtctggggaatggctcaaagtctgagactgtgtcctta

SEQ ID NO: 475588 - DNA, 201 bp, Homo sapiens
catctctactagtgacaggtggcatgcgccgggggggagcacagcccctcgggccccaccaccgtgtttgtggcagggggccagtgacatgtttgccgcaygaggccacggtgtcggggcaaagcaggtgtgagagcctacgaggggtctgtccagcagcgaactggacatcagtgctgtggcttcatggacccctgtccc

SEQ ID NO: 475589 - DNA, 201 bp, Homo sapiens
tttgtgagagtcatgtgtgttgtgtatagctgagatttgttgatttttcttaattactctgttaagttttccattgtataaaaataccactttttaaaatrcacttggctgtacccgacatcggatggtttccagcatgggggtgttgactcttgctgacgtggacgttttaacacgtgtatgacgtttggtgatcccctg

SEQ ID NO: 475590 - DNA, 201 bp, Homo sapiens
gtctgcagccccacgttcccgcctgaatctattcagtttcttgtggtggctccatgcgtcgggagaggtaattagaacagggcttttcagctatttatgaycatacatttccttttctaaaaaaaggagaagttgtggagtgactcagagttgggtggaggtggctgagctgaggtgggatgggcttgggaagaggccctg

SEQ ID NO: 475591 - DNA, 201 bp, Homo sapiens
gcacattctattccttagaaccgggacgtttctgtacctaaggaggagcagccagtggacaatgtaactctgctgggtgcttcttaaagcgagtctgggaygcccccgtcagcactgccagccgcctgtttgttcagcagttaatcaccgcatttgttgaggtggaaatgaagtggacttgcccgcaggtggagtcagctg

SEQ ID NO: 475592 - DNA, 201 bp, Homo sapiens
ggacaatgtaactctgctgggtgcttcttaaagcgagtctgggatgcccccgtcagcactgccagccgcctgtttgttcagcagttaatcaccgcatttgytgaggtggaaatgaagtggacttgcccgcaggtggagtcagctgttaaaaagtcatagcaagtcacaaccacaccgtgcctgctgtttcactaccggtga

SEQ ID NO: 475593 - DNA, 201 bp, Homo sapiens
cctgtttgttcagcagttaatcaccgcatttgttgaggtggaaatgaagtggacttgcccgcaggtggagtcagctgttaaaaagtcatagcaagtcacamccacaccgtgcctgctgtttcactaccggtgacaaaacaggttcttgaaagggtacaaacaacaaactttctaatgcttttcttctgtgccagccagtgc

SEQ ID NO: 475594 - DNA, 201 bp, Homo sapiens
ccagctgtgctcagctagacgcggggctcagccagacgcggggcagctagagctgtggtgatggtggtacctgcggggcggcagaggggtggtgggagcamagagccatggcctcctcttccatcctgagaagtcacaggtaatgccccaaactgaagaattaggaaagtggcaatgaaagcctatcgtctagaggaaggg

SEQ ID NO: 475595 - DNA, 201 bp, Homo sapiens
gctcaccagcgcagtctccagccaggcatctctgtggctggtgcggggcatttgtcctgggctgctcaggtttaatgaggcctttcccagcggatggggcmgtggaacccagtgactcatcctgctgaagccttagtaacatcttcattcagaagcggaatatccacagcaaaccagtggcaggcgtctgattgccctgcg

SEQ ID NO: 475596 - DNA, 201 bp, Homo sapiens
gagcatggacatctccagaggagatttgaacagtttaaagagccagggtggaatgagcgataaacagacagctaagcaagtgaaaaaccccttctcctgtyagcttgaggggaagcacaaagtaggaaggagttggaagtcaccatggtttcctttgtggcctcagtgtgagtggttgagcacccagctgtgctcagctag

SEQ ID NO: 475597 - DNA, 201 bp, Homo sapiens
aagagagagactgatgactgaggaaggattggaacgcagggagcaggatatccgtcactgggggagaagcagctgaagatgatgcctgtgcccgggcagayggtgctcagtcctcagagcaggaagtggtgccgagaaagtctccccaaagacgagattgccaggcagcccgatgccgggtgagcatggacatctccagag

SEQ ID NO: 475598 - DNA, 201 bp, Homo sapiens
gagaccccatctgtccaacaacagcaacaatagcagcagcagctgggtgtgctggcctgcttgtagtcctaggtactcagggtacggagggctgaggcagraggatcgcttgagcccacgaggtggaggccacagtgagctatgaccataccactgcaccccagcctgggtggcagagtgagaccctatcttaaaaacaaa

SEQ ID NO: 475599 - DNA, 201 bp, Homo sapiens
ttggaaaagttaaggagatccggaaagaaaaaaaagatcaaacaggagaaacggaatacactctgaggatcgggttctgtggaccacattcaacaagtacsgcaaagaaacggcggggaggacagcataatgaaacaattgaaaaaccctctcttgagcgtcatcctcttctagactgaaggagccaccaagtacccagtc

SEQ ID NO: 475600 - DNA, 201 bp, Homo sapiens
aaaaatcagtgtaagtgttggaaaagttaaggagatccggaaagaaaaaaaagatcaaacaggagaaacggaatacactctgaggatcgggttctgtggascacattcaacaagtaccgcaaagaaacggcggggaggacagcataatgaaacaattgaaaaaccctctcttgagcgtcatcctcttctagactgaaggag

SEQ ID NO: 475601 - DNA, 201 bp, Homo sapiens
gagggagatgctttgtgtcagattcgcatggtgaggagggggcagctctgagaggagccaggcccaggctgcctccagggcgtccagtgctccccaggctygcctaggagagtgtcgattcctgctgcacagcaactctcatgaccaagtttaaaatgcattatacgtagaaaagtgtgcttctgtggctcacgcctgtaa

SEQ ID NO: 475602 - DNA, 201 bp, Homo sapiens
taataacatattagcgattcacagttcacctggagaaggctgggtgtctcttctgatttcacaaccctggccacacagctcaccaagcaaacagttattaytagcgtatgttttttagaggagctcttgcctatcttttgataaatttaatcctaagaattttgtattattgatgataatttgagtagaattttgaagact

SEQ ID NO: 475603 - DNA, 201 bp, Homo sapiens
tcttttctttttttttttttttgagacggagttttgctcttgttgcccagtctggagtgcagtggcacgatcttggctcactgtgacctccgcctcccagkttcaagcgattctcttgcctcagcctcccgagtagctggaattacaggtgcctgccaccacgcccagctaattttttgtatttttagtagggatgaggtt

SEQ ID NO: 475604 - DNA, 201 bp, Homo sapiens
gacagactcattccccaaccaagtttttgccctgggagagattaggggaggtgaaatcaagacaggactttctttcttttctttttttttttttttgagayggagttttgctcttgttgcccagtctggagtgcagtggcacgatcttggctcactgtgacctccgcctcccaggttcaagcgattctcttgcctcagcct

SEQ ID NO: 475605 - DNA, 201 bp, Homo sapiens
gttggctgatcatgtggtccttgtcctcctgatattttgcccgttgttctatcagctattgagagagggatactgaagtctcagattgtcattgaggaccygtctatttctccctgcatttctggctggttttgcttcatttgttttgcagctcttttattagcacacacatgtttaggattattattttcctttgattaa

SEQ ID NO: 475606 - DNA, 201 bp, Homo sapiens
caggaagacagagaaagacgccagaaagagcatcattctgcagggttcaaggtgaacctggctcgctttcagaggagtagggcaacgagggcacccagacyctaattacacaggatcccggcactgtgccatcggggcctcatgtgtggtcttggtggagaatgaccagggctgctctctagcccccgtcctccagatggt

SEQ ID NO: 475607 - DNA, 201 bp, Homo sapiens
tgtcgtcactcatcaccttgggcaggttcactcccctatgaagccctgggaggcgagggtcaggaacacccaccctgggccctcggccaggccccttaccrgctctgtgatcaggggcctctcagatggctttctgagcctcagtctcccctttactcaggcaccaggacttccctgctagattgatgtgaagactgaggg

SEQ ID NO: 475608 - DNA, 201 bp, Homo sapiens
ggaggctgaggcagcagaattgcttgaacccgtgaggcggaggttgcagtgagtcgagatcgtgccactgcattccagcctgggcaacagaatgagactcygtctcaaaaaaaaaaaacaaaacaataaccaaaaaaaaaacaaaacacaaagtggtatactggactttggagattcagaagtggggaggtttggagaggg

SEQ ID NO: 475609 - DNA, 201 bp, Homo sapiens
caaatattattcctatattttcttcctatatttcttctaagaaatatatggtttctccaaagtaatgcagattatttaaaaaaagagaaaaaaagaaataygtggcatgtagggtgtcagataggggtccaatttcattcctttgcagttgtatatccagttgtcccaacaccatttgttaaaaatactatttttttctcc

SEQ ID NO: 475610 - DNA, 201 bp, Homo sapiens
tggagacgacaaatcaagaatgtcctttccttggaggaaactgggaggcttcccccaacaaccattgtctctgaatgtggctccagctgccagattgtgtytgcgtgtgtgtgtgtgtgtgtgtgtgtgtgtgtgtgtgtgtgtgtgtgtattctgcatgttttgcttattgtatcgtttttcttggatgttgtgtatttg

SEQ ID NO: 475611 - DNA, 201 bp, Homo sapiens
ggagacgacaaatcaagaatgtcctttccttggaggaaactgggaggcttcccccaacaaccattgtctctgaatgtggctccagctgccagattgtgtgygcgtgtgtgtgtgtgtgtgtgtgtgtgtgtgtgtgtgtgtgtgtgtgtattctgcatgttttgcttattgtatcgtttttcttggatgttgtgtatttgt

SEQ ID NO: 475612 - DNA, 201 bp, Homo sapiens
agacgacaaatcaagaatgtcctttccttggaggaaactgggaggcttcccccaacaaccattgtctctgaatgtggctccagctgccagattgtgtgtgygtgtgtgtgtgtgtgtgtgtgtgtgtgtgtgtgtgtgtgtgtgtgtattctgcatgttttgcttattgtatcgtttttcttggatgttgtgtatttgttt

SEQ ID NO: 475613 - DNA, 201 bp, Homo sapiens
cagggttcaagcgattctcccgcctcaacctcccgagtagtggggattataggagtatgccaccacgcctggctaatttttgtatttttagtagagagtgwgttttcgccatgttagtcaggctggtcttcaactcctgaacttacctaaggtcaggagtttgagactagcctggccaacatagtgaaacctcatctctac

SEQ ID NO: 475614 - DNA, 201 bp, Homo sapiens
aaaaaagaaaaaaaatagtgcatgctgaacaacacaccaggctccttgctaagtctctccaaaagcagggaagtcatcagtgtgcgggatttgagcacatgtggtttatttaatcattcgttcatctttctctgattgcagtggagtttcacacgttccaccatatgctgtccctgaaatgctctgcacacactagtgaga

SEQ ID NO: 475615 - DNA, 201 bp, Homo sapiens
aaatggcctctgtttaaaagataaactttgaagaactagtgtttcctggtgtttgttctggataatgatagaaagaaacattcccacagatgtaggctctsgggaaaaatctaaatgtcagagggcaatgagagcagctgattgactctagtgctcacagctcaggggaatcaggtgtgacacagcatttaatcttcattt

SEQ ID NO: 475616 - DNA, 201 bp, Homo sapiens
aaaaagaaaaaaaatagtgcatgctgaacaacacaccaggctccttgctaagtctctccaaaagcagggaagtcatcagtgtgcgggatttgagcacatgtggtttatttaatcattcgttcatctttctctgattgcagtggagtttcacacgttccaccatatgctgtccctgaaatgctctgcacacactagtgagag

SEQ ID NO: 475617 - DNA, 201 bp, Homo sapiens
ccccttcaaatgcagagcctctgaaggcttgatgagaaccgctgaagagtttacgcctcagtcctaaagacctaaagataggtcttttttcactcaaaacaggagaggagagaaattgtcaaggggaagaaacactcaaataaataccaaattattattgaggcagaaatctgagtatcttttgcctcttatagctgaggc

SEQ ID NO: 475618 - DNA, 201 bp, Homo sapiens
tctcttggtatatgggggaatttatgttttggatagtcggatttctcagcccattactcccttgccaaaagcataccacaaggaggatcacctacctggcyctcacatacgtgaagacctatacaaccccattgtaaaatggcctctgtttaaaagataaactttgaagaactagtgtttcctggtgtttgttctggataa

SEQ ID NO: 475619 - DNA, 201 bp, Homo sapiens
gagctcagccaagctgtgagacacagaggaaagcagcattttgatccagtgtgcactgggtcagtcacttcatccgagacagtcacacatgccagccccargtaagtccctgggggcttgcagctgttttctttgtggagtggaaatttgggttttttccttcagtggatttctccctgctgctgtcactgagctccacgc

SEQ ID NO: 475620 - DNA, 201 bp, Homo sapiens
tgccagagggctgtctttttgtttggatctgtagggagaggggagatgtaattgtcaagctcaaggtcccctacccgccttccttacaggaccctataccytaaagctattagacgttcacagtaaaatataaatgactagaaataatgtaaaccttattctatgctcctcaatagcacaaagtcttaacccaagaaagaa

SEQ ID NO: 475621 - DNA, 201 bp, Homo sapiens
ttctgatatgatgggattctcaacaccaatgtccatatgttggaaactcaagttaaatcacattcccctaagatcttttgttaaaattcaattttttactcccccccattgatttttactttgaataatttcttaccaaactctaaaattctgtaggaaggataatattagtaacagccaacacttctatagtgcttacca

SEQ ID NO: 475622 - DNA, 201 bp, Homo sapiens
ggtggaggacgagtatgacacatgaaattatgagtctcggaccttctctggctcacatcccagaacaggggcctctcttggcaagggcccactgcaagaayaagtactcaatgagcaacacagagccaagctctggaggttcacaggtcacactacaagccagttcattccacggaacacactctccagtggagaagtgga

SEQ ID NO: 475623 - DNA, 201 bp, Homo sapiens
aaaattagccgggtgttgtggcacacgcctgtagtcccggctactcaggaagctgaggcacaagaattgcttgaacccaggaggcagagattgcagtgagycgagatcgtgccactgcactccagcctgggcaacagagcgagattccatctcaaaaaaaaaaaaaaaaaatctgtaaagcagtggaaattcagaggtaag

SEQ ID NO: 475624 - DNA, 201 bp, Homo sapiens
gaaaacttcttaactgactttagagaagatcattaactttccaagccagtcttcactaatcaaaatcatcactgtcttcattacactttttctttctttctttttttttttgagacggagtctcgctctgtcacccaggctggagtgcagtggcacgatctcactcagctcactgcaagctccgcctcctgggttcaagcg

SEQ ID NO: 475625 - DNA, 201 bp, Homo sapiens; identical to SEQ ID NO: 382632

SEQ ID NO: 475626 - DNA, 201 bp, Homo sapiens; identical to SEQ ID NO: 382634

SEQ ID NO: 475627 - DNA, 201 bp, Homo sapiens
caatgttgaagaaaatacatttactttgtacccaattctatgcatattttcttctgctttccagtccacacgttgttcatcatattggaaatcctctctayacctgctttgaagcaggatcaatgcactatactgatataatttcagcaaataactactgacatgaattcataaatggcatcattttgcattctgctctgt

SEQ ID NO: 475628 - DNA, 201 bp, Homo sapiens
tcattgcatacttaaaaatgaacacaatgctttatccttaactctattcaatctgtgaccaacacgtagctgcagtatttgccttttggcaaaaaagtctkttcttaaaaatctactgctgggctaaaaacaaatagaacaactacataaaggatgatttcagctggaactagacggggaatcgattacctctcatcagaa

SEQ ID NO: 475629 - DNA, 201 bp, Homo sapiens
ggctttgcacatgctgttttcctcttccaggactcctcttggtccccatgctcttactcttctatttcctctcactcctattcatttctatggactcagckcccctaacacggcctctctcctaccccactccaactggtctagggctctcatatctccttcccatgtgctctcaaagcaccttgtgcttacaacttccac

SEQ ID NO: 475630 - DNA, 201 bp, Homo sapiens
tcctctctctaagtatgctgagtccctggtcaggtgtgatttcaatagggcaagcagaaacaggcactaacacgtcccttctgccgctgtctcccagtccrtgccataggcaacagaaatgactcttattttcttcagagatgaaaacttcttaactgactttagagaagatcattaactttccaagccagtcttcactaa

SEQ ID NO: 475631 - DNA, 201 bp, Homo sapiens
aaaagtcctcaagtactatcatctctttcttagacaactgcaaccacctcacagctggtctcctgtgtccaattttgcccctctccctactgtagccagcrtaagtattaaattctgcaaccatcgcagactagagggggctgcaaaataaaatacttaaaaattagctacttaaaacctgaagcttagcttatggtgcat

SEQ ID NO: 475632 - DNA, 201 bp, Homo sapiens
tgttttctccttgaggatataaaaagggttatccatagcatacatttaagtttttaattattgctgttatcagtggattctctttgatataggttatttarcaataaaaacaatcttcatattgtctggcctcagttgtcaaagtggaaggtactcttttgggccggaaaaggtcttcctctctctaagtatgctgagtcc

SEQ ID NO: 475633 - DNA, 201 bp, Homo sapiens
atttgatctttagcagacttctaacctgcagagacagagctcagccaagctgtgagacacagaggaaagcagcattttgatccagtgtgcactgggtcagycacttcatccgagacagtcacacatgccagccccaggtaagtccctgggggcttgcagctgttttctttgtggagtggaaatttgggttttttccttcag

SEQ ID NO: 475634 - DNA, 201 bp, Homo sapiens
ggcaccatcttcttgttcaggatttggcagacaggaacaaatttcagcccagagatcctggccagatcttgtggctgtagagtcagcgctctcaaacattwtcatttggaatctgagctataaaacagaagctcaagtgagtaagaactggctttaagaatacagcataaggttgagcacagtggctcacgactgtaatcc

SEQ ID NO: 475635 - DNA, 201 bp, Homo sapiens
tttttaactgaatgcccatggtgtataaaacagcagagactgaggtaaatagtatctgtatctgggagtggggctgcttcttctgtcagcctgttggtctsgggggttgagtcagtcttgttaggaattggacagggtttgggtttggttgtgctctcattaccttcagtgcaccccaggtttcaaattcctctagtggtg

SEQ ID NO: 475636 - DNA, 201 bp, Homo sapiens
ttggggtagaccacaccgagaacatttgagcaaagacttggaggagatgagagcaatccctgaataacacatgaagaaatcaaatgacttttacaatatgktctcgctatgccgttagaaagcaggcattagaagggctaagatcccaagaggggctggtgaaacttgtatatatctacatcattggctaaaatataaatc

SEQ ID NO: 475637 - DNA, 201 bp, Homo sapiens
cctcctgggttcaagcgattctcctgcctcagaaggagtagctgggactacaagtgcgcaccaccacgcccggctaatttttgtattttagtagagacggmgtttcaccatattggccaagctggtctcgaactgctgaccttgtaatccacccacctcagctcccaaagtgctgggattacaggcatgagccaccatgcc

SEQ ID NO: 475638 - DNA, 201 bp, Homo sapiens
atctctctgaggagtaagtggttttttctttttgttacagtaacatgaagtggtttccaaatctcatgagaaagaattagagaaaatgatgaaagatccarcggttcattagatattaaaattgacttgatgagaactcaataagagacctttaaaatctctatgtgtgattaaattcttaataaaaagaatctcccaaca

SEQ ID NO: 475639 - DNA, 201 bp, Homo sapiens
agaagtagagcttaacaaggaaaatgagcatgacatgaaattttaactaaatctaaaactcaaaatactaacttaaaaaatctctcaccgatgaggacatscacactccctgccaaagaggtcattttttaaggacagataaaagggaattgaacattcttcctttttccttcacaaagtcctcaccctgcattgtatcaa

SEQ ID NO: 475640 - DNA, 201 bp, Homo sapiens
tgctatacataattgtcctgcattattattattttatttatttattttgagatggagtttccctctgttgcccaggctggagtgcagtggcgtgatctcarctcactgcaacctctgcctcctgggttcaagcgattctcctgcctcagaaggagtagctgggactacaagtgcgcaccaccacgcccggctaatttttgt

SEQ ID NO: 475641 - DNA, 201 bp, Homo sapiens
aaaagaaaaaaaatagtgcatgctgaacaacacaccaggctccttgctaagtctctccaaaagcagggaagtcatcagtgtgcgggatttgagcacatgtggtttatttaatcattcgttcatctttctctgattgcagtggagtttcacacgttccaccatatgctgtccctgaaatgctctgcacacactagtgagagc

SEQ ID NO: 475642 - DNA, 201 bp, Homo sapiens
ttgaagcaaaactgccataatgactgatgtttgactcctgcataccaaggcattcctgtggcaaggtcaagaaacaatgcctgggccgggcgcagtggctsatgcctgtaatcccagcactttgggaggctgaggcgggaggatcacgaggtcaggagattgagaccatcctggctaacacggtgaaaccccgtctctact

SEQ ID NO: 475643 - DNA, 201 bp, Homo sapiens
tgaccaaccaaggtatggcttctgtgcataagtttctattaagcatttatctctgagaaactagattcgtcagcctctctctctgttttgtttttgttgtygttgttgttgttgttttgagacagagtcccactctgtcgcccaggctggaatgcagtggcatgatcttggctcactgcaacctctgcctcccaggttcaa

SEQ ID NO: 475644 - DNA, 201 bp, Homo sapiens
tatggcttctgtgcataagtttctattaagcatttatctctgagaaactagattcgtcagcctctctctctgttttgtttttgttgttgttgttgttgttkttttgagacagagtcccactctgtcgcccaggctggaatgcagtggcatgatcttggctcactgcaacctctgcctcccaggttcaagagattcttctgc

SEQ ID NO: 475645 - DNA, 201 bp, Homo sapiens
gagacaggatcttgctctgtcgcccaggatagggtgcggtagggcaatcatagctcactgcagcctcaacctcctgggctcaagcaatcctcccacctcarcatcccgagtagctggactacaggcatgcagtaccacgccaggctaatttttaaattttgtttttgtagagacggggtctctttctgttgcccaggctgg

SEQ ID NO: 475646 - DNA, 201 bp, Homo sapiens
ccaagagtttacctttgggatgattgttctaacaactgtgggtctcctctaccatactcttacccaatgtacactccgcatcctgtctgccttgatcaggyaccatgctgaagaccacactgcaccttggcattctgctaagccaatatttgatggtctcatccccaaaggatgtaagattaaagagccaaaactggtcct

SEQ ID NO: 475647 - DNA, 201 bp, Homo sapiens
aaaggatgtaagattaaagagccaaaactggtcctggaaatatctgttctttaaaatgctcataaactctcagtaacctatctgctttcttctgcacacayacacacacacacacacacaatccctctcacctttgcctcctccctttctacttatctgctaaagaagtaatttttaaaagtggattacgtcaaaatgaag

SEQ ID NO: 475648 - DNA, 201 bp, Homo sapiens
aggatgtaagattaaagagccaaaactggtcctggaaatatctgttctttaaaatgctcataaactctcagtaacctatctgctttcttctgcacacatayacacacacacacacacaatccctctcacctttgcctcctccctttctacttatctgctaaagaagtaatttttaaaagtggattacgtcaaaatgaaggg

SEQ ID NO: 475649 - DNA, 201 bp, Homo sapiens
ggcacacaccaccaacacctggctaatttttgtatttttagtagagatggggtttcgccatgttgaccaggctggtctgaaactcctgacctcaggtgatmcacctgtctcggcctcccaaagtgctaggattacaagtgtgagccatagcgcctgacctatgttttgcagttttttaactgaatgcccatggtgtataaa

SEQ ID NO: 475650 - DNA, 201 bp, Homo sapiens
ctccctgttctcccacaataaactccaaactccttaacatggtttataaaatccttcacacctggccttgtttagtaatttccaccctcacctctcgtctrtccctcctttgttctttgtgctccagctacactgaactaccttccatcctccaagttcccttttgcttttagggctttgcacatgctgttttcctcttcc

SEQ ID NO: 475651 - DNA, 201 bp, Homo sapiens
cataatttaccccatagtgggcactttgactacaggcagcagcaggcccccttcaaatgcagagcctctgaaggcttgatgagaaccgctgaagagtttaygcctcagtcctaaagacctaaagataggtcttttttcactcaaaacaggagaggagagaaattgtcaaggggaagaaacactcaaataaataccaaatta

SEQ ID NO: 475652 - DNA, 201 bp, Homo sapiens
tttttttagagatggggtctatgttgctcaggctgctctcaaactcctgactcaagcgatccacccacctcggcttcctaaagattttgtgtttttttttwaaatatgaaaagacatgttattattattattagtgcatacaccagattgcactgtctccaatggcaaatgaggcagagggtaatatttctctttaattcc

SEQ ID NO: 475653 - DNA, 201 bp, Homo sapiens
tgtgattaaattcttaataaaaagaatctcccaacattttttaaagttgctcaacttgtggcctagatgttggagtctaataaaaacaaatgtcttctaaycccatgacagtgctccatatggcttcttgatgatagaggttaaattactcttgtttgcattttaactctaattgtttaacagatttcccctttcgaagaa

SEQ ID NO: 475654 - DNA, 201 bp, Homo sapiens
ctagtgtttcctggtgtttgttctggataatgatagaaagaaacattcccacagatgtaggctctggggaaaaatctaaatgtcagagggcaatgagagcrgctgattgactctagtgctcacagctcaggggaatcaggtgtgacacagcatttaatcttcatttaccacacttttcatcaaattgttcaaattatttcc

SEQ ID NO: 475655 - DNA, 201 bp, Homo sapiens
gcaaattctactttgcaattgtagtcacctggaaaagaagagtacgtagatttatgacaaacataaggctccattttggattgaagataaatgtttccagrtagttctctttgatatcacccgtcttactgctgctactgccatgtagcaagacacttatcaggtagtatgaaaaaagatgcttcaaagagaatctgcttc

SEQ ID NO: 475656 - DNA, 201 bp, Homo sapiens
tttgaaatagagtaattggggtagaccacaccgagaacatttgagcaaagacttggaggagatgagagcaatccctgaataacacatgaagaaatcaaatkacttttacaatatgttctcgctatgccgttagaaagcaggcattagaagggctaagatcccaagaggggctggtgaaacttgtatatatctacatcattg

SEQ ID NO: 475657 - DNA, 201 bp, Homo sapiens
ctcaccgcaggagcctgctggtgaccagcctgtccctcttcccatgggttctctagctggctctgactaaagccctgtctctctcttggctctctcgccarctgtcccacttctcagcttctccctttcttcattcagcccagcccagaagccctgagggctgggccagagggaagtagttgttgctgtttctccccagct

SEQ ID NO: 475658 - DNA, 201 bp, Homo sapiens
cagcaaggaggggttggtaaagccatgggatgagggaacagctacaggagatggctgcccagggctggggaaatagcgttcagacaccagccagctgttgmtgctccattctgcatcccaggtggggtgccaatgggccaagccatgattttctcagaggtgaggacccctgtcttgcaaccagcctggcactacaggccc

SEQ ID NO: 475659 - DNA, 201 bp, Homo sapiens
cacagctggcaggacgtttgtttacttgctgtgcctgcagccagggcctatttctggatcaggtattggatgcatgcctgtgtcactccagccctgatctygccaggcgctgagtgatgagcacgtgtgtgtgccgggagagaacagcagcagtcccttaggttatctgcctggctgcagcccagccttctctgggtgtac

SEQ ID NO: 475660 - DNA, 201 bp, Homo sapiens
gcgcctgacctatgttttgcagttttttaactgaatgcccatggtgtataaaacagcagagactgaggtaaatagtatctgtatctgggagtggggctgcytcttctgtcagcctgttggtctcgggggttgagtcagtcttgttaggaattggacagggtttgggtttggttgtgctctcattaccttcagtgcacccca

SEQ ID NO: 475661 - DNA, 201 bp, Homo sapiens
accccactccaactggtctagggctctcatatctccttcccatgtgctctcaaagcaccttgtgcttacaacttccacagaattaatgaggtaggctctaytcccccctccatcattctatgtgggaagatgccgttctgctttatttaacaccatgcaccatgcctggaacatggcaggggctcaacaaatattggttag

SEQ ID NO: 475662 - DNA, 201 bp, Homo sapiens
tactgggtggcctctggcctgggttctccaagccttagaagccacccacccataatgtctggtccacccaatgccctggcccttggatgctcatactttgstgtctctccttaggtataaataaaatagtgtcaataattacatatctttgtccttggccttttttttttttctctccatgacctgcaagtcaccgtggat

SEQ ID NO: 475663 - DNA, 201 bp, Homo sapiens
accaacacacagagagagtcaacagtgggaggaagagaggctaaagatactgctggagtcctgaggtccagctaactgaagccagctctatatgtcttagrctagaattgagtccggcttggattttttttttcaacagccttggaaaactttccagagtctggcttcttggcttctgtcactagaacaaactaataaata

SEQ ID NO: 475664 - DNA, 201 bp, Homo sapiens
tttttctttttctttccttttttttttttttctgagatagggtctcaccctgtcacccaggctggagggcagtggcatgatcttggctcactgcaacctcygccttctgggttcaagtgattctcttgcctcagcctcccaagtagctgggaccacaggcacgagccaccatgcctggctaatttctgtattttttggtga

SEQ ID NO: 475665 - DNA, 201 bp, Homo sapiens
cattttttttcatgaaaatatgtgggcttgtttgtaagtgtgtgttggggggtcatttgtttttaacaggctgggctcatgctctttcagctcaataaatrtttattgattagctactgtatgccaggtactgttttatataactgaaaataatactgtaacttgctgttttttcttaaaagcataaaatctttccacatc

SEQ ID NO: 475666 - DNA, 201 bp, Homo sapiens
agtgaccaagcctcagtggttctccttgcaaatgctcccatatccacttctctctagccttgccgccacacctcattcatgtaactatcatctcttcaaakatttattctgcctcattctctctctcttcaccttctgaggctggaatcacatgtatattagactgttattgtcccatagctcttataggttttgctttgt

SEQ ID NO: 475667 - DNA, 201 bp, Homo sapiens
tgtgaggccgaggcaggcagatcacctgaggtcagaagtttgagaccagcctggccaacatggtgaaactccatctctactaaaaatacaaaaattagccrggtgttgtggcacacgcctgtagtcccggctactcaggaagctgaggcacaagaattgcttgaacccaggaggcagagattgcagtgagccgagatcgtg

SEQ ID NO: 475668 - DNA, 201 bp, Homo sapiens
gttgcccaggctggtctcaaactcctgtgctcaagcaatcctcctgcctcagcttctcaaagtgttgggattacaggcatgagccattgcacctggccaayttacaatattatatatcataatttctattctcctgttggtggacatgtaagaggaagaggataatggttcatcatgagctctgtaccaggtgctgcccac

SEQ ID NO: 475669 - DNA, 201 bp, Homo sapiens
cagcctcaacctcctgggctcaagcaatcctcccacctcagcatcccgagtagctggactacaggcatgcagtaccacgccaggctaatttttaaattttktttttgtagagacggggtctctttctgttgcccaggctggtctcaaactcctgggctcaagtgatcctcccaccttggcctcccaaagtgctgggattgt

SEQ ID NO: 475670 - DNA, 201 bp, Homo sapiens
ggtagggcaatcatagctcactgcagcctcaacctcctgggctcaagcaatcctcccacctcagcatcccgagtagctggactacaggcatgcagtaccaygccaggctaatttttaaattttgtttttgtagagacggggtctctttctgttgcccaggctggtctcaaactcctgggctcaagtgatcctcccaccttg

SEQ ID NO: 475671 - DNA, 201 bp, Homo sapiens
cactgcagaacatcctcttgcaatgtggtgcccagacgatgctttcagagaggcatgaccactgcagaatatatttttacactactatgtcccaggtacayaggtacatttccactattgattcctagaattataacttttttttagcagcacataacactgctgactccattgaactgttaagacactgaacacctgttt

SEQ ID NO: 475672 - DNA, 201 bp, Homo sapiens
tccaaaacagggccagggagaggctccagggcttccgtcttccagcaatggtcctggtgggcaggtctgcttggaagggtgcacctcggccacagctggcrggacgtttgtttacttgctgtgcctgcagccagggcctatttctggatcaggtattggatgcatgcctgtgtcactccagccctgatctcgccaggcgct

SEQ ID NO: 475673 - DNA, 201 bp, Homo sapiens
cagatcactgcagcctcgacttcccgggttcagttgatcctcccacttcaggctggcgcgtgccaccagacctggctaattttttttattttttgtagagrtagggggtttcaccatgttgcccaggctggtctcaaactcctgtgctcaagcaatcctcctgcctcagcttctcaaagtgttgggattacaggcatgagc

SEQ ID NO: 475674 - DNA, 201 bp, Homo sapiens
tgtaagggcactaatcccattgataaagggtccactctcatgacctaattacctccccaaagttccatctccatataccatcacatcaggattagtgtttsaacatgtatattttagagggacacaaacacacagtccattgcaccatcaaagtgaggaagtgatgggctcagaatggtcttggagtcagatgtcagggtc

SEQ ID NO: 475675 - DNA, 201 bp, Homo sapiens
atttatagttttcagggcccgccccttctctcctcctccactcagcttcctttcgttcagtcttcaggcacttcatggttctttattccttttcacaaccaaaaaaaaaaaagaaaaaaaatagtgcatgctgaacaacacaccaggctccttgctaagtctctccaaaagcagggaagtcatcagtgtgcgggatttgag

SEQ ID NO: 475676 - DNA, 201 bp, Homo sapiens
ctcacgcgctgcctcacatccctccagcccatttctgtgaccagccgcagctgcagcggatgcttctggtacatgctcagtttccctcctctctcctctgygtgaggcttttcttagcccctgcagggctgcctgaaagtggcaggggcttaatacctccaaagagcaaacctcaaccaatgaaggatgggcactggtgga

SEQ ID NO: 475677 - DNA, 201 bp, Homo sapiens
cttagcccctgcagggctgcctgaaagtggcaggggcttaatacctccaaagagcaaacctcaaccaatgaaggatgggcactggtggaactgcagcccaratgtgccccgtcagtcagtggcaaaattctgagctgtaatattttttttttttttttgagacggagtctcgctctgtcacccaggctggagtgcagtggc

SEQ ID NO: 475678 - DNA, 201 bp, Homo sapiens
acctccaaagagcaaacctcaaccaatgaaggatgggcactggtggaactgcagcccagatgtgccccgtcagtcagtggcaaaattctgagctgtaatattttttttttttttttgagacggagtctcgctctgtcacccaggctggagtgcagtggctccatctcggctcactgcaacctccgcctcccgggttcaagc

SEQ ID NO: 475679 - DNA, 201 bp, Homo sapiens
gctcaggagtttgaggttacagtgaactatatgattgtaccattgcactccagcctgggcaacaaagtgagacctcaaaaaaaaaaaaaaaaaaaaaaaaaaagcaaatgttctcagaagatttatttattctattttttcttttagctcctctctcgatcggaagatttttacagccaccctactgatctttagggattt

SEQ ID NO: 475680 - DNA, 201 bp, Homo sapiens
ctcaggagtttgaggttacagtgaactatatgattgtaccattgcactccagcctgggcaacaaagtgagacctcaaaaaaaaaaaaaaaaaaaaaaaaaaagcaaatgttctcagaagatttatttattctattttttcttttagctcctctctcgatcggaagatttttacagccaccctactgatctttagggatttg

SEQ ID NO: 475681 - DNA, 201 bp, Homo sapiens
cccttcaaatgcagagcctctgaaggcttgatgagaaccgctgaagagtttacgcctcagtcctaaagacctaaagataggtcttttttcactcaaaacaggagaggagagaaattgtcaaggggaagaaacactcaaataaataccaaattattattgaggcagaaatctgagtatcttttgcctcttatagctgaggca

SEQ ID NO: 475682 - DNA, 201 bp, Homo sapiens
gagatagttccagaaaataatctctctgaggagtaaatggtttttccttttgttacagtaacatggtttccaaacctcatgagaaagaattcaagaacataagagagactgattagttactactttctcaagttcattgcatacttaaaaatgaacacaatgctttatccttaactctattcaatctgtgaccaacacgta

SEQ ID NO: 475683 - DNA, 201 bp, Homo sapiens
agatagttccagaaaataatctctctgaggagtaaatggtttttccttttgttacagtaacatggtttccaaacctcatgagaaagaattcaagaacataagagagactgattagttactactttctcaagttcattgcatacttaaaaatgaacacaatgctttatccttaactctattcaatctgtgaccaacacgtag

SEQ ID NO: 475684 - DNA, 201 bp, Homo sapiens
atgaaagatccaacggttcattagatattaaaattgacttgatgagaactcaataagagacctttaaaatctctatgtgtgattaaattcttaataaaaakaatctcccaacattttttaaagttgctcaacttgtggcctagatgttggagtctaataaaaacaaatgtcttctaatcccatgacagtgctccatatggc

SEQ ID NO: 475685 - DNA, 201 bp, Homo sapiens
gctcactgcaacctctgcctcctgggttcaagcgattctcctgtctcagcctcccgagtagctgggactataggtgtgcgccaccacgcccagctaatttktgtatttttattagagacagggtttcaccatgttggccaggatggtctcgatctcttgaccttgtgatctgcctgcctcggtctcccaaagtgctgggat

SEQ ID NO: 475686 - DNA, 201 bp, Homo sapiens
acttctaacctgcagagacagagctcagccaagctgtgagacacagaggaaagcagcattttgatccagtgtgcactgggtcagtcacttcatccgagacrgtcacacatgccagccccaggtaagtccctgggggcttgcagctgttttctttgtggagtggaaatttgggttttttccttcagtggatttctccctgct

SEQ ID NO: 475687 - DNA, 201 bp, Homo sapiens
tcactgcaacctctgcctcctgggttcaagcgattctcctgtctcagcctcccgagtagctgggactataggtgtgcgccaccacgcccagctaatttttrtatttttattagagacagggtttcaccatgttggccaggatggtctcgatctcttgaccttgtgatctgcctgcctcggtctcccaaagtgctgggatta

SEQ ID NO: 475688 - DNA, 201 bp, Homo sapiens
agaagccatgcatgaagtaaaaaatacatatacacagacataaacacccacattttcacacttcttttgcccatttgttccacaaggaacaaatgagagaragaagcccagcctctctccctggagtccgtatacttactacagatttgttagagaagccccagatggggcttggattcaaggagcagacttcactcttac

SEQ ID NO: 475689 - DNA, 201 bp, Homo sapiens
ttcctgtgtttggaatctctctagatacttatactatggccgcaggacagggtactgaaaatgtgttcaggaaatatatttttttttttaaagaaatatawaactatttattaaccactgttcagtatttacaataaagtaaacaatatacagttggataacattttgattactacaaagttgttcttcctggcttttgct

SEQ ID NO: 475690 - DNA, 201 bp, Homo sapiens
gcagaattgcttgaacccgtgaggcggaggttgcagtgagtcgagatcgtgccactgcattccagcctgggcaacagaatgagactccgtctcaaaaaaamaaaacaaaacaataaccaaaaaaaaaacaaaacacaaagtggtatactggactttggagattcagaagtggggaggtttggagaggggtgagggataaaa

SEQ ID NO: 475691 - DNA, 201 bp, Homo sapiens
ccatcaccgccctagactgatatttctttttcccctagcatgggacaatttgaatctctttcctgtgtttggaatctctctagatacttatactatggccrcaggacagggtactgaaaatgtgttcaggaaatatatttttttttttaaagaaatatataactatttattaaccactgttcagtatttacaataaagtaa

SEQ ID NO: 475692 - DNA, 201 bp, Homo sapiens
aacccgtgaggcggaggttgcagtgagtcgagatcgtgccactgcattccagcctgggcaacagaatgagactccgtctcaaaaaaaaaaaacaaaacaayaaccaaaaaaaaaacaaaacacaaagtggtatactggactttggagattcagaagtggggaggtttggagaggggtgagggataaaaaactacacattgg

SEQ ID NO: 475693 - DNA, 201 bp, Homo sapiens; identical to SEQ ID NO: 382626

SEQ ID NO: 475694 - DNA, 201 bp, Homo sapiens
cattgagggcttaggaaaggctggggctggaggctagggaatcgaggagcaaaggcccactactgttccactttggcctgtaggaggtggtgtggggtacyagcagagagcacaggcactggagagctaggcttggctctccatcctggcaccaccacctgctaaccacccactactacctgctgagagcctgcagctccc

SEQ ID NO: 475695 - DNA, 201 bp, Homo sapiens
tatgtggcatgtagggtgtcagataggggtccaatttcattcctttgcagttgtatatccagttgtcccaacaccatttgttaaaaatactatttttttcyccattcaattgtcttgacactcttgttgaaaatcaattaatcataaatgaaagggtatacttctggactcacaattctattctattgctttatgtctatc

SEQ ID NO: 475696 - DNA, 201 bp, Homo sapiens
ccttttcccacacaaccttggtgcacaatatgctactctctgccaggggtcttaaggggaagcttaacacatggcagcatcactggagtggtggtttgccrgtgttttcagatgacagaggtccgaagaatacagaaaagggccttgcatcctgaacctggtgaaattgtggcccaggatcacaggaaaagagcacacctt

SEQ ID NO: 475697 - DNA, 201 bp, Homo sapiens
taaactctcagtaacctatctgctttcttctgcacacatacacacacacacacacacaatccctctcacctttgcctcctccctttctacttatctgctamagaagtaatttttaaaagtggattacgtcaaaatgaagggaggagagagtcagtttgtttgggaaaagaaaacctttactttagagcaatgtgtgacaca

SEQ ID NO: 475698 - DNA, 201 bp, Homo sapiens
attgctcccatttcacagatcaggaaactgaggcacacataggttacttacccaagaacatacaaccagtaagtggcagagccgatttcctgagtgtcgarccccattcctgctcattgtggcagggcagcatgccctctctatctttctgcatctaaactacttgcaggtactgttcaagtcctgcctccctctatggca

SEQ ID NO: 475699 - DNA, 201 bp, Homo sapiens
tctataccctttacaaatagtaactcatttaaccctcataacaacttatgaggtaagagctgattgctcccatttcacagatcaggaaactgaggcacacwtaggttacttacccaagaacatacaaccagtaagtggcagagccgatttcctgagtgtcgagccccattcctgctcattgtggcagggcagcatgccctc

SEQ ID NO: 475700 - DNA, 201 bp, Homo sapiens
agtgggaggaagagaggctaaagatactgctggagtcctgaggtccagctaactgaagccagctctatatgtcttaggctagaattgagtccggcttggattttttttttcaacagccttggaaaactttccagagtctggcttcttggcttctgtcactagaacaaactaataaatactctgttcttctctgtcctctag

SEQ ID NO: 475701 - DNA, 201 bp, Homo sapiens
cttttggcaaaaaagtctgttcttaaaaatctactgctgggctaaaaacaaatagaacaactacataaaggatgatttcagctggaactagacggggaatygattacctctcatcagaatcaagtccatccacaaagaactctgaagctaacttctcctggaggaaccgatcccagcattccttcttggcttgggccagag

SEQ ID NO: 475702 - DNA, 201 bp, Homo sapiens
cacactgcaccttggcattctgctaagccaatatttgatggtctcatccccaaaggatgtaagattaaagagccaaaactggtcctggaaatatctgttctttaaaatgctcataaactctcagtaacctatctgctttcttctgcacacatacacacacacacacacacaatccctctcacctttgcctcctccctttct

SEQ ID NO: 475703 - DNA, 201 bp, Homo sapiens
atgattgtcactacactccagcttgggtgatagagtgaggagaccttgtctcaaaaaaacaaaaaaaaaataaagaaggaaaaaagaggagcggccaggcrcggtggctcatgcgtgtaatcccagcactttgggaggctgaggcgggcagatcacctgaggtcaggagttcgagaccagcctcaacatggagaaacccca

SEQ ID NO: 475704 - DNA, 201 bp, Homo sapiens
aatctctttcctgtgtttggaatctctctagatacttatactatggccgcaggacagggtactgaaaatgtgttcaggaaatatatttttttttttaaagraatatataactatttattaaccactgttcagtatttacaataaagtaaacaatatacagttggataacattttgattactacaaagttgttcttcctggc

SEQ ID NO: 475705 - DNA, 201 bp, Homo sapiens
gaaacatgggtttacctgtgatttttttgtttgggtgaatgcttaaaaacaaaaaaaaatttacatatgcattttatggatacacacacacacacacacacacacacaaaaaacacgtaataaatctagaatggtccttaggcttatgagaacacaagttttgactgagtaatgactatggacatttcccccaacatttag

SEQ ID NO: 475706 - DNA, 201 bp, Homo sapiens
aacatgggtttacctgtgatttttttgtttgggtgaatgcttaaaaacaaaaaaaaatttacatatgcattttatggatacacacacacacacacacacacacacaaaaaacacgtaataaatctagaatggtccttaggcttatgagaacacaagttttgactgagtaatgactatggacatttcccccaacatttagaa

SEQ ID NO: 475707 - DNA, 201 bp, Homo sapiens
cacttggcataacgttttcaaggttcatccacgttgtagcatgtatcagtacttcattcctttgtagtgccaaataatattccattgtatggaattttatktatccatccatcaatggatggatatttgggttatttccactttgggctactatgaataatgctgctatgaatattcatatacacgtttttgtgtgggata

SEQ ID NO: 475708 - DNA, 201 bp, Homo sapiens
tggaaggatagcttgagcccagaggttcgagactaacctgggcaaaataatgcgaccctgtctctacaaaaattttttttaaaaattagccaggcatagtrgcacatgcctatagtcccagctactcaggggaagctgaggcagaaggatggattgagcctgggaggttgaggctgtagtgagccatgattgtcactacac

SEQ ID NO: 475709 - DNA, 201 bp, Homo sapiens
caggactcctcttggtccccatgctcttactcttctatttcctctcactcctattcatttctatggactcagcgcccctaacacggcctctctcctacccmactccaactggtctagggctctcatatctccttcccatgtgctctcaaagcaccttgtgcttacaacttccacagaattaatgaggtaggctctattccc

SEQ ID NO: 475710 - DNA, 201 bp, Homo sapiens
caatgtgaacaccactgaatcatacacacaaaaatagttaaaatggtcaattttatgctacatatattttaacacacacacacacacacacacacacacamaaatctgtagggcatttccaggttggacaaccagcctgcacttttctccaaagatctccaaaatgcaacagttctatctccagtcaattaaattctgttt

SEQ ID NO: 475711 - DNA, 201 bp, Homo sapiens
actgcagcagtatccatttgtcttagtcaggtctaaccttagtcaggtttatttctcacagttccgaggttggagtctgagaattgggggccagcagggtycagttctgggagaaagccctcttctgggtctccagctgtattaatccattctcacactgctataagaacatactggagactgggtaatttgtacaggaaa

SEQ ID NO: 475712 - DNA, 201 bp, Homo sapiens
ttttttcctgagccttctcctcccaccctccatcctccaataggccctagtgtgtgttgttctcttccatgtgtccgtgtgttctcaccatttagctcccrcttataagtgagaacacgtggtatttggttttctgttcttgcgttagtttgctaaggataatggcctccagctccatccatgtccctgaaaaggacagga

SEQ ID NO: 475713 - DNA, 201 bp, Homo sapiens
aaccaacccaaatgtccatcaatgatagactggattaagaaaatgtggcacatatacaccatggaatactatgcagccataaaaaaggatgagttcatgtyctttgtagggacatggatgaagctggaaaccatcattctgagcaaactgtcgcaaggacagaaaaccaaacactgcatgttcccactcatagatgggaat

SEQ ID NO: 475714 - DNA, 201 bp, Homo sapiens
ctcagagcctgaaaaagagaaatttgtagcagaagtgattctccagcctacctaccaacccatcaaagtgagcaaagagcagatagaagaatataaataarctaaatggtcttctttaaaaaaaaaaattattgtggaagttttcaaatacatacaaaagtagagagaacaagtataatacacctctaggtatccatcacc

SEQ ID NO: 475715 - DNA, 201 bp, Homo sapiens
ttgcttctgcatttatattttattctaggcctcagacttctgtcagtgaataattttatatatatatatatgtatatatgtatgtatagatacacacacayatatatatgcacacacacacatatatattttaaggtgaccttaaataaaggaaagggaagccaatagtggcatcatgagtggaaacatgttatatgccag

SEQ ID NO: 475716 - DNA, 201 bp, Homo sapiens
tcaagttactgctgcggttttattgcatctttatttggacacttttagaacatatttctggaaaggccagaaagtagactatcaagtttcttatcttgtttttcttttttctatttaggtatgttaggaaataaacaatccataagcattgcttccttttgtctctggcttcctccttatgtctttgtttctttctctttt

SEQ ID NO: 475717 - DNA, 201 bp, Homo sapiens
cgggtagatcacttgaggtcaggagttcgagaccagcctggccaacatggagaaaccctgtctctactaaaaatgcaaaaattagccaggcgtggtggcgmatgcctgtagtcccagctactcgagaggctgaggcaggagaatcggttgaacctgggaggtagaggttgtagtgagccgagattgagccacttcagtcca

SEQ ID NO: 475718 - DNA, 201 bp, Homo sapiens
ttcaagttactgctgcggttttattgcatctttatttggacacttttagaacatatttctggaaaggccagaaagtagactatcaagtttcttatcttgtttttcttttttctatttaggtatgttaggaaataaacaatccataagcattgcttccttttgtctctggcttcctccttatgtctttgtttctttctcttt

SEQ ID NO: 475719 - DNA, 201 bp, Homo sapiens
gcaaaaagagtgagactccatctcaaaaacaaaaacaaaaacaaaaacaggtgagggagtgtgtgtgtgtgtgtgtgtgtgtgtgtgtgtctgtgtgtgtktgcttttagcctttgaattataatggttttgtcccagggctatttgggtactaagaacaaagtgtgatttgtttattccttaacaaggattctaaaagaa

SEQ ID NO: 475720 - DNA, 201 bp, Homo sapiens
tttgcagcaacagcagcagcaacagcttcgaaggcgaccttccttgctttcagaatttcacccaggttctgacaggtaatgaggtttcttttatgtttctrtctaggattataattgtgaagtatacaagtttgtcattattttatttttttactttttattaaccaagccatgactggtcatttatagtttgcattttga

SEQ ID NO: 475721 - DNA, 201 bp, Homo sapiens
tttcaagttactgctgcggttttattgcatctttatttggacacttttagaacatatttctggaaaggccagaaagtagactatcaagtttcttatcttgtttttcttttttctatttaggtatgttaggaaataaacaatccataagcattgcttccttttgtctctggcttcctccttatgtctttgtttctttctctt

SEQ ID NO: 475722 - DNA, 201 bp, Homo sapiens
gtttcaagttactgctgcggttttattgcatctttatttggacacttttagaacatatttctggaaaggccagaaagtagactatcaagtttcttatcttgtttttcttttttctatttaggtatgttaggaaataaacaatccataagcattgcttccttttgtctctggcttcctccttatgtctttgtttctttctct

SEQ ID NO: 475723 - DNA, 201 bp, Homo sapiens
agtaatgagtgagatggaactaattgttttaattggaaaaaaaattctttcaaaaaggcaaagaggactcagaagtgactttaagagttcttttctggtartatggtacccaataaagtacccccagtgtgccttgtttaagatgcccagttttaagggatttaagattctctctgcagttttattttgaatgtcatttaa

SEQ ID NO: 475724 - DNA, 201 bp, Homo sapiens
ccaaacaaattaaaagggaaagtcctcccatacgagcatttgaaggtgccattaccaaaggaaaaccatatgatggcatcaccaccatcaaagaaatgggrcgttccattcatgagattccaaggcaagatattttaactcaggaaagtcggaaaactccagaagtggtccagagcacacggccgataattgagggttcca

SEQ ID NO: 475725 - DNA, 201 bp, Homo sapiens
gggcttcattctgagcaatttcttcagcctgtcttccagtttacattttccttttcaattatatgtaatctgctgtcaaatctgtcttcaatttcaacaaytatgtttttattgctggaatttctgtttggctccttctcaaatctgcctggtcattaaaaaaaattttttttttgctttcattgagttgtattaaatttt

SEQ ID NO: 475726 - DNA, 201 bp, Homo sapiens
attccaagccattatcttttttagaaaacctttctaacagtttcttgttctacttatgaaattcctgttagttgtaacatcttatcactcttgtcttccgygtctcttgtttctctttcttatttttaacttctttgggcttcattctgagcaatttcttcagcctgtcttccagtttacattttccttttcaattatatg

SEQ ID NO: 475727 - DNA, 201 bp, Homo sapiens
ttcctggtacacagattactttccctcccaggccgtacaactctgcttccatgtctccaggtgagattgtacagttacacacctctctaatagaaccatcrtgtttacatttttacaacatagccttttaaggtatcttgggcaatttttcctcatttggtttcttgtttttcttttaacatttaatagtagttcttatgt

SEQ ID NO: 475728 - DNA, 201 bp, Homo sapiens
ttttccaaagtctctgtaccattttatattcttaccagcagtatatggaggttccattttttcctacctccttgccaacatctgttattttccttttttawaaaaatatagccatccttggagatgtgaagtggtatctagttgtagttttcatttgcatatccttaatgactaatgatgttgagcatcttttcatgtgct

SEQ ID NO: 475729 - DNA, 201 bp, Homo sapiens
caaaaagaaactccatacctactagcagttactccccatttccccttttccccaacccctggcagccactagtctattctctgtctctatggactagcatrtgccaaatatcagaaaaaacagaatcatatgtgaccttttgtgtttggcttcatttatttagcatgttgtcctgattcatccatgtcgtatcttgtgtca

SEQ ID NO: 475730 - DNA, 201 bp, Homo sapiens
cttgaacccaggaggtagagactgcagtgagccaagatcacgccactgcactccagcctgggtgacagcgagactctatctcaaaaaaaaaaaaaaaaaaattgaggatgatggctaataagtgtttgaatatatatttattggtgggacaatctgaccatcctgaataacatcatttaagagaagagaggctggagtagg

SEQ ID NO: 475731 - DNA, 201 bp, Homo sapiens
tgggactataggcactttaagtgcttttaatgtattcataaagttgtacagctatcaccactctctaattctagaacatttttatcatttcaaaaagaaaytccatacctactagcagttactccccatttccccttttccccaacccctggcagccactagtctattctctgtctctatggactagcatgtgccaaatat

SEQ ID NO: 475732 - DNA, 201 bp, Homo sapiens
agtctcactctgtcaccgaggctggagtgcagtggtgcgatcttggctcactgcaacctctgtctcccaggttcaagtgattctcctgcaacagcctcccragtagctgggactataggcactttaagtgcttttaatgtattcataaagttgtacagctatcaccactctctaattctagaacatttttatcatttcaaa

SEQ ID NO: 475733 - DNA, 201 bp, Homo sapiens
tactgggattacaggcatgagccactgtgcctggccactgatattttatttagatgaaacatactggtttattttggaagccaatgacctcaaggatttayatcttaagagaggaatcataaactctagggcttaaagctgccaaagattgactgtatgccagatgcaaaggatactggagctttaattctattaagtcta

SEQ ID NO: 475734 - DNA, 201 bp, Homo sapiens
ccgccaccacgcccagctaatttttgtattttttagtagagacggggtttcaccatgttggttaggctggtctggaactcctgaccttgtgatctgcctgygtcagcatcccaaagtactgggattacaggcatgagccactgtgcctggccactgatattttatttagatgaaacatactggtttattttggaagccaat

SEQ ID NO: 475735 - DNA, 201 bp, Homo sapiens
cctgggttcaagccattttcctgcctcagcctcccgagtaactgggactacaggtgcccgccaccacgcccagctaatttttgtattttttagtagagacrgggtttcaccatgttggttaggctggtctggaactcctgaccttgtgatctgcctgcgtcagcatcccaaagtactgggattacaggcatgagccactgt

SEQ ID NO: 475736 - DNA, 201 bp, Homo sapiens
ttttaatgttgataaaggagggagggggagaaaaaaaggttgataaagatggttatacaccaaatctgatttttttttctttttttttgagatggagtctygctctgtcacccatgctggaatgcagtagtgcaatctcagctcactgcaacctctgcctcctgggttcaagccattttcctgcctcagcctcccgagtaa

SEQ ID NO: 475737 - DNA, 201 bp, Homo sapiens
acattgcttgagactgggaggcggaggttgcagtgagccgagattgctccactgcactccagcctgggtgatagagcaaatctctgtctcaaaaaaaaaaacaaaaagaaaacaaaaaaaacaaaagaaaagaaaagaaaaaaaaaggttgattcttaaaatttttccaggttttcttgttgcttttatggaagagagttt

SEQ ID NO: 475738 - DNA, 201 bp, Homo sapiens
agcagcagtggagtgggcaggatcccactggtgcagcaccagctgctggagcaggtccaccagcccctacattgtagatgaggctcccaatgttgacattkgccagggccattgcaaacaagctggaccaaaaaggttcaacatttacaccagctgctttaacgagggcattgatcttatcctccgtgatggtcacctcat

SEQ ID NO: 475739 - DNA, 201 bp, Homo sapiens
gcagcgctttaaagttttcactttagagatttgtatgtgttttgtttgatttatatttggctatttgattcctttaaattttgtttttgttttttttttttggacaaagtcttgctttgcagtagtgtgatcatagctcactgtagcctccaactcctgggctcaagcagtcctcccacctcagccttccgagtggctagg

SEQ ID NO: 475740 - DNA, 201 bp, Homo sapiens
cccatggctgcagtttggaaattgcctttaggcagagggcctagagtatggtaggtagggcttacctcatttgcttcatttctctcagcgatcaagccctstgctgcctattattcagtttctgaaaatagtttctacatttctttgaattttttagctgttgactgtgggaaggtaattctgagcagtgttacctgctta

SEQ ID NO: 475741 - DNA, 201 bp, Homo sapiens
tacatccagttttttccttaagcccttttaaatctgaagactatgttttttctaatttcagagaaatgctgttctattatttttcagaatcctgtctcttrcctgtggatatgggatgttggaacttcttgctgtagctcccatttttaacttttttcctgtggtttctatgtctttgtgctttactgggtactgagagaa

SEQ ID NO: 475742 - DNA, 201 bp, Homo sapiens
ttaaatctgaagactatgttttttctaatttcagagaaatgctgttctattatttttcagaatcctgtctcttacctgtggatatgggatgttggaacttyttgctgtagctcccatttttaacttttttcctgtggtttctatgtctttgtgctttactgggtactgagagaattcctcagttctctcttagctttcatt

SEQ ID NO: 475743 - DNA, 201 bp, Homo sapiens
tatccatgttgtggatggcaagatctcatttttttttagggttgaataatattccatagtgtatatataccacagtttctttatgattcattcattgacaracacttagattgtttttatatcttggctattgtgaataattagctgcaataacatgggagtgcatttacctttacaagatggtgatttcatttcccttgg

SEQ ID NO: 475744 - DNA, 201 bp, Homo sapiens
gcattgaacaaactaaataaaggccagtgtgacttgaattcagagagctgtgtgcaagctggagaggctggagggggcccactgggcaaggccttgcagaycataccagcaattttgggactttatcctaatagtaatgggggtccactgaaaagttatgagagtgagagagtgagttattgtggtaaaatctggctttta

SEQ ID NO: 475745 - DNA, 201 bp, Homo sapiens
gtgtatgttaaaccagccttgcatgccagggatatgtcccacttgctagtggtttgtaatcttcgtgatgtgttgttgaattcagtttgttaatattttawtgaggtttgttttttttttttttttttttttgagacagagtctcgctctgttgcccaggctggagtgcagtggcacgatcttggctcactgcaagctctg

SEQ ID NO: 475746 - DNA, 201 bp, Homo sapiens
aagtcattggtgacttttgagaaaacatcttttaacaggaggcttcagaatagaagccagctttataagggaataagtaagtaaagggaaaggactatgtygtacttcaatttaggactgaaggggagagaattatttttgaaaaaaatcagcatcttccattaagcaagaataattgagtctttgagtattgccatctat

SEQ ID NO: 475747 - DNA, 201 bp, Homo sapiens
gactaccctgggcaacatggtgacaccctgtctctgcaaaaaatacaaaaattaaccaggtatgctggcacgtgtctgtagtcccagctactcgagaagcygaggtgggaggctcacttgagcccaagagattgaggctgcagtgagctgtgttcgcgccactgctcttcagcctgggtgacggagtgagacactttctca

SEQ ID NO: 475748 - DNA, 201 bp, Homo sapiens
tgttggccaggctggtctcgaactcctgacctcaggtgatctgcccgctttggcctcccaatatgctgggattataggcgtgagccactgcagctggcccrtacattatttaggttgatttttttgtatacattcttacttatttccttaaggtagatttcttttagtataattaattgtagaccaggttgatttttaagg

SEQ ID NO: 475749 - DNA, 201 bp, Homo sapiens
aaaactcattcattaaaatgggacgtgttgtgttgtagtgtgacccatttccatgttatagttgagaaactgggtgttcagaaaaattaagtgacctaggtagtaactcctgagttgaaattaacccaggaccccgactctagtcctgctttttttcccctaaagtgtaaaccatgactacttctactaactaatacttct

SEQ ID NO: 475750 - DNA, 201 bp, Homo sapiens
aagagtaatttaaaagatagtaaatgtatctacaatttattttcaaatagttcagccaaaatgaagttatacacacacacacacacacacacacacacacmcacacagaaagcaaatatgttaaaatgttaactactggtgaatctagatgaaggataaatgagtgtccattatattgttccttcaacttttaagtaaatt

SEQ ID NO: 475751 - DNA, 201 bp, Homo sapiens
aaactctttgcttaataagtatccttcaggtgcaaattaggacacagaatacttgtgcctcactttggtccttagagaagaatttttcattatcagtatgstaaattttaaaagtaagaattctaagggttatttacatttcataataataggaaagtaactgtgggaaatattttatctaaaagctgtgtaaatgccatc

SEQ ID NO: 475752 - DNA, 201 bp, Homo sapiens
tcaccgtgttggccaggctggtctcttgaactcctgacctcgtgatctgcccacctcggcctcccaaagtgctgggattacaggcatgagccactgtgccsggcctatgtttacctttttcaactctgctttgcttattattaattctgcagattaggaagtgcctgacacttagtagatacagaataaatatttgtcata

SEQ ID NO: 475753 - DNA, 201 bp, Homo sapiens
attctagttaatgtgaattttctgatattcatctttgtgctggaagacattataaataaagttatgctttatgttccgttcatctgaattttcagagtgadaattgttgtcctgtccttgaagcaaatcaccttcaagtattacagtgtaatattcacattctctggtagatgagagacacaactttgtgtagtggatatt

SEQ ID NO: 475754 - DNA, 201 bp, Homo sapiens
tgcccctgcaggagtataatggcatgatctcgggtcacctcaacgtctgcctcctgggttcaagcgattcttccgcctcagcctcccgagtagctgggatwgcaggcgtgcaccaccatgtctgactaattttgtattttttagtagagatgggtttttctccatgttggtcaggctggtctcgaactcctgacctcagat

SEQ ID NO: 475755 - DNA, 201 bp, Homo sapiens
tgcactttggggggccaaggcaggcggctgggaggtggaggttgtagcgagccgagatcacgccactgcactccagcctgggcaccattgagcactgagtkaacgagactccatctgcaatcccggcacctcagaatgccgaggctggtggatcactcgcggttaggagctggagaccagcccagccaacacagcgaaacc

SEQ ID NO: 475756 - DNA, 201 bp, Homo sapiens
ggacgaaaactatttgctcaggaagtgtcagttttctttatgtgatgttgcatgctgcggtgcctcttccacagagttaaccttggagagtagtagtatasgtaattctaatctttgggattagtatgtaaacctgcatcagatttgcttctctaattatatcctaattatattgaaatttacattccttgtgtgcaccct

SEQ ID NO: 475757 - DNA, 201 bp, Homo sapiens
gcaaaacaaaacaaaaaacctgaaagaatttcttttttttcttttttctttttttgagatggagttttgctcttgttgttcaggctggagtgcaatgatgygatctcggctcactgcaacctccgcttcctgggttcaagtgattctcctacctcagcctcccaagtagctgggattacgggcatgtgcccccatacctgg

SEQ ID NO: 475758 - DNA, 201 bp, Homo sapiens
cgggaagaggcgctgctcacttcccaggtgggatggcggccgggcagagacgctcctcactttccagactgggcagccaggcagaggggctcctcacatcycagacggtgggcggccaggcagagacgctcctcacttcccagacggggtggcggccgggcagaggctgcaatctctgcactttggggggccaaggcaggc

SEQ ID NO: 475759 - DNA, 201 bp, Homo sapiens
ggcggcggggtagaggcgctccccacatctcagacgatgggcggccgggcagagacgttcctcacttcctagatgggatggcggccgggaagaggcgctgytcacttcccaggtgggatggcggccgggcagagacgctcctcactttccagactgggcagccaggcagaggggctcctcacatcccagacggtgggcggc

SEQ ID NO: 475760 - DNA, 201 bp, Homo sapiens
gacatgatcttgactcactgcaacctctgcctctcatgttcaaacgattcttctgcctcagcctccgattagctggaactgcaggcactacaaaaaaaaaataactttttttgtagttttagtagaagcagggtctcaccgtgttggccaacctggtctcaaactcctgacctcaggtgatccacctgcatcggcctccca

SEQ ID NO: 475761 - DNA, 201 bp, Homo sapiens
ggccatggctgccatatattaaaaccttactacatgtgaggtactcttctgaattatttgcttgtctgtctttgtttgtttgtttgtttgtttgtttgttttttggagacttgaactctcatgtgaactccaggctcatatatttgatcacctacagtatttccatttggatgcctaagagccatcttgttgttaacagcc

SEQ ID NO: 475762 - DNA, 201 bp, Homo sapiens
ttttttttttttttttttgagacagagtctcgctctgttgcccaggctggagtgcagtggcacgatcttggctcactgcaagctctgcctcccggcttcaygcccggctaatttttgtacttttagtagagacacggtttcactgtgttagccaggatggtctcgatctcctgacctcgtgatccgcccgcctgggcctcc

SEQ ID NO: 475763 - DNA, 201 bp, Homo sapiens
tggccatggctgccatatattaaaaccttactacatgtgaggtactcttctgaattatttgcttgtctgtctttgtttgtttgtttgtttgtttgtttgttttttggagacttgaactctcatgtgaactccaggctcatatatttgatcacctacagtatttccatttggatgcctaagagccatcttgttgttaacagc

SEQ ID NO: 475764 - DNA, 201 bp, Homo sapiens
ctggccatggctgccatatattaaaaccttactacatgtgaggtactcttctgaattatttgcttgtctgtctttgtttgtttgtttgtttgtttgtttgttttttggagacttgaactctcatgtgaactccaggctcatatatttgatcacctacagtatttccatttggatgcctaagagccatcttgttgttaacag

SEQ ID NO: 475765 - DNA, 201 bp, Homo sapiens
ctattgtgaataattagctgcaataacatgggagtgcatttacctttacaagatggtgatttcatttcccttgggtatatatccagaagaaggattgtggrgtcatgtggtagttctatttttaattgctttaggaactttcatactgttttccataatggttgtactaatttacgttaccaccagcagtgtacaagagtt

SEQ ID NO: 475766 - DNA, 201 bp, Homo sapiens
cctggccatggctgccatatattaaaaccttactacatgtgaggtactcttctgaattatttgcttgtctgtctttgtttgtttgtttgtttgtttgtttgttttttggagacttgaactctcatgtgaactccaggctcatatatttgatcacctacagtatttccatttggatgcctaagagccatcttgttgttaaca

SEQ ID NO: 475767 - DNA, 201 bp, Homo sapiens
ttcagaagctttttagtttgatgtagtcccatttatatatttgtgcttttgtggcctgacctcttgatatgcaaaaaatcattgccaaggtcggtgtcccrgagcttttctccctacgttctcttgcaggacttttatagtttctgatcttatatttaagtattttatccattttgagttgatttttgtatatgctgtaaa

SEQ ID NO: 475768 - DNA, 201 bp, Homo sapiens
gtatctttcatgattagaagaattaaatcagaccaaacttcaccaaaatttggatttgctcttgttctctttttctacatcattctttaaggtttttttttgtatttttaggaaaaaaaaagatactcatgtttggctactgcttggtgaaacattatgccttggaaaccttcctactcttttgtggcttggaagaagaaa

SEQ ID NO: 475769 - DNA, 201 bp, Homo sapiens
tgaacaaaaacatatttttcaaacaggctaaaaatttacccttttataaataagaaaagacatacagctattgtcaaaaacttagaaaagtgggattcacrgaaagaattacaagtatcttgaatgacttggcctcctattttctattgttaaagtagcattattgttttatgagtcaaggaacatgagtttttattttat

SEQ ID NO: 475770 - DNA, 201 bp, Homo sapiens
cactacatccggcaaccagggcacaggaaaattaagaaaaacattgagtatggaatattctcttttagcaagaaatcagactgctttaaaattctttaaarttcgaatgataaagtatagttatttaaatgtgttttgtaattttaatttgttttaaagatgtttaaagatggtgttacgagatgacaaaagtcagtaaaa

SEQ ID NO: 475771 - DNA, 201 bp, Homo sapiens
caggagtataatggcatgatctcgggtcacctcaacgtctgcctcctgggttcaagcgattcttccgcctcagcctcccgagtagctgggatagcaggcgwgcaccaccatgtctgactaattttgtattttttagtagagatgggtttttctccatgttggtcaggctggtctcgaactcctgacctcagatgatccaca

SEQ ID NO: 475772 - DNA, 201 bp, Homo sapiens
ctgctgggatgacaggtgtgagccaccgcacccagcataaatgtattgttttttaagtttcatgtttggattgtttaatgctagtgtatagaatacaactkagttttgtgtgttgattttgtatcctccaacttcgatgtatttatttgttagctctaatagttttttttttgccaattctttagggtgccacatatggaa

SEQ ID NO: 475773 - DNA, 201 bp, Homo sapiens
ccttaaatttagtagcagtttattaactgctatatgggagaaaacacatccaggtaaggttgaattgtgcatataagttctatacaaaagaaaattgttcytaatttatgtaagtaatacatacttatagaaaactgggaaaataaagaggaaaaaagttacctgtaatcctgtaacttggagataacgaccctcccccag

SEQ ID NO: 475774 - DNA, 201 bp, Homo sapiens
tctgagtgtccatgtctctgtgtgtggttatcttttttatcactggtcagtgaattccatgatgtccaaaggctatgtacagttcttcagtgtggttttcmgtttgactcttgagaaccttcctcatcctgaaggggaggtccattgccatagtcttgccccttaaggcttcaagaacaatgtgaacacggtttggattcc

SEQ ID NO: 475775 - DNA, 201 bp, Homo sapiens
tctgtgtgtggttatcttttttatcactggtcagtgaattccatgatgtccaaaggctatgtacagttcttcagtgtggttttcagtttgactcttgagarccttcctcatcctgaaggggaggtccattgccatagtcttgccccttaaggcttcaagaacaatgtgaacacggtttggattccgactttctactgagtg

SEQ ID NO: 475776 - DNA, 201 bp, Homo sapiens
ttggaagttgtaaccagatttaggatgttgaatacataaacagtgatgagtaacagtggatacaaaagtcacaaattactgtaaacttcttagaatatagwgatttattttagtttctcaatgatcatttctgttccatttatcaagtttccaatctcctaagtgtactagaacccaggtagctgcagtttccatgacctg

SEQ ID NO: 475777 - DNA, 201 bp, Homo sapiens
actgtaaacttcttagaatatagtgatttattttagtttctcaatgatcatttctgttccatttatcaagtttccaatctcctaagtgtactagaacccakgtagctgcagtttccatgacctggtggggataggaaggactgttgagtaccagaggagcaggtggtggctagggagcagagttcattcccacctgctgca

SEQ ID NO: 475778 - DNA, 201 bp, Homo sapiens
gctgcagtttccatgacctggtggggataggaaggactgttgagtaccagaggagcaggtggtggctagggagcagagttcattcccacctgctgcatctrtgtccagcccagggccatgcaccctttggagctctgacagtgctctcagattctgtagtgcagtttgtggatgtgaagagccctctgaattcagaggttc

SEQ ID NO: 475779 - DNA, 201 bp, Homo sapiens
gcatcataagctgtttctgagttttcctattaatattcatttactgcttcttcattccttcctaagaatttctgctctagattatctccattctaattctrattttatgatttcattttgagagctaaatcatttttcctcaaatgatgtactaagtggtttatgattacatactgtttcttagggctgtaaccacaaaca

SEQ ID NO: 475780 - DNA, 201 bp, Homo sapiens
ttgaactcctctggtggaggtgactctgatatgggtaagtgggatttctttcatgaaccccaaataaaacatgcattaataatgatatctccagtgttgcytctcctgtaatgcttgagtttgaaggctctttacaggacatctgtccaacacatctgatcctagagttccttctcaagtgtctgccagcccatgaagagt

SEQ ID NO: 475781 - DNA, 201 bp, Homo sapiens
atatgtcccacttgctagtggtttgtaatcttcgtgatgtgttgttgaattcagtttgttaatattttattgaggtttgttttttttttttttttttttttgagacagagtctcgctctgttgcccaggctggagtgcagtggcacgatcttggctcactgcaagctctgcctcccggcttcacgcccggctaatttttgt

SEQ ID NO: 475782 - DNA, 201 bp, Homo sapiens
catccatgttatggtatgaaaggatttttttcttttttaaagttgaataatatttatacacacacacacacacacacacacacacacacacatacatacayacatacatatatatgtatacacacacacatcacattttctttctttcttttttttttagacagagtctcactctgtcacccaagctggagtgcaatggca

SEQ ID NO: 475783 - DNA, 201 bp, Homo sapiens
gtctgtcctgtttttgtagagccctcaagttaagaatgatttttacatttacatattaaaataaattttattatgtatatttgaggtttacatggtgtgtgttatgggatacacatagtttagccagtgaacatatctgtcatctcacatactttgttttggtgacgaatagctaaaatctacccatttagcaaaaatccc

SEQ ID NO: 475784 - DNA, 201 bp, Homo sapiens
ggaggcggagcttgcagtgagctgagatcacgccactgcactccagcctgggcgacagagcgagactgtctcaaaaaaaaaaaaaaaaaaaaaaaaaaaatatatatatatatatatatatatatatatgtctgatcaagtgtagggtggcaccatcacatctgctcaatcatctagaagagtttcctattaagaggaaat

SEQ ID NO: 475785 - DNA, 201 bp, Homo sapiens
tgtctgtcctgtttttgtagagccctcaagttaagaatgatttttacatttacatattaaaataaattttattatgtatatttgaggtttacatggtgtgtgttatgggatacacatagtttagccagtgaacatatctgtcatctcacatactttgttttggtgacgaatagctaaaatctacccatttagcaaaaatcc

SEQ ID NO: 475786 - DNA, 201 bp, Homo sapiens
gggaggcggagcttgcagtgagctgagatcacgccactgcactccagcctgggcgacagagcgagactgtctcaaaaaaaaaaaaaaaaaaaaaaaaaaaatatatatatatatatatatatatatatatgtctgatcaagtgtagggtggcaccatcacatctgctcaatcatctagaagagtttcctattaagaggaaa

SEQ ID NO: 475787 - DNA, 201 bp, Homo sapiens
agaggtttagttttatttgtttgctgtttttcactttttttattatctaggacagaggttgccaaactaaggctagttggtactgaccatatcctgtctgtcctgtttttgtagagccctcaagttaagaatgatttttacatttacatattaaaataaattttattatgtatatttgaggtttacatggtgtgtgttatg

SEQ ID NO: 475788 - DNA, 201 bp, Homo sapiens
tgggaggcggagcttgcagtgagctgagatcacgccactgcactccagcctgggcgacagagcgagactgtctcaaaaaaaaaaaaaaaaaaaaaaaaaaaatatatatatatatatatatatatatatatgtctgatcaagtgtagggtggcaccatcacatctgctcaatcatctagaagagtttcctattaagaggaa

SEQ ID NO: 475789 - DNA, 201 bp, Homo sapiens
cgggcgtggtggtgggcacctatagtcccagctactctggaggctgaggcaggagaatggcatgaacccgggaggcggagcttgcagtgagccaagattgygccactggactccatcctgggtgacagagcgagactccgtctcaaacaaaaaaaataaataagtaaaataaaataaatttatttaagttttctgtgattt

SEQ ID NO: 475790 - DNA, 201 bp, Homo sapiens
aatctccttgggctgccataacaaaataccacagattgggtggctgcagcaactgaaattaattttctcacggttctggaggctgtacgtgcaaggtcaargtgctggcacagttgctttctgatgagggctgtctttgtggcttgcagatggctaaccgccttgttactttgtccttacatggcctttcctttgggtgtg

SEQ ID NO: 475791 - DNA, 201 bp, Homo sapiens
atactttgaggttactgatgtgaagtacagtctttaatatccttctttaaagaatgtcttaaaaagtaatgatgatagtaaacatttttatttatattatrtacaaattacccttgattcacagagatagacaaaatccaaagtcatgtatggttctgtacctttagaataacacttaacataaattgtattgtcttttgg

SEQ ID NO: 475792 - DNA, 201 bp, Homo sapiens
ttaataaatctccttgggctgccataacaaaataccacagattgggtggctgcagcaactgaaattaattttctcacggttctggaggctgtacgtgcaargtcaaggtgctggcacagttgctttctgatgagggctgtctttgtggcttgcagatggctaaccgccttgttactttgtccttacatggcctttcctttg

SEQ ID NO: 475793 - DNA, 201 bp, Homo sapiens
gtgagccatagcacccagcctggatttgcttattatagacattttatataaatggaatcataatatgtggccttttgtgcctgacctttttttttttttttaaacttagtataatgttttctatgtttgtctgtgttctagcatctctccttttttaaggctgaatgatattcagttgtatggttatactacattttgttt

SEQ ID NO: 475794 - DNA, 201 bp, Homo sapiens
gacactgcaggagaggagaggtggagatcactaagtgggaagctactgggtgaggtaggacttctccagaaaaaaacaaaatgtttaaaaatgtagacatraagagaacttttaacaacactgaaaaagatcataatattgaagtgttgacttgtttcttctagtttggtggaggagaggttactatcctatttctgcagt

SEQ ID NO: 475795 - DNA, 201 bp, Homo sapiens
gctcaccatttcttctcgcaactcaagtcttccatcgaagggaacacccttctactgaagaacatctcttagaatttcctttagtgaaggtctcttagttrgcaaattcagtatttgtttggtttttatgacttaaatattgtcttatatttggcctgtttattaaaagatatatttattaatttggtatgtgattatttt

SEQ ID NO: 475796 - DNA, 201 bp, Homo sapiens
atgaaggctggaggttaataaatctccttgggctgccataacaaaataccacagattgggtggctgcagcaactgaaattaattttctcacggttctggargctgtacgtgcaaggtcaaggtgctggcacagttgctttctgatgagggctgtctttgtggcttgcagatggctaaccgccttgttactttgtccttaca

SEQ ID NO: 475797 - DNA, 201 bp, Homo sapiens
tgccaccacgcccagctaattttttgtgtttttagtggagatggggtttcactgtgttggccaggctgttctcaaactcctgaccttgtgatctgcccgcyttggcctcccaaagtgctgggattacaggcatgagccactgtgccaggctgaaaaagttttttaaatggtttttttatgttttcaactttatatctgaga

SEQ ID NO: 475798 - DNA, 201 bp, Homo sapiens
gcttaagctggagtccagtgttgtgatctcggctcactgcaacctctgcctcctgggttcaagcgattctcctgcctcagcttcctgagtaggtgggactrcaggcatgtgccaccatccccagctaatttttgtatttttagtagagatggggttctgccatattggtcaggctggtcttgaactcctgacctcaagtga

SEQ ID NO: 475799 - DNA, 201 bp, Homo sapiens
acttgtattgaaatgggttttggctttgaacaacccctaaccttaaacttgtttttgggagggtttgtgaaaaatgaggtcatctttacaagagtagagasagtattagagaagtcccacccgagggtagggtaagagtgctgcaaacagggaaggtagtttggtgtgttaatggcacttctagagaggttgtcagagtct

SEQ ID NO: 475800 - DNA, 201 bp, Homo sapiens
agagtgcaatggtacgatctcagctcactgcaccctccccctcctgggttcacgtgattctcctgcctcagcctcctgagtagctgggattacaggagcaygccaccacgcccagctaattttttgtgtttttagtggagatggggtttcactgtgttggccaggctgttctcaaactcctgaccttgtgatctgcccgcc

SEQ ID NO: 475801 - DNA, 201 bp, Homo sapiens
ggtaaatgttttcttgatttttttggtaagaaaaaagatacctaatttatttcagtttacactctgattaaagtttctgtggattttttttttttttttttggaaattgcttctgatgtggggatttttataatgcttttagtagctcttcatatattataaattaaacatgttcatgttttgtatatgcagataattttt

SEQ ID NO: 475802 - DNA, 201 bp, Homo sapiens
atgctatttttgtgatagtgaataagtcttaggagatctactggttttagaaagaggagttcccctgcacaagttttttttttttttttttttttttttttgcctgccgccatcatgtaagacgttacttgctcctccttcccttttgccatgattgtgaagcctccccagccatgtggaactgtaagtccattaaacctc

SEQ ID NO: 475803 - DNA, 201 bp, Homo sapiens
catgctatttttgtgatagtgaataagtcttaggagatctactggttttagaaagaggagttcccctgcacaagttttttttttttttttttttttttttttgcctgccgccatcatgtaagacgttacttgctcctccttcccttttgccatgattgtgaagcctccccagccatgtggaactgtaagtccattaaacct

SEQ ID NO: 475804 - DNA, 201 bp, Homo sapiens
tggatagagccagtgagaaggtggaacctagagatgaagatttggtggtagctcagcaaataaatgcccaaaggcccgagccccagtcagacaatgattcyagtgccacgtgcagcgctgatgaggatgtggatggagagccagagaggcagaggtgaggctcgttccataagtcctccccgtgcttactctgctggttgg

SEQ ID NO: 475805 - DNA, 201 bp, Homo sapiens
ctgagcagagatgtagcttgagatgaagtttaaagtaatgatgagtgaacttggttacctttgcagacctttgcagaaacatcaccctgagcttgtttttrcttgagcagctatttaatccttccaggcagaatgagaattaagaacagaattagaaagctctttgaatgttactgttaaaatagtgacaatggttaatac

SEQ ID NO: 475806 - DNA, 201 bp, Homo sapiens
agtcttctgactcttctcctggtcagctttcacaacagcaggaaacatgacatcaggaggaggatggtatatttatttaaaatatttatatattacatggkaccacatagtttttaaagttctttttttttttttggagacggagtctggacccctcacgcaggctggagtgcagtggtgccatcttggctcactgcaacc

SEQ ID NO: 475807 - DNA, 201 bp, Homo sapiens
agtttctgtctgggactccaattactcatgttgcatgttattccacagttcactggacctctgttcactttttttccctgtttttattttattttttttttaaatccattagcttcattttgctatggtatcatagtcagtgatcctttcttctgtacttttcaacctgttgttaattttatccagtgacatttttattgc

SEQ ID NO: 475808 - DNA, 201 bp, Homo sapiens
tagtttctgtctgggactccaattactcatgttgcatgttattccacagttcactggacctctgttcactttttttccctgtttttattttattttttttttaaatccattagcttcattttgctatggtatcatagtcagtgatcctttcttctgtacttttcaacctgttgttaattttatccagtgacatttttattg

SEQ ID NO: 475809 - DNA, 201 bp, Homo sapiens
ccattctcctgcctcagtctccccagtagctgggactacaggcacccgccaccacgccctgctacttttttgtatttttagtagagacagggtttcaccgygttagccaggatggtctcgatctcctgacctcatgatccacccgccttggcctcccaaagtgctgggactacaggcatgagccaccacgcccagccgcct

SEQ ID NO: 475810 - DNA, 201 bp, Homo sapiens
cctgcttcagcctcccaggtagctgggaccatgggtgtgtaccgccatgcctgactaattatttttttcttttttttttcttttcttttttttttttttttgagacagagtcttgctctgttgcccaggctggcatgcagtggcccgatcttggctcacggcaagctccgcctcccgggttcacgccattctcctgcctca

SEQ ID NO: 475811 - DNA, 201 bp, Homo sapiens
tcatgctatttttgtgatagtgaataagtcttaggagatctactggttttagaaagaggagttcccctgcacaagttttttttttttttttttttttttttttgcctgccgccatcatgtaagacgttacttgctcctccttcccttttgccatgattgtgaagcctccccagccatgtggaactgtaagtccattaaacc

SEQ ID NO: 475812 - DNA, 201 bp, Homo sapiens
agccctcgtcagaaggaattatgggaaacgcagaggcagaaaccaggtgtgttttcttacttgtatggaagatatttcaggattgggggaaataggcaagsaaaaagtgttaaaacagaagtcctgcccttagtgtgtagtttaaacattgatgtttctgttaaattagtgaggatgttataattattttgaagttatatt

SEQ ID NO: 475813 - DNA, 201 bp, Homo sapiens
gtttttaaagttctttttttttttttggagacggagtctggacccctcacgcaggctggagtgcagtggtgccatcttggctcactgcaacctctgcctcycagcttcaagtgattctcctgcctcagcctcccgagcagctgggtttacaggcacgcgccaccatgcgtggctaattttttgtatctttagtagagacca

SEQ ID NO: 475814 - DNA, 201 bp, Homo sapiens
agagacagctttcaccaactccaggttacccaagtcagtatcagctttacgcaatggagaacacaagacagacaatcttaaatgattacattacctcacarcagatgcaagtgaacttgcgtccagatgtggccagaggactctccccaagagagcagccactgggtctcccatacccagcaacgagaggtgtgtgtcttt

SEQ ID NO: 475815 - DNA, 201 bp, Homo sapiens
tatgaacaataaggtccaggctgaggtgatctcagatggaaatgaggaacttgttgggaattggagcaaaggtgagtcttcttatgttttagcaaagagamtggcagcattttgcccctgccctagagatttgcagaactttgaacttgagagagataatttaggttatctggcggaagacatttctaagcagcaaagcat

SEQ ID NO: 475816 - DNA, 201 bp, Homo sapiens
gaggatggtatatttatttaaaatatttatatattacatggtaccacatagtttttaaagttctttttttttttttggagacggagtctggacccctcacscaggctggagtgcagtggtgccatcttggctcactgcaacctctgcctctcagcttcaagtgattctcctgcctcagcctcccgagcagctgggtttaca

SEQ ID NO: 475817 - DNA, 201 bp, Homo sapiens
gtccttgatgacgcagtaaaagttaattttattaaatctcacccattgagtatgtctttttatacttcgtgtcatgtaatgggaagtaaacataaagttcygctctataccaaaatatgatggttctctcagggaaaagcactttggcaattgttcgagttctaagttgcaccagcctcccctttttcatggaatgtcatt

SEQ ID NO: 475818 - DNA, 201 bp, Homo sapiens
atgcgaggacaggaagggcttgctttgacctgtaaatttgtatgctagtaggggctaatttcctgattttgctagtgtgtgtgtgtgtgtgtgtgtgtgtgtttttttttttttccttctgtattgggcggatagtacttttaaagaaaactgactttttttttttttgagataataaagttaaacttcactaaagtcata

SEQ ID NO: 475819 - DNA, 201 bp, Homo sapiens
ccagacctcaggtgatccacctgtctcagcctcccaaagtgctgggattacaggtgtgagccactgcatctagccttgatgttttttttttttttttttttctgagctccagagattggttttaagagaaacctttttgtatcttatatttttatttattgcacttatatgtaaaaggtatgctaaatttttagtataggc

SEQ ID NO: 475820 - DNA, 201 bp, Homo sapiens
gagtaacttgtgggagcttaccttatatgtagcgtggttagaaagactcttctgagatgacatttgaactgagaccttaagtttgaggaggagctagccayctgaatgagccaggaacagctttcctggcagagagtaaaggacaaagacccagttaggaaggacctggcagagaagggctcctgaagaaactgaaaggaa

SEQ ID NO: 475821 - DNA, 201 bp, Homo sapiens
ttatcttattggcttgatatattgtgtccagagatctagatgtacctaatcatttagtttgcaagtatttgagctattactaatgtgtctaatgttgtccyagccctgtgagagatacataggaaggacaaggtttagcccttctgttaatgagcatgttttaaatttgagggggaaaaatatagaactgtaaatgagttt

SEQ ID NO: 475822 - DNA, 201 bp, Homo sapiens
ctcacttttttctttcttttttttttttgtgagacagagttttgctcttgttgcacaggctggattgcaatggcaggatttcagctcacctcaatctctgyctcctgggttcaagtgattctcctgccttagcctcctgagtagctgggattacaggcctgcaccaccatgcctggctaattttgtatttttactacagat

SEQ ID NO: 475823 - DNA, 201 bp, Homo sapiens
cattagtatgtaaaataggtcttataaaatatcttaattttagctggtcaaaacttttaaaaactatggtatggcagaattgttgataattttttttttttgagtgagagattaggtagttttattcaatttctatttagataatattcaaaactaaaaccttcttcgatgtatgtatactttggaatcacacaagttttc

SEQ ID NO: 475824 - DNA, 201 bp, Homo sapiens
acccaccttggcctcccaaagtgctgggattacaggcatgagccactgcgcccaaccttttttttttttcttcttttcttttcttttcttttagacagagyctcgctcttgttgcccaggctggagtgcagtggcacaatctcagctcactgcaacctccgcctcccaggttcaagcgattcccctgcctcagccttccaa

SEQ ID NO: 475825 - DNA, 201 bp, Homo sapiens
atatacatacatgtatatatacatacagatatatacatacatgtatatatacatacagatatatacatacatgtatatatacatacagatatatacatatwcacacacacacctatgataaactttgatttgtatattaggcacagtaaggaattaacagtaacaaataataaaatagagttatagcaatatactgtaata

SEQ ID NO: 475826 - DNA, 201 bp, Homo sapiens
atacatacatatatacacacacatatatacatacatatatgcatacatgtatatatacatacagatatatacatacatgtatatatacatacagatatatrcatacatgtatatatacatacagatatatacatacatgtatatatacatacagatatatacatatacacacacacacctatgataaactttgatttgtat

SEQ ID NO: 475827 - DNA, 201 bp, Homo sapiens
atatacatacatacatatatacacgtatatatacatacatatatacacacacatatatacatacatatatgcatacatgtatatatacatacagatatatrcatacatgtatatatacatacagatatatacatacatgtatatatacatacagatatatacatacatgtatatatacatacagatatatacatatacaca

SEQ ID NO: 475828 - DNA, 201 bp, Homo sapiens
agtgttgacttgtttcttctagtttggtggaggagaggttactatcctatttctgcagtttctttcaccaaatgcttttacatagtcttttatgtcagatraagagatataattatatgattggtttgaataaaggatttaactttgtttttctctgcctgattgggttctctctttattttagtttctacagagcctgtg

SEQ ID NO: 475829 - DNA, 201 bp, Homo sapiens
ttttttcctgtggtttctatgtctttgtgctttactgggtactgagagaattcctcagttctctcttagctttcatttacttttcacttctgtgtgttcarctattgtttaccttcagtgattcagtttttagtttctttgattctttaataaattttttttttattttttgagacagagtctcactctgttgcccaggct

SEQ ID NO: 475830 - DNA, 201 bp, Homo sapiens
caaaagtactcaaggcttttaaggaagcagctctgtgattagctactgaccaagaccctcctatcactggtgtctaatccctatgttacagatgaagacayaggtttagtactttgcccatatagttaaattagtgacagagataggccataagcccacatttgtcttcagtcaaagctttcactcctgtccctgttccac

SEQ ID NO: 475831 - DNA, 201 bp, Homo sapiens
gctggtctcgaactctcgacctcaggtgatccacccaccttggcctcccaaagtgctgggattacaggcatgagccactgcgcccaaccttttttttttttcttcttttcttttcttttcttttagacagagcctcgctcttgttgcccaggctggagtgcagtggcacaatctcagctcactgcaacctccgcctcccag

SEQ ID NO: 475832 - DNA, 201 bp, Homo sapiens
tcaagtgatctgcccgccttggcctcccaaagtgttgggattacaggcgtgagccatcgcacttggccgagtgtattctttatggttttttttttttttttacatccaaaagcttatttgtaatattcattttctgtatgtattcatgctataaaatttattttattttaattttttaaaaatagagatggggtctgattg

SEQ ID NO: 475833 - DNA, 201 bp, Homo sapiens
atcatgaggtcaggagatcgagaccatcctggccaacatgatgaaaccctgtctctactaaaaaaatacaaaaaattagccgggcatgatggcacgcaccygtagtgccagctactcgggaggctgaggcaggagaatggcgtgaacccgggaggcggagcttgcagtaagccgagattgcgccactgcactccagcctgg

SEQ ID NO: 475834 - DNA, 201 bp, Homo sapiens
tagtcttgttttactttcgataacactgaaggtcggagaagtgaagtgatttacctgcctaagttgctaaagttgggcaatagcagaatctaagtcttttsgtatctattatagtgttcactgtgttacactgtatcatccatgggatgaatcgatttgatgattgacacttaaaaatcggccaggcgcggtggctcacac

SEQ ID NO: 475835 - DNA, 201 bp, Homo sapiens
catatatacatacatgtatatatacatacatatatacatacatgtatatatacatacatatatacatacatgtatatatacatacatacatatatacacgtatatatacatacatatatacacacacatatatacatacatatatgcatacatgtatatatacatacagatatatacatacatgtatatatacatacagat

SEQ ID NO: 475836 - DNA, 201 bp, Homo sapiens
gcctatcctcttaatcaaaaaagaatgaaatgatggaaattaacttataggaaagattagattagttaataacttttttaaagctttttttttttttttttggagacagggtctcttttgcccaggctgaaatacagtggctcgctgcagccttgacctctggactcaggtgatccttccacctcagcctcccaagtcgct

SEQ ID NO: 475837 - DNA, 201 bp, Homo sapiens
acatatatacatacatgtatatatacatacatatatacatacatgtatatatacatacatatatacatacatgtatatatacatacatacatatatacacgtatatatacatacatatatacacacacatatatacatacatatatgcatacatgtatatatacatacagatatatacatacatgtatatatacatacaga

SEQ ID NO: 475838 - DNA, 201 bp, Homo sapiens
tgcctatcctcttaatcaaaaaagaatgaaatgatggaaattaacttataggaaagattagattagttaataacttttttaaagctttttttttttttttttggagacagggtctcttttgcccaggctgaaatacagtggctcgctgcagccttgacctctggactcaggtgatccttccacctcagcctcccaagtcgc

SEQ ID NO: 475839 - DNA, 201 bp, Homo sapiens
catacacgtatatatacatatacacatatatacatacacatatacacatgtatatatacatacacatatacacatgtatatatacatacatatatacatayatgtatatatacatacatatatacatacatgtatatatacatacatatatacatacatgtatatatacatacatacatatatacacgtatatatacatac

SEQ ID NO: 475840 - DNA, 201 bp, Homo sapiens
tatatatacacatacacgtatatatacatatacacatatatacatacacatatacacatgtatatatacatacacatatacacatgtatatatacatacayatatacatacatgtatatatacatacatatatacatacatgtatatatacatacatatatacatacatgtatatatacatacatacatatatacacgtat

SEQ ID NO: 475841 - DNA, 201 bp, Homo sapiens
tgtatatacacatatgtatatacatgcacatatacacacgtgtatatatacacatacacgtatatatacatatacacatatatacatacacatatacacawgtatatatacatacacatatacacatgtatatatacatacatatatacatacatgtatatatacatacatatatacatacatgtatatatacatacatat

SEQ ID NO: 475842 - DNA, 201 bp, Homo sapiens
tatatacacatgtgtatatatacatgcagatatatacacgtgtgtatatacacatatgtatatacatgcacatatacacacgtgtatatatacacatacaygtatatatacatatacacatatatacatacacatatacacatgtatatatacatacacatatacacatgtatatatacatacatatatacatacatgtat

SEQ ID NO: 475843 - DNA, 201 bp, Homo sapiens
acacatacacatatatacatatatgtatatatacacatacacatatgtatgtatacatacatatatacacatatgtatatatacatacatatatacacatrtgtatatatacatgcagatatatacacgtgtgtatatacacatatgtatatacatgcacatatacacacgtgtatatatacacatacacgtatatataca

SEQ ID NO: 475844 - DNA, 201 bp, Homo sapiens
atacacatacacatatatacatatatgtatatatacacatacacatatatacatatatgtatatatacacatacacatatgtatgtatacatacatatatrcacatatgtatatatacatacatatatacacatgtgtatatatacatgcagatatatacacgtgtgtatatacacatatgtatatacatgcacatataca

SEQ ID NO: 475845 - DNA, 201 bp, Homo sapiens
tcccagtggatgcttgaaaccacagatagtaccgaaccctaatatactatgagagatatatatatatatctccacacatatatacacatatatgtatatayacacacacatatatacatatatgtatatatacacatacacatatatacatatatgtatatatacacatacacatatatacatatatgtatatatacacat

SEQ ID NO: 475846 - DNA, 201 bp, Homo sapiens
tgatttgtatattaggcacagtaaggaattaacagtaacaaataataaaatagagttatagcaatatactgtaatagaagttacatgagtgtggtcttttytcaaatatcatactgtacgctactacacttacccattttcatactgcagttgactccaggtaactgaaaccacagaaagagaaactcctgatatggtggg

SEQ ID NO: 475847 - DNA, 201 bp, Homo sapiens
aacactcccagtggatgcttgaaaccacagatagtaccgaaccctaatatactatgagagatatatatatatatctccacacatatatacacatatatgtrtatatacacacacatatatacatatatgtatatatacacatacacatatatacatatatgtatatatacacatacacatatatacatatatgtatatata

SEQ ID NO: 475848 - DNA, 201 bp, Homo sapiens
aggttatgggtgtaagaggtttaaagaaaaataggaaaggatgggataaaacggtcctctcagagactaagaaagcagatttgtcatcagaatgtactacrgggtcctcctgaggactcctttgaagtgcagtcatgattacagagttagaatggacattcttacgttgttcctatgtagggaggcatttagtctttcacc

SEQ ID NO: 475849 - DNA, 201 bp, Homo sapiens
ccagtcttgccaccccaatatagctgttttttatttagttgttatgctagtgtgccataaatattttctaatttctaataattaccatttttattttttartggctgtgtaatattgaggcatgacttctttaaccattctcttattgctgaatgattaggttgtctgccctcttccctgcttttaaaccaatgtatatag

SEQ ID NO: 475850 - DNA, 201 bp, Homo sapiens
tgatgacgcagtaaaagttaattttattaaatctcacccattgagtatgtctttttatacttcgtgtcatgtaatgggaagtaaacataaagttctgctcyataccaaaatatgatggttctctcagggaaaagcactttggcaattgttcgagttctaagttgcaccagcctcccctttttcatggaatgtcattttaga

SEQ ID NO: 475851 - DNA, 201 bp, Homo sapiens
ctttttatacttcgtgtcatgtaatgggaagtaaacataaagttctgctctataccaaaatatgatggttctctcagggaaaagcactttggcaattgttygagttctaagttgcaccagcctcccctttttcatggaatgtcattttagattgaaagaatgacagacaaactatgttttcagactgggattttgggagac

SEQ ID NO: 475852 - DNA, 201 bp, Homo sapiens
caccatccccagctaatttttgtatttttagtagagatggggttctgccatattggtcaggctggtcttgaactcctgacctcaagtgatccaccttcttyggcctcccaaagtgctgggattacaggcatgagccaccacgcccagcctatacatagtctttcttttcccaagtttttttttttttagttgttgaaatat

SEQ ID NO: 475853 - DNA, 201 bp, Homo sapiens
tggctgtctatatttctcccataaagaaaagctctttggccaggtgcagtggctcacgcctttaatcccagcacgttgggaggccgaggcgggcagatcaygagttcaagagatcaagaccatcctggccaacgtggtgaaaccctgtctctactaaaaatacaaaaattagctgggtgtgatggtgtgcacctttaatcc

SEQ ID NO: 475854 - DNA, 201 bp, Homo sapiens
aaggtatatattatctttagaaaaaatatatatatattgtttttattagataacattatctggagtgagtaaaaagcatggaggtatgtgatttttggctwtttatacatgtatagtggtgagtaattccaaaagtggatcagatgtaacttttgcttagtttgataaaggcgagccatctacacaaaatttggccagtta

SEQ ID NO: 475855 - DNA, 201 bp, Homo sapiens
ctagagaggttgtcagagtctcttggttttaatgggtttgtttctggtggctagtattccctggggttataaatgttaatgaaggctggaggttaataaayctccttgggctgccataacaaaataccacagattgggtggctgcagcaactgaaattaattttctcacggttctggaggctgtacgtgcaaggtcaaggt

SEQ ID NO: 475856 - DNA, 201 bp, Homo sapiens
ttatgataggtctttatgcatattgcacaaaggtgaggtcctccagttgctgctgactgcacttcctctccgctcaccactgcctggtcagtatacagagkggtgagaggttctgctggacaggtaccaaacacttctctagactctaatgcagcaactctgtccatttctttggatcatttccacactatgcagagccag

SEQ ID NO: 475857 - DNA, 201 bp, Homo sapiens
aaataaagcagttcccccttattcacaggggatatgttccaacactcccagtggatgcttgaaaccacagatagtaccgaaccctaatatactatgagagatatatatatatatctccacacatatatacacatatatgtatatatacacacacatatatacatatatgtatatatacacatacacatatatacatatatg

SEQ ID NO: 475858 - DNA, 201 bp, Homo sapiens
aaaataaagcagttcccccttattcacaggggatatgttccaacactcccagtggatgcttgaaaccacagatagtaccgaaccctaatatactatgagagatatatatatatatctccacacatatatacacatatatgtatatatacacacacatatatacatatatgtatatatacacatacacatatatacatatat

SEQ ID NO: 475859 - DNA, 201 bp, Homo sapiens
tttagtaatttcgttttttggcaacttattttctgttgagtgggaacttgtctgtttctcttttctaaaaaaggtgaacatttaaaacaaatataattagmacatatatatagttagatattcatttatatatagtagtaatgaatcttagcataaactattatttgatcttgccaaaggggacccatatgaaactgaatc

SEQ ID NO: 475860 - DNA, 201 bp, Homo sapiens
ggtgtaagaggtttaaagaaaaataggaaaggatgggataaaacggtcctctcagagactaagaaagcagatttgtcatcagaatgtactacagggtcctmctgaggactcctttgaagtgcagtcatgattacagagttagaatggacattcttacgttgttcctatgtagggaggcatttagtctttcaccattattac

SEQ ID NO: 475861 - DNA, 201 bp, Homo sapiens
aaaggaaggaaggaaagcaagaaaagccagactggacgtggtggctcatgcctagaatcccagagcaagactccatctcaggaaaaaaaaaaaaaaaaaaagtgtagtttgctattgatagattctaagtttgcaaagtttgattttttaaaacctgttgctatagggaagcttagtagtgtttactctgaaaatgagttt

SEQ ID NO: 475862 - DNA, 201 bp, Homo sapiens
gcagatttgtcatcagaatgtactacagggtcctcctgaggactcctttgaagtgcagtcatgattacagagttagaatggacattcttacgttgttcctrtgtagggaggcatttagtctttcaccattattacatgtaatgttagttgcacgtttttgttgatgccttttttggttgaagaggttgctttctgttccta

SEQ ID NO: 475863 - DNA, 201 bp, Homo sapiens
gaggcaaacatgaagctccatcctctccaatttcggggcaaccatgtggagatgatcaaaatgcttcaccttcaaaactctcaaaggaagagttaatacaragtatggatcgtgtagatcgagaaattgcaaaagtagaacagcagatccttaaactgaaaaagaaacaagtaaatgtctttgcttaatatattctaagaa

SEQ ID NO: 475864 - DNA, 201 bp, Homo sapiens
agtagctgggactacaggcgcctgccaccacgcccggctaagtttttgtatttttagtagagatggggtttcaccatgttggccaggatggtctcaatctyctgacttccatgatccacctgccttggcctcccaaggtgctgggattacaggcatgagccaccgcgcccagcctagataatttaatttctaaaaagcact

SEQ ID NO: 475865 - DNA, 201 bp, Homo sapiens
aggatccagcattcggaggcaaacatgaagctccatcctctccaatttcggggcaaccatgtggagatgatcaaaatgcttcaccttcaaaactctcaaasgaagagttaatacagagtatggatcgtgtagatcgagaaattgcaaaagtagaacagcagatccttaaactgaaaaagaaacaagtaaatgtctttgctt

SEQ ID NO: 475866 - DNA, 201 bp, Homo sapiens
ccttgattagagattctttacaaaaacctggaacctgattttgtttcatattaacttcatttgtggagttcagatagtttaatttctttctttcttttttytttttttttttttttgaaacagagtctcgctctgtcgcccaggctggagtgcagtggtgctatcttggctcactgcaacctccgcctcctgggttcaatc

SEQ ID NO: 475867 - DNA, 201 bp, Homo sapiens
catcaataattatgactttctagaagttttccctaactagttccaccatttgaacatgaacatgtaaccttcaaatctcaatcgtaacatttaaattgttattaataggtgacacagcatattacttaaaagtatatactcaatagtattttatgtttcttctcttaacttggttaaaaagttccattcagaaaagtaatc

SEQ ID NO: 475868 - DNA, 201 bp, Homo sapiens
gcatcaataattatgactttctagaagttttccctaactagttccaccatttgaacatgaacatgtaaccttcaaatctcaatcgtaacatttaaattgttattaataggtgacacagcatattacttaaaagtatatactcaatagtattttatgtttcttctcttaacttggttaaaaagttccattcagaaaagtaat

SEQ ID NO: 475869 - DNA, 201 bp, Homo sapiens
tttctcacggttctggaggctgtacgtgcaaggtcaaggtgctggcacagttgctttctgatgagggctgtctttgtggcttgcagatggctaaccgcctygttactttgtccttacatggcctttcctttgggtgtgcgcactcctggtgtctcttcctcatatgaagacaactcctactggattagagcccactgttat

SEQ ID NO: 475870 - DNA, 201 bp, Homo sapiens
cctactaattttgtattttttttagtagagacagggtttctccacgttggtcaggctggtctcaaacccctgacctcaggtgatccacctgcctcggcctyccaaagtgctgggattacagccatgagccactgcacccagcctaaaacatgtcttaaagcccataaaacttcagaaaaccctcattaacctggaatacct

SEQ ID NO: 475871 - DNA, 201 bp, Homo sapiens
catttggatgcctaagagccatcttgttgttaacagccaaagcaaactcatgtgtctctaccaccacaagctgcttttccctctggtctttcactatatcrataaattaggttttctttagtctctttagaattggatccttgtctccattgctcctaccctgcttctgaggagccctcattgcagtagttttttgattag

SEQ ID NO: 475872 - DNA, 201 bp, Homo sapiens
tggacgttgaagtgagggtgccagaaaaccatgcatctaaagttgaaggtgataataccaaagaaagagacttggatagagccagtgagaaggtggaaccwagagatgaagatttggtggtagctcagcaaataaatgcccaaaggcccgagccccagtcagacaatgattccagtgccacgtgcagcgctgatgaggatg

SEQ ID NO: 475873 - DNA, 201 bp, Homo sapiens
ttctgaggagccctcattgcagtagttttttgattagtctcttgcttctttttgttccattctttttatttatttttagagatgaggtctcgctgtgtcayctaggctggagtgcagtggctcgatcgtggctcactgcagcctcaaactcccaggctcaagcgattttcccacctcatccccccaagtatctgggaccat

SEQ ID NO: 475874 - DNA, 201 bp, Homo sapiens
ttattaatgtttggagtaagttttgttagcaatactccatttatttgagaaaatcattatatagtgttatataatccatagctttaaaatcatcatggtgktgaatgaagcagctttatagcctcagcgtttttctaagaacagagtgtcccacagaattggaatcattggaatcagttattgagatctactccctcattt

SEQ ID NO: 475875 - DNA, 201 bp, Homo sapiens
acttttatactctgtaggaaactttagccttctcaatggctgtaaatacttcaatgaggtcatcaaaggagtagaattcatcctaaacaactactttcaarcatggtttctatcaccacctgaaacatgttcattatcagatttttatgctgtatcattatctttaaggtgcagaaaatagttctgatacagaaagtgctc

SEQ ID NO: 475876 - DNA, 201 bp, Homo sapiens
atattggcacgttataggtagtctgtacaattttaatattgggctgatactgttctgtttaaataaccacaaactattgtatgatcattttaatgaaacarattatacatttctcctatatctgtcttgttacgtgtattctgtatgatagcataacagggaatttcaactaataaagttgtgaataaaccacagataact

SEQ ID NO: 475877 - DNA, 201 bp, Homo sapiens
tttctcctatatctgtcttgttacgtgtattctgtatgatagcataacagggaatttcaactaataaagttgtgaataaaccacagataactgttgtgccygaggagggcagcagtgggatgtggtagaagaaggtggaggctagaggcattgaggcactcccgcttctctaaggcagtgcaacctcaaaacaaggcctac

SEQ ID NO: 475878 - DNA, 201 bp, Homo sapiens
taattactagttcattataagggatataactcagaaacagccaaatggaagagatggatcgggcaaggtgtgcagaaggggtgtggagcttctgtctcctrtctaggtctgcctccctcccagcaactccacgtgttcaccagcctggaaactcttaaaaccccatcatttggggtttttatgaaggcctcatcacatagg

SEQ ID NO: 475879 - DNA, 201 bp, Homo sapiens
atgccagtaacatttttaatagcattctagttaatgtgaattttctgatattcatctttgtgctggaagacattataaataaagttatgctttatgttccrttcatctgaattttcagagtgagaattgttgtcctgtccttgaagcaaatcaccttcaagtattacagtgtaatattcacattctctggtagatgagaga

SEQ ID NO: 475880 - DNA, 201 bp, Homo sapiens
atgggctctctgagcaggaggtaagaaaataaatttaattcaagttaattcgttaattattaaagcattttaactctgtaggagctaagggtttttttgtrtgtaaatgtgggaacttaattgagtgctagagtttagactgtcaaagatttgagtgtctgttaaagggtttttaaacgaggcagtcacacgatcatactg

SEQ ID NO: 475881 - DNA, 201 bp, Homo sapiens
gaggggagccggagtcactcttgtttgaacacctccaacactctcaatttttctttaggcaccagaaaatgaccttgttcttttctttagttattttctakttattcaaatatttaaagctcttgctttattcaaaaatgtgttttctatctcaaataataagtggtaaaagtttttaattgtgtacttaccacaaaaaga

SEQ ID NO: 475882 - DNA, 201 bp, Homo sapiens
aaaacttaccaattctctagaatttctggggtaagacctatatttatactcccaagttgtggctgagttttaagctggccagataacttggcatgtcttgrgtgagggccaagataaagacctctctctttttaagaaattgatggtaggaagatttgtatagtaggtaggaaggaagggatggtagttaggaaggaagac

SEQ ID NO: 475883 - DNA, 201 bp, Homo sapiens
ggtccatccatgttatggtatgaaaggatttttttcttttttaaagttgaataatatttatacacacacacacacacacacacacacacacacacatacayacatacatacatatatatgtatacacacacacatcacattttctttctttcttttttttttagacagagtctcactctgtcacccaagctggagtgcaat

SEQ ID NO: 475884 - DNA, 201 bp, Homo sapiens
aatagtacacgtctaccttgctgtggttgtaaagttaaggaaggagcattcggtattgttatataacaggtggctctgcattattttatgtataatgtagyacgttattacatattaattagtgtattagtactgtatatacacagtagatactatggaggtacctgttttcattgttacatcactgtttttatttcaagt

SEQ ID NO: 475885 - DNA, 201 bp, Homo sapiens
acttgcgtccagatgtggccagaggactctccccaagagagcagccactgggtctcccatacccagcaacgagaggtgtgtgtctttgcatttcagatttygtagaatttattatgtttacctagtgtttcttaggtactcagtaaatacttgttgaatgaatgatggaaagaaagaaagaaaagaatactatatccttcc

SEQ ID NO: 475886 - DNA, 201 bp, Homo sapiens
aaattctgagactccaaactgtgaattgtatttctctgtgttagtcacattactacacgtggtttagatctcagtggtatcctaatttttaatcataattyagtcatcttaaaatcaaattgtaattatacttttgattagtatgacattaagaattttacagtttggtcgaaggtgatgctctacaaagtagggcaagtt

SEQ ID NO: 475887 - DNA, 201 bp, Homo sapiens
taccaatatgacatatctaggaataatttttaacaagcaagggatggaactatctgacaaaaacaagatttctcaactagaaaactcattattataaaatrtcatcacctgtttattcataaatttaatacaagtctaatgaaaattctatttattctttgttttgagaggaagtactcaatgattttaaatttagattta

SEQ ID NO: 475888 - DNA, 201 bp, Homo sapiens
acacccaagccgtcagtgggatctatctctcttggactgccacggcaacaggaatctgccaaatcaggtcagtgagttaatacagtcataatgcatctacrtttgtagcatcacagccagtaatttagtactggattgtttcatgtttctctgcctttccacagctactttgccctacatcaagcaggaagaattttctcc

SEQ ID NO: 475889 - DNA, 201 bp, Homo sapiens
tgacatatctaggaataatttttaacaagcaagggatggaactatctgacaaaaacaagatttctcaactagaaaactcattattataaaatatcatcacstgtttattcataaatttaatacaagtctaatgaaaattctatttattctttgttttgagaggaagtactcaatgattttaaatttagatttacttggaaa

SEQ ID NO: 475890 - DNA, 201 bp, Homo sapiens
attctctgaagtagtgttatcagctgtttttaagaagtaccctaagagtgattggcgagagagaaaaaatttttgaagactgatgtttgctatgctaagcrgaagtttgaaataagcatcagcttgaaagctgtggtttgaaagggagttgaatatttcaaccccacaaatagtatttgtgacaaatatgtatacaggctt

SEQ ID NO: 475891 - DNA, 201 bp, Homo sapiens
ttatttagacaagggtaacaattacagaagaagtaaccgcaagttactggagagagaaatcttgtatctttttttctttttctgttaacatccggtggaaktttatttatttgttttaatatttatagtacccagttgcttggccttgctttaagcacacctgttaatggaaatcaagattaattgtatatatggatatag

SEQ ID NO: 475892 - DNA, 201 bp, Homo sapiens
ctttgttaaaacttgtcctccctcctcgcactgatttgtcagagttgtaataaataataatctgtctgaatatgaagtttcaagagataatgaccagaagwtgcagcagtcactgtactcttgccacaaatcagaactttcagtgagttatgtacccagattgagtggtcataacataccacccatttaattacacttggc

SEQ ID NO: 475893 - DNA, 201 bp, Homo sapiens
ttagagggtagataggctgggcgcggtggttcacgcctatctactatctaatcccagtactttgggaggccgaggcaggcggatcacaaggtcaggagatsgagaccatcctggctaacacggtgaaaccctgtctctactaaaaataccaaaaaattagccgggcatggtggcgggcgcctgtagtcccagctactcggg

SEQ ID NO: 475894 - DNA, 201 bp, Homo sapiens
gagtagtcatgagctatgctttctcttccaatacaaagaaataaagtatgtgcgtacatagtgccagatgctgcaaaatgcttgatagcattcttatttcmctctcctttacacgtctggcatattatgattcacattttgtttttggggttaagaaattaataatgtacgttgtccatatcagaagtctacacacctctg

SEQ ID NO: 475895 - DNA, 201 bp, Homo sapiens
tatggatgcagattttggaataagaaaataagtgaaaagaaaatctaatttcttgatctgattgaagtaagagaggaagctagatagatatcttttttttwtaaaaaaaaattatactttaagagaattttaggtgcattattcttagtttgtgacaaaaatgtgatatttctactttatatgttttattaagtataagca

SEQ ID NO: 475896 - DNA, 201 bp, Homo sapiens
ggcaaagaggctgggcgtggtggctcacgcctgtaatcccaacacttttgggaggccgaggtgggtggatcacttgaccgcaggagttccaagaccagctygggcaacatagcgaaaccctgtctctccaaaaaaaaacaaaaaaaaattagctccgcatggtgccatgcgcctgtggttgggaggctgaggtggaaggat

SEQ ID NO: 475897 - DNA, 201 bp, Homo sapiens
gtttgaaatgtattttgctttgattatgaagtggggaacttgcagaggtttttaaatagaggaatgctgtgattagatttgtgtctttggaagttaactgrtagcaattgtggaggtcagtttagacagaataaaggctggaggcagagggcccagcatgtatgcagtggcccaagcaaggaggggatggattcagagttg

SEQ ID NO: 475898 - DNA, 201 bp, Homo sapiens
gagtctcgctctgtcgcttaagctggagtccagtgttgtgatctcggctcactgcaacctctgcctcctgggttcaagcgattctcctgcctcagcttccygagtaggtgggactgcaggcatgtgccaccatccccagctaatttttgtatttttagtagagatggggttctgccatattggtcaggctggtcttgaact

SEQ ID NO: 475899 - DNA, 201 bp, Homo sapiens
gtatacattcttacttatttccttaaggtagatttcttttagtataattaattgtagaccaggttgatttttaaggtacggtgggtatttccagattgtcytgcaaaagagtagggccagttcttaactcctgacagcagtgtataaaggtacccacttcttggctgggcgcggtggctcacgcctgtaatcccagcactt

SEQ ID NO: 475900 - DNA, 201 bp, Homo sapiens
gtgttaggtttctctcctagcattttcatagcacattatacttctcctttcatagcttattttactacataatctgtacctacattattgtgtaagtttcrtgcagaaagggacttaatttgttaatcttacctgcaagcctagcttatgcctagcacacagtaggcatcaataaacacatttgaatgagtgaaaatattt

SEQ ID NO: 475901 - DNA, 201 bp, Homo sapiens
gtgtaagtttcgtgcagaaagggacttaatttgttaatcttacctgcaagcctagcttatgcctagcacacagtaggcatcaataaacacatttgaatgartgaaaatattttcatgaatcatctacacatattttattgtaggttaagacaagttttaatattattatttttataagatagactatgaaactaacctatt

SEQ ID NO: 475902 - DNA, 201 bp, Homo sapiens
cttacctgcaagcctagcttatgcctagcacacagtaggcatcaataaacacatttgaatgagtgaaaatattttcatgaatcatctacacatattttatwgtaggttaagacaagttttaatattattatttttataagatagactatgaaactaacctatttactgtacattgtataccatgtgctccgtctgagcaag

SEQ ID NO: 475903 - DNA, 201 bp, Homo sapiens
gcaacaataatgtgaagcttcttaggaggttatttacaactctttcgtttcaatttgcatgtttcatttaatacattttccctatttttatggtatccatatttcccgttttccctttatcacaagtatatttcaaagctaagcaatggtttccaatcctgtatcttctttcctcttgataaagaagtgttgggattttag

SEQ ID NO: 475904 - DNA, 201 bp, Homo sapiens
agatcaccacagtgaactgtaactgccatgggccagacatagacctgagatagaaaagtagccagatgactttgctacctgtaatgtttgtttctttcccwttagggcacaccaataaagtttgacaacaactcaggtcaatctgccatcaaacacaatgtcaaatccttaatcacggggcctagcaaactatcccgtgga

SEQ ID NO: 475905 - DNA, 201 bp, Homo sapiens
ggacgtgccacaatgcccggctaatttttaaatttattttttgtagagatgaagtctcactatgttgcccagactagtcttgaatctgtggggtcaagcartctgcccaccttggcctccccaaagtgttgggattacagatgtgagccatagcacccagcctggatttgcttattatagacattttatataaatggaatc

SEQ ID NO: 475906 - DNA, 201 bp, Homo sapiens
gtggcgcgctcctgtagtcccagctacttgggaggctgagacaggagaatcgcttgaacccaggaggtagagactgcagtgagccaagatcacgccactgyactccagcctgggtgacagcgagactctatctcaaaaaaaaaaaaaaaaaaattgaggatgatggctaataagtgtttgaatatatatttattggtggga

SEQ ID NO: 475907 - DNA, 201 bp, Homo sapiens
ccttttgtgcctgacctttttttttttttttaaacttagtataatgttttctatgtttgtctgtgttctagcatctctccttttttaaggctgaatgataytcagttgtatggttatactacattttgtttatttgttcattagttgatggacattttggttgtttttattttttggctgttgtgaataatgcacccatga

SEQ ID NO: 475908 - DNA, 201 bp, Homo sapiens
gactggatgccttttatttcttttcttttttttcttttctttttttttttttttgtttgattgctcttgctagtacttctagtactatgttgattagaagygtttgccactgcttctaatcaacatagtactagatgggaaaaggatccgatccttacctttcatggtatcttagtggaaaatctttcagtatttccctat

SEQ ID NO: 475909 - DNA, 201 bp, Homo sapiens
ttttaagtaaagctagaacttccaagtaaagacacttccaagcaatctaaatacagaatccttctagattttttttccagcctttgaagttgtctagtccrcacctgattcaacttctgtatcaactctttccaaagctgttagttttcagagaaaccactcttcattcttccttgatttacaaattatgtcattaagtta

SEQ ID NO: 475910 - DNA, 201 bp, Homo sapiens
gattagaagcgtttgccactgcttctaatcaacatagtactagatgggaaaaggatccgatccttacctttcatggtatcttagtggaaaatctttcagtwtttccctattgattatgatgttagttgtggaattttcacaaatggcctttattatgttaaggaactttccttcttttcctaaactgttgagttttttaag

SEQ ID NO: 475911 - DNA, 201 bp, Homo sapiens
cgtagaatttattatgtttacctagtgtttcttaggtactcagtaaatacttgttgaatgaatgatggaaagaaagaaagaaaagaatactatatccttcytcccgtagactttttagcccagagacatacattgagacaaggtgttttggtgaatactgaaattaactaaaccaaatccttgtgctgagtatttgtaatc

SEQ ID NO: 475912 - DNA, 201 bp, Homo sapiens
atttcaaattgttcttttgtagcactagaggtttagttttatttgtttgctgtttttcactttttttattatctaggacagaggttgccaaactaaggctrgttggtactgaccatatcctgtctgtcctgtttttgtagagccctcaagttaagaatgatttttacatttacatattaaaataaattttattatgtatat

SEQ ID NO: 475913 - DNA, 201 bp, Homo sapiens
gacatacattgagacaaggtgttttggtgaatactgaaattaactaaaccaaatccttgtgctgagtatttgtaatccatggcttacaaatttgctctctktaatctgcccatactttgaggttactgatgtgaagtacagtctttaatatccttctttaaagaatgtcttaaaaagtaatgatgatagtaaacattttta

SEQ ID NO: 475914 - DNA, 201 bp, Homo sapiens
caaaatattgatagattaatcttagcaagggaagatttttgctaggtaacactttggtctggattattttacttttgaaaatagcaactgggtgctgtggstcacacctgtaatcccagagctttgggagactgagatgggggcattatttgagtccaggaagttgaggctgcagtgagctatgatcgtgccattgtgtcc

SEQ ID NO: 475915 - DNA, 201 bp, Homo sapiens
cccagatatctttatgaggtggtgatttcattccttttgagtatacaaccagaagagggattgctgggtctatagtagttgtatttttaatttctttgggrccttccatactgttttccataatggctataacaatctacattcccaccaacaaaatactagggttcccttttctccataccctcgccaacatttgttatc

SEQ ID NO: 475916 - DNA, 201 bp, Homo sapiens
tagattttggaaatcatatacacactagagtttgaggaaaaatcagaaagatgaacttatatgatttgtagtagtacttcttgttggtgctgttttatttmtggaatcaagattgaaatttatcagagaaatggaaatgacagtaaatgatggctgatgttttgtttcaagttactgctgcggttttattgcatctttatt

SEQ ID NO: 475917 - DNA, 201 bp, Homo sapiens
gtggtgatttcattccttttgagtatacaaccagaagagggattgctgggtctatagtagttgtatttttaatttctttgggaccttccatactgttttcyataatggctataacaatctacattcccaccaacaaaatactagggttcccttttctccataccctcgccaacatttgttatcttttggagaatagccatc

SEQ ID NO: 475918 - DNA, 201 bp, Homo sapiens
ccactgcacccagcctaaaacatgtcttaaagcccataaaacttcagaaaaccctcattaacctggaatacctttgaacatggtggatcagaattgaaaawatgctacaggtgtgaagaacttagacttcagaaacttttcctgggattagttttgaaataagattttcttttcttaaagtatcttctcacaggtatgaaa

SEQ ID NO: 475919 - DNA, 201 bp, Homo sapiens
ggaccttccatactgttttccataatggctataacaatctacattcccaccaacaaaatactagggttcccttttctccataccctcgccaacatttgttrtcttttggagaatagccatccttacaggtgtgaggtgagatctcattgtagttttaatttgcatttccattgtgattagtgatattgagcaccatttcat

SEQ ID NO: 475920 - DNA, 201 bp, Homo sapiens
ttcagaaaaccctcattaacctggaatacctttgaacatggtggatcagaattgaaaaaatgctacaggtgtgaagaacttagacttcagaaacttttccygggattagttttgaaataagattttcttttcttaaagtatcttctcacaggtatgaaacacctagcgatgctattgaggtgataagtcctgccagctcac

SEQ ID NO: 475921 - DNA, 201 bp, Homo sapiens
ctctacaaaaatacaaaaaaaaaattagccaggcatgatggcaggtgcctgtaatcccagctactcaggacactgaggcagaagaatcgcttgaacctggkcggaagaatcacttgaacccgagatcatgccattgcactgcagcctgggcgacagagcgagactccgtctcaaaaaaaaaaaaaaaaaaaaaagataaaa

SEQ ID NO: 475922 - DNA, 201 bp, Homo sapiens
accaagatttttcttcctttgccccacttacatgttccctcgggccatagaacagtatttagaaagccatacctattcttccatttgcagagaagatgacyacatgccagaaaaagtgggaacaatcaaggagaacccacccagactatcccacgccaaagagaaaggctgccacaatgtacctgagcaggagggtgggga

SEQ ID NO: 475923 - DNA, 201 bp, Homo sapiens
ctacaaaaatacaaaaaaaaaattagccaggcatgatggcaggtgcctgtaatcccagctactcaggacactgaggcagaagaatcgcttgaacctgggcrgaagaatcacttgaacccgagatcatgccattgcactgcagcctgggcgacagagcgagactccgtctcaaaaaaaaaaaaaaaaaaaaaagataaaaag

SEQ ID NO: 475924 - DNA, 201 bp, Homo sapiens
gtgatcctcctgcctcagtcttctgagtagctcagattacaggcgcatggcattgtgcctgacaaattttttatttttgtagagacagagttgctatattkcctggactggtctcaaactcccagcatcaagcgatcctcctgccttggccccctaaagtgatgggaaacgtgtgagccactacatccggcaaccagggca

SEQ ID NO: 475925 - DNA, 201 bp, Homo sapiens
taattttgtattttttagtagagatgggtttttctccatgttggtcaggctggtctcgaactcctgacctcagatgatccacacgccccggcctcccaaastgctgggatgacaggtgtgagccaccgcacccagcataaatgtattgttttttaagtttcatgtttggattgtttaatgctagtgtatagaatacaactt

SEQ ID NO: 475926 - DNA, 201 bp, Homo sapiens
cctttgggtatatacccagtaatgggattgttgggttgagtggtagttctgcatttaggtctttgaggaatttccacagtgtcttccacagtggttgaacyaatttacactcccaccaacagtgtataagtgttccattttctccacagtcttgccaggatctgttattttttcactttttaatagccattctgactggtg

SEQ ID NO: 475927 - DNA, 201 bp, Homo sapiens
ggggccaggatgatgttttagaagcaatgttggatttctcctcaagagacttgtctttaagactgaatggtacctcataagtgaagtcatttctctttctwtgtagcaatagctgggagatttttatttcttgcttgtttttattattggttgaaaaatggtggctcttctggtttatattatcccaaatttaattattat

SEQ ID NO: 475928 - DNA, 201 bp, Homo sapiens
tttggttttgattggcacttactctttttttgttgttgttaaaacagagtcttgccctgttgcccaggctagagtgcaatggtgtgatcttagctcactgyaacctccacctcccaggttcaagtgattctcctgcctcagcctcctaagtagctaggattacaggctcctgcccccatatctggttaatttttgtatttt

SEQ ID NO: 475929 - DNA, 201 bp, Homo sapiens
tcctagggataacatctacttgattgtggtggataagctttttaatattttgctgggtttggtttgccagtattttgttgaggatttttgcattcatgttmatcaaggatattggccggaagttttctttttattgttgtgtctctgccaagttttggtatcaggatgatgctggcctcatagaatgagatagggaggagt

SEQ ID NO: 475930 - DNA, 201 bp, Homo sapiens
cctttttatgatttcccactttatacagaatagccgaagcctttattgatgtttacatgcttacccgcctggcccttgccccatactcttttcttagtaayatcccaccagaagaggttttggatgttcccttgttagcaatatctttaccccgctatgttgcccctgctgtcaggtggccccgtgttttgtcttttctgc

SEQ ID NO: 475931 - DNA, 201 bp, Homo sapiens
ccgaggcaggcagatcacgaggtcaggagatcgagaccatcctggctaacacagtgaaaccccatttctactaaaaaaaaaaaaagaaatacaaaaaattwgccaggcgtggtggccggcatctatctgtagttccagttactcgggaggctgaggcaggagaatggcgtgaacccgggaggcggagcttgcagtgagcca

SEQ ID NO: 475932 - DNA, 201 bp, Homo sapiens
cataaatatttgatttcttttatagccactgtataaccagccatcagataccaaggtgtaccatgagaacatcaagacgtaagtattgatcatctttggasttcttcaattaaagaccgtatattctataaagagatcatttttgttatctgctgacattattataatatattgtaggtatgttttagatttgtgtaattt

SEQ ID NO: 475933 - DNA, 201 bp, Homo sapiens
agcagggaatgcgtgggattactttgaagctctgattggcattagaagcagaaaagtattggggaaataagattagcatgtgttacccaactctaaggggwtactgaatttctttccttacgttctgctgagttgacatgtccccgtcgtatctttaggccataaaccgttttctgggttacacagctcacttgctaggca

SEQ ID NO: 475934 - DNA, 201 bp, Homo sapiens
tgatttaaaagtgtgtatacaaagcggcctttaggttaataataagaatgtgagagttaaaaatatgctgtagcaaccaaaacatgaaaaagtctactgayaagataaagacttgacttcaggaggtaacatccaaaatgttttgagaaaaagtgaagtaaaaaatgagtcagatatgtatttaaaatataaatgttggct

SEQ ID NO: 475935 - DNA, 201 bp, Homo sapiens
agatttttatgtccctcaatagattttcacactttgcttcaaataagtcctgtacagataagtctcgtatattcgtatatttcttatttcttttaaaaaawttagacccatgaatgggagtttgtttgtttattttattcaacaaatattgtagagaatcaaacaggtagtttttattctagtgagggaagacagaatata

SEQ ID NO: 475936 - DNA, 201 bp, Homo sapiens
gggtagcagctggagaagaagggcgaggagatttttcgctttatattctgcggtactttttcttaagtcctacatataatatttatttccaaaaagatcarccctcctcacgatgccacatgctggcttttccccttccacctggagcagttgcaggtgtatggatgaggagaaagctcctcaggtggttttaatgtgtgc

SEQ ID NO: 475937 - DNA, 201 bp, Homo sapiens
aagccttggttcctgttctgagaacagcattttcctatttgtttttctccagcagtgcaaagttcctttcccttttctgggttacactgcttctttttttwtttatttatttatttttggtaaacagatgggagagtctcactgtgttgcccaggctggcctcaaattcctatgctcaagcagtcctaccgcctcagcctg

SEQ ID NO: 475938 - DNA, 201 bp, Homo sapiens
tgatccgcctgccttagcgtccccacgtgctgggattacaggtgtgagccaccgcgccccctgcagttttggttatttcttgtcttctgctagctttgggrtttgtttgctcttggttgtgatgttagcttgttaacttgagatctttctaactttttgatgtggatatttagtgctataaatttccctgtcaacactgcc

SEQ ID NO: 475939 - DNA, 201 bp, Homo sapiens
cttggttcctgttctgagaacagcattttcctatttgtttttctccagcagtgcaaagttcctttcccttttctgggttacactgcttctttttttatttwtttatttatttttggtaaacagatgggagagtctcactgtgttgcccaggctggcctcaaattcctatgctcaagcagtcctaccgcctcagcctgctga

SEQ ID NO: 475940 - DNA, 201 bp, Homo sapiens
agagattctggtacgttgtatctttgttctcattagtttaaaaaaacttgctttctgcctttatttcattatgtactccaggagcaggttattgaatttcyatgtaattgtatggagtgatttttataagcaaaacacagaggagtttctctgtagttctagaaaaggatgtgatgcaataaatcttaaaaatggctgaca

SEQ ID NO: 475941 - DNA, 201 bp, Homo sapiens
aaccaagcagctcctcaccaacagaacaggatctgggagcgagagcctgccccactgctctcagcacagtacgagaccctgtcggatagtgatgactgaastgcacaaagtgaggggaacagggtgcaggagagggatctctagtttttgtggtttaatttttagtagcaggtcaaaaacctgccctcctgtgacttattc

SEQ ID NO: 475942 - DNA, 201 bp, Homo sapiens
cctagcacttttggaggcccaggcaggtggatcacctgaggtcaggaggcctagccaacatggtgaaaccccgtctctactaaaaatacaaaaattagccsgggtatggtggcgcatgcctataattccaattccagctgctcgggaggctgaggcaggagaattgcttgaacctgggaggcagaggttgcagtgagctga

SEQ ID NO: 475943 - DNA, 201 bp, Homo sapiens
tataattccaattccagctgctcgggaggctgaggcaggagaattgcttgaacctgggaggcagaggttgcagtgagctgatcacaccactgcactccagsctgggtgacaaagccagactctgtctcaaaaaaaaaaaaaatgataaatgggtgggagctaaacagtgtgtctatcttatattattcttaccaaatggta

SEQ ID NO: 475944 - DNA, 201 bp, Homo sapiens
atggatgcagattttggaataagaaaataagtgaaaagaaaatctaatttcttgatctgattgaagtaagagaggaagctagatagatatctttttttttwaaaaaaaaattatactttaagagaattttaggtgcattattcttagtttgtgacaaaaatgtgatatttctactttatatgttttattaagtataagcag

SEQ ID NO: 475945 - DNA, 201 bp, Homo sapiens
gactcaaaataggtaggaaaacccttgaggtttcacctggactaaggagccaagggtgagatggtgtctgatgttgaaggacatgcggagcctcaaggackcagcttctgccactgctgctgcccgggcagcactgtctgatgacgtgactcctggatccacggggcgcgcatgggtcaagtggcagtaacacagtggttt

SEQ ID NO: 475946 - DNA, 201 bp, Homo sapiens
gagctggcagtgtggtgagaaatgaggctgctgagggaagccagagccaggttgtatactgtcctggaggttgcataatgtttgggtttgcattttaagartttgcatttagcggggcaggtgcaatggctcacgcctgtaatcccagcactttggaaggccaaggagggcagatcacttgaggtcgggagtttgagaccc

SEQ ID NO: 475947 - DNA, 201 bp, Homo sapiens
acactggaatctctgtccaaatcatgttgcttattgttccctgaattcctttctgtccatagtcgtgcagtttgcctagtgctgaaccctccactgatgcrctgaaagccagacatgtcacttgctcatggtcgtactgatactaatggggaagggccagttttaaacgaaggcctttctaactccaaattgctagtgcct

SEQ ID NO: 475948 - DNA, 201 bp, Homo sapiens
ggattgcttgagcctgggaagttgaggctacagtgagctacgatcgcatcactgcactgcagcctaagccagagtgagatgtctcaagaaaaaaaaaaaawttttttttaaattgtctgggtgtggtggctcacgcctgtaatcccagcactttgcaaggccaagacgggttgatcacctgagatcaagagtttgaggcca

SEQ ID NO: 475949 - DNA, 201 bp, Homo sapiens
ttattgatgggctctctgagcaggaggtaagaaaataaatttaattcaagttaattcgttaattattaaagcattttaactctgtaggagctaagggtttwtttgtatgtaaatgtgggaacttaattgagtgctagagtttagactgtcaaagatttgagtgtctgttaaagggtttttaaacgaggcagtcacacgatc

SEQ ID NO: 475950 - DNA, 201 bp, Homo sapiens
gagctacgatcgcatcactgcactgcagcctaagccagagtgagatgtctcaagaaaaaaaaaaaaattttttttaaattgtctgggtgtggtggctcacrcctgtaatcccagcactttgcaaggccaagacgggttgatcacctgagatcaagagtttgaggccagcctgggcaagatggtgaaaccctgtctctacta

SEQ ID NO: 475951 - DNA, 201 bp, Homo sapiens
ttgatcacctgagatcaagagtttgaggccagcctgggcaagatggtgaaaccctgtctctactaaaaatataaacagctggtcatggtggcgtgcacctrtaatcccagctactcaggaggctgaagcatgagaatcatttgaacctgggaggcagaggttgcagtgagccaagattgtgccactgcattccagcctggg

SEQ ID NO: 475952 - DNA, 201 bp, Homo sapiens
tctgccttggcctccaaaagtgctgggattacaagcgtgagccactgtgcccagcaatttttcatttcttttgtagcagtataatcaagagctttaaaacrtaaccacttactctatattgcttttaaaattacctctaaagtacatgattgaaatgacattcagcccttggaatatgtagccattatttctacaatgacg

SEQ ID NO: 475953 - DNA, 201 bp, Homo sapiens
agtagagatggggttctgccatattggtcaggctggtcttgaactcctgacctcaagtgatccaccttcttcggcctcccaaagtgctgggattacaggcrtgagccaccacgcccagcctatacatagtctttcttttcccaagtttttttttttttagttgttgaaatatttgtacgcaagtgtgtttttgttttcgtt

SEQ ID NO: 475954 - DNA, 201 bp, Homo sapiens
gctctgacacatataagtagttaactagaaccgattttaaaaagactgcgaagagtctcatgtgattaatgtaatgataattacaattattagagaaatcktaacacagaacacagaactaaatggttaatgaaagatgacctgatgtttatttccctaaaacacatagattacaatgcttttggagcctcattaaatttc

SEQ ID NO: 475955 - DNA, 201 bp, Homo sapiens
cctggccatttttagctttttttccaagatagcttaggccaccttgaacacctttgcataacacattttggttatgcaaaaattgtgggccaaaagccagragttcctgctgagaggaaaaattgcttttttttttggcaggatagtatttgaaattttgttgttgcaagattttcctgttgagtaaatatgtgtgcgttt

SEQ ID NO: 475956 - DNA, 201 bp, Homo sapiens
gccaccacgcccagccgcctgactaattgttattattattattttaattttcttgtagacataggtctggcttcattgcccagactggtcttgaacgcctkgccttaggagatcctctgatcttgacttcccaaagtgctgggattacaggtgtgagccactgtggccagcctataagttttattttaaagttagattgaa

SEQ ID NO: 475957 - DNA, 201 bp, Homo sapiens
acagttgtcacatggatatattgcatagtagtgaagtctgtgcttttagtgtaccatcgcccaaatagtgtacattatacccattatacctcacccacccyctcgcaccctctcacctgtttgaatctctagtgtctcttattccactctctatatccatgtgtccacattatttagctcccacttataagtgagaacatg

SEQ ID NO: 475958 - DNA, 201 bp, Homo sapiens
agctaagtgttggttttgatgaataggtaaaagactttggagcgctattaagaagggaaatttttcttaaaattaattagttacttccatattgtctggtraaaacaagtaagaggacaggtagagttgctatgaggcaagattgacattagcctggatcagaatgaacagtcgagattggagggtaaaaacttttcagat

SEQ ID NO: 475959 - DNA, 201 bp, Homo sapiens
catcttaaccagattgttggtaaatattctagctaatgttctgtggcagaacctttttcctctgggttgatatgcaagtattaatcagaacctcctcgtgytctctcagcactcacttgtactaactatccccccagtcttatcagtcttttcctcagtccccttgatagagagactttgggtagaccatagtctggttta

SEQ ID NO: 475960 - DNA, 201 bp, Homo sapiens
cagacggggtttatccatgttggccaggctggtctcgaactcctgacctcaggtgatccacccacctcagcatcccaaagtgttgggattacaggcgtgarccactgtatccggccaccttttcaaaaaatattgttattactattttctgtctccagtcttcaacagtttaatctattatttacagctcctcaagtgtca

SEQ ID NO: 475961 - DNA, 201 bp, Homo sapiens
tactctggccattactatcctggtctctctgcctcctgatgggagtcagctcctcctgtcaagttggcctccacagtggctttcacatgtctaccttccaytctgctaatttctgagcagttaccacattcttgctcaacagtaggtaccagtcacctggattgcttattaaatagttgaattatggagccccaggaatgt

SEQ ID NO: 475962 - DNA, 201 bp, Homo sapiens
aggaaattgtcttcatctgaccatttttgatcaataaggtaatcttaacaattcagtcaaataactgctcaattaaatatctatcaaatgaatgactcctrttccacacacttcatgataacagggctctgctgtttcaggctcaatttatttaccttgtcacctggcccataagtaagaagactgtcatccatggccatt

SEQ ID NO: 475963 - DNA, 201 bp, Homo sapiens
cagaaagccttggttcctgttctgagaacagcattttcctatttgtttttctccagcagtgcaaagttcctttcccttttctgggttacactgcttctttwtttatttatttatttatttttggtaaacagatgggagagtctcactgtgttgcccaggctggcctcaaattcctatgctcaagcagtcctaccgcctcag

SEQ ID NO: 475964 - DNA, 201 bp, Homo sapiens
ttggtcagcacttctggtaggctagctctgccctcattagcttttaagttattgctttgaagatttttcctccaattttacatttctctggttgtttcackgggaatttgggagaggtgtgagttaaatgaatttagaccatcatctcatgccaccagatttaccattgtttcttaattgtttgtatacttattccattta

SEQ ID NO: 475965 - DNA, 201 bp, Homo sapiens
agttatctgtggattaagatggtctctgggctgggtgcggtggctcacgcctgtaatcccagcactttgggaggccaaggcgggcggatcacctgaggttsggaattcgagatcagcctgaccaatatggtgaaaccccatctcctaaaaatacaaaaaattagcctggtgtggtggtgggtgcctgtagtcccagctact

SEQ ID NO: 475966 - DNA, 201 bp, Homo sapiens
gatctgggttaaagatatagaatttgctatatagaaaaaaggttagaatacttctttttaaaaacagaattgaattgcaaggttaagattttcaaaatctrtgtatcaactcccttgattttaccctggtggatacagagatccaactaatttgaaaatcactttacttctctgctatgtaaccaagctctagtcaggagg

SEQ ID NO: 475967 - DNA, 201 bp, Homo sapiens
tagtcccagctacttgggagactgaggtaggagaatcccttgaatctgggaggcggaggttgcagtgagccaagatcgcgccactgcactccagcctgggygcgacagagagagactctgtctccaaaaaaaaaggtctctgtgtggtgggtcctggtattgttctaggtcacttgccaagtgctgtgtgtattcagtggg

SEQ ID NO: 475968 - DNA, 201 bp, Homo sapiens
gggcatgatggcgtgtgcctgtaatcccaggtactcaggaggctgaggcaggagaattgcttgaacccgagaggcggaggttgctgtgagctgagatcacrccactgcactccagcctggaaacagagtgagactccgtctcaaaatacatacatacacagacacacacaataaaataaaataatcgtaagccataaaaaa

SEQ ID NO: 475969 - DNA, 201 bp, Homo sapiens
gaactctagccccagagtgctctgcccaattgtacctatgtgactctaggtgggtcctttcacttggtgagccttggtttccacattcatgagagtggggwcagtgatacttaggttgcatggttaataagaactgggtatgtgtgtaaagtccctggagtgcagagtcaggcacagagagtgcccaataaatggtagcca

SEQ ID NO: 475970 - DNA, 201 bp, Homo sapiens
tttaaaagagacagatattcttctcattgtaattttatacctgaggaagatacctctaagggaatatatttttttcttttagtttgggttaaacatttttygggccatgtagccagtggttcttctcacatggaactctgtcataacttgattttatttttttgttaaaatttctaaactatttaacaagcttttatttat

SEQ ID NO: 475971 - DNA, 201 bp, Homo sapiens
ctgtctgtcctgtttttgtagagccctcaagttaagaatgatttttacatttacatattaaaataaattttattatgtatatttgaggtttacatggtgtgtgttatgggatacacatagtttagccagtgaacatatctgtcatctcacatactttgttttggtgacgaatagctaaaatctacccatttagcaaaaatc

SEQ ID NO: 475972 - DNA, 201 bp, Homo sapiens
agtgaatattggaagttgtaaccagatttaggatgttgaatacataaacagtgatgagtaacagtggatacaaaagtcacaaattactgtaaacttcttakaatatagtgatttattttagtttctcaatgatcatttctgttccatttatcaagtttccaatctcctaagtgtactagaacccaggtagctgcagtttcc

SEQ ID NO: 475973 - DNA, 201 bp, Homo sapiens
cctgtctgtcctgtttttgtagagccctcaagttaagaatgatttttacatttacatattaaaataaattttattatgtatatttgaggtttacatggtgtgtgttatgggatacacatagtttagccagtgaacatatctgtcatctcacatactttgttttggtgacgaatagctaaaatctacccatttagcaaaaat

SEQ ID NO: 475974 - DNA, 201 bp, Homo sapiens
tggaagttttcaaatacatacaaaagtagagagaacaagtataatacacctctaggtatccatcacccaattttggtaatcctcagtgtatgacgagtttygtttcattttcatccccgcttgccccgacccccaaactggataattttgaagcaaatctcggacttagtcattagacgcagctggataaccttaaggata

SEQ ID NO: 475975 - DNA, 201 bp, Homo sapiens
tatgtgtgcgtttatttaatatgagaggatttaaaaaggaacttaaatagatcaatttcattttgcaatattgtattacctgtttgcaatatataagaggmtagttctgggtttatctgtataattcagttagaagtgctgttgtcttttatgacagtgacatataattattactatattattcccatcctaaaacattat

SEQ ID NO: 475976 - DNA, 201 bp, Homo sapiens
ggactctccccaagagagcagccactgggtctcccatacccagcaacgagaggtgtgtgtctttgcatttcagatttcgtagaatttattatgtttacctrgtgtttcttaggtactcagtaaatacttgttgaatgaatgatggaaagaaagaaagaaaagaatactatatccttcctcccgtagactttttagcccaga

SEQ ID NO: 475977 - DNA, 201 bp, Homo sapiens
atgatcaaacttgaaatggatgaggagttgcttcttagggatgagcaaagaaagtggtttcttgagattgaatctgcccctgaagatgctgtgaacatggytgaaatgacaacaaaggatttagaatactacattacataaacccagttaataaagaagggtttgagggatcaactccaattttgaaagttctactgtggc

SEQ ID NO: 475978 - DNA, 201 bp, Homo sapiens
tgggagtcagtttatctttgctgagcctatgttttctctcagtaaatggggttagtaatacttgtctcatgagaattttgtgaataacagcttagtcgatraaaagtaattaacaacgcagagctcatattaaatgtcccataggtggtagctaagattgtcgactgtggtcagtcagtttagcttaggtaaagagccttt

SEQ ID NO: 475979 - DNA, 201 bp, Homo sapiens
gcaatgtatgttgttctttttctttaattttactttcagaataccagagattttccttggaagtaatatttaattaaaaaatttctttatttcattggatyctcaaaaataattgttttatttcttacagagtgttcctgattgtgttttgtattactatttaaccaagaaaaatgagaattataaagccctcgtcagaag

SEQ ID NO: 475980 - DNA, 201 bp, Homo sapiens
gcatggtccatccatgttatggtatgaaaggatttttttcttttttaaagttgaataatatttatacacacacacacacacacacacacacacacacacayacatacatacatacatatatatgtatacacacacacatcacattttctttctttcttttttttttagacagagtctcactctgtcacccaagctggagtg

SEQ ID NO: 475981 - DNA, 201 bp, Homo sapiens
ggcctttcagaaataagtggaaatgtttttgattctctttcaggctcagttagctctagaggccattcttttgctgatcctgccagtaatcttgggctggwagacattatcaggaaggctctcatgggaagctttgatgacaaagttgaggatcatggagttgtcatgtcccagcctatgggagtagtgcctggtactgcc

SEQ ID NO: 475982 - DNA, 201 bp, Homo sapiens
tagacatcatgaaaaaaaaaatgatttctcatgctccagaatgcaatgtgcagttcttttgatctctgagtatccactagcttaattataatttgtttacktcatatctaccgcattgctgaggcttttagagagagagttagtgttgtgtagacaaaagacttcttttaacctgagattaggaaaatctgcaatatagat

SEQ ID NO: 475983 - DNA, 201 bp, Homo sapiens
gactaagtgcattttagtgcattttttttttttttttccagatttggagtctcactctgtcaccgaggctggagtgcagtggtgcgatcttggctcactgmaacctctgtctcccaggttcaagtgattctcctgcaacagcctcccgagtagctgggactataggcactttaagtgcttttaatgtattcataaagttgt

SEQ ID NO: 475984 - DNA, 201 bp, Homo sapiens
tttaatagatgatactaaatttgctaagaagtaacaccattttacattcctactggcagcttatgtgagtaccggtttgtgcacatttttgcctttgcttsatatcgttttttcagttggatatgaaatagtcttctctgtggtttggaaggaggctgagcttattttcatttgtttatgggttatttgggttccttatgt

SEQ ID NO: 475985 - DNA, 201 bp, Homo sapiens
ccaacatggcaaaaccccacctctactaaaaatacaaaaaattagctgagtgtggtggcgggtgcctgtaatcccagctactctacttgggagactgaggyaggagaatcacctgaacccgggaggcagaggttgcagtgagctgagattgtgccactgcactccagcctgggcaaaaagagtgagactccatctcaaaaa

SEQ ID NO: 475986 - DNA, 201 bp, Homo sapiens
ttgaacccgagaggcggaggttgctgtgagctgagatcacaccactgcactccagcctggaaacagagtgagactccgtctcaaaatacatacatacacasacacacacaataaaataaaataatcgtaagccataaaaaaagagtaggaaaaaaggtgtaatcatagcactttgggagggtaagttgggtggatcacttg

SEQ ID NO: 475987 - DNA, 201 bp, Homo sapiens
aaaaatagcctgggcaacagagtgagaccctgtctcaaaaaaaaaaaatacttccattttatcttcacttaatgggtgagaaataaaggttgagatcatgraaaataaaaagattaattttattataggaattttttgagactttagtttggtatatatgattatcacatcttaattaacttgaatgtttgcttaaatata

SEQ ID NO: 475988 - DNA, 201 bp, Homo sapiens
cccaggtgaatgacagcatcagtgctgagacagcagagcagatggatgtagatcagcaggagcacagtgctgaagagggttctgtttgtgatcccccaccygctaccaaagctgactctgtggacgttgaagtgagggtgccagaaaaccatgcatctaaagttgaaggtgataataccaaagaaagagacttggatagag

SEQ ID NO: 475989 - DNA, 201 bp, Homo sapiens
tcccaaattctgatgcatcactaagacatttcatttatgtctttatgtgctcagagtcacctcttagggtttccgttacttaaaaaaggtttttgaaaacstacccagacattataatatgaacagaaataaaatggaagaaaatttttacccaaagtgtcaccctcctgggatgtccattttttatttgtttgcacctag

SEQ ID NO: 475990 - DNA, 201 bp, Homo sapiens
ggcatcaataattatgactttctagaagttttccctaactagttccaccatttgaacatgaacatgtaaccttcaaatctcaatcgtaacatttaaattgttattaataggtgacacagcatattacttaaaagtatatactcaatagtattttatgtttcttctcttaacttggttaaaaagttccattcagaaaagtaa

SEQ ID NO: 475991 - DNA, 201 bp, Homo sapiens
ttggagagtagtagtataggtaattctaatctttgggattagtatgtaaacctgcatcagatttgcttctctaattatatcctaattatattgaaatttayattccttgtgtgcaccctggtgaggcagtgatggaaggctgaacatggcactgtgcaaggagcaacaggcccgggatttaaaaatgcctacaaagattca

SEQ ID NO: 475992 - DNA, 201 bp, Homo sapiens
ttcgaaaacaaagagaacagcaagaaagatttcagcggtgagtagtttgatgtttaatgactgtgatatttttcttcaaatatttattgtttctttttttwaaaaatttttttagtatgtattgatcattcttgggtgtttctcggagagggggatttggcagggtcataggacaatagtggagggaaggtcagcagataa

SEQ ID NO: 475993 - DNA, 201 bp, Homo sapiens
taaaagtcgattcttacattgcttgagactgggaggcggaggttgcagtgagccgagattgctccactgcactccagcctgggtgatagagcaaatctctrtctcaaaaaaaaaaacaaaaagaaaacaaaaaaaacaaaagaaaagaaaagaaaaaaaaaggttgattcttaaaatttttccaggttttcttgttgcttt

SEQ ID NO: 475994 - DNA, 201 bp, Homo sapiens
tgtcttttcttctctatttagaaaatggtatcataattcacttacttctctaaaagcattaattctcaatttcacgtagttcactggatttctgtttttttgttttgttttgtttttgtctgttgcccaggttggagtgcagtggtgcgatctcggctcactgcaacctccacctcctgggttcaagcgattctcccgcct

SEQ ID NO: 475995 - DNA, 201 bp, Homo sapiens
aattagccaggcatagtggcgggcgcctgtagtcccagccactcggggggctgaggcaggagagtggcgtgaacctgggaggcagagcttgcagtgagccragatcgcaccgctgcactccagcctgggcggcagagtgagactccgtcttaaaaataaattaattaataaattaattaatttcacattctggctgagcac

SEQ ID NO: 475996 - DNA, 201 bp, Homo sapiens
accatcattctgagcaaactgtcgcaaggacagaaaaccaaacactgcatgttcccactcatagatgggaattgaacaatgagaacacttggacacagggyggggaacatcacacaccggggcctgtcagggggtggggcatgggggagggatagcattaggagaaatacgtaatgtaagtgatgagttaattggtgcagc

SEQ ID NO: 475997 - DNA, 201 bp, Homo sapiens
aagctggaaaccatcattctgagcaaactgtcgcaaggacagaaaaccaaacactgcatgttcccactcatagatgggaattgaacaatgagaacacttgkacacagggtggggaacatcacacaccggggcctgtcagggggtggggcatgggggagggatagcattaggagaaatacgtaatgtaagtgatgagttaat

SEQ ID NO: 475998 - DNA, 201 bp, Homo sapiens
acttataggaaattgtcttcatctgaccatttttgatcaataaggtaatcttaacaattcagtcaaataactgctcaattaaatatctatcaaatgaatgdctcctgttccacacacttcatgataacagggctctgctgtttcaggctcaatttatttaccttgtcacctggcccataagtaagaagactgtcatccatg

SEQ ID NO: 475999 - DNA, 201 bp, Homo sapiens
ccccagtcagacaatgattccagtgccacgtgcagcgctgatgaggatgtggatggagagccagagaggcagaggtgaggctcgttccataagtcctcccygtgcttactctgctggttggtgactgaatcacagggtggtgctggctgcagacatgtctcctatgtaaatattggcacgttataggtagtctgtacaatt

SEQ ID NO: 476000 - DNA, 201 bp, Homo sapiens
gccctctcttttcctgctctgccccccacccaattactgtggattccaatgttgtggtagagaacatggactttgcgtcttttaacagacacagacagtgwcccatcactggctgatgaagggcacataatttagcctctttgtgcttcctttactctagaatatttcagagctgttaaaaggattaagtgaaattatgca

SEQ ID NO: 476001 - DNA, 201 bp, Homo sapiens
catgtgcccggagacagtgtaagtctcagcagtgggttgggaagcctggatcctgggcattttaggtggacaatgtgggcaagtcatgtggtctctccaascctctgtctgtaaaatgggaggtgacccccgttcctacctcatgaggctatcgtgaagactaagtgaaggaaaatgtggaaagggtttagtacagtgact

SEQ ID NO: 476002 - DNA, 201 bp, Homo sapiens
ctgttgaacagttactcaaatggatttgcccccaggagctgctgggtgatcaagctgcaacttgcataacgggagcaagaaggtgggaggctctaatcctyggcaagctcggcactgcctctcctgttaggtgaatgggcagatctgcttcccaggctgcggctgtctgcgtacggggatgtgtcccttgcctcctgtggg

SEQ ID NO: 476003 - DNA, 201 bp, Homo sapiens
caagtgaaacacatttcattagacagtggaatagacttatgtcaattttcttttctctcttattttacacagtctgatttcctgaagacaggaggcgggartaagctaatcaggccctgagttagctgtttccaagaagcttagagtgtcccacttacctacgggttgcagggcccgcattgccagtagggctggctttta

SEQ ID NO: 476004 - DNA, 201 bp, Homo sapiens
acagctctcctcccagggtgcctttctgcaaccttattctatgaatagatgagagctcttatctcccctctgcctgaccctcaggacacagaagggttggrgggggggagggccctgaagtcggctaattagagatggctgggaggattactagggccttgctctggcagctgtgcccacctctaaattcaatatccagaa

SEQ ID NO: 476005 - DNA, 201 bp, Homo sapiens
agctgtttccaagaagcttagagtgtcccacttacctacgggttgcagggcccgcattgccagtagggctggcttttagggatgctgctgttggtgtgtgytgtacttgttttctaggattgggacaagcttccttgagctcctgactttagagaccaggtttgggaactgatgggtgcagcaaatgcaaacagacagcaa

SEQ ID NO: 476006 - DNA, 201 bp, Homo sapiens; identical to SEQ ID NO: 370804

SEQ ID NO: 476007 - DNA, 201 bp, Homo sapiens
gatgctgctgttggtgtgtgctgtacttgttttctaggattgggacaagcttccttgagctcctgactttagagaccaggtttgggaactgatgggtgcarcaaatgcaaacagacagcaaacaggccaaagaggagattcattcactgaagagggccctggtacagtactgtcgaggttttgcggtggcctggacacggc

SEQ ID NO: 476008 - DNA, 201 bp, Homo sapiens
ggaattccttgtgtattctagatattagtcagttttagacactgcaagcatcttttcccattctgtcatttggtcctactttttgatcacttttgtatccrcctttctctcccaccttcagctccagggggatctcctgctcagtctcatctactcatgagactcctatacccccttgccagtgatggatttaggaataca

SEQ ID NO: 476009 - DNA, 201 bp, Homo sapiens
atgctgctgttggtgtgtgctgtacttgttttctaggattgggacaagcttccttgagctcctgactttagagaccaggtttgggaactgatgggtgcagmaaatgcaaacagacagcaaacaggccaaagaggagattcattcactgaagagggccctggtacagtactgtcgaggttttgcggtggcctggacacggct

SEQ ID NO: 476010 - DNA, 201 bp, Homo sapiens
cttacctctggcaccaaacagtgatcgtgatctgccagatgatcatagtgtcttttttctccgaaaagcttaactcagtcctcatgcttggttgctgtgcrcttccaagctgggccaatgcgggaggagacagtggtgactcctgtacactggggctgtggttgctgcacccacccactccagccgcagaactgggagggg

SEQ ID NO: 476011 - DNA, 201 bp, Homo sapiens
gcccagctgtgacggcagggccagtcacacaagacgtctcttgtgaggtcaggctggcactggtggtatccgtactgcgactccctgtatgtctactttcrgcatccctggagaagaccaacgcacatacgctgctgcgatgaaggtcatgggcatttcctgatgcaaaagatttgaaacactctgagactttagcttttg

SEQ ID NO: 476012 - DNA, 201 bp, Homo sapiens
gccaactgtcgcctccaagcaaacacaacaagcaaactccttacctctggcaccaaacagtgatcgtgatctgccagatgatcatagtgtcttttttctcygaaaagcttaactcagtcctcatgcttggttgctgtgcacttccaagctgggccaatgcgggaggagacagtggtgactcctgtacactggggctgtggt

SEQ ID NO: 476013 - DNA, 201 bp, Homo sapiens
cagctctaagaagccctggtcttctgggaaaccctggagggagcaaggcaaaaggaaggctctgaacttcacacctgattttccaccagaacatttctgcycttttctgtgtgacaatcctttgaatagaaagttctacagccaaacatttgatttaggaagagcaggtaagtgagctgctcttcatgggtaaagctggca

SEQ ID NO: 476014 - DNA, 201 bp, Homo sapiens
gacccttgcccttgtaagccatccctctccagttatcctaatttggctatgctattcatcatagtccgctcaggatgctataacaaatatgctgcagcctygggcttaaacaatggatgtttatttttcacatttctggaggctggaagtgtggggtcaaggtgccagcagacttggtgtctgggagcgcctgcttctggt

SEQ ID NO: 476015 - DNA, 201 bp, Homo sapiens; identical to SEQ ID NO: 231078

SEQ ID NO: 476016 - DNA, 201 bp, Homo sapiens; identical to SEQ ID NO: 232096

SEQ ID NO: 476017 - DNA, 201 bp, Homo sapiens; identical to SEQ ID NO: 231090

SEQ ID NO: 476018 - DNA, 201 bp, Homo sapiens; identical to SEQ ID NO: 232298

SEQ ID NO: 476019 - DNA, 201 bp, Homo sapiens; identical to SEQ ID NO: 231094

SEQ ID NO: 476020 - DNA, 201 bp, Homo sapiens; identical to SEQ ID NO: 232300

SEQ ID NO: 476021 - DNA, 201 bp, Homo sapiens
ctacttatttttggggtcagcctgtcctaggaatggatctcacttcttttgcattctctctgttttccctcttggttgtgacagaaacttggagctaggcyttaagttaggggtgtgcatgtggcatgcgtgtggtgtgtatggcatgtgtggcgtgcatgcttgtgtgtggtatgtgagatacatgtgtgcatgtgtgtg

SEQ ID NO: 476022 - DNA, 201 bp, Homo sapiens
atccttgacaaccactgatcttttaaatgtctctatagttttgccttttccaggattttcagactggctgctttcacttagcaatgtgcatgtgggaaccstggctctttccggcctctgtgagaacaacccgtttgtacccaaggagctgtgagcatgctgcctcccaccgtgtcttgcactggtgcccaggggtgtgcg

SEQ ID NO: 476023 - DNA, 201 bp, Homo sapiens; identical to SEQ ID NO: 232301

SEQ ID NO: 476024 - DNA, 201 bp, Homo sapiens; identical to SEQ ID NO: 230834

SEQ ID NO: 476025 - DNA, 201 bp, Homo sapiens
catttaaattgtattttggatcgacaggctttgatggactagccagggaaccaaatcactaattccatgttctaaatatctgacgtaattctacttatttktggggtcagcctgtcctaggaatggatctcacttcttttgcattctctctgttttccctcttggttgtgacagaaacttggagctaggccttaagttagg

SEQ ID NO: 476026 - DNA, 201 bp, Homo sapiens; identical to SEQ ID NO: 232302

SEQ ID NO: 476027 - DNA, 201 bp, Homo sapiens; identical to SEQ ID NO: 230836

SEQ ID NO: 476028 - DNA, 201 bp, Homo sapiens; identical to SEQ ID NO: 230835

SEQ ID NO: 476029 - DNA, 201 bp, Homo sapiens; identical to SEQ ID NO: 230839

SEQ ID NO: 476030 - DNA, 201 bp, Homo sapiens; identical to SEQ ID NO: 230840

SEQ ID NO: 476031 - DNA, 201 bp, Homo sapiens; identical to SEQ ID NO: 232303

SEQ ID NO: 476032 - DNA, 201 bp, Homo sapiens
cacacgtgtgctgtagctggttccatcgtgggctttctcttcaccttgcccacatggaacccccccccgccttgctctatgtgtttaagtcgtggggtacsagagctccctgtcccagtgcatgaaacctgctccagggagcagagctgagtctgtggcacacggggaggccggcgtgggatgtccaggtccccagcattc

SEQ ID NO: 476033 - DNA, 201 bp, Homo sapiens
atttctctcacttttctcccggccctgggatggaatcaagctctagggagaggagcagagagtcggaacgaggagaggatggtgcgttttactccgtgacrgctttatcactcctgaggctttgtgttcagtgctgacactcgcctcaccttaaggcagttcggacatcgcaggcatccgcagagctaggaggatggtgac

SEQ ID NO: 476034 - DNA, 201 bp, Homo sapiens; identical to SEQ ID NO: 231897

SEQ ID NO: 476035 - DNA, 201 bp, Homo sapiens
caggtgtccccgcaggaacagggcccagaggctgtgcagggggcaggccctcatgcctgcaggagaaaccttggcctgaacttgccagcggtcagctcccrtcgttcatggcaattgagtgtgcagcggcgcagagaacatgccacttaataactgttttggggtcctgccttgtaggtctaagatccaggccaccgtgca

SEQ ID NO: 476036 - DNA, 201 bp, Homo sapiens
tggtggtagagacagggttgggcaggggccatggatttttaggccatgtctgccttggccacagcgacgcccagagatgggaggaagcagagcaggtgcaygtggtacaggatgtgccgagcttcctcccagccagtgagagaggtggtgggctctgttcacatttactgtatttccacaatgaacaacaaactctccata

SEQ ID NO: 476037 - DNA, 201 bp, Homo sapiens
gggtatgctggcgcacgcctgtagtcccagccacttgggaggctgaggcagggggattgcttgaacctgggaggcagaggtcgcagtgagccaagatcacwccattgcactccagcctgggtgataagagcaagactccatcaaaaaaaaaaatctgtttttcatgagattgttatttcaaaacaaaacaaacaaaaactc

SEQ ID NO: 476038 - DNA, 201 bp, Homo sapiens; identical to SEQ ID NO: 231109

SEQ ID NO: 476039 - DNA, 201 bp, Homo sapiens
attcgctgtacacacacagtggtgccagaacacaccctgcacatgcaccatcctggacagtccattctgacgtggaccttcctcttaaaacagtccaccaytctgacgtggacctttctcctaaacagtctaccattccgatgtggaccttccccctgagccagcacccggacagtccaccattgtgacgtggacctccct

SEQ ID NO: 476040 - DNA, 201 bp, Homo sapiens
cttacatatatacctttaaaatatctagaattctttttatgggaatgtatcctaagaggaaaaaatcagagatctctccaaggacttacaatcaagattgygtattgcagtattatttttaatgggaaatattggaaacaatgtaaagtttcttcaagagggaattggttagctagatgatgtgcatgtgtagaaatagtt

SEQ ID NO: 476041 - DNA, 201 bp, Homo sapiens; identical to SEQ ID NO: 232108

SEQ ID NO: 476042 - DNA, 201 bp, Homo sapiens; identical to SEQ ID NO: 232110

SEQ ID NO: 476043 - DNA, 201 bp, Homo sapiens; identical to SEQ ID NO: 231113

SEQ ID NO: 476044 - DNA, 201 bp, Homo sapiens; identical to SEQ ID NO: 231114

SEQ ID NO: 476045 - DNA, 201 bp, Homo sapiens; identical to SEQ ID NO: 231116

SEQ ID NO: 476046 - DNA, 201 bp, Homo sapiens; identical to SEQ ID NO: 231117

SEQ ID NO: 476047 - DNA, 201 bp, Homo sapiens; identical to SEQ ID NO: 231119

SEQ ID NO: 476048 - DNA, 201 bp, Homo sapiens; identical to SEQ ID NO: 232326

SEQ ID NO: 476049 - DNA, 201 bp, Homo sapiens; identical to SEQ ID NO: 232329

SEQ ID NO: 476050 - DNA, 201 bp, Homo sapiens; identical to SEQ ID NO: 232331

SEQ ID NO: 476051 - DNA, 201 bp, Homo sapiens; identical to SEQ ID NO: 232333

SEQ ID NO: 476052 - DNA, 201 bp, Homo sapiens; identical to SEQ ID NO: 232335

SEQ ID NO: 476053 - DNA, 201 bp, Homo sapiens; identical to SEQ ID NO: 230862

SEQ ID NO: 476054 - DNA, 201 bp, Homo sapiens; identical to SEQ ID NO: 230864

SEQ ID NO: 476055 - DNA, 201 bp, Homo sapiens; identical to SEQ ID NO: 230865

SEQ ID NO: 476056 - DNA, 201 bp, Homo sapiens
cagcatccctgcatctgccttcccccaaggtctctgttcctccacgctggagatgcaccctagaatcctgagcagagtcctgcagctcctgccagagccgkgaccagggacgttccacgacatcggactaacctccagcacatctccggtgtggtcacatccttactgctcccagctccttctctgtgcgcctctgtgtgc

SEQ ID NO: 476057 - DNA, 201 bp, Homo sapiens
gaacgtgagctgtgtctgcagcatccctgcatctgccttcccccaaggtctctgttcctccacgctggagatgcaccctagaatcctgagcagagtcctgyagctcctgccagagccgggaccagggacgttccacgacatcggactaacctccagcacatctccggtgtggtcacatccttactgctcccagctccttct

SEQ ID NO: 476058 - DNA, 201 bp, Homo sapiens; identical to SEQ ID NO: 232133

SEQ ID NO: 476059 - DNA, 201 bp, Homo sapiens
gtggcctgggtgggttcctctcccgtgtgcttggctcaggaagcctctgaagtgctttgctctgcacaattgccaccacacctgtgtggccggtgtcactyagtcattctactgaaggaggacaaagctgggctcaaactcaggttcaatcctcagcctcactgtggagcccgcagccttggccatgttcttcatgattgc

SEQ ID NO: 476060 - DNA, 201 bp, Homo sapiens; identical to SEQ ID NO: 232139

SEQ ID NO: 476061 - DNA, 201 bp, Homo sapiens; identical to SEQ ID NO: 232359

SEQ ID NO: 476062 - DNA, 201 bp, Homo sapiens; identical to SEQ ID NO: 231938

SEQ ID NO: 476063 - DNA, 201 bp, Homo sapiens; identical to SEQ ID NO: 231404

SEQ ID NO: 476064 - DNA, 201 bp, Homo sapiens; identical to SEQ ID NO: 230882

SEQ ID NO: 476065 - DNA, 201 bp, Homo sapiens; identical to SEQ ID NO: 230651

SEQ ID NO: 476066 - DNA, 201 bp, Homo sapiens; identical to SEQ ID NO: 230883

SEQ ID NO: 476067 - DNA, 201 bp, Homo sapiens; identical to SEQ ID NO: 230653

SEQ ID NO: 476068 - DNA, 201 bp, Homo sapiens; identical to SEQ ID NO: 230885

SEQ ID NO: 476069 - DNA, 201 bp, Homo sapiens; identical to SEQ ID NO: 231939

SEQ ID NO: 476070 - DNA, 201 bp, Homo sapiens; identical to SEQ ID NO: 231940

SEQ ID NO: 476071 - DNA, 201 bp, Homo sapiens
ttttttttgttaaacttgcataaattaaggctcctctttgtgctgtgaagttcagtgggctttgataaatgcatgtcatttatccacagttacagtaacayagaaatagcctcactgccctaaaaaaatcatctatttcacatactcacatctcccttcctctcccggaatccttgacaaccactgatcttttaaatgtct

SEQ ID NO: 476072 - DNA, 201 bp, Homo sapiens; identical to SEQ ID NO: 231942

SEQ ID NO: 476073 - DNA, 201 bp, Homo sapiens; identical to SEQ ID NO: 231412

SEQ ID NO: 476074 - DNA, 201 bp, Homo sapiens; identical to SEQ ID NO: 231169

SEQ ID NO: 476075 - DNA, 201 bp, Homo sapiens; identical to SEQ ID NO: 231170

SEQ ID NO: 476076 - DNA, 201 bp, Homo sapiens
tacaccaggtgacgctttgtaaatgtgcatttcacagggcaagagacggctgaccggctctggggagtgattgagtggcctgttttgggacgtcacctggygttcataccccatggcaaacctcagcagcatctggaggctgcccaggcgggtgcccccgcctgtcctgcacccaagcacgggtacccccaccacactgta

SEQ ID NO: 476077 - DNA, 201 bp, Homo sapiens; identical to SEQ ID NO: 232162

SEQ ID NO: 476078 - DNA, 201 bp, Homo sapiens; identical to SEQ ID NO: 232164

SEQ ID NO: 476079 - DNA, 201 bp, Homo sapiens; identical to SEQ ID NO: 231720

SEQ ID NO: 476080 - DNA, 201 bp, Homo sapiens; identical to SEQ ID NO: 232419

SEQ ID NO: 476081 - DNA, 201 bp, Homo sapiens; identical to SEQ ID NO: 230676

SEQ ID NO: 476082 - DNA, 201 bp, Homo sapiens; identical to SEQ ID NO: 231723

SEQ ID NO: 476083 - DNA, 201 bp, Homo sapiens; identical to SEQ ID NO: 232421

SEQ ID NO: 476084 - DNA, 201 bp, Homo sapiens; identical to SEQ ID NO: 230679

SEQ ID NO: 476085 - DNA, 201 bp, Homo sapiens; identical to SEQ ID NO: 230681

SEQ ID NO: 476086 - DNA, 201 bp, Homo sapiens; identical to SEQ ID NO: 230685

SEQ ID NO: 476087 - DNA, 201 bp, Homo sapiens; identical to SEQ ID NO: 230688

SEQ ID NO: 476088 - DNA, 201 bp, Homo sapiens; identical to SEQ ID NO: 230692

SEQ ID NO: 476089 - DNA, 201 bp, Homo sapiens; identical to SEQ ID NO: 231958

SEQ ID NO: 476090 - DNA, 201 bp, Homo sapiens; identical to SEQ ID NO: 230926

SEQ ID NO: 476091 - DNA, 201 bp, Homo sapiens; identical to SEQ ID NO: 230927

SEQ ID NO: 476092 - DNA, 201 bp, Homo sapiens; identical to SEQ ID NO: 231961

SEQ ID NO: 476093 - DNA, 201 bp, Homo sapiens; identical to SEQ ID NO: 230928

SEQ ID NO: 476094 - DNA, 201 bp, Homo sapiens; identical to SEQ ID NO: 231962

SEQ ID NO: 476095 - DNA, 201 bp, Homo sapiens; identical to SEQ ID NO: 230701

SEQ ID NO: 476096 - DNA, 201 bp, Homo sapiens; identical to SEQ ID NO: 231964

SEQ ID NO: 476097 - DNA, 201 bp, Homo sapiens; identical to SEQ ID NO: 231197

SEQ ID NO: 476098 - DNA, 201 bp, Homo sapiens; identical to SEQ ID NO: 231985

SEQ ID NO: 476099 - DNA, 201 bp, Homo sapiens; identical to SEQ ID NO: 232194

SEQ ID NO: 476100 - DNA, 201 bp, Homo sapiens; identical to SEQ ID NO: 232459

SEQ ID NO: 476101 - DNA, 201 bp, Homo sapiens; identical to SEQ ID NO: 232196

SEQ ID NO: 476102 - DNA, 201 bp, Homo sapiens; identical to SEQ ID NO: 232201

SEQ ID NO: 476103 - DNA, 201 bp, Homo sapiens; identical to SEQ ID NO: 231766

SEQ ID NO: 476104 - DNA, 201 bp, Homo sapiens; identical to SEQ ID NO: 230715

SEQ ID NO: 476105 - DNA, 201 bp, Homo sapiens; identical to SEQ ID NO: 230719

SEQ ID NO: 476106 - DNA, 201 bp, Homo sapiens; identical to SEQ ID NO: 230721

SEQ ID NO: 476107 - DNA, 201 bp, Homo sapiens; identical to SEQ ID NO: 231453

SEQ ID NO: 476108 - DNA, 201 bp, Homo sapiens; identical to SEQ ID NO: 231455

SEQ ID NO: 476109 - DNA, 201 bp, Homo sapiens; identical to SEQ ID NO: 230976

SEQ ID NO: 476110 - DNA, 201 bp, Homo sapiens; identical to SEQ ID NO: 231458

SEQ ID NO: 476111 - DNA, 201 bp, Homo sapiens; identical to SEQ ID NO: 230977

SEQ ID NO: 476112 - DNA, 201 bp, Homo sapiens
gccccgacacccacaggagcagagccacttccgcacctgctccgagcgtcccacgttgccccgacacccacaggagcagagccacttccgcacctgctccragcgtcccacgttgccccgacacccacaggagcggagccacttccgcacctgctccgagcgtcccacgttgccccgacacccacaggagcggagccactt

SEQ ID NO: 476113 - DNA, 201 bp, Homo sapiens; identical to SEQ ID NO: 231462

SEQ ID NO: 476114 - DNA, 201 bp, Homo sapiens; identical to SEQ ID NO: 231993

SEQ ID NO: 476115 - DNA, 201 bp, Homo sapiens; identical to SEQ ID NO: 230978

SEQ ID NO: 476116 - DNA, 201 bp, Homo sapiens
acctgctccgagcgtcccacgttgccccgacacccacaggagcggagccacttccgcacctgctccgagcgtcccacgttgccccgacacccacaggagcrgagccacttccgcacctgctccgagcgtcccacgttgccccgacacccacaggagcagagccacttccgcacctgctccgagcgtcccacgttgccccga

SEQ ID NO: 476117 - DNA, 201 bp, Homo sapiens; identical to SEQ ID NO: 231466

SEQ ID NO: 476118 - DNA, 201 bp, Homo sapiens; identical to SEQ ID NO: 231994

SEQ ID NO: 476119 - DNA, 201 bp, Homo sapiens; identical to SEQ ID NO: 231468

SEQ ID NO: 476120 - DNA, 201 bp, Homo sapiens; identical to SEQ ID NO: 231995

SEQ ID NO: 476121 - DNA, 201 bp, Homo sapiens; identical to SEQ ID NO: 231476

SEQ ID NO: 476122 - DNA, 201 bp, Homo sapiens; identical to SEQ ID NO: 231479

SEQ ID NO: 476123 - DNA, 201 bp, Homo sapiens; identical to SEQ ID NO: 231484

SEQ ID NO: 476124 - DNA, 201 bp, Homo sapiens; identical to SEQ ID NO: 231488

SEQ ID NO: 476125 - DNA, 201 bp, Homo sapiens; identical to SEQ ID NO: 230981

SEQ ID NO: 476126 - DNA, 201 bp, Homo sapiens; identical to SEQ ID NO: 231222

SEQ ID NO: 476127 - DNA, 201 bp, Homo sapiens; identical to SEQ ID NO: 231224

SEQ ID NO: 476128 - DNA, 201 bp, Homo sapiens; identical to SEQ ID NO: 232483

SEQ ID NO: 476129 - DNA, 201 bp, Homo sapiens; identical to SEQ ID NO: 231229

SEQ ID NO: 476130 - DNA, 201 bp, Homo sapiens
aagttatgcctttatgaaggtttgaggaggtcaccaactctatcttcattgtgttagaaagaaagtggcggaatccactgtatgaattggctcagtctccmtaacaaacccccacaaaccaggcggcttagcaaacaacagacatttctgagtcctggaggccgaaagtccaagatgagagcacggcagggcaggttcccc

SEQ ID NO: 476131 - DNA, 201 bp, Homo sapiens
tgcctgtgccccgtcctagctcagagtggctggtggttctcgtgagcgtggctctacctggttatctctgcagcgtcccacgggagagatgcagccctgcygagctcaccgggaaggagtggtgtcagttcccttcgccgccacaggtgggcagggagggcctgagcctgcacgaggggtgaccccttcgccacacaagtg

SEQ ID NO: 476132 - DNA, 201 bp, Homo sapiens
agagtggctggtggttctcgtgagcgtggctctacctggttatctctgcagcgtcccacgggagagatgcagccctgccgagctcaccgggaaggagtggygtcagttcccttcgccgccacaggtgggcagggagggcctgagcctgcacgaggggtgaccccttcgccacacaagtgaatcctgccctggattccgccg

SEQ ID NO: 476133 - DNA, 201 bp, Homo sapiens; identical to SEQ ID NO: 232010

SEQ ID NO: 476134 - DNA, 201 bp, Homo sapiens; identical to SEQ ID NO: 230750

SEQ ID NO: 476135 - DNA, 201 bp, Homo sapiens; identical to SEQ ID NO: 230752

SEQ ID NO: 476136 - DNA, 201 bp, Homo sapiens; identical to SEQ ID NO: 230754

SEQ ID NO: 476137 - DNA, 201 bp, Homo sapiens; identical to SEQ ID NO: 231521

SEQ ID NO: 476138 - DNA, 201 bp, Homo sapiens
cacgtcctgctctgtgtcccacaggtctgtgggtcctttgacctctgtcctgactcacctgcctctggcccctggtctgctggtcttctctggctgagtgkaagggagcgcagcttcagagcaccttttccctgttctgaggcaggagaatggcagagggagctggagcttggatagagacggcatgtggactgcacttcc

SEQ ID NO: 476139 - DNA, 201 bp, Homo sapiens; identical to SEQ ID NO: 231522

SEQ ID NO: 476140 - DNA, 201 bp, Homo sapiens; identical to SEQ ID NO: 231019

SEQ ID NO: 476141 - DNA, 201 bp, Homo sapiens; identical to SEQ ID NO: 231022

SEQ ID NO: 476142 - DNA, 201 bp, Homo sapiens; identical to SEQ ID NO: 231525

SEQ ID NO: 476143 - DNA, 201 bp, Homo sapiens; identical to SEQ ID NO: 231021

SEQ ID NO: 476144 - DNA, 201 bp, Homo sapiens
taacttgtataatttttcataatgggttaaaaagatgttaacatgttccttgaagaaaatgtgaaacacagataagcagaaaaggaagatcaaaggccaawacattcccgctgcccggcacaaatgaccactggtaagtttcggggctgccttttctatcttccacatttacatcttgttttttaaaacttaatgtagcat

SEQ ID NO: 476145 - DNA, 201 bp, Homo sapiens
gctcagacatggaaaccaggacgtgctcactgtgacctggctgggcatggctgaggcagggattaggattttctgataagcagccacccgatcgttcttcrtatgtttgtttctattggtaatatggttgaaaaaaatccaggagttatagtcttttctaaaaaaccatgtaagtgctactttaaatggaattatcaccac

SEQ ID NO: 476146 - DNA, 201 bp, Homo sapiens; identical to SEQ ID NO: 231528

SEQ ID NO: 476147 - DNA, 201 bp, Homo sapiens; identical to SEQ ID NO: 231024

SEQ ID NO: 476148 - DNA, 201 bp, Homo sapiens
aaagccacacactcagtgtgcgccatcatggtggataccaactgtgctcagtggcttggtggggagggttgcggcttctccccctcaccccgcttccctcyttccctgctgcactctctgagggaaggcacagtgtaaacccacactcgtgagtgacgcgtcatgctctgcttccttgaaggcagaggatagacagaaatt

SEQ ID NO: 476149 - DNA, 201 bp, Homo sapiens
ctggggagtgattgagtggcctgttttgggacgtcacctggcgttcataccccatggcaaacctcagcagcatctggaggctgcccaggcgggtgcccccrcctgtcctgcacccaagcacgggtacccccaccacactgtatgagtgcaccttctcgggagcctcttgtttaggctgatgcctctggagctctgtggaaa

SEQ ID NO: 476150 - DNA, 201 bp, Homo sapiens; identical to SEQ ID NO: 231531

SEQ ID NO: 476151 - DNA, 201 bp, Homo sapiens; identical to SEQ ID NO: 231025

SEQ ID NO: 476152 - DNA, 201 bp, Homo sapiens
cagtggcttggtggggagggttgcggcttctccccctcaccccgcttccctctttccctgctgcactctctgagggaaggcacagtgtaaacccacactcrtgagtgacgcgtcatgctctgcttccttgaaggcagaggatagacagaaattgtttggaattctgcacaggagatttgtctctttcttcccatttattta

SEQ ID NO: 476153 - DNA, 201 bp, Homo sapiens
gccgtggtgtgtctggaggaagcgcctgttgctggtttttgttgttttgttatgtattttttgccatgttccatgctgttcctctaatcacatcatgtccygggtttttgaagtttagtgacgtttttggtcttttcttactttttacccatgttttttcctctttgtaggatcaaagtcacatacaatagcaactttatt

SEQ ID NO: 476154 - DNA, 201 bp, Homo sapiens
tatttattcaacactttatgttatattttgggctataacataacacttttcattttgtttgctcacattgttccagcttcggctgccggcagcccgttccrtggcctcacacaaactgtccctttgaatacgtccatctttatggctttttgaaaacacttccttcctttctgacactacaagaggctttaggctcatctt

SEQ ID NO: 476155 - DNA, 201 bp, Homo sapiens; identical to SEQ ID NO: 231536

SEQ ID NO: 476156 - DNA, 201 bp, Homo sapiens; identical to SEQ ID NO: 232250

SEQ ID NO: 476157 - DNA, 201 bp, Homo sapiens; identical to SEQ ID NO: 231537

SEQ ID NO: 476158 - DNA, 201 bp, Homo sapiens; identical to SEQ ID NO: 231540

SEQ ID NO: 476159 - DNA, 201 bp, Homo sapiens; identical to SEQ ID NO: 231028

SEQ ID NO: 476160 - DNA, 201 bp, Homo sapiens; identical to SEQ ID NO: 231543

SEQ ID NO: 476161 - DNA, 201 bp, Homo sapiens; identical to SEQ ID NO: 231546

SEQ ID NO: 476162 - DNA, 201 bp, Homo sapiens; identical to SEQ ID NO: 231269

SEQ ID NO: 476163 - DNA, 201 bp, Homo sapiens; identical to SEQ ID NO: 231820

SEQ ID NO: 476164 - DNA, 201 bp, Homo sapiens; identical to SEQ ID NO: 231841

SEQ ID NO: 476165 - DNA, 201 bp, Homo sapiens; identical to SEQ ID NO: 230777

SEQ ID NO: 476166 - DNA, 201 bp, Homo sapiens; identical to SEQ ID NO: 230779

SEQ ID NO: 476167 - DNA, 201 bp, Homo sapiens; identical to SEQ ID NO: 231849

SEQ ID NO: 476168 - DNA, 201 bp, Homo sapiens
tctatgagcacctggtgtgggtgccgtgggctgagttggtgaaatgtttcctcggagcaccctgggcttctaagttgttctgtcattggggctcccccagracccaagagggagaagccgaggatgccaagttgtaacattgaaactatgttaaatattccctgatagaaccgggcccagctaaatgtgtccccgcacacc

SEQ ID NO: 476169 - DNA, 201 bp, Homo sapiens; identical to SEQ ID NO: 231854

SEQ ID NO: 476170 - DNA, 201 bp, Homo sapiens
gggtgccgtgggctgagttggtgaaatgtttcctcggagcaccctgggcttctaagttgttctgtcattggggctcccccagaacccaagagggagaagcygaggatgccaagttgtaacattgaaactatgttaaatattccctgatagaaccgggcccagctaaatgtgtccccgcacaccaggaaacaggtttagggg

SEQ ID NO: 476171 - DNA, 201 bp, Homo sapiens; identical to SEQ ID NO: 232042

SEQ ID NO: 476172 - DNA, 201 bp, Homo sapiens; identical to SEQ ID NO: 230780

SEQ ID NO: 476173 - DNA, 201 bp, Homo sapiens
tcccccagaacccaagagggagaagccgaggatgccaagttgtaacattgaaactatgttaaatattccctgatagaaccgggcccagctaaatgtgtccycgcacaccaggaaacaggtttaggggtgtggccttgaaatctggaaagtacaggctctgaggtgtctctctcagggtgtctccactgatccaagatctgc

SEQ ID NO: 476174 - DNA, 201 bp, Homo sapiens; identical to SEQ ID NO: 230782

SEQ ID NO: 476175 - DNA, 201 bp, Homo sapiens; identical to SEQ ID NO: 231573

SEQ ID NO: 476176 - DNA, 201 bp, Homo sapiens; identical to SEQ ID NO: 230787

SEQ ID NO: 476177 - DNA, 201 bp, Homo sapiens; identical to SEQ ID NO: 231044

SEQ ID NO: 476178 - DNA, 201 bp, Homo sapiens; identical to SEQ ID NO: 231574

SEQ ID NO: 476179 - DNA, 201 bp, Homo sapiens; identical to SEQ ID NO: 231576

SEQ ID NO: 476180 - DNA, 201 bp, Homo sapiens; identical to SEQ ID NO: 231045

SEQ ID NO: 476181 - DNA, 201 bp, Homo sapiens; identical to SEQ ID NO: 231578

SEQ ID NO: 476182 - DNA, 201 bp, Homo sapiens; identical to SEQ ID NO: 231047

SEQ ID NO: 476183 - DNA, 201 bp, Homo sapiens; identical to SEQ ID NO: 231301

SEQ ID NO: 476184 - DNA, 201 bp, Homo sapiens; identical to SEQ ID NO: 231049

SEQ ID NO: 476185 - DNA, 201 bp, Homo sapiens; identical to SEQ ID NO: 231580

SEQ ID NO: 476186 - DNA, 201 bp, Homo sapiens; identical to SEQ ID NO: 231304

SEQ ID NO: 476187 - DNA, 201 bp, Homo sapiens; identical to SEQ ID NO: 231582

SEQ ID NO: 476188 - DNA, 201 bp, Homo sapiens; identical to SEQ ID NO: 231310

SEQ ID NO: 476189 - DNA, 201 bp, Homo sapiens; identical to SEQ ID NO: 231585

SEQ ID NO: 476190 - DNA, 201 bp, Homo sapiens; identical to SEQ ID NO: 231050

SEQ ID NO: 476191 - DNA, 201 bp, Homo sapiens; identical to SEQ ID NO: 231051

SEQ ID NO: 476192 - DNA, 201 bp, Homo sapiens; identical to SEQ ID NO: 231053

SEQ ID NO: 476193 - DNA, 201 bp, Homo sapiens; identical to SEQ ID NO: 231062

SEQ ID NO: 476194 - DNA, 201 bp, Homo sapiens; identical to SEQ ID NO: 230804

SEQ ID NO: 476195 - DNA, 201 bp, Homo sapiens; identical to SEQ ID NO: 230807

SEQ ID NO: 476196 - DNA, 201 bp, Homo sapiens; identical to SEQ ID NO: 231331

SEQ ID NO: 476197 - DNA, 201 bp, Homo sapiens
ggtttcgccatgttgcccaggctggtcttgaactcctgagctcaagcaattcacctgtttcagcctcccaaagtgctgggattacaggcatgaaccaccgygcctggcctcaagtaacatttttaatcagctcgaatgtttgacccttagccttggggaaggttcgtccttccctcttgtcctgctgtggcctcctcaagt

SEQ ID NO: 476198 - DNA, 201 bp, Homo sapiens; identical to SEQ ID NO: 230809

SEQ ID NO: 476199 - DNA, 201 bp, Homo sapiens; identical to SEQ ID NO: 231332

SEQ ID NO: 476200 - DNA, 201 bp, Homo sapiens
tatagtatgactacgcagacagcattccagctggggcaggaagtcactgcgtctgcaggactgagcgcctcgcacagagggaagtcatggaataaggtccyggctgcagcacttggaatcctgctgtgggagagataagagggacgtggctgaaatctcctgttccttggctggctgagatctcggccaggccctcatggc

SEQ ID NO: 476201 - DNA, 201 bp, Homo sapiens
cggggcaggaagaccaggggagcctggggtgagagctggcggaggacagcctggccccagccccatgtacacagacaattctactctctgcagaggtcacrgtgagggaatggccagctctgtgtggctgctgtgagacccccccacagagtggagcccacacctcggagccctgccctgtgcacaacccccacatggctg

SEQ ID NO: 476202 - DNA, 201 bp, Homo sapiens; identical to SEQ ID NO: 231614

SEQ ID NO: 476203 - DNA, 201 bp, Homo sapiens; identical to SEQ ID NO: 231615

SEQ ID NO: 476204 - DNA, 201 bp, Homo sapiens; identical to SEQ ID NO: 231343

SEQ ID NO: 476205 - DNA, 201 bp, Homo sapiens; identical to SEQ ID NO: 231072

SEQ ID NO: 476206 - DNA, 201 bp, Homo sapiens; identical to SEQ ID NO: 231344

SEQ ID NO: 476207 - DNA, 201 bp, Homo sapiens; identical to SEQ ID NO: 231074

SEQ ID NO: 476208 - DNA, 201 bp, Homo sapiens
ctggctcctgatggcttcctagcactccacgttgggccactcagtggaaggcaaaggtgcgatctccttggatggtttgtgtctgggatttgcagccagaygcggagggtcctagaaatctccatttctgagcttcttgctcaacaagtgagtttggcaaagttttgttgggacttaaagtttgcacagattccatctgtg

SEQ ID NO: 476209 - DNA, 201 bp, Homo sapiens; identical to SEQ ID NO: 231076

SEQ ID NO: 476210 - DNA, 201 bp, Homo sapiens
tgtggtggagcctggccgtccctgagccatcaagatggtctgcgcgtcagagtgcagcacgggccacattctctctgccatgtgcagagggctcctgcacrgaagcctgcacgcatttaacaccagcacgctcaatgtagtcttgtaaggaacaggttgaagtgtgccgtggtgtgtctggaggaagcgcctgttgctggt

SEQ ID NO: 476211 - DNA, 201 bp, Homo sapiens; identical to SEQ ID NO: 232082

SEQ ID NO: 476212 - DNA, 201 bp, Homo sapiens
cagtccaagttcatgtactacaattggttactttggtctctttgcttctgaaacagtccccaacatttattgtggcattgacttttttgtagagtccaggkcattctaattttatagaatgccctgctcttgatctatcagacgaaatgcttcctcttgcatttaacctgcttctccactctctgggtttcctgtacactg

SEQ ID NO: 476213 - DNA, 201 bp, Homo sapiens
tcatgtactacaattggttactttggtctctttgcttctgaaacagtccccaacatttattgtggcattgacttttttgtagagtccagggcattctaatwttatagaatgccctgctcttgatctatcagacgaaatgcttcctcttgcatttaacctgcttctccactctctgggtttcctgtacactggactgctggt

SEQ ID NO: 476214 - DNA, 201 bp, Homo sapiens
gggagcaagtgctctagaacaaaactggtctcctacacagctgcagaaggtagccccctgagaaattaactgttccgggtgtctcctgactttcagtgcayggccacatcatggtacctaacttgtggcaaattgttgctttataagtaaggatccagtccaagttcatgtactacaattggttactttggtctctttgct

SEQ ID NO: 476215 - DNA, 201 bp, Homo sapiens
catgtactacaattggttactttggtctctttgcttctgaaacagtccccaacatttattgtggcattgacttttttgtagagtccagggcattctaattwtatagaatgccctgctcttgatctatcagacgaaatgcttcctcttgcatttaacctgcttctccactctctgggtttcctgtacactggactgctggta

SEQ ID NO: 476216 - DNA, 201 bp, Homo sapiens
ctttggtctctttgcttctgaaacagtccccaacatttattgtggcattgacttttttgtagagtccagggcattctaattttatagaatgccctgctctkgatctatcagacgaaatgcttcctcttgcatttaacctgcttctccactctctgggtttcctgtacactggactgctggtagaagcctgattagaagcag

SEQ ID NO: 476217 - DNA, 201 bp, Homo sapiens
tccccaacatttattgtggcattgacttttttgtagagtccagggcattctaattttatagaatgccctgctcttgatctatcagacgaaatgcttcctcktgcatttaacctgcttctccactctctgggtttcctgtacactggactgctggtagaagcctgattagaagcaggtttaatgtggcaaaaatttctccta

SEQ ID NO: 476218 - DNA, 201 bp, Homo sapiens
agagtccagggcattctaattttatagaatgccctgctcttgatctatcagacgaaatgcttcctcttgcatttaacctgcttctccactctctgggtttmctgtacactggactgctggtagaagcctgattagaagcaggtttaatgtggcaaaaatttctcctagcagtgcaaggcccccttccccagaaggcaggca

SEQ ID NO: 476219 - DNA, 201 bp, Homo sapiens
atagaatgccctgctcttgatctatcagacgaaatgcttcctcttgcatttaacctgcttctccactctctgggtttcctgtacactggactgctggtagragcctgattagaagcaggtttaatgtggcaaaaatttctcctagcagtgcaaggcccccttccccagaaggcaggcagtgtccatctgctccaggattgg

SEQ ID NO: 476220 - DNA, 201 bp, Homo sapiens
agttttccagaagagtttgtgtagaattggcattacttcttcccctaaatgtctgggcgattgtctttttaaaattttttattgagctgtaagatgtatgyagtttactaatcccaagcgcatggctcattattccttaatgcccagactgtgccatgtgtggccagttgggggcgctccaggcacctttagatgccgccc

SEQ ID NO: 476221 - DNA, 201 bp, Homo sapiens
gtgcaaggcccccttccccagaaggcaggcagtgtccatctgctccaggattggtgtgtttttatcaagaatggatgttggattttggcagttcccttttyggcagctcttgagatgatcacgtggtgaatcattttctattactacagtgaattacagtcacttgaattccatcctactgggtcgtgctgtagtatcctt

SEQ ID NO: 476222 - DNA, 201 bp, Homo sapiens
gctgcaaatgagggaggggctgtctaccctgaagggcagcactgagggtggagggcccgaccacacccctggtaggcagaggccccacgctcagggtcagsgaccccgctcctcctgctcctttcccatgcctttgcctgaggtggtctctgacacttgagtagatgtctcatggcctgtggccatgggggccctgaagcc

SEQ ID NO: 476223 - DNA, 201 bp, Homo sapiens
cccgccggggctcaccgcgcccccctacccgcagctctttccagcagcgcctgtcctacaccacgctcagcgacctggccctggcgcttctcgacggcacygtgttcgaaatcgtgcaggggctactggagatccagcacctcaccgaaaagagcctgtacaaccagcgcctgcgcctacagaacgagcaccgaggtgcgc

SEQ ID NO: 476224 - DNA, 201 bp, Homo sapiens
catttaacctgcttctccactctctgggtttcctgtacactggactgctggtagaagcctgattagaagcaggtttaatgtggcaaaaatttctcctagcrgtgcaaggcccccttccccagaaggcaggcagtgtccatctgctccaggattggtgtgtttttatcaagaatggatgttggattttggcagttccctttt

SEQ ID NO: 476225 - DNA, 201 bp, Homo sapiens
ccctgcttccctgtgttatggagctgtcttgaggggggcttttggtaaataccatcgtcgaggtgtgtacagaatgtgaagagacaggagatcggggaagsctgtaggcacagcgggagccaggctacctgcaggggagcctcaggggccctggagttccctggggactggccaccagagaagagctgcaacatcagggct

SEQ ID NO: 476226 - DNA, 201 bp, Homo sapiens
gcttccctgtgttatggagctgtcttgaggggggcttttggtaaataccatcgtcgaggtgtgtacagaatgtgaagagacaggagatcggggaagcctgyaggcacagcgggagccaggctacctgcaggggagcctcaggggccctggagttccctggggactggccaccagagaagagctgcaacatcagggctcttc

SEQ ID NO: 476227 - DNA, 201 bp, Homo sapiens
ggcagagctgccctcacctctccccctccgcgccctggccccatggcaggccgtggaacaccggatccgtgaggagcagcgggcgatggaccagaagatcrtcctggagctggaccggaaggtggctgaccagcagagcacactggagaaggcgggggtggctggcttctacgtgaccaccaacccacaggtcagtgcctg

SEQ ID NO: 476228 - DNA, 201 bp, Homo sapiens
agtagttggaagtctgttgacagttgtgcagcaagcgtctttcagggtcagttccctctcaggcctcgcagggcctcattccagttgcacatcaaattccwaagcactgtctcctgtggcgccctcccaaacccgaagagcttcccacttgagccaggcctgcttggtgggcttgggagccctttcctgcaaattatatag

SEQ ID NO: 476229 - DNA, 201 bp, Homo sapiens
gggccgggatgaaaggggcctgggggtcactctggccttcatggggcccctctgtatcccaggagctgatgctgcagatgaacctgctggaactcatccgraagctgcagcagaggggctgccgggcagggaatgcagccctgggactgggaggtccctggcagtcgcctgctgcccagtgtgaccagaaaggcagccctg

SEQ ID NO: 476230 - DNA, 201 bp, Homo sapiens
acatcatggtacctaacttgtggcaaattgttgctttataagtaaggatccagtccaagttcatgtactacaattggttactttggtctctttgcttctgraacagtccccaacatttattgtggcattgacttttttgtagagtccagggcattctaattttatagaatgccctgctcttgatctatcagacgaaatgct

SEQ ID NO: 476231 - DNA, 201 bp, Homo sapiens
ggggtcactctggccttcatggggcccctctgtatcccaggagctgatgctgcagatgaacctgctggaactcatccgaaagctgcagcagaggggctgcygggcagggaatgcagccctgggactgggaggtccctggcagtcgcctgctgcccagtgtgaccagaaaggcagccctgtcccaccatagccacaggcagc

SEQ ID NO: 476232 - DNA, 201 bp, Homo sapiens
gatccagtccaagttcatgtactacaattggttactttggtctctttgcttctgaaacagtccccaacatttattgtggcattgacttttttgtagagtcyagggcattctaattttatagaatgccctgctcttgatctatcagacgaaatgcttcctcttgcatttaacctgcttctccactctctgggtttcctgtac

SEQ ID NO: 476233 - DNA, 201 bp, Homo sapiens
ggccttcatggggcccctctgtatcccaggagctgatgctgcagatgaacctgctggaactcatccgaaagctgcagcagaggggctgccgggcagggaakgcagccctgggactgggaggtccctggcagtcgcctgctgcccagtgtgaccagaaaggcagccctgtcccaccatagccacaggcagcagaagtctggg

SEQ ID NO: 476234 - DNA, 201 bp, Homo sapiens
gcccctctgtatcccaggagctgatgctgcagatgaacctgctggaactcatccgaaagctgcagcagaggggctgccgggcagggaatgcagccctgggrctgggaggtccctggcagtcgcctgctgcccagtgtgaccagaaaggcagccctgtcccaccatagccacaggcagcagaagtctgggcagagttcatct

SEQ ID NO: 476235 - DNA, 201 bp, Homo sapiens
cctctgtatcccaggagctgatgctgcagatgaacctgctggaactcatccgaaagctgcagcagaggggctgccgggcagggaatgcagccctgggactrggaggtccctggcagtcgcctgctgcccagtgtgaccagaaaggcagccctgtcccaccatagccacaggcagcagaagtctgggcagagttcatcttct

SEQ ID NO: 476236 - DNA, 201 bp, Homo sapiens
ctgatgctgcagatgaacctgctggaactcatccgaaagctgcagcagaggggctgccgggcagggaatgcagccctgggactgggaggtccctggcagtygcctgctgcccagtgtgaccagaaaggcagccctgtcccaccatagccacaggcagcagaagtctgggcagagttcatcttcttgacctttggccactgc

SEQ ID NO: 476237 - DNA, 201 bp, Homo sapiens
actggctgctcctgcctcctttgtgttccctggtcatgtctaaggccaggccccttctgcccaggcagccagcgtggctctcttcttgccttttggttgtmtatctagtggaatctggtagtggacctggcacttgtagcaatgtttgatcagtagagtgaaggagatgacatttccctgcttccctgtgttatggagctg

SEQ ID NO: 476238 - DNA, 201 bp, Homo sapiens
gactggctgctcctgcctcctttgtgttccctggtcatgtctaaggccaggccccttctgcccaggcagccagcgtggctctcttcttgccttttggttgyctatctagtggaatctggtagtggacctggcacttgtagcaatgtttgatcagtagagtgaaggagatgacatttccctgcttccctgtgttatggagct

SEQ ID NO: 476239 - DNA, 201 bp, Homo sapiens
tgtgcagatcagctccttccttggaagtgttcggaagaggtctctaagattgacaaaatcaacgggcgcagagactgagacagcgcctttttggtgatcartgggtccaaccagttttgttttcagttgcgcagcacccaccttcttagcagaaactccctgttcgggcttccctgtgccccacgcgcttccagacaggat

SEQ ID NO: 476240 - DNA, 201 bp, Homo sapiens
tccagcagcgcctgtcctacaccacgctcagcgacctggccctggcgcttctcgacggcactgtgttcgaaatcgtgcaggggctactggagatccagcayctcaccgaaaagagcctgtacaaccagcgcctgcgcctacagaacgagcaccgaggtgcgcgggggcagcgggatgaggtgccgcctcctccgggtcggc

SEQ ID NO: 476241 - DNA, 201 bp, Homo sapiens
ctcagccgctcccttggcagctgcagcccccatgcagaagaggctcccaggcccaagctctgtgtgacccagagaaataaagatgcctcagtgtggcccamatgtggcttgtgtgatagctgcaggttctgccataaccggggccctggtagggcccccacctctgttgcagcagaggcctctacctgggggccccttcct

SEQ ID NO: 476242 - DNA, 201 bp, Homo sapiens
tccagtccaagttcatgtactacaattggttactttggtctctttgcttctgaaacagtccccaacatttattgtggcattgacttttttgtagagtccarggcattctaattttatagaatgccctgctcttgatctatcagacgaaatgcttcctcttgcatttaacctgcttctccactctctgggtttcctgtacac

SEQ ID NO: 476243 - DNA, 201 bp, Homo sapiens
ccagtccaagttcatgtactacaattggttactttggtctctttgcttctgaaacagtccccaacatttattgtggcattgacttttttgtagagtccagkgcattctaattttatagaatgccctgctcttgatctatcagacgaaatgcttcctcttgcatttaacctgcttctccactctctgggtttcctgtacact

SEQ ID NO: 476244 - DNA, 201 bp, Homo sapiens
ccgcgataccgcaccccctcagacaccaaacccccccagacaccacacaccccccccaacaccacacaccccaacacccccagacaacacacaccccaacmcccccagacaccacacaccccaacacccccagacaccacacaccccaacacccccagacaccacacacacccaaccacaccccttagacaccacaaaccc

SEQ ID NO: 476245 - DNA, 201 bp, Homo sapiens
accacacacacccaaccacaccccttagacaccacaaacccccctagacaccaaacaccagatgacccctacacacaccccggataccacacccgcccccyagacaccacacactgtacacctccccagacaccacacaccttcagacaccacacatgccccgacacaccttcagacaccacacagccccccagaccacac

SEQ ID NO: 476246 - DNA, 201 bp, Homo sapiens
cacacacacccccaccgcgataccgcaccccctcagacaccaaacccccccagacaccacacaccccccccaacaccacacaccccaacacccccagacamcacacaccccaacacccccagacaccacacaccccaacacccccagacaccacacaccccaacacccccagacaccacacacacccaaccacacccctta

SEQ ID NO: 476247 - DNA, 201 bp, Homo sapiens; identical to SEQ ID NO: 139667

SEQ ID NO: 476248 - DNA, 201 bp, Homo sapiens
gcctgggcacctcacacatctgctcttacactgcccgaacacccccaatctctctcacacacacccccaccgcgataccgcaccccctcagacaccaaacmcccccagacaccacacaccccccccaacaccacacaccccaacacccccagacaacacacaccccaacacccccagacaccacacaccccaacaccccca

SEQ ID NO: 476249 - DNA, 201 bp, Homo sapiens
ccacacaccccaacacccccagacaacacacaccccaacacccccagacaccacacaccccaacacccccagacaccacacaccccaacacccccagacamcacacacacccaaccacaccccttagacaccacaaacccccctagacaccaaacaccagatgacccctacacacaccccggataccacacccgcccccca

SEQ ID NO: 476250 - DNA, 201 bp, Homo sapiens; identical to SEQ ID NO: 139669

SEQ ID NO: 476251 - DNA, 201 bp, Homo sapiens
agacccccaaccacacacccccaaccacccccgccagacaccacacccaaccacataccccaccacaccccccagacaccagaccaactacacacccccaracaccacacccaaccacacaacccccgccccagacaccacacaccttcagacaccacacagccccctgccccagacaccacacacaccgaaccacacacc

SEQ ID NO: 476252 - DNA, 201 bp, Homo sapiens
aacacacaccccaacacccccagacaccacacaccccaacacccccagacaccacacaccccaacacccccagacaccacacacacccaaccacacccctyagacaccacaaacccccctagacaccaaacaccagatgacccctacacacaccccggataccacacccgccccccagacaccacacactgtacacctccc

SEQ ID NO: 476253 - DNA, 201 bp, Homo sapiens
acaccacacaccccaacacccccagacaccacacacacccaaccacaccccttagacaccacaaacccccctagacaccaaacaccagatgacccctacasacaccccggataccacacccgccccccagacaccacacactgtacacctccccagacaccacacaccttcagacaccacacatgccccgacacaccttca

SEQ ID NO: 476254 - DNA, 201 bp, Homo sapiens
cacaggtcccatcacaccaggtgaggctgggctcctcagggcatctcttgtgccacacagagctcgccctcaaggttgcccgaattggccaactctacagragggttggtgtcccagggagaatcgtgcctggctttccaggtgaggctccgccctgcctgtccccacccctgccctgggctcagcacttgggccaagccc

SEQ ID NO: 476255 - DNA, 201 bp, Homo sapiens
accaccattgatgccacccattccagtcccccacctggttcccagccctgggagacgcatactcggcccagctcctgcctcaagctcctcgaggacgttcracatgcggcttggcccagcagccccagctatggaatcgtggctggaactcttcaaggccaggcagcccctggggttcatgggtcgtgcaagtgagatccc

SEQ ID NO: 476256 - DNA, 201 bp, Homo sapiens
gaaggccgcatccaggcgcagggatgacccagcacttactatctactcacacccacattagctgtcaccctgctggcccgcagcaggccgcgggtaggggrcagagtgaccgggcgccagagctgtccctgatgctggccaaggccgagcagcccacacaccctgcagggaccacgcagctcccaaccctgccgatctcag

SEQ ID NO: 476257 - DNA, 201 bp, Homo sapiens
atagctcactgcagcctcgaactcctgggctcaagccatcctcccacctcagcctcccaagtagctaagattacagctgcataccaccacacccggctaatttttttttttttgagacagagtctcgatctgtcacctaggctggagtgcagcggcgcgatctcagctcactgcagcctcctcctccctggttcaagcgat

SEQ ID NO: 476258 - DNA, 201 bp, Homo sapiens
cacaggcaggtaccatcacactcggctgatttttgcatttttttgtacagacaaagttttgctgtgttgcccaggcttgtctcgaactcctgggctcaagygatcctcccgactcagcctcccaaagtgctgggattacaggagtgagccactgcactggctaggatgttattttatttattattgttattattacttttt

SEQ ID NO: 476259 - DNA, 201 bp, Homo sapiens; identical to SEQ ID NO: 157516

SEQ ID NO: 476260 - DNA, 201 bp, Homo sapiens
tttcctggggctgccgtaactaagcaccacagaccaggcggctgcaacaacagacactattgtctcgcagcattggatgctggagatccaagatcaaggcrtcagcagggctggctccttttgagggtcttctcggtatgcagacgactgcttctatctctgtatacacaccagcttcccctgtgcgtatctgagtcaccc

SEQ ID NO: 476261 - DNA, 201 bp, Homo sapiens
ccatgcccagcaaatttttgtattttgtttttagtagggacggggtttcactatgttggccaggctgatctcgaactcctgacctcaggtgatccacctgyctcggcctcccaaagtgctgggattataggtgtgagccaccgtgccgggcctaaatggcattttattatgacacattttctttttttttttttgagatgg

SEQ ID NO: 476262 - DNA, 201 bp, Homo sapiens
gaaccttggaggcggagcttgtggtgagccgagatcgtgccattgcactccagcctgggcaacaagagtgaaactctgtctcaaaaaaaaaaaaaaaaaamaaacaaaccaaaaaactgatccccagtgttggaggtggggtctaatgggagacagatctacctaatggcagatccttcatgaacggcttggtgttgtcct

SEQ ID NO: 476263 - DNA, 201 bp, Homo sapiens
cccatgtcaaccctcctcctctccacccaaggggctgggtggcactgaccagcacccgcaggccagccatcaagcttcctttccagagatgggagcactcrgggtgggttgagtctcttcagcagcctgcaggaggcagccctgaaacgcatacagagctggctggctctcctcagcgtgctagtttcctggggctgccgt

SEQ ID NO: 476264 - DNA, 201 bp, Homo sapiens
agaagcagatgctgacactgtgcttcaggtcccctgtagaactctaagccaaataaacctcttttctttataaattacccagccttgtggatcacttgagrtcaggagtttgagaccagcccagccaacctggtgaaaccccatctctactaaaaatacaaaaattgggctgggggaaggatagcgttaggagaaataccc

SEQ ID NO: 476265 - DNA, 201 bp, Homo sapiens
gcctgtccccacccctgccctgggctcagcacttgggccaagcccaaccaactctcagcatgtccttggcagtccaagaaggccagagtggtcaaagccaygcagggttggccctgaggcccaggcggccagaaccagaccacaaagagcagctggaggaagaggcaggcaggagggtctggggtccagtcagcagccttg

SEQ ID NO: 476266 - DNA, 201 bp, Homo sapiens
tacaccccgccatcacacttggaagcagcaccactcagttagggtcactcgggccacgcaggggctagggaagcaacaaggcgcagccaccgctgagcacrcaggaagactcaccactgaggatctcgttgttgttcccccagaagtcagctaacttggagggtcggctgtagaattcatccctgttggctgccaagatga

SEQ ID NO: 476267 - DNA, 201 bp, Homo sapiens
cattgcacatcaatttcataaaacaacatttgctcctgattaaatgtgaaataacagacattcataaaattgggagtgaaagtggtgctcacagctgggtrcggtggctcatgcctgtaatcccagcattttgcgaggccgaggtgggtggatcatgaggtcaggagttcaagaccagcctggccaagatggtgaaacccc

SEQ ID NO: 476268 - DNA, 201 bp, Homo sapiens
agcatacacctcgtccccacccagggacctctggggcccagagcaggcagttttccacaatgcaaacgagtgcagaacggagattagattccgaggccacscaagggtgacacccaagttccctgaaatgtgcacatgtgcaatgatttagtgacacggctccagggcagagccagtgctcacagctgggacatgggacag

SEQ ID NO: 476269 - DNA, 201 bp, Homo sapiens
tggagaccctgggggccagaggggatgggacacacgcttttggcggaaccacttccctttggcaagcgaaaaggcaagcatagcacatgggcagaggggaygtgtgctaagcagaaagcagtggtgacagaggaatggcaagctattagtaccacagggtcaaggggacctagacacttgggagggtagccatcaagtcgg

SEQ ID NO: 476270 - DNA, 201 bp, Homo sapiens
atgatggggcccccatgcagacgcatggcacaggaagccacgcagacagtgctgggtgggcagctctggcaatgcccggtgctggggctggccccgaccaygagccccatcagttccacctctacaccccgccatcacacttggaagcagcaccactcagttagggtcactcgggccacgcaggggctagggaagcaacaa

SEQ ID NO: 476271 - DNA, 201 bp, Homo sapiens
aaaaagtgatggctgaagaccccctgagcacttgtgccggagaggcagctccaaggagcagagctcagctgtcctgccatcacaatctgagtctgaaaccaagttgcagtggtgagagcccgacaagtgtttaaaaataatttccatattgatcattgcacatcaatttcataaaacaacatttgctcctgattaaatgtg

SEQ ID NO: 476272 - DNA, 201 bp, Homo sapiens
acctgtaatcccagcagtttgggaggccaaagtgggaggatcacttgaggctaggagttttgagaccagcttgggcaagaaagtaagaccccatatctacaaaaaaaaaatacaaaaattagtcaggtgtggtggtgcatgcctgtattcccaactactggggaggctgaggcagcaggatcatttgagcccaggagtttg

SEQ ID NO: 476273 - DNA, 201 bp, Homo sapiens
tcagatggaaacgagcgagccaagtctttttctcttttcacacacaaaactggcctcagtggcaacaagggccagtctcagagagggcaggaagccggcaktcctgctgcacccacactggaggaaggagcaccgtggctccaggtgagctctcgggagcctgcagctgggaccgcacgggaaacaggaggatgctaggca

SEQ ID NO: 476274 - DNA, 201 bp, Homo sapiens
aggcattcacacctgtgtgcacatgtgtgccccccactcagtgcctgcccctgaagcttcttgccagcagaactggggaaatgcttttggtcattgccagkgactgtgccatgccctagagcccttggggtctgctatggaagccttaccacctccagggtgccccattcagcctggtctgacacccagctggccccaggg

SEQ ID NO: 476275 - DNA, 201 bp, Homo sapiens
actgcaccattgcactccaacctggggaacagagaagccctgtctctaaaaaaaaaaaaaaagtgatggctgaagaccccctgagcacttgtgccggagasgcagctccaaggagcagagctcagctgtcctgccatcacaatctgagtctgaaaccaagttgcagtggtgagagcccgacaagtgtttaaaaataatttc

SEQ ID NO: 476276 - DNA, 201 bp, Homo sapiens
cctgctcaccatgccaggcactctgcaggtgcccaagtccacaaagtgacacagtaagaaagtccataacctggaaaagaagccagcctgtgcctttccayggtgatgaggcagcagggaggtctcagccagaagatagcactctgcttggtctttcatgcagaggccagagataagcaacatctgcccatggggacagga

SEQ ID NO: 476277 - DNA, 201 bp, Homo sapiens
tgaggcaggacaatggtgtgaacccgggaggcagagtttgcagtgagccgagatcatgctactgtactccagcctgagtgacagagcaagactccgtctcaaaaaaaaaaaaaaaaaattagccgggtgtggtggcgggcgcctgtaatcccagctgctcgagaggttgaggcagagaattgcttgaacccgggaggcgga

SEQ ID NO: 476278 - DNA, 201 bp, Homo sapiens
tctgggtgctggtggtggtgtgatatggacggtagctgtgtggctgggttcactttgtacaatctgtcacgccagacactgaaagcgtgcacacccagtargcatgcttcccggcggggaacagtaatgtctaccctcaaaagaaagtgcactggccaggcacagtggctcacacctgtaatcccaacactttgggaggcc

SEQ ID NO: 476279 - DNA, 201 bp, Homo sapiens
agtggctcatggctgtaatccctgcactttgggaggctgaggcgggcagatcatttgaggtcaggaattcaagaccagcctggccaacacggtgaaacccrgtctctactaaaaatacaaaaattagccaggcatggtagtgcaggcctgtaatcccagctactcaggaggctgaggcaggaggatcacttgaacccagga

SEQ ID NO: 476280 - DNA, 201 bp, Homo sapiens
aggagagacatctaaactttaagagccctggtcttgaggaaagaaaactgactttcaagtcccagcttggacattagaagaaaacaaataaggacacagcrgtgactgagtggaaggggtcagttcctgcaatgtccattagacctgagggtctaagaagcgatggctgggccaggcacagtggatgacacctgtaatccc

SEQ ID NO: 476281 - DNA, 201 bp, Homo sapiens
agcaaatgccaggatcatgcttcctgtgcaccttgcagaaccgagagccaattaaacctctttttttaataaatgacccagtcccaggtatttctttacarcagtgggagagcagctgaggacattcctaggatagacgcaagaggtggaattgctccatccatgggtgacgctttcagataaacagacttggccaagtcc

SEQ ID NO: 476282 - DNA, 201 bp, Homo sapiens
gattgactgattgaatgagacagggtctcgctctgtcacccatgctggagtgcagtggcacaatctcagctcactgaaacctctgctttccgggctcaggmaattctctagcctcagcctcctgagtagctggggccacaggcacatgccaccacgcctggctaatttttgtatttttttttgtagagacagggttttacc

SEQ ID NO: 476283 - DNA, 201 bp, Homo sapiens
gttcagaggcagctgacagacctgggtgccagggtgggatggagcccaggagggcacaatagtcaaggaaccagaagagggtaaccctctgagccgccacrtcttcatctatgaaaaccttccaccttccaaggacatcagtcttgtgccttcacccacccgtcctgaccagccctgcacccactgcatcctcctatacca

SEQ ID NO: 476284 - DNA, 201 bp, Homo sapiens
cagggtgatttcatttctaacaagttctcaagtaaagctggtgctacaggcccaaggaccacacctggagaaccactgtcctaaacttttgcatacaatcyggtgacgccagagagtgagaggatgtgggccttagtgatatggtcaccccgacacttggcagaagcccgtgtacatccatgcaccagctgccaccatcaa

SEQ ID NO: 476285 - DNA, 201 bp, Homo sapiens
ggtccacactgggggtacaaggacccacaagccaagcacagttttaaggggttccagcactcgtagtgcccctgtgcctgaagttctctctggagaaagayaccttcatcctatacttcaaagaagtctcaaaatcatttttcaaagaccagaagcagtacatagtcagaaagaaccacataatgaaagaagcaccatgag

SEQ ID NO: 476286 - DNA, 201 bp, Homo sapiens
taaatgacccagtcccaggtatttctttacagcagtgggagagcagctgaggacattcctaggatagacgcaagaggtggaattgctccatccatgggtgrcgctttcagataaacagacttggccaagtccccgctaacgtctagcaccagaacctgttgccactcacctgcctccagggtgtatgcagtgtgggaaatg

SEQ ID NO: 476287 - DNA, 201 bp, Homo sapiens
ctgggtacttcttagacaactcagtattgttaaggtgacacttctccccacatgacccatagattcaaaacctgcccagtcaaaatcccagggggcttttygttttatagcaattaacagactggctgaaatatctatgcatatgcaaaggaactgggatggccaaaatagtcccgaaaaagaaggcagacccacattgcc

SEQ ID NO: 476288 - DNA, 201 bp, Homo sapiens
aaaggaaaacactgagttgagcggatggcagacactcagggctgccctccgaacctgcaacaggccagaacagagagaaccacctctgtggtgtctgtacyacttgctgggtgtgggggaactggacaccacactcttggccggtgccacacaaacaactcccaaacccatgcactcattggcactggccagactgtctct

SEQ ID NO: 476289 - DNA, 201 bp, Homo sapiens
gctggtgctgcagggctgagcagccgggcgcccaatccccatcccttgtaatccccactccatcagcggtggcagcccccaggggcagagcttgaaagcaygagttgctcttttcaaaggcagacacagacatgtgacgcgggctcccggtggctgtcagcagaggaggtaaacacacgtgggaacacagtgtcgctgttc

SEQ ID NO: 476290 - DNA, 201 bp, Homo sapiens
aacaaaaaaaaaggggggcactcctaccatgcccgcaaagaggatgaaggcaagcacttcaagtttcaagttagcatggcactgaagatctcaatggatgyacccccaaatgtcagcaagtgcaccaggggagcagccgctgggagaaggaggccagccttttttatctttaagcatgcataaactatttttgcagtctaa

SEQ ID NO: 476291 - DNA, 201 bp, Homo sapiens
aaactttcagcttagactgaacttctttggttcgggtgaaggcaactaagtgcggggaaagtggaggccgacaagcacacatcagctatccaagcagggtrgcctagtatatcctgtttcttctgtagtttgctgagctaagccaatttaagacactttgtcttggaaatagaccactgtatacattcttccttcaagact

SEQ ID NO: 476292 - DNA, 201 bp, Homo sapiens
aggcactgggagcaggccctggctctgaatgaccttgggaacacgatctgccaccttagcctgagttttccttgtatgagcaggactggatcaatgaatgmttgccccaaaaggctgcccagaggcaaatgagctagcgtgagaaagccttccaaagagctactcagctacccccttatagctgccgtcacatctgcctca

SEQ ID NO: 476293 - DNA, 201 bp, Homo sapiens
gctggccccgaccacgagccccatcagttccacctctacaccccgccatcacacttggaagcagcaccactcagttagggtcactcgggccacgcaggggstagggaagcaacaaggcgcagccaccgctgagcacgcaggaagactcaccactgaggatctcgttgttgttcccccagaagtcagctaacttggagggtc

SEQ ID NO: 476294 - DNA, 201 bp, Homo sapiens
caagctctggacacagggtggccccatcctcaggccctcctgggaggaacactcagcttcctcacaagccagggacaggccagcctcgcagcggcccctgyggcctgagtggttagtaaaaacaaaaaaaaaggggggcactcctaccatgcccgcaaagaggatgaaggcaagcacttcaagtttcaagttagcatggca

SEQ ID NO: 476295 - DNA, 201 bp, Homo sapiens
gggctgcctgtggcgccagagtgttcttaacctgcttgcacacacatgtgagcagacacatgtatgctgtggggttaacacgctagggtcccattgctccrttctccctgattggccatgaggtctgtctccaccagagccatgtccccactggttcaccactgcccagctttcccgctgctctgcctctcagctgtggct

SEQ ID NO: 476296 - DNA, 201 bp, Homo sapiens
cctcttcacaccgcagccaagggcttcccgtcctctaagaataccagtgcgggtggaattcttcccagaatcccagcatacgttcccctagcctaacaacytggtaattctgcaaaacaggaagaaagcctggacttggcatgggttattcttagagcatggcgctgtctgtgaaggacggaagctttccaggcactctgg

SEQ ID NO: 476297 - DNA, 201 bp, Homo sapiens
ccatgtcactcctctgtcctacctgtggctgccttctgtggctgagtcttcacgtctttgtacattgactggagtccccgccccgagaggcattctgacarcatcccacactgagtgaccctgtcctggagggcagtgccaggcctgtgcagccccgtcctggcccacacaccttcctgcacacagcagcttgggtggcat

SEQ ID NO: 476298 - DNA, 201 bp, Homo sapiens
gcaggatctgctgatccccgccagggtgcaagaggtccctgggcaagctggtgatgggcagccagcttcctcctggccatggtggtcactgtgttcacatrtggtcctactagaaacatcatcttgaaagcaactggcatgacacaggcacatggccaggcctcaccaggcccacagggatggaagagcccagatatgtag

SEQ ID NO: 476299 - DNA, 201 bp, Homo sapiens
ccctgtagcagtcaatagttctttcctaacatttcttccaccttccctgcagcatgctgtctgctgctgggacctgccactcacccaactgcaaaaagggaaaacaccagacacccttccttcctgattccttggcctgaaatgacttcactcagccttgaagtcaagcagcatggtgtctatgcaactttgcagtgactc

SEQ ID NO: 476300 - DNA, 201 bp, Homo sapiens
tcggagagcgtggcccacagaggacagcagaacacagtggccaatcctgcctgagagcgtttgcccactgaacacactggggctcatactctggtggcctygggggcgaaggagacagaagacaaggtccagtcacccccacaggatgaagaacctaacagaagactctcctctaagttaggctgggactccaaagagcga

SEQ ID NO: 476301 - DNA, 201 bp, Homo sapiens
tatgttggccaggctgatctcgaactcctgacctcaggtgatccacctgtctcggcctcccaaagtgctgggattataggtgtgagccaccgtgccgggcytaaatggcattttattatgacacattttctttttttttttttgagatggagtttcgctctgttgcccaggctggagtgcagtggcacgatcccggctcac

SEQ ID NO: 476302 - DNA, 201 bp, Homo sapiens
gatgagggcagttctggccactgatacacgtaggacagacaggcagaaaggcacccccagttcagctgcaggaccccaccatcctagctggccagggtgcrggggcagcagaccagccctccaggcaccagtggcagggagggctccatggtccaagggaaggccataaacagatctccggacagcctggcactggaggtg

SEQ ID NO: 476303 - DNA, 201 bp, Homo sapiens
ggttccagcactcgtagtgcccctgtgcctgaagttctctctggagaaagataccttcatcctatacttcaaagaagtctcaaaatcatttttcaaagacmagaagcagtacatagtcagaaagaaccacataatgaaagaagcaccatgagcaagaaccagcagaaagataaccgtacatgcatcatcaaccaaccatgc

SEQ ID NO: 476304 - DNA, 201 bp, Homo sapiens
ctcgccatcccacaggacccgaaggccccacacacccacagcagctggcatggacacgtgccggggacacgctgggtgactgcacacttagcatacacctygtccccacccagggacctctggggcccagagcaggcagttttccacaatgcaaacgagtgcagaacggagattagattccgaggccacccaagggtgaca

SEQ ID NO: 476305 - DNA, 201 bp, Homo sapiens
gaccaccagggcagcctgcacacaaccaccaggcttgcagaagcagtcagatggccacacgcccatcctctccaggcggaaaatgcttacccctctccatyctgtcaactggcctcacggccaccgggatagcagttgggcaagtaggttacagggcgggtggggcaggtgacgcaaaacctggctgccagggcgggtcca

SEQ ID NO: 476306 - DNA, 201 bp, Homo sapiens
gccctctttacaagagtcctggtgcaccctgggaaggaaatgcgctggagtgtgaggcactggttctctggtcatacggagcggctggcctgtaccactgyctcctggagcacatagggacttggtagacaagcaagggacgaaaggatgtgcgtcgtgaggctcatccatatctgagaaagtccagctcctctcacacag

SEQ ID NO: 476307 - DNA, 201 bp, Homo sapiens
gcctccctgcagcccagacagctagagtgaatgcccaggggacatgcacagcctctgtgcagggaggccggggaactaatcacttgggactttggtgtggyctttgccaaccctgccagggaggtaagagggggacagtcactgtgagctcaccatgtgactgcaaatgccaccagcctcagcagggacagagcacaggcc

SEQ ID NO: 476308 - DNA, 201 bp, Homo sapiens
ggaaactgaggcagggtgaggaagtgcggccagcccacccaccttcaagcagcctggcccggtccgcgcacccagagcccagagcccggagcccccgagcmcaggccggccgggccactagcggagtcggccagccccggagccgcgcactcaccgcctccgccaccgccgccgacttccgggtgccgcgcccgcgcgcca

SEQ ID NO: 476309 - DNA, 201 bp, Homo sapiens
ggtggtctctgtccctgatgagcctcagcctttgtacctctaactgccatgtttcaacccagacccagcccaagtctccatgtcccttctgggcagaagtrccccccaacctctgcagcagggatggcaggagagcccaccttccctgggctggacagtgctagtagaaggcagtgcacttgccccagacctggatgggcc

SEQ ID NO: 476310 - DNA, 201 bp, Homo sapiens
gccaatttaagacactttgtcttggaaatagaccactgtatacattcttccttcaagactgtcccccacatgcacatctcctcccctgcaacagcaccaamcccaccccacacgccaccagtgggggcagccctgcctccgcctccaacagcatggcccactcacctgggatgcaggccctacaggtcctgctcagcacac

SEQ ID NO: 476311 - DNA, 201 bp, Homo sapiens
caggacccgaaggccccacacacccacagcagctggcatggacacgtgccggggacacgctgggtgactgcacacttagcatacacctcgtccccacccarggacctctggggcccagagcaggcagttttccacaatgcaaacgagtgcagaacggagattagattccgaggccacccaagggtgacacccaagttccct

SEQ ID NO: 476312 - DNA, 201 bp, Homo sapiens
gggcaaaggaagtgatgaagagcaaactgggtttacaaagcagcaaaaggaactcggttttttgtttgttgttgttgttttgtttttgctcctgttgcccmggctggctggcataatctcggctcaccgcaacctccgccccccgagttcaagcaattctcctgcctcagcctcccgagtagctgggattacaggcatgcg

SEQ ID NO: 476313 - DNA, 201 bp, Homo sapiens
agcacatagggacttggtagacaagcaagggacgaaaggatgtgcgtcgtgaggctcatccatatctgagaaagtccagctcctctcacacagatgtgacraaagaggtcgcctttgtgatggtcaacacttaaccacccccagtagagtgccatctccagttgggccaggcaccctgcctccctgcagcccagacagcta

SEQ ID NO: 476314 - DNA, 201 bp, Homo sapiens
tcctgtatgttcttgccaacaattcaccaacatgggtactgactgctaggcctttgtctcactgacccgtagtgcagctggtgtgatgtgggcaaccatgygcctgtcccaggcctgcaactgttttctccctagccatcccctgcctttcagctctgcctgtgatgctgtctagtagaaatagccttatattacatggga

SEQ ID NO: 476315 - DNA, 201 bp, Homo sapiens
taaggctgagtctcctgtagccacgactggcagctctggaggctggtgggacccatagttgttaataccatcgctcaggtcacccaggagcacattctggrgggaaacatttccagtgacatttaacgggccaaagccccatcccttcagggctcatgtctgtcatcccagcactttgggaggctaaagcaggaggattgt

SEQ ID NO: 476316 - DNA, 201 bp, Homo sapiens
cacccagcacagtttcgacaagcaatttatcccctagtacgcaggtccctcccccagttcctcataggccgagtactgtggggtcacaattttcccggacrtcgcctattaattgttgggtaggggcttcaggtgtttttttgggggcttgtcttgctgtattttgttgcagcccacaatgcattgcagtcctagttagct

SEQ ID NO: 476317 - DNA, 201 bp, Homo sapiens
gaagcagactgtggggctggaagtgggttgggtccccttgccgggtgccctggaagcgcccacagggggccatcatccgagggtgggcaggctactagggscaatccttttggtaaaaacaactcaagatgctggatgaaatatgaaaacatcttaaaaattgccaggagctgatgagctcatgcagcatttggccaacag

SEQ ID NO: 476318 - DNA, 201 bp, Homo sapiens
gattacaagcatgagccagcacgatcggcctgaatttcttaatgttttccttcactgggcatttaggaccttgttaaagaaggcctttcatctccagagcycatgaagatgctctcccatagcatcttctaggctttaaaacattcagagcttatttgctgtgtggtgttggtgagggctctaatttttctccccgcaacc

SEQ ID NO: 476319 - DNA, 201 bp, Homo sapiens
ggcgtgcacctgtaatctcagctactcaggaggctaaggcaggagaattgtgtgaacctgggaggcagaggttgcagtgacccgagatcgcgccactgtastccagcctgggcaacaaagctagactccgtctcaaaaaaaaaaaaaaagttggggaagcttagaggttctggtttctgtaatcagccttggggaagagga

SEQ ID NO: 476320 - DNA, 201 bp, Homo sapiens
gtgatctgcccacctcagcctcccaaagtgcctggattacaggtgtgagccacagtggcaggccctcatttcctcattgttttgaaacaaggcacatacattttctgtagggaaaagaaagatcagactgttactgtgtctatgtagaaaaggaagacataagaaactccattttgatctgtactaagaaaaattgttttg

SEQ ID NO: 476321 - DNA, 201 bp, Homo sapiens
taagtgttatatgtgttaattgttacgacattctgtgggtttttttgtgtgttcctgtagatactactcagctaacctataaacacaattgatagtttcgtgtgtgtgtgtgtgtgtgtgtgtgtgtgtgtactttgcattttaaaatgtcttttggttactgagggtttccataaaaatcataaatataagatgctcacc

SEQ ID NO: 476322 - DNA, 201 bp, Homo sapiens
catatatgtatatatttacaaacacatacaacttaggtttacatctatatttatttatatgcattgacttctaggtatttatagatagatagagacagatwtaaataaataaataaataaataaataaataaaatatggaaagatatactcctcaaatagtaatggtggctttatctgaacagtagaatacttcgtgattt

SEQ ID NO: 476323 - DNA, 201 bp, Homo sapiens
ctcacccacagggagacgcccccacactcccatttaggacttgttgatggttgtttgctaactttgggcagagcaagaaaaatgaattgccctttagctaycacacacccttcagtcttctccataaaataaaccataagcctgcaaaatcatgtgtaaagtcaacagggaaaggaaagagctgtagtcataaattctaat

SEQ ID NO: 476324 - DNA, 201 bp, Homo sapiens
tgtaaagtcaacagggaaaggaaagagctgtagtcataaattctaatcccaggaggatatgtcaaaggatgcttgcattatatatatatatatatatatatttttttttttcttttcttttcttttcttttctgagacagagtcttgctctgtcacccaggctggagtgcagtggtgcaatctctgctcactgcaacctct

SEQ ID NO: 476325 - DNA, 201 bp, Homo sapiens
gagatatggagatttggagcggcgaatttatctcacatgccagttagacactttattctgtctaattcaggacaaagactgatgatttggggggctaatcaggggattcttttcaagaatacagtgtgatgaagaaggttatcaagacagactgcaaactcttttctctagtaacctctgaaaatagaatcataatgtgaa

SEQ ID NO: 476326 - DNA, 201 bp, Homo sapiens
gaaaattagagttgttagtagttacagtagtcctgccttgtctgcaggggatacatcccaagatccccagtggatgcctaaaaccatgaatagtactgaaytctatatatactatatttttttctgtacatatacatatatatctatgataaagtttaacttataaattaggcacagtaagagatccacaacaataattca

SEQ ID NO: 476327 - DNA, 201 bp, Homo sapiens
agatatggagatttggagcggcgaatttatctcacatgccagttagacactttattctgtctaattcaggacaaagactgatgatttggggggctaatcaggggattcttttcaagaatacagtgtgatgaagaaggttatcaagacagactgcaaactcttttctctagtaacctctgaaaatagaatcataatgtgaag

SEQ ID NO: 476328 - DNA, 201 bp, Homo sapiens
tccttaaccttggcaaaataaacttcaaaattgattaagtcctttctcagatacttttggtgtacagtgggatggagcagagtggtgtgaaattttataayactactcagaacagcgtgcaacttaaaacatgaattatttttggaattttccatttaatattttcaggccatggctgattgtgggtaactgaaaccacag

SEQ ID NO: 476329 - DNA, 201 bp, Homo sapiens
agctccccgctggtgaaatcctgtaatgtgtttctttcaagtccccctccctgcctttgtctcctggtgatgaggtgtaagttctgccttttttcttttctttttttttttattttcagaaagtctttgttgcttcaggcaagcatcagaaactgaatctgctggggtgttggttggactgtgtggcctctctttatccct

SEQ ID NO: 476330 - DNA, 201 bp, Homo sapiens
cactactcagaacagcgtgcaacttaaaacatgaattatttttggaattttccatttaatattttcaggccatggctgattgtgggtaactgaaaccacaraaagtgaaattgcaggtacgaggggaccaatgcatttgcaagtgtaaatgatgtgatcttaatgccatagtttctagagtagcttggagagtctaagtcc

SEQ ID NO: 476331 - DNA, 201 bp, Homo sapiens
atttcaagggctggtaacttgtctagagttgcaccactagcaagtggtacagccaagagtctaatcactctgtttacttcagaacttcagctgttcatccrctgccatattgccagtcccagggccttcctcaagtcctttgtctttgttctttctgcctgaaatgttctttccttagctatttgcatgactggtgatatg

SEQ ID NO: 476332 - DNA, 201 bp, Homo sapiens
gaactggggaggcagaggttgcagtgagctgagattgcgccactgcactccagcctgggtgactgggcaacagagcaatactctgtctcaaaaaaagaataaaaaaaaaagaaagaaaaagaaaaagaaaatgtagtgctatcaaattaagaaaatgcaaaaacctgcaccagttcatctatcagattagggcactccatc

SEQ ID NO: 476333 - DNA, 201 bp, Homo sapiens
gtgaggggatatcttggtgacataactattaagtggtgcagatggctccctaagcttttgctcttacttgctggactgcaggtactgatgtagatttgaasagtctattggacatcccagggcagcagcaaaagtgggtttagagaaaggtagagaatgctaggtctcaccatattttccccccgcagcactacaggacgt

SEQ ID NO: 476334 - DNA, 201 bp, Homo sapiens
aactggggaggcagaggttgcagtgagctgagattgcgccactgcactccagcctgggtgactgggcaacagagcaatactctgtctcaaaaaaagaataaaaaaaaaagaaagaaaaagaaaaagaaaatgtagtgctatcaaattaagaaaatgcaaaaacctgcaccagttcatctatcagattagggcactccatca

SEQ ID NO: 476335 - DNA, 201 bp, Homo sapiens
aattcacgtattttgccatctaacccttatatcaacccggttcagagattccgtagaagaactcacaggactcagaatacagttgtaatcatgactaagaytgattacaactggattgctggtccctagccccttgggagggtggggagggcagccacgtgggctgaattcccacgggcaagccagcctctgcctgaggaa

SEQ ID NO: 476336 - DNA, 201 bp, Homo sapiens
atgggtgtggatttctgtgcttcctgattctgcgtattcaacctccactgaaatgggtgactcgtggttcccaggtccctccttcctccttctgcccaccygagcctgggcatcttactatggggtacagttgggtgaaggagcatcatagaagcaccctagaagagatgattggtgcattagaagctgtctgccaggtct

SEQ ID NO: 476337 - DNA, 201 bp, Homo sapiens
actggggaggcagaggttgcagtgagctgagattgcgccactgcactccagcctgggtgactgggcaacagagcaatactctgtctcaaaaaaagaataaaaaaaaaagaaagaaaaagaaaaagaaaatgtagtgctatcaaattaagaaaatgcaaaaacctgcaccagttcatctatcagattagggcactccatcac

SEQ ID NO: 476338 - DNA, 201 bp, Homo sapiens
cttcctgattctgcgtattcaacctccactgaaatgggtgactcgtggttcccaggtccctccttcctccttctgcccacccgagcctgggcatcttactrtggggtacagttgggtgaaggagcatcatagaagcaccctagaagagatgattggtgcattagaagctgtctgccaggtctgagttgtgttatgcttatt

SEQ ID NO: 476339 - DNA, 201 bp, Homo sapiens
tacattcactaatttgccaagagataacgagggcatatagtgtgagagggtggagggatagggtgggaattggaatgattggcattgagcttctagccagkggatggctctatgctgatcatttccatcgccaccaacaccatcaccattcttattttgagaacttaccttgagctaatattacacgaaattcacgtattt

SEQ ID NO: 476340 - DNA, 201 bp, Homo sapiens
aacctccactgaaatgggtgactcgtggttcccaggtccctccttcctccttctgcccacccgagcctgggcatcttactatggggtacagttgggtgaasgagcatcatagaagcaccctagaagagatgattggtgcattagaagctgtctgccaggtctgagttgtgttatgcttattctctgggtagtctgaggcaa

SEQ ID NO: 476341 - DNA, 201 bp, Homo sapiens
gcacttcgcaccttctttgtgctcaggagcggtgagtgtcagttcggcggctgagcccccagtaagggcgtggttccgggccaacgggaggacgtgctgawggcgctgctttcttccttccccaccgcagctgtttccgactcgcgcgctgaacccaccactacccctcggcccacgcccctggcagttttcacggcataa

SEQ ID NO: 476342 - DNA, 201 bp, Homo sapiens
gcgagggagtctccgggaggcgcggcggggagtaggcagtgtgttgctgacctctggcggtcgctctgcggcacttcgcaccttctttgtgctcaggagckgtgagtgtcagttcggcggctgagcccccagtaagggcgtggttccgggccaacgggaggacgtgctgatggcgctgctttcttccttccccaccgcagc

SEQ ID NO: 476343 - DNA, 201 bp, Homo sapiens
tttcctaaaaggaagagtcaactggtgcggcaaccttgattgttgtcttattttaagaaattgtcacagccaccccagccctcagcaaccaccaccctgaycagtccagggtgaagacaggaatcactgaaggctcagatgatcattagcattttttagcaataaagttttttttaaaaattaaggtatatatatgtattt

SEQ ID NO: 476344 - DNA, 201 bp, Homo sapiens
cattccatgctacagagaaatctttcctaaaaggaagagtcaactggtgcggcaaccttgattgttgtcttattttaagaaattgtcacagccaccccagmcctcagcaaccaccaccctgatcagtccagggtgaagacaggaatcactgaaggctcagatgatcattagcattttttagcaataaagttttttttaaaa

SEQ ID NO: 476345 - DNA, 201 bp, Homo sapiens
tataacatagaagtgcaacgtgaagcagcaagtgttgatgaagaagttgcagcaagttatctaaaagatgtagctaagataattgatgaagatggctacaytaagcaacagatttttaatgtagatgaaacggccttatattggaagaagagaccatctaaggactttcctagagcaaagtcaatgccctgcttcaaagcc

SEQ ID NO: 476346 - DNA, 201 bp, Homo sapiens
ttccacaacagctctgacccctaacccaaaaaaagaggcattgatgctggggctttagatgctgagaaggctgagatggtggagggggtgttgactccatyttggggtatgagtgtgaatgaactcatctgaggaggccacagagcctcccagatgatgactcttcaagcagaggctgagccctcagtctctgagcctctc

SEQ ID NO: 476347 - DNA, 201 bp, Homo sapiens
aacctcctagggtttctccttccactccttgccatgatcttcttctactcccgtattggttgtgtcttggtgaggctgaggcccgcaggccagggccgggytttaaaaatagctgcagccttggtggtggccttcttcgtgctatggttcccatacaatctcaccttgtttctgcatacgctgttggacctgcaagtattc

SEQ ID NO: 476348 - DNA, 201 bp, Homo sapiens
cctacctccatgtgcacagagtacacagtcaaaggcaagtgaagaatgactgtatgcccttccacaacagctctgacccctaacccaaaaaaagaggcatygatgctggggctttagatgctgagaaggctgagatggtggagggggtgttgactccatcttggggtatgagtgtgaatgaactcatctgaggaggccaca

SEQ ID NO: 476349 - DNA, 201 bp, Homo sapiens
ggcagaggttgcagtgagctgagattgcgccactgcactccagcctgggtgactgggcaacagagcaatactctgtctcaaaaaaagaataaaaaaaaaagaaagaaaaagaaaaagaaaatgtagtgctatcaaattaagaaaatgcaaaaacctgcaccagttcatctatcagattagggcactccatcaccgcatacg

SEQ ID NO: 476350 - DNA, 201 bp, Homo sapiens
aggttgcagtgagctgagattgcgccactgcactccagcctgggtgactgggcaacagagcaatactctgtctcaaaaaaagaataaaaaaaaaagaaagaaaaagaaaaagaaaatgtagtgctatcaaattaagaaaatgcaaaaacctgcaccagttcatctatcagattagggcactccatcaccgcatacggaacg

SEQ ID NO: 476351 - DNA, 201 bp, Homo sapiens
ggttgcagtgagctgagattgcgccactgcactccagcctgggtgactgggcaacagagcaatactctgtctcaaaaaaagaataaaaaaaaaagaaagaaaaagaaaaagaaaatgtagtgctatcaaattaagaaaatgcaaaaacctgcaccagttcatctatcagattagggcactccatcaccgcatacggaacgc

SEQ ID NO: 476352 - DNA, 201 bp, Homo sapiens
agattgcaccattgccctccagcctgggtgacagagtaagactctgtctccaaaaaaaaaaaaaaaaaagaaagaaatcagttaatgagtcatgtctagctatttatttatttatttatttatttatttatttatttattattcattattttttgagatggagtctctctctctctgttgtccaggctggagtgcagtggc

SEQ ID NO: 476353 - DNA, 201 bp, Homo sapiens
gattgcaccattgccctccagcctgggtgacagagtaagactctgtctccaaaaaaaaaaaaaaaaaagaaagaaatcagttaatgagtcatgtctagctatttatttatttatttatttatttatttatttatttattattcattattttttgagatggagtctctctctctctgttgtccaggctggagtgcagtggca

SEQ ID NO: 476354 - DNA, 201 bp, Homo sapiens
attgcaccattgccctccagcctgggtgacagagtaagactctgtctccaaaaaaaaaaaaaaaaaagaaagaaatcagttaatgagtcatgtctagctatttatttatttatttatttatttatttatttatttattattcattattttttgagatggagtctctctctctctgttgtccaggctggagtgcagtggcac

SEQ ID NO: 476355 - DNA, 201 bp, Homo sapiens
ctaaactgagagtaattcacgtattatggaacaattttccaaacatatatataaattacaaaccacacctctctcccacctccaaagttgtgatgagataraagcaaaactgtagcaccagcaaaactaaataaaactttgtaataaggctttaagtgccctgaatctcttccaaggatcaagatgaaccctagagctgca

SEQ ID NO: 476356 - DNA, 201 bp, Homo sapiens
ttgcaccattgccctccagcctgggtgacagagtaagactctgtctccaaaaaaaaaaaaaaaaaagaaagaaatcagttaatgagtcatgtctagctatttatttatttatttatttatttatttatttatttattattcattattttttgagatggagtctctctctctctgttgtccaggctggagtgcagtggcaca

SEQ ID NO: 476357 - DNA, 201 bp, Homo sapiens
gcccaatggagcctttgaagcaatgagaatgaatgaactgcaactgcacgtcatctcgcaaacataatgttgaacaaatgaaaccaacacaaaagaatatrttctatacgaccggttagcatttttagaagctaacttgtaatgttagaagtcaggagagttgctaccatacttagggtggtaggttactggaaaggcgca

SEQ ID NO: 476358 - DNA, 201 bp, Homo sapiens
caatttgaacagcaagataaataatgagagtaacaggataaaataaatacccatgagttcatactaatataaatacttaagaagaaaggctaactcttttaaaaaaaaaaaatttttttttttttttttttttttgagatggggtctccctctgttgcccatgctggagtgcacggcacaatcttgtctcactgcagcctc

SEQ ID NO: 476359 - DNA, 201 bp, Homo sapiens
ttttaaaatgcataaaataaaacacatatgattatcaattctactgaagtttctaagaatgtcaatcccattgaaatagttaccaagttttaaaaaaattrtagtatagcgtgtgctatttatgtgtatctttattaatgccttaaatacaagatctagcagtgggtctgaatttccaggaagtaatgaatgtaaatattt

SEQ ID NO: 476360 - DNA, 201 bp, Homo sapiens
cattcctacttggcccccttggtcaagtaagttaacctcactgtggctccactccctcatctgtgaagtagggataattacagtgccttgtaggtgctgtygtgaggcaaaaagagataacacctgaaaagcacttagaatagtgcctggctcatgctagtgctccatatatgttagttagtatcctaaagccttttctct

SEQ ID NO: 476361 - DNA, 201 bp, Homo sapiens
aggataaaataaatacccatgagttcatactaatataaatacttaagaagaaaggctaactcttttaaaaaaaaaaaatttttttttttttttttttttttgagatggggtctccctctgttgcccatgctggagtgcacggcacaatcttgtctcactgcagcctccacttcccgggctcaaacaatcctctcaactcag

SEQ ID NO: 476362 - DNA, 201 bp, Homo sapiens
ataaaaaaaaagagaagaaaagaaaaagaaaaacagaaactctcatcgtggccagatggagccagagatttgtgagaagacgaggcttaaagagtaaaagsctatcagtgtgcgagatgggttgaaaaacaaaaaataaaaggtgaaatccgagactgccacgctcacctaggagaagttgcaaaacctccttagtgatgt

SEQ ID NO: 476363 - DNA, 201 bp, Homo sapiens
cagacagctcttgcaccttctctctaagcctgccttgagcccactcccacccccatagctgacagactatttatacccccatttactcatgcttttatttrtttgccagttcagttggtagaaatgaatcaagcacttacaaaatctcacttccactctttcctcatctttagaagactcaacaaatgcctccattcctac

SEQ ID NO: 476364 - DNA, 201 bp, Homo sapiens
aagaccaaaggtagataaatccatgaagatgaggaaaaaccagtgcaaaaaggctgaaaattccaaaaaccagaacacctcttctcctccaaatgatcacaactccttgcaggcaagggaacaaaactggatggagaatgagtttgatgaattgacagaactaggcttcagaaggtgggtaataacaaactcctctgagct

SEQ ID NO: 476365 - DNA, 201 bp, Homo sapiens
ttccaggaaggagtagctggcactgggatgggcaggaacagcaatgtctctactgatggtttcattggagaaagctggcaaagttgagaagtttggagacyaaccgtgacaaaatttaaacatcaggtatgtgaaggcaagggggaccaactgtgacaaaatgtaaacgtcaagtgtgtgaagtcaaaggggaaccaggaa

SEQ ID NO: 476366 - DNA, 201 bp, Homo sapiens
atgccccagtaggctccagtctagggaagtgggcagcaggcagaaaccaagacacagaaagcaacgacacataacagatatgctatgatacaaatggtgcygcaggagctgcacagttcggaggccatttctggccagaggatgggatgcgtgaaatccaggaaggcttccaggaaggagtagctggcactgggatgggca

SEQ ID NO: 476367 - DNA, 201 bp, Homo sapiens
cagctccagctggagccctgccatcagccagctgcagctatggcagccaccccctcaccctcttgtagcactgataagcacgctgggaagggggattgtcytcatttcatagattggagggctgaggccaggaaatgatttgaggactgaaagtaaattagccgagactggaagtcaggtttctaacatttaatctccact

SEQ ID NO: 476368 - DNA, 201 bp, Homo sapiens
caggcatgagctaacttttgtatttttgtatttttaatagagacagggtttcgccatgttggccaggctggtctcaaacttctgagctaaagtgatctgcmcacctcggcctcccaaagtgctgggattacaggcatgagccacttcgcccagtcctatttgtctttcatgcctttctctgtgtatgtgtgagtgtgtact

SEQ ID NO: 476369 - DNA, 201 bp, Homo sapiens
tgcctgcccacatggcatctctctctcccgagcttctaaagcacccactgctcttcccacctcatagaactacctggtgcaacctgcccacgtcccagcaygtctgccctgcacaattgaacgtggaacctggcacacaggaaaggaaactttttggtggatggaatggagggtaggagaacagacggctgggtgaatgta

SEQ ID NO: 476370 - DNA, 201 bp, Homo sapiens
ctgtagtccagctgggaaatgctattaaaaggaccattctcgtagccttgatggtggacccagcatctggcaatcaggagggccttgaagtactctgcctrgggaatgtcccaggaccatatacagtctgcagaaggaggcagtgaacacacttggcctaggccccatctcaggagccttcacatctccctgggacctgca

SEQ ID NO: 476371 - DNA, 201 bp, Homo sapiens
ctctctcctgtgtagcctgtcagccttcgtgtctccagtcattctcttcctagacagacttgtctgggatgttcagaactggaagtttggtggcttgcccygacatgtccaatactcagtaagcaagcagaacttaccctctttgggctctctgcactgtgtgctcttctaagccatgcaatcaacttctaagaccataag

SEQ ID NO: 476372 - DNA, 201 bp, Homo sapiens
gaccattcttgaggataggagggtgacaagccacaaggtgcacaaccagcagtgcacaaggtgaacttgaatacaattcagagtctgccaaagccctgcgrcagttttagccaagaaaggaaagggagttactgtgtggcattcaagatggactgagtgaagactacagataagtttcctaggactgtgtggagatgccag

SEQ ID NO: 476373 - DNA, 201 bp, Homo sapiens
cttaattttattaaaagagtatcttgtacatatttttatgggacttagagataagtgggctgattcaagaggagagactcacagggtggtggtggtgaggrtgatggggaaagaatctgcaaggtatcccatatttcagtcttaggtgactgagtagttggtggagtcattcagttagataggcctaggaaagaagaaagg

SEQ ID NO: 476374 - DNA, 201 bp, Homo sapiens
accatgttggccaggctggtcttgaactcctgacctgaagtgatctgcccacctcagcctcccaaagtgcctggattacaggtgtgagccacagtggcagrccctcatttcctcattgttttgaaacaaggcacatacattttctgtagggaaaagaaagatcagactgttactgtgtctatgtagaaaaggaagacataa

SEQ ID NO: 476375 - DNA, 201 bp, Homo sapiens
ccatgaatctattttgggtatttgcctattctggacatttcatataaatggaatcgtacaatatatggacttttgtatcagatttcttttacattgtatartgttttcaaggttcatccatgtcatagcatgtatcgatactttattccttttaaatggctgaataatatttcactgcatggatataccacactttgctta

SEQ ID NO: 476376 - DNA, 201 bp, Homo sapiens
ggaagcccatcagactaacagctgatctctctgcagaaactctacaagccagaagagagtgggggtccaatattcaacattcatttttttttttttttgaracagagtctcactctgttgcccaggctggagtgcagtggcgcggtcttggctcactgcaagctccacctcctgggttcacgccattctcctgcctcagcc

SEQ ID NO: 476377 - DNA, 201 bp, Homo sapiens
tagacagatcagcaagacagaaaattaacaaggatattcaggacttgaactcacctctggaccaagtggacctagtagacatctacagaactctccacccyaaatcaacagaatatacattcttctcagcatcctgataccacaacatcacacttattctaaaactgaccacataattggaagtaaaacagtcctcagcaa

SEQ ID NO: 476378 - DNA, 201 bp, Homo sapiens
caaaaaccacattattttctcaatagatgcagaaaaggccttcgataaaattcaacaccccttcatgctaaaaactcaataaactaggtactgatggaacwtatctcaaaataataagagctattggtgacaaacccacagccaatatcatactgaatgggcagaatctggaagcattccctttgaaaaccggcacaagac

SEQ ID NO: 476379 - DNA, 201 bp, Homo sapiens
ctctgtcatccaggctgaagtccaatcccacaatcatggctcactgcagccaccacctcctgagctcaagtgatcctcccatctaagcccccaagtagctrggactacaggagcacaccaccacacctggctaatttttgtattttttgtggagacagggtctcagtatgttacccaggttggactggaaacccttggctc

SEQ ID NO: 476380 - DNA, 201 bp, Homo sapiens
tcaccactcctgttcaacatagtattggaagttctggccagggcaatcaggcaaagagaaagaaataaagcgtattcgaataggaagagaggaagtcaaaytgtctctgtttgcagatgacatgattgtatatttagaaaaccccatcgcctcagcccaaaatctccttaagctgataagcaacttcagcaaagtctcaga

SEQ ID NO: 476381 - DNA, 201 bp, Homo sapiens
tcgtaaaaccctagaagaaagctaggcaataccattcaggacataggcattggcaaagacttcatgactaaaacaccaaaagcaatggcaacaaaagccaraattgacaaatgggatctaattaaactaaagagcttctgcacagcaaaataaactatcatcagagtgaacagacaacctatagaatgggagaaatttttg

SEQ ID NO: 476382 - DNA, 201 bp, Homo sapiens
ccagaatctacaaagaacttaaacaaatttacaagaagaaaacaaccccatcaaaaagtgggtgaaggatatgaacagatacttctcaaaagaagacattyatgcagtcaacaaacatatgaaaaaaaagctcatcatcactgggcattagagaaatgcaaataaaaaccacaatgagatgagataccatctaaccccagt

SEQ ID NO: 476383 - DNA, 201 bp, Homo sapiens
aggggagggataacattagaagaaatacctaatgtaaatgacagattgatgggtgcagcaaaccaccatggtatgtatatacctatgtaacaaacctgcaygttttgtacatgtatcccagaacttaaagtataataaacaaaattttttaaaaaagccccactgaagctaagctgtcattaaagaaattataaaccatac

SEQ ID NO: 476384 - DNA, 201 bp, Homo sapiens
ttcctccactttcttcacttgcttccaggataccacgctttcttttctgaattgctacaatctttcttccttccttccttgcttccttccttccttccttccctctctccctccctccctccctcgcttcttcccttcctcctttcctcccttcctactttccttccttccttctgacagggtcttgctctattgctctgt

SEQ ID NO: 476385 - DNA, 201 bp, Homo sapiens
tttcaaagttactttctatatgcggccggaacagggtggttgacatcagttttcttcaggttactttttaataatgattaaaacggggaacttcattatcmtgagcatggttactgtctgcattattacgccaactgaaactgtcatgtttgggaatttggctgttaactctgtctccaggagtctcaaaggtcagataac

SEQ ID NO: 476386 - DNA, 201 bp, Homo sapiens
cactttcttcacttgcttccaggataccacgctttcttttctgaattgctacaatctttcttccttccttccttgcttccttccttccttccttccctctctccctccctccctccctcgcttcttcccttcctcctttcctcccttcctactttccttccttccttctgacagggtcttgctctattgctctgtcaccca

SEQ ID NO: 476387 - DNA, 201 bp, Homo sapiens
ggttgtagtgagccaagatcacaccactgcactgcagcctgggcaacagagtgagactctgtctcaaaaaaaaaaaaaggtatcatttctctagacctgtkgctatccaatagggcagccacctgccacacacggcaattaagcacttggaatgtggctagtctgaactgggaagaactgcaaaagtacagtacataccag

SEQ ID NO: 476388 - DNA, 201 bp, Homo sapiens
  misc_feature (1)...(201): n = A,T,C or G
gcccaggcctcattatccagctgttctgagagcagcatacttactgcccaagaggaaatgactggcatgaatgaccttggagagaggcagtctgagaactnccctaacaaggaggatgtggggaataaatcagcctgagtgaccaaattttggtctggtgggaacagatgggaaccagctcaattgggtgtccactcaaag

SEQ ID NO: 476389 - DNA, 201 bp, Homo sapiens
gggtgcagcaaaccaccatggtatgtatatacctatgtaacaaacctgcacgttttgtacatgtatcccagaacttaaagtataataaacaaaattttttwaaaaagccccactgaagctaagctgtcattaaagaaattataaaccatacatgaggaagggtcaggagacacattaaatagatgaattgatatccctaaa

SEQ ID NO: 476390 - DNA, 201 bp, Homo sapiens
tgtatatgccctgagggaactaacacagttgcataggatggcaagaaacctatacatttttgcggaatgaattaataaaatctattgacttttgtgctctrcttttctcccttaactttattgcagcaagcaatcaaataaaggtaattagtcctagtttgttctacactaagtatatcacactgtgattctgatttcata

SEQ ID NO: 476391 - DNA, 201 bp, Homo sapiens
gaactacaaaccactgctcaaggaaataagagaagacacaaacaaatagaaaaacattccacgctcatggataggaaaaatgaatatcgtgaaaatggccrtactgcccaaagtgatttatagattcaatgctatccccatcaagctaccactgactttattcacagacttagaaaaaactactttaaattttatatggaa

SEQ ID NO: 476392 - DNA, 201 bp, Homo sapiens
tgtgtatatgtgttttcctagggacatatgatttcaattttcttgggcatataccagaccatatgtttaagttcttaaggaattaccaaaattgttttccratgtggctgtgccattttacattcacagcagcaatgtatgagggttccagtttctccatgtttctctttttgaattatagccatcccaatggatgtgaag

SEQ ID NO: 476393 - DNA, 201 bp, Homo sapiens
caggaacagagttgggccttagataaagccactcaggctgagctcctggggtgggggcaggtcatgtgtggtttccacagcatctggtccagatgccatcrgataggagcccaagggtggggcagaagctcacagagtgggaggactccagggctccctcaggagaggttctgtttcagcagcactgaatagttccatcag

SEQ ID NO: 476394 - DNA, 201 bp, Homo sapiens
gggtttcgccacgttgaccaggctggtctcaaactcctgacctcaggtgatccacccaccttggcctcccaaagtgctggaattacaagcatgagccaccrcacccagccttcaatcacacctttctcagtgactcctttttgtaactgctaggtagagcagaacagaggctaaggatgaggtgggaccagggacaaggta

SEQ ID NO: 476395 - DNA, 201 bp, Homo sapiens
ctcagctcactgcaacctctgcctcctgggttcaagtgattctcctacctcagcctcccaagtagctgggattacaggtgtgcactaccatgcccggctawtttttgtatttttagtagagatggggtttcgccacgttgaccaggctggtctcaaactcctgacctcaggtgatccacccaccttggcctcccaaagtgc

SEQ ID NO: 476396 - DNA, 201 bp, Homo sapiens
agtttatgtctttctagaaatttgttcatatgaattatctaatttattggcatacagatgttcatagtattttcttataatctttttttctatagtgattytctctcttttatttctgattttagcaattagagtcttctcccttttttcttagtcaattagttaaaagtttgtcagttttgctgatgttttccaagaaca

SEQ ID NO: 476397 - DNA, 201 bp, Homo sapiens
ttattctcatgtaagctcagatctcttgcataccaggtatgggtcctttggggatccatggaccttagattaagactcctttaattgttgcctctgactcmtctccctttgcccctgactattcccagggctttgctggaaacctgcctgtgagctgacaactagcaaagagtgctaagtgtttgttaaacaaggcaagat

SEQ ID NO: 476398 - DNA, 201 bp, Homo sapiens
gcatgaatgaccttggagagaggcagtctgagaactaccctaacaaggaggatgtggggaataaatcagcctgagtgaccaaattttggtctggtgggaayagatgggaaccagctcaattgggtgtccactcaaagtgctctctccaggggcctcagtgactgtgttgctaaacccagtggtcagttctcagttctcagc

SEQ ID NO: 476399 - DNA, 201 bp, Homo sapiens
gggctgtgtccctggccgtctccatccctgatatggtctttgtacagacacatgaaaatcccaagggtgtgtggaactgccacgcagatttcggcgggcaygggaccatttggaagctcttcctccgcttccagcagaacctcctagggtttctccttccactccttgccatgatcttcttctactcccgtattggttgtg

SEQ ID NO: 476400 - DNA, 201 bp, Homo sapiens
tgcctcagcctcccaaagtgctgggattacaggcatgagccactatgcccggccttcagctttcttttggttctaatcatatatgtggtaaagtgattgayttagacagttatgttaatgtgaacagtgctgttaatgttattgaatttgattaaaataaagctccataatttattttattttatttagcattagggcctt

SEQ ID NO: 476401 - DNA, 201 bp, Homo sapiens
gctggtctcaaactccttacctcaggtgatctgcccacctcagcctcccaaagtgctgggattacagacgtgagccaccatgcctgtctagcactcagtattttttattgctgttggggacagcaggacacttaacaagtactaatgaaaaaaaaatttggtagagtggaaaaggcactggctttgggcccctggattgct

SEQ ID NO: 476402 - DNA, 201 bp, Homo sapiens
ttgtagtgagccaagatcacaccactgcactgcagcctgggcaacagagtgagactctgtctcaaaaaaaaaaaaaggtatcatttctctagacctgttgstatccaatagggcagccacctgccacacacggcaattaagcacttggaatgtggctagtctgaactgggaagaactgcaaaagtacagtacataccagac

SEQ ID NO: 476403 - DNA, 201 bp, Homo sapiens
tagtgattttatgcacccaaccatatgaagcaaaaatgccctcattttacagaggagaaaattgagatttcaagggctggtaacttgtctagagttgcacmactagcaagtggtacagccaagagtctaatcactctgtttacttcagaacttcagctgttcatccactgccatattgccagtcccagggccttcctcaag

SEQ ID NO: 476404 - DNA, 201 bp, Homo sapiens
caaccatatgaagcaaaaatgccctcattttacagaggagaaaattgagatttcaagggctggtaacttgtctagagttgcaccactagcaagtggtacarccaagagtctaatcactctgtttacttcagaacttcagctgttcatccactgccatattgccagtcccagggccttcctcaagtcctttgtctttgttct

SEQ ID NO: 476405 - DNA, 201 bp, Homo sapiens
gtacatatttcagaggcatcacaggggggtgtactgataggacgggggcctgcttgtatgaaggtgaaagaggaggagggagagtgtctctgggagatggrgtgaatggtagtgttctgagcagagagagcagggaaatcaggaggaggagtggttcagggaagaggcaggggttcagatgccaagttctgcattggccaa

SEQ ID NO: 476406 - DNA, 201 bp, Homo sapiens
aaattgagatttcaagggctggtaacttgtctagagttgcaccactagcaagtggtacagccaagagtctaatcactctgtttacttcagaacttcagctsttcatccactgccatattgccagtcccagggccttcctcaagtcctttgtctttgttctttctgcctgaaatgttctttccttagctatttgcatgactg

SEQ ID NO: 476407 - DNA, 201 bp, Homo sapiens
taggagggacccagtgggagataattgaatcatgggggcggtttccccatactgttctcgtggtagtgagtaattctcatgagatctgatgattttgtacygggaaaccccttttgcttggttctcattctctcatctgccaccatgtaagacatgcctttcgccttctgtcatgattgtgaggcctccccagccacgtgg

SEQ ID NO: 476408 - DNA, 201 bp, Homo sapiens
gttctcgtggtagtgagtaattctcatgagatctgatgattttgtaccgggaaaccccttttgcttggttctcattctctcatctgccaccatgtaagacrtgcctttcgccttctgtcatgattgtgaggcctccccagccacgtggaactgtgagtccattaaacctctttttctttataaattacccagtctcgggta

SEQ ID NO: 476409 - DNA, 201 bp, Homo sapiens
tcatggtccccttgcactgaacggtatccaaataccttcagcaccagtttttttgcatattgcccaaagtctagttttctctgtgtgtccttgaggatggrgccaaaggagagggggtccatgacgaaggtgaagtactggccccctagctgcactgtgaacacatccccatgcttggtcctcatgcgcttcagaaattca

SEQ ID NO: 476410 - DNA, 201 bp, Homo sapiens
caccccagtctcccagtgcacaggtgggcccttagtctgagccactccacattgatttatttcccttactgcacatgtgttaagggacagaattcttcgcygtgggcatgttaggcaagccccctgtgcacaatgacctgagcagcatttggctgtctcatttctatcaactctgtggagaaaggcatctaaagaggtggt

SEQ ID NO: 476411 - DNA, 201 bp, Homo sapiens
tggctttgaaccttcctgccactagttgccgaggccagaagtcccactgtcggaacctcaaccttcgaatttaagtttgatccattttgaaagggagtgtkggggggaaggggtcgtcacttccacctcacgttgtgagggccatccaatccccggccccccatttgctaatctgaggctgtggacaattgggcttcacct

SEQ ID NO: 476412 - DNA, 201 bp, Homo sapiens
atatatattattatggcaatcaggaaaaaataacatgttaaaaaagtaaggagagagagtgtgccgtgatctggaatcagaggccagctgattcctctggscagctgtgcctggcttacagtgtggccctggatttcctgggaaactagagaggcgatacctgttcaccccttcacgagggagccaggaagacacagcaat

SEQ ID NO: 476413 - DNA, 201 bp, Homo sapiens
tgctcctttcccaaattcttggcccccttccttctgcccaaaacagttccagattcaaatagtccctggatctcctcccatgcatcccagcctgaatcaartgtcatttaatcagcgagtttattcattttaggggctggaagagaaccaatagtatatgccaggcccttagtttaccataataaccctgcaagggaggca

SEQ ID NO: 476414 - DNA, 201 bp, Homo sapiens
cacttccctgaggaagaggcacctggcgctgccgctctcctcccaggcttgtggtggacattctcaagcaagtcattctggctccggtaggttatagccayactcggggtgtggggtgggggtgagacttcccaggggacacagggagagactgaacccagtggcttggggagtgggcacaggtgctgggaagagggaggt

SEQ ID NO: 476415 - DNA, 201 bp, Homo sapiens
gtgtgtgactccaatgccatgcctttaaccacctgacattactactctattattgctcagtccaggtggagacaacaggcattcaccaagcacttgctgtrtgtcaagggggcagtgggactggaggtgagggtggctgaggtactgatcctggaccacaggtgctgtcctgggaaggcagaccctcatactgctaagcat

SEQ ID NO: 476416 - DNA, 201 bp, Homo sapiens
aaaataaggatgtacaaaaggggggaggtgagggagaataaaaaaggagcccaggtcctagaacttagctgttctgtgggagggaccgaggaccctgtggstcttgttgggcagctccttgggtctctctattggaaactagtgtttggcctagagaaacttggaggcctcacttgaaaggtcccctgcttccttctgcct

SEQ ID NO: 476417 - DNA, 201 bp, Homo sapiens
atcatgtcaatgttaatttccttgtttagattcttagtcagtactgtgattatgtagatgtgttaaaagtaaaaccttagaggccggctgctgtggctcgyggctagaatcccagcacgttgggaggctgaggcaggtggatcacttgagctctggagtgggagaccagcttgaccaacatggtgaaaccttgcctctatt

SEQ ID NO: 476418 - DNA, 201 bp, Homo sapiens
gcaattcttgtgcctcagcctcctgaacagctggaactacaggtgcatgggaccatatctggctaatttttttgtatttttggtggagacggggtttcacygtgttagccaagctggtcttgaactcctgacctcaggtgatccacccacctcagcctccgactgacattttaaaaaacgtaatagtgccttaacccctag

SEQ ID NO: 476419 - DNA, 201 bp, Homo sapiens
ggctacctgtggccctgttcaccttggactccccatgtgccatgtccctgtgccccctaagtcccgcaaacaccaggaccgtggccataagacagggcacrgtgtccctctaatgtttagactgacctgcttccctgctgcctcttaccttctcagcctggggaatgcttttttagtttggtatagaatagaaagagaacc

SEQ ID NO: 476420 - DNA, 201 bp, Homo sapiens
tggaacagaacagaggcctcagaaataacatcacaggtctacaaccatctgatctttgacaaacctgacaaaaacaagcaatggggaaaggattctctatytaataaatggtgttgggaaaactggctagccatatgcaaagaactgaaactggacccattccttacaccttatacaaaaataaactcaaggtggattaaa

SEQ ID NO: 476421 - DNA, 201 bp, Homo sapiens
tacactctttgcccttatgtccaccagcctccagtgctccagacacaactgatctcaaatactcctgacacatccccctggggattcctcttcctggattrctctcctctcagctgtctgcttggctcactctctcaccttctgaggtcttagctcagataccacctttcactcacctgtccaacctatttaacacaaact

SEQ ID NO: 476422 - DNA, 201 bp, Homo sapiens
atggagatttggagcggcgaatttatctcacatgccagttagacactttattctgtctaattcaggacaaagactgatgatttggggggctaatcaggggwttcttttcaagaatacagtgtgatgaagaaggttatcaagacagactgcaaactcttttctctagtaacctctgaaaatagaatcataatgtgaagtaca

SEQ ID NO: 476423 - DNA, 201 bp, Homo sapiens
acctctgaaaatagaatcataatgtgaagtacaatacctgcaattatggtagcacacattaaatgaaataggaggataatataagagcaggcccatagttrtatatattagtggactaaatgagtgatatctttattgtgatcatcatggtcacatttattgacagtcagtttagggcaaaacactcctgggagaggggag

SEQ ID NO: 476424 - DNA, 201 bp, Homo sapiens
cagtcagtttagggcaaaacactcctgggagaggggagcatcaagccatctgaaattggacggaattaaagagttagaaaaggaacagagcaggtgtcctsgtatagagtggacttgaacagggtgaaagaatgggcgatctttggatggagagaaggggagaagaaaatgagggtgagtaaaaggccacagaggttggaa

SEQ ID NO: 476425 - DNA, 201 bp, Homo sapiens
cgatctttggatggagagaaggggagaagaaaatgagggtgagtaaaaggccacagaggttggaatgtgtaagatacacatttcatcaatgcaaaaatacmagaaggtggcaaacgtggactttggtagaggcatggcacaggaaaattgctgttcataagtccacataggtgtgtcagcttccaaacaatattagctcac

SEQ ID NO: 476426 - DNA, 201 bp, Homo sapiens
tggtgtcctttggcaaagtcttcctcccagtcttctatagcctgatttttgtgttgggcctcagcgggaacctccttcttctcatggtcttgctccgttaygtgcctcgcaggcggatggttgagatctatctgctgaatctggccatctccaaccttctgtttctggtgacactgcccttctggggcatctccgtggcct

SEQ ID NO: 476427 - DNA, 201 bp, Homo sapiens
catagctgagggtaccccctgctccctcagaaactgaagcatgttgcccagccagttgctgatgccctccttctcctggctgtggctcacggagagcatcytgtgaaagagacgctggagtcggcccacttctagccactcccggggccacagcagggagtagacaaaccttgggaaaagaaggtcaaacttgcggaactc

SEQ ID NO: 476428 - DNA, 201 bp, Homo sapiens
gcactgagaggtagggaaagagggccaggatgtctccatggcggaacagatactcctgcccactggacatcttcagggtatagtcttcatgaaccaacctraggagggtgggtgcagccctcagccgcagcgtctcctccaccacgctgtctagaactggggtgtgttgcagggcaccgagtttgaaggcaaaggactgct

SEQ ID NO: 476429 - DNA, 201 bp, Homo sapiens
agggcaccgagtttgaaggcaaaggactgcttggtctccagcctggcctcacccaggacctgggtagcttcctccctcacagcccgaatagcttctgggtrcttcaggaggtacaagagggcccagaaagaggtaggccccgtgttcccctgggaggcccagagcatcatgaagttgaacttgtcctgcatagctgagggt

SEQ ID NO: 476430 - DNA, 201 bp, Homo sapiens
aaagtgctatgtttatgcctggtgttctgatttagccaaagtgttcctgagcctatttatatgcccagaactctccatttagagggaattgagttctttasgagagaggactgggatcaggccaaacaggccatgaacccatgttcccttttccagattccaagcccacacccagagcttctgcttccaaacattccatca

SEQ ID NO: 476431 - DNA, 201 bp, Homo sapiens
ctgatctctctgtgcctcagttcctcatttgtaaaatggaaatgaccctaccgcttcatagggttggttggtgtgaagattagatgagtttaggtgttgtyggccacagtgatggcactgattgtcattggagaggtagacagaggttgaggcctttctgggcattagaaacagcacaaactgtgcagagacaggatggtt

SEQ ID NO: 476432 - DNA, 201 bp, Homo sapiens
tttttttttttttttgagatggagtttcactcttgttgcccaggctgtagtgcaatggtgtgatctcagctcactgcaacctctgcctcctgggttcaagygattctcctacctcagcctcccaagtagctgggattacaggtgtgcactaccatgcccggctattttttgtatttttagtagagatggggtttcgccacg

SEQ ID NO: 476433 - DNA, 201 bp, Homo sapiens
tttagaaggggccaggaacacctagtagttaggcacacaggctctctcatcagcctggattcaaaacctggctccatcactccctagcattgggattttgrgcaagtcttcctgatctctctgtgcctcagttcctcatttgtaaaatggaaatgaccctaccgcttcatagggttggttggtgtgaagattagatgagtt

SEQ ID NO: 476434 - DNA, 201 bp, Homo sapiens
atcttacttgactcttctatcatatttgacattatgaatcttccattgacactcttcttctcattctccttccagtctggtcattctttcttagttacagkgactgaatttatttcctgtgtcccttaaatattggtgtgctctagggttctgtgctctctttccttcttactctctgcccttctcttagagtaatctcat

SEQ ID NO: 476435 - DNA, 201 bp, Homo sapiens
acctataaacacaattgatagtttcgtgtgtgtgtgtgtgtgtgtgtgtgtgtgtgtactttgcattttaaaatgtcttttggttactgagggtttccatraaaatcataaatataagatgctcaccatcaatatggtgtacttcagcaaagaagaagctaggagctagaaaccacctttgatctctttagtttacatagt

SEQ ID NO: 476436 - DNA, 201 bp, Homo sapiens
gcaagataaataatgagagtaacaggataaaataaatacccatgagttcatactaatataaatacttaagaagaaaggctaactcttttaaaaaaaaaaawtttttttttttttttttttttttgagatggggtctccctctgttgcccatgctggagtgcacggcacaatcttgtctcactgcagcctccacttcccggg

SEQ ID NO: 476437 - DNA, 201 bp, Homo sapiens
ttacaagaaaatgacaatgacacacttacatctttcataatacagacattataattggtaacaaacatgcaacatctattattccattcttcgtattgggygtcattttgaagtataattgatgcagaagacttaacacattatttgggttttcaggtattaaaccaacccacctgtaatttatagaaagaaaggcagcac

SEQ ID NO: 476438 - DNA, 201 bp, Homo sapiens
tttcctgctgaccttctccccattatcaccctgttctcctgccgcattcccctagccgagatagtgaaaatagtaatcaataaatgctgaaggaactcagwgaccggggcctgtgcgggtcctccatatgctgagcgccggtcccctgggaccactgttctttctctatactttgtctctgtgtcttattccttttctcag

SEQ ID NO: 476439 - DNA, 201 bp, Homo sapiens
tctggcctacgtgcacatccgggcacagtaccttcccttaaacttatttgtgacacagattcctttgctcacatgttttcctgctgaccttctccccattrtcaccctgttctcctgccgcattcccctagccgagatagtgaaaatagtaatcaataaatgctgaaggaactcagagaccggggcctgtgcgggtcctcc

SEQ ID NO: 476440 - DNA, 201 bp, Homo sapiens
cttagctgaagggtgccttgggcagatgtacaaaagaggagataacacagtctgagtggccagcgggggccaggctggggacagcacagaaagaggaagtrgaagaggtgagaggagcatcatttccttccttttgtgccgtcaatggagcatgttaggaagatctgaggttctggcataacagcaaataaaagtgagtaa

SEQ ID NO: 476441 - DNA, 201 bp, Homo sapiens
tcaggaggtacaagagggcccagaaagaggtaggccccgtgttcccctgggaggcccagagcatcatgaagttgaacttgtcctgcatagctgagggtacmccctgctccctcagaaactgaagcatgttgcccagccagttgctgatgccctccttctcctggctgtggctcacggagagcatcttgtgaaagagacgct

SEQ ID NO: 476442 - DNA, 201 bp, Homo sapiens
tagatagatagagacagatataaataaataaataaataaataaataaataaaatatggaaagatatactcctcaaatagtaatggtggctttatctgaacrgtagaatacttcgtgatttttatttccgtttttaaaaatatatttatgaaactaaatttatattattgctataatcacaaaacaatttttaaaacctttc

SEQ ID NO: 476443 - DNA, 201 bp, Homo sapiens
aggtttgcagctggcttggccaagctcactctgtaggatgcaggcggtagcggaagcgcacatcgtggctgggctgcatggtgccaaaaccccagcgctgygggtcaacatggggtagtggtgtgtcagggtccaccaactctaagtcaaagtgtgtgaccataagcaggataaagagcttcacctcactgagtgcaaaga

SEQ ID NO: 476444 - DNA, 201 bp, Homo sapiens
ctaggtatttatagatagatagagacagatataaataaataaataaataaataaataaataaaatatggaaagatatactcctcaaatagtaatggtggcwttatctgaacagtagaatacttcgtgatttttatttccgtttttaaaaatatatttatgaaactaaatttatattattgctataatcacaaaacaatttt

SEQ ID NO: 476445 - DNA, 201 bp, Homo sapiens
gagctttagagtccacgttgctttccgttgctcacgtcttcactgactgctctgttcatctgcctatctcagaatcacaccctttctccaggaccactctycttctgctggaagtacgttcttcagtgagttccttgagtctcactctcctgagtttcgtgttgtgataaattctgtttcccatctggaaatgccctttac

SEQ ID NO: 476446 - DNA, 201 bp, Homo sapiens
gggactataattttctgaaattaaacttcaggcaaaaaaaataaaaaaaaagagaagaaaagaaaaagaaaaacagaaactctcatcgtggccagatggarccagagatttgtgagaagacgaggcttaaagagtaaaaggctatcagtgtgcgagatgggttgaaaaacaaaaaataaaaggtgaaatccgagactgcca

SEQ ID NO: 476447 - DNA, 201 bp, Homo sapiens
actgagaggtagggaaagagggccaggatgtctccatggcggaacagatactcctgcccactggacatcttcagggtatagtcttcatgaaccaacctgargagggtgggtgcagccctcagccgcagcgtctcctccaccacgctgtctagaactggggtgtgttgcagggcaccgagtttgaaggcaaaggactgcttg

SEQ ID NO: 476448 - DNA, 201 bp, Homo sapiens
cagccactcgccactgaggatgccgattctgagaatagcagcttctattactatgactacctggatgaagtggccttcatgctctgcaggaaggatgcagyggtgtcctttggcaaagtcttcctcccagtcttctatagcctgatttttgtgttgggcctcagcgggaacctccttcttctcatggtcttgctccgttac

SEQ ID NO: 476449 - DNA, 201 bp, Homo sapiens
ttgtcactaaaaaatggatcttggattctttgcagctcctcaaattcctttttgttctttctgttagttctttgctggggtgttggtgggggaaatggggrgcaggtgggatggtgggcacagaattttcctgactaagccgaagctctcctgcctcttttacttgttctgaagacttttgaatttgagattaacaacaca

SEQ ID NO: 476450 - DNA, 201 bp, Homo sapiens
gcactgttattattttcattttaaagataaggaaactaagagggagaaaagtttagtaggttctgagcccatcaacatgatggatcacacctttctgctgygaacagaaatattggataaaatgtttaaaatattaaatatttgtcattaaaaatattgatatgaaactatttacaaataaaatatttaaaaattctcaaa

SEQ ID NO: 476451 - DNA, 201 bp, Homo sapiens
ctgaaggctttcctggctgccgtgcttggatggcacctggcacctggcactgcccaggcctcattatccagctgttctgagagcagcatacttactgcccwagaggaaatgactggcatgaatgaccttggagagaggcagtctgagaactaccctaacaaggaggatgtggggaataaatcagcctgagtgaccaaattt

SEQ ID NO: 476452 - DNA, 201 bp, Homo sapiens
tgaaggctttcctggctgccgtgcttggatggcacctggcacctggcactgcccaggcctcattatccagctgttctgagagcagcatacttactgcccawgaggaaatgactggcatgaatgaccttggagagaggcagtctgagaactaccctaacaaggaggatgtggggaataaatcagcctgagtgaccaaatttt

SEQ ID NO: 476453 - DNA, 201 bp, Homo sapiens
ttaagttgcagaatatctttcaatctgttggtaatgtgattggaatgatgagttaggagtcaactaaccatttcaaacaaattaactttttgttgaaattktttaaaaagactgggtgtattgataaactgatgtgggatatgataagatttctcttcaaataatctgatcaatcttttattctttaattcatagtacccc

SEQ ID NO: 476454 - DNA, 201 bp, Homo sapiens
cctagtgcaggaggttagtccaaaacaatggccttccatagtttttacttaacaagcccaactccttacggtaatcctttaaggcctatgtgatctgcccycaccctggctacactctttgcccttatgtccaccagcctccagtgctccagacacaactgatctcaaatactcctgacacatccccctggggattcctct

SEQ ID NO: 476455 - DNA, 201 bp, Homo sapiens
gtaagtgttatatgtgttaattgttacgacattctgtgggtttttttgtgtgttcctgtagatactactcagctaacctataaacacaattgatagtttcktgtgtgtgtgtgtgtgtgtgtgtgtgtgtgtactttgcattttaaaatgtcttttggttactgagggtttccataaaaatcataaatataagatgctcac

SEQ ID NO: 476456 - DNA, 201 bp, Homo sapiens
aaatacattgcccctggccaatttcaggcacccatataaggtcactgaaggaggagttggaaagagatgtgcatcgtcagcatggagtcctgataagtaakcaacaatgaggaagggaccttaggtaggggagaaccccaggtggggaagaacaatgaacagttgttctgagagatggctaatcacaaataacctgtgggc

SEQ ID NO: 476457 - DNA, 201 bp, Homo sapiens
cactcatcacactgtctaaaatcagaacatttttcatcatgccaaacatgagtgacacacattagctgtcacttccatctccacaccttccccctgccccwtgaatctattttgggtatttgcctattctggacatttcatataaatggaatcgtacaatatatggacttttgtatcagatttcttttacattgtataatg

SEQ ID NO: 476458 - DNA, 201 bp, Homo sapiens
tcaggcacccatataaggtcactgaaggaggagttggaaagagatgtgcatcgtcagcatggagtcctgataagtaagcaacaatgaggaagggaccttakgtaggggagaaccccaggtggggaagaacaatgaacagttgttctgagagatggctaatcacaaataacctgtgggcacaatgacttgtcctgtccgcaa

SEQ ID NO: 476459 - DNA, 201 bp, Homo sapiens
ttctgtccacacccaattcatttctgaatacactcaagggcaatatttgaaattgaaggtcaccacccagaagcaggttatgaaatcagttaattacatgstggctcacacctgtaatcccaacacttttggaggtcgaggcaggtggatcatttgagatcaggagtttgagaccagcttggccaacatggtgagactcca

SEQ ID NO: 476460 - DNA, 201 bp, Homo sapiens
tttcattatttttatttttattttttttgagacagagtttcgctcttgttgcccaggctggagtgcagtggtgcgatcttggctcaccataacctccaccktctaggttcaagcaattcagctcagcctcccgagtagctgggattacaggcatgcgcctccacgcccggctaattttgtatttttagtagagatggggtt

SEQ ID NO: 476461 - DNA, 201 bp, Homo sapiens
gtcaggctggtctcgaactcctgacctcaggtgatccacctgcctcggcctcccaaagtaccgggattacaggcgtgagccactgtgcccagccacattaycattattataccgctatggtgatctgtgatcaatgatctttgatgttactatgcaattgttttgggtgtccatataagacgagaacctaatggataaatg

SEQ ID NO: 476462 - DNA, 201 bp, Homo sapiens
tacaggcacccgccactgcgcccagctaattttttgtatttttagtagagacggggtttcaccttggtctcgatctcctgacctcgtgatctgcccgcctyggcctcccatagtactgggattacaggcgtaaaccactacgcgtggttttttttttttttttttttgagacagggtctatctctgtcacccaggctgagt

SEQ ID NO: 476463 - DNA, 201 bp, Homo sapiens
tttttagtagagacggggtttcaccttggtctcgatctcctgacctcgtgatctgcccgcctcggcctcccatagtactgggattacaggcgtaaaccacyacgcgtggttttttttttttttttttttgagacagggtctatctctgtcacccaggctgagtggtacaaaggctcactgcagcggtacaagggctcactg

SEQ ID NO: 476464 - DNA, 201 bp, Homo sapiens
gagacggggtttcaccttggtctcgatctcctgacctcgtgatctgcccgcctcggcctcccatagtactgggattacaggcgtaaaccactacgcgtggttttttttttttttttttttgagacagggtctatctctgtcacccaggctgagtggtacaaaggctcactgcagcggtacaagggctcactgcaacctcta

SEQ ID NO: 476465 - DNA, 201 bp, Homo sapiens
tggaggccatcctgtaccacgtgcacctcttccagcccacggagctgctgctgcagcaggcggtgttcttcctgcgagacactgagcggaggcgggtcttscaggctctagccaggtgggcagtggcagctcgcatgtggtcctgcgccccggcgggaggggcacttcttaacactctgcacccaaacaggcaagctgggg

SEQ ID NO: 476466 - DNA, 201 bp, Homo sapiens
aatcatcctcccaaccccgtccgtggaaaaattgtcttccacgaaaccagtccgtggtaccaaataggttggggaccgctggattggtagatacttagggyggtggatcaggggtgggggtattcagggggttgggagtatacggagcgatagctgaggggtgtggggtttctttttgaggtgatgagatgttctaaaatt

SEQ ID NO: 476467 - DNA, 201 bp, Homo sapiens
ctctcaagtagctgggactacaagcatgcgccaccacacccagctaatttttgtatttttagtagagacagggtttcaccatgttggccacactggtctcratctcctgaccttgtgatctgcccgcctcagcctaccaaagtgctgggattacaggtgtgagcaacctcgcccagcctctgatgtctcttcttgcaaaga

SEQ ID NO: 476468 - DNA, 201 bp, Homo sapiens
aggcctgagacctctgcagggcactgcagggtcattttggatggagtacagtgggtaaaggggcaggtaaaatgctgtctccagaatcaggtacaaccagrtgctcctcccttcgtgagccttccccgggcagcttcaagaatacagccagggctgggcacagtggctcatgcctgtaatcccagcactttgggaggccaa

SEQ ID NO: 476469 - DNA, 201 bp, Homo sapiens
taaaggcttcctgagcttcaacactattacccatgactgatctctaggtgtccagccaagagctgggggcagaggctctgggcttcactgggaccttccarcggcaaagatactgacagttctttctttggggtaaggcagagacaggaaacgtaggtcttgctgtaccagtccctccaagtcctcttcctctttatccct

SEQ ID NO: 476470 - DNA, 201 bp, Homo sapiens
aaatcagcacattgacatgagtctaatgtgtatataggtctgtgccattttattgtacatgtatgtaactgtcacagcacttgagatgtagaaatattctrtcatcacaaagatctccttcgtgctacccttttatagtcacaacaacccctaacacccaccatccctaaccactaatttgctatctctacacttttgtca

SEQ ID NO: 476471 - DNA, 201 bp, Homo sapiens
aggtgcgtgtgcgggtccaggagcagcagcacctggatgtgctcactggcttccacctgctggacgggaagacacaccttttcatcctggaaggcctggcygaccaaggcttgaggcagctgtgggagaaccaccaaagctggtaggtggtttgttttacattttacataaaaatgatggcatctggatgccgagggagtg

SEQ ID NO: 476472 - DNA, 201 bp, Homo sapiens
gaaatattctgtcatcacaaagatctccttcgtgctacccttttatagtcacaacaacccctaacacccaccatccctaaccactaatttgctatctctayacttttgtcaatttgaaaatgttattgttaaggattgaattgtgttcctccaaaaaatggtatgttgaactcctaacgcccagtatctcagaatgtgatc

SEQ ID NO: 476473 - DNA, 201 bp, Homo sapiens
ttgttcccttggcggattttagtctgtattctttccctgtaatacaactgtaactgtgagtgtagaactcattttcagtaagttctgtgagcccttctagygcattatcaaaccagagggcggtctcagaaaccttctgaacttgcagtcggcgtcagaagtaagggcggtcttggggactgtgccctcaaactttgtggt

SEQ ID NO: 476474 - DNA, 201 bp, Homo sapiens
gtaactgtgagtgtagaactcattttcagtaagttctgtgagcccttctagcgcattatcaaaccagagggcggtctcagaaaccttctgaacttgcagtyggcgtcagaagtaagggcggtcttggggactgtgccctcaaactttgtggtttggctaatgctgggcagatagtatatgaattatatctcaaaagctttt

SEQ ID NO: 476475 - DNA, 201 bp, Homo sapiens
atttaaaaaataccaaaagtatgttcagataagattatttaatgtggtatcgaatataaaaattagtataaaaatctatcaaattttgaataccatctacmtacaaaaactaatttttaaaaattggaacacatttaaagtaaaatgtatgaaattcataggactaaatttgacaaaaagatgtgaaagacatccatcatg

SEQ ID NO: 476476 - DNA, 201 bp, Homo sapiens
gggtgatcagacccaacaccaggctgtgggggccacaaagtccagcggagtcaaaggaatgagacaaaacaagttaagagtgcataaagtgggactagggrgccaatgctagtatggaggctgtgaaggtcccaagttctggaagcctgcactatttattggtgatcaaacaaagaagcagctggtgaggatgtgggggtt

SEQ ID NO: 476477 - DNA, 201 bp, Homo sapiens
aggctggagtgcaatggtgcgatctcggctcactgcaacctctgcctcctgggttcaagcaactctcctgcctcaacctccatagtagctgagattacagrcacctaccaccatgctcagctaattttttgtatttgtagtagagacagggttttgccatgttgggaaggctggtctcgaactcctgacctcaggtgatcc

SEQ ID NO: 476478 - DNA, 201 bp, Homo sapiens
atcagacccaacaccaggctgtgggggccacaaagtccagcggagtcaaaggaatgagacaaaacaagttaagagtgcataaagtgggactagggggccartgctagtatggaggctgtgaaggtcccaagttctggaagcctgcactatttattggtgatcaaacaaagaagcagctggtgaggatgtgggggttgaaag

SEQ ID NO: 476479 - DNA, 201 bp, Homo sapiens
ccatgcttatgaagaacaaagacaaaaagcacagtttcatccaggtgggctgccttcctccccaacttggggttcccaggcctcacctgggcggtccaggygcctgctgagaggcatagggcatattcctgagtgggacatttgcctctggtcgtgcctgcgctcctggcctgggctaccctgctggatgggcaagaagtg

SEQ ID NO: 476480 - DNA, 201 bp, Homo sapiens
gcataaagtgggactagggggccaatgctagtatggaggctgtgaaggtcccaagttctggaagcctgcactatttattggtgatcaaacaaagaagcagstggtgaggatgtgggggttgaaagaaagcagtgtatcagcacatgatctatagctgtgacagtttagcattttctttgaagcatgtggaacatgttctgc

SEQ ID NO: 476481 - DNA, 201 bp, Homo sapiens
  misc_feature (1)...(201): n = A,T,C or G
tgcgtcagaactctgggcctcatttcccccatctgtaatgtggagatgacagcaaccacacaaggttaaggatgaaatgacattagcgcatgtttgggacnggctgttggaggagcacaaacattcccttacaccattccactcttaaccagggctcttaactcagggggcttgtgtctgctggggacacttggctgtgtg

SEQ ID NO: 476482 - DNA, 201 bp, Homo sapiens
tgactccagtcggtcctcattccatcttcgcattcagattcaactggcccatggctcgtactgggggaaccccctccatggttgggtccctccagtctccygttccatggtcgtacacatcttgagggcacccacacggcttgttcatctcctgcaaaaacacaagcataccctcaaccccacgttagtaaatctagcgaa

SEQ ID NO: 476483 - DNA, 201 bp, Homo sapiens
tatttgaatcttacgtttaagctgggtgctggagaatcacttgagcccaggagtttaagaccagcctgggcaacacagtgtgatcccttcttaattttttwttttaattagctagatgtggtggcatacacctgtagcccagctattcaagaggccggggtgggaggatggcttgaacccaggaggctgaggctgcagtga

SEQ ID NO: 476484 - DNA, 201 bp, Homo sapiens
ccttgtagaagcgaaagtggtaaaagtattgtccagtcctttttaagttggtggctgagcttggtgagctgtgtttttaaaagacctttagtccgttctayttttcttgaagacggaggaccgtaagggatataaaggtttcactgaaacctactaagagcctgaaaaactgcttggctgatttgactaataaaggctggt

SEQ ID NO: 476485 - DNA, 201 bp, Homo sapiens
ttcgagatggagtcttgctctgtcgcccaggctggagtgcagtggcgcgatctcggctcactacagcctctgcccccccaggtttaagcaattctcctgcytcaacctctagagtagctgggattacaggcgcatgccaccatgccaggctaatttttgtattttttgtagagatggggtttcacaattttggccaggctg

SEQ ID NO: 476486 - DNA, 201 bp, Homo sapiens
cagcctccctgagagctgggactacaggtgcccgccaccatgcccagctaattttttttttgtatttttagtagagacggggtttcaccgtgttagccagratggtctcgatctcctgacctcgtgatctgcccacctcagcctcccaaagtgctaggattacaggcatgagccaccgcgcccagcaaactaattgaattt

SEQ ID NO: 476487 - DNA, 201 bp, Homo sapiens
tccttcgtcctacagtcccaaggaggaacccatgatcctcctgggggagcgtaccatgggacctgccccgctttggattttactgtgagaggaaaaagaarttcaaccatttgggcctgcctggcatgactgtttccagcagaatgaagccaggacatggtcccctctctcttttttttttttcgagatggagtcttgctc

SEQ ID NO: 476488 - DNA, 201 bp, Homo sapiens
ggttaggctggtctctaactcctcacctcaggtgattcacccacctcagcctcccaaagtgctgtgattacaggcatgagccaccatgtccagactagttytaatgttcttgtctgatacttccaatatctggattacctggggtctgtttctattgtcttttttcttggtttccatcttttcatcctgttacctggcatg

SEQ ID NO: 476489 - DNA, 201 bp, Homo sapiens
acgcagaaggtgttggccaagagaacctgccagaaccgaggacagaaaagatatgcccaaattcctggaatcagacctctgagcttcaaaaacccagcctatcaatcagccaaactgggtagcatggcaggggtcacaaggcctggcacaggagtcaccccgtcttgggttctaattccagccctgatccaacagcctttc

SEQ ID NO: 476490 - DNA, 201 bp, Homo sapiens
gcatacacctgtagcccagctattcaagaggccggggtgggaggatggcttgaacccaggaggctgaggctgcagtgagctatgattgcaccactgcactmcagcctggatgacagagaccctgtctctcaaaaaaaaaaaaaagaagaagaagaagaaaagaaagaaaaaaattgtatgtgtagcaggccttctccaaca

SEQ ID NO: 476491 - DNA, 201 bp, Homo sapiens
cgcagaaggtgttggccaagagaacctgccagaaccgaggacagaaaagatatgcccaaattcctggaatcagacctctgagcttcaaaaacccagcctatcaatcagccaaactgggtagcatggcaggggtcacaaggcctggcacaggagtcaccccgtcttgggttctaattccagccctgatccaacagcctttcc

SEQ ID NO: 476492 - DNA, 201 bp, Homo sapiens
aggttgcatgttccttatgagactctaaccaatgcctgatgagctgaggtggaacagtttcatccccaaaccatgcccatacaaccctctcccactggccrtggaaaaactgtcttccacgaaaccagtccctggtgccaaaaaggttggaaactgctattttgctaaatcactaatcttatcccctgctgtatgttgggg

SEQ ID NO: 476493 - DNA, 201 bp, Homo sapiens
gccggggtgggaggatggcttgaacccaggaggctgaggctgcagtgagctatgattgcaccactgcactccagcctggatgacagagaccctgtctctcaaaaaaaaaaaaaagaagaagaagaagaaaagaaagaaaaaaattgtatgtgtagcaggccttctccaacaccaaactgcatgtgtagcaggcctgtggag

SEQ ID NO: 476494 - DNA, 201 bp, Homo sapiens
gcagaaggtgttggccaagagaacctgccagaaccgaggacagaaaagatatgcccaaattcctggaatcagacctctgagcttcaaaaacccagcctatcaatcagccaaactgggtagcatggcaggggtcacaaggcctggcacaggagtcaccccgtcttgggttctaattccagccctgatccaacagcctttccc

SEQ ID NO: 476495 - DNA, 201 bp, Homo sapiens
cagaaggtgttggccaagagaacctgccagaaccgaggacagaaaagatatgcccaaattcctggaatcagacctctgagcttcaaaaacccagcctatcaatcagccaaactgggtagcatggcaggggtcacaaggcctggcacaggagtcaccccgtcttgggttctaattccagccctgatccaacagcctttcccc

SEQ ID NO: 476496 - DNA, 201 bp, Homo sapiens
cttgagcccaggaggcggaggttgcagtgagccagtatcacgccactgaattccagcctggacaacagagccagaccctgtctcaaattaaaaaaaaaaamaaaaaaaaacggggggggaaataacccaaatgtttatcaactgataaacaaaagataataagtccatagaataattgagccataaaaggaaatgaaagcc

SEQ ID NO: 476497 - DNA, 201 bp, Homo sapiens
acctggggcaggcattccagaagcccggcgactgactcctggttaggcgaaggaaacggggttgctcgtcgtcgtgcttactgccagccacccttatctgytgttccttcatccattcattctctaagtcgattgagtaccgactgtgtggcaggcagtgaaggagccccggcgttcatctaggagcaggcgggggaagca

SEQ ID NO: 476498 - DNA, 201 bp, Homo sapiens
tgtaagttacctccaatgccatcgcaagccttaatacattcagctaactgaaccttccctgtcaggggtctaatagcagtttgacactgcattagcattaytgtatgtaagaagctgtattaaaacatcctgagcagaatgtttgctttcactttgtgccattgttaccctggtccttccgagtgctcagctttcctgctg

SEQ ID NO: 476499 - DNA, 201 bp, Homo sapiens
ggccatggacctgtaccggtctctggcctgttaggaactgggctgcacagcaggaggtcagcaagctctgcctgagcttcgccacctgtcagatcagcagyggcattagattctcataggagcgggaacacttttgtgaactgtgcatgcgagggacctaggttgcgcattccttatgagaatctaatgcctggtgatctg

SEQ ID NO: 476500 - DNA, 201 bp, Homo sapiens
atgggtttctagaacttgttaaatctgtagcttgattttttttaagttttaaaagttctaggacagtatttctcttcagatattacttatattcatcttcycttcctctcctcctgggactccaatgttagatattttcaccatgatctgcatctgatattacttatacatctcatactttttattttacagtcttttttt

SEQ ID NO: 476501 - DNA, 201 bp, Homo sapiens
gtcagctgccagtcttgttcttttgaagataatttggttgtctctggctgcttaaattttttgtttttattttctttggttttcggcagttttatgatgaygtttgtaggtgtgtttttctttgtatttaacttgccatgggtttctagaacttgttaaatctgtagcttgattttttttaagttttaaaagttctaggac

SEQ ID NO: 476502 - DNA, 201 bp, Homo sapiens
tggtggaagttcacgaccgggaccgcaagtcagaggagtgttctcagaagcccgtgctgtttggggaggaccctctggattcatacctcaacttccaggcmctcatctctcccagagagacagagaacaacccctttgagtcccagaacaagatgtggtacccttatggcatcgcccaggtcagttttgctgacctcctcc

SEQ ID NO: 476503 - DNA, 201 bp, Homo sapiens
agcataagccccagtttccactatggtgtctcctcaatgaccagaatacccgccagttccaggggtcagcaattccattctctctctccggctcagttcaraagctgtgatggtcctgttagagagcactgcctgcaggtcaaaacctggaagaggctctcccaggccaggcgacaacccttcaggtgcagacggggaaca

SEQ ID NO: 476504 - DNA, 201 bp, Homo sapiens
acatacatatatatacatatatacatatacatacatacatatatatacatacatatatatgtatgtgtatatatatatacacacatatatatatctcatascactttgggaggccgaggtgggcaggttgcttaagctcaggagttcgagaccagcctgggcaacatggcgaaaccgtctctacagaaaattagctgggca

SEQ ID NO: 476505 - DNA, 201 bp, Homo sapiens
tccagcccacggagctgctgctgcagcaggcggtgttcttcctgcgagacactgagcggaggcgggtcttccaggctctagccaggtgggcagtggcagcycgcatgtggtcctgcgccccggcgggaggggcacttcttaacactctgcacccaaacaggcaagctggggcatccaacaactagatagtggccccaacag

SEQ ID NO: 476506 - DNA, 201 bp, Homo sapiens
  misc_feature (1)...(201): n = A,T,C or G
agggtcttaccccaccccacgctccagcctgaccctccagcatacctattgcacacagtagctttgagcgaacgcctttgctagctgcttccttcgtcctncagtcccaaggaggaacccatgatcctcctgggggagcgtaccatgggacctgccccgctttggattttactgtgagaggaaaaagaagttcaaccattt

SEQ ID NO: 476507 - DNA, 201 bp, Homo sapiens
  misc_feature (1)...(201): n = A,T,C or G
atcagaacctcttgagaggcaacagtgacagagagtaaactttcagagggtcttaccccaccccacgctccagcctgaccctccagcatacctattgcacncagtagctttgagcgaacgcctttgctagctgcttccttcgtcctacagtcccaaggaggaacccatgatcctcctgggggagcgtaccatgggacctgc

SEQ ID NO: 476508 - DNA, 201 bp, Homo sapiens
ttaagaaattacattgtaagaaaagcggtttttacagtgtagttgcacaatcttaacatccctaccagcaatgcatgagggttctagtttctctgcattcmtacaaacacttatccgtccttttgattatagccattctagtgtgtatctcatgattttaatttgcattttataatgactgacgatgctagatatctttta

SEQ ID NO: 476509 - DNA, 201 bp, Homo sapiens
agaggttaagtaactttcctaatcccacacagctcagtggccaaacagggatttaattattttgctttataagatctaccacaatttatgaactggacttyatacatactggtaaatcataactaaatattatatcaatatgttttgatgattgaaagctcagcatatattttggtaaaattatgttgctttgttccaaaa

SEQ ID NO: 476510 - DNA, 201 bp, Homo sapiens
cactgtgttacccaggctggtcttgaaccccttgggctcaggcagtcctcccacgttggcttcccgaagtgctgggattacagttatgagtcactgtgccyggccatctgtatcatttatccattttaaaatcaagttgtctttttattgttgagttgttatatattctggatacaagtacttaatgagaaatatgatttg

SEQ ID NO: 476511 - DNA, 201 bp, Homo sapiens
ttcagttccatgaaggctgagagaggtgaggacgctgcaaaagacaactttgaagctagcagagattggtttatgaggtttaaggaaaggagccatctccrtaacataaaagtgtaaggtgaaacagcaagtgctgacggagaagctgcagcaagttgtttaggagatctagctaagatcactgatgaaggcaactacact

SEQ ID NO: 476512 - DNA, 201 bp, Homo sapiens
tggctaattttttgtgtttttattagagacggggtttcaccatgttagccaggatcgtctcgatctcctgacctcgtgatctgcccgcctcggcctcccaragtgctggattacaggcgtgagccaccacgcctggccttctcttctttttttttctgagagggagcctcactctattgcccaggctggagtgcaatggcg

SEQ ID NO: 476513 - DNA, 201 bp, Homo sapiens
ctgggagtgctagaaggaaggagccagcaagtctagacacattccagaggccgcaaggggttttatgccctgagccctggattccatccaagccatgaggrgttttgtgccctgggcttagattgtggtgcagcagggcagccttccaccctttggcacagagcttggtgttccaaaggccatgaggggttttggaccctg

SEQ ID NO: 476514 - DNA, 201 bp, Homo sapiens
ttgttcgtgcactcatcaaaggacatttaggttgcttctagtttttggtaattatgaatagagctgcttaaaaacagtgtacacatgtttttataggaacrtaagttttcagttctttagggtaaatgccaacaaatgaaattgctaggctatatgttaagtatatgcctgactatgaaaaactgcccaccattttccagt

SEQ ID NO: 476515 - DNA, 201 bp, Homo sapiens
agcaatgaagtatttttttctctttttcttcctttctctcttccctcgctccttttcttcctttcttccttccctcctttctttctttttctcttttttctttatatatatatatatatatatatatattattatactttaagttttagggtacatgtgcacaacgtgcaggtttgttacatatgtatacatgtgccatgt

SEQ ID NO: 476516 - DNA, 201 bp, Homo sapiens
gcaatggcacgatcttggctcactgcaacctctgcctcctgggttcaagtgattctcctgcctcagcctcccgagtagctgggattacaggcgcccactaycacacccagctaatttttgtatttttagtagagacggggtttcaccatgttggccaggctggtcttgaactcctgacctcaagtgatccacccacctcag

SEQ ID NO: 476517 - DNA, 201 bp, Homo sapiens
gagtgcaaggcgatggcagggaaagcggttgtgtggtgtgctggagcaatgcatctgcatgggcgtccctcctgtgtattggcagcagaggcgggcggggctcaccctgccacacggctgtattgctcttgctgcatggcttactttttgttactgattctgagttctgctcttgtcccccaggctggaatgcaatggcac

SEQ ID NO: 476518 - DNA, 201 bp, Homo sapiens
aatgaagtatttttttctctttttcttcctttctctcttccctcgctccttttcttcctttcttccttccctcctttctttctttttctcttttttctttatatatatatatatatatatatatattattatactttaagttttagggtacatgtgcacaacgtgcaggtttgttacatatgtatacatgtgccatgttgg

SEQ ID NO: 476519 - DNA, 201 bp, Homo sapiens
gcactgggaagataatgtatgactcactttattgtgatatttactttagtgtagtctgaaaccgaacgcccagtgtctccaagaaatgcccatagtagttaattcaataaatattttggattgattgagtcaatgatcctttcttctcctgcattctagaagtgagacatttggttttaaatcagagaaaattatctgaac

SEQ ID NO: 476520 - DNA, 201 bp, Homo sapiens
tgaagtatttttttctctttttcttcctttctctcttccctcgctccttttcttcctttcttccttccctcctttctttctttttctcttttttctttatatatatatatatatatatatatattattatactttaagttttagggtacatgtgcacaacgtgcaggtttgttacatatgtatacatgtgccatgttggtg

SEQ ID NO: 476521 - DNA, 201 bp, Homo sapiens
tggttgcagtgagctgagattgagccactgtactctagcctgggcaatggagcgagagcctgtctcagggaaaaaaaaaaaaaaattccgggatgggcacrgtggctcacgcctgttatcctggcaatttgggaggctgaggcaggaggatcacttgagctcaggagttcaagaccagcctgggcaacatggtaaaactct

SEQ ID NO: 476522 - DNA, 201 bp, Homo sapiens
gccaggctggactgcagtggtgcagtcacagctccctgcagcttcaaactcctgggctcaggcagtcctcccaattcagcctctcaaagtgctgggattayggacatgagccaccgtatctggccccaataaggtattttttaaacttaggtatgtacatttttttttagatataatgcttttgcacacttaatagactac

SEQ ID NO: 476523 - DNA, 201 bp, Homo sapiens
aagtatttttttctctttttcttcctttctctcttccctcgctccttttcttcctttcttccttccctcctttctttctttttctcttttttctttatatatatatatatatatatatatattattatactttaagttttagggtacatgtgcacaacgtgcaggtttgttacatatgtatacatgtgccatgttggtgtg

SEQ ID NO: 476524 - DNA, 201 bp, Homo sapiens
gtatttttttctctttttcttcctttctctcttccctcgctccttttcttcctttcttccttccctcctttctttctttttctcttttttctttatatatatatatatatatatatatattattatactttaagttttagggtacatgtgcacaacgtgcaggtttgttacatatgtatacatgtgccatgttggtgtgct

SEQ ID NO: 476525 - DNA, 201 bp, Homo sapiens
ttggttgataatgctttgccttattgggcttcacagagatcatgcgttttccaaattggaggtttgtggcaaccctgtgttgaacaagtctattgacgccrttttttcaacctcgtgtgctcactttgtgtctctgtcacattttgataattctcggatttttcacacttattatatctgctttggtgatctgcgatctgt

SEQ ID NO: 476526 - DNA, 201 bp, Homo sapiens
tatatatatatatatatattattatactttaagttttagggtacatgtgcacaacgtgcaggtttgttacatatgtatacatgtgccatgttggtgtgctrcccccattaactcgtcatttacattaggtatatctcctaatgctatccgtcccccttccccccaccccacaacaggccccggtgtgtgatgttccccttc

SEQ ID NO: 476527 - DNA, 201 bp, Homo sapiens
tagtgtacatgttgtcttaagtcctgccttttctcacgtaaaaagatttcttacagaaactcttatttcttgggagtgcagaaatgctgtaagagttctgyctcatgttatgaaggggataggatgtttcttggatgcctggtaggtcacatgccagaacttgttagcattcagcctgctggtcttgaagaaacatcctaa

SEQ ID NO: 476528 - DNA, 201 bp, Homo sapiens
ctgcaagctctgtctcccgggttcacgccattcttctgcctcagcctcccgaatagctgggactacaggcgcccgccaccacgcctggctaattttttgtrtttttattagagacggggtttcaccatgttagccaggatcgtctcgatctcctgacctcgtgatctgcccgcctcggcctcccaaagtgctggattacag

SEQ ID NO: 476529 - DNA, 201 bp, Homo sapiens
aggcatgttgaaaggaatagactgatctttttgagcaccatctcatatatcatctttcttaatcctttaaacccaaggaaggtggtgtctatccccatttygaagatgaaattgagccttggagactctagcttatcacatgacaaagagtcagatctgggattcaaacccaggtcaatcctgcctccaaaacttgaggtg

SEQ ID NO: 476530 - DNA, 201 bp, Homo sapiens
aagtcacaggggatgtgatggcctggcctgggctcagaggcctgacattcctgccttcttatattaataagacaaataaaacaaaatagtgttgaagtgtyggagcggcaaaaatttttggggggtggtgtggagagagaacgggcgatgtttctcagggctgcttcaagcgggattaggggcagcgtgggaacctagagt

SEQ ID NO: 476531 - DNA, 201 bp, Homo sapiens
aagcttatagatgaaaatatagaagaacatattcatgaccccagaatggagaaagagttcttgaaccttgaaccagacaaggacaaagaagaaaagaatcrtacatttggcaacgttaaaagtaacttctgctcatcaaaagacactgtcaaagtcaaaatacagagatgaatctctaaatttaaaaattttatttgggaa

SEQ ID NO: 476532 - DNA, 201 bp, Homo sapiens
tacttgggaggctgaggcaggagaatcacatgaacccaggggatggaggttgcagtgagccaagatcgcgccattgcactccagcctgggcaacaagagcraaactctgtctcaaaaaaaaaaaaaaaaaaaaaaagatacaatcgttctatgagcctgggagtgctagaaggaaggagccagcaagtctagacacattcc

SEQ ID NO: 476533 - DNA, 201 bp, Homo sapiens
gttttacttttattcaaatgagttgttagatgtgtatcttttcccagtctgtgactcgtcttttcattgtttcagtattgagaagtgtttgtgagtatcarttaatttttctgtgattagattttttgggtatttttcctgggtttagaattctagcttggcagttattaacactttaaagacatcattccgttgtcctct

SEQ ID NO: 476534 - DNA, 201 bp, Homo sapiens
tacacctgtcttgcaaggtaggagaggttcagtggggcagtggttctttgttccaggatccacgacatctgctataacagcaccaccctctgggacgtgayggtgagggacctgctgccctcctctgctatgataaaagacttgagccaagagtttgggatgcccctttcgcaagaagaactcacagatgagaaactgttt

SEQ ID NO: 476535 - DNA, 201 bp, Homo sapiens
ctaaaaaaaaaaatacaaaatgagccggacgtggtggtacatgactgtaatcccagctacttgggaggctgaggcaggagaatcacatgaacccaggggayggaggttgcagtgagccaagatcgcgccattgcactccagcctgggcaacaagagcgaaactctgtctcaaaaaaaaaaaaaaaaaaaaaaagatacaat

SEQ ID NO: 476536 - DNA, 201 bp, Homo sapiens
agttgtatttttctaattgacagtgttttacttttattcaaatgagttgttagatgtgtatcttttcccagtctgtgactcgtcttttcattgtttcagtrttgagaagtgtttgtgagtatcagttaatttttctgtgattagattttttgggtatttttcctgggtttagaattctagcttggcagttattaacacttt

SEQ ID NO: 476537 - DNA, 201 bp, Homo sapiens
gtgctgcttcctagttttgtgtaaggtaacagcaataactaagcaattctttctcctggggaagaagaccactgagtcgaggaactaataactaattgaattttttttttttttgagatggagccttgctctattgcccaggctggagtgcagtggcacgatcttgactcactgcaagctccacctcctgggttcactcca

SEQ ID NO: 476538 - DNA, 201 bp, Homo sapiens
gctaaaaaaaaaaatacaaaatgagccggacgtggtggtacatgactgtaatcccagctacttgggaggctgaggcaggagaatcacatgaacccaggggrtggaggttgcagtgagccaagatcgcgccattgcactccagcctgggcaacaagagcgaaactctgtctcaaaaaaaaaaaaaaaaaaaaaaagatacaa

SEQ ID NO: 476539 - DNA, 201 bp, Homo sapiens
tttctctgagtctcactttcctcctctgtgaaatgggggtgattactcctacctcagagcgttgttttaaggatcacaggagctgacgtgtgtaaactgcttagcacagtgggacccagggggtgcaggtgtggaggcagcagctgtcctgaggccatgtgtgtgggccgctccattatacccatgacatagcctatggtc

SEQ ID NO: 476540 - DNA, 201 bp, Homo sapiens
tgcccagaaggggattgcacctctgggagacctgccttcctgtgctgatgggcccagaggcaccgggagaagctggccttgtatctattataagcccaggmgaagtgaaaacatatgtccacacaagagcttgtacacacatgttcacagcagcattatgtataatagtcaaaaagtgaaaacaggccaggtgcagtagct

SEQ ID NO: 476541 - DNA, 201 bp, Homo sapiens
tttccaatctatgtatatagtacatctctccatttatttacatcttttttttttttcatcagtgctttgaagttttcaggaccccctatttacattttgcmtggagagcaaactagtagacttctgccgagccactggggggacacctagggatctgattgcttcttaaggaacttgcacccagtcctccctgctccagcc

SEQ ID NO: 476542 - DNA, 201 bp, Homo sapiens
cagcagtgaacaagggttctagttgctccctaccctctccagaatgtggtattgtcagtattttaagtttagccagtctaagaagtttgtattgttatcayatcatggttttaatttgtagttccctgacggataatgatgttgagcatcttttgatgtgtttatttgccattttacatcccatttggtgaaatttctgct

SEQ ID NO: 476543 - DNA, 201 bp, Homo sapiens
agaaggaaggagccagcaagtctagacacattccagaggccgcaaggggttttatgccctgagccctggattccatccaagccatgaggggttttgtgccytgggcttagattgtggtgcagcagggcagccttccaccctttggcacagagcttggtgttccaaaggccatgaggggttttggaccctggaccccagaca

SEQ ID NO: 476544 - DNA, 201 bp, Homo sapiens
agactcttttacattatatcagacatgcaagtcctgcctcagcttttttcccaacactcagcttttccccaacatgcccccttttcttttttgtaaaaccrccacagctatcatagcttgttctcgacggcagctgtctctcccgaggtggcttccgcatctgcagactaaaaggagacagcacaaacacataattattag

SEQ ID NO: 476545 - DNA, 201 bp, Homo sapiens
cagccatagcctgagctaaaagattagccttatgtaagttacctccaatgccatcgcaagccttaatacattcagctaactgaaccttccctgtcaggggyctaatagcagtttgacactgcattagcattattgtatgtaagaagctgtattaaaacatcctgagcagaatgtttgctttcactttgtgccattgttacc

SEQ ID NO: 476546 - DNA, 201 bp, Homo sapiens
tgggtaaagggaatttggtggccagaaaaggaaggagaaaaggtgttctagggcctcctgctatgagtattcttattgattgattgagacagtctcactcwgttgcccaggttggagtacagtgatgtgatcatagcttactgcagctttgagctcctgggctcaagtgattcctcctgcctcagcctcctgagtagctgg

SEQ ID NO: 476547 - DNA, 201 bp, Homo sapiens
ttacctccaatgccatcgcaagccttaatacattcagctaactgaaccttccctgtcaggggtctaatagcagtttgacactgcattagcattattgtatrtaagaagctgtattaaaacatcctgagcagaatgtttgctttcactttgtgccattgttaccctggtccttccgagtgctcagctttcctgctgagcttc

SEQ ID NO: 476548 - DNA, 201 bp, Homo sapiens
gtggctggaaagccttgcttttctctgattttccagcccaccttctcaaggagcctttctgaccttggaggcttggaacttcccactttcagtctttcatktatgtccagggtttcttactcttggcactattgacattttgggccagataattcctcgctgtgggggctgttctgtggattgctgggtgttttgcagcat

SEQ ID NO: 476549 - DNA, 201 bp, Homo sapiens
atgtttgctttcactttgtgccattgttaccctggtccttccgagtgctcagctttcctgctgagcttctttcagtcgtcctcgggtgtcctctgatgatrcatcctctttcacacactctagtgttccttcactggggtgttcgttgcctcatattgggcgccaggaatgttggggtgatcagacccaactccaggctgt

SEQ ID NO: 476550 - DNA, 201 bp, Homo sapiens
aagatgcaggctttgaagccagacggtagaattcagtcctgtctccatcttgtacttgttggtgacttgggcatgttcctgaacatacgtttctcatctgyaaaaaaggaaaaataactagtacctgcttcactggaatactggaggcaggttgaccggcgtggtctacctgggtgcaagcaatgagggtgtgcattgtct

SEQ ID NO: 476551 - DNA, 201 bp, Homo sapiens
tctctgcacaaatgctaactattttggtagcagaaaaattaatgctgcagcagtctcctggggttaaaaatttagactttaaaaactacagctttaaagayagtcatgtttttatagaatgatatttggattaaatgtttatggagcttcttatgatgtgaaaagccccaacctagagtgtgcagtttaagctggagtgta

SEQ ID NO: 476552 - DNA, 201 bp, Homo sapiens
ggccaagctggtcttgaacttctgacctcagatgatctgcctgcctaggcttcccaaagtactgggattacaggcatgagccaccacatctggccccaagrgtttttaaaggagggttttatgtaaaacctaaggcctttaaacctaagccctcacaattagttggcttggatatgaaattgtaggttgaagttaacttac

SEQ ID NO: 476553 - DNA, 201 bp, Homo sapiens
gttgggtgtatagtatgtttagaactgctccatcttcttggtgaactgaactttttgtcattttatggtgaccattcctgtctaaaatgatgcctttactmttgggtctattgctataaagcaaaagagcctggaaaaagacatctggcaaataccaaccaaaagaaaattggcacttgacctcctttagccctcatctct

SEQ ID NO: 476554 - DNA, 201 bp, Homo sapiens
cctacaacttactttaaaatgttttgacatgatttagattatctttgagaatatgatcaaggatacttgtttttgtttgtttgtttttagacagagtctcyctctgtcacccaggctggagtacagtggcgcgatcttggctcactgcaacctccgcctcctgggttcaagcgattctcctgcctcagcctcccaagcagc

SEQ ID NO: 476555 - DNA, 201 bp, Homo sapiens
tctgtcaccaggctggagtgcagtggtgcgatctcagctcactgcaacctcagccttccgggttcaagcaattctcgtgcctcagcctcccaagtagctgrgattacaggtgcacgccaccacacccatctaatttttgtatttttagtagagactgggtttcaccatgttggccagaatggtctcgaacccctgacctca

SEQ ID NO: 476556 - DNA, 201 bp, Homo sapiens
ggcttgccctccccgacctcgccaggctcctgcacgtgctgcccccggcctggtttgcctctccccaaatagcaaacgcatcttgtgcttaggcgcagcargcctgcctgagcagacgtcccctctcccgcctggtggctcccgggagctgctcacctggggcaggcattccagaagcccggcgactgactcctggttagg

SEQ ID NO: 476557 - DNA, 201 bp, Homo sapiens
aggtggcctgctcttttcctctagaagctttgagagtttatctttgtatttgtttgcttaaatcccactaataatagtgtacccaggcttggaagttttgwcttttctgacattcattattgcttcaaattttcttgttctcacttttcccctccttttgggacttctgttatttggatgttatttccatcctctatactc

SEQ ID NO: 476558 - DNA, 201 bp, Homo sapiens
ggcctgggctcagaggcctgacattcctgccttcttatattaataagacaaataaaacaaaatagtgttgaagtgttggagcggcaaaaatttttgggggrtggtgtggagagagaacgggcgatgtttctcagggctgcttcaagcgggattaggggcagcgtgggaacctagagtgggagagattaagctgaagggagg

SEQ ID NO: 476559 - DNA, 201 bp, Homo sapiens
atattacctttaccatggctcccagagttcattgtagagaaagaactgtggcatgtgtgtgtgtgtgtgtgtgtaacatgttgcttacgctgctcagggcmtaagtgtcataagatgtccaagcaacatgggacataaactaatctgcatgacagagggagagaatgggagactgagaagctggtgagggggtagaaggct

SEQ ID NO: 476560 - DNA, 201 bp, Homo sapiens
gattaggggcagcgtgggaacctagagtgggagagattaagctgaagggaggtcttgtggtaaggggtgatattgtggggatgttagaagaaacatttgtygtatagaatgattggtgatggcctggatatggttttggatgaattgagaaactaaatggaataagagagggagaaaaacaggtataaaaggtctaagaat

SEQ ID NO: 476561 - DNA, 201 bp, Homo sapiens
caccttagagatccacgcccaccaggagaagtacctgcagtggcggagtgccatgcttatgaagaacaaagacaaaaagcacagtttcatccaggtgggcygccttcctccccaacttggggttcccaggcctcacctgggcggtccaggcgcctgctgagaggcatagggcatattcctgagtgggacatttgcctctgg

SEQ ID NO: 476562 - DNA, 201 bp, Homo sapiens
atgtgggaggccagattgaagtccgggccaggaacgatggtaattgtgagacttaaagagtgagtacagctgaaggagccggggagcagaaagtatatgcstcaggtatgaggaagaaaatagattttgggaaatgtagagagtgagttgagcatagtttgtgacttttagggcctctaacagtattaaagcagcggcagc

SEQ ID NO: 476563 - DNA, 201 bp, Homo sapiens
agaagggcagcaatgagatgcagctgtagtccaggaatagtcagggaagcagataatttggttaaaatatctcggtctaataagggaactgggcaggtggrgataactaaaaaagagtgcataaaagagtattgtctaagttggcaccagagttggggagttttaagaggtttagaagcctgtctgtcaatacccacaaca

SEQ ID NO: 476564 - DNA, 201 bp, Homo sapiens
gtgtctcttttgtctctaccagaaaatgaaaggaattgaaattaagggagagattgaagtgtggcaccaagattgaaaggagaaagaggttgagggatagygagggaggttggagaagagagtcaaaagaggccgcttaccggatttgaaattggtgagatgtttcttgggctggtcggtctgaggacctgaggtcataga

SEQ ID NO: 476565 - DNA, 201 bp, Homo sapiens
ctcctactatgccgcaggtgctcttcacatgcaggtcatgaacctcccttcaggagcccccaggcttccctcttcctgtggcagttgccagcgggatgctmactcattgtgaaccaaccaggttcagcactgctgtttattctgtgagttccttgttccctcttctggttggatccctgtctcctgaattctctcccttta

SEQ ID NO: 476566 - DNA, 201 bp, Homo sapiens
ttcctgagcaccttctgaggaaatgtggccctgccaacagcttaatttctgacttctagcctcagaacagggagacaataaatttctgtcattttaagccmcccccagtttatggcgcttcgtaggaaactggtgtggttatataaatgaaaacatccagcatgtgaccttttgagactggccttctcccccactccagga

SEQ ID NO: 476567 - DNA, 201 bp, Homo sapiens
cctcctgggttcaagtgattctcctgcctcagcctcccgagtagctgggattacaggcgcccactaccacacccagctaatttttgtatttttagtagagrcggggtttcaccatgttggccaggctggtcttgaactcctgacctcaagtgatccacccacctcagcccccaaagtgctgagattataggtgtgagccac

SEQ ID NO: 476568 - DNA, 201 bp, Homo sapiens
ttaagaatggctcactgtgcctaaatggcttttgcaaacagtatcgtttgtgctgaatgcctgctttccctttgggaggctgagattttcatacatgctargcagggggtgctatgtgaccaggcctcagcaaaagccctaggcagtgagtccctcatgggcttccccagtggacagcatttcacacgttgctgcactgca

SEQ ID NO: 476569 - DNA, 201 bp, Homo sapiens
ggagctctttagtcacaagctccaggacttgggaccagctaagcagcctctgagtgttcatttcctgctgtaggatgggagtgattacacctgtcttgcawggtaggagaggttcagtggggcagtggttctttgttccaggatccacgacatctgctataacagcaccaccctctgggacgtgacggtgagggacctgct

SEQ ID NO: 476570 - DNA, 201 bp, Homo sapiens
ttgtccctttcttcgtctttgatatggagaaagcagacttttcttggggtcctttctgcctactctcactggtatttctggatactgccttctccagcacycagtccggaatatatgaggcaaatagaagacccaggatcccatgttccctaaacaccttttctgtacttttcaaagtctttgtattttttttttatatat

SEQ ID NO: 476571 - DNA, 201 bp, Homo sapiens
gattcacctgtctcagccttccaaaagtgctgggattacaggctacaggcgtgagccaccatgcccagccacattcaggctttaatgtctgtctctctctsaataatgttgagcaccttttcacgattggctatttggatatctccttttataaagtgcttgttcaaatttatttattttctccatttaaaataaatctag

SEQ ID NO: 476572 - DNA, 201 bp, Homo sapiens
tctacaaaaagttgtgctgggattttgattggaattgcattacatttgtaaacctataaactgattggtttgaggagagttgacatctttgctatattgtyttccaatctatgtatatagtacatctctccatttatttacatcttttttttttttcatcagtgctttgaagttttcaggaccccctatttacattttgcc

SEQ ID NO: 476573 - DNA, 201 bp, Homo sapiens
ataaatagaaatacaataggttttaccttgattatattctttcttttcttaaacttatatccttattttatatctctgatcattctaatatcttatgcctyggtgcatctgatttcactagtagtgcctttgtctttacgtgttctgtgatttttaccatgatctcgtgttcaatggaactttcttgatgggaattctttg

SEQ ID NO: 476574 - DNA, 201 bp, Homo sapiens
ggattacaggcatgagccaccacatctggccccaagggtttttaaaggagggttttatgtaaaacctaaggcctttaaacctaagccctcacaattagttkgcttggatatgaaattgtaggttgaagttaacttaccttgttgctgttgtggatctgatcacaagtgatagtttttctttacaggtggcctgctcttttc

SEQ ID NO: 476575 - DNA, 201 bp, Homo sapiens
gcccacacactgcggccaggacagcaggagaaggaaggttgtggggcttggggtccccagagatggccaccagcacggcccaatgcccaggggcaactacytagaggctgactcccagctcaagttgcgagtggacatcgcggtgccactgagggccggggccagagctgctgatcctgaccttgggggctcccagtttgg

SEQ ID NO: 476576 - DNA, 201 bp, Homo sapiens
cccactaataatagtgtacccaggcttggaagttttgtcttttctgacattcattattgcttcaaattttcttgttctcacttttcccctccttttgggayttctgttatttggatgttatttccatcctctatactcagtttctaattttatcttttttatacaggactgctttctgaaagcatatctcaagtggatatt

SEQ ID NO: 476577 - DNA, 201 bp, Homo sapiens
aaaggaaatgaaagccaggcacggtggctcacacctgttatcccagcactttgggaggctgaggcgggaggattgcctgaggtcaggagttcgggaccagyctggccaacatggtgaaaccctgtctctactaaaaatagaaaaacttacccaggcatggtggcacgtgcctgtaatcccagctactcgggagactgaggc

SEQ ID NO: 476578 - DNA, 201 bp, Homo sapiens
ctgtcaggaccctgcagcagatcctgtcagccttcaaggtgcgtgtgcgggtccaggagcagcagcacctggatgtgctcactggcttccacctgctggaygggaagacacaccttttcatcctggaaggcctggccgaccaaggcttgaggcagctgtgggagaaccaccaaagctggtaggtggtttgttttacatttt

SEQ ID NO: 476579 - DNA, 201 bp, Homo sapiens
agctctgtgccactctgcatcttcagtggtatccattttgtttacactatcaaccaaactttctatgctaagaaaagcaagatgcagaatgggtctgaaaraagagattgaatgctgggctggaactcagaccaggattctagccccaagtgtgacatttgtgtgacttgaggcaaatcccttcatgccctgggtctggtt

SEQ ID NO: 476580 - DNA, 201 bp, Homo sapiens
ttaaaaaaaattgtcttactgatctgccagctttgtgtttacatctggataattgtacattgccagttatatgcatggtaatcctcacagacaggggtatrtaacttatcgtttgacttgatttatgttatcttggttttgtacaccaattatttaactattcctctctagtttatactttcacgaatgtttaagaaatcc

SEQ ID NO: 476581 - DNA, 201 bp, Homo sapiens
cttcaggtgcagacggggaacaaaaggcttaacctgtgataatcccaacaccttctgaaaaaagagtaacagtcatccagcaacgggccatgggtaggggygggcggtagcaggggacactgtcccctgcctcagcatgtcctgtccagagggtgggcacagatataggctcgcttctcaaggatctgctgggacactttc

SEQ ID NO: 476582 - DNA, 201 bp, Homo sapiens
tgaacaataatgaaaataatatattatctaaatttgcagggtgggccgggcacagtggctcatgtctgtaatcccaacactttgggaggccaaggtgggcrgatcgcctgaggtcaggagtttgagaccagcctggccaacatggtgaaaccccatctctactaaaaatacaaaaattagctgggcgtggtggcacatgct

SEQ ID NO: 476583 - DNA, 201 bp, Homo sapiens
aataatgaaaataatatattatctaaatttgcagggtgggccgggcacagtggctcatgtctgtaatcccaacactttgggaggccaaggtgggcggatcrcctgaggtcaggagtttgagaccagcctggccaacatggtgaaaccccatctctactaaaaatacaaaaattagctgggcgtggtggcacatgcttgtat

SEQ ID NO: 476584 - DNA, 201 bp, Homo sapiens
cattctgttcctaatttgctggctcacacaattcatgaaaatcaactctagtctaggtagaccaagcccgtttttaaacttttaactttgtcgtttttttkagctttttctttctttttctttctttttattgagacagggtttattgctgttacccaggctggagtgcagtggtgcgatcacaattcactgcagccttga

SEQ ID NO: 476585 - DNA, 201 bp, Homo sapiens
ccctgatccaacagcctttccccaacagcaagtgactcaacatctctgaccctgtttcctctgaaaggcagatgtcacaatcctggtatctgcaggtgctytggaaagtgcaggcagagatcctggtatacagtgggtcctcagagactgcacccgcctccctccagcacagcgggcaatgtgcagggtctgtcccttgct

SEQ ID NO: 476586 - DNA, 201 bp, Homo sapiens
ctccagcatcctgatcacttctcattgaaccttgcttatactccccgtgtgatcggtagctctttatctcaaaacagaatattctaagccaacccctgccygctctcaccaagtaagatttctcatttgaaccccagctcccagatacttaaaggccttctgtagaccatgtcctcaaggtcccctggccatctgcttgca

SEQ ID NO: 476587 - DNA, 201 bp, Homo sapiens
ggttgccctgagcccacagaaagacacctccagagtgcggattgagaagcctttattgtgggaggatcggggtgtccgagggccccgggagtcgggatggrcttggaaggctggggggaggggcctttgaggaagaggagtcctggaagcgggggtcatcacaggtcaaggggtggtccttgggacccccgcagtcagtgg

SEQ ID NO: 476588 - DNA, 201 bp, Homo sapiens
taagatttctcatttgaaccccagctcccagatacttaaaggccttctgtagaccatgtcctcaaggtcccctggccatctgcttgcatgttccagtttcyctcctcccccatgcacatcgtgaaatgtgccctcccactccccaggatgagcaaggtggtgtcctctgtgactgagcagtcagcaacttaacaccaaagg

SEQ ID NO: 476589 - DNA, 201 bp, Homo sapiens
cccacagaaagacacctccagagtgcggattgagaagcctttattgtgggaggatcggggtgtccgagggccccgggagtcgggatggacttggaaggctsgggggaggggcctttgaggaagaggagtcctggaagcgggggtcatcacaggtcaaggggtggtccttgggacccccgcagtcagtggtgctgcggcggc

SEQ ID NO: 476590 - DNA, 201 bp, Homo sapiens
aacttaacaccaaaggtcaccaatgatcaaatccatgagagttgatccgaggagttatgtattagggctacgaaagagtaaacactcagtaaatagtggctattattattatcatcatcatcatcatcatcatgattaccctcaagttcccctgggagagctcctattcaaccttcaaaaccacatgtggtggcacccatc

SEQ ID NO: 476591 - DNA, 201 bp, Homo sapiens
acttaacaccaaaggtcaccaatgatcaaatccatgagagttgatccgaggagttatgtattagggctacgaaagagtaaacactcagtaaatagtggctattattattatcatcatcatcatcatcatcatgattaccctcaagttcccctgggagagctcctattcaaccttcaaaaccacatgtggtggcacccatcc

SEQ ID NO: 476592 - DNA, 201 bp, Homo sapiens
cttaacaccaaaggtcaccaatgatcaaatccatgagagttgatccgaggagttatgtattagggctacgaaagagtaaacactcagtaaatagtggctattattattatcatcatcatcatcatcatcatgattaccctcaagttcccctgggagagctcctattcaaccttcaaaaccacatgtggtggcacccatcct

SEQ ID NO: 476593 - DNA, 201 bp, Homo sapiens
cagcatccagctctgttctttttctgcctgaccagttcctgggtataagtctcaggcccggccagtccggctgaggagtgtgcagacacaggctgtgccartttgaatccatcgccagtccacacggccctgggcatcagcggtcaatgcccgcacataggactgcttggccttgcactcagacacccagtgccccccggt

SEQ ID NO: 476594 - DNA, 201 bp, Homo sapiens
cctgcccgcggggccgcagcctcggaggacattatctggacttagtcccttccccgcgatgccatcaagctggacaattttaaggtctgtttctttcccartgtagggtataggttggcacagggaagagggctagaaacctgacttgagctccccacccagggctgaactctccagcatcctgatcacttctcattgaac

SEQ ID NO: 476595 - DNA, 201 bp, Homo sapiens
tccacacggccctgggcatcagcggtcaatgcccgcacataggactgcttggccttgcactcagacacccagtgccccccggtccacaccccggcggcagcccctccacctacccccgggccaccttcctcagatttatcggcctcgaagcgggcaacaaagaagtgctggcggagggaactgccgacagctgcaggcacc

SEQ ID NO: 476596 - DNA, 201 bp, Homo sapiens
cgatgccatcaagctggacaattttaaggtctgtttctttcccagtgtagggtataggttggcacagggaagagggctagaaacctgacttgagctccccrcccagggctgaactctccagcatcctgatcacttctcattgaaccttgcttatactccccgtgtgatcggtagctctttatctcaaaacagaatattcta

SEQ ID NO: 476597 - DNA, 201 bp, Homo sapiens
ggccttgcactcagacacccagtgccccccggtccacaccccggcggcagcccctccacctacccccgggccaccttcctcagatttatcggcctcgaagygggcaacaaagaagtgctggcggagggaactgccgacagctgcaggcacctcgcccaacacctccacctcgagcacacccaagtccacagcagtccaggg

SEQ ID NO: 476598 - DNA, 201 bp, Homo sapiens
aggtgtggtgggtagctcctcaggcttggcttcaaggggtcccaggcagccagctggtggctgtgcagggactgagcggggcaggggcagccacgacctgcacctggggggctgccaagggatctgagagcggcttccacagcactccagggttgggctggttgagcggtggagatgacgtttcctgaggtagggaggaca

SEQ ID NO: 476599 - DNA, 201 bp, Homo sapiens
ggtggaggcagcatccaggggagctggggcttcctgaccctcgtccctttgtgccccacaggaggaccgagcagtggccaaggaagctgtacatgcagctyatcccgcagcagctgctggtgaggggctggggccgggtgctggagcctgcacgcagtagctcttccagagggcggggctgggggcaagagcgcctcccca

SEQ ID NO: 476600 - DNA, 201 bp, Homo sapiens
acctggtggtgtcaactcaggcccagtccagatcgtcaacaacaagtttctggcatggagtggtgtcatggagtggcaggaggtgagcactcggcagcccrgggacttgggacccccagatcctcacggactgtggctgggaggggacactggcattgggggtctccagccctgagggctcctctttgcctctcccccaaa

SEQ ID NO: 476601 - DNA, 201 bp, Homo sapiens
ggagatcctgtgagtgctgggctggggggtggaggcagcatccaggggagctggggcttcctgaccctcgtccctttgtgccccacaggaggaccgagcaktggccaaggaagctgtacatgcagctcatcccgcagcagctgctggtgaggggctggggccgggtgctggagcctgcacgcagtagctcttccagagggc

SEQ ID NO: 476602 - DNA, 201 bp, Homo sapiens; identical to SEQ ID NO: 282981

SEQ ID NO: 476603 - DNA, 201 bp, Homo sapiens
gggggagtcattccgaagcccaactggagatgagaactcttaaaggcaccgtggggcacctagtggatgaccccaggaagctcttgcggggcttgagaatgtgtggcagggagggaagatgtcctgcagggggagcccatgagcaggtggctccgtgggcacctggggctcagtccagacgcagcgcagcctagtgggtgc

SEQ ID NO: 476604 - DNA, 201 bp, Homo sapiens
tcactgtagctcagattcttgcataggaaacacaccaggccaggcacggtggctcacgcctgtagggtccagccccacagggtcggtgggtttttctcccygtgtgcggagacgagagattgtagaaataaagacacaagacaaagagatgaaagaaaagacagctgggcccgggggaccactaccaccaagaggcggaga

SEQ ID NO: 476605 - DNA, 201 bp, Homo sapiens
agtagcaggtgtttttccttgacactaaggctaccgctagactagacttcccagacgctggcgtcaccgctagaccaaggaaccctctggtggccctgtcygggcataacagaaggctcgcactcttgtcttctggtcactactcactgtgtcccctcagctcctatctctctatggcccggttttttctaggttatgatt

SEQ ID NO: 476606 - DNA, 201 bp, Homo sapiens
caagactctgtcttgaaaaatgaaggggtgctgacaaatcccatttaacacgtgagagaacaaaggcacagagaggggaggttatttgcccagaaacacasagccggggaggcacaggactccagagcatgtgctcttagccactgtgccgcactggagtggttggggtgctaaatttagaccttggcttcagaaaatatt

SEQ ID NO: 476607 - DNA, 201 bp, Homo sapiens
gatccgctggcctcggcctcccagagtgctgggattataggcgtgagcctctggcccggcctttcctttttcctctcctctcctgccgagagtggaacacrcgtgtcctgggagctgcatcttgtgtagggtccagctgcttttggggactgcaggaatcatctcccctgggccctggactcggactggggcctccccacc

SEQ ID NO: 476608 - DNA, 201 bp, Homo sapiens
cttccgccagctgggcttcgcgccgggcgacgtggtggccatcttcctggagggccggccggagttcgtggggctgtggctgggcctggccaaggcgggcwtggaggccgcgctgctcaacgtgaacctgcggcgcgagcccctggccttctgcctgggcacctcgggcgctaaggccctgatctttggaggagaaatggt

SEQ ID NO: 476609 - DNA, 201 bp, Homo sapiens
ccatccatatgttcacctggtcttcagaaagacttgcagtgtcaagctcaagctgcccagaacatactggaccccttttagccagggcaggctctccctcygggaacctttgctgaattttcctgctcagcaccctcccatagctccttgttgcccttagaattgacgccatactggccgggagcggtggctcacgcctgt

SEQ ID NO: 476610 - DNA, 201 bp, Homo sapiens
catgattgccccactgcactccagcctgggtgagggagcaagactctgtcttgaaaaatgaaggggtgctgacaaatcccatttaacacgtgagagaacaraggcacagagaggggaggttatttgcccagaaacacacagccggggaggcacaggactccagagcatgtgctcttagccactgtgccgcactggagtggt

SEQ ID NO: 476611 - DNA, 201 bp, Homo sapiens
ctttttctttttctttttgagacggagtctcactctgttgcccaggccagagtgcagtggtgcgatctcagttcactgcaacctccacctcctgggttcargtgattctcctgcctcaggctcctgaatagctgggattacaggtgtgtgccaccacgcctggctaattttgtatttttagtagagatggggtttcaccat

SEQ ID NO: 476612 - DNA, 201 bp, Homo sapiens
gatggggtttcaccatgttggccaggctggtctcgaactcctgacctcaggtgatccacccaccttggcctccgaaagtgctgagattacaggcgtgagcyaccgtgcccggccacaggtagccctttttatcggtgcagctgctggcatcccctgctgcaagcttccagcttccttatttgtgtttgcagcccaatcttc

SEQ ID NO: 476613 - DNA, 201 bp, Homo sapiens
gggatgtggtatctccaggaagctgcttggcagaatcgagggaccacgaaggggtgcgggtagggggaggaggaaagacactgcatctgcttggatagaarttgcatccggccaggcacaagtggctcacacctggaatctcacactttgggaggctgaggcaggaggattgcttgaggccaggagttcaagaccagcctg

SEQ ID NO: 476614 - DNA, 201 bp, Homo sapiens
caggcatggtggcaggtgcctgtagtcaatgctactaaggaggctgaggcgggaggatcacgtgagctcacgagatcgaggctgcagtgagctatgattayaccactggactccagcctgggcaacagagtgagactctgtgtctctaaaaaggaaaaaaaaaaacagcaagtgccatgggggctgggtccttaatgccaa

SEQ ID NO: 476615 - DNA, 201 bp, Homo sapiens
ggcctcaagtgatctgcccaccttggcctcacaaagtgctgggattacaggcgtgagcccctgtgcccagcctggtctgctctttggaagctacaatgaayagcactgtcatttcccccattcgactttaagatgccaaattttttatctttcgatacaaaaaaatttttttttgagacggagtctcactctgtcacccag

SEQ ID NO: 476616 - DNA, 201 bp, Homo sapiens
cacaatggagctgctgcgggatgcccagggcctctgcatcccctgccaggccggtgagcagggcccccgcatggtccccacccggagcaggggtccccacrccctgcctgcctagcgcagcctgaacatggccttctccctaggggagcctggcctccttgtgggtcagatcaaccaacaggacccgctgcgccgcttcga

SEQ ID NO: 476617 - DNA, 201 bp, Homo sapiens
cgggcacggttgcgggtgcctgtagtcccagctacttgggaggctgaggcaggagaatggcatgaacctgggaggcggagtttgcagtgagcccagatcaygccactgcactccagcctgggcgatagagtgatactctgtctcaaaaaaaaaaaaaaaaaaaagaatacctggccgggtgtggtggctcccgcctgtaat

SEQ ID NO: 476618 - DNA, 201 bp, Homo sapiens
ctcctggcctcaagtgatctgcccaccttggcctcacaaagtgctgggattacaggcgtgagcccctgtgcccagcctggtctgctctttggaagctacartgaatagcactgtcatttcccccattcgactttaagatgccaaattttttatctttcgatacaaaaaaatttttttttgagacggagtctcactctgtca

SEQ ID NO: 476619 - DNA, 201 bp, Homo sapiens
ccagtctgggtgacagagtgagattccatctttaaaaaaaaaaaaagtcagtaatttggtggcattcacaatgtacaatcaccatgtctatctagatccaraacattctcatgccccccaaaggaaatcccatccccagttactccccatccctccacccccagcccctggcaaccactattctgcttcctgcctctatga

SEQ ID NO: 476620 - DNA, 201 bp, Homo sapiens
attttcccacttggtttgagccccgttagtcatcagcctgcagcggggggccccattcttgtgcaggctgcccagttttctgttgtaaagacaatccattktataggtcatccctcccctgcttagggcgtttggtgtttttctgatcttctgcactttggaagctacaatgaatagcactgttatttcccatatgcgaat

SEQ ID NO: 476621 - DNA, 201 bp, Homo sapiens
cgcccacctttttctaaaataaatttaaaaaattattttaacatagagatgaggtctcactatattgcccaggctggcctcgaactcctggcctcaaatartccccctgtcttggcctcccagagtgctggaattacaggagtgagcccctacacctggccctgaagtgttgacattgaactcaactagcagcactaaaac

SEQ ID NO: 476622 - DNA, 201 bp, Homo sapiens
gctaaggccctgatctttggaggagaaatggtggcgggtgaggccaggcgtgggcatcaggtgggcggggacccaggactggcccctgggcgggcggggakatgctgcgccccaggcctcggaaggcggccgccctggacgtgggcatgaggtgcacggtctgggtatgccccgggcagggagttggtgcatcccaggcct

SEQ ID NO: 476623 - DNA, 201 bp, Homo sapiens
gtccagctgcttttggggactgcaggaatcatctcccctgggccctggactcggactggggcctccccacctccctctcggctgtgccttacggagccccratccaggcctcctgtggctgttgggttccagatgctgcagctccatgtgacttccaagcaggccctccgccctccctgctgaatggaggagccgggggtc

SEQ ID NO: 476624 - DNA, 201 bp, Homo sapiens
tttctttctttttttgagacagggtctcactctcattgcccaggctggagtgcagtggtgcaatcttggctcactgcaacctccacctcctgagttcaagsaagtctcttgcctcagcctcccgagtagctgggattacaggtgcccgccaccatgcccggctaatttttttgtatttttagtagagacggggtttcacca

SEQ ID NO: 476625 - DNA, 201 bp, Homo sapiens
taagatgagtcttgctctgtggctcagctggagtgcagtggtgcaatctaggctcgctgcaacctctgcctcccacattcaagtgattcttgtgcctcacrcttttgagtagccgggattacaggcacccaccaccacgcacggctaatttttgtatctttagtagagacggagttttgccatgttggccaggctggtctc

SEQ ID NO: 476626 - DNA, 201 bp, Homo sapiens
cctgtctctactaaaaatacaaaaaaattagctgggcgtggtagcgggcacctgtaatcccagctactcgggatgctgaggcaggagaatcgtttgaaccygggaggcagaggttgcagtgagctgaggtggcaccactgcactccagcctgggtgacagagtgagactctgtctcaaaaaaaaaaaaaaaaggaaaaaaa

SEQ ID NO: 476627 - DNA, 201 bp, Homo sapiens
ctctttggaagctacaatgaatagcactgtcatttcccccattcgactttaagatgccaaattttttatctttcgatacaaaaaaatttttttttgagacrgagtctcactctgtcacccaggctggagtgcagtggcatgatctcagctcactgcaacctccacctcccaggttccagtgattctcctgccacagcctcc

SEQ ID NO: 476628 - DNA, 201 bp, Homo sapiens
attcacccacaggaagcccttagagcagaattgggtgtatactaggtgctccaggctgggcatggtggctcatgcctgtaatcccagcactttgggaggcygaggcgggctgatcacctgaggtcaggagttcgagactagcctggccaacgtggcgaaaccctgtctctactaaaaatacaaaaaaattagctgggcgtg

SEQ ID NO: 476629 - DNA, 201 bp, Homo sapiens
aatcccaccaggacggcccagacatccctactggcttcgctggtggctcatctcgaacatccacgccagcctttctggggccggccacccaggccgcctgyccgtctgtcctccctccagcagcaccccctggcccctggagtggtggggccatggcaagagacaccgtggcgtctcatgtgaactttcctgggcactgtg

SEQ ID NO: 476630 - DNA, 201 bp, Homo sapiens
ctcactgcaaccctgacctcctaggcccaagcgatcctcctgtctcatcctcctgagtagctgggactatacatgccacaatggccagttaatttttttcttttttttttttttttttttgcagagatgaggtctcagtttgttgcccaggctggtttcaaactcctgagctcaagtgatcctcccaccttgacctttcaa

SEQ ID NO: 476631 - DNA, 201 bp, Homo sapiens
gacggagtcttgctctgccacccgggctggagtgcagtggtgtgactccactgcaccctccagctcccaggttcaagcaattctcctgtctcagcctcccragtagctgggattacaggtgcctgccaccacacccggataatttttgtatttttagttgagagggggtttcaccacattggccaggctggtctcaaggtc

SEQ ID NO: 476632 - DNA, 201 bp, Homo sapiens
tccacgccagcctttctggggccggccacccaggccgcctgtccgtctgtcctccctccagcagcaccccctggcccctggagtggtggggccatggcaaragacaccgtggcgtctcatgtgaactttcctgggcactgtggttttatttcctaattgatttaagaaataaacctgaagaccgtctggtgcctgctggga

SEQ ID NO: 476633 - DNA, 201 bp, Homo sapiens
tcactgcaaccctgacctcctaggcccaagcgatcctcctgtctcatcctcctgagtagctgggactatacatgccacaatggccagttaatttttttcttttttttttttttttttttgcagagatgaggtctcagtttgttgcccaggctggtttcaaactcctgagctcaagtgatcctcccaccttgacctttcaaa

SEQ ID NO: 476634 - DNA, 201 bp, Homo sapiens
cctgttgaatataccccacctggtggtggcccctccgatgtccccactgatggctctgacaccgtgttggtggcgatgtcccagacaatcccaccaggacrgcccagacatccctactggcttcgctggtggctcatctcgaacatccacgccagcctttctggggccggccacccaggccgcctgtccgtctgtcctccc

SEQ ID NO: 476635 - DNA, 201 bp, Homo sapiens
cactgcaaccctgacctcctaggcccaagcgatcctcctgtctcatcctcctgagtagctgggactatacatgccacaatggccagttaatttttttcttttttttttttttttttttgcagagatgaggtctcagtttgttgcccaggctggtttcaaactcctgagctcaagtgatcctcccaccttgacctttcaaag

SEQ ID NO: 476636 - DNA, 201 bp, Homo sapiens
aggttattttcagctgccccttatggagttcccagtgtctgttgttcccatctttgcgtccgtgcgtattcaatgtttagctcccacttataacgaaaacatgtggtatttggatttcttttttttttttttgagatggagttttgctcttgttgcccagcctggagtgcaatgacgcgatctcggctcaccgcaacctct

SEQ ID NO: 476637 - DNA, 201 bp, Homo sapiens
ggttattttcagctgccccttatggagttcccagtgtctgttgttcccatctttgcgtccgtgcgtattcaatgtttagctcccacttataacgaaaacatgtggtatttggatttcttttttttttttttgagatggagttttgctcttgttgcccagcctggagtgcaatgacgcgatctcggctcaccgcaacctctg

SEQ ID NO: 476638 - DNA, 201 bp, Homo sapiens
gggaatgaatgaatgagggaatgagtgaaggagggaatgaatgagggaacgagtgaaggagggaatgaatgaatgagggaaggagggaatgaatgaatgarggaatgagggaatgaatgaacaaaggagggaatgaatgagtgaaatgagtgaatgaatgagggagaaatagacccatgacctggtggctctgcacaaggc

SEQ ID NO: 476639 - DNA, 201 bp, Homo sapiens
tcctggagggccggccggagttcgtggggctgtggctgggcctggccaaggcgggcatggaggccgcgctgctcaacgtgaacctgcggcgcgagcccctrgccttctgcctgggcacctcgggcgctaaggccctgatctttggaggagaaatggtggcgggtgaggccaggcgtgggcatcaggtgggcggggacccag

SEQ ID NO: 476640 - DNA, 201 bp, Homo sapiens
ctgtgaacattttggggggtgtgagcagccattgcagggatctggggaggcctgggaaaggcaggggagatccaaaggatggatttggtgattttgatgcrgaagctggagggaggcagtggccgggccaggctgaaacaggggcaggtgggtggagcccctgccctgtgttggtcagggctgggcagggccaggtactac

SEQ ID NO: 476641 - DNA, 201 bp, Homo sapiens
ttaaagtgaaattcatataaattagccatattaaagtgaaaaatttggccaggcacagtggctcacgcctgtaatccctgtacttcgggaggctgagatgkgcagatcacttgaggtcaggagtttgagaccagcctggccaacagggtgaaaccctgtctctactaaaaatacagaaatgtagcctggcgtggtggttgg

SEQ ID NO: 476642 - DNA, 201 bp, Homo sapiens
gcggaagaatcgcttgaacccgggaggcagaggttgcagtgagccaagattgcaccactgcactccagcctgggcgtgacagagtgagactccatctcaaaaaaaaaaaaaaaaaaaaaatttggccgggcatgatgatacacacctgtaatcccagctgcctggaaggctgaggcaggagaatcgcttgaacctgggaag

SEQ ID NO: 476643 - DNA, 201 bp, Homo sapiens
gcagcaggtgaagctctgcagtgtctgacgtagctgtagtgtccacacagaggcatctacttcctgccagcatggagggttttgtggatcaggaagtgggygccagccagaggtcttctcttgactgaatgcaggctgggaaggtgggaggaggggccctgagttggaggcgacgcttactaccctgcttttgcagatcag

SEQ ID NO: 476644 - DNA, 201 bp, Homo sapiens
aaatacaaaaattttgctggccctggtgacgtgcacctgtagtctcagctactagggaggctgaggtgggaggattgcttgagcctgggaggtctgcagtragccatgatcatggactctagtctgggcgacagagtgagaccctgtctcaaaaaaaaagtactgaatgagtgaaggggggaaagaatgaatgacggaggg

SEQ ID NO: 476645 - DNA, 201 bp, Homo sapiens
tgaatgaaagagggagtaaatgataaatggagggaaagaataaaggagggaatgaatgatggagggaataaatgcatgaaagaggtaataaatgaacaaargagggaatgaaagagtgaaggagataataaataaggatggaatgagaccagatgcggtggcccacgcctgtaatcccagcacattgggaggccaagggag

SEQ ID NO: 476646 - DNA, 201 bp, Homo sapiens
ccatgcaggaagtctcatgaaaaccctggacctttgtttttagaaattgcggatgctctcccccaacagaccccggcaccctcctatctccatggctttcrttgtgaacccctcctggggcccatgagcctcatggagccggcccctgcccacctcagacttcattcccctttcatgtcgctttcccctaattccccccac

SEQ ID NO: 476647 - DNA, 201 bp, Homo sapiens
tgaggcaggagaattgctggaacccaggaggcaaatgtttcagtgagccgagatagcaccactgcactctggcctggacgacagagcaagactctgtctcmaaaaaaaaaaaaaaaaaaaaaagggtggggagagaatggagcgggaggagggtctgtatcaccacagggtcttggctagtgtgggctttgcactcagtag

SEQ ID NO: 476648 - DNA, 201 bp, Homo sapiens
caggctggtttcaaactcctgagctcaagtgatcctcccaccttgacctttcaaagtcctagcattataggcgtgagccaccgtgtccacccaattttttwaaaaattttaattttaggctgcaggttgcacgtgctggtttgttgcattggtatattgtatgatgctgaggtttgggcttgtaatcatcccattgtccag

SEQ ID NO: 476649 - DNA, 201 bp, Homo sapiens
gaggcgggagaatcctgtgaacccaggaggtggaggttgcagtgagccgagatcgcaccactgcactccagcctgggtgacaagagtgagactccatctcaaaaaaaaaaaaaaaaaaagaaaaagaaatagaggacggggccgggcgcagtgtcttacgcctgtaatcccagcactttgggaggccgaggcgggtggatc

SEQ ID NO: 476650 - DNA, 201 bp, Homo sapiens
ccatgttggccaggctggtcttgaactcccgacctcaggtgatctgcccgcctgggcctcccaaagtgctgggattacaggtgtgagccactgcgccctgttttttttttgagacggagtcttgctctgccacccgggctggagtgcagtggtgtgactccactgcaccctccagctcccaggttcaagcaattctcctgt

SEQ ID NO: 476651 - DNA, 201 bp, Homo sapiens
ggccgaggcgggctgatcacctgaggtcaggagttcgagactagcctggccaacgtggcgaaaccctgtctctactaaaaatacaaaaaaattagctgggygtggtagcgggcacctgtaatcccagctactcgggatgctgaggcaggagaatcgtttgaacccgggaggcagaggttgcagtgagctgaggtggcacca

SEQ ID NO: 476652 - DNA, 201 bp, Homo sapiens
tgaggcaggagaatcctgtgaacccaggaggtggaggttgcagtgagctgagactgtgccactgcactccagcctgggcgacagagtgagactccatctcaaaaaaaaaaaaagaaaaatagaggacagggccgggcgcggcggctcacgcctgtaatcccagcactttgggaagtcgaggcaggtggatcacctcaggtc

SEQ ID NO: 476653 - DNA, 201 bp, Homo sapiens
gtgaatgaatgagggagaaatagacccatgacctggtggctctgcacaaggctttgatggggagagtgaaggtgacagggagggctcccagggtagaacaragagctccctgacaccagccagtgccccactgaccaagtgcggccccattttgagggagctgtgattggggagcagtaagcatggtgcatgggccatgtg

SEQ ID NO: 476654 - DNA, 201 bp, Homo sapiens
tgaggcaggagaatcgtttgaacccgggaggcagaggttgcagtgagctgaggtggcaccactgcactccagcctgggtgacagagtgagactctgtctcaaaaaaaaaaaaaaaaggaaaaaaaaagacgcaggcattgggcacctgctgtgtgcctcatgggcacttggcctgccactggctacgtcgccagcacttga

SEQ ID NO: 476655 - DNA, 201 bp, Homo sapiens
aaatggggatctgagggacctattttggagggtggatataaggttagcacagggcatggcagatagtaggtgcttaataaacactgagaatgatcatctgtttttttttttttttttttttttgagacatggtctcacactgtcacccaggctggagtgcagtggtgcaatcttggctcactgcaaccttcacctcccggg

SEQ ID NO: 476656 - DNA, 201 bp, Homo sapiens
cctgacatcacgtagtccgcctgccttggcctcctaaagtgctgggattacaggcatgagccaccatgcctggctcccttttttttgagacagggtgtctyctctgttgcccagggtggaccagcctccatctcctgggctcaagcaatcctcccacctcagcctcctgactagctgggactacaaacgcctgcctccgct

SEQ ID NO: 476657 - DNA, 201 bp, Homo sapiens
acctccacctcctgggttcaagtgattctcctgcctcaggctcctgaatagctgggattacaggtgtgtgccaccacgcctggctaattttgtatttttartagagatggggtttcaccatgttggccaggctggtctcgaactcctgacctcaggtgatccacccaccttggcctccgaaagtgctgagattacaggcgt

SEQ ID NO: 476658 - DNA, 201 bp, Homo sapiens
catctttgcgtccgtgcgtattcaatgtttagctcccacttataacgaaaacatgtggtatttggatttcttttttttttttttgagatggagttttgctsttgttgcccagcctggagtgcaatgacgcgatctcggctcaccgcaacctctgcctcccgggttcaagcaattctcctgcttcagcctcccaagtggttg

SEQ ID NO: 476659 - DNA, 201 bp, Homo sapiens
aatagcactgttatttcccatatgcgaatttaatatgccaaactttttattttttaaatttttgagacatacttcatattctattgttgtttctttctccctctctctctcaatttttttaagatgagtcttgctctgtggctcagctggagtgcagtggtgcaatctaggctcgctgcaacctctgcctcccacattcaa

SEQ ID NO: 476660 - DNA, 201 bp, Homo sapiens
gagtagctgggattacaggagtgtgccaccacgcctggctaattttttgtattttttagtagagacggggtttcaccatgttagccaggatggtctcgatmtcctgacctcgtgatccacctgctttggcctcccaaagtgctgggattacaggcttgagccaccccgcctggccgtgcccattcttaagccagtcatatt

SEQ ID NO: 476661 - DNA, 201 bp, Homo sapiens
agctggagtgcagtggtgcaatctaggctcgctgcaacctctgcctcccacattcaagtgattcttgtgcctcacacttttgagtagccgggattacaggsacccaccaccacgcacggctaatttttgtatctttagtagagacggagttttgccatgttggccaggctggtctcaaactcctggcctcaagtgatctgc

SEQ ID NO: 476662 - DNA, 201 bp, Homo sapiens
atagcactgttatttcccatatgcgaatttaatatgccaaactttttattttttaaatttttgagacatacttcatattctattgttgtttctttctccctctctctctcaatttttttaagatgagtcttgctctgtggctcagctggagtgcagtggtgcaatctaggctcgctgcaacctctgcctcccacattcaag

SEQ ID NO: 476663 - DNA, 201 bp, Homo sapiens
ggggggagtcattccgaagcccaactggagatgagaactcttaaaggcaccgtggggcacctagtggatgaccccaggaagctcttgcggggcttgagaatgtgtggcagggagggaagatgtcctgcagggggagcccatgagcaggtggctccgtgggcacctggggctcagtccagacgcagcgcagcctagtgggtg

SEQ ID NO: 476664 - DNA, 201 bp, Homo sapiens
ccttccaagttcaagcaattctcctgcctcagccttctgagtagctgggattacaggcgctgccaccatgcccagctaatttttgtatttttagtagagayagaggtttcacaatgttgtccagactgatctcgaattcctgtcttcaggtgatccacccgccttggcttcccaaagtgctgggattacagacataagcca

SEQ ID NO: 476665 - DNA, 201 bp, Homo sapiens
caggttggagtgcggtgacacgatctctgctcactgcaagctccgcctcccgggttcacgccattctcctgcctcagcctcccaagtagtgggactacagrtgcccgccaccacgcccggctaattttttgtatttttagtaagagagggggtttcatgttagccagaatggtctcgagctcctgacctcgtgatccgcct

SEQ ID NO: 476666 - DNA, 201 bp, Homo sapiens
gcagcctggccaacatagtgaaaccttgtctctactaaaaatacaaaaaatgaggctgggcatggtggctcacacctataatcctagcactttgggaggcygaggctggcggatcacttgaggttaggagtttgaaaccagcttggccaacatggtgaaacctcgtctctattaaaaaaaaaaaaaaaaaaattagctggg

SEQ ID NO: 476667 - DNA, 201 bp, Homo sapiens
gagagaactttgaaaagatgaaaatcagttgccttctgaggtactatgttctcccttctctggaatcacttaaccagaggcaggacatgtgtccctgctgkagtcaggatgttgagatggggtgggaagttggaccaaatgatctttaagatttttattcatggccgggcgcggtggatcacacctataatcccagcactt

SEQ ID NO: 476668 - DNA, 201 bp, Homo sapiens
agtagggtgcaggacatttttgcacatggtgggagcagggctgagtgtgtgttttgttgttttggttttttttcttttctttcgttttttttgtttgtttrtttgtttgtttgttttttgagacagggtcttactctgttgcccaggctggaatacggtggcacactcatagctcactgcagccttgacctcctgggctta

SEQ ID NO: 476669 - DNA, 201 bp, Homo sapiens
aataagaccgcctgcctatgggaggacagtgtagaagacacacgcctcatgggaccctggtgtgggcattgctgtagggggtggatctagccccctctgactctgcagaggggtctgtgtccagtcaacatcatggccaagcttttctaggactggaaattaggaagagactgagacaatgtcaagattaatgactgggga

SEQ ID NO: 476670 - DNA, 201 bp, Homo sapiens
gcaggcatcagggaggtgaataacaaggaaaggaagaagggagcaattaaataaaacttctttaaagcacacacagtacacagtgttcatcatctgaagtrgagtataaggcaacgttctccatagaaaaagagggggatcaggagtcggtgggtgtctttactttttaaatagagctggaatgtgctggaggagaggttg

SEQ ID NO: 476671 - DNA, 201 bp, Homo sapiens
taaatctcaccactgaactgaagtgcagcacaaactattctgactgccagggctcccttcttttcttccaaccttaacgcaaggctttctccttcaagaasccgtctttgcgtttggatgtcagttggaaagttttccgagtacatctatcttctctgtcttcagctgtcagatggggacatgtgccttaaactatctctg

SEQ ID NO: 476672 - DNA, 201 bp, Homo sapiens
acaactctgtgaatatactaaaaatcactgaattgtatactttaaaagggtaagtttcatagtatgtgaatgtttcagtaaagctgattttataaaaaaaragaatgagagcctgtcagagggatataagagccaacctgaaggctgggtgtggtggctcgagcctgtaatcccagcactttgggaggccgaggcgggtgg

SEQ ID NO: 476673 - DNA, 201 bp, Homo sapiens
aaaatcctgttgtgattttgatttgggtaatttttaattcctggattatttatgactgtgcttcttctcacttaaaagctaacaaacatctcatctctttaaaaaaaattttttttttttaaatagagacagggtctctgtcacccaggctaaaatgcagtagaatgatcatagttcactgcaatctcgaactcatgggtt

SEQ ID NO: 476674 - DNA, 201 bp, Homo sapiens
agtggcgcgatctcggctcactgcaacctccacctcccgggttcaagcaattctctgcctcagcctcccgggtagctgggattacaggcgcccgccaccaygcccggctaagttttgtatttttagtagagacggtgtttcaccatgttggccaggctagtctcaaactcctgatctcaagtgatctacccgccttggcct

SEQ ID NO: 476675 - DNA, 201 bp, Homo sapiens
atgctggtctgtggatctgttggaagaaaagagatggagtaatgtataaaatgcccaaaaagaacgcaagcccacttgcctcagattttctttttttctatttttttttttttgagacggaatttttgctcttgttgcccaggctggagtgtagtggcatgatctaggctcacggcaacctcccccttccaagttcaagca

SEQ ID NO: 476676 - DNA, 201 bp, Homo sapiens
acttgaggccaggaatttgaggctgcagtgccctattatcacacctgtgaatagccaaaacactcctgcctgggcaacatagcaagaccccatctcttaaraaaaaaacaaacaaaaaggcgcaggggttgagtccttgtaaggaatttggcaaaaagaggatagatattgggctgggtgtggtggttcacgcctgtaatc

SEQ ID NO: 476677 - DNA, 201 bp, Homo sapiens
gtgggctcctcttcctttgccacccttaaatactgatgttccccaacatctgtcctttctcctcacccagcaccctttccctgggtgaccatgcctactcrcacggctttacataccttccacaggctgccaactcataggcctgtgtctggcccagatctctgctccacgtgttagacctgtacatccagccctctgtgg

SEQ ID NO: 476678 - DNA, 201 bp, Homo sapiens
cagttgattgctcttccttttggtcttggctcgctgcaacctccgccccccggttcaagtgattctgctgcctcagcctcccaggtagctgggattacacrggcctgacaccacgcccggctaattttttgtatttttaatagagttggggtttcaccatgttcgccaggctggtctcgaactcctaacctcaagtgatct

SEQ ID NO: 476679 - DNA, 201 bp, Homo sapiens
ttttttcctcctacaacaggtctagacaacgtcatacaaggagttgcacgcatatccaaaacaaaagcaaggcaaaaacaagcaaaaaagcaacaaatgcmttccaaaatgatgtccatttatcagcccagaaatgtactggatactggtttagttcagcctgtaggtgctgggaagaaattccgacaaatccaagtcagt

SEQ ID NO: 476680 - DNA, 201 bp, Homo sapiens
agtgctggacgttgcaccatttcagcttggtttcattttcctccccagctggttcctgaaatactcctatagatctcaaaccaatgtttgcaagtatcttycctagcgtcactcagagctttatggccacaggctgcagacctgggcaaccaaaagagagaccgatctccctgccactacagaattaaccacgaaaaggaa

SEQ ID NO: 476681 - DNA, 201 bp, Homo sapiens
agtaggctttaggaagctttttcttctggagagaactaggctccatctccacaacccaggccttgggggtaactcggctttttttgcctgtgggttcctgycatcgtgggtctggctttcttggctttttgctatggtatttcccctggaggaatttcacactgtgcaaacagtctttctcttggctattttggtcagctc

SEQ ID NO: 476682 - DNA, 201 bp, Homo sapiens
tcctcaagggcaatctctgctccctttcctacatggcctgacaataccctcgagttagaaatgtcccatgttggctaggcacagtggctcatgcctgtaaycccagcactttgggaggctgaggtgggaggattgcttgaggccaggagttttgagaccagcctgacatagagagactatgcctctattattttaaaaaaa

SEQ ID NO: 476683 - DNA, 201 bp, Homo sapiens
ccagccttgtggcttgggccttctccttgaattacctcttctccccatccttgcagttgggacacgtgcaggccatgcggcgccgcttctccccgggctgkgtctctccggccagggcttgttccatttgcagctggatctgggtggggctcagcccactgatggtcaggttgttcccagaaacattctgcactgtcagct

SEQ ID NO: 476684 - DNA, 201 bp, Homo sapiens
ctgacagaaaagtgagacctcctccaccccaaggtctcctaagagaatgctgctagccaaaaaaagatctgctgataattgaggaagagcatctttaaaargacactcaactacatttcagaaacataaagatctaagtgttggctctacaagggaagaaataaagagaaagaactttttttcctcctacaacaggtctag

SEQ ID NO: 476685 - DNA, 201 bp, Homo sapiens
atgtttggccaggttggataatggagtctggagcttcgtggggaggtcagggctgatgatactggtttaggtagcatgagcctcgaggtggcacttagagycacgagggaggatgagaatgtctgagaagggaagagggcctgggagagttagggagggtggtagggaaatggagagtcaaggaggagtggtaatgatgct

SEQ ID NO: 476686 - DNA, 201 bp, Homo sapiens
tgatactggtttaggtagcatgagcctcgaggtggcacttagagccacgagggaggatgagaatgtctgagaagggaagagggcctgggagagttagggasggtggtagggaaatggagagtcaaggaggagtggtaatgatgctggtgaaatatagcatccagctttcttttttttaatttttttttattttttgagatg

SEQ ID NO: 476687 - DNA, 201 bp, Homo sapiens
ttggcacatttatttgtgagtcactccccacatttatcctgggccatgatcagtgttttgtttttgtttgagatggagtcttgctctgttacccaggctgrggtgcagtggtgcgctctcggctcactgcaatctccgcctcctgggttcaagtgattcccgtgcctcagcctctgcagtagctgggactacaggcgtgtg

SEQ ID NO: 476688 - DNA, 201 bp, Homo sapiens
aaaaaaaaaaaaaaaaaggcataaacaaagtatcttcccataaagttcttaccaggatcaactgaggtaatcagtaaagtgcttagtactgtgcttggcayaccatgtcagtgtttgttaaataactatgctgacatggcaaaagttatcaggttgtgtcatgcaatgacaactattcctttcccattacttggggaaaca

SEQ ID NO: 476689 - DNA, 201 bp, Homo sapiens
tgtggtacctgagtaggtgtcggctcagctgcctggatctgaaagttctgggagggcttctggggtacagtggggagggtggcagatgccgcctgcaccayccgcagagcctgctgggggatctgtaccacctgctgctgctcggccttggggggcaccacctggacctgctggaccacagctggctggcccccaccaggg

SEQ ID NO: 476690 - DNA, 201 bp, Homo sapiens
ccgcctcctgggttcaagtgattcccgtgcctcagcctctgcagtagctgggactacaggcgtgtgccaccacacatggctaatttttgtatttttagtaragatggggttttgccatgttagccaggctggtctcgaactcctgaccttaagtgatctgcctgcctcagcctcccaaagtgctgggattacaggcgtgat

SEQ ID NO: 476691 - DNA, 201 bp, Homo sapiens
cagagctcatctcccaagagcacatcagcccgcagcccagtctgatgagaagcacagtattcccctgtgccagtggcagcctcagagcatcctgaaagagygcttcctagacacgcagtggaagccatgacttcccctaagctgccggtgctgcctctgaactcatgtggaggttcttttttcagtgtccccagaggcagc

SEQ ID NO: 476692 - DNA, 201 bp, Homo sapiens
gggttgcagtgggcctgtgtttaatcaaggtacatgcgggagtctattttgaagctgaagagaaagaggggggttgaatagcagtggggcttgaggtgaascccaggaagaagagagaatagtagtggggtttgaggtgaagcccatgctgactaggagggctctgaaacacaggtggagggaggaaggcgaggggtccca

SEQ ID NO: 476693 - DNA, 201 bp, Homo sapiens
ttcagatcaaaagagactaaggagacaactaaacgtaatgtgtaatattggatcagatccttttgccacaaaggaattagtggggcaagtggtgaaaacasagtggggtcttggaattagcagtgtgtttcactgctaatttcctgggtttgacgattgtattgtggtaatgtagaatgttcttgtgtgtaggaattaaag

SEQ ID NO: 476694 - DNA, 201 bp, Homo sapiens
gtaaagaggagcaaaaagaagaggatcaaacagtcaggaaaggctttgtaaagggagtggacatttgatgtcttaatgagtaagttttcgctagatggacratggaacaggcgtcccagcaagagggaacattgtgagtaaaggcatggtgcacttgggggaacctggagacatgtaatactgctggagcaaaggtgatga

SEQ ID NO: 476695 - DNA, 201 bp, Homo sapiens
ggaaatgcattgttgccagactgtagccttctggaggggactgagccaaggccccattggctctcctctctaagcttcttattaatgggctctgaggccartgccttcctccaggggttggggaggtgggtggaagagctaagttgctggctgaggtcactgctgtaacttggctcttcgtatctgctttgtgtacaggca

SEQ ID NO: 476696 - DNA, 201 bp, Homo sapiens
ttattaatgggctctgaggccaatgccttcctccaggggttggggaggtgggtggaagagctaagttgctggctgaggtcactgctgtaacttggctcttsgtatctgctttgtgtacaggcaaaactggcttacagaagaaaaaggcaggaacacctgcattgggccctggcccttggaggtgctctgggggctcgtgcc

SEQ ID NO: 476697 - DNA, 201 bp, Homo sapiens
tgcccaccccaaaagatactgactctcaaggtcagatcaagctgggagatgaccagcatcatcttcaaagcaagccaaaaagagataaccagaggaggagraggaggacagtacagggagtgtggtacctgagtaggtgtcggctcagctgcctggatctgaaagttctgggagggcttctggggtacagtggggagggtg

SEQ ID NO: 476698 - DNA, 201 bp, Homo sapiens
ggcctgaatgacagagtgagaccctgtctttaaaaaataataataaaaattttaaataaacaaataaattaaaaccatggtaaaagagcccattaacagtaaaacaaatttcaatggctttcatttcaatgagaacaactctgggccgtggcttgctaatgccacaggccgaagtaagcaagaaggtgagtaaggaatgga

SEQ ID NO: 476699 - DNA, 201 bp, Homo sapiens
tggtctcgatcagcaccgtctccacctgctcagccacagccacagggggctgggaggcaggaaggctcttcttccttgctttcttgttagtcttagacagyggggttggggggctttcagtgaggagctgagtaggggccccggtgtcactggcgttcacaaggttgttgacgggcagagtgagcgtcacattgccgcccc

SEQ ID NO: 476700 - DNA, 201 bp, Homo sapiens
tttgccatgttagccaggctggtctcgaactcctgaccttaagtgatctgcctgcctcagcctcccaaagtgctgggattacaggcgtgatcacccagccyggccccaggccagaatcagcttctgaaatgagtggtgatttcatttcccctgagaagacagggctggcttaccatttacttttttggaggctgggaaatg

SEQ ID NO: 476701 - DNA, 201 bp, Homo sapiens
atttacttttttggaggctgggaaatgtcttggtctgttttcttctaggctgatctaagaagattcctaattatcaattgagagcagagatattccacttmcaattacatggcctgcctgctcactcttacttcctattcacactctcttggagaccactttgtgattctaccaaattctataggagaggtgacaacccca

SEQ ID NO: 476702 - DNA, 201 bp, Homo sapiens
tgctcatggtttcccctgccatggtgcactggagttcataggagccagtgtcctggtagatagcaaggctgccaatgtcccatttctccagggtctccccmatctttgtcaagcttccctttttccacattttgcccatgctaggtagtaggagtctagcccctaggtcaatgcaagcaattgccaactgagagtacactg

SEQ ID NO: 476703 - DNA, 201 bp, Homo sapiens
accagttgcagacaaagggccgctcgccagtgtgcaggcgcacatgggcacgcagcaaggacgtcttacggaacgtcttgccacagtcggggatgtggcamacgtgcttcttcttgccctgctctccagacctgagaattggggtgagggtggagtggagggaataggaagaggagagaaaagcggtagaggatggggcag

SEQ ID NO: 476704 - DNA, 201 bp, Homo sapiens
tctgcactccaattaaactttatttacaaaaacaggcaggtgggctagatttggcttcaaagttggtcacagactgcaaacctctaatatagaatacaaawtttttaaaaatgtacgtgtccttgacccactttcagggatttatttagctgtaagattggaaacagcctagatatatacagttaacaaggtatcagttgt

SEQ ID NO: 476705 - DNA, 201 bp, Homo sapiens
ctcaggctgaggtgggaggattgcttgagcccaggagattaagactgtagtgaccgcatcactgcactccagcccggacaacagagtatgaccctatctcaaaaaaaaaaaaacaccctaaaacaaacaaacattccagatgaatctagcctaaatattcctgctataaagctaggctgctcttcctgtttttttcttgtc

SEQ ID NO: 476706 - DNA, 201 bp, Homo sapiens
gaaggctcttcttccttgctttcttgttagtcttagacagcggggttggggggctttcagtgaggagctgagtaggggccccggtgtcactggcgttcacraggttgttgacgggcagagtgagcgtcacattgccgcccccacctgtcagcttcaccacattggccccgctctgcacgggggtggtggtcgtactcgact

SEQ ID NO: 476707 - DNA, 201 bp, Homo sapiens
gggctttcagtgaggagctgagtaggggccccggtgtcactggcgttcacaaggttgttgacgggcagagtgagcgtcacattgccgcccccacctgtcarcttcaccacattggccccgctctgcacgggggtggtggtcgtactcgacttctggatgggggctggcttgatggggacaggcttgtgactggacggtgag

SEQ ID NO: 476708 - DNA, 201 bp, Homo sapiens
gtaatcccggctacttgggaggctaggaacaaaagaattgcatacccgggaggcagaggttgcagtgagctgagatcgcaccattgcactccagcctgggygacagagcaagaccctgtcttaaaacaaacaaaaaatgttttggccattgtgatcctgtaacttggggaagggaagactgagaggttggagactgtcagg

SEQ ID NO: 476709 - DNA, 201 bp, Homo sapiens
ttggccaacatggtgaaacctcgtctctattaaaaaaaaaaaaaaaaaaattagctgggcgtggtggtggatgcctgtaatcccggctacttgggaggctrggaacaaaagaattgcatacccgggaggcagaggttgcagtgagctgagatcgcaccattgcactccagcctgggtgacagagcaagaccctgtcttaaa

SEQ ID NO: 476710 - DNA, 201 bp, Homo sapiens
tgcagtggctcacgcctgtaatcccagcactttgggaggccgaggcaggcgcgtcacctgaggtcaggagttcgaaagcagcctggccaacatagtgaaaycttgtctctactaaaaatacaaaaaatgaggctgggcatggtggctcacacctataatcctagcactttgggaggccgaggctggcggatcacttgaggt

SEQ ID NO: 476711 - DNA, 201 bp, Homo sapiens
ctgttcaccccttacaggcaggggaagaagcagaagcaacaggtgcttgagcctttggacactgaggccagtggtctaacccctaggggctgtcccacttsctttggacagttgagtccttccactttgataatctcttgggcagcaggttaaactgtttggggagctgggtgcagtggctcacgcctgtaatcccagcac

SEQ ID NO: 476712 - DNA, 201 bp, Homo sapiens
aaagccgtttgcctgctcactggaggggtcagtgctggtctaaggtcctctaggaaaggtcagtgtgtcaggggcctggtgcacgagaggaactgagaacsctgttcaccccttacaggcaggggaagaagcagaagcaacaggtgcttgagcctttggacactgaggccagtggtctaacccctaggggctgtcccactt

SEQ ID NO: 476713 - DNA, 201 bp, Homo sapiens
ctgaggactcccagtcatgacagttctattaaactttgggcttgtctccctaaaagctccctggcatggggtaggtggccctgctgtgctgaataagacckcctgcctatgggaggacagtgtagaagacacacgcctcatgggaccctggtgtgggcattgctgtagggggtggatctagccccctctgactctgcagag

SEQ ID NO: 476714 - DNA, 201 bp, Homo sapiens
gttgtgattttgatttgggtaatttttaattcctggattatttatgactgtgcttcttctcacttaaaagctaacaaacatctcatctctttaaaaaaaawtttttttttttaaatagagacagggtctctgtcacccaggctaaaatgcagtagaatgatcatagttcactgcaatctcgaactcatgggttcaagtgat

SEQ ID NO: 476715 - DNA, 201 bp, Homo sapiens
cctcccaaagtgccgggattataggcgtgagccaccgcgcccgccacctcttctagttttaaaccccttccctccagcctcatttatttaagcaagggtcrgagcattttactccctttgctcatggtttcccctgccatggtgcactggagttcataggagccagtgtcctggtagatagcaaggctgccaatgtcccat

SEQ ID NO: 476716 - DNA, 201 bp, Homo sapiens
tgtgtccagctttctaagaggtgagaggaagaaggctgatagcagagcaaggggtgtgctggagggcctgaagctcaggaattcttgggcccagccttgargtgaactcagcttggagccccaagagtagcaacaccaggacttacagaagggcgtgtgcttggtgctctgccagcagatgcctaagccctgagtgggttt

SEQ ID NO: 476717 - DNA, 201 bp, Homo sapiens
ctaatgttttgagtaattctataatcaaaaataagttattaacaagtatgtatctatcccctcaccatcccctgaaaaaaaacaacctataaggaaaaggkgccaaaatatccctatgtttcatcaatttctaaagataagaagtacttggccctatgaactaaagagagcccatttgtcaggtagaaacggccacttact

SEQ ID NO: 476718 - DNA, 201 bp, Homo sapiens
tacgtatggtgagtagggtgcaggacatttttgcacatggtgggagcagggctgagtgtgtgttttgttgttttggttttttttcttttctttcgttttttttgtttgtttgtttgtttgtttgttttttgagacagggtcttactctgttgcccaggctggaatacggtggcacactcatagctcactgcagccttgacc

SEQ ID NO: 476719 - DNA, 201 bp, Homo sapiens
acgtatggtgagtagggtgcaggacatttttgcacatggtgggagcagggctgagtgtgtgttttgttgttttggttttttttcttttctttcgttttttttgtttgtttgtttgtttgtttgttttttgagacagggtcttactctgttgcccaggctggaatacggtggcacactcatagctcactgcagccttgacct

SEQ ID NO: 476720 - DNA, 201 bp, Homo sapiens
cgtatggtgagtagggtgcaggacatttttgcacatggtgggagcagggctgagtgtgtgttttgttgttttggttttttttcttttctttcgttttttttgtttgtttgtttgtttgtttgttttttgagacagggtcttactctgttgcccaggctggaatacggtggcacactcatagctcactgcagccttgacctc

SEQ ID NO: 476721 - DNA, 201 bp, Homo sapiens
gtatggtgagtagggtgcaggacatttttgcacatggtgggagcagggctgagtgtgtgttttgttgttttggttttttttcttttctttcgttttttttgtttgtttgtttgtttgtttgttttttgagacagggtcttactctgttgcccaggctggaatacggtggcacactcatagctcactgcagccttgacctcc

SEQ ID NO: 476722 - DNA, 201 bp, Homo sapiens
ataagaccgcctgcctatgggaggacagtgtagaagacacacgcctcatgggaccctggtgtgggcattgctgtagggggtggatctagccccctctgactctgcagaggggtctgtgtccagtcaacatcatggccaagcttttctaggactggaaattaggaagagactgagacaatgtcaagattaatgactggggac

SEQ ID NO: 476723 - DNA, 201 bp, Homo sapiens
gagggttgactggctctaaggaaaagctgtttgctggcagacacaggtggctggtgacaaagggaacagagcaggggaatggatagctcaaaacgagcctygccactcctgaacagaacagcaatcccagctgtgtcctttcgagggtgagtgaaagcacatgctgtcctttacatgcttgaggcggacttgcctgtctct

SEQ ID NO: 476724 - DNA, 201 bp, Homo sapiens
gaaaaaataatactgtagctaaatctttctgcatatgtatcattatttccttagggaagacctgggttttagtcctgtctccatcaacctcaagaaatggsacctcatggaagggaggggaggcaatgccgaggatgtgctcctgagcaggtgccacaattcttcacctgtaaggtaggtctgatcatgggaattcacaga

SEQ ID NO: 476725 - DNA, 201 bp, Homo sapiens
tgccctggagtcagttctcatttccttttgcccaaggtccctatgagcaggtatttgaccctcttttccaggctctgagtcactaccatagtccaccatgrtttgcttccttttttacccacagccctgttcattattccatccttgcaggctcacttcctgcctcttctactccctgaggaccccttctcctaggaaacc

SEQ ID NO: 476726 - DNA, 201 bp, Homo sapiens
tttccttagggcagtgtgaactaggaaacttctgccatattcccttttgcctggggtaaaggatgatgctgctgataagaagttgtatctgtgtgcgtgaycacagcccactttctcaccgtgagctggggagcccagggtgttccccctgaggactcccagtcatgacagttctattaaactttgggcttgtctccctaa

SEQ ID NO: 476727 - DNA, 201 bp, Homo sapiens
tcctgggttcaagccattctcctgcctcagtctcccaagtagctgggattacaggcgtgtgccaccacacctggctaattttttgtaattttagtagagayggggtttcgccatgttggccaggctggtatggaactcctgacctcaagtgatccacccacttcggcctcccaaagtgctgggattacagacgtgagccac

SEQ ID NO: 476728 - DNA, 201 bp, Homo sapiens
tgctacatgttgcagcaagcagggctaagggagatggctgggagtcctgcaaaaaaacagcagagaaaaggagtgagacaggaaggcccgctgcccggccrcctctgtccatgatcctctcctcctggcggcattccacgccagtcttccccacctccggggcaggcatgttgccagtaccctcccctgcttggctgctgt

SEQ ID NO: 476729 - DNA, 201 bp, Homo sapiens
gatctctgctcactgcaagctccgcctcccgggttcacgccattctcctgcctcagcctcccaagtagtgggactacagatgcccgccaccacgcccggckaattttttgtatttttagtaagagagggggtttcatgttagccagaatggtctcgagctcctgacctcgtgatccgcctgccttggcctcccaaagtgct

SEQ ID NO: 476730 - DNA, 201 bp, Homo sapiens
catcgagggtttaaaggcatatatggctttaaagtttaataagtcctggccaggtgcagtggctcaagcctgtaatcccagcactttggaagggcaatgtragcagatcacttgagctcaggtgtttgagcccagcctgggcaacatggtgaaaccttgtctgtatattaaaaaaaataagtcctccacttaggttaaaaa

SEQ ID NO: 476731 - DNA, 201 bp, Homo sapiens
agagttcagggtgaggaagcctgaaacctcgagtcaacccttctgcccttctgcacatgacaaagatgataatcacagcagctatttttgagagcctgctstatgttggatatcattttaaggacctttgtacagggactcatttaatctccatgaccctataaaataggtactatcatcagcactttacagatgaagaaa

SEQ ID NO: 476732 - DNA, 201 bp, Homo sapiens
cactgggactcacagcagcagtggcagccatgctggtctgtggatctgttggaagaaaagagatggagtaatgtataaaatgcccaaaaagaacgcaagcycacttgcctcagattttctttttttctatttttttttttttgagacggaatttttgctcttgttgcccaggctggagtgtagtggcatgatctaggctca

SEQ ID NO: 476733 - DNA, 201 bp, Homo sapiens
actattataaggtgggcacggtggctcatgcctgtaataccagcactttgggaggccgagacaggaggatcacttgaggccaggggttcaagactagcctsggcaatacagcaagatgccatctctacaaaaaatgtttacaaactagctgggtgtggtggtgtgtgcctgcagtcccagctccttaggaggccaaggcga

SEQ ID NO: 476734 - DNA, 201 bp, Homo sapiens
ttagtgtctgtgtttctccaggagtcctactcactcttgtgcccacatagaggtctaaattgaggtaattgagtcccatgagtatcaacaagctggtaagraaaacaagacaacctagaatgcctccctctctcctaaagcatatagtctggcggcaaactactgtaccagccttatttcttttcacttctcctatacaca

SEQ ID NO: 476735 - DNA, 201 bp, Homo sapiens
ccaaaccagaatgctcttctaaaggacttggatattcttcataattcatcacagatgaagagcatgtcaaccttcattgaagaagcctataagaaactggrtgcatcttaaagagtgttttttttttagattgttccatattaatttaatgttcgtgaatttgtaaaactgttaacctatgattatatgtacagaggctaa

SEQ ID NO: 476736 - DNA, 201 bp, Homo sapiens
tggggagagggagagatagatttgaaagaagaatggcgattcgttgacaattattgaagttggatgatagatacttaaggtttattttactgttctctctracatacatttgagatttctcataataaaatgttaacaactacatttaatactatctttcccacagaaagaaattttggcgctaattccaaaccagaatgc

SEQ ID NO: 476737 - DNA, 201 bp, Homo sapiens
acttcatgtcaccagctgcattagcccctaacaagagcctaacaaaagcatctcctttaaagctttgaagccaggcattgccttctcttttccaactatcraagtcctagagatagcatcttcttccaatagaatgctgttttatttacattgaaaatatgttgtttactatagccaccttcaccagtgatcttagctagc

SEQ ID NO: 476738 - DNA, 201 bp, Homo sapiens
atgataataagcttatatatgtgaataagttataacctagtgtataaaaaattatttctaacaaactacagtatactgtcttgggttgttttttttttttwagtctgtaaaataaaatgactgcaattacttttttatgtgacctataatatcagttaatttgggagatgccataattctgttaacacccttcaggcagag

SEQ ID NO: 476739 - DNA, 201 bp, Homo sapiens
acattccatttttaagcaaaaacatgtaaaacatctagattgatcagagcctcttctattactaacgacaggacaaacaaagcacactaacctaaaacacrgaaagacagcagccagcaagagaaaaacctggcaacctctgtcaaagagtaccagagaccatttgcaaactatgatggaatcagtaataatgtgagtata

SEQ ID NO: 476740 - DNA, 201 bp, Homo sapiens
aaattctatcagaagagccaggcatgtaacttattacaatacagtgtggcaaaatatatatataagaagaattttttcattgtacttctgtttaaagtgtmtttaatatgaaaggaaaagtgattgattttgcctggctagtggggaggggtacttgagagaaatcagagagaaaaagtacaaagagtatatgatttgtgc

SEQ ID NO: 476741 - DNA, 201 bp, Homo sapiens
gtaacagtattaaagaaaaagaagaaatacaataccatctcaacttcctgaagaaaaggtaatactattgcataattaaaatgattaaaacataatttttwaaaacctgacttctttctatgttgccaaatagacacttgtggaatgtaagtttttctttttttttagagaaggtgaacaacttggaagtatgttttctct

SEQ ID NO: 476742 - DNA, 201 bp, Homo sapiens
gtgccagtgggtcggtccaggggtcctcagtagaagttgttagttgaactcctttgggattctatttgtaagaccatctgtagcttgatggcctcgatttrctcagtgataggcaatggtctcactgcttggcgatggtctcaccgctcggcgattgtctcaccgcttggcgataggcgaaggtccctttgtggtcgccaa

SEQ ID NO: 476743 - DNA, 201 bp, Homo sapiens
accttttcttattatgataataagcttatatatgtgaataagttataacctagtgtataaaaaattatttctaacaaactacagtatactgtcttgggttktttttttttttttagtctgtaaaataaaatgactgcaattacttttttatgtgacctataatatcagttaatttgggagatgccataattctgttaacac

SEQ ID NO: 476744 - DNA, 201 bp, Homo sapiens
gaaggtacagtgtatgtttgggaggcagaattactcaaagtgtgttcaggaaatcatcaaatctagctagagagggagatttgattaaggagtagtaggaragaagtatgaaaaggtaggcagagttaggttggtaaggactaaaaatggcatggtaaagagtttgaatgttacacagaacgtattggggtaaatttttta

SEQ ID NO: 476745 - DNA, 201 bp, Homo sapiens
tgcaaatttggattcagaccacagcaaaaaagcaaatactgcaataacgcaagtcacacaaatgttttggtttcccacggcatatggaagttatgtttacrctatactgtagtctagtaagtgtgaaaaagcattatttcttttttttttttttaaagggacataccttaatttagaaaacgctttactgctaaaaaatgt

SEQ ID NO: 476746 - DNA, 201 bp, Homo sapiens
ggatggccatgggccaggcgtggtggctcacgcctgtaatcccagcacttttggaggctgaggctggtggataaccagaggtcaggagttcaagaccagcmtggccaacatggtgaaaccctgtctctacttacaatacagaaaaaaaaattatctgggcatagtggcaggtgcctgtagtcccagctacttgggaggctg

SEQ ID NO: 476747 - DNA, 201 bp, Homo sapiens
acagttcacaaaatttagcccatgggaaattccacagagtaaactatctaatctccacaaataaattgaaatggaagccttctatggatgaaaagagactyagacatatcaaccagtcacaaccagtttggaacctgattaaaacaaaatgtaaaaaaaaaactccaatttatgagaaaattgaaaatgtgaacactaacc

SEQ ID NO: 476748 - DNA, 201 bp, Homo sapiens
ctggggctgcaggtggagctgcctgccagtcctgtgctgtgcgcccgcactcctcagcccttgggtggtcgatgggactgggcactgtggagcagggggcrgcgctcatgggggaggctcctgctgcacaggaaccctctgaggggggaggctcaggcatgtcgggctgcaggtcccaagccctgccccacagggaggcag

SEQ ID NO: 476749 - DNA, 201 bp, Homo sapiens
aaaatttgcttttagtaaagtagccccagtgtcccttaatttgaggtaaatcttaataaattgaaaggctaaatgatgatttgtcagggcttttagagggrgagatttactggcaatgttacccagtggtaataaaagaatattgtacccttaagaatatgaggacaagaaaaaatgaggactgttttaaaataataatag

SEQ ID NO: 476750 - DNA, 201 bp, Homo sapiens
tgtttttagcagttgccaaatctaggaaactaacatttatattgctgtatctataagtatttgcctaaaaccataaaataggaattgccttaaggatctartagtttataatgcctgaatggaactcatttattggttaacagctcatatcaggagctgtgataagtaagtgtttacatacactgtctagtgcataaaaac

SEQ ID NO: 476751 - DNA, 201 bp, Homo sapiens
tataaaccttttcttattatgataataagcttatatatgtgaataagttataacctagtgtataaaaaattatttctaacaaactacagtatactgtcttsggttgtttttttttttttagtctgtaaaataaaatgactgcaattacttttttatgtgacctataatatcagttaatttgggagatgccataattctgtt

SEQ ID NO: 476752 - DNA, 201 bp, Homo sapiens
ttcaagtcaccacccatattagcccctacaagagagtcagcctgtcttttgaagctttgaagccaggcaatgacttctttctagatatgaaagtcctagayagcatcttccaatagaaggctgttttgtcttcattgaaaatctgttgtttagtgtagccccttcatcaattatcttacctagaactggataacttgctgc

SEQ ID NO: 476753 - DNA, 201 bp, Homo sapiens
ttacctagaactggataacttgctgcagcttctgcatcagcacttgctgcttcactttgtactttcatgttatgcagatagcttacttccttaaacctcargaaccaagctctgctagcttcaggctcttttgctacagctttctcacctctctcagctttcatagaattgaagtgagttaagaccttgccatgaattcgt

SEQ ID NO: 476754 - DNA, 201 bp, Homo sapiens
tgttaatagtgctgaggttgagaaactttgtgctatagtctagtgcctcaagtaggtttcattgttaacagtacttctcaaactctgttagaccagttttkctttttatttctaatcagtcataactgatacttttgtaaaatgcaattaaaaatcaattattagtcaaactcccttgtggtataataccaggagtgaact

SEQ ID NO: 476755 - DNA, 201 bp, Homo sapiens
tgtcttaacagtttaatgagaattatgatttgtggggtttttgctgcctacttttttctttacaaaaattaaaattttatttgcaaacaatgcatcaaacraaggtctgtatcaagactctattagaaacttaaacaaattagcaagcaaaaaaccaacaatcctattaaaaagtgggcaaaggacatgaacagacacttt

SEQ ID NO: 476756 - DNA, 201 bp, Homo sapiens
atagaatttttgagcaatgcactttgatcttagtgttttatttgccttaaactctatagaactcagttttctttgaaatcatttagaataactaatgtaartcttctctatttttgatcacattctctaaaataattgagatttggggtccagggtcatagttaagacttctagactagtgttctgtctctcaaccaataa

SEQ ID NO: 476757 - DNA, 201 bp, Homo sapiens
ccagactcaggagcccagttggcttcacccagtggagcccacactggggctgcaggtggagctgcctgccagtcccacaccgtgtgccagcactcctcagmccttgggtggtcgatgggactgggcgccatggagcagggggcagcactcatcggggaggcttgggctgcacaggagcccacggaggagggaggctcaggc

SEQ ID NO: 476758 - DNA, 201 bp, Homo sapiens
agaccatctgtagcttgatggcctcgatttgctcagtgataggcaatggtctcactgcttggcgatggtctcaccgctcggcgattgtctcaccgcttggcgataggcgaaggtccctttgtggtcgccaaaatgtgtctggagttggtgggttcttggtctcactgacttcaagaatgaagccacagaccctcgtggtga

SEQ ID NO: 476759 - DNA, 201 bp, Homo sapiens
catcctgctgattggtagagccgagtggtctgttttgacagggcactgattggtgtatttataatccctgagagctagacacaaaggttctccacgtcccyaccagagtagctagatacggagtgtagattggtgcattcacaaaccctgagctagacacagggtgctgattggtgtgtttacaaaccttgagctagatac

SEQ ID NO: 476760 - DNA, 201 bp, Homo sapiens
atcctgctgattggtagagccgagtggtctgttttgacagggcactgattggtgtatttataatccctgagagctagacacaaaggttctccacgtccccmccagagtagctagatacggagtgtagattggtgcattcacaaaccctgagctagacacagggtgctgattggtgtgtttacaaaccttgagctagataca

SEQ ID NO: 476761 - DNA, 201 bp, Homo sapiens
ctgttttgacagggcactgattggtgtatttataatccctgagagctagacacaaaggttctccacgtccccaccagagtagctagatacggagtgtagahtggtgcattcacaaaccctgagctagacacagggtgctgattggtgtgtttacaaaccttgagctagatacagagtgcagattggtgtatttacaatccc

SEQ ID NO: 476762 - DNA, 201 bp, Homo sapiens
agctagatacggagtgtagattggtgcattcacaaaccctgagctagacacagggtgctgattggtgtgtttacaaaccttgagctagatacagagtgcarattggtgtatttacaatcccttagctagacataaaggttctccaagtccccaccagactcaggagcccagctggcttcacccagtggatcccacactggg

SEQ ID NO: 476763 - DNA, 201 bp, Homo sapiens
cttaaactctatagaactcagttttctttgaaatcatttagaataactaatgtaaatcttctctatttttgatcacattctctaaaataattgagatttgkggtccagggtcatagttaagacttctagactagtgttctgtctctcaaccaataattcacaatgtataatagactcatgtagtgtaatagtctagaaaac

SEQ ID NO: 476764 - DNA, 201 bp, Homo sapiens
ctagacataaaggttctccaagtccccaccagactcaggagcccagctggcttcacccagtggatcccacactggggctgcaggtggagctgcctgccagycctgtgctgtgcgcccgcactcctcagcccttgggtggtcgatgggactgggcactgtggagcagggggcggcgctcatgggggaggctcctgctgcaca

SEQ ID NO: 476765 - DNA, 201 bp, Homo sapiens
tcagcccttgggtggtcgatgggactgggcactgtggagcagggggcggcgctcatgggggaggctcctgctgcacaggaaccctctgaggggggaggctyaggcatgtcgggctgcaggtcccaagccctgccccacagggaggcagctaaggcccagcgagaaatcgagcagtgccggtgggctggcactgctggggga

SEQ ID NO: 476766 - DNA, 201 bp, Homo sapiens
tttgtgacaagagctaccatggatatgattgatatagactggattatatacctagccccatgattacacagacaagtttgctaggcaaacaaaactattcrccattacaattctaaaggaacatacttccagaaagtctgccctatagaaacaatgttataagtggtgattaaatgttgctgatataataggatatattca

SEQ ID NO: 476767 - DNA, 201 bp, Homo sapiens
ggaagataataggagataaccttatctatcatggttaacttccagcttttaatgaatggatatccaaacaactaagtcaaagcaaccttgaggagcttatyagataattataaaaactaacacatatgggaccgtatctcttagacattttgaagtagtttgtagatgtggtgcatagattttagttgcaatttattaagt

SEQ ID NO: 476768 - DNA, 201 bp, Homo sapiens
tgcctacttttttctttacaaaaattaaaattttatttgcaaacaatgcatcaaacgaaggtctgtatcaagactctattagaaacttaaacaaattagcragcaaaaaaccaacaatcctattaaaaagtgggcaaaggacatgaacagacacttttcaaaagaaaacatacatgcggccaacaaacatgaaaaaaatgc

SEQ ID NO: 476769 - DNA, 201 bp, Homo sapiens
gtagctcttaacagtgggcttaaaatattcagtaagccatgctctaaacagttgtactgtcatccaggctttgttgttccatttacagagcacagacaacrcagatgtagttgatttagtagaattaaggaccctgggattttcagaatgatcagtgagcattggcttcaacttcatgtcaccagctgcattagcccctaa

SEQ ID NO: 476770 - DNA, 201 bp, Homo sapiens
tgtttggcaaattacttttctcattcgactgtatagtttgaacatcttgtcagtcacgtagatctctcatttttgttgatagctatgtaacattctgttgyatggaggtcatataatttgtaaattactgatggaaatacataatttttttaatacaggtaagactgggtacacccttgtacatatgtctttactgatttg

SEQ ID NO: 476771 - DNA, 201 bp, Homo sapiens
gataccatatgagtatggtagtaatacccaaagataaccaaagcaatggaacaaaataaattttataatgagaaattttaatccttgttatatttaacccwtttgttcattcaatgctgttatacattccctttgttgtgggttgaatctaggaaaagggtcttgtccaatataattaaggatctcaagatgaagcatcct

SEQ ID NO: 476772 - DNA, 201 bp, Homo sapiens
tggcagggccagccagctgctccaagtgtggggcctgctaaacccacgcccacctggaactacagctgacctgcaagcaccgggcgcagccccggttcccrctcgcgcctctccctccacacctccctgcaagctgagggagccagctccagccttggccagcccagaaaggggctcccacagtgcagcagtgggctgaag

SEQ ID NO: 476773 - DNA, 201 bp, Homo sapiens
tttttaatgcttctaacaatagcatataactccttataaaatagtactgtcttatttgtagtaaactatttcttccaagggctctagtagacattgtagtrtaaatgtttgtagcattggaaagtcttcatgttttctcaagaagtaatttgaaattttcctattggctgggcacagtggctcacacctgtaatcccagca

SEQ ID NO: 476774 - DNA, 201 bp, Homo sapiens
tcactatgttgtatggcatcctgtggaagataataggagataaccttatctatcatggttaacttccagcttttaatgaatggatatccaaacaactaagwcaaagcaaccttgaggagcttattagataattataaaaactaacacatatgggaccgtatctcttagacattttgaagtagtttgtagatgtggtgcata

SEQ ID NO: 476775 - DNA, 201 bp, Homo sapiens
gaggttttgaccaatcttttaaaatgtacaaacaattcacagttcttgaactgtacaaaaacatcccatgggcaattgctgacccctgcagctaccctttyttaaaaaaaaaaaaaagtcatttagaagccaaaatatatttcttgaggaagactactctcccagcaatagttctgcatccagtatttggaaaagacatag

SEQ ID NO: 476776 - DNA, 201 bp, Homo sapiens
accaaagcaatggaacaaaataaattttataatgagaaattttaatccttgttatatttaacccatttgttcattcaatgctgttatacattccctttgtwgtgggttgaatctaggaaaagggtcttgtccaatataattaaggatctcaagatgaagcatcctgtatcgtcacgggtacgtcctaaatccaatgacaag

SEQ ID NO: 476777 - DNA, 201 bp, Homo sapiens
acctatgattatatgtacagaggctaaggcttctgcaggatttattatctcctgatatgcactttaaaattagtctttgtagttctatcattagcatctartgtagttctgaagactgtttttagcagttgccaaatctaggaaactaacatttatattgctgtatctataagtatttgcctaaaaccataaaataggaat

SEQ ID NO: 476778 - DNA, 201 bp, Homo sapiens
tgatggcaggcaggggcaggagcagcccagccacaaggacacaggcggccagggtgcagagccaagctgtcccaaaaggaagcagaccctataaattttcyattaagtaatgacattctggaaatctctaagcaatgcccttgaggcaagatgaggccaaggacttctagaacttctgggctgggccatgcttgtctcttt

SEQ ID NO: 476779 - DNA, 201 bp, Homo sapiens
tgatgctctccgggtgcttggggggctccggccgcagcgaggggctgaagggctcgctgcggatgatgggtgagtggatcttctcctccttcaccaccacraggggctggggctggaccacggaggcagcacgcagctcctgggatggcacaggcacagcggccggtgaggtgggcaggcacccccggccctagcccacag

SEQ ID NO: 476780 - DNA, 201 bp, Homo sapiens
ctgcagctcgggacaagccacactgtccacagaggaggctgcccctctgcaacgcttttgctcccagcctagcctcatgcccatctccttccactgtctgycagcacaggcacccttgggttctccaggagccctgctggctggaggcatctattttcataggcctggagcaaaccacaatgccccaggtgtggtagatcc

SEQ ID NO: 476781 - DNA, 201 bp, Homo sapiens
tctctactaaaaaacaaaaattagctgggcgtggtggcgtgcgcctgtaatcccagctactcaggaggctgaggcaggagaactgcttgaaccaggaggcrgaggttgcagtgagctgaggtcgtgccaccgcactccagcctgggcgacagaaagagactccatctcaaaaaaaaaagaaagaaagaaagaaagaaatta

SEQ ID NO: 476782 - DNA, 201 bp, Homo sapiens
gaccactttgggcactgccaattccattcagtgctggagggccccaggtctggcctgccagggatccacaggcacatgactgcaacagcctcccacccaastagggcagtgccttcagcacctgctgaggctgacctgggcaacggtaggctccaggggctgtggtttatagaaaccacctgcctgctggtgggttcagag

SEQ ID NO: 476783 - DNA, 201 bp, Homo sapiens
gtggtggcgtgcgcctgtaatcccagctactcaggaggctgaggcaggagaactgcttgaaccaggaggcagaggttgcagtgagctgaggtcgtgccacygcactccagcctgggcgacagaaagagactccatctcaaaaaaaaaagaaagaaagaaagaaagaaattaaaaagcctgaactccttcaaggatgggaaa

SEQ ID NO: 476784 - DNA, 201 bp, Homo sapiens
attcagtgctggagggccccaggtctggcctgccagggatccacaggcacatgactgcaacagcctcccacccaagtagggcagtgccttcagcacctgcygaggctgacctgggcaacggtaggctccaggggctgtggtttatagaaaccacctgcctgctggtgggttcagaggatggctcacggatgactcctgaaa

SEQ ID NO: 476785 - DNA, 201 bp, Homo sapiens
caagtcctcacttctgccctggaagcagatggctgcgacagccaggtgtgcagaagcccgctgaggcctacaatgagcacatcagcacctcatgatggctstgaccctgagaacagaagcaacccatggccttggggagaagatgctgggaatttttatgatcatttatctacagtcttaaagaatttaaaaaagaagatg

SEQ ID NO: 476786 - DNA, 201 bp, Homo sapiens
taacaacttggcttttggcctacaaagcccctagcaggatcccaatccacactgctcttgatgccccatcctagcctgctggggcttgggtcacggccagrgacctgaagtagagctggctggagaagacctgcctcagccccgataggtgcctggtgcacccgagtgctggctcttctaaatgccttgcatcccctgtct

SEQ ID NO: 476787 - DNA, 201 bp, Homo sapiens
cccaatcttattattcaaagaaagtcattttttaaacttaggtatttttccttttttaaaaaaattaagtttacacatctatgctgtaacctcccctcccygcccacacgtgtacttcacactgtgcaccacccaggctctcaacttgaaggaagtgacccaggacccccaatcagaattgtggccatgtggaaacaacca

SEQ ID NO: 476788 - DNA, 201 bp, Homo sapiens
gctccttgtcagggtgctgcctcttgctgctggtgttggaggacacatgctttgcccaaatccaggctccttccacttggatctgcttcgtggagggccaygctaagcttctgtgaggcacgtggccctcagtgcagcatgccaccaaaagggatggggaaggaccttgtgccctgtaagagctcaccactccacgccaga

SEQ ID NO: 476789 - DNA, 201 bp, Homo sapiens
cgggaaaacactcctcagagcttccaggcacagctgcccttgttcccagaagcactgccttctgagtaagagcttctggcagggagccggcagtagccgcycttgccaaggtttctggaaactggcaggcccccacctcctggaaccacagggggcagctggactgctgcccttcatgactggctcgagcgctgcctccca

SEQ ID NO: 476790 - DNA, 201 bp, Homo sapiens
tgctcaaacagaaacacctctaccaagcactggcagagaggtgtccctcccaagggcaggcgaaacaggctgggccagaggcagcccacctacagcacccyccaccccttgcctgcactaggcccccttgagattgaggcctgtgtccactccagtccggcacctggagcccgtgtgtaggaagaaactctactgctgcag

SEQ ID NO: 476791 - DNA, 201 bp, Homo sapiens
gggcttggatgatgtggccacactcgcctgccccaaccccaggggctgtcgtcattctaagggactgaagacggggaaaatgttcacactgttaacaccartcagaggtgtccatggggcagtccctgagggtctgtgacaccctctctggtccaccagcccagactcaccccactagaggaggcgggtggggtgaggtgg

SEQ ID NO: 476792 - DNA, 201 bp, Homo sapiens
ttcttcgtctttttaggaggaggttccttggctttgctttttttattctcttccacttcctctttccttttgtgcttttcttttttcttttccttcttgtytttctcctttttctttggtttgttctgctggggctgagagagggctgcaagctgctcgtgcacggctttgagctgtagaccagacaggcaagacacacac

SEQ ID NO: 476793 - DNA, 201 bp, Homo sapiens
actctactgctgcagtgtctgtggtgtgacagacatccagtggccttggtaaactctacattcaggcaggcttactcccctctcagaaggagaaaaatgcaaaaaaaaaaaaaaaaaccacttaaaacccaaaaatctttgttggagaaaatctgcgaaaaggaggtggctccagggtgtcaggagaggacagaaaaaatg

SEQ ID NO: 476794 - DNA, 201 bp, Homo sapiens
acgttcttggggacagaaaaccagtcacggcggcagcaacgatgtcctgtgtatactgtgtagacatttggcggagagaagggcctctgccccgcatgtgrggatgcagggcttgggtccagccggcacttgctcgtaacaaggcgtgtgctgagcggacgtcctgtgaggggtggtgggtggcgggacgtctgtccgact

SEQ ID NO: 476795 - DNA, 201 bp, Homo sapiens
gctgactgcctccactcctcatcttggtcaatggagagcgtggcgcctcttctgcctccatacctttcctgagccatttcaagacccagacacgtactgcmctgttctgattatcttcccccgagtgcttgacacgtattcagtgaagcaatagcaccagacagttcttacagacacaatgactttaaacttgggagtaag

SEQ ID NO: 476796 - DNA, 201 bp, Homo sapiens
caggtaaatccacgggagccacagctcctactggcatcagcaagtgatcttgagggggaacaccaaaataaagtggagcggggaagggttcctggatgctggggagtaattcagagggaaacgtacaagtttccaaccactctatcttgaaataggctgccttcattgaaatgcacattttttctttttatggatactaaa

SEQ ID NO: 476797 - DNA, 201 bp, Homo sapiens
tcccccattactggcagatttctcaatctcgtcccagggccgctctccgcagacatgctagtgatcccatcacattcttcaccaggcactctacaaaggawgagaagagcccccgtgagatatcagtcagcagatgggcaccgctcagaatgacaagtccctctggctgtggtctccaaggactgagttccctggcggtag

SEQ ID NO: 476798 - DNA, 201 bp, Homo sapiens
tgcagtgcctcctgctggctgatggattacaaaagcagtgtggggagagtaacggttagagatgaaagggtgaaggatggcgacagggaaggccaggaggycagtgagctgcccacggcattctgcatgcagttgtggtagagaatgtgggcatctggagtcctggagggtccttcagcccacttcaaggcaagtctcctc

SEQ ID NO: 476799 - DNA, 201 bp, Homo sapiens
gaaaccactcactcaagggccctgcagctctcaccatgattccaaatgcatctcctaccctccccccaggaactgccctgaccaggagacatgcaggagamgacctccaggacggccaccctgggccctgcccacactactcacagggaggttcagcttgacggcatccacaggctgctggaaaggccatgcaaactggtg

SEQ ID NO: 476800 - DNA, 201 bp, Homo sapiens
aaggaaagtgacagaaaaaaaaactctgccaaggcccacagaagtctgctcccacgaggacctcagcctgctctgctgagggtggctgcgccctcccaagsctcacctggagcttgcgggccatggccaccacctcatggtcaggagggttgtacttatagcagttggagaacatcaatcggacgtcagcaccaaactcct

SEQ ID NO: 476801 - DNA, 201 bp, Homo sapiens
cacggctttgagctgtagaccagacaggcaagacacacactcagggctgaaaccaccttcctgtcacccaagacccaggcgtctgctccaaaaaacatgcracagcatgcacctggggcatcagggtgtgggcataggggaggcaggggaagggaaggcccccagctttgcgcctgtcatgttaaccagattcctaacaag

SEQ ID NO: 476802 - DNA, 201 bp, Homo sapiens
tggaggagaaaggaaggagggagtcaggaggatgacctagccaccctgcagctacaagccctcatacccgctaccagcagtcagccccgtagccctccccrtggctgacccctcatagcgctcaccccgtccacacagcactcagggccctacagctgagtccagaggaccacatgccgaccagcagggacggggctcccc

SEQ ID NO: 476803 - DNA, 201 bp, Homo sapiens
gtccagtgtaccagtcttggtccagacacagatagattacaggacacaccaagtgactggacacaagtattggtagaaggacagcatcacagacaaggaawcaagtcagtggggtttaaaccccactcacatgtggagtaggctggagagggcttccatgcagcaggaccagcaagtccaaagtgaccaatggggacaagt

SEQ ID NO: 476804 - DNA, 201 bp, Homo sapiens
gaagagcccccgtgagatatcagtcagcagatgggcaccgctcagaatgacaagtccctctggctgtggtctccaaggactgagttccctggcggtagctwgccaagttggccagagggaccaccccatgctttgactgaaagggttccaatgtctcctctccccaaagacttaccctccagcagggaggagaccacaaac

SEQ ID NO: 476805 - DNA, 201 bp, Homo sapiens
gaaaccagttattgttaagccaattagctcattctttctccctgatttcaactgatcagaactgctgaaaccactcactcaagggccctgcagctctcacyatgattccaaatgcatctcctaccctccccccaggaactgccctgaccaggagacatgcaggagacgacctccaggacggccaccctgggccctgcccac

SEQ ID NO: 476806 - DNA, 201 bp, Homo sapiens
ggtgtccatggggcagtccctgagggtctgtgacaccctctctggtccaccagcccagactcaccccactagaggaggcgggtggggtgaggtggggttgrggggatgataggcccaaggcccttcaccagtgcctgcctggcaggtcctgcatactgcagcctggttccaggaggtactttccctatgtgacttgagaag

SEQ ID NO: 476807 - DNA, 201 bp, Homo sapiens
gacagagctcactcagtgcacacagaaggcaaaggaaagcccctgctggccaggattgggaagacaaaagggagccaggcaaaacccaaggtggggagggygcctgggaagaggggaaggccagagcccagatagctgcatgagcggccagggctggaccgccagagcctgggagcctgggagccagcggctctgagactg

SEQ ID NO: 476808 - DNA, 201 bp, Homo sapiens
ggggtgtggggcactcgttcaggaaaccaggagcattcccactcctctcccaaagcagaggagcccagaagagggacgcagaggccaagggcaaaggccaygatcacacactggaaatcaggatgtgatggccacagccctctaaggtgtcttgtcttgtgagggctaaagcagcacactgccacgaccacgtcatgtcat

SEQ ID NO: 476809 - DNA, 201 bp, Homo sapiens
gactcacggcttcccggcgtcttcgctcctgctcccgcttccgggccaactccctctgctggtccagcatggactggggctgggagctctgggcctgtggrgtggcggcggcagccaccgcagctgcttgctgttgctgctgctgctgttgctcctggcgctgctgctgctgctgctcctggcgccgacgtgcctcctcat

SEQ ID NO: 476810 - DNA, 201 bp, Homo sapiens
gagcattcccactcctctcccaaagcagaggagcccagaagagggacgcagaggccaagggcaaaggccatgatcacacactggaaatcaggatgtgatgkccacagccctctaaggtgtcttgtcttgtgagggctaaagcagcacactgccacgaccacgtcatgtcattttagttaatcaggtcccctgacaatttca

SEQ ID NO: 476811 - DNA, 201 bp, Homo sapiens
cgacagacaccaagtctcacggccatcctgatcgcagaaggagggcccctaagaatctaagtaagagcacacggacacgtcaggcacgaagggcctgatgrctggctatagggagaggagcaaacaggtagccccaggagagacgaacatcctggctcaacctcctccttccagatactgaaaggatcaagccacctcctc

SEQ ID NO: 476812 - DNA, 201 bp, Homo sapiens
agagaaggcatgcctggcatagataacaggagacaacatcttcaaagttttccgttgaaaagattaaaaactgctgctccctctccattttcatactgacytgtggccaaaaagcaggagccaccattcaccacgttaagagttagctgaaggtcaaggaaaaggaaaagaatttcgcttattgtttccaatccaaaggcg

SEQ ID NO: 476813 - DNA, 201 bp, Homo sapiens
ccgcagcgaggggctgaagggctcgctgcggatgatgggtgagtggatcttctcctccttcaccaccacgaggggctggggctggaccacggaggcagcaygcagctcctgggatggcacaggcacagcggccggtgaggtgggcaggcacccccggccctagcccacaggactatggcccagccctgccagttacctgtt

SEQ ID NO: 476814 - DNA, 201 bp, Homo sapiens
aaagaccttcccccaaatgtgtgtcagtgcttcagagaggaccacggccctggaatcccctcctgatggctcaggaaacactccttgaggcttcctctccyacgctgctggagcaggcatcccatataactgtggtgttgattccctcccctccaggacacccggagtatgacttcttttagccaataactttttttttgg

SEQ ID NO: 476815 - DNA, 201 bp, Homo sapiens
ctgctgccaagcagcaggaagcaggttagagaagtgggcctcagaagtgccaggacatcatgaagggagataatcagctatgcctcccaggacaaagggartgccctctactgagtggtagctacctcagcgaactggtctgtaagcctgggccagcttcaagacttgaggatgtccttgttcctccccaccaggtgatga

SEQ ID NO: 476816 - DNA, 201 bp, Homo sapiens
ggcgaaacaggctgggccagaggcagcccacctacagcaccccccaccccttgcctgcactaggcccccttgagattgaggcctgtgtccactccagtccrgcacctggagcccgtgtgtaggaagaaactctactgctgcagtgtctgtggtgtgacagacatccagtggccttggtaaactctacattcaggcaggctt

SEQ ID NO: 476817 - DNA, 201 bp, Homo sapiens
tgacacgtattcagtgaagcaatagcaccagacagttcttacagacacaatgactttaaacttgggagtaaggatgcctggcagaggctaaggccgctcckacacaccagtggctctggtgtgcacacaccagtggctctggtgtgcacacaccagtctgggtcagtggctgcaaccacctaatgcacttgccagggggtg

SEQ ID NO: 476818 - DNA, 201 bp, Homo sapiens
ggcccttgagccgaggaagctgaattttcctttttttttttttttggagacagggtctgtcgcccaggcagtgcagtggtgcaatcttggctcactgcaamctctgccttccagggtcaagtgattctcccacctcagcctccccagtagctaggattacaggcgtgtgccaccatggctggctaatatttgtatttttag

SEQ ID NO: 476819 - DNA, 201 bp, Homo sapiens
gcgtttcccttcaaagccaagcttcttgaaatggtggcttcacatcctcaccttctcattcacaccgtcgcaatctggtttctacttctgtgtcacgtctwcctaaggtcaccaatgccctcctaaaggtcaacaggatgatcaggtcggaatcctcatctctttgacctccctgtagcttctgatgttggaatctgggga

SEQ ID NO: 476820 - DNA, 201 bp, Homo sapiens
cagttcccactgcgttttcttgtaacaagctgacccctctgctattctggcactgatgcgtttcccttcaaagccaagcttcttgaaatggtggcttcacrtcctcaccttctcattcacaccgtcgcaatctggtttctacttctgtgtcacgtcttcctaaggtcaccaatgccctcctaaaggtcaacaggatgatca

SEQ ID NO: 476821 - DNA, 201 bp, Homo sapiens
ggaccacatgccgaccagcagggacggggctcccccgctgcccctccctgtccaggctccagtccccctttcccagctccctcaggagctaatccttagamcagggtccccaccaggcctccagactcacggcttcccggcgtcttcgctcctgctcccgcttccgggccaactccctctgctggtccagcatggactggg

SEQ ID NO: 476822 - DNA, 201 bp, Homo sapiens
acagagggccaggcagggggctgcacccagacagcaagtccccaatgactagaccagctcaggctgttggcctgacccaccgatagccaaactttctgagycatcactctgactgaggacaggtgctcctgtaattaagttcaagtggtgtatcagaaccaaatccaagtggagtcccacggtagaggcacaggctgcagg

SEQ ID NO: 476823 - DNA, 201 bp, Homo sapiens
cacaagtcactgagaaaaccaatgggttgggaccagctatactttgtatttgcagttctacctgaagtcctggcctcccagcggacctcttgaaacccagkaatcctgccttcattctgtctggtctgttcagactcacccctctcctaaagtgatggagcacacaggtagaaagacgccagggaaggcagaagcagtcgc

SEQ ID NO: 476824 - DNA, 201 bp, Homo sapiens
agatggcctcgagaagccacagatcttccctctagagaccagagcagctgaggctaagaagctgcccagccagagtgctcggacaccacatgggtaaaccraggcaggaaggggtctcaacccacactggggcaggccacggctcacctggaggagagaccactgcgtgctggttgagatggggtggagtgctgtgctcag

SEQ ID NO: 476825 - DNA, 201 bp, Homo sapiens
tttaacttccaagatggcctcgagaagccacagatcttccctctagagaccagagcagctgaggctaagaagctgcccagccagagtgctcggacaccacrtgggtaaaccgaggcaggaaggggtctcaacccacactggggcaggccacggctcacctggaggagagaccactgcgtgctggttgagatggggtggagt

SEQ ID NO: 476826 - DNA, 201 bp, Homo sapiens
caccttgaggtttccttttcttccgcaaacaggaggtgacatagcgctccagctcacgcagtgtggacggcttcagggtctcaaagtcgatttcaatctcrtcggggttggaattcttcagggagggctcccgtgactggatgatgtgcaccacgcggcccagcttctcgccggggagcttgttgatgtccaagctgagct

SEQ ID NO: 476827 - DNA, 201 bp, Homo sapiens
gtactcactggtggccacgactatggccaggaggctgttgtccatggtgatgtctgcacacggagaagcagtggcaggggatgccaagaaagggcatcagycttgagggcagccagcagggccacagggctgaccctccccgaggtgccacacccctccctgggaaccctggcccagaggaacagcttcattcagagcagg

SEQ ID NO: 476828 - DNA, 201 bp, Homo sapiens
caggggcatctgtaagcagctttccaggagctcagcctctcctgcctctgcaggcctggcagctatgagtgtcccactacaaccttcagagcaggggttgsggggaacaggccctgcttctgctgaacctgacagccagtgggactccaactcgcccagatctctgcacttctcagtcccagatccctcccagccccattg

SEQ ID NO: 476829 - DNA, 201 bp, Homo sapiens
ctcctcaccagattggaattcactccagaagctggtgtaggaatgacctggctggtactgataccagcttgacaagcaaggcaaactgaggtgcaggcagmatccctttttgctacggcatcaagtccctggggcagagatttgtgagggggagcagagtagccctgtcccttccctgcctgcagcccagggggtgatgtg

SEQ ID NO: 476830 - DNA, 201 bp, Homo sapiens
tcttctggtcttggcttccacctctaacagaaccgtggtgtccatggttgccctggaaactgggtacgccaggccatgaaatacaaaagcctctctgcccrggctctcctcctccctccaaagcagttattgtgcagctctgggggcccagcctgcctttggccgctccccgcccccactctgtgtcctgcctggcccaaa

SEQ ID NO: 476831 - DNA, 201 bp, Homo sapiens
gccatgaaatacaaaagcctctctgcccaggctctcctcctccctccaaagcagttattgtgcagctctgggggcccagcctgcctttggccgctccccgyccccactctgtgtcctgcctggcccaaatcctgattttgaccccagtggcccagccaggagtggatttcaaagaaacctcaaaaaacccaagcctccagg

SEQ ID NO: 476832 - DNA, 201 bp, Homo sapiens
ccctggaaagtcagacagggaggagggcttcaccagtgtttgtcactagattaaaactgtttctcagctgggcgcactggcgcatgtctatcatcccagcwctttagaaggccaaggagggtgagaattgtttgagcccaggagttcaagactaacctggacaacacagtgagaccccatttctaacaaaaaatacaaaaa

SEQ ID NO: 476833 - DNA, 201 bp, Homo sapiens
gcccccagcaaagtgaccagagcacatcatcaggtggaacaccctggagttgagatatttattaacagatgggggtgctgggggtgggctcctgcccccaraggggatgcaggtggatgccgggtggggagggctgcagggctggctcctggcctctgtcctggcttcatggtcctgacagctctgggccagcctcaggcg

SEQ ID NO: 476834 - DNA, 201 bp, Homo sapiens
acagtaccccagggggctcctcaccctgccttgggactgggctgatctcggagaaccttcagggtgggggtggagggatgggcctgccccctggagaggcrctggcatggagctggcctccgtacatggtgggggatgtattgtggtgttcaggggagcaggtcgggcagggccccaggtgaggatgggttggggggcaca

SEQ ID NO: 476835 - DNA, 201 bp, Homo sapiens
gcccgcactcacctgcgccaggtacgctctatacaggaagacgtccctctccacgtctctctctgggcttgacagctgtgggaaccaatgtgagtcaggaygcacagtgggaggcccagcgcagcccacacagggtgagcatgacagacaggcccctgtacactggggacaggtggcttctccggcagggttggaggtctg

SEQ ID NO: 476836 - DNA, 201 bp, Homo sapiens
aaccaatgtgagtcaggacgcacagtgggaggcccagcgcagcccacacagggtgagcatgacagacaggcccctgtacactggggacaggtggcttctcyggcagggttggaggtctgagtcccagccctgatcctccgtagcccgagtggcctctgctgggggtaccctacacggggggtgcctgatctcatcccgcgc

SEQ ID NO: 476837 - DNA, 201 bp, Homo sapiens
ccccgcgcctcaggccaacccattctctggggcctcacctccgactctcgtgggcgaggtagtcagcaaacatgcgcacggcctggagctcaggggccgargagggcttgatctcatccaggaccacaccgaacttcctctgcagtagggacgaggcgtcagctgcacccgtccaccccagaggatttccatgtcttcagc

SEQ ID NO: 476838 - DNA, 201 bp, Homo sapiens
aggctggcaggggccacggcctgatcctggagccccactggagtggccagcagcctacgcacaggtgggggtgcccacagaccctgctcagccaggtgccygcaatgcccacccacctcatggcctagggctcaccgtggccaggctgacccaggcagtggcgagctgggtgagggtggcatcctcgtccaggtcctgcat

SEQ ID NO: 476839 - DNA, 201 bp, Homo sapiens
gccaagtcgcttggctgtgagaagcccggaatggagtcaaggctgagttatgccaggctggcaggggccacggcctgatcctggagccccactggagtggycagcagcctacgcacaggtgggggtgcccacagaccctgctcagccaggtgcccgcaatgcccacccacctcatggcctagggctcaccgtggccaggct

SEQ ID NO: 476840 - DNA, 201 bp, Homo sapiens
cacccgtccaccccagaggatttccatgtcttcagcttggcagggagagccccagacaggaagcccctgccccaccagggacccctcagcccagcatgggmcacctccactgcagtacactgtggagggtggcatggcgtcacctgtcgtgagcagccaggtgtgccctcatctgcagggccacactgcccatgccttgag

SEQ ID NO: 476841 - DNA, 201 bp, Homo sapiens
ctgttcatcactcttgcccccggccaaggcccgcactcacctgcgccaggtacgctctatacaggaagacgtccctctccacgtctctctctgggcttgayagctgtgggaaccaatgtgagtcaggacgcacagtgggaggcccagcgcagcccacacagggtgagcatgacagacaggcccctgtacactggggacagg

SEQ ID NO: 476842 - DNA, 201 bp, Homo sapiens
agggtctggacattagggttggcctggagccctgggggccgcttacctcagggggcttgcccaggtgctgggacaggacgatgaggttgaccagcgtctcygggtagccactatcctggagacacaggcagacacggggaggcagggtcagccactccagcccccatgcctgcccgtcacccccacctcaggcagcaccac

SEQ ID NO: 476843 - DNA, 201 bp, Homo sapiens; identical to SEQ ID NO: 378102

SEQ ID NO: 476844 - DNA, 201 bp, Homo sapiens; identical to SEQ ID NO: 378103

SEQ ID NO: 476845 - DNA, 201 bp, Homo sapiens
ctgctctgggttctgtcacgggacagtgactactcctcactgaactgtggaagaggtggcccaaaaaacgcgagaagaaaagagaaagtttttagacgcaraacgcggctcgcggccaccagaaagcgtcctccgcctccgcccccagcgtccccgcgcccctgcgcggccgcaccttcacccgctgcgcctcgtttatgc

SEQ ID NO: 476846 - DNA, 201 bp, Homo sapiens
cactcaccactccaggctgtccccctggtgcagcgcacgcagggcggcatccgggttctggtcgtggagatagatggaggcggccatgagcaggaaggtgrtgttggtcacgtccacgctcctgctcatctctcggtccagctcggccacgatgctgtccctgcaagacagagatgctcacgacccacagctggggtggcc

SEQ ID NO: 476847 - DNA, 201 bp, Homo sapiens
gctcagtgcgggtggagaggggcaggagggctcaccgggcgaggtccaggcggtccagcttcagcaggatctgcactgtcatggctgtgctgcaggacagrgcgagggggcggtcagcgggtcgccacagacacattgcatggccgctccacacccagggctcactgtgtgtgtctgggatgttcctaagtcctgtgctta

SEQ ID NO: 476848 - DNA, 201 bp, Homo sapiens
tcctggacccccagccatggcctccgacctggtgatgccacgtgcaggccccgccagccccacggcacagttacaagctggtcaagtaacatgttgctccrggcacaacctccactctccctccatgaagcccaccctcaccctgtgggagaggcctgccacccactgcatagagagaaactgaggcacagagagccatgg

SEQ ID NO: 476849 - DNA, 201 bp, Homo sapiens
gaaactgaggcacagagagccatggccctcctccctggcaacatactgcagggaagggctgaacgacagcaagccacccccatggaaaggaaagacaacargagtaatgacagcaccacagacgctctgggctgtgacgctctgggctgtgacgctctgggctgtggctcagtgcgggtggagaggggcaggagggctcac

SEQ ID NO: 476850 - DNA, 201 bp, Homo sapiens
gcccattgagcagcagcagggtgggcgagcacttgtcagccatctcctggaagatgtagtaggcatcctgcagcttctcaccaccctgcagggagggtccygcatcattgcctgtgcccctgctgcccggcccttcccccgccagccccctcccctagcgggggggactccagcactgcacagagacgaatctggtgtgcc

SEQ ID NO: 476851 - DNA, 201 bp, Homo sapiens; identical to SEQ ID NO: 378107

SEQ ID NO: 476852 - DNA, 201 bp, Homo sapiens; identical to SEQ ID NO: 378108

SEQ ID NO: 476853 - DNA, 201 bp, Homo sapiens
cactcactctaggctcccagcacacaggaccctaggaaacatctaggccaggagacccagccagagccctggtgtctgcttggagcacagacacaccaacsaggatgcgcccagagcccgacctgcccacggcggcccatggcagggcacctttttgcagaccggacttttctgagcctcagtctccaccatgaaggggga

SEQ ID NO: 476854 - DNA, 201 bp, Homo sapiens
tgctggtagctgccgatgtagaaggcgttctttacgtcgaacagctcgtctacctccccggagccgccggaggccgggccgggggccggaggcgccatttmgctgtcttctcaccagctcctcttcctgaaagacacgtcagccggaagcaagacacgggcacgctaggaaatgtagtttactttttccgagcggcggcga

SEQ ID NO: 476855 - DNA, 201 bp, Homo sapiens
tgaggcaggagaatggcatgaacccaggaggcagagcttgcagtgagccgagatcacaccactgcactccagcctgggcgacagagcaagactccatctcaaaaaaaaaaaaaaaaaaaatccaccaagcatggtggctcacacctataatcctaatgctttgggaggctgaggtgggacgatcacttgaggccaggagtt

SEQ ID NO: 476856 - DNA, 201 bp, Homo sapiens
tcataaccaacaggccttgaagatggccccgcgcctcaggccaacccattctctggggcctcacctccgactctcgtgggcgaggtagtcagcaaacatgygcacggcctggagctcaggggccgaggagggcttgatctcatccaggaccacaccgaacttcctctgcagtagggacgaggcgtcagctgcacccgtcca

SEQ ID NO: 476857 - DNA, 201 bp, Homo sapiens
ttcaggtctgagtctgtttccccgtgctgagggaccatgttacagggatcatgcaggggaggagcaaggagctcccaagaccatcttacaaagcttcctgrggctccagcacacaagggtgtataaacactgccagttgtcgtagcgttggtactgtaatgttgtcatcctaaggtgttacaattaccaatggggccgggt

SEQ ID NO: 476858 - DNA, 201 bp, Homo sapiens
cagctcggccacgatgctgtccctgcaagacagagatgctcacgacccacagctggggtggcctctgtgggacctcagagggtccccttccttggaagcasacaggtccagagagggtgagccaggccctgggggtgcagagcagcagcaggccgagcatcgagctgtcccgacatgtcctccctccgttcctatgaagca

SEQ ID NO: 476859 - DNA, 201 bp, Homo sapiens
gcacagaactgaggagcaagagggaggtaacctgtggcaacatccattttgggatgataatgaagctgcccctgagcccaggccagggagggaggctgggrccgctctccagaacacagctttgcatgctgcccccggaggctggctgacttcccagggtgcccatggcaggtgggcacagtgcagctcagcccatggcct

SEQ ID NO: 476860 - DNA, 201 bp, Homo sapiens
tgacgacagccagcgaggccgtgcgcagcctggagatgtggcagggggcacttgcctccctgggctggccccagagcagggaggccactcaccactccagrctgtccccctggtgcagcgcacgcagggcggcatccgggttctggtcgtggagatagatggaggcggccatgagcaggaaggtggtgttggtcacgtcca

SEQ ID NO: 476861 - DNA, 201 bp, Homo sapiens
gcaggggagctggagcctggacagcaggccagggcctcatttcagcaccacctttctctgctcccatgacgacagccagcgaggccgtgcgcagcctggaratgtggcagggggcacttgcctccctgggctggccccagagcagggaggccactcaccactccaggctgtccccctggtgcagcgcacgcagggcggcat

SEQ ID NO: 476862 - DNA, 201 bp, Homo sapiens
gaagacgtccctctccacgtctctctctgggcttgacagctgtgggaaccaatgtgagtcaggacgcacagtgggaggcccagcgcagcccacacagggtsagcatgacagacaggcccctgtacactggggacaggtggcttctccggcagggttggaggtctgagtcccagccctgatcctccgtagcccgagtggcct

SEQ ID NO: 476863 - DNA, 201 bp, Homo sapiens
cgtggggggtggggacacagaaaccgagcagagacaaagccgctttctgctctgcccttgggaacagagggttgcagcctgggcaccgtgtccttggatcygcagcctggtgcgcagatgggagtgcctcccacactgggcaggggagctggagcctggacagcaggccagggcctcatttcagcaccacctttctctgct

SEQ ID NO: 476864 - DNA, 201 bp, Homo sapiens
agcaggatcacagcagtctccccatgccagaccctcactccgaccccacagcaggagggggcaaggttcctgggtccccacagcccagccccctctccccytggctgccgcccatgggcgtttgaccaacgctggcctgtggctcaggggcaggacaggcgtggcctcacccaccctcccactgggctccaggggagatac

SEQ ID NO: 476865 - DNA, 201 bp, Homo sapiens
ccgaacttcctctgcagtagggacgaggcgtcagctgcacccgtccaccccagaggatttccatgtcttcagcttggcagggagagccccagacaggaagyccctgccccaccagggacccctcagcccagcatgggccacctccactgcagtacactgtggagggtggcatggcgtcacctgtcgtgagcagccaggtgt

SEQ ID NO: 476866 - DNA, 201 bp, Homo sapiens
cagccgtcatccccacagggcctggggggctacatagagatctggggagggtggcatgtggacccagccccctctcagggccagtgttgtgtgttatttcsgcatttctgctgcctagggtgagtcaaggaggaagcacaaagtttggcccagagcagagtgcatgggtggagcagagagttgatgaatgaacttgtaagt

SEQ ID NO: 476867 - DNA, 201 bp, Homo sapiens
tgaggtcaggagttcaagaccagcctggccaacatggtgaaaccccgtctctactaaaaatacaaaaaatagccaggcatggtggcgggcgcctgtaatcygggctacttgggaggctgaggcaggaaaataatttgaacccaggaggcggaggttggagtgagcccacattgaaccactgcactccagcctgggagacag

SEQ ID NO: 476868 - DNA, 201 bp, Homo sapiens
aatcacgcaccctagttctggctcccccagtgcagagctcaccccctcttcccattccaccctccccagttccgaatccctgaccccgcactggagccccmcttcccacagccccggaacggagcccttgacctccactgaccagaccttggagccccctggcccaggtgagtattaagagatttgggtgtttgtagggag

SEQ ID NO: 476869 - DNA, 201 bp, Homo sapiens
tgcctgggatgcagtcacttcccatatccaaagggcttctagagctctcagccaagaggactgggaacgctgatctgcacttgaacccaggctgtgggacytcagaccaggagcatgaatttgagtgggagcttcagtttcccactgagagctcacatggtgtcctaaatctttcaggtctccctatgacctggacaaaaa

SEQ ID NO: 476870 - DNA, 201 bp, Homo sapiens
gcctgggtgacagagtgagaccctgtctctaaaatacatgattaaaaagtggcagcctcaactggagagggaagagaggtcagcttcctgagaacagatttaaaaggctctgggccctggtgggtgtcttaggcttgtggggaataggacccagtgctgactctgagctcctttccccagctccaggtgacactgggcccc

SEQ ID NO: 476871 - DNA, 201 bp, Homo sapiens
gtctgtggtcatggctgtgagattctgtcaccggaatgagtccaagtttgagaacctggacgaggtgtccatggtaaggtagggctgggctgggggctcakccctggggccaaggcatggttgggggagctgctatcccaagcagggccaacctgggctgcagagccttttggtgtctgaatgcctccctgtgtgttcctt

SEQ ID NO: 476872 - DNA, 201 bp, Homo sapiens
gtggggaataggacccagtgctgactctgagctcctttccccagctccaggtgacactgggccccgtgagttacacaggaacccgagtgtggtggtggtcrtgtgtttgctggtgtctcttttgctcatcgggtctgtggtcatggctgtgagattctgtcaccggaatgagtccaagtttgagaacctggacgaggtgtc

SEQ ID NO: 476873 - DNA, 201 bp, Homo sapiens
agggaagagaggtcagcttcctgagaacagatttaaaaggctctgggccctggtgggtgtcttaggcttgtggggaataggacccagtgctgactctgagytcctttccccagctccaggtgacactgggccccgtgagttacacaggaacccgagtgtggtggtggtcgtgtgtttgctggtgtctcttttgctcatcgg

SEQ ID NO: 476874 - DNA, 201 bp, Homo sapiens
ctgatcctctctgagctcataggtggatctttatagttgagtgtcactgtgcacccactgtgtttctattctattgtgtgtgtgtgtgtttttttttttttgagacggagtctcactctgttgcctaggctggagttcagtggcatgatcatggcttactgcagccttgaactcctggactcaagcgatcctcccacctca

SEQ ID NO: 476875 - DNA, 201 bp, Homo sapiens
gtcaccggaatgagtccaagtttgagaacctggacgaggtgtccatggtaaggtagggctgggctgggggctcagccctggggccaaggcatggttggggragctgctatcccaagcagggccaacctgggctgcagagccttttggtgtctgaatgcctccctgtgtgttccttcctcagggatccgtgaatgacagatt

SEQ ID NO: 476876 - DNA, 201 bp, Homo sapiens
cttcatgccagatgccccagaccacgagagcctcaagcttctccagagaggtggggatggaaccatgaattcctctgctctctgggattgcagatgtgttmcacacacacacacacacacacacacacacacacacacacacatattttttttttctagacagagtcttgctctgttacccaggctcaagtgcagtggcgc

SEQ ID NO: 476877 - DNA, 201 bp, Homo sapiens
tctctggctttagggtatattagggacatctccgcaaatatccatatagtttcatatctcagtaagttgtgtccaggttttttttttttttttttttgagrcagagtctcgctctgtcgcccaggctggagtgcagtggtgcaatatcagctcactgcaagctctgcctcctgggttcacaccattctgctgcctcagcct

SEQ ID NO: 476878 - DNA, 201 bp, Homo sapiens
tttttaactttgtattcaggaaaatgtaaaaaatatttagaataatataattaacccccatgtacccaccatgcagtttcaacactttaacttacgccaattttttttttatttctttttctttttttttttagacagagtcttgctctgtcgcccaggctggattgcagtggtgcgatctcggctcactgcaacctctgc

SEQ ID NO: 476879 - DNA, 201 bp, Homo sapiens
cgcctcagcctcccaaggtgctgggattacaggcatgagcgaccgcgcccggccgtccagttttttacatatgtgtgttgggctcttgagttttttgtttstttgtttgttttttagatggaatcttgctgtgtcacccaggctggagtgcagtggtacaatttaggctcactgcaacctccgcctcttgggttcaagtga

SEQ ID NO: 476880 - DNA, 201 bp, Homo sapiens
cccgcaaggagctggagaatctggactcccgtattccttcatgcagtgtcatctacatccctctggtgagggcaggagagtgggtgtagccttcagatgtmttttgggggagatattaggcttatgaaagacatactggtagataagaaaacttgtggggcagcctgaagaacatgaacacttttttgtggggatacaggg

SEQ ID NO: 476881 - DNA, 201 bp, Homo sapiens
atagagtggcagacgacctcaggttttcaccatgttgtcagcctccaactcctcctctagaattttctaacagatttacactcagagcctggtcgcccccygttagcccagattcaaaaggtgaacatctgtttgcagaatctgattcatgagaaggtgagtttattgttttcagtttagacttttgggaagttggactag

SEQ ID NO: 476882 - DNA, 201 bp, Homo sapiens
ccatcagccaatttaagaataagacatgccgggcgcggtggctcatgcctgtaatcccagcactttgggaggccgaggcgggtggatcacaaggtcaggarttcaagaccagcctggccaagatggtgaaaccccgtctctactaaaaatacaaaaattagctgagcacagtggcgggtgcctgtaattccagaacctggg

SEQ ID NO: 476883 - DNA, 201 bp, Homo sapiens
agtctcaaaacaagagactaggaaagatccaaaacacagagcaggagtccacaggggaacctgccctgcctcagtaaaaatacagtgttgttgctgtaggragactcccggattctaccccaggatacttcatgagaacgaaccccttcagagaggccctacaaaacagattagagggaagacagaggggtccaagggaga

SEQ ID NO: 476884 - DNA, 201 bp, Homo sapiens
gccatctggatgctccgcttcattcaaatctggggtgttctaacccaaagtaactggccacagactgcaatgtaagatacaaatcttcaggacctagtgtrtgcacatgttggctcttatataagatggcatccttagtacttgttctatgtagaaaagaatttgtgggctcacaagtccctacagagtctcacactctca

SEQ ID NO: 476885 - DNA, 201 bp, Homo sapiens
tgatctggctataacctccacctcccgggttcaagagattctcctgcctcagcctcccaagtagctggaattacatgtgcatgccaccaagcccagttaatttttgtattttgagtagagacagggtttcaccatgttggtgaggctgatctcgaactcctgacctcaggtgatctacccacctcagcctcccaaagtgct

SEQ ID NO: 476886 - DNA, 201 bp, Homo sapiens
atgtaaacgcactggtgacatcatctctaaacagagtggaaacctttgctagcctcaggtgcacaatccttcccctacctcacctcccgctgcaatgtgtrtcttgtaggagttaatttaggataatctctgaggtcatctccaggtaatcagcatctccaggaatcggcagggtaatttaattacccacacattcttcag

SEQ ID NO: 476887 - DNA, 201 bp, Homo sapiens
agtctgaaaatttggttcttgctctagctttccattaactgcctgtgtgagcttgggcaagtcaaataatctctcttgcttctattgtctcattcttaaamtggggtgaaaaaattgagctacaagaccgttccctttgcttgcctccctcaaataggtctggagataagcaaacaacgcctcctttctggaaactactcc

SEQ ID NO: 476888 - DNA, 201 bp, Homo sapiens
acagatctcccctctgccttatgtcatcctaaacctttgtgctcctcatgccctatgacctgtccccccaagatctctcctgctccctaccctttaataayctgcagcttattgggaagcctctgcttaagtcatgtctagggatgagggcctcccctgaggagtggtgacactttttggacagggttttattgttggaat

SEQ ID NO: 476889 - DNA, 201 bp, Homo sapiens
tggcagagaagaagcaagggggagggagatgccaggctctttttgacaaccagctctctcaggaactaatagagtgagaacctctcactcatacccaccarcacactccaggaagggcattaatctgttcatgagcgatccactcccatcacccacacacctcctgctaggccctacctcacaacactatcacactgggga

SEQ ID NO: 476890 - DNA, 201 bp, Homo sapiens
tctttcctcccccacagcctcccaggagcacagagagcctaaaagacctgaaatcatatttttgccaagtgtggattttggtatctccttccttttgcttwgcctaactccctgttccggtgtcccattctttcccccaactctaccttcatcatcacagatctcccctctgccttatgtcatcctaaacctttgtgctcc

SEQ ID NO: 476891 - DNA, 201 bp, Homo sapiens
aaactatagcactgactcaatatattttacagttgcttcacagaggctccctcttttgtttttatgaattcatttcattatttaacaaatatttgtgaggytgttttttggtttgtttggttgttcttttttgagacagtgtcttgctccgtcactcaggctggaagtgtagtggtgccatcttggctcactgcaacctcc

SEQ ID NO: 476892 - DNA, 201 bp, Homo sapiens
tcactttttgcatccgcagagcctccaagctcatggcctccttaggagcgaacccaaggaggacaccgcagggaccgagacctggggcggcctcctccggyttccccagcccggccccagtgccgggccccagggaggccgaggaggaggaagtcgaggaggaggaggagctggccgaggtctctgaggggagtagaaact

SEQ ID NO: 476893 - DNA, 201 bp, Homo sapiens
atttttaagagtgagtctcacccctcagtgtacaaagtggccagtggactgaaggaggggctcagcctctttggtaggtgtgccccatccctcatctcacrttacaaagacctaccagaaaagcaattggctccaaagatgtgtcccagcctcccttcccacttcactcccattgtcagatatctctttcatgccaatcca

SEQ ID NO: 476894 - DNA, 201 bp, Homo sapiens
gtgattcaccccaaccccaaccaaagtaatgtgggattgggaggcctgaaaagtaaagtgggggtggggtgtggatgtggctgtgacccagtgggtcaagkgctctaggacacccgggagaatctaagggctaatgagactttgggaagaagactgggacaatattcagagagggggacaaaggaagtggagttgtggaac

SEQ ID NO: 476895 - DNA, 201 bp, Homo sapiens
cactgcacttgccactacattcccatagcacatcgtggatacatattgccacaatccccagggactgcaagcacactttttggcaaactgagatcaagatratagatgtaacttgtagtacccccacccaaaccctcacttccaggctatggttcacacgtccgactcatgacctgggggagctcagttctcgtctggacg

SEQ ID NO: 476896 - DNA, 201 bp, Homo sapiens
attgaggtcaattggataaagaatgggatggtgggaggaggcagcagaacttcagggaagtatctggagggtgagagttaaaggaggactgcagggagaaytggggcccaaggagagctgaggaacaggacagagggtgccaggtcctaagaaacagtacttatctcctcaggtggactttgagggcagccttgctgaaaa

SEQ ID NO: 476897 - DNA, 201 bp, Homo sapiens
ggcattgctggcagtacaccttctcaagccatgaaccttggattgatgctagaaacaaaaaacctgtcattccaaaacagagatctaagcatgtcactcctttttttttttttttttttttgtgactgagtttcgctcttgttgcccaggctggagtacaatggcacgatctctgctcactgcaacctccacttcccgggt

SEQ ID NO: 476898 - DNA, 201 bp, Homo sapiens
gcaaatgtaaacgcactggtgacatcatctctaaacagagtggaaacctttgctagcctcaggtgcacaatccttcccctacctcacctcccgctgcaatrtgtatcttgtaggagttaatttaggataatctctgaggtcatctccaggtaatcagcatctccaggaatcggcagggtaatttaattacccacacattct

SEQ ID NO: 476899 - DNA, 201 bp, Homo sapiens
ggatgcttccaacaggcccctcctcttcctgctctctgtctcgctcactctgactctatcttttcctctgaatgtcttgaggtctcagattgtatctgcarcctgtttccagatccccctaggggcctctgcctctccttcactttcccctggaactgacctccagctcccttcctcacccactcccagaccaggagacgc

SEQ ID NO: 476900 - DNA, 201 bp, Homo sapiens
ctcaagccatgaaccttggattgatgctagaaacaaaaaacctgtcattccaaaacagagatctaagcatgtcactcctttttttttttttttttttttgkgactgagtttcgctcttgttgcccaggctggagtacaatggcacgatctctgctcactgcaacctccacttcccgggttcaagcaattcttctgcctcag

SEQ ID NO: 476901 - DNA, 201 bp, Homo sapiens
ttcattttctcagttgttaaatttacagtttggtttaactaaagtctctcccagtacgagcagggcgtgagtcagagatacctaagtgtttagtgcagcgsatgtgctttctaaagtggggatggctatttacagactggcctacactgttctggtgggagccctcagtgaccaaggagcagaggtacctgaaacccaccc

SEQ ID NO: 476902 - DNA, 201 bp, Homo sapiens
aagtccttggggtacgaatccagaatggcaggtaagaatagaggcgggtggaggaatagacatgaggggcccaaaggctacatcttctgggggttcatctmtcttgatccacaagccatgcgaggtgcctctccgcccactgcagacatcctctgatggaactctgtgcccgaacctttgtgcccaactccacagaatgtg

SEQ ID NO: 476903 - DNA, 201 bp, Homo sapiens
ggctacatcttctgggggttcatctatcttgatccacaagccatgcgaggtgcctctccgcccactgcagacatcctctgatggaactctgtgcccgaacytttgtgcccaactccacagaatgtggtggggacaaagggagggtcaaagtcatcactggacccaactcatcagggaagagcatatacctcaaacaggtga

SEQ ID NO: 476904 - DNA, 201 bp, Homo sapiens
gacccttatttccccttctcttccccactccccttactcctcccaccttcttgcttgttcctaggtctcagacttgatccgcagtggaaaacccatcaagyctgtcaaggatttgctaaagaagaaccaaatggaaaagtgcgtatatggccccagtgtctttaccctctctgcatcttctcctgcaactcttctcccctt

SEQ ID NO: 476905 - DNA, 201 bp, Homo sapiens
ttgtatttttagtagagacgggatttcaccatgttggccaggatggtcttgatctcttgacctcaggtgatccacccgcctcagcctcccaaagtgctggsattacaggcgtgaaccactacacccagccatctattaattctttagcaattacaaagtagtagcatttaaatctctgattctttcttcatttattagcca

SEQ ID NO: 476906 - DNA, 201 bp, Homo sapiens
aacccctgaaaatgctcataacaggaaagcatgccctctgctgcatgccctttatactaaaagtggggagcactaaggtcagagataagaagaatcaatamcataaacatttcttgaacccttgtttcatgtgagtcactgttggcaaagaggatgaacaaagcgtgcacctcaccattcaagaacttgcagtgcagtagg

SEQ ID NO: 476907 - DNA, 201 bp, Homo sapiens
gggagcagaacttgtggcagcaacaggtaaacttcaagaaggagggcaggagccccaccctacagggctgggaggagcccagaggccccatctgtttctcytccaggagttgtcaaggcagcagaaaggagtcacccagccaaaggaggagatggctcagcggggctgcaccaaggggccaagaggccctacccgtgtcta

SEQ ID NO: 476908 - DNA, 201 bp, Homo sapiens
aatctgtactttagttaaatacccgagaattcacctcctgtgtccacagctctccacgcccctcagccctgccccgcagccctgtagcagaagtacttagygctttgcattctgcgcgccaccctaccccggcctcctctgtgaatcgttgcttccgaaccgccctcactttttgcatccgcagagcctccaagctcatgg

SEQ ID NO: 476909 - DNA, 201 bp, Homo sapiens
aagacccaggggcccagagcttcttcctttgggtgagtatcagcccaacaagaggtcccaggggaactctctcaatagatctgccctttatatttccattsaacttgagggcccacagtgttcccgcctgcctccccttgccctccaggtcctcagtggccagtctgggttcacactcagtgaccacacagtgaacccaac

SEQ ID NO: 476910 - DNA, 201 bp, Homo sapiens
tcgcgcttctggccgctgtgctccgacactggctggcacgtggacccacatgcccccacatctttgtggccaccaactttctgagccttgttcagctacarctgctgccacaagggcccctggtgcagtatttggtgaggagaccaatctagctcctcggggacccccaggctgggcatttcccagaggtggggattggct

SEQ ID NO: 476911 - DNA, 201 bp, Homo sapiens
atgtttctactagttgggtacctgttagggactttgggagaccttgtgtatagagaagagttttgtaactgcataactgcctatttgatttgtatagagtytttatcagttgtctctggctttagggtatattagggacatctccgcaaatatccatatagtttcatatctcagtaagttgtgtccaggtttttttttttt

SEQ ID NO: 476912 - DNA, 201 bp, Homo sapiens
tggagagccatgctctaatggaactttccgtggcccaaattccttcacctgcctctgagtaggtacacaccactcccaagtatgtctctgcccacgtcccrtgcctcttcactgattctaaattagcccacagggctatggtcaggattcggggaggagagacagagtcagtgtgtctgttacctatttctcctgtttcac

SEQ ID NO: 476913 - DNA, 201 bp, Homo sapiens
ccacctcagagccatggggagccagggctctggcggggtgcccttggtgcaggctccctacacagtcctgctgctgccgctggggacaagccgccaagacycaggggcccagagcttcttcctttgggtgagtatcagcccaacaagaggtcccaggggaactctctcaatagatctgccctttatatttccattcaactt

SEQ ID NO: 476914 - DNA, 201 bp, Homo sapiens
tgcctcagcctcccatgtagctgggataacaggcacatgccaccatgcccaagttttttttttgtatttttagtagagacagggtttcaccatgttggccrggatggtcttgatctcctgacctcgtgatccacccgcctcggcctcccagagtgctgggattacaggcgtgagccacctcacccggccaatatttcaggg

SEQ ID NO: 476915 - DNA, 201 bp, Homo sapiens
tgaagaatcatcatataatctaatgaactaaggacaggtgacatatttattaatatttctgtatacgaatttattttaatttattaggaaatacctctaaygtacaaaaagatgtaaataataatatagggccagatgtggtggctcacgcctataatcccagcatttgggaggctgaggcaggaggattgcttgaggcca

SEQ ID NO: 476916 - DNA, 201 bp, Homo sapiens
cagagcctccaagctcatggcctccttaggagcgaacccaaggaggacaccgcagggaccgagacctggggcggcctcctccggcttccccagcccggccycagtgccgggccccagggaggccgaggaggaggaagtcgaggaggaggaggagctggccgaggtctctgaggggagtagaaacttgaatggagagttgat

SEQ ID NO: 476917 - DNA, 201 bp, Homo sapiens
ctgagactccggtgggctgccatgccctctttgtttccttatctccctcagacgcagagtttttagtttctctagaaattttgtttcatattaggaataargtttattttgaagaaagatattgtttctttagtctcaaaacaagagactaggaaagatccaaaacacagagcaggagtccacaggggaacctgccctgcc

SEQ ID NO: 476918 - DNA, 201 bp, Homo sapiens
gcctgaagaacatgaacacttttttgtggggatacagggatcttttaagctccctctagggtggggaggtgtccagtaagtctccaagcaggagagtagaktatctcctctttactctccccagattggcttccttctttctattccccgcctgccttccatggtagaggccagtgactttgagattaatggactggactt

SEQ ID NO: 476919 - DNA, 201 bp, Homo sapiens
ggggagatattaggcttatgaaagacatactggtagataagaaaacttgtggggcagcctgaagaacatgaacacttttttgtggggatacagggatcttytaagctccctctagggtggggaggtgtccagtaagtctccaagcaggagagtagagtatctcctctttactctccccagattggcttccttctttctatt

SEQ ID NO: 476920 - DNA, 201 bp, Homo sapiens
cccaaccaaagtaatgtgggattgggaggcctgaaaagtaaagtgggggtggggtgtggatgtggctgtgacccagtgggtcaagtgctctaggacacccrggagaatctaagggctaatgagactttgggaagaagactgggacaatattcagagagggggacaaaggaagtggagttgtggaacgaactcagactgctt

SEQ ID NO: 476921 - DNA, 201 bp, Homo sapiens
gaccacacagtgaacccaactaggggtggagagaaagggccataacccagagccctactgtggcgtgagagtcagcctctgtgattgcctttcccagctaygcaggatgcaggctctggagagagaacaggatgccctgtggcagggtctggagctgctacagcatggccaggcctggtttgaagaccatctgagggaggc

SEQ ID NO: 476922 - DNA, 201 bp, Homo sapiens
ctgaagttcctgggtcgaagaagaatcggggttgaactggaagactataatgtcagcgtccccatcctgggctttaagaaatttatgttgtaggtgattcmccccaaccccaaccaaagtaatgtgggattgggaggcctgaaaagtaaagtgggggtggggtgtggatgtggctgtgacccagtgggtcaagtgctctag

SEQ ID NO: 476923 - DNA, 201 bp, Homo sapiens
cctttcctactggatctaccttatattctagtcatttagggccacttgccattatggaaacatgtcatgcctgtgtttatgctgctccttctggaaagtcttttttttttttttttgagacggagtctccctctgtcacccaggctggagtgcagtggcgcggtctttgctcactgcaacctccacctcccaggttcaagc

SEQ ID NO: 476924 - DNA, 201 bp, Homo sapiens
gggttcaagcaattctcctgactcaacctcccgagtagctgggactacaggcgtgtgccaccacacccagctagttttttgtgtgtgtttttagcacagayggtgtttcaccatgttggccagggtggtctcaaactcctgaccttgtgatccgcccaccttggcctcctaaagtgctgggactacaggtgtgagtcacca

SEQ ID NO: 476925 - DNA, 201 bp, Homo sapiens
agtcaccacgcccagccatgttttacttacattaactcacctcactgtctagcatattttgtgttgctgtaaggaaatacctgactctgagtaatttgttaaaaaaaaaaaaaagttttatttggcttatggttctggatggttggaaagctcaaaattgggcatcttcactggtgagagcctcagactgcttcaactcat

SEQ ID NO: 476926 - DNA, 201 bp, Homo sapiens
cactgactcaatatattttacagttgcttcacagaggctccctcttttgtttttatgaattcatttcattatttaacaaatatttgtgaggttgttttttkgtttgtttggttgttcttttttgagacagtgtcttgctccgtcactcaggctggaagtgtagtggtgccatcttggctcactgcaacctccgtctcccgg

SEQ ID NO: 476927 - DNA, 201 bp, Homo sapiens
agtttggcccaggagcaggtaggaggctcgcctgagaaactgcaggagacatctaactggcttctgtcccagcagcaggctgacggctcgttccaggaccyctctccagtgatacataggagcatgcaggtgcgggcatgctggggctggcccgagaagcgcctgtcggaggactctctttgccccttccccctcctgttt

SEQ ID NO: 476928 - DNA, 201 bp, Homo sapiens
tctcaaaggcaagctcatttttgggggagaaagcaagtgctgggctcctgggtgcccacgcagctgccatcacggcctatgccctgacactgaccaaggcscctgcggacctgcggggtgttgcccacaacaacctcatggcaatggcccaggagactggaggtgaggggtgaggcgctctggcagtgagcctgaggccca

SEQ ID NO: 476929 - DNA, 201 bp, Homo sapiens
tcagaggcctcttgtggctttccacaacttattgtctcatatttttatggacagtttatacaggcaccccacaagtccttttcccaacatgcccccctccstttttttttttttaaccgctattgctattatggcttatttgtggtgtttggtctgttttcagaagtgtcttttgcatctgtagactaaaagtaaacagca

SEQ ID NO: 476930 - DNA, 201 bp, Homo sapiens
cctatgccctgacactgaccaaggcccctgcggacctgcggggtgttgcccacaacaacctcatggcaatggcccaggagactggaggtgaggggtgaggsgctctggcagtgagcctgaggcccaggggaccttaggatccctgagtgtgcccagagggagaggctggatgaagactcagaggaggaatgaagttataag

SEQ ID NO: 476931 - DNA, 201 bp, Homo sapiens
agttataagcaggggtgggttgggggagactcaggagagcccagcagggggtggctaagggccaggggaccaggctcttctccctgccttcctgtttactygtggtctcccttcactttcagataacctgtactggggctcagtcactggttctcagagcaatgccgtgtcgcccaccccggctcctcgcaacccatccga

SEQ ID NO: 476932 - DNA, 201 bp, Homo sapiens
atgagaagcaagtccttatccccaaccctcctttcctgccctccaggctcacagcctttgtgttgaaggtcctgagtttggcccaggagcaggtaggaggmtcgcctgagaaactgcaggagacatctaactggcttctgtcccagcagcaggctgacggctcgttccaggacctctctccagtgatacataggagcatgc

SEQ ID NO: 476933 - DNA, 201 bp, Homo sapiens
tttttccccctgcttgctttcgcttgctctccccatctctgggtacctgttgtttcctttacccgcctcagtgctggtggctccgaatcccactcctcagmccaggcctcttccctgaaccatgggccccactcgtcccactcccacagcacctcagacgaggcatgtcccaaagcccttcttcattctgtgtctcttgtc

SEQ ID NO: 476934 - DNA, 201 bp, Homo sapiens
tggaggaggagctgcaggtgaaccactccctggtgaaccactccctcgcctgggtagccaggacacctgggcctcgtggccaggccagaagccgtccccamcctcccacccgtggaatccccgcagcacttcttcctggggtcttcgggggaagactgacttcctggctgcgtgacctggagctctgagcttcagttttct

SEQ ID NO: 476935 - DNA, 201 bp, Homo sapiens
gcaggtaggaggctcgcctgagaaactgcaggagacatctaactggcttctgtcccagcagcaggctgacggctcgttccaggacctctctccagtgatasataggagcatgcaggtgcgggcatgctggggctggcccgagaagcgcctgtcggaggactctctttgccccttccccctcctgtttgacatcttttctcc

SEQ ID NO: 476936 - DNA, 201 bp, Homo sapiens
ggggtgccaggtgtgagggctgccctcccacctccgctgggaggaacctgaacctgggaaccatgaagctggaagcactgctgtgtccgctttcatgaacmcagcctgggaccagggcatattaaaggcttttggcagcaaagtgtcagtgttggcagcgaagtgtcagtgtgtgttgctagggctgagagcagtgcccct

SEQ ID NO: 476937 - DNA, 201 bp, Homo sapiens
aggtaggaggctcgcctgagaaactgcaggagacatctaactggcttctgtcccagcagcaggctgacggctcgttccaggacctctctccagtgatacayaggagcatgcaggtgcgggcatgctggggctggcccgagaagcgcctgtcggaggactctctttgccccttccccctcctgtttgacatcttttctcccc

SEQ ID NO: 476938 - DNA, 201 bp, Homo sapiens
gtgttcatgaatcgagagcccaagaggaccctgacctcggtctcggtgtttgtggaccatcacctggcaccctccttctactttgtggccttctactaccmtggagaccacccagtggccaactccctgcgagtggatgtccaggctggggcctgcgagggcaaggtgaccggggtcaggagagatggcacttgtgccgag

SEQ ID NO: 476939 - DNA, 201 bp, Homo sapiens
aaccatgaagctggaagcactgctgtgtccgctttcatgaacacagcctgggaccagggcatattaaaggcttttggcagcaaagtgtcagtgttggcagygaagtgtcagtgtgtgttgctagggctgagagcagtgcccctgcccgatgcagttctgggcaggccaggttgacataaccttagactctctgagccctga

SEQ ID NO: 476940 - DNA, 201 bp, Homo sapiens
ttgtggctttccacaacttattgtcccatatttttatggccagtttatacaggcaccccacaagtccttttcccaacacagacaggaatacggcagcctgygccctgggagctcactgtcttgtgggagggaaccactcaagccactccccacttgtcctcctgtccctctcttcttgggctctgtcccccacctctctct

SEQ ID NO: 476941 - DNA, 201 bp, Homo sapiens
acactgtggctccccgactctctgaccacgtgggagatccatggcctgagcctgtccaaaaccaaaggtgatgtcaccctgtctgggcctcaggtgacccygcttccatttccctgtaccccagctccctgttccctttgctcttagtgtaggaagagggtccagtgatctggggaggtctgtgccagcgtgcagctggcg

SEQ ID NO: 476942 - DNA, 201 bp, Homo sapiens
actgtggctccccgactctctgaccacgtgggagatccatggcctgagcctgtccaaaaccaaaggtgatgtcaccctgtctgggcctcaggtgaccctgmttccatttccctgtaccccagctccctgttccctttgctcttagtgtaggaagagggtccagtgatctggggaggtctgtgccagcgtgcagctggcgtg

SEQ ID NO: 476943 - DNA, 201 bp, Homo sapiens
tgtcaggctccccagcttctggcattcctgtcaaagtttctgccacggtgtcttctcctgggtctgttcctgaagtccaggacattcagcaaaacacagaygggagcggccaagtcagcattccaataattatccctcagaccatctcagagctgcagctctcagtaggactcctcggacccctgggagatggtgggggaa

SEQ ID NO: 476944 - DNA, 201 bp, Homo sapiens
gtattttgtgtcatctcccttctccttggatcttagcaagaccaagcgacaccttgtgcctggggcccccttcctgctgcaggtttcttccagaggggaasgatgagtagggaggatgtggtagttaggagggctcagggtctgaccactctcttttgcctgccctcctttacctgcctaggccttggtccgtgagatgtc

SEQ ID NO: 476945 - DNA, 201 bp, Homo sapiens
gctggcccccagctctctccctttttcctcaggaacccaggggtccaggcccaagaccctcctcccgttttcttccaggaagcctccatctcaaaggcaarctcatttttgggggagaaagcaagtgctgggctcctgggtgcccacgcagctgccatcacggcctatgccctgacactgaccaaggcccctgcggacctg

SEQ ID NO: 476946 - DNA, 201 bp, Homo sapiens
tggcgggggtgggtagtcctcagaccaagggcttgcttgagtcctggctcaacctccctaggacacggtgattgccctggatgccctgtctgcctactggwttgcctcccacaccactgaggagaggggtctcaatgtgactctcagctccacaggccggaatgggttcaagtcccacgcgctgcagctgaacaaccgcca

SEQ ID NO: 476947 - DNA, 201 bp, Homo sapiens
tcatttttgggggagaaagcaagtgctgggctcctgggtgcccacgcagctgccatcacggcctatgccctgacactgaccaaggcccctgcggacctgckgggtgttgcccacaacaacctcatggcaatggcccaggagactggaggtgaggggtgaggcgctctggcagtgagcctgaggcccaggggaccttaggat

SEQ ID NO: 476948 - DNA, 201 bp, Homo sapiens
cctctcatgctcacccccacctggccctgcagtgggtcagtatgcttccccgacagccaagcgctgctgccaggatggggtgacacgtctgcccatgatgmgttcctgcgagcagcgggcagcccgcgtgcagcagccggactgccgggagcccttcctgtcctgctgccaatttgctgagagtctgcgcaagaagagcag

SEQ ID NO: 476949 - DNA, 201 bp, Homo sapiens
catttttgggggagaaagcaagtgctgggctcctgggtgcccacgcagctgccatcacggcctatgccctgacactgaccaaggcccctgcggacctgcgsggtgttgcccacaacaacctcatggcaatggcccaggagactggaggtgaggggtgaggcgctctggcagtgagcctgaggcccaggggaccttaggatc

SEQ ID NO: 476950 - DNA, 201 bp, Homo sapiens
gcggtgtccaaggttctgcagattgaggtgaatggagcacccctgaatataagtccccgggcccccagctttgtcctccaccctcagcactctctctgctrgccaggccaggggcccaacacccgaaccaatgccttggtctgttcccatcttctacaattctgatccaactctgtccctggagttgaaactcaaagttct

SEQ ID NO: 476951 - DNA, 201 bp, Homo sapiens
aaccccttgggtgagtgaccctctacctccagccattggtttcctaagtgggtacaggtggtgggggatgtggacagcaggacaggctgccaacttccccmatttccccagaccaccgaggccggaccttggaaatacctggcaactctgatcccaatatgatccctgatggggactttaacagctacgtcagggttacag

SEQ ID NO: 476952 - DNA, 201 bp, Homo sapiens
gagtgtgggggttgggaggccttggggccaggcaggggctggcgcagggagccgggtggccatcccagccctcctcacaatgcttccctgtgcagtggaascaaacgaggactatgaggactatgagtacgatgagcttccagccaaggatgacccagatgcccctctgcagcccgtgacacccctgcagctgtttgaggg

SEQ ID NO: 476953 - DNA, 201 bp, Homo sapiens
tggtgtttggtctgttttcagaagtgtcttttgcatctgtagactaaaagtaaacagcataaacagatacacattaaagtaaaatttgtaatagttgatcmtttaatggtcttaatctgtttaagaggatttatgtttgaaagtccgtcagtagctccaatgagaatgtcagtctcaggcaggagggttaaatgagcctga

SEQ ID NO: 476954 - DNA, 201 bp, Homo sapiens
gtgtttgtggaccatcacctggcaccctccttctactttgtggccttctactaccatggagaccacccagtggccaactccctgcgagtggatgtccaggmtggggcctgcgagggcaaggtgaccggggtcaggagagatggcacttgtgccgagggggttgaggacagggtgattgccaacagggcatggatttagctt

SEQ ID NO: 476955 - DNA, 201 bp, Homo sapiens
cccctgcttgctttcgcttgctctccccatctctgggtacctgttgtttcctttacccgcctcagtgctggtggctccgaatcccactcctcagcccaggsctcttccctgaaccatgggccccactcgtcccactcccacagcacctcagacgaggcatgtcccaaagcccttcttcattctgtgtctcttgtctggctg

SEQ ID NO: 476956 - DNA, 201 bp, Homo sapiens
caggggctggcgcagggagccgggtggccatcccagccctcctcacaatgcttccctgtgcagtggaagcaaacgaggactatgaggactatgagtacgaygagcttccagccaaggatgacccagatgcccctctgcagcccgtgacacccctgcagctgtttgagggtcggaggaaccgccgcaggagggaggcgccca

SEQ ID NO: 476957 - DNA, 201 bp, Homo sapiens
cttggtgctgcatcctagattctgtgctgagacggccttctccctacctggaacttctctctacctcctgtctcccctgtctgatccactgtccacacggsagtgacactgaccttccaaaagccccagccagatcagccttggggaaaagtcactccccgctgcccacggctcagatggctgggcctctgcccacccctc

SEQ ID NO: 476958 - DNA, 201 bp, Homo sapiens
ttctccctgccttcctgtttactcgtggtctcccttcactttcagataacctgtactggggctcagtcactggttctcagagcaatgccgtgtcgcccacsccggctcctcgcaacccatccgaccccatgccccaggccccagccctgtggattgaaaccacagcctacgccctgctgcacctcctgcttcacgagggca

SEQ ID NO: 476959 - DNA, 201 bp, Homo sapiens
gatgctgggtgcttggattggggcagggctggcatcgggacccgattcaggagtgagggagagcaggggtggaggtgtcagagcgaagtctgactgctgawcctgtctgttctccccaggttgctcttgttctctccttctgtggttcatctgggggtccccctatcggtgggggtgcagctccaggatgtgccccgagga

SEQ ID NO: 476960 - DNA, 201 bp, Homo sapiens
tgaagtccaggacattcagcaaaacacagacgggagcggccaagtcagcattccaataattatccctcagaccatctcagagctgcagctctcagtaggaytcctcggacccctgggagatggtgggggaaggggaggagggtgagctggggtcccaaggatccatggcctgacttggggggaaggtggggtacttggctc

SEQ ID NO: 476961 - DNA, 201 bp, Homo sapiens
acctctctgtctcgcctgacgcctgtggcgaatgtggtgccactcgtgtgtgtggactgtgcagtgacggggaggaaaaggggctgaaggcctcaaatccygtagcccagggagatgcccttaggtatggcaccagagaggtctgtggcctcacatgtcccacgtcctctccctgccccttgctgagccaggtccttcgta

SEQ ID NO: 476962 - DNA, 201 bp, Homo sapiens
cgtgggcacgaggaggggtcaggcctgggacctgagtcggggggtcaggcaggatgacagaacctgcagttaggttgtggcaaataaaggaggacccagtkgtatccatgacaaagatgaggccgcgaggagggcgagtgggtttgggggcaggcagagtgccttggagaacttacaggtcctgccacaatcctaatgcaa

SEQ ID NO: 476963 - DNA, 201 bp, Homo sapiens
tagtcccttcccagtggccaccttcggattcatgtgggacctgtggatccctgcttggtcccactccccgtgagcctctgacacagagtcctcagacctcyaccctctccctcccatgtagcctcagatccattggacactttaggctctgagggggccttgtcaccaggaggcgtggcctccctcttgaggcttcctcga

SEQ ID NO: 476964 - DNA, 201 bp, Homo sapiens
tgcttccgtcctgggtgtttttccccctgcttgctttcgcttgctctccccatctctgggtacctgttgtttcctttacccgcctcagtgctggtggctcygaatcccactcctcagcccaggcctcttccctgaaccatgggccccactcgtcccactcccacagcacctcagacgaggcatgtcccaaagcccttcttc

SEQ ID NO: 476965 - DNA, 201 bp, Homo sapiens
cactattttttgagtacagtcactcagatctaagaagcagatgttcagggagaaacagtgaaagggaggcagtgggtcataggcgtaatctatagcaatasagttttaaatgaatctcctttgtgctcaaacagcatgtctttaaattatcggagagtagctggtggaagtgggcttagctagaagactgcatgtctgtcc

SEQ ID NO: 476966 - DNA, 201 bp, Homo sapiens
cgtaatctatagcaatagagttttaaatgaatctcctttgtgctcaaacagcatgtctttaaattatcggagagtagctggtggaagtgggcttagctagragactgcatgtctgtccaatgcttcaaaggagggtctttctccttgaacacagtgtttacagataagacagggggtctcactctgagcatgggaacatga

SEQ ID NO: 476967 - DNA, 201 bp, Homo sapiens
gccgggagctgccctgggccaggggagggagggcaggacccaggctggggctgggcttctggagcccgcgcaggcagaacctggacgacagctcacacgtytccacaggcggaacggcaaggtggggctgtctggcatggccatcgcggacgtcaccctcctgagtggattccacgccctgcgtgctgacctggagaaggt

SEQ ID NO: 476968 - DNA, 201 bp, Homo sapiens; identical to SEQ ID NO: 232605

SEQ ID NO: 476969 - DNA, 201 bp, Homo sapiens
catgtctttaaattatcggagagtagctggtggaagtgggcttagctagaagactgcatgtctgtccaatgcttcaaaggagggtctttctccttgaacasagtgtttacagataagacagggggtctcactctgagcatgggaacatgatggcaattaggaggcttttcttctcagaggcctcttgtggctttccacaac

SEQ ID NO: 476970 - DNA, 201 bp, Homo sapiens
aatatgatccctgatggggactttaacagctacgtcagggttacaggtgggagtgccctttagtcccttcccagtggccaccttcggattcatgtgggacytgtggatccctgcttggtcccactccccgtgagcctctgacacagagtcctcagacctccaccctctccctcccatgtagcctcagatccattggacact

SEQ ID NO: 476971 - DNA, 201 bp, Homo sapiens
cagtgtttacagataagacagggggtctcactctgagcatgggaacatgatggcaattaggaggcttttcttctcagaggcctcttgtggctttccacaayttattgtctcatatttttatggacagtttatacaggcaccccacaagtccttttcccaacatgcccccctccctttttttttttttaaccgctattgcta

SEQ ID NO: 476972 - DNA, 201 bp, Homo sapiens
gtgtagcctgctcctcttacaggtcatgcacgcagcctgtttgctctgacaccaacttcctaccctctcagcctcaaagtaactcacctttcccccttctyctcaccccctcttaggcttccaggttaaggttctccgagaagacagcagagctgctttccgcctctttgagaccaagatcacccaagtcctgcacttcag

SEQ ID NO: 476973 - DNA, 201 bp, Homo sapiens
ggtctcactctgagcatgggaacatgatggcaattaggaggcttttcttctcagaggcctcttgtggctttccacaacttattgtctcatatttttatggmcagtttatacaggcaccccacaagtccttttcccaacatgcccccctccctttttttttttttaaccgctattgctattatggcttatttgtggtgtttg

SEQ ID NO: 476974 - DNA, 201 bp, Homo sapiens
tgggaaagaatatttgatcatgggtctggatggggccacctatgacctcgagggacagtgagtcatctggtcccctcagtctcttgtcctccccatgcctygccacctaggccttgcccctcagaagccagatgcctgtgctctccgtttccacctgccatcctcccgagccctgctgactgcccctttgccccctgcagc

SEQ ID NO: 476975 - DNA, 201 bp, Homo sapiens
tctttttaactttagtaaatacgtttacacacggaattttttacaattatcattttaaaacttgtttagatctttaaaacaaaattaaacaaccttttttrtataaattttttataactttttttatgacttttacagacaatttttaacatgtcttaactttttatgttttataatttttttactaaaggtacattttta

SEQ ID NO: 476976 - DNA, 201 bp, Homo sapiens; identical to SEQ ID NO: 232606

SEQ ID NO: 476977 - DNA, 201 bp, Homo sapiens
gcccccagtacctgctggactcgaatagctggatcgaggagatgccctctgaacgcctgtgccggagcacccgccagcgggcagcctgtgcccagctcaaygacttcctccaggagtatggcactcaggggtgccaggtgtgagggctgccctcccacctccgctgggaggaacctgaacctgggaaccatgaagctggaa

SEQ ID NO: 476978 - DNA, 201 bp, Homo sapiens
tgaatggacagagccacatttccctctcaaaggcagagttccaggacgccctggagaagctgaatatgggcattactgacctccaggggctgcgcctctaygttgctgcagccatcattgagtctccaggtgggtgactttcccttattgtaaccccagacccttgcctctgacctctgagctaaccctctgtcctccggc

SEQ ID NO: 476979 - DNA, 201 bp, Homo sapiens
tcagtctcttgtcctccccatgcctcgccacctaggccttgcccctcagaagccagatgcctgtgctctccgtttccacctgccatcctcccgagccctgytgactgcccctttgccccctgcagcccccagtacctgctggactcgaatagctggatcgaggagatgccctctgaacgcctgtgccggagcacccgccag

SEQ ID NO: 476980 - DNA, 201 bp, Homo sapiens
cttgtcctccccatgcctcgccacctaggccttgcccctcagaagccagatgcctgtgctctccgtttccacctgccatcctcccgagccctgctgactgyccctttgccccctgcagcccccagtacctgctggactcgaatagctggatcgaggagatgccctctgaacgcctgtgccggagcacccgccagcgggcag

SEQ ID NO: 476981 - DNA, 201 bp, Homo sapiens
ggagcaggtaggaggctcgcctgagaaactgcaggagacatctaactggcttctgtcccagcagcaggctgacggctcgttccaggacctctctccagtgwtacataggagcatgcaggtgcgggcatgctggggctggcccgagaagcgcctgtcggaggactctctttgccccttccccctcctgtttgacatcttttc

SEQ ID NO: 476982 - DNA, 201 bp, Homo sapiens
agagacaggttaagagttcataaagagtgggggccagggggccaattgcaaaatggaggctgcaaaaggctcagagctctggtctccacactattttttgmgtacagtcactcagatctaagaagcagatgttcagggagaaacagtgaaagggaggcagtgggtcataggcgtaatctatagcaatagagttttaaatga

SEQ ID NO: 476983 - DNA, 201 bp, Homo sapiens
gtggactgtgcagtgacggggaggaaaaggggctgaaggcctcaaatcccgtagcccagggagatgcccttaggtatggcaccagagaggtctgtggcctyacatgtcccacgtcctctccctgccccttgctgagccaggtccttcgtacctacaatgtcctggacatgaagaacacgacctgccaggacctacagatag

SEQ ID NO: 476984 - DNA, 201 bp, Homo sapiens
ttggcccaggagcaggtaggaggctcgcctgagaaactgcaggagacatctaactggcttctgtcccagcagcaggctgacggctcgttccaggacctctstccagtgatacataggagcatgcaggtgcgggcatgctggggctggcccgagaagcgcctgtcggaggactctctttgccccttccccctcctgtttgac

SEQ ID NO: 476985 - DNA, 201 bp, Homo sapiens
atctgtagactaaaagtaaacagcataaacagatacacattaaagtaaaatttgtaatagttgatcctttaatggtcttaatctgtttaagaggatttatrtttgaaagtccgtcagtagctccaatgagaatgtcagtctcaggcaggagggttaaatgagcctgagatgctttaaaaacctgtttttttaaaatttggt

SEQ ID NO: 476986 - DNA, 201 bp, Homo sapiens
ggagatccatggcctgagcctgtccaaaaccaaaggtgatgtcaccctgtctgggcctcaggtgaccctgcttccatttccctgtaccccagctccctgtyccctttgctcttagtgtaggaagagggtccagtgatctggggaggtctgtgccagcgtgcagctggcgtgggccagagggcagaggcggactgagacaga

SEQ ID NO: 476987 - DNA, 201 bp, Homo sapiens
atttttaaagagcaggttagtgttttaagaaaaacttgtgttttattttaatgtttagtttatagaaaactggatgatatctttttaactttagtaaataygtttacacacggaattttttacaattatcattttaaaacttgtttagatctttaaaacaaaattaaacaaccttttttgtataaattttttataactttt

SEQ ID NO: 476988 - DNA, 201 bp, Homo sapiens
gtgagtgtcacctgagcggccacctctcctctccaaggctacatgcggatccagcagtttcggaaggcggatggttcctatgcggcttggttgtcacgggrcagcagcacctggtgagcttgggagagtggttccagggttctgagggggtcagggctggggcaggggtgggacagagctggtatgatgggagggtggata

SEQ ID NO: 476989 - DNA, 201 bp, Homo sapiens
ggtgcttggattggggcagggctggcatcgggacccgattcaggagtgagggagagcaggggtggaggtgtcagagcgaagtctgactgctgatcctgtcygttctccccaggttgctcttgttctctccttctgtggttcatctgggggtccccctatcggtgggggtgcagctccaggatgtgccccgaggacaggtag

SEQ ID NO: 476990 - DNA, 201 bp, Homo sapiens
gtgcttggattggggcagggctggcatcgggacccgattcaggagtgagggagagcaggggtggaggtgtcagagcgaagtctgactgctgatcctgtctkttctccccaggttgctcttgttctctccttctgtggttcatctgggggtccccctatcggtgggggtgcagctccaggatgtgccccgaggacaggtagt

SEQ ID NO: 476991 - DNA, 201 bp, Homo sapiens
cctcgtgttggggacactctgaacctgaacttgcgagccgtgggcagtggggccaccttttctcattactactacatggtgtgcatgagctggggagtcamggagggctggggtgcagggaagagccctctgggtggggctgggggggttcaaggctgaggctgtcccatgaagaggcaaccactcttgtccctcccattc

SEQ ID NO: 476992 - DNA, 201 bp, Homo sapiens
tttatttattggaactataatttttattgggctcagtgccacaaagtttaataattcatatatgagcctgtccaattagaattgccatctgatttaagtayactgtaagtgcttttatggtattatgtggcaaaaaggaccatttaactaaatcatcattttgaacaataacccccattattgtgtggttagtgtgaagta

SEQ ID NO: 476993 - DNA, 201 bp, Homo sapiens; identical to SEQ ID NO: 232619

SEQ ID NO: 476994 - DNA, 201 bp, Homo sapiens
ggcaaaacagtgaaagggtagcagtgcgtcacaggcataatctacagcagaagcgctttaaatgaatctcctttgtgctcaaacagcatatctttaacttrtcggagagtagctagtgggagtgggcttaactaggagcctgcacgtctgtccacattccaatgcttcaaaggagggtctttctccttgaatacagtgttt

SEQ ID NO: 476995 - DNA, 201 bp, Homo sapiens
ctgtgccggagcacccgccagcgggcagcctgtgcccagctcaacgacttcctccaggagtatggcactcaggggtgccaggtgtgagggctgccctcccmcctccgctgggaggaacctgaacctgggaaccatgaagctggaagcactgctgtgtccgctttcatgaacacagcctgggaccagggcatattaaaggct

SEQ ID NO: 476996 - DNA, 201 bp, Homo sapiens
gggcccccttcctgctgcaggtttcttccagaggggaaggatgagtagggaggatgtggtagttaggagggctcagggtctgaccactctcttttgcctgmcctcctttacctgcctaggccttggtccgtgagatgtcaggctccccagcttctggcattcctgtcaaagtttctgccacggtgtcttctcctgggtctg

SEQ ID NO: 476997 - DNA, 201 bp, Homo sapiens
ctgcaggtttcttccagaggggaaggatgagtagggaggatgtggtagttaggagggctcagggtctgaccactctcttttgcctgccctcctttacctgmctaggccttggtccgtgagatgtcaggctccccagcttctggcattcctgtcaaagtttctgccacggtgtcttctcctgggtctgttcctgaagtccag

SEQ ID NO: 476998 - DNA, 201 bp, Homo sapiens
cctctccaggtatctgcaggctccccacatccagcgatagccaggctcactgtggcagccccaccttcaggaggccccgggtttctgtctattgagcggcyggattctcgacctcctcgtgttggggacactctgaacctgaacttgcgagccgtgggcagtggggccaccttttctcattactactacatggtgtgcatg

SEQ ID NO: 476999 - DNA, 201 bp, Homo sapiens
cagtatgcttccccgacagccaagcgctgctgccaggatggggtgacacgtctgcccatgatgcgttcctgcgagcagcgggcagcccgcgtgcagcagcyggactgccgggagcccttcctgtcctgctgccaatttgctgagagtctgcgcaagaagagcagggacaagggccaggcgggcctccaacgaggtgagggg

SEQ ID NO: 477000 - DNA, 201 bp, Homo sapiens
gggcctcaggtgaccctgcttccatttccctgtaccccagctccctgttccctttgctcttagtgtaggaagagggtccagtgatctggggaggtctgtgycagcgtgcagctggcgtgggccagagggcagaggcggactgagacagagctgggtcacccccacccctccctcctgtggccctgaagctttgatggcccc

SEQ ID NO: 477001 - DNA, 201 bp, Homo sapiens
gaccctgcttccatttccctgtaccccagctccctgttccctttgctcttagtgtaggaagagggtccagtgatctggggaggtctgtgccagcgtgcagmtggcgtgggccagagggcagaggcggactgagacagagctgggtcacccccacccctccctcctgtggccctgaagctttgatggcccctctgatctctg

SEQ ID NO: 477002 - DNA, 201 bp, Homo sapiens
aggatggctacaggatgaagtttgcctgctactacccccgtgtggagtacggtcagtcttcccaccgaggccctggcctgaccctccctcggggaccggcygttttggtctctctgggtgtagcctgctcctcttacaggtcatgcacgcagcctgtttgctctgacaccaacttcctaccctctcagcctcaaagtaact

SEQ ID NO: 477003 - DNA, 201 bp, Homo sapiens
aaggcaagctcatttttgggggagaaagcaagtgctgggctcctgggtgcccacgcagctgccatcacggcctatgccctgacactgaccaaggcccctgyggacctgcggggtgttgcccacaacaacctcatggcaatggcccaggagactggaggtgaggggtgaggcgctctggcagtgagcctgaggcccagggga

SEQ ID NO: 477004 - DNA, 201 bp, Homo sapiens
ggctaaccgggccaggactctggccatcctcgttttcctgccctcaggtgagcgtccacgtgtccccagtggaggggctgtgcctggctgggggcggaggkctggcccagcaggtgctggtgcctgcgggctctgcccggcctgttgccttctctgtggtgcccacggcagccgccgctgtgtctctgaaggtggtggctc

SEQ ID NO: 477005 - DNA, 201 bp, Homo sapiens
actatttattgagtacaataacttagatctaagaagcagatgttcagggcaaaacagtgaaagggtagcagtgcgtcacaggcataatctacagcagaagygctttaaatgaatctcctttgtgctcaaacagcatatctttaacttatcggagagtagctagtgggagtgggcttaactaggagcctgcacgtctgtcca

SEQ ID NO: 477006 - DNA, 201 bp, Homo sapiens
attttttgaaatctgcctctgctaaaggaattgtaaaaaagcagtcttttaaatctataataacaagcggtcagtctttagggagcacagtgggggatggragcccaggttgtaaggctcccatcggttgaattacagcgttgacgccatctaccggactttttcttaattacaaatactggggaattccaaggagagaaa

SEQ ID NO: 477007 - DNA, 201 bp, Homo sapiens
tgaactgtgggtcgggcaataatgggcacggtgagccaagtctcgggctccctccccctgcacccactcggctgaggaggaggtggccattctggacattyctctacaggaaccgtgggctgaacaattttttgagtaggtttagggagactggggagattggcataaatcatcttcagactctcctttttgttagtactc

SEQ ID NO: 477008 - DNA, 201 bp, Homo sapiens
tgcttggattggggcagggctggcatcgggacccgattcaggagtgagggagagcaggggtggaggtgtcagagcgaagtctgactgctgatcctgtctgytctccccaggttgctcttgttctctccttctgtggttcatctgggggtccccctatcggtgggggtgcagctccaggatgtgccccgaggacaggtagtg

SEQ ID NO: 477009 - DNA, 201 bp, Homo sapiens
aggcaccccacaagtccttttcccaacacagacaggaatacggcagcctgtgccctgggagctcactgtcttgtgggagggaaccactcaagccactcccyacttgtcctcctgtccctctcttcttgggctctgtcccccacctctctctgtcctttgtcttgcaggtggggagatggaggaggcagagctcacatcctg

SEQ ID NO: 477010 - DNA, 201 bp, Homo sapiens
ggcccaacacccgaaccaatgccttggtctgttcccatcttctacaattctgatccaactctgtccctggagttgaaactcaaagttctgggggagtctgygctagcagggcaggctgtagtcctgtgtgacctcacaaccatgttttccctgagacagaaggaaggggccatccatagagaggagctggtctatgaactc

SEQ ID NO: 477011 - DNA, 201 bp, Homo sapiens
tagaaggctgaagtgagataattcatgtgctggtataaactttgtggaaatgtgaggtggggagaggaggtggggctgttttgaggaaggagataagttaytggagccgcaaaaacaggtttgcttgtgcccttctaacatcgccttcccttttctgttgctgaagttttccttgggcagcaagatcaatgtgaaggtggg

SEQ ID NO: 477012 - DNA, 201 bp, Homo sapiens
agaaatgaccaggtcagaaccaagggtggtccagaagctaacccttagcttagggacagtttcacagagaacacgtccatgatgcaagactctgctgaggscctggagcagtgaagactggggcaaggtcaccctctgggaagtgaagtcaccagagaccttgcggagcagctttgagagttctctgagtaggaaggtaac

SEQ ID NO: 477013 - DNA, 201 bp, Homo sapiens
tacgttgctgcagccatcattgagtctccaggtgggtgactttcccttattgtaaccccagacccttgcctctgacctctgagctaaccctctgtcctccrgcaccaacaccaccccacttctcacatctcatctcagactcaaaaccaggaaacacccaggagacctggtttctctccaactctgtctctgtgactcggc

SEQ ID NO: 477014 - DNA, 201 bp, Homo sapiens
gaggtgaatggagcacccctgaatataagtccccgggcccccagctttgtcctccaccctcagcactctctctgctggccaggccaggggcccaacacccraaccaatgccttggtctgttcccatcttctacaattctgatccaactctgtccctggagttgaaactcaaagttctgggggagtctgtgctagcagggca

SEQ ID NO: 477015 - DNA, 201 bp, Homo sapiens
tggctcgagggtccttcgaattccctgtgggagatgcggtgtccaaggttctgcagattgaggtgaatggagcacccctgaatataagtccccgggccccyagctttgtcctccaccctcagcactctctctgctggccaggccaggggcccaacacccgaaccaatgccttggtctgttcccatcttctacaattctgat

SEQ ID NO: 477016 - DNA, 201 bp, Homo sapiens
gacaagacagagcagtggagcacactgcctcccgagaccaaggaccacgccgtggatctgatccagaaaggttctgggtgcaagggcaagcaggagggggkccaggaaaggacagttactggaagatggacagcccaggaggctacagagggaaagaaagggggcccctgatgaggatggggagcatggccttgggctcaa

SEQ ID NO: 477017 - DNA, 201 bp, Homo sapiens
ggggctgtgcctggctgggggcggagggctggcccagcaggtgctggtgcctgcgggctctgcccggcctgttgccttctctgtggtgcccacggcagccrccgctgtgtctctgaaggtggtggctcgagggtccttcgaattccctgtgggagatgcggtgtccaaggttctgcagattgaggtgaatggagcacccct

SEQ ID NO: 477018 - DNA, 201 bp, Homo sapiens
acccctccctcctgtggccctgaagctttgatggcccctctgatctctgcccctgtgcccacgcttcctttccctcaggcctatgtgtggccaccccagtycagctccgggtgttccgcgagttccacctgcacctccgcctgcccatgtctgtccgccgctttgagcagctggagctgcggcctgtcctctataactacc

SEQ ID NO: 477019 - DNA, 201 bp, Homo sapiens
ccactcccagttcggtaccgggtctttgctctggatcagaagatgcgcccgagcactgacaccatcacagtcatggtggaggtgagtccccgacctctggmcttcctgatcctggccactgatgtgacctcctgcctgtgagcacttctccccttgcagaactctcacggcctccgcgtgcggaagaaggaggtgtacatg

SEQ ID NO: 477020 - DNA, 201 bp, Homo sapiens
tttggggccagagatccgaattccgggattacgagtggaaggtgggcagctctctccagcagcctctcttatgttgctggtctcaaggggtcggggcgggkgctgaggtgtatgtcctttttgtcctctcatgctcacccccacctggccctgcagtgggtcagtatgcttccccgacagccaagcgctgctgccaggatg

SEQ ID NO: 477021 - DNA, 201 bp, Homo sapiens
gcacctccgcctgcccatgtctgtccgccgctttgagcagctggagctgcggcctgtcctctataactacctggataaaaacctgactgtgaggccccatrggagcctgagcatacaggagttgggggagccagggcccagtgaggggtggggaggctaaccgggccaggactctggccatcctcgttttcctgccctcag

SEQ ID NO: 477022 - DNA, 201 bp, Homo sapiens
ctctcaaaggcagagttccaggacgccctggagaagctgaatatgggcattactgacctccaggggctgcgcctctacgttgctgcagccatcattgagtmtccaggtgggtgactttcccttattgtaaccccagacccttgcctctgacctctgagctaaccctctgtcctccggcaccaacaccaccccacttctcac

SEQ ID NO: 477023 - DNA, 201 bp, Homo sapiens
ccaaaaggcgattaatgagaaatgtgagttgcgggtgcctaggcagtagcttgggctctccacctgggatccgggttgggggtctgcctctctgcccctcrgctccttgctgaacccacgtgtggtatttggggccagagatccgaattccgggattacgagtggaaggtgggcagctctctccagcagcctctcttatgt

SEQ ID NO: 477024 - DNA, 201 bp, Homo sapiens
aggacattcagcaaaacacagacgggagcggccaagtcagcattccaataattatccctcagaccatctcagagctgcagctctcagtaggactcctcggmcccctgggagatggtgggggaaggggaggagggtgagctggggtcccaaggatccatggcctgacttggggggaaggtggggtacttggctctgagctac

SEQ ID NO: 477025 - DNA, 201 bp, Homo sapiens
gagaaacgtgaacttccaaaaggcgattaatgagaaatgtgagttgcgggtgcctaggcagtagcttgggctctccacctgggatccgggttgggggtctkcctctctgcccctcggctccttgctgaacccacgtgtggtatttggggccagagatccgaattccgggattacgagtggaaggtgggcagctctctccag

SEQ ID NO: 477026 - DNA, 201 bp, Homo sapiens
cgtgcagctggcgtgggccagagggcagaggcggactgagacagagctgggtcacccccacccctccctcctgtggccctgaagctttgatggcccctctratctctgcccctgtgcccacgcttcctttccctcaggcctatgtgtggccaccccagtccagctccgggtgttccgcgagttccacctgcacctccgcct

SEQ ID NO: 477027 - DNA, 201 bp, Homo sapiens
cggagcacccgccagcgggcagcctgtgcccagctcaacgacttcctccaggagtatggcactcaggggtgccaggtgtgagggctgccctcccacctccrctgggaggaacctgaacctgggaaccatgaagctggaagcactgctgtgtccgctttcatgaacacagcctgggaccagggcatattaaaggcttttggc

SEQ ID NO: 477028 - DNA, 201 bp, Homo sapiens
tagttctgcctacaaaagtttgacaaactgtgggactatttaacataccctggggcaaaactttccaatgatatttggctgcaggttttttgttattaacrgcaggaatggtaaaggcaaattttttgaaatctgcctctgctaaaggaattgtaaaaaagcagtcttttaaatctataataacaagcggtcagtctttag

SEQ ID NO: 477029 - DNA, 201 bp, Homo sapiens
cagcatttgtaattgtcttttgcaaagattaataatattgaataagttggtctctactttttgctgcacaaatctggaaactgatctctaacaggctggakagttctgcctacaaaagtttgacaaactgtgggactatttaacataccctggggcaaaactttccaatgatatttggctgcaggttttttgttattaacg

SEQ ID NO: 477030 - DNA, 201 bp, Homo sapiens
ttgttaaattaatctgtcatgtaactgagttaataaatgcctgtttaacctgatttttatttattggaactataatttttattgggctcagtgccacaaartttaataattcatatatgagcctgtccaattagaattgccatctgatttaagtatactgtaagtgcttttatggtattatgtggcaaaaaggaccattta

SEQ ID NO: 477031 - DNA, 201 bp, Homo sapiens
gggggagccagggcccagtgaggggtggggaggctaaccgggccaggactctggccatcctcgttttcctgccctcaggtgagcgtccacgtgtccccagyggaggggctgtgcctggctgggggcggagggctggcccagcaggtgctggtgcctgcgggctctgcccggcctgttgccttctctgtggtgcccacggca

SEQ ID NO: 477032 - DNA, 201 bp, Homo sapiens
tttttacttttttgtatttttttgatttttgtcttagtcttttttttacttttatttttttaaatgtgtaataattagatgagtgttggtaacaatggatrtatgtacatattttagtttttaaaatttagggatgtgtttaacatctgtttgccagaactgactaggttccaattctttacggttaacacctattgaagg

SEQ ID NO: 477033 - DNA, 201 bp, Homo sapiens
agcagagatggcagaccaggctgcggcctggctcacccgtcagggcagcttccaagggggattccgcagtacccaagtaggggccgtccccgggctctggsgggggtgggtagtcctcagaccaagggcttgcttgagtcctggctcaacctccctaggacacggtgattgccctggatgccctgtctgcctactggattg

SEQ ID NO: 477034 - DNA, 201 bp, Homo sapiens
tgaggcttcctcgaggctgtggggagcaaaccatgatctacttggctccgacactggctgcttcccgctacctggacaagacagagcagtggagcacactkcctcccgagaccaaggaccacgccgtggatctgatccagaaaggttctgggtgcaagggcaagcaggaggggggccaggaaaggacagttactggaagat

SEQ ID NO: 477035 - DNA, 201 bp, Homo sapiens
gtgggaagtagggatggataccctggaggctactggaagcagccttcccaagatcttcactatggatttccttggcagagctcactgtagcctgtctccarggacttcaccctgccttttctgggcagccccattcttgtctctctgggtttccctgaaaatcttgagaaataccaaagagatattcaccacccttctgcc

SEQ ID NO: 477036 - DNA, 201 bp, Homo sapiens
cagccaccaatgcactgctccttaccttttcctatgggactgaaaccttttagaatgtgatgaaagctatagcctccctccccagaaagatgcacacattrttttgacacatagttttgcatatgattgcaagggagggagagacaccctgaagcccattcacagatgtcagcacgtggggccctagtactgggaaagagg

SEQ ID NO: 477037 - DNA, 201 bp, Homo sapiens
ccctagtactgggaaagagggctggctaggccacgtctgcctgtctggggtccccacagatagtgagtctttgggcccagttatggtctcattgttttccytgactctgacccatcttacgattcttctcaaagccatcgctccgcagcaggaacaccattttcaccctaggaacccgcggctctgtcatctcccccactg

SEQ ID NO: 477038 - DNA, 201 bp, Homo sapiens
ccattcgggattgtatcctccagcagagggaaggggtggtgctattgacatggggattttgtggcgtgtggtacagatgtcccagctggggtcaacatctstgaggtttctatcacttcaaagagaaattggagaggtactacaaatctgaggatctcccatcttcaccatgaggccccttgactttttgtggatcagata

SEQ ID NO: 477039 - DNA, 201 bp, Homo sapiens
cccatctttttgctgggctcagcatcatctaagtgacccttggtcttcagttactagctgtgcccaaagttctgtatgagccctaacctgattcttttttktttgtttgttttgttttttttttgagacagagtctagctctgttgtccaggctggagtgcagtggcacagtctcggctcactgcaacctctgcctcccag

SEQ ID NO: 477040 - DNA, 201 bp, Homo sapiens
ctgaggatctcccatcttcaccatgaggccccttgactttttgtggatcagatattcaagagagtgagaatatagcatctctacacaaccagatcacagcytgtgatgctgtcctggaggttagtaatcatgacctgtgacccctaatagctactctgaaccagatcatggactctggtgccatttttaggtcatcagcct

SEQ ID NO: 477041 - DNA, 201 bp, Homo sapiens
tgctagtattttttatttataagagttctttgcatcatctacatactaatcttgttgattatacgtaggttacagattatcttttagtatgtatctttttrcttttttttttttttttggtgagatgagggtctttctgtgttgcccaggctcctgggctcaagaaatccttgcacctttttttttttttttttgagatgg

SEQ ID NO: 477042 - DNA, 201 bp, Homo sapiens
tttcgtatttgtagtagagatggggtttcactgtgttggccaggctggtctcgaattcctgacctcgtgatctgcccgccatggcctcccacagtgctggsattacaagtgtgagccactgcgcctggccgcctaacctgattcttaatcatcactattagcaccattttacggtttgatccctcaatgactttctttgac

SEQ ID NO: 477043 - DNA, 201 bp, Homo sapiens
atatctaaaaaaatttccttttttcaagtctgttcattcctcatagttcttactaattggtcatttttacatcctttttttttttttttttttttgagacrgagtcttgctctgtcatccaggctggagtgcagtggcatgatctctgctcactgcaacctccgcctcccaagttcaagtgattctcttgcctcagtctcc

SEQ ID NO: 477044 - DNA, 201 bp, Homo sapiens
tggttcactcaactagtcaccatgtcctgaggcatgaagcctcctcagctcttggaattgctggcaaggggtgactgcctctgagtcattgtgtttttcaragtgatttcttttctgtagctttttgacctaagatctcagcaatttgaacactaacctctcccctcctggctcaagaattactccgaagtcagtctgcag

SEQ ID NO: 477045 - DNA, 201 bp, Homo sapiens
cttccagcagctgctcaatgctcggacacaggtaggggtgtggggaaaagggaagagacagccttctgtgctgttttcagctctctctctctctctctctstgtgtgtgtgtgtgtgtgtgtgtgtgtgtagggagtggcataatggatctcaggtatgcggaattactgtaactcttgattcacaacatactgtcattat

SEQ ID NO: 477046 - DNA, 201 bp, Homo sapiens
gccacttacacgctgtgtgcccttgggcaagttaaccagcttctctgtgccatcatttctcacacctttaaggtgaggaagatagaacctattgtatacawcgtcgttaggattagatgaatatgtgtaagattgcacctggcatgcaggtaaacactatgtgttttgacatttctagaaagcctggggttccccagaggt

SEQ ID NO: 477047 - DNA, 201 bp, Homo sapiens
ctggcatgcaggtaaacactatgtgttttgacatttctagaaagcctggggttccccagaggtgtgatagaacacccaagatggcaggagtctgagggtcytaaatttaagtgcaagttctgctctatcctctgcaattcctagctttcctcattcggtcatctccactgcacttttttttttgagacggagtcttgctct

SEQ ID NO: 477048 - DNA, 201 bp, Homo sapiens
acccagaaaattcggtttcccccactgctgttagctctgtgagggcagagatgatgcctgtcttgttcagtgttttactcttggagtctggcacagtgtcyagcttagtacaataagtgtggaatgaaggggacatcctgaagtgaaggactgctttccccaaactagacatttccctttgtcttcccttaggagcgggct

SEQ ID NO: 477049 - DNA, 201 bp, Homo sapiens
ttgggggtttagtggcatttgtgaaggaggctgaggctttgattgagcgtggacaggctgagcgacttcgaggggaagaaggtatgaggaaaatatggtartgatgggatcagtggtaagggaagtggaaaagaaaaatgaaaggatgcagattacatggtgggggaatagagtatgaaagactggattgagagaatacca

SEQ ID NO: 477050 - DNA, 201 bp, Homo sapiens
gtcaaacaacttaactcaaatatctgggaacgatttcgcgctgaggaagaccctttgggacttgtagctccactccggggaacggactcgccgggactgayagttgccggaagtgaggctgcggggaatggccgccgctgcgaccatggcggctgcggcccgggaactggtgttgcgggctgggacctcagatatggagga

SEQ ID NO: 477051 - DNA, 201 bp, Homo sapiens
tgtgtatatgtgtttgtgtctttccaggaattcattgaagagttgctgtctcccccttttgggggtttagtggcatttgtgaaggaggctgaggctttgaytgagcgtggacaggctgagcgacttcgaggggaagaaggtatgaggaaaatatggtaatgatgggatcagtggtaagggaagtggaaaagaaaaatgaaa

SEQ ID NO: 477052 - DNA, 201 bp, Homo sapiens
agcagctccttctcacttgaaggactggggatatccaattatattttttctttctgtctttcaccgtaccctactcccattaacttatccctttccaggcrggtggtcctgggctccaggaaccactgcaacttggggagttggatatcacttctgatgaattcatcctggatgaagtggatggtaagcgatggcatgggg

SEQ ID NO: 477053 - DNA, 201 bp, Homo sapiens
gtatagtggggaggtccaggaatagaaaactttgtacatgtgtcctgactatatggtacaatgcaaggtggtagagatgacaggggctggaggtaaggagygtggtctgggtctggtttagggatgtctgggtctcccttgtaactcatcccacccctccctgctaaccagggcaattctggaggctccagtgacagagcc

SEQ ID NO: 477054 - DNA, 201 bp, Homo sapiens
gtatccacattgttctccggttccgtaacattgcagcaaagagggatgttcctgccctggacaggtcactgaattctggtccttgatgcccaacaggccamgaactctcttggtcttgcatgactctgccctgaccttagactcctactgacctggtatcatcaacctttattcccattcatttgctccggaggcagtagt

SEQ ID NO: 477055 - DNA, 201 bp, Homo sapiens
acaggccacgaactctcttggtcttgcatgactctgccctgaccttagactcctactgacctggtatcatcaacctttattcccattcatttgctccggargcagtagtgctgctttttgactcacctttctccaaccactgccccccaacccccacaactagctattgaccattaaactgaatgatgccccactccctcc

SEQ ID NO: 477056 - DNA, 201 bp, Homo sapiens
agactcctactgacctggtatcatcaacctttattcccattcatttgctccggaggcagtagtgctgctttttgactcacctttctccaaccactgccccscaacccccacaactagctattgaccattaaactgaatgatgccccactccctcccatccccctccaacattccttgctggctgacctctgattctgatta

SEQ ID NO: 477057 - DNA, 201 bp, Homo sapiens
aattttttgttgtgtctggcccagctgcacacgacctgttccatgctgtcatgggccgtacactcagcatgaccctggtaagactcctgtttcctgtaccrttcaacacctttgtccccagtcttcatcagcagcatagtggggtcatgactctggtagaactgaaatcaggatcgcctcattctaaaatgtctaagcctt

SEQ ID NO: 477058 - DNA, 201 bp, Homo sapiens
ctctctgccttttcaggtggaggtggagaattttgtcctccgagtggcagctgagttctcctcaaggaaggagcagcttgtgtttctgatcaacaactatsacatgatgctgggtgtgctgatggtaataggtgctccttctccttgccttcctacccagaaaattcggtttcccccactgctgttagctctgtgagggca

SEQ ID NO: 477059 - DNA, 201 bp, Homo sapiens
gagagtgggtacaacgtgagactcttagaatttttcaaagcagtacctgtggctcccagtaaaagcagctccttctcacttgaaggactggggatatccarttatattttttctttctgtctttcaccgtaccctactcccattaacttatccctttccaggcgggtggtcctgggctccaggaaccactgcaacttgggg

SEQ ID NO: 477060 - DNA, 201 bp, Homo sapiens
atccatgggaagtcagtgttggggtccatcccttctgtttttcttctttactcctcctctcccagtatccatttgaggccctcttccgcagccagcactaygccctcctagacaattcctgccgcgaataccttttcatctgtgaattttttgttgtgtctggcccagctgcacacgacctgttccatgctgtcatgggcc

SEQ ID NO: 477061 - DNA, 201 bp, Homo sapiens
caatctcagctcactgcaagctccgcctcccgggttcatgccattcttcctgcctcagcctcccgagtagctgagactacaggtgcccagcaccatgcccrgtattttttttgtattttgtatttttagtagagacggggggtttcaccatgttagccaggatggtcttgatctgacctcgtcatctgcccgccttggcct

SEQ ID NO: 477062 - DNA, 201 bp, Homo sapiens
gtcctgtccagtgcatcatccccaaagaaacaaatgcgtttgttcatagtcactgaggacaacaaactgacattctcttttaatcctctgtttgttccccwatcacacagaaacacctggattcttatctagctgactgctacgatgccattgctgtttttctctgtatccacattgttctccggttccgtaacattgcag

SEQ ID NO: 477063 - DNA, 201 bp, Homo sapiens
cttcccacctcggcctcccaaagtgctgggattacaggcgtgagccactgcgtccggcctccactgcactgtcttgtcttttacctttttttgttttcttkagacgggtttccctgtgttacccaggttgaccttgaactcctgatctcctcaaacaatcttcccgtctcagcttctaagtagttgggactacaaggagcc

SEQ ID NO: 477064 - DNA, 201 bp, Homo sapiens
agcttccagcagctgctcaatgctcggacacaggtaggggtgtggggaaaagggaagagacagccttctgtgctgttttcagctctctctctctctctctstgtgtgtgtgtgtgtgtgtgtgtgtgtgtgtagggagtggcataatggatctcaggtatgcggaattactgtaactcttgattcacaacatactgtcatt

SEQ ID NO: 477065 - DNA, 201 bp, Homo sapiens
gcctttgagtttttgagcggcctagtgtgggcatctggtttcttgggagacaggtagactgacatgttcctgaccccctaggttcttctatcagtttctgytgggcaatgaacgagcaacagcaaaggagatcagggatgaatatgtggagacgctgagcaagatttacctgtcttactaccgctcttacctggggcggct

SEQ ID NO: 477066 - DNA, 201 bp, Homo sapiens
gaactctgctgtgataggcttgtgatcatagatcctggtgtggccaggtgcagtggcttatgcctgcaatcccagtactttgggagaccaaggcaggaagrttgcttgaggccaggagttcgagaccagcctgggcaatgcggcaagaccttgtctctacaaaaaatttaaaaataaacttaaccaggcatggtggtacac

SEQ ID NO: 477067 - DNA, 201 bp, Homo sapiens
tatccacattgttctccggttccgtaacattgcagcaaagagggatgttcctgccctggacaggtcactgaattctggtccttgatgcccaacaggccacraactctcttggtcttgcatgactctgccctgaccttagactcctactgacctggtatcatcaacctttattcccattcatttgctccggaggcagtagtg

SEQ ID NO: 477068 - DNA, 201 bp, Homo sapiens
actatgtgagggagggcaagggtaacaaagggttcttgaaaggcagggctctaagcatcattgtgggggttggccaaggtcacagttgtgtcatgggccaygctatgagcaggtgttctgggagggtggtgaaactcatggtgagtggtgcactgtgggtaggagggactgaaggtagagtcacatcacatggaggtgggt

SEQ ID NO: 477069 - DNA, 201 bp, Homo sapiens
ggttcttgaaaggcagggctctaagcatcattgtgggggttggccaaggtcacagttgtgtcatgggccacgctatgagcaggtgttctgggagggtggtraaactcatggtgagtggtgcactgtgggtaggagggactgaaggtagagtcacatcacatggaggtgggttggctaaggaagttgggaggttgtgttggt

SEQ ID NO: 477070 - DNA, 201 bp, Homo sapiens
ttactgagacaagttgctgctctgtcgcccaggctggagtgcagtgacatgatcttggctcactacaacctctgcctcccggttcaagtgattcttctgcytcagtctccctgagtagctggggttacaggcatgcaccaccacacctggctaattttagtattaataatttatttttaaatggaataataatttcacttt

SEQ ID NO: 477071 - DNA, 201 bp, Homo sapiens
cttgactttttgtggatcagatattcaagagagtgagaatatagcatctctacacaaccagatcacagcctgtgatgctgtcctggaggttagtaatcatsacctgtgacccctaatagctactctgaaccagatcatggactctggtgccatttttaggtcatcagcctcaagatggggacaggttagggtcattttcaa

SEQ ID NO: 477072 - DNA, 201 bp, Homo sapiens
ctccctctgtctcccaggctggagtggtgcagtggtgcaatctcagctcactgcaagctccgcctcccgggttcatgccattcttcctgcctcagcctccygagtagctgagactacaggtgcccagcaccatgcccggtattttttttgtattttgtatttttagtagagacggggggtttcaccatgttagccaggatg

SEQ ID NO: 477073 - DNA, 201 bp, Homo sapiens
catcatgttggccaggctggtcttgaactcctgacctcaggtgatctgcccacctcagcctcccaaagtgctgggattacaggcgtgagccactgtgcccrgcctatccttaactttagacattgcacacagtacaactgctatccgtatcggatagttcttaaggtcagcagctattgcttattgtgtctgctgactctc

SEQ ID NO: 477074 - DNA, 201 bp, Homo sapiens
gctcaagaagcataagcccaacttctgatgtgccagaaaccgccctgagatctgccggtcatctccatggacttctgcaccccattccatacccttcttcmcctggggtaccccttccagttttccccttgcttcccaggcccttgacatggcttacctgccttcactcccagcaccttgcccaacaggataagctggatc

SEQ ID NO: 477075 - DNA, 201 bp, Homo sapiens
tagtgagaacccttttcatattcctgattttgaaagaattgttgctggtgctgtggctcatgcctgtaatcccagcactttgggatgctgagatgggagamtctcttgagcccaggagtttgagagtttgaggggatctgcctgggcaacatagtgagactccatttcttttttttttttttttttttagacagagtctcc

SEQ ID NO: 477076 - DNA, 201 bp, Homo sapiens
tgctcccatacacccaaggcttgtttcttcccctgtaaaaaccactgcctcaatctctggttcactcaactagtcaccatgtcctgaggcatgaagcctcytcagctcttggaattgctggcaaggggtgactgcctctgagtcattgtgtttttcaaagtgatttcttttctgtagctttttgacctaagatctcagcaa

SEQ ID NO: 477077 - DNA, 201 bp, Homo sapiens
gcaatctcagctcactgcaagctccgcctcccgggttcatgccattcttcctgcctcagcctcccgagtagctgagactacaggtgcccagcaccatgccyggtattttttttgtattttgtatttttagtagagacggggggtttcaccatgttagccaggatggtcttgatctgacctcgtcatctgcccgccttggcc

SEQ ID NO: 477078 - DNA, 201 bp, Homo sapiens
tgtgtgtgagactgcatttaggcaactgtaataggttgaatttggttatttaatctctgtccaaaatcacatcacaaagatgccttgattatagaaagatmcttccttgcagcatattagttatttgacaccctcagtggatataagtgaatattttgagggaagaatagaaaagatacaatttttatttatttatttatt

SEQ ID NO: 477079 - DNA, 201 bp, Homo sapiens
gtcttactaccgctcttacctggggcggctcatgaaggtgcaggtaaggtcaggagggagaggtattcctgggcacatggactgggaggaggggacatccytgggcaaggaatattttattgtgttgtgggaagagacggttatcagttctcttttctctttccttagtatgaggaagtcgctgagaaagatgatctaatg

SEQ ID NO: 477080 - DNA, 201 bp, Homo sapiens
caccacgccgggctagtttttgtgtttttagtagagacgggatttcaccatgttagccaggcttgtcttgaactcctgacttcaagtgatcctcccacctkggcctcccaagtgctgggattacaggcgtgagctaccgtgcctgaccaagagactatcttttccccagtgtatgttcttggcacttttaccaaaaatgag

SEQ ID NO: 477081 - DNA, 201 bp, Homo sapiens
gggacttgtagctccactccggggaacggactcgccgggactgacagttgccggaagtgaggctgcggggaatggccgccgctgcgaccatggcggctgcsgcccgggaactggtgttgcgggctgggacctcagatatggaggaggaagagggcccgctggtgagagcgcggagctgtttctcctccgtagttccggtgc

SEQ ID NO: 477082 - DNA, 201 bp, Homo sapiens
cctgcccgggctgagctcatcaacattcaccaccttatggtggagctcaagaagcataagcccaacttctgatgtgccagaaaccgccctgagatctgccrgtcatctccatggacttctgcaccccattccatacccttcttcacctggggtaccccttccagttttccccttgcttcccaggcccttgacatggcttac

SEQ ID NO: 477083 - DNA, 201 bp, Homo sapiens
ctcactgcaacctctgcctcccaggttcaagtgattttcctgcctcagcctcccaagtagctgggattacaggtgcctgccaccacaaccagctaattttygtatttgtagtagagatggggtttcactgtgttggccaggctggtctcgaattcctgacctcgtgatctgcccgccatggcctcccacagtgctgggatt

SEQ ID NO: 477084 - DNA, 201 bp, Homo sapiens; identical to SEQ ID NO: 182309

SEQ ID NO: 477085 - DNA, 201 bp, Homo sapiens
ggtatatttgatcaaggacaagattaaatgttctgattggctaaccatcaaaccactgcctccactttttttccaacttgaaaataatatttagttatcaygctagcacagccatattaatatataccccttcaaaactttaaatataaagctttaaatgtttcaggaaaaagaaatattaatgatgctgagattggtggg

SEQ ID NO: 477086 - DNA, 201 bp, Homo sapiens
ttcgattattagtattattagctaatggtctttggcatgtttttgttttttatttctgttgagatatagcctttacatttgtacacaaatgtgactatgtmttggcaatgcacttcatacacaatgactaatctatactgtgatgatttgactcaaaaggagaaaagaaattatgtagttttcaattctgattcctattca

SEQ ID NO: 477087 - DNA, 201 bp, Homo sapiens
tgcttaacttccctccagaagaaagtaatctcttctactggagtggtcatgagtacttgatagagtcattagctagtgtccatctaaaaataaagaggaaraaaatatctttgtgaacaggaggaaaaagagcaaaagagaaaaggaaaaagactttacataaaaattattggattttaaatcttctgtaaacttaaaatg

SEQ ID NO: 477088 - DNA, 201 bp, Homo sapiens
tgaggcagctctcataggaaggtcacttgtaggtgttacatagtttcctcctttgtttgcatgaataatgaagatatgcaaaattttaaaggttaatgacttttttttttaattaattcaaccaagttatttatacctccttttgctagactaagaatgcaatagtaagcaaatatacagtccatgcttttacagaattaa

SEQ ID NO: 477089 - DNA, 201 bp, Homo sapiens
ttttcacttttttatgataaacagtatgttgtgtgtattttacaacaataaaaatacattcatacaaaacagtaatgttcatttcgaacacatacaaaatrgtatacattaaaattgttgtgtatgaagtgagaggggggtacatggggaaaaggcataagtgtgaaaaaaatgaatgaaatattttttactttttaatgc

SEQ ID NO: 477090 - DNA, 201 bp, Homo sapiens
tttgaatgcatgggtagaaaatatcatattttaaaactatgtatatttaaatttagtaattttctaatctctagaaatctctgctgttcaaaaggtggcarcactgaaagttgttttcctgttagatggcaagagcacaatgcccaaaatagaagatgcagttaagaataaggggccctgaatgtcatgaaggcttgaggt

SEQ ID NO: 477091 - DNA, 201 bp, Homo sapiens
cagttacactttgttagcagtaattgtaaaaacttaatttaaatcaatagttctgagtgcagtatggttctcacaaaatagcaattggaatgaatggtacrgtcatattctgttttgtctctactcatgcataaattttataaatctacacataaagtggtaaagattttgacatcctctgtgaaggctgttttaaatgta

SEQ ID NO: 477092 - DNA, 201 bp, Homo sapiens
taaaaaacctgggcagttcaggagaaaataattgattaaccacaaatgtaaaagcatataataaagaagtctagggagaaagcagttacactttgttagcrgtaattgtaaaaacttaatttaaatcaatagttctgagtgcagtatggttctcacaaaatagcaattggaatgaatggtacagtcatattctgttttgtc

SEQ ID NO: 477093 - DNA, 201 bp, Homo sapiens
gaaagtgaattctatcttgcaatgaacaaggaaggaaaactctatgcaaaggtattgataattgatagcttaggcttaatttttaaaactcatttttgtcraaatatctcacctttctgaaaagtaaaaatggaattaatttatctccaactgtataatttaatgattttattaaaacactttatactcaaacgttaagaa

SEQ ID NO: 477094 - DNA, 201 bp, Homo sapiens
tcttaagaatatcttagaaggtttgtattctgaaagttgcagtggctctttccagcaattagaatactatttattgcaatatttactgagcatatattacrtattatgtactgtgtatgcacagatacacaatgcaagcacccaccattgaaaaaattcagcctatgtgtggataccaacaccaaagagtcaatttcagta

SEQ ID NO: 477095 - DNA, 201 bp, Homo sapiens
atgaagcctaatgaagcagatctaagttgaatcaggaaccttcttagcctaatattctgctgctgactgcagaccaaggaccctttgtgcatatgttccgkggtctgtctcaaaggctagaaataaattgcaaatatctccagctttttaaatactctgcatgaatctatcattcaagaatcaatttaagccatcttgaat

SEQ ID NO: 477096 - DNA, 201 bp, Homo sapiens
tcaattataaataaagatacatgtaaacgagatcagatatccataaagattacttaactttagagatactgtcatcctgtgaattctaatgttaaaatttytgagttggaaaacaggtttttagaaatgtatggagggaacactccacagacatatgcaaagaaaatgtcatgctcaatcacaaactagactgtgatgcgc

SEQ ID NO: 477097 - DNA, 201 bp, Homo sapiens
ataatctatctttgtataattcatatttgggaatatggcttttaataatgttcttcccacaaataatcatgcttttttcctatggttacagcattaaactmtattttaagttgtttttgaactttattgttttgttatttaagtttatgttatttataaaaaaaaaaccttaataagctgtatctgtttcatatgctttta

SEQ ID NO: 477098 - DNA, 201 bp, Homo sapiens
ctggaacccggaaggcagaggtttcagtgagctgagattgtgccactgcactccagcctaggcgacacagtgagattccgtctcaaaaaaaaaaaaaaaawatccaaactcaactagctgcataagttcttaatggtctagccctgcctatatttcttatttcttttcctggaagttcgctgtgtataagttgcaagcaca

SEQ ID NO: 477099 - DNA, 201 bp, Homo sapiens
tgtaagtatttgctaacgctcttataagcacagaaatatcgttttttagactacttcaaactgatttgatgtggctcaacaaacaaggtttttgtttgttwtttgtttgtttgctttagagttactatttttatcctaggataaagctgatctttttcattggcggaggtgagacactttttaaaacctggctttgaataa

SEQ ID NO: 477100 - DNA, 201 bp, Homo sapiens
gtagaaatgcagtgacaagggtgtcatctagaaagaatgaaaagaaatacatccaagaactcaaacagcttgctgggagaaattccaggatgtaaggacaycaagggaactactgcagcccacctggaacatatttgttgtgtttgttccacatcttgtgcctgagatggttaccaattcatgtataatataaactgtttt

SEQ ID NO: 477101 - DNA, 201 bp, Homo sapiens
cagaaaggaagccaagaagaaaaattctaaagaggctagggaatccaaaccatcattaagaatatggcaaatgtgaggccggatacagtgactcgtgcctrtaatcccagcactttgggaggccgaggtgggtggatcacctgaggtcaggagttcgagactagcctggctaacatggcaaaacccctcctctactaaaaa

SEQ ID NO: 477102 - DNA, 201 bp, Homo sapiens
aaactctaatcagaaaaaaaattctcaaaaaaactattatgaaagtcaataaaatagataatttaacaaaagtacaggattagaacatgcttatacctatwaataagaacaaaatttctaatgctgctcaagtggaaagggtattgctaaaaggatgtttccaaaaatcttgtatataagatagcaacagtgattgatgat

SEQ ID NO: 477103 - DNA, 201 bp, Homo sapiens
gagtttctaacaattagaaaagaaaaaattaaaacatgaaatgataacaaaagtaaacaaaagatactttcaaagcagtgaacaaaacattttgacataarccataatataaattataatataaaaaataaaaaccatagtataaattgtcagcctttgagttggctacaaattcaatttaatgacagaagagaagggatg

SEQ ID NO: 477104 - DNA, 201 bp, Homo sapiens
gggaatatggcttttaataatgttcttcccacaaataatcatgcttttttcctatggttacagcattaaactctattttaagttgtttttgaactttattrttttgttatttaagtttatgttatttataaaaaaaaaaccttaataagctgtatctgtttcatatgcttttaattttaaaggaataacaaaactgtctgg

SEQ ID NO: 477105 - DNA, 201 bp, Homo sapiens
tgttcttcccacaaataatcatgcttttttcctatggttacagcattaaactctattttaagttgtttttgaactttattgttttgttatttaagtttatkttatttataaaaaaaaaaccttaataagctgtatctgtttcatatgcttttaattttaaaggaataacaaaactgtctggctcaacggcaagtttccctc

SEQ ID NO: 477106 - DNA, 201 bp, Homo sapiens
cacaaataatcatgcttttttcctatggttacagcattaaactctattttaagttgtttttgaactttattgttttgttatttaagtttatgttatttatwaaaaaaaaaccttaataagctgtatctgtttcatatgcttttaattttaaaggaataacaaaactgtctggctcaacggcaagtttccctcccttttctg

SEQ ID NO: 477107 - DNA, 201 bp, Homo sapiens
tgggccagcaaatcctggaaggcagacaaaaataagagcctgaagcaatgcttacaatagatgtctcacacagaacaatacaaatatgtaaaaaatctttyaccacatattcttgccaattaattggatcatataagtaaaatcattacaaatataagtatttacaggattttaaagttagaatatatttgaatgcatggg

SEQ ID NO: 477108 - DNA, 201 bp, Homo sapiens
taagaatatggcaaatgtgaggccggatacagtgactcgtgcctgtaatcccagcactttgggaggccgaggtgggtggatcacctgaggtcaggagttcragactagcctggctaacatggcaaaacccctcctctactaaaaatacaaaaattagctggtgtggtggcacaacctgtaattacagctactcaggaggct

SEQ ID NO: 477109 - DNA, 201 bp, Homo sapiens
agttaagaataaggggccctgaatgtcatgaaggcttgaggtcagcctacagataacaggattattacaaggatgaatttccacttcaaaagtctttcatwggcagatcttggtagcactttatatgttcaccaatgggaggtcaatatttatctaatttaaaaggtatgctaaccactgtggttttaatttcaaaatatt

SEQ ID NO: 477110 - DNA, 201 bp, Homo sapiens
ttaagaaaaatgtaaaggtgaggggaaaaaagtgggctggaagagatggtaattccatgtttttcaatttaaagccttacatttttcccaagaatcagttwttcttcttatgttaaaatatcagggttgtgttttgcatttaatggttatgatgaataaccaacttcaatagtattaaatgtaatggaataagatacacac

SEQ ID NO: 477111 - DNA, 201 bp, Homo sapiens
gtctttttgagagtgacaacagcatctcatgctttatgtaacaataatgagcatccagaaaagctagctgacattaggtaatttcttggctaggaagcagytgaacacaggtttgacagtttgctgagtggggagctgtggtcttcctgacacgtgtatcaagatctaaagggcagccagaaaagacgtatcaagctaact

SEQ ID NO: 477112 - DNA, 201 bp, Homo sapiens
cagcattgttgtcagctactctttattccacttctgtacagtatttattcaaccaagctgctgctttcaatgaaggtcacttgttccttcagggacacatrtactcccacctatcctttaattttgaatggtttgtcaggaaaatttactttctcttgagttgaaaaacttgacaggaagcaagaaataatacagtcctag

SEQ ID NO: 477113 - DNA, 201 bp, Homo sapiens
tggtaatacatttatagatgagagttatatgaaaaggctaggtcaacaaaaacaatagattcatttaattttcctgtggttgacctatacgaccaggatgyagaaaactagaaagaactgcccttcctcagatatactcttgggagagagcatgaatggtattctgaactatcacctgattcaaggactttgctagctagg

SEQ ID NO: 477114 - DNA, 201 bp, Homo sapiens
ggatagaggaaaatgttttgggagaggggcaatatgaacttattgtcatgactggaccaaaaagggaagatgtctgcctatcataattaataataactctrtcagtcaacatttatgttttacaattgttctgtaaaagaaaagccagcaaacattacagattccagtccctaataactgatcatgaaagacactctaaac

SEQ ID NO: 477115 - DNA, 201 bp, Homo sapiens
aaagggcagccagaaaagacgtatcaagctaactaaatgctgacacatgcaggaataaatgacagcaccggaagaaacttggaatccctcgtgacagtgamgttctggataagaaagtgaaagacatgacagcacaggtgttgttttcattttttcttctagttttatctcatgactttagaagtgaaaaaaaaaaaaagc

SEQ ID NO: 477116 - DNA, 201 bp, Homo sapiens
aacaatagattcatttaattttcctgtggttgacctatacgaccaggatgtagaaaactagaaagaactgcccttcctcagatatactcttgggagagagsatgaatggtattctgaactatcacctgattcaaggactttgctagctaggttttgaggtcaggcttcagtaactgtagtcttgtgagcatattgagggca

SEQ ID NO: 477117 - DNA, 201 bp, Homo sapiens
caaagatatgacaagaagagaatagaaagcttattatgcctcataagaaaagggctagaatcaaaacgtgtaacttcaaatgggtagaaaaaaagcacagwtgtaatgataaatagtagatggaaaagttacatgacattacagatgaagacatttcccaaatttgctaatgacaaataagagaaaggagtatctaatttt

SEQ ID NO: 477118 - DNA, 201 bp, Homo sapiens
aatagattcatttaattttcctgtggttgacctatacgaccaggatgtagaaaactagaaagaactgcccttcctcagatatactcttgggagagagcatraatggtattctgaactatcacctgattcaaggactttgctagctaggttttgaggtcaggcttcagtaactgtagtcttgtgagcatattgagggcagag

SEQ ID NO: 477119 - DNA, 201 bp, Homo sapiens
tgataaatagtagatggaaaagttacatgacattacagatgaagacatttcccaaatttgctaatgacaaataagagaaaggagtatctaattttttgggtaccatacattttaatatactcatgtatcagttatttgtgatttattccatgccaaattataaacagaattaaagtggctgaattaaaactcaccatttct

SEQ ID NO: 477120 - DNA, 201 bp, Homo sapiens
gttgacctatacgaccaggatgtagaaaactagaaagaactgcccttcctcagatatactcttgggagagagcatgaatggtattctgaactatcacctgwttcaaggactttgctagctaggttttgaggtcaggcttcagtaactgtagtcttgtgagcatattgagggcagaggaggacttagtttttcatatgtgtt

SEQ ID NO: 477121 - DNA, 201 bp, Homo sapiens
gataaatagtagatggaaaagttacatgacattacagatgaagacatttcccaaatttgctaatgacaaataagagaaaggagtatctaattttttgggtaccatacattttaatatactcatgtatcagttatttgtgatttattccatgccaaattataaacagaattaaagtggctgaattaaaactcaccatttctt

SEQ ID NO: 477122 - DNA, 201 bp, Homo sapiens
atggtattctgaactatcacctgattcaaggactttgctagctaggttttgaggtcaggcttcagtaactgtagtcttgtgagcatattgagggcagaggrggacttagtttttcatatgtgtttccttagtgcctagcagactatctgttcataatcagttttcagtgtgaattcactgaatgtttatagacaaaagaaa

SEQ ID NO: 477123 - DNA, 201 bp, Homo sapiens
ataaatagtagatggaaaagttacatgacattacagatgaagacatttcccaaatttgctaatgacaaataagagaaaggagtatctaattttttgggtaccatacattttaatatactcatgtatcagttatttgtgatttattccatgccaaattataaacagaattaaagtggctgaattaaaactcaccatttctta

SEQ ID NO: 477124 - DNA, 201 bp, Homo sapiens
taaatagtagatggaaaagttacatgacattacagatgaagacatttcccaaatttgctaatgacaaataagagaaaggagtatctaattttttgggtaccatacattttaatatactcatgtatcagttatttgtgatttattccatgccaaattataaacagaattaaagtggctgaattaaaactcaccatttcttaa

SEQ ID NO: 477125 - DNA, 201 bp, Homo sapiens
aaatagtagatggaaaagttacatgacattacagatgaagacatttcccaaatttgctaatgacaaataagagaaaggagtatctaattttttgggtaccatacattttaatatactcatgtatcagttatttgtgatttattccatgccaaattataaacagaattaaagtggctgaattaaaactcaccatttcttaag

SEQ ID NO: 477126 - DNA, 201 bp, Homo sapiens
tttcccaaatttgctaatgacaaataagagaaaggagtatctaattttttgggtaccatacattttaatatactcatgtatcagttatttgtgatttattccatgccaaattataaacagaattaaagtggctgaattaaaactcaccatttcttaagcaattgtatgtggaccactcatgtttccaaaggtacttggggg

SEQ ID NO: 477127 - DNA, 201 bp, Homo sapiens
cagcactgaaagttgttttcctgttagatggcaagagcacaatgcccaaaatagaagatgcagttaagaataaggggccctgaatgtcatgaaggcttgargtcagcctacagataacaggattattacaaggatgaatttccacttcaaaagtctttcattggcagatcttggtagcactttatatgttcaccaatggga

SEQ ID NO: 477128 - DNA, 201 bp, Homo sapiens
tgataatgattatttaaatattcctatctgcttataaaatggctgctataataataataatacagatgttgttatataaggtatatcagacctacaggctkctggcaggatttgtcagataatcaagccacactaactatggaaaatgagcagcattttaaatgctttctagtgaaaaattataatctacttaaactctaa

SEQ ID NO: 477129 - DNA, 201 bp, Homo sapiens
aacaaaagtaaacaaaagatactttcaaagcagtgaacaaaacattttgacataagccataatataaattataatataaaaaataaaaaccatagtataarttgtcagcctttgagttggctacaaattcaatttaatgacagaagagaagggatgctggaggtaaattcttagggtttctatctcatagagtttgctctt

SEQ ID NO: 477130 - DNA, 201 bp, Homo sapiens
ctagcagactatctgttcataatcagttttcagtgtgaattcactgaatgtttatagacaaaagaaaatacacactaaaactaatcttcattttaaaaggrtaaaacatgactatacagaaatttaaatagaaatagtgtatatacatataaaatacaagctatgttaggaccaaatgctctttgtctatggagttatact

SEQ ID NO: 477131 - DNA, 201 bp, Homo sapiens
ccaaatgctctttgtctatggagttatacttccatcaaattacatagcaatgctgaattaggcaaaaccaacatttagtggtaaatccattcctggtagtrtaagtcacctaaaaaagacttctagaaatatgtactttaattatttgtttttctcctatttttaaatttattatgcaaattttagaaaataaaatttgct

SEQ ID NO: 477132 - DNA, 201 bp, Homo sapiens
cggggtctctaactgtacttctgaccataggcctagtttatctggttcatattgaggcagctctcataggaaggtcacttgtaggtgttacatagtttcckcctttgtttgcatgaataatgaagatatgcaaaattttaaaggttaatgacttttttttttaattaattcaaccaagttatttatacctccttttgctag

SEQ ID NO: 477133 - DNA, 201 bp, Homo sapiens
ttaaatttattatgcaaattttagaaaataaaatttgctctagttacacacctttagaattctagaatattaaaactgtaaggggcctccatccctcttamtcatttgtagtctaggaaattgagattttgatacacctaaggtcacgcagctgggtagatatacagctgtcacaagagtctagatcagttagcacatgct

SEQ ID NO: 477134 - DNA, 201 bp, Homo sapiens
gcattaaagaaagatttgaaaagtatacacaaaaatcagatttagtaactaaaggttgtaaaaaattgtaaaactggttgtacaatcatgatgttagtaayagtaatttttttcttaaattaatttacccttaagagtatgttagatttgattatctgataatgattatttaaatattcctatctgcttataaaatggctg

SEQ ID NO: 477135 - DNA, 201 bp, Homo sapiens
tacatttgtacacaaatgtgactatgtcttggcaatgcacttcatacacaatgactaatctatactgtgatgatttgactcaaaaggagaaaagaaattaygtagttttcaattctgattcctattcaccttttgtttatgaatggaaagctttgtgcaaaatatacatataagcagagtaagccttttaaaaatgttctt

SEQ ID NO: 477136 - DNA, 201 bp, Homo sapiens
tcaatttagaaaagaatggtttgagtgcctccacaaacatatcaaatatgaatgccaggaatttagaaagatgagacagatttactcacagtttagttaaytcatccttttgtcatttaatgaagtcatgatgatgttcactattatataaataagttcattcattgtcatatgctgctaaatttataaccttaacaaacc

SEQ ID NO: 477137 - DNA, 201 bp, Homo sapiens
tgtttgttttaagacactgcattaaagaaagatttgaaaagtatacacaaaaatcagatttagtaactaaaggttgtaaaaaattgtaaaactggttgtamaatcatgatgttagtaacagtaatttttttcttaaattaatttacccttaagagtatgttagatttgattatctgataatgattatttaaatattcctat

SEQ ID NO: 477138 - DNA, 201 bp, Homo sapiens
ttctactaacattaccctaaacactgaataaaatcatgttaaaggtcaaatatgcaagcctgtggtttcctacactgatataaggctttcaaaaagtattycttgtaataataatttaggtggacaaagtgttattatataatccaccaggcccattgtaaataatcttgcactatattgttatttcttttgatacttgta

SEQ ID NO: 477139 - DNA, 201 bp, Homo sapiens
tatgtagttttcaattctgattcctattcaccttttgtttatgaatggaaagctttgtgcaaaatatacatataagcagagtaagccttttaaaaatgttmtttgaaagataaaattaaatacatgagtttctaacaattagaaaagaaaaaattaaaacatgaaatgataacaaaagtaaacaaaagatactttcaaagc

SEQ ID NO: 477140 - DNA, 201 bp, Homo sapiens
cctccacaaacatatcaaatatgaatgccaggaatttagaaagatgagacagatttactcacagtttagttaactcatccttttgtcatttaatgaagtcatgatgatgttcactattatataaataagttcattcattgtcatatgctgctaaatttataaccttaacaaaccattggttaacaagagaaagtataaaga

SEQ ID NO: 477141 - DNA, 201 bp, Homo sapiens
ttgtgcaaaatatacatataagcagagtaagccttttaaaaatgttctttgaaagataaaattaaatacatgagtttctaacaattagaaaagaaaaaatkaaaacatgaaatgataacaaaagtaaacaaaagatactttcaaagcagtgaacaaaacattttgacataagccataatataaattataatataaaaaata

SEQ ID NO: 477142 - DNA, 201 bp, Homo sapiens
ctccacaaacatatcaaatatgaatgccaggaatttagaaagatgagacagatttactcacagtttagttaactcatccttttgtcatttaatgaagtcatgatgatgttcactattatataaataagttcattcattgtcatatgctgctaaatttataaccttaacaaaccattggttaacaagagaaagtataaagaa

SEQ ID NO: 477143 - DNA, 201 bp, Homo sapiens
atataagcagagtaagccttttaaaaatgttctttgaaagataaaattaaatacatgagtttctaacaattagaaaagaaaaaattaaaacatgaaatgawaacaaaagtaaacaaaagatactttcaaagcagtgaacaaaacattttgacataagccataatataaattataatataaaaaataaaaaccatagtataa

SEQ ID NO: 477144 - DNA, 201 bp, Homo sapiens
tccacaaacatatcaaatatgaatgccaggaatttagaaagatgagacagatttactcacagtttagttaactcatccttttgtcatttaatgaagtcatgatgatgttcactattatataaataagttcattcattgtcatatgctgctaaatttataaccttaacaaaccattggttaacaagagaaagtataaagaac

SEQ ID NO: 477145 - DNA, 201 bp, Homo sapiens
taagcagagtaagccttttaaaaatgttctttgaaagataaaattaaatacatgagtttctaacaattagaaaagaaaaaattaaaacatgaaatgataamaaaagtaaacaaaagatactttcaaagcagtgaacaaaacattttgacataagccataatataaattataatataaaaaataaaaaccatagtataaatt

SEQ ID NO: 477146 - DNA, 201 bp, Homo sapiens
ttcttcagatcactacagtcctagtgccaagaatgggtctggcaataaacactcagtaaatacttgttaaataacttgtatgttacagaaaatattgtgayaatcatattggagttggtctcacgttttggaggggtataatgactctctaccccagcaatattttatttatggagcactatttacaaatagaagaataaa

SEQ ID NO: 477147 - DNA, 201 bp, Homo sapiens
tttctaacaattagaaaagaaaaaattaaaacatgaaatgataacaaaagtaaacaaaagatactttcaaagcagtgaacaaaacattttgacataagccrtaatataaattataatataaaaaataaaaaccatagtataaattgtcagcctttgagttggctacaaattcaatttaatgacagaagagaagggatgctg

SEQ ID NO: 477148 - DNA, 201 bp, Homo sapiens
tgacagacaggtaaatcaatgggacaaaacagtcaataaaaggtaaaagagaggcatcagtaaaaaaaggaatagaatgtttaataaataatgttgaaaawactagatagctatttcaaggaataaaatatcagttttcggcaggagcccccaacccctgggctggggaccggtactggtccatggcctgttaggaactag

SEQ ID NO: 477149 - DNA, 201 bp, Homo sapiens
tagaatgtttaataaataatgttgaaaatactagatagctatttcaaggaataaaatatcagttttcggcaggagcccccaacccctgggctggggaccgktactggtccatggcctgttaggaactaggcggcagagcaggagatgagctgcgggtgagcaagcattccacctcctgtcagattagctgtggcattagaa

SEQ ID NO: 477150 - DNA, 201 bp, Homo sapiens
attaaaacatgaaatgataacaaaagtaaacaaaagatactttcaaagcagtgaacaaaacattttgacataagccataatataaattataatataaaaaytaaaaaccatagtataaattgtcagcctttgagttggctacaaattcaatttaatgacagaagagaagggatgctggaggtaaattcttagggtttctat

SEQ ID NO: 477151 - DNA, 201 bp, Homo sapiens
tttaagcatagatacaatataataaattatcacaaaagatctatagaattggttacacaaaaattgatcagtttgattaattttttcaccctgcactccgrtagtgtatgattagtgaaacatgagaattaggaatagaacaaggagtgtgaagtgagccaaacagtgcataaaataaagtgttactgaaagaactcttgg

SEQ ID NO: 477152 - DNA, 201 bp, Homo sapiens
taggaatagaacaaggagtgtgaagtgagccaaacagtgcataaaataaagtgttactgaaagaactcttggatttggcaattaggagtttattcatgagyttgaagagagaacgccaataaagagattagaagttaggatgcaaaagttaaattgaagaaaaatgagcagattctggctacgtgttcaagaaagttggtg

SEQ ID NO: 477153 - DNA, 201 bp, Homo sapiens
taattcaagctctatctattcctcaaatcctccgttgaccacttgaccacttctttcttctgaattcctatttattttgctgttttgtttttttgtttttggtttttttttttttgcatttggcatatactgccaggtatcacttattttattttttctgtggaaaaagaaaatactaactgaatttttgtatatatttat

SEQ ID NO: 477154 - DNA, 201 bp, Homo sapiens
gctgagtaaataatcacattaaaaattttaaaaacttccgattaaaacagaaataagaacaaatggccattcgtggatcatttgcaaaactgaacgaatayttgacatgtctttctgtgattccttgcagatatcatggaaatcaggacagtggcagttggaattgtggcaatcaaaggggtggaaagtgaattctatctt

SEQ ID NO: 477155 - DNA, 201 bp, Homo sapiens
aatggccattcgtggatcatttgcaaaactgaacgaatatttgacatgtctttctgtgattccttgcagatatcatggaaatcaggacagtggcagttggrattgtggcaatcaaaggggtggaaagtgaattctatcttgcaatgaacaaggaaggaaaactctatgcaaaggtattgataattgatagcttaggcttaa

SEQ ID NO: 477156 - DNA, 201 bp, Homo sapiens
gtaaacaaaagatactttcaaagcagtgaacaaaacattttgacataagccataatataaattataatataaaaaataaaaaccatagtataaattgtcarcctttgagttggctacaaattcaatttaatgacagaagagaagggatgctggaggtaaattcttagggtttctatctcatagagtttgctcttctggttc

SEQ ID NO: 477157 - DNA, 201 bp, Homo sapiens
agtgaacaaaacattttgacataagccataatataaattataatataaaaaataaaaaccatagtataaattgtcagcctttgagttggctacaaattcartttaatgacagaagagaagggatgctggaggtaaattcttagggtttctatctcatagagtttgctcttctggttctctagactgccaaagaacataaag

SEQ ID NO: 477158 - DNA, 201 bp, Homo sapiens
aacattttgacataagccataatataaattataatataaaaaataaaaaccatagtataaattgtcagcctttgagttggctacaaattcaatttaatgamagaagagaagggatgctggaggtaaattcttagggtttctatctcatagagtttgctcttctggttctctagactgccaaagaacataaagatgtgcgag

SEQ ID NO: 477159 - DNA, 201 bp, Homo sapiens
tcagcctttgagttggctacaaattcaatttaatgacagaagagaagggatgctggaggtaaattcttagggtttctatctcatagagtttgctcttctgrttctctagactgccaaagaacataaagatgtgcgaggggacctagctgtagtaaaagcaatcctataacaagaaaaactctaaaacagtgccccttacga

SEQ ID NO: 477160 - DNA, 201 bp, Homo sapiens
taattctattagtttcattggctaactactgtgataagcctcatgaaggatgggttaggcaggggatggattttctaaacgagggtgtagggagggtaggyaatcagaatctccacagagtatgtgtagatttaaaaagcggtgattctgacactttatttcccgaaggatattttttgcccaacaatttctgcccccacc

SEQ ID NO: 477161 - DNA, 201 bp, Homo sapiens
tttgtatatatttattaatatccagataggatatcataattaaagtaatcagatcaagtttctaaaatattactggctcttgttttccattcccaaacacytgagagatactgtacacttaacaagtgaaacagtggtctgtatatccagtatttgtatcctacaatttccaaagtgtgtttttattatgaccttactcct

SEQ ID NO: 477162 - DNA, 201 bp, Homo sapiens
tgctggaggtaaattcttagggtttctatctcatagagtttgctcttctggttctctagactgccaaagaacataaagatgtgcgaggggacctagctgtrgtaaaagcaatcctataacaagaaaaactctaaaacagtgccccttacgattttctactgaaatttctctaatagtagaggtgtaaaataagaagttaga

SEQ ID NO: 477163 - DNA, 201 bp, Homo sapiens
taactcatgaaatattagaagtagaatgtccttcttaattttatttttattttattttttgagatggagtctcgcactgttgctcaggctagagtgcagtracacgatctcaactcactgcaacctctgcctcctaggttaaagcgattctcctgcctcagcctcccaagtaggtgggattacaggcacctgccaccatgt

SEQ ID NO: 477164 - DNA, 201 bp, Homo sapiens
tatttattaatatccagataggatatcataattaaagtaatcagatcaagtttctaaaatattactggctcttgttttccattcccaaacacctgagagakactgtacacttaacaagtgaaacagtggtctgtatatccagtatttgtatcctacaatttccaaagtgtgtttttattatgaccttactcctctttactg

SEQ ID NO: 477165 - DNA, 201 bp, Homo sapiens
ggttctctagactgccaaagaacataaagatgtgcgaggggacctagctgtagtaaaagcaatcctataacaagaaaaactctaaaacagtgccccttackattttctactgaaatttctctaatagtagaggtgtaaaataagaagttagagaataatgcaaagggggcccaccacagacggaacatttcttttctctta

SEQ ID NO: 477166 - DNA, 201 bp, Homo sapiens
accttactcctctttactgtccatatttcacaaaaagaagttatccattgggtaagaagatcttaatccattaccaaagacatttttaatagtaattaatmaatcacatatgttctatatattttggacataaataaataatgtaaaatgtcggtacaaatagtttctctacactcaatgatattatattattaaagtcag

SEQ ID NO: 477167 - DNA, 201 bp, Homo sapiens
atcctataacaagaaaaactctaaaacagtgccccttacgattttctactgaaatttctctaatagtagaggtgtaaaataagaagttagagaataatgcmaagggggcccaccacagacggaacatttcttttctcttaagactcatgtgatttttgcatcttactccataatatatttgtggttgcgttaatatgacaa

SEQ ID NO: 477168 - DNA, 201 bp, Homo sapiens
gctttgtatagttctatgagttctgacaaatgtatatcatgtatccactattacagtattacgcagaatagtttcactgatttaaaaatcccctgtgattsagcttttcatcctttttctgctctcctcaaggcccttgccaccactgatactactgtctctaaagttttgcctttgccagaatgtcatatggctggaatc

SEQ ID NO: 477169 - DNA, 201 bp, Homo sapiens
agagaataatgcaaagggggcccaccacagacggaacatttcttttctcttaagactcatgtgatttttgcatcttactccataatatatttgtggttgcrttaatatgacaatgtctgcaattaaacaccagtaagcaaaattgatacatcagaatgacttgcagggcttatcatgcagtttggtttacatccctactcc

SEQ ID NO: 477170 - DNA, 201 bp, Homo sapiens
tttcactgatttaaaaatcccctgtgattcagcttttcatcctttttctgctctcctcaaggcccttgccaccactgatactactgtctctaaagttttgyctttgccagaatgtcatatggctggaatcatacagtatgtggctttttcagactggtttctttcacttagcaatatgtacttaaggttccccttgtcttt

SEQ ID NO: 477171 - DNA, 201 bp, Homo sapiens
tttctcttaagactcatgtgatttttgcatcttactccataatatatttgtggttgcgttaatatgacaatgtctgcaattaaacaccagtaagcaaaatygatacatcagaatgacttgcagggcttatcatgcagtttggtttacatccctactccactgccatttacttgagcgtgaatgagacacaaaagattattt

SEQ ID NO: 477172 - DNA, 201 bp, Homo sapiens
ttggttgctttgcatccttgccagcatacagcactgttagttttttggagtttagtcacgctaatagttgtacagaggtatctcattgttgttttaatttkcaattcctttttaaataatttcaacttttattttagattcagggggtacatgtgcaggtctgttacctgggtatattgtgtgatactgaggtttgaggta

SEQ ID NO: 477173 - DNA, 201 bp, Homo sapiens
gcaaaattgatacatcagaatgacttgcagggcttatcatgcagtttggtttacatccctactccactgccatttacttgagcgtgaatgagacacaaaarattatttgcctcccataatccaactttacacataaataacacaaggctaaagaaaaccagaactcaaattcaccacgcataggagtgataacaaaaatat

SEQ ID NO: 477174 - DNA, 201 bp, Homo sapiens
ttcaacccttccctcatctactccccgccagtagtccccagtgtcagttgttgccatctttatgtccctaagtacccagtgtttagctcccacttataagkgaaaacatgcagtatttagttttctgttcatgtgttaatttgcttaggataatggcctccggctgcatccatgttgcaattctttaatgatctatgatat

SEQ ID NO: 477175 - DNA, 201 bp, Homo sapiens
ctttatgtccctaagtacccagtgtttagctcccacttataagggaaaacatgcagtatttagttttctgttcatgtgttaatttgcttaggataatggcytccggctgcatccatgttgcaattctttaatgatctatgatattgagcatcttttcatatgcttatttgccctttgtgtatctttagtgaggtgtccaga

SEQ ID NO: 477176 - DNA, 201 bp, Homo sapiens
ccactttttaactaggttttttttttcttattgttgtgttttcagtgttttttgtatatgttggatatattgatatattttttgcatatatgtatatgtcrgtgtattttagtgatgtaaaatgaatggaatctatagccttaaacataataaaaatatataatagttaagatttcccactcaacaatccaggcttgacag

SEQ ID NO: 477177 - DNA, 201 bp, Homo sapiens
aatccaactttacacataaataacacaaggctaaagaaaaccagaactcaaattcaccacgcataggagtgataacaaaaatatttaacagtcagtatggktgattactggccaatcagaatacatcactgatacatcgaaatggatgcaggccactatgactaacttgtgggtatcatttctatgatcaccctaaaacag

SEQ ID NO: 477178 - DNA, 201 bp, Homo sapiens
ttttttttttcttattgttgtgttttcagtgttttttgtatatgttggatatattgatatattttttgcatatatgtatatgtcggtgtattttagtgatrtaaaatgaatggaatctatagccttaaacataataaaaatatataatagttaagatttcccactcaacaatccaggcttgacagaaaatcataaaatgta

SEQ ID NO: 477179 - DNA, 201 bp, Homo sapiens
aactttacacataaataacacaaggctaaagaaaaccagaactcaaattcaccacgcataggagtgataacaaaaatatttaacagtcagtatgggtgatyactggccaatcagaatacatcactgatacatcgaaatggatgcaggccactatgactaacttgtgggtatcatttctatgatcaccctaaaacagagttg

SEQ ID NO: 477180 - DNA, 201 bp, Homo sapiens
aataacacaaggctaaagaaaaccagaactcaaattcaccacgcataggagtgataacaaaaatatttaacagtcagtatgggtgattactggccaatcaraatacatcactgatacatcgaaatggatgcaggccactatgactaacttgtgggtatcatttctatgatcaccctaaaacagagttgggaaaatatctat

SEQ ID NO: 477181 - DNA, 201 bp, Homo sapiens
gtatttacaggattttaaagttagaatatatttgaatgcatgggtagaaaatatcatattttaaaactatgtatatttaaatttagtaattttctaatctytagaaatctctgctgttcaaaaggtggcagcactgaaagttgttttcctgttagatggcaagagcacaatgcccaaaatagaagatgcagttaagaataa

SEQ ID NO: 477182 - DNA, 201 bp, Homo sapiens
acaaggctaaagaaaaccagaactcaaattcaccacgcataggagtgataacaaaaatatttaacagtcagtatgggtgattactggccaatcagaatacrtcactgatacatcgaaatggatgcaggccactatgactaacttgtgggtatcatttctatgatcaccctaaaacagagttgggaaaatatctattaactg

SEQ ID NO: 477183 - DNA, 201 bp, Homo sapiens
caaaattgatacatcagaatgacttgcagggcttatcatgcagtttggtttacatccctactccactgccatttacttgagcgtgaatgagacacaaaagrttatttgcctcccataatccaactttacacataaataacacaaggctaaagaaaaccagaactcaaattcaccacgcataggagtgataacaaaaatatt

SEQ ID NO: 477184 - DNA, 201 bp, Homo sapiens
aattgatacatcagaatgacttgcagggcttatcatgcagtttggtttacatccctactccactgccatttacttgagcgtgaatgagacacaaaagattmtttgcctcccataatccaactttacacataaataacacaaggctaaagaaaaccagaactcaaattcaccacgcataggagtgataacaaaaatatttaa

SEQ ID NO: 477185 - DNA, 201 bp, Homo sapiens
aagtaaaagggacccaagagatgaagaataattacagtaagtaattttaagtactgctcatgaaccttagcaatctgttaatggatcaattttcaggtgayatgttttctcatcttccttttgcttcttggaaaaaaaattaaataaaatgtcacctaatttctctaaattgaactatgttgaactatgcccctaaaaata

SEQ ID NO: 477186 - DNA, 201 bp, Homo sapiens
tacatcagaatgacttgcagggcttatcatgcagtttggtttacatccctactccactgccatttacttgagcgtgaatgagacacaaaagattatttgcytcccataatccaactttacacataaataacacaaggctaaagaaaaccagaactcaaattcaccacgcataggagtgataacaaaaatatttaacagtca

SEQ ID NO: 477187 - DNA, 201 bp, Homo sapiens
tgaggatgatgtggaatcagttctcttgttgcaggacatttcagttatacttgataccagcaattatgcaatcatgtggaactattttgaatttcatgctratttgaggggaattatactttctgggtttcagtaataatttatctacttgtgtttctttcttgcaggcttcaattagttttctaatttcttttagtgtat

SEQ ID NO: 477188 - DNA, 201 bp, Homo sapiens
ctcccataatccaactttacacataaataacacaaggctaaagaaaaccagaactcaaattcaccacgcataggagtgataacaaaaatatttaacagtcrgtatgggtgattactggccaatcagaatacatcactgatacatcgaaatggatgcaggccactatgactaacttgtgggtatcatttctatgatcaccct

SEQ ID NO: 477189 - DNA, 201 bp, Homo sapiens
ttggctaaccatcaaaccactgcctccactttttttccaacttgaaaataatatttagttatcatgctagcacagccatattaatatataccccttcaaamctttaaatataaagctttaaatgtttcaggaaaaagaaatattaatgatgctgagattggtgggcatggattctgtgtagtgagacactaaaaagtaatt

SEQ ID NO: 477190 - DNA, 201 bp, Homo sapiens
agaaaaccagaactcaaattcaccacgcataggagtgataacaaaaatatttaacagtcagtatgggtgattactggccaatcagaatacatcactgatayatcgaaatggatgcaggccactatgactaacttgtgggtatcatttctatgatcaccctaaaacagagttgggaaaatatctattaactggtctctctgg

SEQ ID NO: 477191 - DNA, 201 bp, Homo sapiens
ttatgaaagattttagagaatttttttaaaaagtaattgcaatttagatcaaagtttcccatttttcattccaagtgtgatacaggtttaaataataaacmgacaaaaaggtttagataaattcatgaattattgaaccagaggataaaaaatagggaagctatttagggcatagtctctagtgtgtaagggtgacatcct

SEQ ID NO: 477192 - DNA, 201 bp, Homo sapiens
cagaatacatcactgatacatcgaaatggatgcaggccactatgactaacttgtgggtatcatttctatgatcaccctaaaacagagttgggaaaatatcwattaactggtctctctggtttgaattctcaatatgtatcttaatatgaaatagctcattaaaacttcatgtgtaactatttcagcattgttgtcagctac

SEQ ID NO: 477193 - DNA, 201 bp, Homo sapiens
atgaatttcttcagtatttttcattttattagtacaaatttaacctaatagtattcttctgcatgttatttccctttgtgcttcctttactgcaatgaagytgtagttaccaaatagagtgctctaaaagggcaaggcttgtctgtgaattaagcctagcatagaattggctctcagtgaagatgtgttgaacgttacatg

SEQ ID NO: 477194 - DNA, 201 bp, Homo sapiens
aaccagaggataaaaaatagggaagctatttagggcatagtctctagtgtgtaagggtgacatcctaaataataaatttgtgctattattgacaatattgytgacaaggctaaatggtcaatgtgcttgacatattgcctggtttttcatgttctattgcatgagctgattctctctctcttttatttatatttttgaact

SEQ ID NO: 477195 - DNA, 201 bp, Homo sapiens
cagagttgggaaaatatctattaactggtctctctggtttgaattctcaatatgtatcttaatatgaaatagctcattaaaacttcatgtgtaactatttsagcattgttgtcagctactctttattccacttctgtacagtatttattcaaccaagctgctgctttcaatgaaggtcacttgttccttcagggacacata

SEQ ID NO: 477196 - DNA, 201 bp, Homo sapiens
gaagttgtagttaccaaatagagtgctctaaaagggcaaggcttgtctgtgaattaagcctagcatagaattggctctcagtgaagatgtgttgaacgttwcatgaatgcatcaacatcataatccttcatgtgcttgtaagcaattattaaaattttctctagcctattcaggcctgtgttcttcaaaattcttcaaaat

SEQ ID NO: 477197 - DNA, 201 bp, Homo sapiens
atggtcaatgtgcttgacatattgcctggtttttcatgttctattgcatgagctgattctctctctcttttatttatatttttgaactctaccattatgcyatcatggacattatgtcaacaatttgatgcatctatgtaatatgctttaaatctttggaaataaatttactgggtgctacttaatgtgaacaaacttctc

SEQ ID NO: 477198 - DNA, 201 bp, Homo sapiens
ttgggaaaatatctattaactggtctctctggtttgaattctcaatatgtatcttaatatgaaatagctcattaaaacttcatgtgtaactatttcagcaytgttgtcagctactctttattccacttctgtacagtatttattcaaccaagctgctgctttcaatgaaggtcacttgttccttcagggacacatatactc

SEQ ID NO: 477199 - DNA, 201 bp, Homo sapiens
tagaaaatagggttgataagctactgattctgccaacactgcttaatgctcttcccaagcaattgtcttttagatatgttgatttcccagtgttaatggtrttttttaaatatgtcaagcaattaagaatataagtctattctcatctcagttaaacgtagaatctttacaaagaatttttggtatccttaaccctaatat

SEQ ID NO: 477200 - DNA, 201 bp, Homo sapiens
tagctcattaaaacttcatgtgtaactatttcagcattgttgtcagctactctttattccacttctgtacagtatttattcaaccaagctgctgctttcartgaaggtcacttgttccttcagggacacatatactcccacctatcctttaattttgaatggtttgtcaggaaaatttactttctcttgagttgaaaaact

SEQ ID NO: 477201 - DNA, 201 bp, Homo sapiens
agcaattgtcttttagatatgttgatttcccagtgttaatggtattttttaaatatgtcaagcaattaagaatataagtctattctcatctcagttaaacrtagaatctttacaaagaatttttggtatccttaaccctaatatgtggagggataagattaaaaatgttcatcaccttatttttatttatttatttatcta

SEQ ID NO: 477202 - DNA, 201 bp, Homo sapiens
ggacacatatactcccacctatcctttaattttgaatggtttgtcaggaaaatttactttctcttgagttgaaaaacttgacaggaagcaagaaataatayagtcctagcctctttccaataacatctgatttctccattctcaaactacacttctcaaggaaccagatatttactctcatctgggaagatgcctcttatg

SEQ ID NO: 477203 - DNA, 201 bp, Homo sapiens
ccaggttagtattgaattcctgacctcaagtgttccgcctgactcggcctcccaaagtgctgggattacaggtgtgagctaccacatccagccatcccctytgtaaagtgcagtaaagaaacagtgggcaatagacaggcaggggatagaggaaaatgttttgggagaggggcaatatgaacttattgtcatgactggacc

SEQ ID NO: 477204 - DNA, 201 bp, Homo sapiens
tttggaggtattgcaaatatgttgaatcaatgaatttcttcagtatttttcattttattagtacaaatttaacctaatagtattcttctgcatgttatttycctttgtgcttcctttactgcaatgaagttgtagttaccaaatagagtgctctaaaagggcaaggcttgtctgtgaattaagcctagcatagaattggct

SEQ ID NO: 477205 - DNA, 201 bp, Homo sapiens
agtaactgggattacagacacccaccatcatgcctggctaatttttgtatttttagtagagatggggtttcaccatatttgccaggctggtcttgaactcytgacctcaggtgatccacccgcgttggcctcccaaagtgctgggattacaggcgtgagccactgcgctccgcccatagttaacacttctataaatatttg

SEQ ID NO: 477206 - DNA, 201 bp, Homo sapiens
aacgttacatgaatgcatcaacatcataatccttcatgtgcttgtaagcaattattaaaattttctctagcctattcaggcctgtgttcttcaaaattctkcaaaatatatggacgtgtttgctgtttctattaggttttaacttctggtgtcagaaaccagggctgtttttcttaatttgtgtcctaaaaccacagtagg

SEQ ID NO: 477207 - DNA, 201 bp, Homo sapiens
tctagcctattcaggcctgtgttcttcaaaattcttcaaaatatatggacgtgtttgctgtttctattaggttttaacttctggtgtcagaaaccagggcwgtttttcttaatttgtgtcctaaaaccacagtagggttgtatgcattgtgataatgcttaataaatatataaaagattaatatccattcatttgcatttt

SEQ ID NO: 477208 - DNA, 201 bp, Homo sapiens
tgggtagatatacagctgtcacaagagtctagatcagttagcacatgctttctactcttcgattattagtattattagctaatggtctttggcatgttttkgttttttatttctgttgagatatagcctttacatttgtacacaaatgtgactatgtcttggcaatgcacttcatacacaatgactaatctatactgtgat

SEQ ID NO: 477209 - DNA, 201 bp, Homo sapiens
aaatattagctgggctacattaaatcccaatgacatgaatagaaattttattatccaggtagcaaaaatgaagtaaaaaaaataaataagagaatgaagtraaggtatggggcaaaacaattagttttttctttaagtcaatattttagaaaatagtttttgaaggcccaatcacacagataattgacactttgacttttc

SEQ ID NO: 477210 - DNA, 201 bp, Homo sapiens
ttagcacatgctttctactcttcgattattagtattattagctaatggtctttggcatgtttttgttttttatttctgttgagatatagcctttacatttstacacaaatgtgactatgtcttggcaatgcacttcatacacaatgactaatctatactgtgatgatttgactcaaaaggagaaaagaaattatgtagttt

SEQ ID NO: 477211 - DNA, 201 bp, Homo sapiens
caaaatactatcagtttaaaacaatcttttttttaaggcagtaggctctgtttaccatcatttacacttgctttaattagaattttcttcactttcagtayattcaagagctattctgttggcaataatttttaagataaagtttatccaaatagaaaagtaattatataatgattaagagccagaatgtctgggttcaaa

SEQ ID NO: 477212 - DNA, 201 bp, Homo sapiens
ttaactgacctctaaggatccttccagctctaaaattccatgtgcattttagatatttaaaatccaaaatttccatttgccagtattaaagctctttttgytaaagttcacccaatttgcacattgctgacatgaaaattcttgggaaaaaatcttgaaatgtttagttcattcatcaacatcaatctcacaatcatgggc

SEQ ID NO: 477213 - DNA, 201 bp, Homo sapiens
actgatacatcgaaatggatgcaggccactatgactaacttgtgggtatcatttctatgatcaccctaaaacagagttgggaaaatatctattaactggtmtctctggtttgaattctcaatatgtatcttaatatgaaatagctcattaaaacttcatgtgtaactatttcagcattgttgtcagctactctttattcca

SEQ ID NO: 477214 - DNA, 201 bp, Homo sapiens
cactgatacatcgaaatggatgcaggccactatgactaacttgtgggtatcatttctatgatcaccctaaaacagagttgggaaaatatctattaactggwctctctggtttgaattctcaatatgtatcttaatatgaaatagctcattaaaacttcatgtgtaactatttcagcattgttgtcagctactctttattcc

SEQ ID NO: 477215 - DNA, 201 bp, Homo sapiens
tggcctgttaggaactaggcggcagagcaggagatgagctgcgggtgagcaagcattccacctcctgtcagattagctgtggcattagaatctcataggarcgtgaaccctattgtgaactgcatatgccagggatctaggttgcgtgctccgtacgaaaatctcactaatgcctgacgatttgaagtggaacagtttcat

SEQ ID NO: 477216 - DNA, 201 bp, Homo sapiens
actctttcttaaatcaatctacaattcacagataggaagaggtcaatgacctaggagtaacaatcaactcaagattcattttcattatgttattcatgaamacccggagcactacactataatgcacaaatggatactgacatggatcctgccaactttgctctacagatcatgctttcacattatctgtctagtgggtac

SEQ ID NO: 477217 - DNA, 201 bp, Homo sapiens
ataatacagtcctagcctctttccaataacatctgatttctccattctcaaactacacttctcaaggaaccagatatttactctcatctgggaagatgcckcttatgttttccttttacttcctggttatcatgtggttgcattttccaagttcttatcattgaatttatgagagcctatcaaaatttattttctttcatt

SEQ ID NO: 477218 - DNA, 201 bp, Homo sapiens
atttgcattttcttaataaaacccaatttctagatgagtagctgtgaaactctcaactggacgagctctgactagtgttaagtatagtatattgggaaaarggcttctatatgcaacatatatgtgaggcaaatgacaaatattagctgggctacattaaatcccaatgacatgaatagaaattttattatccaggtagca

SEQ ID NO: 477219 - DNA, 201 bp, Homo sapiens
tgacatgaatagaaattttattatccaggtagcaaaaatgaagtaaaaaaaataaataagagaatgaagtgaaggtatggggcaaaacaattagttttttmtttaagtcaatattttagaaaatagtttttgaaggcccaatcacacagataattgacactttgacttttctttgcactgtgttagacataggtaaaagaa

SEQ ID NO: 477220 - DNA, 201 bp, Homo sapiens
gaatgaagtgaaggtatggggcaaaacaattagttttttctttaagtcaatattttagaaaatagtttttgaaggcccaatcacacagataattgacactwtgacttttctttgcactgtgttagacataggtaaaagaatgtctcaggactgtaccttcatgtagaaaatgtaattaatagcaaattgcataaaagtaca

SEQ ID NO: 477221 - DNA, 201 bp, Homo sapiens
ttttagaaaatagtttttgaaggcccaatcacacagataattgacactttgacttttctttgcactgtgttagacataggtaaaagaatgtctcaggactrtaccttcatgtagaaaatgtaattaatagcaaattgcataaaagtacattaaaattttaattattacatcattttaataaatatcttgagattttacttt

SEQ ID NO: 477222 - DNA, 201 bp, Homo sapiens
ataattgacactttgacttttctttgcactgtgttagacataggtaaaagaatgtctcaggactgtaccttcatgtagaaaatgtaattaatagcaaattrcataaaagtacattaaaattttaattattacatcattttaataaatatcttgagattttactttatttagtgtgtcattaaaacacaggatttaaggaag

SEQ ID NO: 477223 - DNA, 201 bp, Homo sapiens
ctttgacttttctttgcactgtgttagacataggtaaaagaatgtctcaggactgtaccttcatgtagaaaatgtaattaatagcaaattgcataaaagtrcattaaaattttaattattacatcattttaataaatatcttgagattttactttatttagtgtgtcattaaaacacaggatttaaggaagatatatataa

SEQ ID NO: 477224 - DNA, 201 bp, Homo sapiens
taattaatagcaaattgcataaaagtacattaaaattttaattattacatcattttaataaatatcttgagattttactttatttagtgtgtcattaaaayacaggatttaaggaagatatatataataaaggaaaatagtaagttaccattcttgtgtaaacacattttgtaaatactatttcaacaaagatttaaaagt

SEQ ID NO: 477225 - DNA, 201 bp, Homo sapiens
tgcataaaagtacattaaaattttaattattacatcattttaataaatatcttgagattttactttatttagtgtgtcattaaaacacaggatttaaggamgatatatataataaaggaaaatagtaagttaccattcttgtgtaaacacattttgtaaatactatttcaacaaagatttaaaagttaattacaaaggtat

SEQ ID NO: 477226 - DNA, 201 bp, Homo sapiens
taataaatatcttgagattttactttatttagtgtgtcattaaaacacaggatttaaggaagatatatataataaaggaaaatagtaagttaccattcttrtgtaaacacattttgtaaatactatttcaacaaagatttaaaagttaattacaaaggtataaagttatgaagtattatataaacaggattcataattttg

SEQ ID NO: 477227 - DNA, 201 bp, Homo sapiens
taaatatcttgagattttactttatttagtgtgtcattaaaacacaggatttaaggaagatatatataataaaggaaaatagtaagttaccattcttgtgyaaacacattttgtaaatactatttcaacaaagatttaaaagttaattacaaaggtataaagttatgaagtattatataaacaggattcataattttgttt

SEQ ID NO: 477228 - DNA, 201 bp, Homo sapiens
ttgacttttctttgcactgtgttagacataggtaaaagaatgtctcaggactgtaccttcatgtagaaaatgtaattaatagcaaattgcataaaagtacrttaaaattttaattattacatcattttaataaatatcttgagattttactttatttagtgtgtcattaaaacacaggatttaaggaagatatatataata

SEQ ID NO: 477229 - DNA, 201 bp, Homo sapiens
aatgtaaaagcatataataaagaagtctagggagaaagcagttacactttgttagcagtaattgtaaaaacttaatttaaatcaatagttctgagtgcagyatggttctcacaaaatagcaattggaatgaatggtacagtcatattctgttttgtctctactcatgcataaattttataaatctacacataaagtggtaa

SEQ ID NO: 477230 - DNA, 201 bp, Homo sapiens
taacaaaaatatttaacagtcagtatgggtgattactggccaatcagaatacatcactgatacatcgaaatggatgcaggccactatgactaacttgtggrtatcatttctatgatcaccctaaaacagagttgggaaaatatctattaactggtctctctggtttgaattctcaatatgtatcttaatatgaaatagctc

SEQ ID NO: 477231 - DNA, 201 bp, Homo sapiens
agatcagttagcacatgctttctactcttcgattattagtattattagctaatggtctttggcatgtttttgttttttatttctgttgagatatagccttyacatttgtacacaaatgtgactatgtcttggcaatgcacttcatacacaatgactaatctatactgtgatgatttgactcaaaaggagaaaagaaattat

SEQ ID NO: 477232 - DNA, 201 bp, Homo sapiens
aaattacatagcaatgctgaattaggcaaaaccaacatttagtggtaaatccattcctggtagtataagtcacctaaaaaagacttctagaaatatgtacyttaattatttgtttttctcctatttttaaatttattatgcaaattttagaaaataaaatttgctctagttacacacctttagaattctagaatattaaaa

SEQ ID NO: 477233 - DNA, 201 bp, Homo sapiens
ttccctcccttttctgactgacactaagtctagcacacagcacttgggccagcaaatcctggaaggcagacaaaaataagagcctgaagcaatgcttacartagatgtctcacacagaacaatacaaatatgtaaaaaatctttcaccacatattcttgccaattaattggatcatataagtaaaatcattacaaatataa

SEQ ID NO: 477234 - DNA, 201 bp, Homo sapiens
ctgattcctattcaccttttgtttatgaatggaaagctttgtgcaaaatatacatataagcagagtaagccttttaaaaatgttctttgaaagataaaatyaaatacatgagtttctaacaattagaaaagaaaaaattaaaacatgaaatgataacaaaagtaaacaaaagatactttcaaagcagtgaacaaaacattt

SEQ ID NO: 477235 - DNA, 201 bp, Homo sapiens
agtaagagtatgtttagtttttaagaaactgccaaactgtcttcccatgtgactgcaccattttgcattcccactagtaatgaaagagttttggttgcttygcatccttgccagcatacagcactgttagttttttggagtttagtcacgctaatagttgtacagaggtatctcattgttgttttaatttgcaattccttt

SEQ ID NO: 477236 - DNA, 201 bp, Homo sapiens
cacgcagctgggtagatatacagctgtcacaagagtctagatcagttagcacatgctttctactcttcgattattagtattattagctaatggtctttggyatgtttttgttttttatttctgttgagatatagcctttacatttgtacacaaatgtgactatgtcttggcaatgcacttcatacacaatgactaatctat

SEQ ID NO: 477237 - DNA, 201 bp, Homo sapiens
tactactctatttagtaattattttttacgagactagttgataaaaatgaccactgcttataaaaatattgatctgctatccagaacaataaagcaattcrtttgattgtccttcatttctattaaaaaacacacaaaatctactgtcatataactaatactcaactaatatatcttccttctctagtgatataaatacaa

SEQ ID NO: 477238 - DNA, 201 bp, Homo sapiens
tttcttaaatcaatctacaattcacagataggaagaggtcaatgacctaggagtaacaatcaactcaagattcattttcattatgttattcatgaacaccyggagcactacactataatgcacaaatggatactgacatggatcctgccaactttgctctacagatcatgctttcacattatctgtctagtgggtactata

SEQ ID NO: 477239 - DNA, 201 bp, Homo sapiens
tcttgagattttactttatttagtgtgtcattaaaacacaggatttaaggaagatatatataataaaggaaaatagtaagttaccattcttgtgtaaacayattttgtaaatactatttcaacaaagatttaaaagttaattacaaaggtataaagttatgaagtattatataaacaggattcataattttgttttaaatg

SEQ ID NO: 477240 - DNA, 201 bp, Homo sapiens
tcagttttcagtgtgaattcactgaatgtttatagacaaaagaaaatacacactaaaactaatcttcattttaaaagggtaaaacatgactatacagaaayttaaatagaaatagtgtatatacatataaaatacaagctatgttaggaccaaatgctctttgtctatggagttatacttccatcaaattacatagcaatg

SEQ ID NO: 477241 - DNA, 201 bp, Homo sapiens
cctacaacaaattcaaaaactctcttagaatcagaacacctgtaattagtatgtttattccatgaattttctgaacctcctagtccatgtgttgtacattyttgcagtgctgttttctttcttttcttttttttgagatataagagtgaaaagagattttttaaatgaacctgcatttcagcattgtgttaagtgcttttc

SEQ ID NO: 477242 - DNA, 201 bp, Homo sapiens
aagttatgaagtattatataaacaggattcataattttgttttaaatggtcttttaatgtatcaaaatactatcagtttaaaacaatcttttttttaaggyagtaggctctgtttaccatcatttacacttgctttaattagaattttcttcactttcagtatattcaagagctattctgttggcaataatttttaagata

SEQ ID NO: 477243 - DNA, 201 bp, Homo sapiens
atgctgctcaagtggaaagggtattgctaaaaggatgtttccaaaaatcttgtatataagatagcaacagtgattgatgataatactgtacttcatcttayttgccacaaaataacattttataaatcctcaaagtaaaattgagaaatctttaagtttttttcaagtaacataatctatctttgtataattcatatttgg

SEQ ID NO: 477244 - DNA, 201 bp, Homo sapiens
tgcaggtctcattatctcaaaaggcaattagttcctcaaagatagagagctaacaatttattttttgtattccctgtaaaaatccatgcacaatgttagayactgagtaggtatacagtcaataactctgcttcattttatgcagatttgaaaaacattaaatacatattccttggccatcatccaaactataaaaagagg

SEQ ID NO: 477245 - DNA, 201 bp, Homo sapiens
tcaagagctattctgttggcaataatttttaagataaagtttatccaaatagaaaagtaattatataatgattaagagccagaatgtctgggttcaaattmcagttctgctacttatcaggtataagaatttgggcaaatttcttagtttctctgtgcttcagtttcctgatctgtaaaactgggataacaagactacctg

SEQ ID NO: 477246 - DNA, 201 bp, Homo sapiens
agtccagtctcataattctcttttccagcatgggcaaatataatttctaacataatttgttaaaaagtctctactgattctattttaactttgtatctttsattcattgtgcatgatccactttcgttggcacagaactggaaagtatagagtagggaggtaagggtaggctacagtaactcttaccaagaagaggaaagc

SEQ ID NO: 477247 - DNA, 201 bp, Homo sapiens
taatgattaagagccagaatgtctgggttcaaattccagttctgctacttatcaggtataagaatttgggcaaatttcttagtttctctgtgcttcagttycctgatctgtaaaactgggataacaagactacctgtctcaatctgtggttatgagtaaatgagttaatacataagagcaatgcaataatccttggcatgt

SEQ ID NO: 477248 - DNA, 201 bp, Homo sapiens
attaagttaaaatacaactttgaaagataagatatgatatatcagattatgaaagcagcttagactagtgaagactttggcatgtatagaaaggatgactrtattctgaaagattattgataaattataaacgatattacattcaaaataaataaatacattttattctctaggtcctaaggcactttatacattcaattt

SEQ ID NO: 477249 - DNA, 201 bp, Homo sapiens
agtttcctgatctgtaaaactgggataacaagactacctgtctcaatctgtggttatgagtaaatgagttaatacataagagcaatgcaataatccttggmatgtggtatgagttcaataaacattagctattattattatagtaaattagaaatttaattctagagaataaaaagctgaactcaaatatgtaactattta

SEQ ID NO: 477250 - DNA, 201 bp, Homo sapiens
tagatcagtactacaatctcttcactggtcttgcctcttgccaatttatctcccacactgctgctagaagtatttttctaaacttttcagtggcttaccawcctctacagaataaaaattcaaattcggccaggcacagtggctcacacctgtaatcccagcactctgggaggctgaggtgggtggatcacctgaaatcag

SEQ ID NO: 477251 - DNA, 201 bp, Homo sapiens
aaaactgggataacaagactacctgtctcaatctgtggttatgagtaaatgagttaatacataagagcaatgcaataatccttggcatgtggtatgagttmaataaacattagctattattattatagtaaattagaaatttaattctagagaataaaaagctgaactcaaatatgtaactatttatttgatacagacaca

SEQ ID NO: 477252 - DNA, 201 bp, Homo sapiens
tcaataaacattagctattattattatagtaaattagaaatttaattctagagaataaaaagctgaactcaaatatgtaactatttatttgatacagacayattttctacaaaataaaaaaccatcggtttgcacttcccttatataatgactatcttggtgtttgtgtgtatctgttgtgggtcaggggtcttgggctga

SEQ ID NO: 477253 - DNA, 201 bp, Homo sapiens
tggaatagattctgaggaaaggcaaggcagcttctgtaaggggaaaattgtaagtatttgctaacgctcttataagcacagaaatatcgttttttagactwcttcaaactgatttgatgtggctcaacaaacaaggtttttgtttgttttttgtttgtttgctttagagttactatttttatcctaggataaagctgatct

SEQ ID NO: 477254 - DNA, 201 bp, Homo sapiens
tagtaaattagaaatttaattctagagaataaaaagctgaactcaaatatgtaactatttatttgatacagacacattttctacaaaataaaaaaccatcrgtttgcacttcccttatataatgactatcttggtgtttgtgtgtatctgttgtgggtcaggggtcttgggctgagtaaataatcacattaaaaattttaa

SEQ ID NO: 477255 - DNA, 201 bp, Homo sapiens
tatgtaactatttatttgatacagacacattttctacaaaataaaaaaccatcggtttgcacttcccttatataatgactatcttggtgtttgtgtgtatstgttgtgggtcaggggtcttgggctgagtaaataatcacattaaaaattttaaaaacttccgattaaaacagaaataagaacaaatggccattcgtggat

SEQ ID NO: 477256 - DNA, 201 bp, Homo sapiens
cattttctacaaaataaaaaaccatcggtttgcacttcccttatataatgactatcttggtgtttgtgtgtatctgttgtgggtcaggggtcttgggctgwgtaaataatcacattaaaaattttaaaaacttccgattaaaacagaaataagaacaaatggccattcgtggatcatttgcaaaactgaacgaatatttga

SEQ ID NO: 477257 - DNA, 201 bp, Homo sapiens
caagagcacaatgcccaaaatagaagatgcagttaagaataaggggccctgaatgtcatgaaggcttgaggtcagcctacagataacaggattattacaargatgaatttccacttcaaaagtctttcattggcagatcttggtagcactttatatgttcaccaatgggaggtcaatatttatctaatttaaaaggtatgc

SEQ ID NO: 477258 - DNA, 201 bp, Homo sapiens
gtctggctcaacggcaagtttccctcccttttctgactgacactaagtctagcacacagcacttgggccagcaaatcctggaaggcagacaaaaataagarcctgaagcaatgcttacaatagatgtctcacacagaacaatacaaatatgtaaaaaatctttcaccacatattcttgccaattaattggatcatataagt

SEQ ID NO: 477259 - DNA, 201 bp, Homo sapiens
aactgtctggctcaacggcaagtttccctcccttttctgactgacactaagtctagcacacagcacttgggccagcaaatcctggaaggcagacaaaaatragagcctgaagcaatgcttacaatagatgtctcacacagaacaatacaaatatgtaaaaaatctttcaccacatattcttgccaattaattggatcatat

SEQ ID NO: 477260 - DNA, 201 bp, Homo sapiens
ataaaaaaaaaaccttaataagctgtatctgtttcatatgcttttaattttaaaggaataacaaaactgtctggctcaacggcaagtttccctcccttttstgactgacactaagtctagcacacagcacttgggccagcaaatcctggaaggcagacaaaaataagagcctgaagcaatgcttacaatagatgtctcaca

SEQ ID NO: 477261 - DNA, 201 bp, Homo sapiens
ttaagagtatgttagatttgattatctgataatgattatttaaatattcctatctgcttataaaatggctgctataataataataatacagatgttgttayataaggtatatcagacctacaggcttctggcaggatttgtcagataatcaagccacactaactatggaaaatgagcagcattttaaatgctttctagtga

SEQ ID NO: 477262 - DNA, 201 bp, Homo sapiens
gtttgttgccttaaatcaaaaggggattcctgtaagaggaaaaaaaacgaagaaagaacaaaaaacagcccactttcttcctatggcaataacttaattgyatatggtatataaagaaccagttccagcagggagatttctttaagtggactgttttctttcttctcaaaattttctttccttttattttttagtaatcaa

SEQ ID NO: 477263 - DNA, 201 bp, Homo sapiens
atttataaaaaaaaaaccttaataagctgtatctgtttcatatgcttttaattttaaaggaataacaaaactgtctggctcaacggcaagtttccctcccytttctgactgacactaagtctagcacacagcacttgggccagcaaatcctggaaggcagacaaaaataagagcctgaagcaatgcttacaatagatgtct

SEQ ID NO: 477264 - DNA, 201 bp, Homo sapiens
gctcaatctgagggttaaaaaaagttgtgtatgtttcaattctaccaaatattacctgcttactcttcgtttaattgagcctctctaaaaatcatttggawaatgtctgtttgtttgtttgttttaacagaaagaatgcaatgaagattgtaacttcaaagaactaattctggaaaaccattacaacacatatgcatcagc

SEQ ID NO: 477265 - DNA, 201 bp, Homo sapiens
agaatctccacagagtatgtgtagatttaaaaagcggtgattctgacactttatttcccgaaggatattttttgcccaacaatttctgcccccacctctaktctatcatgttgagaatcactggttcttaaaagagaaacagaaaaggaattagtttgaattaatattttaaataaaaatgtgttaacagtgagattcctc

SEQ ID NO: 477266 - DNA, 201 bp, Homo sapiens
aggggtcttgggctgagtaaataatcacattaaaaattttaaaaacttccgattaaaacagaaataagaacaaatggccattcgtggatcatttgcaaaaytgaacgaatatttgacatgtctttctgtgattccttgcagatatcatggaaatcaggacagtggcagttggaattgtggcaatcaaaggggtggaaagtg

SEQ ID NO: 477267 - DNA, 201 bp, Homo sapiens
aaagctacacatatttcataactagctgtgtattatgtggtgtttttatttcaaatttaagatacctttttatgcaaatatactacataagtatagctaayaaaccacattaggcctgctcaatctgagggttaaaaaaagttgtgtatgtttcaattctaccaaatattacctgcttactcttcgtttaattgagcctct

SEQ ID NO: 477268 - DNA, 201 bp, Homo sapiens
catctctaaattcatgaactaagctaatgatgataaaatgctggaagacagaacatttatatataggtaggcaaaaaactggcagatgacttttaatgtaytgaattttgtaataaaatttaaattatacaagataaaagtcactgaataatgattttcttgcaaaaatgacaccaataaatcatttcagatgttcccata

SEQ ID NO: 477269 - DNA, 201 bp, Homo sapiens
ttttgtcaaaatatctcacctttctgaaaagtaaaaatggaattaatttatctccaactgtataatttaatgattttattaaaacactttatactcaaacrttaagaaaaaatgttttctgtgtgactttggacaaatggcttgttctttggattttggtttcttcatctgtaaaatgagttgaattaactgacctctaag

SEQ ID NO: 477270 - DNA, 201 bp, Homo sapiens
gtgcagtggtcccaaatgaccaataaagtaatggacactatcaggaagaatgtaagacacaaaacagaacacatagtatctccgtgtaaacagtgtggtgyatctacatctggaagacagatgccattctccttgcttagcgttaataaaaactatacagtacaatggaagcatcctgcaattagaatgaataaatgaata

SEQ ID NO: 477271 - DNA, 201 bp, Homo sapiens
gccattctccttgcttagcgttaataaaaactatacagtacaatggaagcatcctgcaattagaatgaataaatgaataacgtaagacatacatgacatayctaaaaaacattttggctatcatctagaataataaatgtttattaaggtgataataaacaccttaactagtttctaattaagaaactataatgttataaa

SEQ ID NO: 477272 - DNA, 201 bp, Homo sapiens
atgcaaatatactacataagtatagctaataaaccacattaggcctgctcaatctgagggttaaaaaaagttgtgtatgtttcaattctaccaaatattayctgcttactcttcgtttaattgagcctctctaaaaatcatttggataatgtctgtttgtttgtttgttttaacagaaagaatgcaatgaagattgtaact

SEQ ID NO: 477273 - DNA, 201 bp, Homo sapiens
atggacacacaacggaggggaaatgtttgttgccttaaatcaaaaggggattcctgtaagaggaaaaaaaacgaagaaagaacaaaaaacagcccactttsttcctatggcaataacttaattgcatatggtatataaagaaccagttccagcagggagatttctttaagtggactgttttctttcttctcaaaattttct

SEQ ID NO: 477274 - DNA, 201 bp, Homo sapiens
gctcaggctagagtgcagtgacacgatctcaactcactgcaacctctgcctcctaggttaaagcgattctcctgcctcagcctcccaagtaggtgggattrcaggcacctgccaccatgtctggcttttctttttctttttttttttttttggtagagatgggtttcaccatgttggccaggctgctcgaactcctgagct

SEQ ID NO: 477275 - DNA, 201 bp, Homo sapiens
cattaaagaaagatttgaaaagtatacacaaaaatcagatttagtaactaaaggttgtaaaaaattgtaaaactggttgtacaatcatgatgttagtaacrgtaatttttttcttaaattaatttacccttaagagtatgttagatttgattatctgataatgattatttaaatattcctatctgcttataaaatggctgc

SEQ ID NO: 477276 - DNA, 201 bp, Homo sapiens
atttgacacactacttaatatggtgtttttgtcatttattgagggtgtgtcaaatacaaatccctgtaccaagtactgggggttagctgaagcataagatrgtctcttcaaatagtctacaacctagatttaaaaacaggcaaaatttataaataacaagagaacaatagaggtgggtgctaattaatagtacagcagtat

SEQ ID NO: 477277 - DNA, 201 bp, Homo sapiens
taaagaaagatttgaaaagtatacacaaaaatcagatttagtaactaaaggttgtaaaaaattgtaaaactggttgtacaatcatgatgttagtaacagtratttttttcttaaattaatttacccttaagagtatgttagatttgattatctgataatgattatttaaatattcctatctgcttataaaatggctgctat

SEQ ID NO: 477278 - DNA, 201 bp, Homo sapiens
ttgtagaagaaaaatgggagaaaattatgtaggctggagtcagattttggagagctttggatagtaaataaaagaggtttttgtttgcttttgtttttaayagagtataccactgaaacttttgaagcagaagagtaacctttataacatatatcttatgaatacataaagggttaaagtcagaagggctggaggcaaagg

SEQ ID NO: 477279 - DNA, 201 bp, Homo sapiens
tgtacaatcatgatgttagtaacagtaatttttttcttaaattaatttacccttaagagtatgttagatttgattatctgataatgattatttaaatattyctatctgcttataaaatggctgctataataataataatacagatgttgttatataaggtatatcagacctacaggcttctggcaggatttgtcagataat

SEQ ID NO: 477280 - DNA, 201 bp, Homo sapiens
tccctgaatgaatgacataattatttttggttaaccagacatgtcatttaaatggtttttgacatcattataaaatatatatgggattaataagaagtatktttgatttattccctaataatgaggatgatgtggaatcagttctcttgttgcaggacatttcagttatacttgataccagcaattatgcaatcatgtgga

SEQ ID NO: 477281 - DNA, 201 bp, Homo sapiens
taataatacagatgttgttatataaggtatatcagacctacaggcttctggcaggatttgtcagataatcaagccacactaactatggaaaatgagcagcmttttaaatgctttctagtgaaaaattataatctacttaaactctaatcagaaaaaaaattctcaaaaaaactattatgaaagtcaataaaatagataatt

SEQ ID NO: 477282 - DNA, 201 bp, Homo sapiens
atgaaagtcaataaaatagataatttaacaaaagtacaggattagaacatgcttatacctataaataagaacaaaatttctaatgctgctcaagtggaaarggtattgctaaaaggatgtttccaaaaatcttgtatataagatagcaacagtgattgatgataatactgtacttcatcttacttgccacaaaataacatt

SEQ ID NO: 477283 - DNA, 201 bp, Homo sapiens
taatcagatcaagtttctaaaatattactggctcttgttttccattcccaaacacctgagagatactgtacacttaacaagtgaaacagtggtctgtatawccagtatttgtatcctacaatttccaaagtgtgtttttattatgaccttactcctctttactgtccatatttcacaaaaagaagttatccattgggtaag

SEQ ID NO: 477284 - DNA, 201 bp, Homo sapiens
ggtactatatctttagcttgcaatgacatgactccagagcaaatggctacaaatgtgaactgttccagccctgagcgacacacaagaagttatgattacayggaaggaggggatataagagtgagaagactcttctgtcgaacacagtggtacctgaggatcgataaaagaggcaaagtaaaagggacccaagagatgaag

SEQ ID NO: 477285 - DNA, 201 bp, Homo sapiens
ggacttgtgcatttatgtttgttttaagacactgcattaaagaaagatttgaaaagtatacacaaaaatcagatttagtaactaaaggttgtaaaaaattktaaaactggttgtacaatcatgatgttagtaacagtaatttttttcttaaattaatttacccttaagagtatgttagatttgattatctgataatgatta

SEQ ID NO: 477286 - DNA, 201 bp, Homo sapiens
ataaaagtaatggcaaaagccacaattacttttgcaccaacctaactgatacatttattccattttggaggtattgcaaatatgttgaatcaatgaatttmttcagtatttttcattttattagtacaaatttaacctaatagtattcttctgcatgttatttccctttgtgcttcctttactgcaatgaagttgtagtta

SEQ ID NO: 477287 - DNA, 201 bp, Homo sapiens
tatcacctgattcaaggactttgctagctaggttttgaggtcaggcttcagtaactgtagtcttgtgagcatattgagggcagaggaggacttagtttttyatatgtgtttccttagtgcctagcagactatctgttcataatcagttttcagtgtgaattcactgaatgtttatagacaaaagaaaatacacactaaaac

SEQ ID NO: 477288 - DNA, 201 bp, Homo sapiens
taaaacactttatactcaaacgttaagaaaaaatgttttctgtgtgactttggacaaatggcttgttctttggattttggtttcttcatctgtaaaatgadttgaattaactgacctctaaggatccttccagctctaaaattccatgtgcattttagatatttaaaatccaaaatttccatttgccagtattaaagctct

SEQ ID NO: 477289 - DNA, 201 bp, Homo sapiens
tatcctttaattttgaatggtttgtcaggaaaatttactttctcttgagttgaaaaacttgacaggaagcaagaaataatacagtcctagcctctttccartaacatctgatttctccattctcaaactacacttctcaaggaaccagatatttactctcatctgggaagatgcctcttatgttttccttttacttcctgg

SEQ ID NO: 477290 - DNA, 201 bp, Homo sapiens
aattgatagcttaggcttaatttttaaaactcatttttgtcaaaatatctcacctttctgaaaagtaaaaatggaattaatttatctccaactgtataatwtaatgattttattaaaacactttatactcaaacgttaagaaaaaatgttttctgtgtgactttggacaaatggcttgttctttggattttggtttcttca

SEQ ID NO: 477291 - DNA, 201 bp, Homo sapiens
cagatatcatggaaatcaggacagtggcagttggaattgtggcaatcaaaggggtggaaagtgaattctatcttgcaatgaacaaggaaggaaaactctaygcaaaggtattgataattgatagcttaggcttaatttttaaaactcatttttgtcaaaatatctcacctttctgaaaagtaaaaatggaattaatttatc

SEQ ID NO: 477292 - DNA, 201 bp, Homo sapiens
atgttatttataaaaaaaaaaccttaataagctgtatctgtttcatatgcttttaattttaaaggaataacaaaactgtctggctcaacggcaagtttccytcccttttctgactgacactaagtctagcacacagcacttgggccagcaaatcctggaaggcagacaaaaataagagcctgaagcaatgcttacaataga

SEQ ID NO: 477293 - DNA, 201 bp, Homo sapiens
aactctccacgaagctccccttggccatttcagtccacccctgcacactgctgagtaccttgtgagagtaaaatgtgagaactgtaaaacagtatacaaayataaggcattactgttatgattttctccttagattactgtattctcctagactttagaaccaggagttggaagtattataggtctttccatctattatat

SEQ ID NO: 477294 - DNA, 201 bp, Homo sapiens
tatttaagtttatgttatttataaaaaaaaaaccttaataagctgtatctgtttcatatgcttttaattttaaaggaataacaaaactgtctggctcaackgcaagtttccctcccttttctgactgacactaagtctagcacacagcacttgggccagcaaatcctggaaggcagacaaaaataagagcctgaagcaatg

SEQ ID NO: 477295 - DNA, 201 bp, Homo sapiens
tttattatttatatgcttgtgtgctatgcttcctttatatcagtagaatttgtaatgaactatgtgtgcatatatatgtacactttttttccctgagagtcagttgttaaacatttacatcatgcttctacatataatctatcatccaaactggaacacttttgagagtaaaagattgtgctgtaaataaacacatcagaa

SEQ ID NO: 477296 - DNA, 201 bp, Homo sapiens
attttaacttcatattataaaaagagaagatagcacaaaacaaggataaatgggagagacagaattaaaggaaggatgttaggaagtaaatggagaaagayacaagcagggggagaagtgaggaaggagtgctcactaaagagaaggaaaagcaatacacagatatatcaagaaatcaggagagataaaaggcagagaaat

SEQ ID NO: 477297 - DNA, 201 bp, Homo sapiens
tacagcattaaactctattttaagttgtttttgaactttattgttttgttatttaagtttatgttatttataaaaaaaaaaccttaataagctgtatctgyttcatatgcttttaattttaaaggaataacaaaactgtctggctcaacggcaagtttccctcccttttctgactgacactaagtctagcacacagcactt

SEQ ID NO: 477298 - DNA, 201 bp, Homo sapiens
catcttacttgccacaaaataacattttataaatcctcaaagtaaaattgagaaatctttaagtttttttcaagtaacataatctatctttgtataattcrtatttgggaatatggcttttaataatgttcttcccacaaataatcatgcttttttcctatggttacagcattaaactctattttaagttgtttttgaact

SEQ ID NO: 477299 - DNA, 201 bp, Homo sapiens
taaaaggatgtttccaaaaatcttgtatataagatagcaacagtgattgatgataatactgtacttcatcttacttgccacaaaataacattttataaatyctcaaagtaaaattgagaaatctttaagtttttttcaagtaacataatctatctttgtataattcatatttgggaatatggcttttaataatgttcttcc

SEQ ID NO: 477300 - DNA, 201 bp, Homo sapiens
ctgtgattctactaacattaccctaaacactgaataaaatcatgttaaaggtcaaatatgcaagcctgtggtttcctacactgatataaggctttcaaaamgtattccttgtaataataatttaggtggacaaagtgttattatataatccaccaggcccattgtaaataatcttgcactatattgttatttcttttgata

SEQ ID NO: 477301 - DNA, 201 bp, Homo sapiens
aattccattttataaatgaggaaaatgaggctcagtttgacagtcagagactggtttggttctagtaaacaacagagtcaggacctgaactcagggctctmcagaaatgaaaagccaatgctctttccacccattgagttgttttgttatataacattctgaagttgattactgaggtattattaaacattctaatatttt

SEQ ID NO: 477302 - DNA, 201 bp, Homo sapiens
gacaggaagcaagaaataatacagtcctagcctctttccaataacatctgatttctccattctcaaactacacttctcaaggaaccagatatttactctcrtctgggaagatgcctcttatgttttccttttacttcctggttatcatgtggttgcattttccaagttcttatcattgaatttatgagagcctatcaaaat

SEQ ID NO: 477303 - DNA, 201 bp, Homo sapiens
tgctgtagaacataaagataaggttgaagttctccagagcaatcctgacatttaacttaaaaaacctgggcagttcaggagaaaataattgattaaccacwaatgtaaaagcatataataaagaagtctagggagaaagcagttacactttgttagcagtaattgtaaaaacttaatttaaatcaatagttctgagtgcag

SEQ ID NO: 477304 - DNA, 201 bp, Homo sapiens
ttgtgcatcagcattctctttttatctaaaagaaaatatattaaataaagggaggaatggcaggagtaaagagacttgaaggaaaagaaaatattgacttmttaatgatattttacaatgctaagatctttagaaaccaactattccatatgtcttttaaatattaggttggtgcaaaggtaattacagtttttgtcataa

SEQ ID NO: 477305 - DNA, 201 bp, Homo sapiens
gggaggaatggcaggagtaaagagacttgaaggaaaagaaaatattgacttcttaatgatattttacaatgctaagatctttagaaaccaactattccatwtgtcttttaaatattaggttggtgcaaaggtaattacagtttttgtcataaaagtaatggcaaaagccacaattacttttgcaccaacctaactgataca

SEQ ID NO: 477306 - DNA, 201 bp, Homo sapiens
gctaaaaggatgtttccaaaaatcttgtatataagatagcaacagtgattgatgataatactgtacttcatcttacttgccacaaaataacattttataawtcctcaaagtaaaattgagaaatctttaagtttttttcaagtaacataatctatctttgtataattcatatttgggaatatggcttttaataatgttctt

SEQ ID NO: 477307 - DNA, 201 bp, Homo sapiens
aactgtttttatgaggatttatcaacagagttatttaaggaggaatcctgtgttgttatcaggaactaaaaggataaggctaacaatttggaaagagcaastactctttcttaaatcaatctacaattcacagataggaagaggtcaatgacctaggagtaacaatcaactcaagattcattttcattatgttattcatga

SEQ ID NO: 477308 - DNA, 201 bp, Homo sapiens
aattaatttacccttaagagtatgttagatttgattatctgataatgattatttaaatattcctatctgcttataaaatggctgctataataataataatrcagatgttgttatataaggtatatcagacctacaggcttctggcaggatttgtcagataatcaagccacactaactatggaaaatgagcagcattttaaa

SEQ ID NO: 477309 - DNA, 201 bp, Homo sapiens
cagataatcaagccacactaactatggaaaatgagcagcattttaaatgctttctagtgaaaaattataatctacttaaactctaatcagaaaaaaaattmtcaaaaaaactattatgaaagtcaataaaatagataatttaacaaaagtacaggattagaacatgcttatacctataaataagaacaaaatttctaatgc

SEQ ID NO: 477310 - DNA, 201 bp, Homo sapiens
ttacccttaagagtatgttagatttgattatctgataatgattatttaaatattcctatctgcttataaaatggctgctataataataataatacagatgwtgttatataaggtatatcagacctacaggcttctggcaggatttgtcagataatcaagccacactaactatggaaaatgagcagcattttaaatgctttc

SEQ ID NO: 477311 - DNA, 201 bp, Homo sapiens
taaatggacacacaacggaggggaaatgtttgttgccttaaatcaaaaggggattcctgtaagaggaaaaaaaacgaagaaagaacaaaaaacagcccackttcttcctatggcaataacttaattgcatatggtatataaagaaccagttccagcagggagatttctttaagtggactgttttctttcttctcaaaattt

SEQ ID NO: 477312 - DNA, 201 bp, Homo sapiens
gctacacatatttcataactagctgtgtattatgtggtgtttttatttcaaatttaagatacctttttatgcaaatatactacataagtatagctaataawccacattaggcctgctcaatctgagggttaaaaaaagttgtgtatgtttcaattctaccaaatattacctgcttactcttcgtttaattgagcctctcta

SEQ ID NO: 477313 - DNA, 201 bp, Homo sapiens
ctttatactcaaacgttaagaaaaaatgttttctgtgtgactttggacaaatggcttgttctttggattttggtttcttcatctgtaaaatgagttgaatyaactgacctctaaggatccttccagctctaaaattccatgtgcattttagatatttaaaatccaaaatttccatttgccagtattaaagctctttttgtt

SEQ ID NO: 477314 - DNA, 201 bp, Homo sapiens
aggggcaatatgaacttattgtcatgactggaccaaaaagggaagatgtctgcctatcataattaataataactctatcagtcaacatttatgttttacawttgttctgtaaaagaaaagccagcaaacattacagattccagtccctaataactgatcatgaaagacactctaaacttgtgcatcagcattctcttttta

SEQ ID NO: 477315 - DNA, 201 bp, Homo sapiens
caattacttttgcaccaacctaactgatacatttattccattttggaggtattgcaaatatgttgaatcaatgaatttcttcagtatttttcattttattmgtacaaatttaacctaatagtattcttctgcatgttatttccctttgtgcttcctttactgcaatgaagttgtagttaccaaatagagtgctctaaaagg

SEQ ID NO: 477316 - DNA, 201 bp, Homo sapiens
acttatcaggtataagaatttgggcaaatttcttagtttctctgtgcttcagtttcctgatctgtaaaactgggataacaagactacctgtctcaatctgyggttatgagtaaatgagttaatacataagagcaatgcaataatccttggcatgtggtatgagttcaataaacattagctattattattatagtaaattag

SEQ ID NO: 477317 - DNA, 201 bp, Homo sapiens
ccagtattaaagctctttttgttaaagttcacccaatttgcacattgctgacatgaaaattcttgggaaaaaatcttgaaatgtttagttcattcatcaayatcaatctcacaatcatgggcattgaaatgtaattattcacattgtccccacttcactacaatgcaaaatatgtaacagttcatcccaccataataaaat

SEQ ID NO: 477318 - DNA, 201 bp, Homo sapiens
tgacttgcagggcttatcatgcagtttggtttacatccctactccactgccatttacttgagcgtgaatgagacacaaaagattatttgcctcccataatscaactttacacataaataacacaaggctaaagaaaaccagaactcaaattcaccacgcataggagtgataacaaaaatatttaacagtcagtatgggtga

SEQ ID NO: 477319 - DNA, 201 bp, Homo sapiens
tactccataatatatttgtggttgcgttaatatgacaatgtctgcaattaaacaccagtaagcaaaattgatacatcagaatgacttgcagggcttatcaygcagtttggtttacatccctactccactgccatttacttgagcgtgaatgagacacaaaagattatttgcctcccataatccaactttacacataaataa

SEQ ID NO: 477320 - DNA, 201 bp, Homo sapiens
aaaacttgagtacagacttgaaaaatgagtctataaaatgagtatgatcttagagcagaatctttgaagtggtcccaggtcccagtgacaatagatttccaatgtctattacttcagtatttagaaaatagatgacaagttttgaggctttatttagtatatttaaaattaaaagaattgattaatacattatattagaga

SEQ ID NO: 477321 - DNA, 201 bp, Homo sapiens
cctaaacagcagtatgatttaaagtgtagttgggggatcacctgtattaggatcacctactttacttgttttaaagcatattctctaggcctcaaccctcmcctattgagtcaaaatctctgctgttaattggcgtctcaggtgatttgtatgcatgcaatgtgacaggcacctcaagtctggtgatattcctgttcacct

SEQ ID NO: 477322 - DNA, 201 bp, Homo sapiens
taatacattatattagagaataggaatttttatagtcatcagttaaatggtatacttttggaaagcgttcataatgatataaaaaacaattaaatgaatctaatcatttttgtgctaattttagcacaagttaaacatttaattaatgttagaaaaattaagcctttactgatgttatttatctttcgttaggcatcactt

SEQ ID NO: 477323 - DNA, 201 bp, Homo sapiens
ttcagggagttagaggactctagtggaggccagctaacagaacctgggagagaaagggcaatactctcaaaaaacatattttaaccacatctcaaagagcmagtgggagtgaatcaggctagagaagagggtaggaaatggggaagggagtcagaagaaagggtatctcttcctggaaaatagtacatgaagaaaaagctg

SEQ ID NO: 477324 - DNA, 201 bp, Homo sapiens
tcagggagttagaggactctagtggaggccagctaacagaacctgggagagaaagggcaatactctcaaaaaacatattttaaccacatctcaaagagccrgtgggagtgaatcaggctagagaagagggtaggaaatggggaagggagtcagaagaaagggtatctcttcctggaaaatagtacatgaagaaaaagctga

SEQ ID NO: 477325 - DNA, 201 bp, Homo sapiens
gaggacaaggaaataatactgtatcatatattatggaacctgggtgttaatcctttttcttccaataattaactgaatgaccttgggcaaatagttgactmtcctaggcctcagtttttgtttttgtatttgttttataaatataaattgaagagaggtaggccagatttcttgaatagattacagttgttaaatgttacc

SEQ ID NO: 477326 - DNA, 201 bp, Homo sapiens
ttcatttaaaaataaacctcatctgttttactgtaaaatctgttacaggcaattggatagcttaggttttttgtctgaagctgcccagttattcttttccrcatgtgggctgaacctatttgggaaaaaaactaaactagagatatagttagtatagctacagctaatcaactcctttgaatgctccttcccccaaaaata

SEQ ID NO: 477327 - DNA, 201 bp, Homo sapiens
aatatatttgaatgcatgggtagaaaatatcatattttaaaactatgtatatttaaatttagtaattttctaatctctagaaatctctgctgttcaaaagrtggcagcactgaaagttgttttcctgttagatggcaagagcacaatgcccaaaatagaagatgcagttaagaataaggggccctgaatgtcatgaaggct

SEQ ID NO: 477328 - DNA, 201 bp, Homo sapiens
caaattttagaaaataaaatttgctctagttacacacctttagaattctagaatattaaaactgtaaggggcctccatccctcttactcatttgtagtctrggaaattgagattttgatacacctaaggtcacgcagctgggtagatatacagctgtcacaagagtctagatcagttagcacatgctttctactcttcgat

SEQ ID NO: 477329 - DNA, 201 bp, Homo sapiens
aaggttgaagttctccagagcaatcctgacatttaacttaaaaaacctgggcagttcaggagaaaataattgattaaccacaaatgtaaaagcatataatraagaagtctagggagaaagcagttacactttgttagcagtaattgtaaaaacttaatttaaatcaatagttctgagtgcagtatggttctcacaaaatag

SEQ ID NO: 477330 - DNA, 201 bp, Homo sapiens
acctgagaatgtcaataggcttcagaggactactcacttcaccagcagaagcaatgcttccacacaggaatgtggttttttaagatactagtaaatatggmttggagctagcaggagaagtaaaatatctagatgtataattctgcttccacaatgttttgggctcgggtagatggttggagggcatggagaaagaaaagg

SEQ ID NO: 477331 - DNA, 201 bp, Homo sapiens
tcagagggtgaatttagattactgctgcaccaggcagtccaacagcagacagaggctatcattctgcacctgacagaaataacactgctctttaagctgartattgaggtgccgagtgagagaaagcagcagtgcactgggcactcagtgaccgccttgagagacagatgtggaagacagaatccaatccctcaggataat

SEQ ID NO: 477332 - DNA, 201 bp, Homo sapiens
gaaatagactttaatataaactcctttactaaacaacatctaacatttttacccctcaaataggttgtaaatgaaaatcctctgccttccacatgatttgsaaaattgtgttaaagagtccctgaatgtttaaccgcttttggaccaagttttttatctgcatttgagattatatctggacatatctttagtagagaagtc

SEQ ID NO: 477333 - DNA, 201 bp, Homo sapiens
tagatatattgaaagggttgcctttctacatttttctatctctcaaccttgtctaaatattacaatcagctggggaactttaaaaaaatactgatgccagkttccacccacaaaaaatttttcattaaattgatctgaggtacagtctgggcatcaggaattttaaaagcttccccagataattctgacatgctgccaggg

SEQ ID NO: 477334 - DNA, 201 bp, Homo sapiens
gtggacaaagtgttattatataatccaccaggcccattgtaaataatcttgcactatattgttatttcttttgatacttgtaagagcttgagaatattaamtaagaaactctgtaacatggctggcaaaatactctcttatcactttgaactttacttagaggtaaatacattttgagcttctgtgaggttaagaagaagt

SEQ ID NO: 477335 - DNA, 201 bp, Homo sapiens
atataaggctttcaaaaagtattccttgtaataataatttaggtggacaaagtgttattatataatccaccaggcccattgtaaataatcttgcactatawtgttatttcttttgatacttgtaagagcttgagaatattaactaagaaactctgtaacatggctggcaaaatactctcttatcactttgaactttactta

SEQ ID NO: 477336 - DNA, 201 bp, Homo sapiens
aaaagaaagtattgctataattgtaccacatgctgatgtactttctaaagattttctaatgttttattttcttaataaatccctgaatgaatgacataatyatttttggttaaccagacatgtcatttaaatggtttttgacatcattataaaatatatatgggattaataagaagtatgtttgatttattccctaataat

SEQ ID NO: 477337 - DNA, 201 bp, Homo sapiens
gattgttttctgaaaatatttgagtagtcagttaacttacaaagattagatattgcatagtaggtctgatgagtccattgtgtgattaacatcattgtatrttaaggagcaagaagttcatatatagaatcttgctttaaaccttccagctttccttttatcaacacaagctggttactaaaagactgtgtagaggaaaaa

SEQ ID NO: 477338 - DNA, 201 bp, Homo sapiens
ttcttaagtaaattttttccctcaatgaaaacatgggccattagtattaagataacaaaaatgactactacaacaaaaattaaatgtgtgagtggtttctrtgtgcctggcactgtgttaaacactttatatacattatttaatttaatcttcacagggctcttattaggtgggcagacttatgctcatttgcagatgggg

SEQ ID NO: 477339 - DNA, 201 bp, Homo sapiens
gtgggcagacttatgctcatttgcagatgggggagatttggctcacagaattaagtaacttgctctaggttacatagctagtaactgtcaaagttgggatrtgaatgcaagtaggtttaactccaaagcacagctttagtatcatcacatgtatcactatactgtcactggtgttattaaaacatcgcatattactttgta

SEQ ID NO: 477340 - DNA, 201 bp, Homo sapiens
gctaaatcatatggtattggccacagttccaacaggagctccagaggactgaagtagaccaggaaagtagaccaggaagcattacagacaaagtgggacayaaagattagttaggatttccatatatagagagaaaaggagagtgcatttcatgacatggtataattttcttctgattcaccacagcagtacttctcaggg

SEQ ID NO: 477341 - DNA, 201 bp, Homo sapiens
aatttctttattcttgagcttttcttgaataaaagagggttgtaggacatggaacaaaatagactagaaaatagggttgataagctactgattctgccaayactgcttaatgctcttcccaagcaattgtcttttagatatgttgatttcccagtgttaatggtattttttaaatatgtcaagcaattaagaatataagtc

SEQ ID NO: 477342 - DNA, 201 bp, Homo sapiens
tgtgcttccacacgacacctatatacctactaagtcactacaattcaccaaatatgtgctgctcacaccactaatgattaggttgattaggaaaaagagaytggaagtgggagagtcaaaggctgttggaaatcatgtgaaggcagaaatagtttctatctcgaactctgctgtattgcatctcacaaaactagcacaatt

SEQ ID NO: 477343 - DNA, 201 bp, Homo sapiens
caaaactagcacaattcctggcacatattaagtgtttgaaaatatgtagccaatgaatgtttgaatatatgggattagttataagtagggtgaccatattyggtggtctgctgaagctccttgtactggtccatgagagccaattgttaaattttcaaaaattttgttaacttattaaatacagccattattaaacattta

SEQ ID NO: 477344 - DNA, 201 bp, Homo sapiens
caactctgttcagtgatgttttgttggtggcttggacccaactatgataagagcacctacaccacataaattggccaatgctacaaatcagggcttgattyactattttgttgatggtctacatttaagcgaatgatacaaaaatgttaataatgtagattaaacttaaggtttagtgtctataactgtttcattgtgaat

SEQ ID NO: 477345 - DNA, 201 bp, Homo sapiens
ttatctgataatgattatttaaatattcctatctgcttataaaatggctgctataataataataatacagatgttgttatataaggtatatcagacctacrggcttctggcaggatttgtcagataatcaagccacactaactatggaaaatgagcagcattttaaatgctttctagtgaaaaattataatctacttaaac

SEQ ID NO: 477346 - DNA, 201 bp, Homo sapiens
atgcacggaaccaaagttggtttaaacagtaacagattatgttttatagtatgaaaaagtaaaaaagaatatagatgatcacatatttgcctttaaaaacwtttttaggataaaaagtaagtagacaaagaaataacattgaaattatctgcttcaaaacatcaatagattgtagtacgtgggtctaattacattcagtta

SEQ ID NO: 477347 - DNA, 201 bp, Homo sapiens
taaggctttcaaaaagtattccttgtaataataatttaggtggacaaagtgttattatataatccaccaggcccattgtaaataatcttgcactatattgktatttcttttgatacttgtaagagcttgagaatattaactaagaaactctgtaacatggctggcaaaatactctcttatcactttgaactttacttagag

SEQ ID NO: 477348 - DNA, 201 bp, Homo sapiens
gttcaaaaggtggcagcactgaaagttgttttcctgttagatggcaagagcacaatgcccaaaatagaagatgcagttaagaataaggggccctgaatgtyatgaaggcttgaggtcagcctacagataacaggattattacaaggatgaatttccacttcaaaagtctttcattggcagatcttggtagcactttatatg

SEQ ID NO: 477349 - DNA, 201 bp, Homo sapiens
taatctctagaaatctctgctgttcaaaaggtggcagcactgaaagttgttttcctgttagatggcaagagcacaatgcccaaaatagaagatgcagttargaataaggggccctgaatgtcatgaaggcttgaggtcagcctacagataacaggattattacaaggatgaatttccacttcaaaagtctttcattggcag

SEQ ID NO: 477350 - DNA, 201 bp, Homo sapiens
agtggactgttttctttcttctcaaaattttctttccttttattttttagtaatcaagaaaggctggaaaactactgaaaaactgatcaagctggacttgygcatttatgtttgttttaagacactgcattaaagaaagatttgaaaagtatacacaaaaatcagatttagtaactaaaggttgtaaaaaattgtaaaact

SEQ ID NO: 477351 - DNA, 201 bp, Homo sapiens
tttgagagtttgaaattattttaatgtccgagagcatatacagatttataatcagtaaataacaaacttatcagaacttcaaaagacagaaatatgaagcmacatattatgctcctatttacataacatatttgagggccagatgaatgagggttatctcaggatatctatcataaattactagaactttcttttcaacct

SEQ ID NO: 477352 - DNA, 201 bp, Homo sapiens
aattttctaatctctagaaatctctgctgttcaaaaggtggcagcactgaaagttgttttcctgttagatggcaagagcacaatgcccaaaatagaagatrcagttaagaataaggggccctgaatgtcatgaaggcttgaggtcagcctacagataacaggattattacaaggatgaatttccacttcaaaagtctttca

SEQ ID NO: 477353 - DNA, 201 bp, Homo sapiens
ctcgaactcctgacctcaagttatctgcctgccttggcttcccactgttctgggattacaggtgtgagccactgcacccggccccaaccagaattttaaaygccagttaccttactatttcatatttgtgaaaattaaaatgaacccttgttaacatctatttctatacttgctatgggaaaaaatgtttggtaaacaaat

SEQ ID NO: 477354 - DNA, 201 bp, Homo sapiens
ttcaccacatattcttgccaattaattggatcatataagtaaaatcattacaaatataagtatttacaggattttaaagttagaatatatttgaatgcatrggtagaaaatatcatattttaaaactatgtatatttaaatttagtaattttctaatctctagaaatctctgctgttcaaaaggtggcagcactgaaagtt

SEQ ID NO: 477355 - DNA, 201 bp, Homo sapiens
aatttcaacttttattttagattcagggggtacatgtgcaggtctgttacctgggtatattgtgtgatactgaggtttgaggtatgattgctcccatcacycaggtactgagcgtagtacctaatggtttttcaacccttccctcatctactccccgccagtagtccccagtgtcagttgttgccatctttatgtccctaa

SEQ ID NO: 477356 - DNA, 201 bp, Homo sapiens
tcacaaaattactctagttaaaaattgtactgctaatataataatcacttttctcctttctcttaccactgtggaaatgtaatttttataaataatcttargtaatcatcctaaaatattgcattgaggtcaacaaaaagtggtagtagcatgtttggttcccattttatattctctgtaataacaactgtatttttcttt

SEQ ID NO: 477357 - DNA, 201 bp, Homo sapiens
aggcatgcgccaccgtgcctggcccagtataaaaatattaatgagatattttacattctttctttttgtacaggtccttcaaaatccaatgcatgtttttsctttacaacacaccttaattccaactattcacattgcaagggttcagtagccacatgtggcacatggctcttatgcaggacagttcagtgtagaccatgt

SEQ ID NO: 477358 - DNA, 201 bp, Homo sapiens
tcccaattgaattcaggatcttccccctcaatcctgctcttaccttatacattttacataagagttctgatattactcagttgaccaaagtggaagccttrcattcctccatctcttctagctcccatttttaatcaccaagtcctactattctatcacttgaaatgtgatagaacattttaatattctcttaaactgaat

SEQ ID NO: 477359 - DNA, 201 bp, Homo sapiens
taagcaaaattgatacatcagaatgacttgcagggcttatcatgcagtttggtttacatccctactccactgccatttacttgagcgtgaatgagacacaraagattatttgcctcccataatccaactttacacataaataacacaaggctaaagaaaaccagaactcaaattcaccacgcataggagtgataacaaaaa

SEQ ID NO: 477360 - DNA, 201 bp, Homo sapiens
actataatattccaaatgcggtaacaacggtgttagtaatagaaatggaaaaaaatcaaatcagcgtgtaaactaccctgtaggtggaatccatagaaagyggtaattagatatgggttatgagagataacttttttaaaaagcattcaaatttcaaagctgaatggtttggaaaattatgatgccattaactaaaacagg

SEQ ID NO: 477361 - DNA, 201 bp, Homo sapiens
atgatgccattaactaaaacaggaaaatcaagaggactgaacttttcagtaaaatataaatacttgagtcactttttcttaaaaatctataacattttatragtaactacattatcaaattccttagagaacagaaacttttctacttccatttctcaagaggaaagaaaacttgagtacagacttgaaaaatgagtctat

SEQ ID NO: 477362 - DNA, 201 bp, Homo sapiens
gaacaatacaaatatgtaaaaaatctttcaccacatattcttgccaattaattggatcatataagtaaaatcattacaaatataagtatttacaggatttwaaagttagaatatatttgaatgcatgggtagaaaatatcatattttaaaactatgtatatttaaatttagtaattttctaatctctagaaatctctgctg

SEQ ID NO: 477363 - DNA, 201 bp, Homo sapiens
tcctgatctgtaaaactgggataacaagactacctgtctcaatctgtggttatgagtaaatgagttaatacataagagcaatgcaataatccttggcatgyggtatgagttcaataaacattagctattattattatagtaaattagaaatttaattctagagaataaaaagctgaactcaaatatgtaactatttatttg

SEQ ID NO: 477364 - DNA, 201 bp, Homo sapiens
atgttacatggaatcaaagggcaattagatctagttcattaagatttaaattagtgcagttcaattcagtactcatagagcaccttcgatgtacaggtgasattgtgtaataatggatacaaagataaacaatgtgacttttacccttaatgtactgccataggaaataatttggtaagttacgatagttgctagtaagtt

SEQ ID NO: 477365 - DNA, 201 bp, Homo sapiens
ttaactaaaacaggaaaatcaagaggactgaacttttcagtaaaatataaatacttgagtcactttttcttaaaaatctataacattttataagtaactayattatcaaattccttagagaacagaaacttttctacttccatttctcaagaggaaagaaaacttgagtacagacttgaaaaatgagtctataaaatgagt

SEQ ID NO: 477366 - DNA, 201 bp, Homo sapiens
tactgcaatgaagttgtagttaccaaatagagtgctctaaaagggcaaggcttgtctgtgaattaagcctagcatagaattggctctcagtgaagatgtgytgaacgttacatgaatgcatcaacatcataatccttcatgtgcttgtaagcaattattaaaattttctctagcctattcaggcctgtgttcttcaaaatt

SEQ ID NO: 477367 - DNA, 201 bp, Homo sapiens
tatttccctttgtgcttcctttactgcaatgaagttgtagttaccaaatagagtgctctaaaagggcaaggcttgtctgtgaattaagcctagcatagaaytggctctcagtgaagatgtgttgaacgttacatgaatgcatcaacatcataatccttcatgtgcttgtaagcaattattaaaattttctctagcctattc

SEQ ID NO: 477368 - DNA, 201 bp, Homo sapiens
ctaaggatccttccagctctaaaattccatgtgcattttagatatttaaaatccaaaatttccatttgccagtattaaagctctttttgttaaagttcacycaatttgcacattgctgacatgaaaattcttgggaaaaaatcttgaaatgtttagttcattcatcaacatcaatctcacaatcatgggcattgaaatgta

SEQ ID NO: 477369 - DNA, 201 bp, Homo sapiens
atgttagatttgattatctgataatgattatttaaatattcctatctgcttataaaatggctgctataataataataatacagatgttgttatataaggtrtatcagacctacaggcttctggcaggatttgtcagataatcaagccacactaactatggaaaatgagcagcattttaaatgctttctagtgaaaaattat

SEQ ID NO: 477370 - DNA, 201 bp, Homo sapiens
agcacttgggccagcaaatcctggaaggcagacaaaaataagagcctgaagcaatgcttacaatagatgtctcacacagaacaatacaaatatgtaaaaamtctttcaccacatattcttgccaattaattggatcatataagtaaaatcattacaaatataagtatttacaggattttaaagttagaatatatttgaatg

SEQ ID NO: 477371 - DNA, 201 bp, Homo sapiens
tctagcacacagcacttgggccagcaaatcctggaaggcagacaaaaataagagcctgaagcaatgcttacaatagatgtctcacacagaacaatacaaayatgtaaaaaatctttcaccacatattcttgccaattaattggatcatataagtaaaatcattacaaatataagtatttacaggattttaaagttagaata

SEQ ID NO: 477372 - DNA, 201 bp, Homo sapiens
tgcaagtgaacaaaagagtgataatgttaatttctttattcttgagcttttcttgaataaaagagggttgtaggacatggaacaaaatagactagaaaatmgggttgataagctactgattctgccaacactgcttaatgctcttcccaagcaattgtcttttagatatgttgatttcccagtgttaatggtattttttaa

SEQ ID NO: 477373 - DNA, 201 bp, Homo sapiens
ttttaaagttagaatatatttgaatgcatgggtagaaaatatcatattttaaaactatgtatatttaaatttagtaattttctaatctctagaaatctctsctgttcaaaaggtggcagcactgaaagttgttttcctgttagatggcaagagcacaatgcccaaaatagaagatgcagttaagaataaggggccctgaat

SEQ ID NO: 477374 - DNA, 201 bp, Homo sapiens
agaaaataaaatttgctctagttacacacctttagaattctagaatattaaaactgtaaggggcctccatccctcttactcatttgtagtctaggaaattragattttgatacacctaaggtcacgcagctgggtagatatacagctgtcacaagagtctagatcagttagcacatgctttctactcttcgattattagta

SEQ ID NO: 477375 - DNA, 201 bp, Homo sapiens
tgtctggctcaacggcaagtttccctcccttttctgactgacactaagtctagcacacagcacttgggccagcaaatcctggaaggcagacaaaaataagrgcctgaagcaatgcttacaatagatgtctcacacagaacaatacaaatatgtaaaaaatctttcaccacatattcttgccaattaattggatcatataag

SEQ ID NO: 477376 - DNA, 201 bp, Homo sapiens
gatgcagttaagaataaggggccctgaatgtcatgaaggcttgaggtcagcctacagataacaggattattacaaggatgaatttccacttcaaaagtctktcattggcagatcttggtagcactttatatgttcaccaatgggaggtcaatatttatctaatttaaaaggtatgctaaccactgtggttttaatttcaaa

SEQ ID NO: 477377 - DNA, 201 bp, Homo sapiens
atgactaatctatactgtgatgatttgactcaaaaggagaaaagaaattatgtagttttcaattctgattcctattcaccttttgtttatgaatggaaagmtttgtgcaaaatatacatataagcagagtaagccttttaaaaatgttctttgaaagataaaattaaatacatgagtttctaacaattagaaaagaaaaaa

SEQ ID NO: 477378 - DNA, 201 bp, Homo sapiens
ttccaattcccttgtcactctctcccctttccttatccctcactcccatctcagcattagaatagtgctttgcatagagtagttactcactaattacatgratgcagtgtcttttattgttgcctgccattataaagctgcaggtaaaggaaatctactagcatggttatttaaacatttgacagaaaaagctcagttcta

SEQ ID NO: 477379 - DNA, 201 bp, Homo sapiens
taattggatcatataagtaaaatcattacaaatataagtatttacaggattttaaagttagaatatatttgaatgcatgggtagaaaatatcatattttaraactatgtatatttaaatttagtaattttctaatctctagaaatctctgctgttcaaaaggtggcagcactgaaagttgttttcctgttagatggcaaga

SEQ ID NO: 477380 - DNA, 201 bp, Homo sapiens
tcaaaaaaaaaaaaaagagagagtgggtttttctcaggtcttctcggtgcccaattccaaatgtggctgtctcctctgcaggagcaggtctgcttgtcaaragtccaagcacgcctgtgttctgtggccacaggagaggaggggccgcttttaaatacaagcctactcctgtcgttggaccagaacaaagacctactggcc

SEQ ID NO: 477381 - DNA, 201 bp, Homo sapiens
tacaagggaaaggcctcgaaatgcgctcaccaaagcctcagagttttattatcaggagctcacattcaggtacagattcctatgaagtttgcctcacctgragggaagagggagagagcagggctggctgagatggggctgccagaggcatggtctccagctgggtaagcgggattctgagagcccctggtgcacacggag

SEQ ID NO: 477382 - DNA, 201 bp, Homo sapiens
catgtatatggcttgcatgtgtgtgcttgtgcacacgcaggagtgtatgtgtgtgccatgtgagtgcctgtgtacatgtgcaagagtgggctcaggtgtayccacatgttcatggtatacctcggccggtcctagacctagtatcagactctgctgctcctcactggcataaaggcagaccctgaactgggcatggggaca

SEQ ID NO: 477383 - DNA, 201 bp, Homo sapiens; identical to SEQ ID NO: 476255

SEQ ID NO: 477384 - DNA, 201 bp, Homo sapiens; identical to SEQ ID NO: 476260

SEQ ID NO: 477385 - DNA, 201 bp, Homo sapiens; identical to SEQ ID NO: 476263

SEQ ID NO: 477386 - DNA, 201 bp, Homo sapiens; identical to SEQ ID NO: 476267

SEQ ID NO: 477387 - DNA, 201 bp, Homo sapiens; identical to SEQ ID NO: 476271

SEQ ID NO: 477388 - DNA, 201 bp, Homo sapiens; identical to SEQ ID NO: 476275

SEQ ID NO: 477389 - DNA, 201 bp, Homo sapiens; identical to SEQ ID NO: 476274

SEQ ID NO: 477390 - DNA, 201 bp, Homo sapiens
tagcacacctgtgcacgtacatgtgcctgtgtcggtgtccatgtatatggcttgcatgtgtgtgcttgtgcacacgcaggagtgtatgtgtgtgccatgtkagtgcctgtgtacatgtgcaagagtgggctcaggtgtatccacatgttcatggtatacctcggccggtcctagacctagtatcagactctgctgctcctc

SEQ ID NO: 477391 - DNA, 201 bp, Homo sapiens
gaaagagagcaggggccctcgttcacctggtgtccctcagccctgccctgcctgtcacagccacaaatagggcaagaatgcaggcaggtagagttaggaascccatgcctggaggctgtgccaagtcacagagagcagcagcctcagtcttggggatgatgaggggccatcagtggcgtgtgagctcttggctggctccac

SEQ ID NO: 477392 - DNA, 201 bp, Homo sapiens; identical to SEQ ID NO: 476280

SEQ ID NO: 477393 - DNA, 201 bp, Homo sapiens; identical to SEQ ID NO: 476282

SEQ ID NO: 477394 - DNA, 201 bp, Homo sapiens
tgagtgtctagaatcttctggaacttcccacaagctctcggcatgcagaggggagcatccatctgctctgggccccacgtggctgcatcaagcctctgggygcactgagcctcccctgggcctgggcctgggcctgggcccatcttctgtcatcaaaagtccctggtgttggaaacctcagctggctcaaggggacaggca

SEQ ID NO: 477395 - DNA, 201 bp, Homo sapiens; identical to SEQ ID NO: 476283

SEQ ID NO: 477396 - DNA, 201 bp, Homo sapiens; identical to SEQ ID NO: 476284

SEQ ID NO: 477397 - DNA, 201 bp, Homo sapiens
cctggccactgcctgtatcctcaggctaggtccaggaggctgaccctcactctgcagcctttggagccgggagagttgcacaggctctgaggagcccaaacccccaacccccaaccacaggagcccgtgtatctgctcaaggcatggcacccttggcaccccacctccacacagctgctgagtgccaagtcctgctggtgc

SEQ ID NO: 477398 - DNA, 201 bp, Homo sapiens; identical to SEQ ID NO: 476285

SEQ ID NO: 477399 - DNA, 201 bp, Homo sapiens; identical to SEQ ID NO: 476287

SEQ ID NO: 477400 - DNA, 201 bp, Homo sapiens; identical to SEQ ID NO: 476288

SEQ ID NO: 477401 - DNA, 201 bp, Homo sapiens
catctaccacatcccacgcgcatggggtctctcacagcggcccctgcccatggacagatggactgacccacaggcatccacatgtggtgctgaagaagccrtgaggaaagggggaggtgggaagggcctcgtccagggtgtctggctgcacaggagacatagcagctcccactggcaccctgcatacaagggaaaggcctc

SEQ ID NO: 477402 - DNA, 201 bp, Homo sapiens; identical to SEQ ID NO: 476291

SEQ ID NO: 477403 - DNA, 201 bp, Homo sapiens; identical to SEQ ID NO: 476293

SEQ ID NO: 477404 - DNA, 201 bp, Homo sapiens; identical to SEQ ID NO: 476297

SEQ ID NO: 477405 - DNA, 201 bp, Homo sapiens; identical to SEQ ID NO: 476300

SEQ ID NO: 477406 - DNA, 201 bp, Homo sapiens; identical to SEQ ID NO: 476299

SEQ ID NO: 477407 - DNA, 201 bp, Homo sapiens
ctgtgctgcaggccaaggggagagaatgtcagactacagccatagggcgtcctccccgacactgcccggtgatctcacagccctgtttctggaggctagcratgtgcgcagtagcccgctgcggccaggtcaggagcttgcaggacccagcccctcaggtgcctggcaggcggggtcatggaggccccagctcttgtccag

SEQ ID NO: 477408 - DNA, 201 bp, Homo sapiens
gccactcatttccatgatgtgtctcttccgcctgggtttgctgagtgtctagaatcttctggaacttcccacaagctctcggcatgcagaggggagcatcyatctgctctgggccccacgtggctgcatcaagcctctgggtgcactgagcctcccctgggcctgggcctgggcctgggcccatcttctgtcatcaaaagt

SEQ ID NO: 477409 - DNA, 201 bp, Homo sapiens
gatgaggcaggatgtagacagaaataagttctacagaacaacaactgagcagaaaataagcatctccagccacggaggtctcagcctctgagaaccgaggrtgccacgtggatggttacagcgactgccccagaggccgctgggccaatgttcacagtgagggggtggtagggagtctctgactgcttttgcaccttttag

SEQ ID NO: 477410 - DNA, 201 bp, Homo sapiens
acagtgcccctcaaggcagggccccccaggagcccactggccaggcccagaggtggggttagctctgcagtgtgaactcataggttctggtctcccagtgrgagaggtccttgtccatcatgctacgctcagtgaaggtcacgtggccgtccgcatctaccaggatgatagtgttggttctgaaagagagcaggggccctc

SEQ ID NO: 477411 - DNA, 201 bp, Homo sapiens
cctgggtttgctgagtgtctagaatcttctggaacttcccacaagctctcggcatgcagaggggagcatccatctgctctgggccccacgtggctgcatcragcctctgggtgcactgagcctcccctgggcctgggcctgggcctgggcccatcttctgtcatcaaaagtccctggtgttggaaacctcagctggctcaa

SEQ ID NO: 477412 - DNA, 201 bp, Homo sapiens; identical to SEQ ID NO: 476305

SEQ ID NO: 477413 - DNA, 201 bp, Homo sapiens
ggggttagctctgcagtgtgaactcataggttctggtctcccagtgggagaggtccttgtccatcatgctacgctcagtgaaggtcacgtggccgtccgcmtctaccaggatgatagtgttggttctgaaagagagcaggggccctcgttcacctggtgtccctcagccctgccctgcctgtcacagccacaaatagggca

SEQ ID NO: 477414 - DNA, 201 bp, Homo sapiens
gatgtatgttacatgtatgtttatctattgcatatgttctcgggtcccctcataaatatgtatggcttttccccaaacctgctgaatatgtatgactctaytgtgtgatatggaccttgggaggcataaaactcaaactgcccttcccctcttcaaagagagcacctcagtccatgctagagactctctcttccgggtctg

SEQ ID NO: 477415 - DNA, 201 bp, Homo sapiens
cccagtgggagaggtccttgtccatcatgctacgctcagtgaaggtcacgtggccgtccgcatctaccaggatgatagtgttggttctgaaagagagcagrggccctcgttcacctggtgtccctcagccctgccctgcctgtcacagccacaaatagggcaagaatgcaggcaggtagagttaggaaccccatgcctgga

SEQ ID NO: 477416 - DNA, 201 bp, Homo sapiens; identical to SEQ ID NO: 476306

SEQ ID NO: 477417 - DNA, 201 bp, Homo sapiens
aagtaccaactggctcgagggttcagggcagctgtctcagcaactccctaaattcctacagctacaagaaaaaccacagtcttgataaactccctcacaayagtagagatcacacacgttatcagaccctcctaactcttgacagcccagaccaccacaaccctgactggacagagaaccagccttcaaacactcttttct

SEQ ID NO: 477418 - DNA, 201 bp, Homo sapiens; identical to SEQ ID NO: 476307

SEQ ID NO: 477419 - DNA, 201 bp, Homo sapiens
tggaaacctcagctggctcaaggggacaggcagggaggacaggatatccatcagcttccctgcagctggggacccagcctggccacttccatgggcctccyggggcagcagggcctgcctttccctctgccctggtggcgggacactggggctcaccccagcaggacccgcccactcacgcctcttcattgttgagcacat

SEQ ID NO: 477420 - DNA, 201 bp, Homo sapiens; identical to SEQ ID NO: 476310

SEQ ID NO: 477421 - DNA, 201 bp, Homo sapiens; identical to SEQ ID NO: 476311

SEQ ID NO: 477422 - DNA, 201 bp, Homo sapiens; identical to SEQ ID NO: 476312

SEQ ID NO: 477423 - DNA, 201 bp, Homo sapiens; identical to SEQ ID NO: 476313

SEQ ID NO: 477424 - DNA, 201 bp, Homo sapiens; identical to SEQ ID NO: 476315

SEQ ID NO: 477425 - DNA, 201 bp, Homo sapiens
gccactgcctgtatcctcaggctaggtccaggaggctgaccctcactctgcagcctttggagccgggagagttgcacaggctctgaggagcccaaaccccmaacccccaaccacaggagcccgtgtatctgctcaaggcatggcacccttggcaccccacctccacacagctgctgagtgccaagtcctgctggtgccacg

SEQ ID NO: 477426 - DNA, 201 bp, Homo sapiens; identical to SEQ ID NO: 476316

SEQ ID NO: 477427 - DNA, 201 bp, Homo sapiens; identical to SEQ ID NO: 476317

SEQ ID NO: 477428 - DNA, 201 bp, Homo sapiens; identical to SEQ ID NO: 476254

SEQ ID NO: 477429 - DNA, 201 bp, Homo sapiens
ggatatccatcagcttccctgcagctggggacccagcctggccacttccatgggcctcccggggcagcagggcctgcctttccctctgccctggtggcggracactggggctcaccccagcaggacccgcccactcacgcctcttcattgttgagcacatccaggaggctggcgatgagcacatccttgggcagcgcctgg

SEQ ID NO: 477430 - DNA, 201 bp, Homo sapiens; identical to SEQ ID NO: 476256

SEQ ID NO: 477431 - DNA, 201 bp, Homo sapiens; identical to SEQ ID NO: 476257

SEQ ID NO: 477432 - DNA, 201 bp, Homo sapiens; identical to SEQ ID NO: 476258

SEQ ID NO: 477433 - DNA, 201 bp, Homo sapiens; identical to SEQ ID NO: 157516

SEQ ID NO: 477434 - DNA, 201 bp, Homo sapiens; identical to SEQ ID NO: 476261

SEQ ID NO: 477435 - DNA, 201 bp, Homo sapiens; identical to SEQ ID NO: 476262

SEQ ID NO: 477436 - DNA, 201 bp, Homo sapiens; identical to SEQ ID NO: 476264

SEQ ID NO: 477437 - DNA, 201 bp, Homo sapiens; identical to SEQ ID NO: 476265

SEQ ID NO: 477438 - DNA, 201 bp, Homo sapiens; identical to SEQ ID NO: 476266

SEQ ID NO: 477439 - DNA, 201 bp, Homo sapiens; identical to SEQ ID NO: 476268

SEQ ID NO: 477440 - DNA, 201 bp, Homo sapiens; identical to SEQ ID NO: 476269

SEQ ID NO: 477441 - DNA, 201 bp, Homo sapiens; identical to SEQ ID NO: 476270

SEQ ID NO: 477442 - DNA, 201 bp, Homo sapiens; identical to SEQ ID NO: 476273

SEQ ID NO: 477443 - DNA, 201 bp, Homo sapiens; identical to SEQ ID NO: 476272

SEQ ID NO: 477444 - DNA, 201 bp, Homo sapiens; identical to SEQ ID NO: 476276

SEQ ID NO: 477445 - DNA, 201 bp, Homo sapiens; identical to SEQ ID NO: 476277

SEQ ID NO: 477446 - DNA, 201 bp, Homo sapiens; identical to SEQ ID NO: 476278

SEQ ID NO: 477447 - DNA, 201 bp, Homo sapiens; identical to SEQ ID NO: 476279

SEQ ID NO: 477448 - DNA, 201 bp, Homo sapiens; identical to SEQ ID NO: 476281

SEQ ID NO: 477449 - DNA, 201 bp, Homo sapiens
cctcagccctgccctgcctgtcacagccacaaatagggcaagaatgcaggcaggtagagttaggaaccccatgcctggaggctgtgccaagtcacagagarcagcagcctcagtcttggggatgatgaggggccatcagtggcgtgtgagctcttggctggctccacaggcccacacttgctgagtcctgccaccttcact

SEQ ID NO: 477450 - DNA, 201 bp, Homo sapiens; identical to SEQ ID NO: 476286

SEQ ID NO: 477451 - DNA, 201 bp, Homo sapiens; identical to SEQ ID NO: 476289

SEQ ID NO: 477452 - DNA, 201 bp, Homo sapiens
tgctcaacgaacagcaggcctggagctcgggagccaggagagaggcccatggacctgcccttgtggaaggaggcagcttcagggcccgccacaatgtgccraccacttcccgtttgcctgtcctggcagaaggccccggactaacagcattggccaagttctggggctttggagggggaggagggcaggagggaggaatgc

SEQ ID NO: 477453 - DNA, 201 bp, Homo sapiens; identical to SEQ ID NO: 476290

SEQ ID NO: 477454 - DNA, 201 bp, Homo sapiens
aacggctccggacagcaagtgccccgcaccagccctcggccttccacctaggggacactgcaactctcccagcctccatagcaagtgtgcagacccatgtrgggcagggctgggcatgccacacacaagggatgctcaacgaacagcaggcctggagctcgggagccaggagagaggcccatggacctgcccttgtggaag

SEQ ID NO: 477455 - DNA, 201 bp, Homo sapiens
gctgggcatggagccctgggccttcaagatggaacagatgcagagaaagagccaggcatggtgccttcctccccgaagtgctgcccccaggtgggacccaycttccccacccctggtaggcttcaagggcccccccgtctatgttcacattccactcccgttcttcctcaccatggtctttggcaactttcctaagatact

SEQ ID NO: 477456 - DNA, 201 bp, Homo sapiens
cactgcctgtatcctcaggctaggtccaggaggctgaccctcactctgcagcctttggagccgggagagttgcacaggctctgaggagcccaaacccccamcccccaaccacaggagcccgtgtatctgctcaaggcatggcacccttggcaccccacctccacacagctgctgagtgccaagtcctgctggtgccacggc

SEQ ID NO: 477457 - DNA, 201 bp, Homo sapiens
tgctgggcatggagccctgggccttcaagatggaacagatgcagagaaagagccaggcatggtgccttcctccccgaagtgctgcccccaggtgggacccmccttccccacccctggtaggcttcaagggcccccccgtctatgttcacattccactcccgttcttcctcaccatggtctttggcaactttcctaagatac

SEQ ID NO: 477458 - DNA, 201 bp, Homo sapiens
aggatgtagacagaaataagttctacagaacaacaactgagcagaaaataagcatctccagccacggaggtctcagcctctgagaaccgagggtgccacgyggatggttacagcgactgccccagaggccgctgggccaatgttcacagtgagggggtggtagggagtctctgactgcttttgcaccttttagtttccaat

SEQ ID NO: 477459 - DNA, 201 bp, Homo sapiens; identical to SEQ ID NO: 476292

SEQ ID NO: 477460 - DNA, 201 bp, Homo sapiens
gtatcagactctgctgctcctcactggcataaaggcagaccctgaactgggcatggggacacagatgggtaacacgcaaaccacagggccctgatccgggkgatgctggccaagccacgggcagtgcaatgcagtatggcaaaggaaggtttcctgtccacagtgcccctcaaggcagggccccccaggagcccactggcc

SEQ ID NO: 477461 - DNA, 201 bp, Homo sapiens; identical to SEQ ID NO: 476295

SEQ ID NO: 477462 - DNA, 201 bp, Homo sapiens; identical to SEQ ID NO: 476294

SEQ ID NO: 477463 - DNA, 201 bp, Homo sapiens; identical to SEQ ID NO: 476296

SEQ ID NO: 477464 - DNA, 201 bp, Homo sapiens
cagttgctcaactctgtgaatgaaacgaaacctactgaatgatacactttaaatgggtgaactgtgccgctagtcagtcatatctcaataaaactttatcaaaaaaaaaaaggcaatgtggaccaggtggggcaggctcagggatgaggcaggatgtagacagaaataagttctacagaacaacaactgagcagaaaataa

SEQ ID NO: 477465 - DNA, 201 bp, Homo sapiens; identical to SEQ ID NO: 476298

SEQ ID NO: 477466 - DNA, 201 bp, Homo sapiens; identical to SEQ ID NO: 476302

SEQ ID NO: 477467 - DNA, 201 bp, Homo sapiens; identical to SEQ ID NO: 476301

SEQ ID NO: 477468 - DNA, 201 bp, Homo sapiens; identical to SEQ ID NO: 476303

SEQ ID NO: 477469 - DNA, 201 bp, Homo sapiens; identical to SEQ ID NO: 476304

SEQ ID NO: 477470 - DNA, 201 bp, Homo sapiens
tggcgggacactggggctcaccccagcaggacccgcccactcacgcctcttcattgttgagcacatccaggaggctggcgatgagcacatccttgggcagsgcctggctccgttccacagcctccaggaagagctgcttcccaaagcacagcttcctccagggagtctccagcagcgcgttgctcagcccgtaggtgcctg

SEQ ID NO: 477471 - DNA, 201 bp, Homo sapiens
cctgggcctgggcctgggcctgggcccatcttctgtcatcaaaagtccctggtgttggaaacctcagctggctcaaggggacaggcagggaggacaggatrtccatcagcttccctgcagctggggacccagcctggccacttccatgggcctcccggggcagcagggcctgcctttccctctgccctggtggcgggacac

SEQ ID NO: 477472 - DNA, 201 bp, Homo sapiens; identical to SEQ ID NO: 476308

SEQ ID NO: 477473 - DNA, 201 bp, Homo sapiens
gctgcagggctgcggtgggaagcccagaacaggggcgcaccttgctcagcaggaaaagcccatggggagggggtgagcagggagccagggctctctgaagygtccaggtgcagggcaaggtgcccacagaccataaggcacttaaatggccacaaagtcatctcagaagagtaatatgacaagtgcctggtctctaaaaag

SEQ ID NO: 477474 - DNA, 201 bp, Homo sapiens; identical to SEQ ID NO: 476309

SEQ ID NO: 477475 - DNA, 201 bp, Homo sapiens
ccatctaattttgtgtttttagtagagacagagtttcaccatgttgaccaagttggttttgacctcctgacctcaggtgatccgcccacctcggcttcccraagtgctgggattacaggcgtgagtcacacaccaggcgtgtttcctccacgtttctgctcaaggcggaaaatctccatctacccttaacttatgactcaa

SEQ ID NO: 477476 - DNA, 201 bp, Homo sapiens
gctgaaggacgaggccgcctatcagaggcccagaggagaaggagggtaggcagggggcagaaaggggccccagggggaggagtgggagatggtccatgggkgcttctctgaagggggcaagctggacagggtgggagtggacgctggatcacctgggcagggcagtggtctgacctgggtggggagcgagggatgggtggg

SEQ ID NO: 477477 - DNA, 201 bp, Homo sapiens; identical to SEQ ID NO: 476314

SEQ ID NO: 477478 - DNA, 201 bp, Homo sapiens
tccaaccctctctgccgtgggctttgcagacggagggtggccctggatcccccaacagccccagcacaggctggttcccagggcagacacatacgcagtgyaccccgtggggtgggacccagcggctatgcggcctgccagggagtggagttggcacttgccttcccctcacacacaggaagatgagcctatgacagagga

SEQ ID NO: 477479 - DNA, 201 bp, Homo sapiens
gtgtgcacctgtgtgtgtgtgtctgtgcaactgtgcatgtgtgcacatgtgtagcacacctgtgcacgtacatgtgcctgtgtcggtgtccatgtatatgscttgcatgtgtgtgcttgtgcacacgcaggagtgtatgtgtgtgccatgtgagtgcctgtgtacatgtgcaagagtgggctcaggtgtatccacatgttc

SEQ ID NO: 477480 - DNA, 201 bp, Homo sapiens
gagagtcgcccttctgccttgttcggcatcgtgtgtgtgcacctgtgtgtgtgtgtctgtgcaactgtgcatgtgtgcacatgtgtagcacacctgtgcaygtacatgtgcctgtgtcggtgtccatgtatatggcttgcatgtgtgtgcttgtgcacacgcaggagtgtatgtgtgtgccatgtgagtgcctgtgtacat

SEQ ID NO: 477481 - DNA, 201 bp, Homo sapiens
aaaaaaaaaaaaaagagagagtgggtttttctcaggtcttctcggtgcccaattccaaatgtggctgtctcctctgcaggagcaggtctgcttgtcaagartccaagcacgcctgtgttctgtggccacaggagaggaggggccgcttttaaatacaagcctactcctgtcgttggaccagaacaaagacctactggccag

SEQ ID NO: 477482 - DNA, 201 bp, Homo sapiens
gaaattgggccatttgttccccggggaggcagtgctttccttccagtaccccgtcggttgttatttggaacacctggcatttcacatggtctttggccatrtgcccctggcttgagaaactccgtcatgaaaatcgacaagtgtgggtcagaaataagggaggacgacagtttcgttccttccatttcatgttttaaaatt

SEQ ID NO: 477483 - DNA, 201 bp, Homo sapiens; identical to SEQ ID NO: 157433

SEQ ID NO: 477484 - DNA, 201 bp, Homo sapiens
tcatctggcccaccctccttagactctcctcccttcaagagttggagcctcacagaggttgcagggagccaagatcgcgccactgcactccagcctgggcracagagcgagagactgtctcgagaaacaacaacaaaaagttggagcctcagaccaagcacacacctgtactcccagcactttgggaggttgaggcaagag

SEQ ID NO: 477485 - DNA, 201 bp, Homo sapiens
ctgtcgcccgacactgcaagcctcctaccagctactcagaccacctggagaactggctaaacatgcatcagcgtctgagcaggactgaaaatctaatgccrtggagaagcgacagtgtcagaggagcaggtgacactatgctgaggtggttttcatctggcccaccctccttagactctcctcccttcaagagttggagcc

SEQ ID NO: 477486 - DNA, 201 bp, Homo sapiens
tttgttggagtatcttacagaacgcatcagtgaaacatctcatgagaaaagtaagtttaagaatggaaatttggtttggtttaccttttatgatgtgtccyttttgccttttatctttttgtgtatttttcttcataggaagcagattcactaatacagtatacctgataaccgtagttgtaaatttcaaattcttattgt

SEQ ID NO: 477487 - DNA, 201 bp, Homo sapiens
cttaatatttataattgtttcacctgtattcttttttttatttaatctccaaggagctgtaagttggtatgtatcgcctgtattcttaaatagcattttcrcaatgttatatccaagtttcaagattatgaagctttcagatttcatggttaaattttttaatagctctatattctgtctccaggagaaaatatagtgaaa

SEQ ID NO: 477488 - DNA, 201 bp, Homo sapiens
tagaaaaaccacaacgcagagtctaagaggtggcctcccaaagccaaataaagcagttccaagtaagaaccacagaattgtactttatggaaaactggcarcctttgaaagcatgtgcaacattccaaggacacagcactgaaagctaacatccaccagttagccgaagaaagttttttttttttcccaatcactgccatg

SEQ ID NO: 477489 - DNA, 201 bp, Homo sapiens
ccaaaaaaggaaggaatatgccagtgaattattagacgccatatttaaagcttccccctttttttcttcaaatataatcaggcagcaggaaattgttgttyttaatatttataattgtttcacctgtattcttttttttatttaatctccaaggagctgtaagttggtatgtatcgcctgtattcttaaatagcattttca

SEQ ID NO: 477490 - DNA, 201 bp, Homo sapiens
tgctcctctgatgaccaatcagcggcgagaagctcttttaacgtccgtccttctttcacgcctccttccccgcgctttggttcgtgcgtccgcgccccagygtcgggtctgcgtggatcggtccttccaggacaccgtcgccttcccggccgcgtcggagtccggcggcgacctgcctctgaaacatggcaggctcggatg

SEQ ID NO: 477491 - DNA, 201 bp, Homo sapiens
gatgcacacaatgtacaagcagtaattgattcactggccttggactacttgcaggtcagcttgtctcacataacaggttggtatatgtataactatcacayaattatgcattttagtaaaaataattgttagaactgtagacattgtttacttaaccaaatgagtgagcttatggagtagaccaaattgtaagattgagct

SEQ ID NO: 477492 - DNA, 201 bp, Homo sapiens
taaaggcagcaaatgggaagtatatccagctcaggtccaagggcctaggacaaggaagcctcccaaaggaaaaaggtaacattactgcagacttcagtgtytacagtctgtttacaaaggaatttgaaaatgcaggggcatgatctccaaatttagctgtgaagaccagaatgaagtatttgttaaagtacgtattacagt

SEQ ID NO: 477493 - DNA, 201 bp, Homo sapiens
gaaaatgcttatgctaaaatattcatgaacaaaacaggatataaagtacagtatggttacaactaagcatactgcatagttgcctgagaattttttaaatytacatggaaaaagagaagtacattgaaacattaatggttaaaaaaaagattaatagtggttgtatttagggtgtgggactatggtgactgaaacttgaaa

SEQ ID NO: 477494 - DNA, 201 bp, Homo sapiens
tggtgagtagttaaacctgaagtatcagttattattcaacatacaactataaaaatgtaaatggtatgtaggagtgtttaaaattgagaagaatagagtgytaactggacatgggatttgaaattccagaatatcccactacccattaaatatgaacacttatctgaagtcgcaggcatatgggcagataagtccaaggca

SEQ ID NO: 477495 - DNA, 201 bp, Homo sapiens
taggcgggaatttcttcttcctaataagcctgggagcgatatgggagactgaggtctatttcagccctacagtctacagaccataaaagatggccacgccygggggaccgtctgtagacctgcccccaggcgtgtattctctttcccagggatgttccttgctgagaaaaagaattcagcgatatttctcccatttgcttt

SEQ ID NO: 477496 - DNA, 201 bp, Homo sapiens
ctaatgaaatgctgtctaaaaaagccttagcctcaccaagttctaaatcacatgaagatatgttgtaccctcctagtgttttgtccaagagtaggacatcytttgttgaagacagtgagttgtaatggatgttagttctttactgctgatgatcattcttggggcaattgttgttgccattagcctttttacttttattgc

SEQ ID NO: 477497 - DNA, 201 bp, Homo sapiens
ctcaggtccaagggcctaggacaaggaagcctcccaaaggaaaaaggtaacattactgcagacttcagtgtttacagtctgtttacaaaggaatttgaaartgcaggggcatgatctccaaatttagctgtgaagaccagaatgaagtatttgttaaagtacgtattacagttattttaaactaaataatagacacctagc

SEQ ID NO: 477498 - DNA, 201 bp, Homo sapiens
atatttctaatgtatgtgaacatgtttatataggtatgtatgtatgtatataaaatggtttatttcttagaattgcatcgtaatatccactttaatttgtyttactagcggaaaccctttctgtgagtgggattccaaatgctaggaagctaggggagcctatccgagcagctattcctttacatccaccctaccaccctt

SEQ ID NO: 477499 - DNA, 201 bp, Homo sapiens
caccagagaaaccctgacttgcacaagataattgggtaaacacaagaccaatactattgcaagtgcgaagcagcctccattaatgagtttctggtaacctsggattatcattaaactgttgtttatgacataatattcctgtttacttgtaaatatgttttaactaaaaacacccatgtaaggcttatataagtaacttaa

SEQ ID NO: 477500 - DNA, 201 bp, Homo sapiens
ctcgagcaccctgccccataggaaaagaatacttgcattcaagtcactgctccccagccgtaaattctactggagagcatacggaattttctggggtaagyggaaaagcttactttcagttggctagaagtacacttgtatgtatgtctgtgtgtgtgttggtaattgattagaaggccgtgtgtgtgtatgtgtattggt

SEQ ID NO: 477501 - DNA, 201 bp, Homo sapiens
ttatttattttaaaagggtaaggctggactcagtggctcacgcctgtaatcccagcactttgggaagctgaggtgcaaggattgcttgggaccagcctggrcaacatagtgagacgtcatctctccaaaaaattaaaaatttagccaggcgtggtggcacatgcctatagtcccagctatttgggtagccaaggtgggaga

SEQ ID NO: 477502 - DNA, 201 bp, Homo sapiens
tctctcagcttcaccacctcttcgcttcgaggccgtggaacagcagtatgctgtgggagagagagaggcactggggcgaggccggtaggacacttgggtcytggctgtaaaaagagcggtcagaagggtcgtccccggacttgtctttctgtggggcgtctagccgctgtccgtgtgccctccgcccttgcactatgggcc

SEQ ID NO: 477503 - DNA, 201 bp, Homo sapiens
attcctgtttacttgtaaatatgttttaactaaaaacacccatgtaaggcttatataagtaacttaagattttaggctgcaacagtatcaattgaatttgsagtatagttttgactatgtagaaattacagcactctggaaatcatcccaagaaattaaatacatctttttaaaaaccatgcctaaagggtctttgaaatt

SEQ ID NO: 477504 - DNA, 201 bp, Homo sapiens
tagatcgatataataaaaaagaaaaactaacaaatgcattaccgttgatgttgttattataccagttcttaacagcctaagtttaatcaccactttttccrgcaccagagaaaccctgacttgcacaagataattgggtaaacacaagaccaatactattgcaagtgcgaagcagcctccattaatgagtttctggtaacc

SEQ ID NO: 477505 - DNA, 201 bp, Homo sapiens
taagagcttggatgctcggttgaggcaccattggaattgaaactcaggatctcctgtttactagacaggtgctttaaccagctaagccatggtgctgcccrttgtgtatgtttttaataactgtaatatatgaccttttcccctttaggcgtttactgaagcatttgaaagggaactaagaagacataaagttcaagagaa

SEQ ID NO: 477506 - DNA, 201 bp, Homo sapiens
acatagtggagatgtttgtttctaataccgattgaaagtgctttcctaccaattcccaggcatttcaaggaacaagtattttaagctaagttacttttggyacagaaaccgttaaactttgcaaatcccagcaatatctaggggagaggagaatgtggtacgcaggaaacgtcaacagtattgataattctgagcttcatg

SEQ ID NO: 477507 - DNA, 201 bp, Homo sapiens
tgggcagagcctttatagcagttgagcatattcagtagcctagtcagagacaatgagatgaaaacttggcctctcatggatacaaaattatgtgatttttyccccccccagacctcatagttattcctaggagtcaagaagatgatgcacacaatgtacaagcagtaattgattcactggccttggactacttgcaggtca

SEQ ID NO: 477508 - DNA, 201 bp, Homo sapiens
aggatgctcagaatatgcatgtcatgggcctctgggaatgtggtggctgatcaggctgctagaagcctggagggccttggctatcggattcctagctttgsatagcaggagcgagacattgtgcaaaaaccagaggcatcattaaaattctgtctgccatatagctgcatcattgatgctttccagtgccttccttgccac

SEQ ID NO: 477509 - DNA, 201 bp, Homo sapiens
actaatcaaggatgatcagaaataggaacaaaatccacagcctgaaagagaaagaccaagctaaacaccaagagtgaattacccctgaagaaataaagatmaaagaagacaaaaaatttaagcttgtgtccttagaggaggcacagaagatattgcctccataaaataagagaaggatgctattaaaaataaacaattaag

SEQ ID NO: 477510 - DNA, 201 bp, Homo sapiens
ataggagtccctatactgctgtcagaaaatttctcagcaaaagttttacagtccaggagagagtaggatgatgtattcaaaatggtaaaagcaaaaaaaamaggactgccaaccaaaaatactttacctagcaaagctttctttcagacatgagggagaaataaaaacttttcctgacaaataaaagctaagggattttat

SEQ ID NO: 477511 - DNA, 201 bp, Homo sapiens
ccggcgtagtggtgcatgcctgtgatcccagctacttgggaggctgaggtaggagaattgcttgaacccaggaggtagaggttacagtgagccgagattgygccactgcactccagcctgggcaacagtgtgagactctatctcaaaaaaaaaaaaaattgtagtactatcatttgtggcaacatgggtaaacctagagaa

SEQ ID NO: 477512 - DNA, 201 bp, Homo sapiens
agcacctttgaaaaagaggtattagcgtccttctatttacagaaactatagggtttttaggggagtagctaatatattactagagaagaccttcgtagaarttggagtacaaaatgaaagtgccaagttcatcctgtcatattttaacatagaagactaaaaattaaaaataggggacaaatgctaaatctagagagggcg

SEQ ID NO: 477513 - DNA, 201 bp, Homo sapiens
tgttagttaacaatgttgtgtatttcaaaatagttagaaaggtggggcacagtggctcaagcctgtaatcccagcactttgggaggccaaggagggtggawcacctgaggtcagttcaagaccagtctgaccaacgtggtgaaaccccatctctactaaaaaaatacaaaagttagccaggcgtggtgatgcatgcctgta

SEQ ID NO: 477514 - DNA, 201 bp, Homo sapiens
gcttgtgggaaatttctgtagctctagcaaaattctttaacatcatattctaatttacaactattttcattattgggttcatttcacagtttattcctttkatttgtgtctttaaaaacttcagtgaatatatttttcctttgcaaaatttctaattgcttacttttcctgtttacttctttttcttttatttctgcccct

SEQ ID NO: 477515 - DNA, 201 bp, Homo sapiens
agtcaggcctaagatttcatagtaatggtggcatatttaaaaaggattgaattcacagccttagcaaagattcctgtgataaagttaggacctttgtgagractaaatgtattctagggattgggattaggagatttggatagacgcacataagaacgttgaatctccaggttccctgaatctttaaagtttgctagaaaa

SEQ ID NO: 477516 - DNA, 201 bp, Homo sapiens
tcatgggtaccccgctggatgctgctgtggggccgcaaggagttctgctcctgccggcatccagaactcctcctggtccctgcacccactcacctgcatgmctcccctcctacaaaggatttgagagctgcaggctgaataaacgagcaactccctttgtgaggcctatgaaggggtcagggaaaatttcctgtttcagtc

SEQ ID NO: 477517 - DNA, 201 bp, Homo sapiens
acgcacataagaacgttgaatctccaggttccctgaatctttaaagtttgctagaaaagagcaaactttctttgcatggagaacatgcatagacctcatcwgagataatgttttaccttgttcttgaaatttgcccatgtctttcaacccattgattttagacaatcgctagggccaagtatcagtgtgaccaaagaaagg

SEQ ID NO: 477518 - DNA, 201 bp, Homo sapiens
gcgaaaagggtcagatgagggttggagaagaaaagaagagagaaaagagaggtctaggtgagggaatggcagagctggtaaggccaggtcctgtggtcttyttgggtgctggtcacagagtccactcttttgggtaaagatgaagtcgaagctgaagccgcttccaggctcttctcagcccagggttatcttgaatcagta

SEQ ID NO: 477519 - DNA, 201 bp, Homo sapiens
aaacatcaagtggctatggggccagaactgctcatcatgacctgtactggcagacccacaaattataaatttagtgggtacagcacaaatccatcacacartggaaatggtgcagttgaggttggactcaacctgatccagaggccctcagtaacagaagacagtggttcaaactccatatgaactacatctgcagaacta

SEQ ID NO: 477520 - DNA, 201 bp, Homo sapiens
gttataaagatagtacagacaattctcatacacccttcacccagcttccactaatgcttacatcttacataatcatgctacaatgatctaacgaaggaaaytggcgttgttacaatactatcagctcaatttttggcttcatttggacttttccagtttttccactaacgtcctctttttctgtttcgagacccagtccag

SEQ ID NO: 477521 - DNA, 201 bp, Homo sapiens
gcaggaagtttatgttaccatccacccagataccctcaaactcagggatggttctcctaaaaaggagaccttctaggggtgggaagtcagagccgactttmcagtgcagggttaggatgacagtgctctccacgaatgtgtagtaaccggttgtcttgtccagttcctcattaggatggcccatatcttcatctgacataa

SEQ ID NO: 477522 - DNA, 201 bp, Homo sapiens
ccaccgcacaccttatcccccctttcactgcctctggaactcagctcccactgcttagtcttatacacaaggcacagcagttgttgcccaatctccctgcyctcacgttgagcccctgcccacactgcctgcctgtcttgtgtctcgctcttattgcaatactctgctcctttgctttctgccacctcctgcttttccctt

SEQ ID NO: 477523 - DNA, 201 bp, Homo sapiens
cagctcccactgcttagtcttatacacaaggcacagcagttgttgcccaatctccctgccctcacgttgagcccctgcccacactgcctgcctgtcttgtrtctcgctcttattgcaatactctgctcctttgctttctgccacctcctgcttttccctttttactgtgacctctcctagcactccccctaatctggatac

SEQ ID NO: 477524 - DNA, 201 bp, Homo sapiens
atgcctcagccacccgagtagtggggattataggcaggtgccaccatacccggctaatttttgtatttttggtagagatggggtttcaccatgttggccargctgatcttacattcctgacctcaagtgatccacctgcctcggcctcccaaattgctgggattacaggtgtgagccactgtgcctggcctaggacaagtc

SEQ ID NO: 477525 - DNA, 201 bp, Homo sapiens
ctatggaaggcttaatgcatagttacaatgatctgattagttgaggtgttttttttctttctggaaagatatctctaacattccacactgaagatgtaacyctcagggggtctgttttgaggatgcaatctggtctgagttaggtacagaacaatagaggaagcagttaatctagaataaatatcagtgattggaaggagg

SEQ ID NO: 477526 - DNA, 201 bp, Homo sapiens
tcttaatatttaaagacatttttatctgtattttcactgacataaactccagatcagcagggttttttttcagccctttgaggatatcatcgtattttttyctggctcacattgtttctgtttttcaggtcagctatcactcgtattgctaccatttgaaaataaaatggtgcacgtgatatgatgtgttaaacgtaattt

SEQ ID NO: 477527 - DNA, 201 bp, Homo sapiens
aaaagtagatatgtacatatcattgcacggatccagaggtccgaaatacagcctgaatgtactaccttgaatgtatggcagttatcagactggctcatggkcacgactgaggcccagtgccattctgcccacctcctgcagcttgctcagctacctggcaactcagcatcaagtagccgttcagacctaaacagtaaattc

SEQ ID NO: 477528 - DNA, 201 bp, Homo sapiens
tgatttcaggtctttagacaataactctttcaaccaattgccaatcagaaaatcttagaatctgcctatgatctggggcccccacttcctattgtcccatytttctggattaaaccaatatacatcttacattaattgattgacgtcttatgtctccctaaaatatataaaaccaagttgtagttcaaccactttgggcac

SEQ ID NO: 477529 - DNA, 201 bp, Homo sapiens
tatagtagcatgatttacaatcctttgggtatatacccagtaaggggatcactgggtcaaatggtatttctagctctaaatccctgaggaatcgccacacygtcttccagaatggttgaactagtttacactcccaccaacagtgtaaaagctttcgtatttctccatatcctctccagcatctgttgtttcctgactttt

SEQ ID NO: 477530 - DNA, 201 bp, Homo sapiens
atgaagctgacttgaccgtgtcgataagctttctgatgtgctgctggattcggtttgccagtattttattgaggattttcacatcgatgttcatcacggawatttgtctaaaattctctttctttgttgtgtttttgccaggctttggtatcaggatgatgctggcctcataaaatgagttagggaggattccctcttttt

SEQ ID NO: 477531 - DNA, 201 bp, Homo sapiens
gaacccgggagacagaggttgcagtgagccgagattgtgccactgcactccagcctgggtgacagagtgagacttggtctcaaaacacaaaaacaaaaacraaaacaaaacacaacaaaaaaccaaagaaaccaaaatgggaggcaggtttgcatgacccagttcccagcttgacttttccctctggcttagtaagtttgg

SEQ ID NO: 477532 - DNA, 201 bp, Homo sapiens
ctcttttgttctttattagtcttgctagtggtctatctattttgttgatcttttcaaaaaaccagctcctggatttattgattttttgaaggattttttaktctctatctccttcagttctgctctgatcttggttatttcttgtcttctgctagcttttgaatttgtttgctcttgcttctctagttcttttaactgtga

SEQ ID NO: 477533 - DNA, 201 bp, Homo sapiens
cttccaactatgtggtcaattttcgaataagtgtgatgtggttctgagaagaatgtatcttctgttgatttggggtggagagttctgtagatgtctattargtccacttggtgcagagctgagttcaagtccgggatatccttgttaactttctgtcttgttgatctgtctaatattgacagtggggtgttacagtctccc

SEQ ID NO: 477534 - DNA, 201 bp, Homo sapiens
gtagatgtctattaggtccacttggtgcagagctgagttcaagtccgggatatccttgttaactttctgtcttgttgatctgtctaatattgacagtgggrtgttacagtctcccattattattgtgtgggagtctaagtctttgtaggtctctaaggacttgctttatgaatctgggtgctcctgtattgggtgcatata

SEQ ID NO: 477535 - DNA, 201 bp, Homo sapiens
gttctggcagcaggagttggtcccacaaggtcccaggggttttctagaaagacttttgcttggcttcaaggtatagaaggcttccttttcttttatggggwtgaagacagcccctgcccactcaaccttgaacagcactgactgcataacgctttgttactggaagtgccaagaatatttttttgctctgagcccctcctt

SEQ ID NO: 477536 - DNA, 201 bp, Homo sapiens
gccactgtgcccggccttgtttacctttctgttacattagcaacaacatatcgtcatgaatcagaatttacaccacttgtacaataaaagatcagaatccrttgcatgcctagcatggcacgtgggacgtgttgccaaagaccagtgcagtttaatgtacttcttcaagctaagtaacaacatccatcacacagataatgt

SEQ ID NO: 477537 - DNA, 201 bp, Homo sapiens
accaacccaaatgcccatcaatgaacgagcatcttcttcccttccattgaccaaaaacaagtttttaaaaagaaaaaatgtacaataccacatgccacttyctgataacatcctacaggctctggtggttgtctactgagtaggagggctcaagtcattattaggagaaaattttctagcaacagaatcacattaaaccag

SEQ ID NO: 477538 - DNA, 201 bp, Homo sapiens
gtcccagaattccaacaggcgagtgtcagagcatgacaactgcaggagaggttcattgtcacagaagaagtggttgatgacgtcgccatggcagtaatcargatgagctcgggagaggacagtgggtaccatggctaggaaaggagctgcccaggcagccccagccagctggacacacatagcccggctcatcagagtgcc

SEQ ID NO: 477539 - DNA, 201 bp, Homo sapiens
ttaacctcccaaagtgctaggattacaggtgtgagccgctgcaactggcctatattttttaaagtatatatatatttatgtatctataatatgtatgatcwatatatatatatatatatatatatataatataaatatatatatatatatattttgagacagagtctcactctatcgcccaggctggagtgcagtggtgcg

SEQ ID NO: 477540 - DNA, 201 bp, Homo sapiens
ctgcaatctgaaaaggaaaggaaatggagacaaataaaatggtcaaatgttcttcttcagtcaatgaggactgggttcggggccaggagagttattttctygtccctagaaactcccggctacggacctttgttattgtgtgggacagaagggaattgagattcttagcccacagtgtctcacagccccattttcttgggg

SEQ ID NO: 477541 - DNA, 201 bp, Homo sapiens
tgaagaccctgaagactctcatcctagtctgactttaagcttcttgagtgacttcaatcaatggcccagcctctgactcactgttagaattctatgtggaygtcacctagagatgtctagatatattggttccagacatttgtcttaatgtggcagggatgtcaatgtgcacaatggcaaatgagactcctggatagatag

SEQ ID NO: 477542 - DNA, 201 bp, Homo sapiens
ctttagccaggattcagagctaaagtgtaagtgtgtgcttctgctttctggatgtatctctcaaaattgctctgtctgtttattcagctcctggatctacyttctcttttctttgaattggacaccattcatgtcattgctcactcagaacttcagctgttctcatgatcacatgctttcttccctgtttatgtcctatcc

SEQ ID NO: 477543 - DNA, 201 bp, Homo sapiens
attcctggctgtaaagggaaagctgttgataattcgatattaaacttagtacttggtgtatatggttgaagatattctttgtaagactaaagaatttttattttttttactagctgtggtaggctgaatagtggctcctccaaagaagtccaagtcctccagagcctgtgaatctgttaccttacctggcaaaaggtactt

SEQ ID NO: 477544 - DNA, 201 bp, Homo sapiens
tacaggatcttggaggaggcacccataagtaggaagccctgaggcttcatgccattaacttaatggcgaatacacctttgggtggggccagaatttccacrctggcagtctggccctggaacatgaccctttaaccactgcactgcctactggcgagaacaagttgcaaagttagtaactggcagagttaggggttcaaaa

SEQ ID NO: 477545 - DNA, 201 bp, Homo sapiens
cagttagggtggggcaggaacaaatcacagtggtggaatgtcatcagttaaggctattttcccttcttttgtggatcttcagttgcttcaggccatctggmtgtatacgtgcaggtcacaggggatatgacggcttagcttgggatcagaggcctgacattcctgtcttatattaataaaaaacaaaacaaaacaaaatag

SEQ ID NO: 477546 - DNA, 201 bp, Homo sapiens
gtggggcaggaacaaatcacagtggtggaatgtcatcagttaaggctattttcccttcttttgtggatcttcagttgcttcaggccatctggatgtatacrtgcaggtcacaggggatatgacggcttagcttgggatcagaggcctgacattcctgtcttatattaataaaaaacaaaacaaaacaaaatagtggtgaag

SEQ ID NO: 477547 - DNA, 201 bp, Homo sapiens
tggtggaatgtcatcagttaaggctattttcccttcttttgtggatcttcagttgcttcaggccatctggatgtatacgtgcaggtcacaggggatatgayggcttagcttgggatcagaggcctgacattcctgtcttatattaataaaaaacaaaacaaaacaaaatagtggtgaagtgttggggtggtgaaaattttg

SEQ ID NO: 477548 - DNA, 201 bp, Homo sapiens
ctcccctggtctctgaaagcagagaacacagctgtggtggcaggtttcagaccagagacatagaacatctttgcttgatcaaattatagtgagttcaagaygcaatgctattcaaaacatttcttggagggctaggatgatcaggacttccctagcagtcactacccatcatgaggtggaagagctagagaagacctgagc

SEQ ID NO: 477549 - DNA, 201 bp, Homo sapiens
cagttaaggctattttcccttcttttgtggatcttcagttgcttcaggccatctggatgtatacgtgcaggtcacaggggatatgacggcttagcttgggmtcagaggcctgacattcctgtcttatattaataaaaaacaaaacaaaacaaaatagtggtgaagtgttggggtggtgaaaattttggggggtagtatgga

SEQ ID NO: 477550 - DNA, 201 bp, Homo sapiens
agtgttggaaaacattatctttccattgctgatattctttggcccttattaatatcatagtcattctaatctcttgtttctccacatccaaatatggatgmcctctgtgtcccaacccagatagaggaggaggtattttttttttgccatggcaggcctctaagtttgttttttgggggctctctctctcttctcccttcc

SEQ ID NO: 477551 - DNA, 201 bp, Homo sapiens
tgttaaagaaggattagaaacgggtaggagagagtgagtgagattgatagtgtggtggagatagctggggagaggtagagggtggcataagaacaggaacragaataagagtgagtataaaagtaaagaataggacttcatcagggtgaaagtattggagtgtgtcctgtcagcaaagattgtctgtgcactccaagaggc

SEQ ID NO: 477552 - DNA, 201 bp, Homo sapiens
cacagtgatcaaacaccaatggagtgtgggtaaataatcaggcaggtgtccccaaagtgattaaacaccaagggaagactgtcttcccaagtctgtgaccrgcaccggagttttgggtccacagataatatgtgtctccttgtctctactaaagaggaaaaagaactggaattgggaggacagggagattgaagggtagcg

SEQ ID NO: 477553 - DNA, 201 bp, Homo sapiens
acttcatataaatagaatcataatatacctacttcctggtttctagcttctttctgtgaacattatttttatgggatttacctaggctgttgcacttagcmgtaactaaatatttttcactgatgtttagtactatattatctaaatgtaccattctttattttagcattatagtttttgctattttgaataaacctgtta

SEQ ID NO: 477554 - DNA, 201 bp, Homo sapiens
actttcaagaacagacaaatcatttaaacagaaaatcaatagggaaacattggacttgaattacacatttgaccaaataaaccagacaaacagaacattgyatccaagtgtaacagaattcacagttgtctcaagtggacatgggacattctctaagatagatcatatgttaggccaaaaacaaaccaacaaacaaaaaac

SEQ ID NO: 477555 - DNA, 201 bp, Homo sapiens
ccagggctggaggggttgaccaggcaatctttctgtaggacttgagcttggaactgagatttggagctgacccattgaaagcaaagaagaggctgggaacrgtggctcatgcctataatcctagcactctgagaggccaaggtgggtgtatcacttgaggtcaggagttccagaccagcctggctaacatggtgaaaccct

SEQ ID NO: 477556 - DNA, 201 bp, Homo sapiens
caagttgcttggcttcctattaccttgtgttgaaaacacaataggctttgggatcaggagttcattccagttattttaatgttatttactagcagtgtgcmctcgtgcacattatcaaactcctctgactcttggaatcctcatttttcaataataactcacaaagctgtcaagcctaagggttctaacagctcgaacagc

SEQ ID NO: 477557 - DNA, 201 bp, Homo sapiens
tccattctctctcaaggatgagtgttttcagctctttctctcatccacatctccaagtccttcgtgtcttgatgatgtttacagttcagcttatgctggawgggaaacttagactccagcagagtgttttctgtgggaatgacaggaagccaaggagccctctggggacttctgaggcactgacgttgctccttagaataa

SEQ ID NO: 477558 - DNA, 201 bp, Homo sapiens
ggggttgaagacagcccctgcccactcaaccttgaacagcactgactgcataacgctttgttactggaagtgccaagaatatttttttgctctgagccccwccttctggtcaactgatatagtgggtgtggagctggggtcaaaggcagctcagggttgaatctttttattttttgagacggagtcttgctttgtcaccca

SEQ ID NO: 477559 - DNA, 201 bp, Homo sapiens
taacggtaggtctaaaatcctaaaatctaccccagcactgactaaattcaaacccagtccttatgtttgtgttgcatgagaacctgactgacatacagacytccccccctcaccttagcctccaagcctgttgtcttctttgtaagctgctctcacttaggcattcatacctggagacacctgcctactggcctcactcta

SEQ ID NO: 477560 - DNA, 201 bp, Homo sapiens
gccttgcacccatgccactggcaagccttaacggtaggtctaaaatcctaaaatctaccccagcactgactaaattcaaacccagtccttatgtttgtgtygcatgagaacctgactgacatacagacttccccccctcaccttagcctccaagcctgttgtcttctttgtaagctgctctcacttaggcattcatacctg

SEQ ID NO: 477561 - DNA, 201 bp, Homo sapiens
ggacaaaggtcaaggccatcagaaagtcccagaattccaacaggcgagtgtcagagcatgacaactgcaggagaggttcattgtcacagaagaagtggttratgacgtcgccatggcagtaatcaagatgagctcgggagaggacagtgggtaccatggctaggaaaggagctgcccaggcagccccagccagctggacac

SEQ ID NO: 477562 - DNA, 201 bp, Homo sapiens
actgtgatagagaagcacacccggaacatgcacacgcatacacacatatgtacacacatacacacccatgcacacatactgggattggacactacctcttratcatagagcacttcttggctgctcttccttaaatgcaaagcacatgcacttccctttactgaaagctctgggctactctcagagttcttacggctgcca

SEQ ID NO: 477563 - DNA, 201 bp, Homo sapiens
agaagtggtgtcccaggtgcccagcacatttcttatatacagattgatcaaggaagtgcaagagctgccagggagatccatgaggtgaatcacccattcaycctccccactcgtgatctttccttgttgacccaaagtttgtttttctaagaaaaaatcaacactcagctagaatgtcagcgtttgagagaggagtcagat

SEQ ID NO: 477564 - DNA, 201 bp, Homo sapiens
ggtgatgagaaatggcgacaattcactttctgcaggatcgcagagtttagtcattctgagctgttgcttctctttggtgtctggaggaaaacatctccctmgcatttgatgggcagactcttgataactcccagtattgatgtcataggaggaagcaattgatgtatcatttccaaattcactgcatttgtttatttcaga

SEQ ID NO: 477565 - DNA, 201 bp, Homo sapiens
gtcccctccagttccgaaattctctctatgtcttggagtgtgtggaatagccaggaaaccagcccaggagctttgactcccagccattctgtaagttgackgtgtcatggctctgccttctttcctttctccttccctgtagtctcccttccagctttgtcccttaccaccatccaggatccggtcctgggcacgccctgc

SEQ ID NO: 477566 - DNA, 201 bp, Homo sapiens
cccctttatttcctgttaggggcagtgttgctagccactctggtattggaaccccagtttggctggggctctcaaaacacctccatgctgttttctataayagctgtactaattgacattcccaccaatagtgtacaagggtcccctcttctccacatccgcgccaacacttgtttttcatctttttgataatagctattc

SEQ ID NO: 477567 - DNA, 201 bp, Homo sapiens
gtttctaatcctctctctatttttgaacatgttggtagtggttcaataatgaggcccagggaagcgcttgagtagactctttaaaagcagctaacatggtrctgaggtccgtgttctttggtagcatcagttaatttgaacattggttaactgagtcatcatttaacttactttcacttgtgactgcagaaaatgattgaa

SEQ ID NO: 477568 - DNA, 201 bp, Homo sapiens
cccagcactgactaaattcaaacccagtccttatgtttgtgttgcatgagaacctgactgacatacagacttccccccctcaccttagcctccaagcctgktgtcttctttgtaagctgctctcacttaggcattcatacctggagacacctgcctactggcctcactctataacatgaatgacatcagagatgcagtctc

SEQ ID NO: 477569 - DNA, 201 bp, Homo sapiens
ggcttttctgccccaatctccagctgtcttctatgacatctctgcagattttcactgctggcagagttgagagtgggagtttcctccctcaattctgactyactaacaaatcaggggatggggtagctccctattaatgcacagaaatatgtaactgctagattttcagacagattggaggaagaaattatctcacatgat

SEQ ID NO: 477570 - DNA, 201 bp, Homo sapiens
ttccaacaggcgagtgtcagagcatgacaactgcaggagaggttcattgtcacagaagaagtggttgatgacgtcgccatggcagtaatcaagatgagctygggagaggacagtgggtaccatggctaggaaaggagctgcccaggcagccccagccagctggacacacatagcccggctcatcagagtgccatagcgcag

SEQ ID NO: 477571 - DNA, 201 bp, Homo sapiens
ccatttatgaggaaggcagacacattgccccactgggagttttatatcacccaagctgcaagcatctctgaaacataaaaacaacaaaatattactctgtytatcacacatgcacatcgcgaggcctcaaaaacatcttgctttactcccacaactgatcccagacagtttgcttagatgtcaaacacaaatacgattcat

SEQ ID NO: 477572 - DNA, 201 bp, Homo sapiens
ttcttcaatttagtacaacttttaaataacctctaacctaggcaaaatcgcttttcctttaacaaaaaacatatcctcatatccatcttataaccatcctyaccaaaaaaaaatcttatgtgttttttgtacattctgtgtatagaattgttatccttcttatccctaattctagttaccatgtattaattagaattttaa

SEQ ID NO: 477573 - DNA, 201 bp, Homo sapiens
aaacatgacaatatttaaaagctaaagaaaaaaaaattgtctatcttctcattatcctaacacggccatttaaaacgtttatatatttcttccagactgtycacatgcaaaccagaatatactaaccactttgtatctttaaaaagttttatactttatattgtatatatttcaccctgataaagaccttattgtagtaat

SEQ ID NO: 477574 - DNA, 201 bp, Homo sapiens
agcatggacttaccatgggacccagtggttgtgttcctaagcatttacccagagaaatgaaaataaaaacctgtacatgaacacacagagtagctttattygtaagaacctgaaactggaaacaacccaagtgtccttcaacaggcgaatgtttaaacacactatgttacatccatactatagaatattaatactattcag

SEQ ID NO: 477575 - DNA, 201 bp, Homo sapiens
ggttttcaggaggtttagcatttatacatttccttgaaatggggaaggcatgtaggtggtgtgaggtgaatggttacatccttgtgagactttagttagtrccttgtaaatctacattttacataagataaggtgaatgttttaccaaaaaaagagggagtaaaggaaaatcagttatgcagatttctcagggtaggtgga

SEQ ID NO: 477576 - DNA, 201 bp, Homo sapiens
aacaaaaatgtgattcacagataggctcaatttgttgttatgagccaatggtggactattaccacactaaaattttactcaggagtgtcctagaggagcayggcttggtgaaaatactcttggtaggcagtgctacaagcagcacaactggtcataaacaggatacctggatgcttgagcggtgggagatctcttggctct

SEQ ID NO: 477577 - DNA, 201 bp, Homo sapiens
ctgttttcttgtttatgtccatgggtgctcaatgtttagctactacttataagtgagaacaggcaatatttggttttctgttctttcattaatttgcttaraattatggtctccagttccatccacactgcagcaaagaaaatgattttattttttatggctgcatagtattccatggtgtctatgtgccacattttcttt

SEQ ID NO: 477578 - DNA, 201 bp, Homo sapiens
ccaacagtgtaaaagtgttcctatttctttgtagggacatggatgaagctggaaaccatcattttcagaaaactatcgcaaggacaaaaaaccaaccaccrcatgttctcactcatcagtgggagttgaacaatgagaacacttggacacaggaaggggaacatcacacaccggggcctgtcgtggggtggggggagcggg

SEQ ID NO: 477579 - DNA, 201 bp, Homo sapiens
cggggcctgtcgtggggtggggggagcggggagggatagcattaggagatatacctaatgtaaatgacaagttaatgggtgcagcacaccaacatggcacrtgtatacatatgtaacaaacttgcacctagtgcacatgtaccctataacttaaaagtataataatttaaaaaaaaatttaaaattttaaaaattttaaaa

SEQ ID NO: 477580 - DNA, 201 bp, Homo sapiens
acctaatgtaaatgacaagttaatgggtgcagcacaccaacatggcacatgtatacatatgtaacaaacttgcacctagtgcacatgtaccctataacttaaaagtataataatttaaaaaaaaatttaaaattttaaaaattttaaaaataaaataaaataaaattacagtttaagattacagctctgtgcgaaaagttt

SEQ ID NO: 477581 - DNA, 201 bp, Homo sapiens
cctgtgcctctcacctcacagtggtggttctgggctatggcagtgccatcttcatctacgtgaggccaggcaagggccactccacatacctcaacaaggcrgtggccatggtgactgcaatggtaacccctttcctcaaccccttcatcttcaccttccggaatgagaaggtcaaggaggtcattgaggatgtgactaaaa

SEQ ID NO: 477582 - DNA, 201 bp, Homo sapiens
gcagcacaccaacatggcacatgtatacatatgtaacaaacttgcacctagtgcacatgtaccctataacttaaaagtataataatttaaaaaaaaatttwaaattttaaaaattttaaaaataaaataaaataaaattacagtttaagattacagctctgtgcgaaaagtttaggactatttccaacctggcagctcagt

SEQ ID NO: 477583 - DNA, 201 bp, Homo sapiens
tttttggtaagttttgcttcttctcttgatcccatgtagcccaagcacttatggtgcatacactcagcagcagtgcatactgtgatagagaagcacacccrgaacatgcacacgcatacacacatatgtacacacatacacacccatgcacacatactgggattggacactacctcttgatcatagagcacttcttggctg

SEQ ID NO: 477584 - DNA, 201 bp, Homo sapiens
gtggtgatttgtgagattttggtgcactcatcacctacacagtatacaactgcaccatatatgttgtcttttatccctcacttccctcccactcttccccrtaagtccccaaagtccattgtataattcttatgcctttgtgtcctcatagcttagctgccacatatcagtgaaaacatacgacatttggttttccattcc

SEQ ID NO: 477585 - DNA, 201 bp, Homo sapiens
ctgaaataaagaaggttttaaagctaagagaaattattgaattactaagtcattaccactaattttgagccaactaactaattaatatgagatgatacaaygtcctatgctttggtaaatacaaactatgtttaaacaatgtctgtaatgtgactttcaaaatgcttctggctttacaaagatgtgattaaaatgtagtaa

SEQ ID NO: 477586 - DNA, 201 bp, Homo sapiens
ataaatggatgaataattatacaaggacccagtcctcctcccaacactcacacacacattgaaaaacaatcagtttgtttttggtaagttttgcttcttcycttgatcccatgtagcccaagcacttatggtgcatacactcagcagcagtgcatactgtgatagagaagcacacccggaacatgcacacgcatacacaca

SEQ ID NO: 477587 - DNA, 201 bp, Homo sapiens
tttcatccatgtccctacaaaggacacgaactcatcattttttatggctgcatagtattccatggtgtatatgtgccatattttcttaatccagtctatcrttgttggacatttaggttggttccaagtctttgctattgtgaatagtgccgctataaacatacatgtgcatgtgtctttatagcagcatgatttataatc

SEQ ID NO: 477588 - DNA, 201 bp, Homo sapiens
ccttaggccaagagctttgtcaggttaagaaccatttatgccttttttacctttctaccctctacctgttacagtgcctgacacacacagcctactcaatrttgaagaaatgaatgaataaatggatgaataattatacaaggacccagtcctcctcccaacactcacacacacattgaaaaacaatcagtttgtttttgg

SEQ ID NO: 477589 - DNA, 201 bp, Homo sapiens
gatccctgaggaatcgccacactgacttccacaatggttgaactagtgtacagtcccaccaacagtgtaaaggtgttcctatttcttgacatcctctccarcacctgtgtttcctgaccttttaatgatcgccattctaactggtgtgagatggtatctcattgtggttttgatttgcatttctctgatggccagtgatga

SEQ ID NO: 477590 - DNA, 201 bp, Homo sapiens
tgaatccactgttgcacgttccccactgtgctggaaacagctatttatcactttttccttccttaggccaagagctttgtcaggttaagaaccatttatgmcttttttacctttctaccctctacctgttacagtgcctgacacacacagcctactcaatgttgaagaaatgaatgaataaatggatgaataattatacaa

SEQ ID NO: 477591 - DNA, 201 bp, Homo sapiens
actttttaatggggttgtttgtttttttcttgtaaatttgtttgagttcattgtagattctggatattagtcctttgtcagatgagtaggtttcaaaaatktcctcccattctgtaggttgcctgttcactctgatggtagtttcttttgctgtgcagaagctctttagtttaattagatcccatttgtcatttttggctt

SEQ ID NO: 477592 - DNA, 201 bp, Homo sapiens
ctcaagctccaaatgagcttacctcattcatttccacatagtggattttttaaatgcttgacatttgtgataaattagtagttttattgttttcaagtaagtgtagctacgaataaactcctggttgtagtttatatatcacaaattgggatatggagtttggtaaattaaagtgtacttacagaaacagtgtgtcaaaac

SEQ ID NO: 477593 - DNA, 201 bp, Homo sapiens
atggaaaaaaaggtttgaagaaccagatcctgctgtcggttctgcaatttctttgaccaactcattcttcctctcagccatgtttcccttacccgctaaarcgggtcgggaacaccgcttgctgcagtttcagaatcagaaattttccttccgagctctcatactctataggaaaacaccttattgaaattaaccacactt

SEQ ID NO: 477594 - DNA, 201 bp, Homo sapiens
cttcctgacttgcacagagtgagctttgccaggcctgacatacagaaagatggtactactgtagccgatgaagaccagtgtgaggtgagacccgcaagtgragaaagccttctggcagctgctggcagaggggatccgcagcacagtggtcactatgtagccataggagatgagggtcaccaggaaggagctgaggacaaa

SEQ ID NO: 477595 - DNA, 201 bp, Homo sapiens
gaaacagtggtgataaataaaatacaaatctttttttccttctttccaacttttattctgggttcaaggggtacatgtgcaagtttgttacctgggtaaaytgcatgttgctgaggtttggtgtacagatagctttgtcacccaagtaatcagcataatacctgatagtttttcaatcctcaccctcctccctccctccat

SEQ ID NO: 477596 - DNA, 201 bp, Homo sapiens
tcagagtgccatagcgcagtgggtggcagatggccacaaagcgatcaagggccatgtctgtcaggatgaggaaggaggtggaccccagggaaaagtggaartagaactggaccatgcagccagtgaaggtaatgactttgtgggggaccaacaggtctgagagcatcctgggcactgcagtcatggttaccaagatctcca

SEQ ID NO: 477597 - DNA, 201 bp, Homo sapiens
tgagtgagaaaagacagaggtggagagaaaggccagggaattgactcccttctgtaacagggacaactgtggctttggttttaattcttacaataactcaytaagattagcaagtcctgattgagaataactcctgcatagagctttagaagtggctgcacgtgagggccagtagctggattcccagtggaatttcaaggt

SEQ ID NO: 477598 - DNA, 201 bp, Homo sapiens
atcaatgagtagaagacagaagaggaagagcttaagaatggtgataatgtagaggtggccaagtcataaatctgctcatcccagccagtaatccattcctygccccagggaaactcctgccttttgggaatgtgtctcctggggtcaactgtgcacacaggctagtgtgcatggggagccaggccagcactatggggacct

SEQ ID NO: 477599 - DNA, 201 bp, Homo sapiens
attaaactctttctctattgcaattcccttgtcttgataaattagccccatctgggtaatgggcaagatgaacccattgggctggtgtcagggtgactgtmctgctctgcagtggagtcttgtgggaagggggtagtttgagatgcctgcagtgcctttcacttagctgtgccccttgggtgagccacttgacctctctga

SEQ ID NO: 477600 - DNA, 201 bp, Homo sapiens
ctgcccctgtagcactgttttaactgtctgattgcagaaggtaaggataaagggattgagaaagggggtgagaactgaagtcaccaaggccacgaccttcytgacttgcacagagtgagctttgccaggcctgacatacagaaagatggtactactgtagccgatgaagaccagtgtgaggtgagacccgcaagtggagaa

SEQ ID NO: 477601 - DNA, 201 bp, Homo sapiens
ggagcaaactagtaaggagaggcactgtggggcttttaggttaacatacacatgattgatgatatgcaggaaggattgttcttgaagagataggaactacytagagcaaagactcaagcatacttaaggcgacagcaagattcctctggggtctttgagttctggtaatacattcttagggcctggatattttctatctag

SEQ ID NO: 477602 - DNA, 201 bp, Homo sapiens
ttaaattagaagaagtgactgttgtgccagatgcacagatatcaacataaggacacaagaaacatgaaaaagcaaagaaacatgatgcctccaaaggaacmcaataattctccaataacagaccccacagaaaaggaaatctatgaaatgtccaaaaacgaattcaaaataatgatctttaggaaactcagcaagatacaa

SEQ ID NO: 477603 - DNA, 201 bp, Homo sapiens
gccgttctgtcctcctctttctcccccaaacaaatctttctgagtacataagaaatttcctcctcttacctctcttctaaagatttttcttggctgggtgyggtggcttatgcctgtaatcccagcactttgggaggctgaggcgggcagatcacaaggtcaggagatcaagaccatcttggccaacatggtgaaacccca

SEQ ID NO: 477604 - DNA, 201 bp, Homo sapiens
ggtgtcatctgatggccgaaggctttggagattgtagtgatgtttgaaaccactgaattagccattaataacactgaagggagccatttctacaggattgrgtaatttctgtttaaagtcttcacatacaaatagtatgccctttttttccattttccctgctggtgttttgaaccaggacacttaaacatgtttgggata

SEQ ID NO: 477605 - DNA, 201 bp, Homo sapiens
ggaaatacaatataccaaaacttatgggatgcagcaaagcagttctgagagggaagttaatagcaaaccctatagagaaagacatttgggacaggccatcyaagaggcagagatagctttatgttcctccatgaattgcaaagaaatatgctccacctcctttttttacaatgagatagaagccacaagtgtgatcttgag

SEQ ID NO: 477606 - DNA, 201 bp, Homo sapiens
cctcataaaatgagtgagggaggattccctctttttctattgattggaatagtttcataaggattggtaccagctcctctttgtacctctggtagaattcrgctgtgaatccatctggtcctggactttttttggttggtaagctattgattattgcctcaatttcagagccttttattggtctattcagagattcaactt

SEQ ID NO: 477607 - DNA, 201 bp, Homo sapiens
tgaagggttttttgtgtctctatctccttcagttctgctctgatcttagttatttcttgccttctgctagcttttgaatgtgtttactcttgcttctctarttcttttaattgtgatgttagggtgtcaattttagatctttcctgctttctcttgtgggcatttagtcctataaatttccctctacacgctgctttgaat

SEQ ID NO: 477608 - DNA, 201 bp, Homo sapiens
atcggctactgaggcttctgcattcatcacgtagctctcgtgcctttgttttcagctccatcaggtcctttaaggacttctctgcgttggttattctagtkatccattagtctaattttttttcaaagcttttaacttctttgccattggtttgaatttcctcctgtagctcggagtagtttgatcttctgaagccttctt

SEQ ID NO: 477609 - DNA, 201 bp, Homo sapiens
tagcccttgggctccaccaatatcccccaacatacactcagaaggctgcaatgtcacaacaccacctggacccagcagtgcaactgcatccctgccacccyagcccatgcagcaccttacactcttaggaacaggcatatcaagcagtctagcacaccaggaaggccgtctcaaaacacagggagccaaagcatatgctct

SEQ ID NO: 477610 - DNA, 201 bp, Homo sapiens
tgcagaagagcggatgttggtgaaccgcaaacgctgctgtctgatcgttcctctggaggttttgtctcagaggagtacccagacgtgtgaggtgtcagtcygccactactggggggtgcctcccagaaaggctactcgggggtcagggacccacttgaggaggcagtctgccagatctcagatctccagctgagtgctggg

SEQ ID NO: 477611 - DNA, 201 bp, Homo sapiens
gcttctctcccccctgtttttgattttttgattatggccattcttgtgggagtgaggtcatattacattgtggttttcatttgcatttccctgatcattartgttgttgagcatttttccatatgtttgctggccatttgtatatcttcttttgagaccagtctattgatgtctttagcccacatttggatgggactgttc

SEQ ID NO: 477612 - DNA, 201 bp, Homo sapiens
gagcgcatggacctcttcctgtccctgctctttgtgctgaccaccatgctgcttatcatcctctcctacatcctcattgtggctgcagtgctgcacatccmttcctcctctggatgccagaaggccttctccacctgtgcctctcacctcacagtggtggttctgggctatggcagtgccatcttcatctacgtgaggcca

SEQ ID NO: 477613 - DNA, 201 bp, Homo sapiens
ttcatttacttcttctctgttcttggttatttcctttcttctgcagggtttgggtttggttttttcttctttctctagttccttgagatgtgaccttatcytttttttttttttttttttttttgagattgagtctcgctctgttgcccaggctggagtgcaatcaatcttggctcactgcaacctctgcctcctgggctc

SEQ ID NO: 477614 - DNA, 201 bp, Homo sapiens
ggcatctgccccctggggttcagtttccccaaatcctttgcaaatttgtctcctgtatcaactttttgcactcaatgcctctgtcttagaacctgggtgcyttccccatctgctctccccatgctcttccctccctcccttctgtccttctgccctgaggtcctggtcctgctcggttcgcagccatgtttctgtttatag

SEQ ID NO: 477615 - DNA, 201 bp, Homo sapiens
tttttttttttttttttttgagattgagtctcgctctgttgcccaggctggagtgcaatcaatcttggctcactgcaacctctgcctcctgggctcaagcrattctcctgccttagcctcccgagtagctgggactacaggcgtgtgccaccatgcctggctaattttttgtatttttagtagagatggggtttcaccata

SEQ ID NO: 477616 - DNA, 201 bp, Homo sapiens
aattcttcctaattaatgttataatacacattttgaaccctcagtattttgagtaaacctttcttatagaatctttttcactttatcttgcattatagttrtttgcctacttgtgtcatgttctaataaaacataaagctcttagaagactaactcttgaagcacctaacagtgttttgcatatcacagatatgcactaag

SEQ ID NO: 477617 - DNA, 201 bp, Homo sapiens
tgtagttctctttatttgttgtgtcctttcctggttctggtattaggatgatactggcttcatcaaatgatttagggggaattccctctttctctgtcttktggaatagtgtcaataggattggtaccaattcttctttgaatgtgtgatagaattcagctgtgaatttgtctggtccttgacatttttttgttggtaatt

SEQ ID NO: 477618 - DNA, 201 bp, Homo sapiens
gtaggcatttaaggctatgaactttcctcttagcactacttttgctgtatctcagaggttttgataggttgtgtcactattatcattcagttcaaagaatkttttaatttccatcttgatttgattattgatccaatggtcattcaggagcaggttatttatttattcatttatttacatatttattttggaggctgagtc

SEQ ID NO: 477619 - DNA, 201 bp, Homo sapiens
aggctctaatgtggggactgccgccaagctctgcagatcaggagcagtggacacagcccgtggtccccgaagccgaaggttgattggagctcttccagggyttccttcctgggccatggacccctctgaggccattcgcctctgttccagtttggctctcctggacccctctggatggctaggttgttcctcctcaggtgc

SEQ ID NO: 477620 - DNA, 201 bp, Homo sapiens
acagactgttgatgtcaaacatgttggacaggtagataaacagagcaactgcattgaaaatgtagagaatgagaaagtagctgatagctttgatggccccyatgtgagcctccatgctggggtcgttggaccctgtggcattgcttcccatgtgtagggtgtgtctcttgagagagaggatcagcagggtggctgtcagga

SEQ ID NO: 477621 - DNA, 201 bp, Homo sapiens
aattccgaaagagcaaaaataggctgcaatcgcaaaatagacaaaaactacaaagcagcaaaaacaagcaaaaattacaacctggaggttttggcccacagggatatttggtaatggctaatagaccatgatgttcttaggagaaatataaatggagaggtaatattgaattgtatgacttaaatatacaaaaagttcaat

SEQ ID NO: 477622 - DNA, 201 bp, Homo sapiens
gctgagaatgtatgtcacctcaggaccgctgttgtacaaattgattgtaaaacatgtgtgtttgaacaatatgaaatcagtgcaccttgaaaacgaacagataacagtgattttagggaacaagggaagacaaccaaagatctgactgcctgcagggtcgggcagaatagagccatatttttcttcttgcagagagcctat

SEQ ID NO: 477623 - DNA, 201 bp, Homo sapiens
gcaatcttcacaaagtagaagaaactgagccaggcagcaaaccacaggctacaaaaatttaagaatataaaacttattttgaatgcataatatacagcgtyttcagaataaaaacttagggaggttgagctgatggtaatttctaacatcatgaggctttggagagctattctggatacactcaggaaaaccaggatcctg

SEQ ID NO: 477624 - DNA, 201 bp, Homo sapiens
tttgtaccacagaaaatttcagttgtcttcatatttcacagatgttttaatttagtaagaccctaagcttttactgtgacgctgtgctccactaaaatttktgtttatgttattaactgcaaaacaaataaaattttacctttctaaatgagtttcaatagcacatattaaaaggtcagatatttcatcttcaacagaaat

SEQ ID NO: 477625 - DNA, 201 bp, Homo sapiens
gcttttactgtgacgctgtgctccactaaaatttttgtttatgttattaactgcaaaacaaataaaattttacctttctaaatgagtttcaatagcacatrttaaaaggtcagatatttcatcttcaacagaaataactttttttttttttgagacagagtctcactctgtcacccaggctggagtgcagtggcacaatct

SEQ ID NO: 477626 - DNA, 201 bp, Homo sapiens
tgcagtatgtcacttgtatgccaattttgctaagggttttaattacaacgagatgctagattttgtcaaatgctttttctgcatctattgagatgatcacwtgattttttgtttttaattctgtttatgtggtgtatcacatttattgacttgcatatgttaaaccttccctgcattcctggtataaaacccacttgatca

SEQ ID NO: 477627 - DNA, 201 bp, Homo sapiens
ctgaccttaggtgatgcacccacttcagcctcccaaagtgctgggattacaggcgtgagccaccgtgccctgccacatgacctatttattaaaggggagaytaggtccccttgaagaaggaccatgcaataacacagcatgtttctagtgtatgaaaagatccctttgatctttctccaaagagacttatggccatttact

SEQ ID NO: 477628 - DNA, 201 bp, Homo sapiens
gagaagacctgagctgctctacatgatggggaagtgagttcaagacactgggtgatgtaaagatgtttattgtcattgagtccttcttaatttcaggtgtkgttgcaatatactgcagatgtccaagatccccagctgccccacaatccccaaggcagggtgatattttaattctagacaattcctataaatagctggcac

SEQ ID NO: 477629 - DNA, 201 bp, Homo sapiens
ttcccaaaattaatactcttaaaatttcttatgcctgtctttactttaatctcttaatcctgttatcttcataagctgagaatgtatgtcacctcaggacygctgttgtacaaattgattgtaaaacatgtgtgtttgaacaatatgaaatcagtgcaccttgaaaacgaacagataacagtgattttagggaacaaggga

SEQ ID NO: 477630 - DNA, 201 bp, Homo sapiens
ctaagggagtgcatacagttagtaaggtataaaaaagaaataaaattctaagccccctaactgactgatgggccctcccctctgccaaggacattccaaasttaatctgaaaaattagttcaggccatgatgggaagtggggtgccactggacatgcctcgcagctgaccagtgttaacatcaacacaaagaccttaagac

SEQ ID NO: 477631 - DNA, 201 bp, Homo sapiens
gagagagaggatcagcagggtggctgccaggatgaacatgatcagaggaacgaagatccccatgttatagaaaaataccaggttgaccatattggtctcakagaagtacttcttctccgtggagttggaggaggggataggaatggagctattcacatacacattgaagacatctctcgagagaggaaagctgaagcttaa

SEQ ID NO: 477632 - DNA, 201 bp, Homo sapiens
ccctggaacatgaccctttaaccactgcactgcctactggcgagaacaagttgcaaagttagtaactggcagagttaggggttcaaaatcaagtagtctgwtaccagagtttatgtccttaaacacttgtctagtctatttattgatgtagcaacagtttaaagttgagaaaaggaaactcacagaggttttaataagttg

SEQ ID NO: 477633 - DNA, 201 bp, Homo sapiens
gtgcagtggtgtgatctcggctcactgcaacctctgcctcccaggttcaagcaattctcctgcctcagcctcccaaatagctgggattacaggcatgtgcyaccatgcctggctgatttttgtatttttagtagagatggggttttggcatgttggccagactggtcttgaactccagacctcaggtgatccatccaccta

SEQ ID NO: 477634 - DNA, 201 bp, Homo sapiens
gagcttgcagtgagccgagatcgcaccactgtgctccagcctgggcgacagagcgagactccgtctcaaaaaaaaaaaaaaaagagagagagagagagatmcaaaattctatgtttattgaagtgtcccaatgtcatattaaaaatttttcatagctgatatacagaattacaaattgacaacaaatatttttgtcattta

SEQ ID NO: 477635 - DNA, 201 bp, Homo sapiens
aaaaggctcctcaggtttaagacatgatgtaagtaaaccacagcttcatggaactgcaagggagtttgtaggtcatgcaggcctgcctccctctgtctcagtgcaggcatccccactgcaacacactgatcagactggcttagggactctgcttgaaccaagtccagggatggagcatgcccagcggtgggaggcagcccc

SEQ ID NO: 477636 - DNA, 201 bp, Homo sapiens
tccctctgtctcagtgcaggcatccccactgcaacacactgatcagactggcttagggactctgcttgaaccaagtccagggatggagcatgcccagcggkgggaggcagcccctttcttcactgcatggttctaaattttaagaagaaatccttatgtcaaacctcaatgtgacgtcctctaaccttcacccattgtccc

SEQ ID NO: 477637 - DNA, 201 bp, Homo sapiens
atggcaaagcagaagggtttaggggttctgaatgctcagtgaagagagcagggaaaggaaatggaggacatgacttcaaaaaagccagttcttaggcaacytacagaatgggagaaaagttttgccatctatccgtctgacaaaggactgatatccagaatctacaaagaacttaaacaactttacaagaaaaaaacaaga

SEQ ID NO: 477638 - DNA, 201 bp, Homo sapiens
ctgcagtctcgacctcctgggcccaagtgatcctcccgcctcagcctcccaagttgttagggctgtaggcacttatggccatgcctggctaatttttgtatttttttttttttttttttggtagagttggagttttgccatgttgcccaggttggtctcagactcctgcactcaggcaatcttcctgcctcggcctcccaa

SEQ ID NO: 477639 - DNA, 201 bp, Homo sapiens
agggtggctgtcaggatgaacatgatcagaggagtcacaatccccaggttaaagaaaaaagccagaccgaccacattgatctcagacaagtatgttttctyagtggagttggaggagtggatagggaaagaattgttacaatacacagtgcagatgttgatgcagaacatgctgtgactgaaggaaataaacacggacagc

SEQ ID NO: 477640 - DNA, 201 bp, Homo sapiens
tctacacatctgggctttgtttttctccccgctccacctcctagagagagctggtttgcagggtgagaaggactaagaaataagagacatactcataagcttttttttttttttttttttggaaagctggaaaagagatttggaaagtactgaaaacctggtttttgtaaaaaataaaataaagagaccttaagacttttc

SEQ ID NO: 477641 - DNA, 201 bp, Homo sapiens
ctctccaaggcacattttggttaaactgtcaaaaggcagagacaaagagagaattctaaaaacagcaagagaaaagtgtcaagtcacatataagggaatcsccatcagactaacagcagattttttcagcagaagctttacaggccaggagagaatgggatgacatattcaaagtgctgaaagaaaacaaaacaaaacaaa

SEQ ID NO: 477642 - DNA, 201 bp, Homo sapiens
tgttagaagaaatactgataaacaaattcagtaaagtttcaggacacaaaatcaacatataaaaatcagtagtgtttctatacgccaatcaccagctcatyaaaaaagaaatgtggaaaacattctcatttacaataactacaaaaaaagtacataggaataaatttttccaaggaggtgaaatatctatacaataagaac

SEQ ID NO: 477643 - DNA, 201 bp, Homo sapiens
gctaataagcagctgtctccagtaagggaggatttatgtcctcgctttaggcaaacaaaagaagggcagagaatctccctgccttttagctgtgtttagckcaacaatcctaagtgttttagagggtaatattttggcttccttcagtagaatggattacaaatgggtgacccaaaaggtgtagagtcatactaaaaccac

SEQ ID NO: 477644 - DNA, 201 bp, Homo sapiens
gtgtgtgagtgtgttggtgtgtgtgaatgtgtggtgtgtgaatgtgtggtgtgtgaatgtgtgtggtgtgtgtgaatgtgagtgtgtgttggtgtgtgtgwgtgaatgtgaatgtgtgtggtggtgtgtgtgtgaatatgtgttgtgtttgtcaatgtgtggtgtgtgtgaatgtgtgtggtggtgtgcgtgtgagatggt

SEQ ID NO: 477645 - DNA, 201 bp, Homo sapiens
actaacaatgaaccacctgaaaaggaaattaagaaaacaattccgtttacaaaagcatcaaagacaataaaatagaaataaaccaaaccaagaaggtaaargacatacacacacaccaaaacattgatgaataaaactaaagaagacacaaataaatggaaaaacatcctgtgttcatggattggaagacttagtgttgtt

SEQ ID NO: 477646 - DNA, 201 bp, Homo sapiens
aggtactttgcagatgtgtctagtgttggaaatcttgagatgagaagattatcttggattttacaagtgggcccaatcatatcacatgaatctttaaaacyggagtctttctctattttgattaactggaaagatttgaaaacagaagagtcagagagaatgcaatgttgctggcttcggagatagagaaaggggccaaaa

SEQ ID NO: 477647 - DNA, 201 bp, Homo sapiens
tgaattggtttaacttggtacagtttctatttcactttgtgcttcttgctgctgaaactgcctgtaagaaaatatgaaattctcattatgctcaaattttmtctcaataaattgattgcactgaaaaatatttgacttttcaaaaaagtattatacttttcaaaagaagatagacatgtgaccaagtagcatatgaagaaa

SEQ ID NO: 477648 - DNA, 201 bp, Homo sapiens
tcaatattcctgcttttgtaccatttcccccctcttttaaaccaaaggtatctttgcaagtgactcaccaaaaccaataagctttaaccaatgttatgatrtaatcaatacattgatcaacgagccttctccaaagagatgcaggacagttctcacaagattccagattcatgccaaagaaagttcaaagagagaaaagtt

SEQ ID NO: 477649 - DNA, 201 bp, Homo sapiens
aactttgctctgctcccagttttctcttcttttgtttgtaaatagcctttctttgatacataaacattagattgtatccttccctactccagttctacaartttttgtaaaagtcactctcaggaaataaaagtcatcattctttgatgacaatgttggcctacagtgcttcctggcagaattagttaataagcagctgtc

SEQ ID NO: 477650 - DNA, 201 bp, Homo sapiens
actcctttgaagaaaaggagtacttaatttggagatgttcttttgccattacttcacagataagttgggtaaagatgattttaaatcctggaggatgctakagacatggaaaaggtgagagaggaagacagaaattaatgggagataaaaggggaaaatggactatgggaagagccagacccagagggagggatggaaggg

SEQ ID NO: 477651 - DNA, 201 bp, Homo sapiens
ccagtggggagtgttttgcccctggcccactcagccccatagatggccgtgatgaagccactcccaaggatgccagtgatgcactctattccggagaccascaaagtgaaggtgaccttgaacttggatatgtctttatctgtggcatctgtgttcaccgttgccattctctttgatcctgactttcaggtttctgcgcca

SEQ ID NO: 477652 - DNA, 201 bp, Homo sapiens
atcaggagcagtggacacagcccgtggtccccgaagccgaaggttgattggagctcttccagggcttccttcctgggccatggacccctctgaggccattygcctctgttccagtttggctctcctggacccctctggatggctaggttgttcctcctcaggtgctgggggtatcacaacagtgctgtaggggggtggttg

SEQ ID NO: 477653 - DNA, 201 bp, Homo sapiens
tatatatataccacaattatatacatattatatatatataccacaattatatatacacacacacacacactatatatatatatatatatatatatatatayacaccacaatttctttatccactcattgattgataggcatttggaccggttccatacttttgcaattgcgaattgtgcgaattgtgctgctataaacatg

SEQ ID NO: 477654 - DNA, 201 bp, Homo sapiens
accatgctgcttatcatcctctcctacatcctcattgtggctgcagtgctgcacatcccttcctcctctggatgccagaaggccttctccacctgtgcctstcacctcacagtggtggttctgggctatggcagtgccatcttcatctacgtgaggccaggcaagggccactccacatacctcaacaaggcggtggccatg

SEQ ID NO: 477655 - DNA, 201 bp, Homo sapiens
aaataggcccatgggttgaatttctcattctggcttaggaatttatgacacctgaagaatatgaaggacatcaatatgggggctgaaaagggtgaggtcayagtctgggaagtggtaattggaggaacagcagcttcctggatttctggattgtcatggattcccaataagagatggagggctgaggactgaccctgtttg

SEQ ID NO: 477656 - DNA, 201 bp, Homo sapiens
gaacatggttccaatagaagtctctgagcattgtcactcagtctaatccatctttttttttttttttttttttttttttttttttttagctttcattttaratacaggggtatatgagcagatttgttacatgggtattttgcatccaggtagtgagcatagtacccaataggtagttttttgacccattcctcccttttg

SEQ ID NO: 477657 - DNA, 201 bp, Homo sapiens
aaataaataaataaataaagccttgcacccatgccactggcaagccttaacggtaggtctaaaatcctaaaatctaccccagcactgactaaattcaaacscagtccttatgtttgtgttgcatgagaacctgactgacatacagacttccccccctcaccttagcctccaagcctgttgtcttctttgtaagctgctctc

SEQ ID NO: 477658 - DNA, 201 bp, Homo sapiens
tgattgcactactgcactccaacccgggtgacagtgagaccctgtctcaaaaaaaaaaaatgggcaaaggatttgaatagatatcttttcaaagaagataytcaaatggccaataagcacatgaaaaaaatgctcagcatcattagtcattagggaaacacaaatcaaaaacacaaggagataccatttcttacccactag

SEQ ID NO: 477659 - DNA, 201 bp, Homo sapiens
gacccatgcctgtaatctcagcactttgggaggtcaaggtgggtggatcacttgaggccaggagttcgagacccgcctgggcaatgtggtgaaaccctgtmtataaaaaaaaaaaaaaaaattagccacacgtggtggctggtccccatggtcccaactacttgaggtgggaggatcacctgagctccagaggcataggtt

SEQ ID NO: 477660 - DNA, 201 bp, Homo sapiens
tgttttattaatattttacttttcaggtaaataagtcccaagctgtctgagctataaaggaatctgtgtgtgtgtgtgtgtgtgtgtgtgtgtgtatgccrtgtgtctgtgtgtatgccgtgtgtgtgtgtggtttttgcagtttatggatgtaaggaactctctctgaaatgtgtgcttgagagcgctggagctcagaac

SEQ ID NO: 477661 - DNA, 201 bp, Homo sapiens
taatctaaaaccagaattacttatggctttttattacatgtgatatggttaaaaaatatatttatatataattttggttttttaaatatatatgtgtgtawatatatatatatatatatatatatatatactttttttttttgagacaggttctagctctctcacccaggctggagtgcagtggcgtgatcacagctcgct

SEQ ID NO: 477662 - DNA, 201 bp, Homo sapiens
cccagggccacagaaaatacctctatcagatagagaaatccgagtcccagtgccttatggtggagccaagggttaagcagatggcctgctttttttatacsaagagtttgcttcctccgggcaatcttaaagtctggcattcacggctggaggtatagggcccatccacttctctcctggatgaagaaaacaacagactct

SEQ ID NO: 477663 - DNA, 201 bp, Homo sapiens
tttattacatgtgatatggttaaaaaatatatttatatataattttggttttttaaatatatatgtgtgtatatatatatatatatatatatatatatatmctttttttttttgagacaggttctagctctctcacccaggctggagtgcagtggcgtgatcacagctcgctgcaacctccgcctcctgggctcaagtgat

SEQ ID NO: 477664 - DNA, 201 bp, Homo sapiens
cccttttttttatggcaggatatacctcctgaaagcttaaggccagcaaagaacaatttgtgaagacagtcatcagggatacctgaggctttttgcctttmtgcaggggttgtggctaatggataatgctttgacacaagattatgaagtaaaagctattcatttgggaaaaggatgatgtgtttgtgttgtgccactcag

SEQ ID NO: 477665 - DNA, 201 bp, Homo sapiens
caccatgcccggctaatttttgtagagacaaggttttgccatgttgtccaggctagtctcaaactcctaagctcaagtgatctgcctttctcagcctcccyaagtgctgggatttcaggcatgagccaccgtgcccggccctatttatatataattttgaagaccattttaagaattctgtaaaccaaaaataaaattcca

SEQ ID NO: 477666 - DNA, 201 bp, Homo sapiens
caggatatacctcctgaaagcttaaggccagcaaagaacaatttgtgaagacagtcatcagggatacctgaggctttttgcctttctgcaggggttgtggytaatggataatgctttgacacaagattatgaagtaaaagctattcatttgggaaaaggatgatgtgtttgtgttgtgccactcagtcaccaggcttaatt

SEQ ID NO: 477667 - DNA, 201 bp, Homo sapiens
tgttttcatttgttctctagccaagaccccaagtctataatgatcaagagggttgttttatttttgacaagtggaaacccacatgtttctgaaaagtggagtggtggtggtggtggtggtggtagcataatctggaagacccctaaagaaggcagtgctacctgccatatttgacttgggggtcagagcgagagtctgagt

SEQ ID NO: 477668 - DNA, 201 bp, Homo sapiens
gttttcatttgttctctagccaagaccccaagtctataatgatcaagagggttgttttatttttgacaagtggaaacccacatgtttctgaaaagtggagtggtggtggtggtggtggtggtagcataatctggaagacccctaaagaaggcagtgctacctgccatatttgacttgggggtcagagcgagagtctgagtt

SEQ ID NO: 477669 - DNA, 201 bp, Homo sapiens
ttttcatttgttctctagccaagaccccaagtctataatgatcaagagggttgttttatttttgacaagtggaaacccacatgtttctgaaaagtggagtggtggtggtggtggtggtggtagcataatctggaagacccctaaagaaggcagtgctacctgccatatttgacttgggggtcagagcgagagtctgagttg

SEQ ID NO: 477670 - DNA, 201 bp, Homo sapiens
ccatacagaagggcctgcagctcaccaaaggaggagaagcccaagaggacaaattcggagggctggctcagatttgccatgatccacagtatggggccctrcatgcaagagaaacaaaagacagacggagaggcagaaacagagagatagagacagagaaccattgaacttgaaacagaagaaacagggacagagacagag

SEQ ID NO: 477671 - DNA, 201 bp, Homo sapiens
actgcagtgacttcgtcatttggacgtactgacttgggaatgtcaaaattctttattatgatcttccgactgattgtgggaagagagaatcagaacaccargatcagagaccaatctttgagtgaggggggagccatgaacagggcaaggggcacaggatgggcaagggagggaaattatggggcttggatcaattgttca

SEQ ID NO: 477672 - DNA, 201 bp, Homo sapiens
cctcgccccagggaaactcctgccttttgggaatgtgtctcctggggtcaactgtgcacacaggctagtgtgcatggggagccaggccagcactatggggwcctgattgagagagaggttgatggcaatctcctgctaacagttctcaacctctcacaggtgtcacatagaatgggcatcaagtgcaatgggtaactacag

SEQ ID NO: 477673 - DNA, 201 bp, Homo sapiens
cattttcctcaataatcatgatttaaaacttacctaataaaagacaacttcagattcctaacgttcaagctctaagatatctggggagagggtgtccaatrttttgtgaacagctctttgagacaatgctgctggaaccatcctgaacaatgacaatggagaataatgtttttcctcttctccagcagcctgccccaagta

SEQ ID NO: 477674 - DNA, 201 bp, Homo sapiens
gggtttgagcagcggggcaccaaagaatcgagccacacccctgtggcataatctgcaaagggaataagggaatttttcccgcttcattagtatttgggcayatgtcaaccagagggcattgagtagccacattgcaccggaactagttaagtaattacctaaactttttcctcttccctcccttcctgcctccagaaactg

SEQ ID NO: 477675 - DNA, 201 bp, Homo sapiens
gaaaggttgctcttaaacgcagaagaaagctgttaaacagtaaaaccaaaggcagtgatggaaagagaaaaagttatccttcgtggtgctttgtagaatcyggttctttgaataaacctggaaccagatgattttaggggaggggatttcaaaattctatgaagccacctcatggactgtgaaggtcttcctagagagggt

SEQ ID NO: 477676 - DNA, 201 bp, Homo sapiens
ctgaaagcacccccttccagttgtcccacctttctggactgagccaatatacatcttatattgattgatgtcttttttttttctttttttttttttattayactttaagttttagtgattgatgtcttttgcctccctaactgtataaaacaaagttgtagcctgtccactttgggcatatgttctcaggatctcctgagg

SEQ ID NO: 477677 - DNA, 201 bp, Homo sapiens
catctgaggttatggaggaagtgaaatctgtgggggactctgaggctttgggctgtggcaggaaagcaggaagtcttctttggtgccagatctctttggaygtttgcggtggggaggaatgtgactgttcttcctccgcaagtgagggtaacaaatgtgaccatgatgatggcatagcaactctgttgcttgccagtcagc

SEQ ID NO: 477678 - DNA, 201 bp, Homo sapiens
attcaataaaccagcctgttgcttagtcatctaaaagaacacaaaaatacaaacattgccctgctggatcaaattcacaaggagaaagcactcagaaagcytagtgttcaacctcaacagagatggtttgtagaggcatgactatttcaaactcattgttatcaagtgagtagcttcagggcaatagctttcaaagcctta

SEQ ID NO: 477679 - DNA, 201 bp, Homo sapiens
ctacttggtagtagtgtgattacaaagctgagttactatgaggagacagtaaaacatatgtgtatattttttggaggagggatccaaacaacgtaaaatawagcaactgagtagaattattacaaacccaacctcttgaatgctactgagtcaatgatggataataagaaaataaaatgcattcgattttaaaaattggag

SEQ ID NO: 477680 - DNA, 201 bp, Homo sapiens
aaccctcatacaccactggtgggaacacaaaatggttcagtcactttggaaaacagttcctcaaaaagttaatgagaaagtagggagagggaatagagagraagtgggcatagggtagtgatgggattattttaagagaaggtttcagtaagaaggtaacatctgagtggagtatttgttgaaataatgactggagaaagc

SEQ ID NO: 477681 - DNA, 201 bp, Homo sapiens
aaaggaaagaaataataagattagagatggaataaataaaatagaaaatattttaaaacaacttaatgaaattaagagtttgttttttgaaaagataaaawtgataagataaacaaaatcctttaaaaactcttctaaaaaatagaagaagaaacagtactaaactaattttatgaggtcagcattatcctgatattaaaa

SEQ ID NO: 477682 - DNA, 201 bp, Homo sapiens
caaaagcaatcaaaatttagagaaattgtttaccaaaacattcaatataattgtaagaaattttggttcatatacaaagtacttcttcaaagactcaaacrtatgtaaagaatgattgatgagagggaacaaaaagagagaactatgctgaagtatttttagtgttcaagatgagattcatcatacaagtttagtaggtca

SEQ ID NO: 477683 - DNA, 201 bp, Homo sapiens
catgtcttattttgtgtatttatgccttttttctttcttgattatgtaagctaatgatgccaattttactgcctcttttcaatgaaccagttttgtatccrttttaacttttttatattttatttatcaaatcaatatttaatatgttctgatttccttagatttatttcgtaattatcctaaatgtttggtttatattta

SEQ ID NO: 477684 - DNA, 201 bp, Homo sapiens
ttagcaaatggcacaccaggagattatatcccgcacctggcttggagggtcccacgcccacagaacctcgctcattgctagcacagcagtctgagattgakctgcaaggtggcagcaaggctgggggaggggtgcccgccattgctgagtcttgagtaggtaaacaaagcagctgggaagctcgaactgggtggagcccac

SEQ ID NO: 477685 - DNA, 201 bp, Homo sapiens
accaacgagaacaaagacacaacataccagaatctctgggacacatttaaagcagtgtgtagagggaaatttatagcactaaatacccacaagagaaagcwggaaagatctaaaattgacaccctaacatcacaattaaaagaactagagaagcaagagcaaacacattcaaaagctagcagaaggcaagaaataactaag

SEQ ID NO: 477686 - DNA, 201 bp, Homo sapiens
gttttaatttagtaagaccctaagcttttactgtgacgctgtgctccactaaaatttttgtttatgttattaactgcaaaacaaataaaattttacctttytaaatgagtttcaatagcacatattaaaaggtcagatatttcatcttcaacagaaataactttttttttttttgagacagagtctcactctgtcacccag

SEQ ID NO: 477687 - DNA, 201 bp, Homo sapiens
aactgaagagcttctgcacagcaaaagaaactaccatcagagtgaacaggcaacctacagaatgggaggaaatttttgcaatctactcatctgacaaaggrctaatatccagaatctacaaagaactcaaacaaatttacaagaaaaaaacaaacaaccccatcaaaaagtgggcaaaggatatgaacagacatttctcaa

SEQ ID NO: 477688 - DNA, 201 bp, Homo sapiens
caggatgaacatgatcagaggagtcacaatccccaggttaaagaaaaaagccagaccgaccacattgatctcagacaagtatgttttcttagtggagttgraggagtggatagggaaagaattgttacaatacacagtgcagatgttgatgcagaacatgctgtgactgaaggaaataaacacggacagccacagaagcca

SEQ ID NO: 477689 - DNA, 201 bp, Homo sapiens
gatcaagggccatgtctgtcaggatgaggaaggaggtggaccccagggaaaagtggaagtagaactggaccatgcagccagtgaaggtaatgactttgtgrgggaccaacaggtctgagagcatcctgggcactgcagtcatggttaccaagatctccagcagggaaaaattgcccaggaagaagtacatgggtgtatgta

SEQ ID NO: 477690 - DNA, 201 bp, Homo sapiens
atttcattccttgttatggctgagtagtattccatggtgtatatatatacacacacacacatatatatacatatatacacacatatatatacatatatatmcacacacacacacacacatatatatatgtatatataccacattttctttatccactagttgactgatgggcatttgggttggttccatgattttgcaatt

SEQ ID NO: 477691 - DNA, 201 bp, Homo sapiens
atctccacactgttttctacagtggttgtactagtttacattcccaccagcagtgtaaaagtgagagaactattttttagaaaaggagcacatggcatggccatggattctgtagagacccaatagctgaccatgaaacatcaagtggctatggggccagaactgctcatcatgacctgtactggcagacccacaaattat

SEQ ID NO: 477692 - DNA, 201 bp, Homo sapiens
tttctagcaacagaatcacattaaaccagcaaacctcttgatcagggaaatgcaaatcaaaaccacaatgcgataccaccttactcctgcaagaatggccrtaatcaaaaaatcataaaacagtagatgttggcgtggatgcagtgatcaggggacacttctatactgctgacgggaatgtaaactgctacaaccactatg

SEQ ID NO: 477693 - DNA, 201 bp, Homo sapiens
taatcaaaaaatcataaaacagtagatgttggcgtggatgcagtgatcaggggacacttctatactgctgacgggaatgtaaactgctacaaccactatgkaaaacagtgtggagattccttaaagaactaaaaatagaaccaccatttgatccagcaatcccactactgggtatctacccagaggaaaagaagtcattat

SEQ ID NO: 477694 - DNA, 201 bp, Homo sapiens
tggtttctaatcctctctctatttttgaacatgttggtagtggttcaataatgaggcccagggaagcgcttgagtagactctttaaaagcagctaacatgrtactgaggtccgtgttctttggtagcatcagttaatttgaacattggttaactgagtcatcatttaacttactttcacttgtgactgcagaaaatgattg

SEQ ID NO: 477695 - DNA, 201 bp, Homo sapiens
gttcttctgtgagctagcaggaaactgcaatacctacaatgtacaggacaatcttttttttttgagacagaatctcactcatccaggctggagtgcagtgrcatgatctcagctcactgcagcctccacctcccgggttcaggaaattctcatgcctcagccacccgagtagtggggattataggcaggtgccaccatacc

SEQ ID NO: 477696 - DNA, 201 bp, Homo sapiens
tcccagggccacagaaaatacctctatcagatagagaaatccgagtcccagtgccttatggtggagccaagggttaagcagatggcctgctttttttatamgaagagtttgcttcctccgggcaatcttaaagtctggcattcacggctggaggtatagggcccatccacttctctcctggatgaagaaaacaacagactc

SEQ ID NO: 477697 - DNA, 201 bp, Homo sapiens
ataggtttgggataggcgtacaaagtacattcttaagggtgggggagaatattacgaagtacctttttaagggttggggagactatatcttatcagttagrgtggggcaggaacaaatcacagtggtggaatgtcatcagttaaggctattttcccttcttttgtggatcttcagttgcttcaggccatctggatgtatac

SEQ ID NO: 477698 - DNA, 201 bp, Homo sapiens
cccacttgctggaggtctccctccccacagaactgctcaatggaggcaggccaggttcccctgggccctgggctcatcattgtgccttgcaaaggcctttyagcctctgcatctgcccctgtagcactgttttaactgtctgattgcagaaggtaaggataaagggattgagaaagggggtgagaactgaagtcaccaagg

SEQ ID NO: 477699 - DNA, 201 bp, Homo sapiens
ggagatggtgtctcaggagctttaagtcatttgccatgtatagtcctttgcggggaagcagacctggaggcttgtttcctgccaggagaaggttgggcacrctaagtgagaaaagacctaagggtcccaggtttggggacctcgacgtgggttttgggcagagggcagcttccttttttttctcttgttgtttcgctcttg

SEQ ID NO: 477700 - DNA, 201 bp, Homo sapiens
atgtacaatctgtggttgttgggtagaatgttctgtaaatatctgttaagtccatttgttccagggtatggtttaaatccactgtttttttttgtttactytctgtcttgatgcttgtctagtgctgtcagtggagtattgaagttcctcactattactgtgttgctttctctaatttcttaggtctagtagtaattgttt

SEQ ID NO: 477701 - DNA, 201 bp, Homo sapiens
caagtagcataacataagtgagaatgtttcattaagtacactgtacattattaaagtgagagattaaattatgtttataatcaaggagttgaattatcttktgaagtcacgcccccagtcctctacttaccaccatgcattctttcaattctgtttgaactgcaagcactgcagtgacttcgtcatttggacgtactgact

SEQ ID NO: 477702 - DNA, 201 bp, Homo sapiens
gctgaaggctgctggcagcacctcacctgcttgggtttatgtctaagggagcctgtgcagaacatcggtgtccccagtgcaataatcctggtatttctccyattctgagccgttctttgaaaacacagttgttagagaaacaaagttgaaatgtgggaagggaagggatatggaaatattttcagagactcttcttttttt

SEQ ID NO: 477703 - DNA, 201 bp, Homo sapiens
taaaaaaaacagaagcccagtggaaaaaatgggaagatgaagagaacatacatgaaaatggacatatagatggcttgcaaatactaaacatttgaagacaytttgtatacttatgataattgtcagttaaaactaccctgtgatatgcttttgtctatcgagttgacaaaactcataaagtttgatgactcagtgttggta

SEQ ID NO: 477704 - DNA, 201 bp, Homo sapiens
ctagcccagccctactgaatcagaaactccatgggtggggcccagatttgttttaataatccctcctggtgattctgatgcgtgctaaggtttcagagaamcccctcattgagctaacagttacatagtcttcccaacagaactgtggtgaaagaagtctaattcattaatttatagttttgctttctccctctcacttta

SEQ ID NO: 477705 - DNA, 201 bp, Homo sapiens
actcagaaagttgtgccaaagatgaccaactcatcctggatggctggggatttcccaatttgtggcactgagggtcctgtatcccttgctcccgggcaaaycaagatggttggtcaccctattttgtctttttggccttacttttaaatgaatgacaaaaggcaagcaggtgagaaaagctgtcctagatacttggagggc

SEQ ID NO: 477706 - DNA, 201 bp, Homo sapiens
ggacgggccgcctggaccaagaccgggcagtggtttcccgcgggccaagggcgcgcctgggaaccgctttgatccctgacctggggcggcgaggcctattwggggaggcaaggcggggcccgaccgtggccgccttctctgcaaaacttcccaagtgccattaattagcttagcaaatatttattgatctgctactgtgtc

SEQ ID NO: 477707 - DNA, 201 bp, Homo sapiens
ggaggaagcacgcgcgtccgatgcaccgccccactcgggccgcgatggccccgcgcctgcgcacgcttcgccttctgcacgcctcgcgtcttgacgccccrgagcatgcgcagagcggacgccactgcggcggcggtggcggcggccgcggtgacgatggggcaactggagaatgggatcccggtggccgtggggtccgtg

SEQ ID NO: 477708 - DNA, 201 bp, Homo sapiens
gagtgtgggatcctggcagtggagtgcctccctcccactccttcagccctgtggggccacaacagctgcaactcttgagcagtgggaaggaagaaaggaargagaggggaggaaaatcctggactgtgtggccactgaggaaccaggatcaagcagagcctggggtacttttgcatccagcttctatttgtccagagacag

SEQ ID NO: 477709 - DNA, 201 bp, Homo sapiens
cttgcctcatatttcctcacctaaataatagaatgcaaagctgtaattttaaggcatcagctttatgtgaagtttgactttaagttatgaaaccataacartttaggtttcttgttagctgcagttaaggggaggaaagtatttgttaagttgagaactagtctttagaaatcaatgaagggaactaaatgcagctcaaag

SEQ ID NO: 477710 - DNA, 201 bp, Homo sapiens
aactaaatgcagctcaaagatccctctcaaagaagatgcacttgattttgacagtaaccgaatgtccagcttgaatgtcaagtttctatgtttaggggctrtttcagcctcaggtggccctgcttaattgctttcctgttcccattactaaccatgatgacagcctacctttcctaacagatacacttgcattttaattta

SEQ ID NO: 477711 - DNA, 201 bp, Homo sapiens
actttaagttatgaaaccataacaatttaggtttcttgttagctgcagttaaggggaggaaagtatttgttaagttgagaactagtctttagaaatcaatraagggaactaaatgcagctcaaagatccctctcaaagaagatgcacttgattttgacagtaaccgaatgtccagcttgaatgtcaagtttctatgtttag

SEQ ID NO: 477712 - DNA, 201 bp, Homo sapiens
tcccctcttctgggctaattgaatcagttccttaaatgtctctacatctaatgatttgaaagaggcacattgtttgaaatatttaaaaaattagggccctyaggttgtatgcagaatgatctcagtgcttatttcagatataagtgtttcctaatgatctcattcatctcaaatgggatatgcctggccactttatttgaa

SEQ ID NO: 477713 - DNA, 201 bp, Homo sapiens
tttagaaatcaatgaagggaactaaatgcagctcaaagatccctctcaaagaagatgcacttgattttgacagtaaccgaatgtccagcttgaatgtcaastttctatgtttaggggctatttcagcctcaggtggccctgcttaattgctttcctgttcccattactaaccatgatgacagcctacctttcctaacagat

SEQ ID NO: 477714 - DNA, 201 bp, Homo sapiens
gggaactaaatgcagctcaaagatccctctcaaagaagatgcacttgattttgacagtaaccgaatgtccagcttgaatgtcaagtttctatgtttagggkctatttcagcctcaggtggccctgcttaattgctttcctgttcccattactaaccatgatgacagcctacctttcctaacagatacacttgcattttaat

SEQ ID NO: 477715 - DNA, 201 bp, Homo sapiens
gtttaggcagaagggggagctagagcaaatcagttcacatgctctctctgtctcctgtttacactgtagtattacaggtgttagacggtagcaagtcctaragaagtgtgttgtgtaagtcactgtcattcaacattgtaaacagctaggtaaaagcagaaaaagttccaaaaggtctgtgcatgaaatcaaaggatcctt

SEQ ID NO: 477716 - DNA, 201 bp, Homo sapiens
cagacaggaagaaattaaaattccagctacaccgccttttctgaagggcctgagggaaaaggcattggcgccccctgcagttgatggtgtgtatgtgcaastgagtattgtccattcaaatagcttggattcaatgtatttttatctgatactggtgagaaatccttaagagatgttatcatttaatttgaatttgtctgg

SEQ ID NO: 477717 - DNA, 201 bp, Homo sapiens
attatttattgcttaggatacatcttgtttgaaaccccttgcataagggaacctaagctgcagcatgctgtatttatttccttatgaaaacaatttattargcctggtggagccaatatcctggagttgcagaggagaaaaataaattcttgcctcatatttcctcacctaaataatagaatgcaaagctgtaattttaag

SEQ ID NO: 477718 - DNA, 201 bp, Homo sapiens
tcatttttaagtggttttcatgtattgttaacaggctgtgtcaacgttattgatttttctgtatctcaataattttttgtttgtttaccttattaaataaytgaaaggacactggatcaggacccaggaaaccaaaactcaattcctagttattctcttactcagtatgttgaaccactgtaaacgtccccaacttcccaa

SEQ ID NO: 477719 - DNA, 201 bp, Homo sapiens
tggagtgcaatggcatgatcacggctcactgcaacctctgcctcctgggttcaagcgattctcctgcttctgcctcctgaatggctaggattacaggcacycaccaccatgcctagctaatttttgtatttttagtggagatggagtttcaccatgttggccagactggtctcgaactcttgaccttaactgatccaccct

SEQ ID NO: 477720 - DNA, 201 bp, Homo sapiens
ctcaataattttttgtttgtttaccttattaaataattgaaaggacactggatcaggacccaggaaaccaaaactcaattcctagttattctcttactcartatgttgaaccactgtaaacgtccccaacttcccaagagaaattatcatttcccaatagaaaatgtcaatgttaatatcagcatatttccataagaatat

SEQ ID NO: 477721 - DNA, 201 bp, Homo sapiens
ttcattgtaggctcaagagactgatgtttctctgtatcctgattccatgtaccttttctgaaataatcagtttgcactgttttcccttgttgactgtcctrtaataaccttcctgcatacagttgtccctaggtatccacaggggactggttccaggaccagtgataccaaaattcatggatgctcaagtccctgatagaa

SEQ ID NO: 477722 - DNA, 201 bp, Homo sapiens
ttcgtatatgttcgagaagcttcaatttgggtactgggatgagcgcagtacttcatcaataatcacacttaacagacaggaagaaattaaaattccagctrcaccgccttttctgaagggcctgagggaaaaggcattggcgccccctgcagttgatggtgtgtatgtgcaagtgagtattgtccattcaaatagcttgga

SEQ ID NO: 477723 - DNA, 201 bp, Homo sapiens
tgacttaataacagtgtatgctcataagatatacttttatcaaagccttagaaggttagagatacaattgagaaataaaaaagtaaaatcttagagttcaytggggagaaagagagggttccagcaagggggaacagtgatacctgtggaaaaacttatcactagttatgagaggctgtggggaaaacatgaaaaagagcc

SEQ ID NO: 477724 - DNA, 201 bp, Homo sapiens
tcttataaaaatgtttaaaagaagtacttacattttaaaaaactgaataaataacatattttaataattgtatttaaaagtttgataattattaattttcrtttctattttgccttttaattttaataaaaattttaaatattttagaaaaaataactttaaaaactataagagaaataatataatgtttctatttttaat

SEQ ID NO: 477725 - DNA, 201 bp, Homo sapiens
caagactagtgtattggttggaagactggggcaaattttggaaaagaaaagtttggctacagtgtggcacacctgtggaggaaaacctaggacataagccmgcccagataacaagctaagaaatttgtttaggcagaagggggagctagagcaaatcagttcacatgctctctctgtctcctgtttacactgtagtattac

SEQ ID NO: 477726 - DNA, 201 bp, Homo sapiens
cctctcccccgaccccccgactcccctcagccgggccgaggtgcatggtggccagagggtcagggagaggtggcagtgggtgcgagtccccctcgcctcgsgctcagaatgaggatccctgcgagcgggtcagcgcggggcggcccttgccaggcgtcgcccgcccagttgctgccctctgccggccgggaccgcccgggc

SEQ ID NO: 477727 - DNA, 201 bp, Homo sapiens
actgtgtggccactgaggaaccaggatcaagcagagcctggggtacttttgcatccagcttctatttgtccagagacagctgaagatgaacaagatctgcytaagggcaaatttttgagcccagcagtacttatccctggtgcttccagccttccctttttgctttctatctcccctcatgagtagcctcgcctcttcttc

SEQ ID NO: 477728 - DNA, 201 bp, Homo sapiens
tttatcaaagccttagaaggttagagatacaattgagaaataaaaaagtaaaatcttagagttcattggggagaaagagagggttccagcaagggggaacwgtgatacctgtggaaaaacttatcactagttatgagaggctgtggggaaaacatgaaaaagagccataacaacatgagctgagtgctccaaggaggacgc

SEQ ID NO: 477729 - DNA, 201 bp, Homo sapiens
gaaaacatctttccttagatactttgagtaactaaaactgcctaatgctcagcgctcagatgctaagcaatagtgaaaacagacaaaaatatttcattttsgtattaggtttatagaaataagttccagcctctcagaacccaaagtgacctgggtgaatcgttttcatggagaaactacagaccttagcttgggcagtcg

SEQ ID NO: 477730 - DNA, 201 bp, Homo sapiens
tgcctgaaggtactcactcacactgcagtggctataacaccctgcaagaaaagtggtctctgttaaccctctcctcatcaagtcctgcatcttctgtttcrctatcattccccctatggagtcccttctctgcagtaatgctactgcctttgctgtggtcctctgcatctcttgagtagcacatgcagctctgcaaagtta

SEQ ID NO: 477731 - DNA, 201 bp, Homo sapiens
tggagtcccatttcttgggcgttaagaaaacattaagcatcagccagaaaacatctttccttagatactttgagtaactaaaactgcctaatgctcagcgytcagatgctaagcaatagtgaaaacagacaaaaatatttcattttagtattaggtttatagaaataagttccagcctctcagaacccaaagtgacctggg

SEQ ID NO: 477732 - DNA, 201 bp, Homo sapiens
cctgaaggtactcactcacactgcagtggctataacaccctgcaagaaaagtggtctctgttaaccctctcctcatcaagtcctgcatcttctgtttcackatcattccccctatggagtcccttctctgcagtaatgctactgcctttgctgtggtcctctgcatctcttgagtagcacatgcagctctgcaaagttatg

SEQ ID NO: 477733 - DNA, 201 bp, Homo sapiens
aggatccttaggcatgggagaaattcctagaactataggaagaggaagaaggtgatgaaaaagaaagggttgtgatatgcctgaaggtactcactcacacwgcagtggctataacaccctgcaagaaaagtggtctctgttaaccctctcctcatcaagtcctgcatcttctgtttcactatcattccccctatggagtcc

SEQ ID NO: 477734 - DNA, 201 bp, Homo sapiens
tggagcccatcaccttttatgacagatgaggaaactcagatcctgggagacacatcagttacagaagtccagaaaataagggccagaatcagaatggagaractggaaggcagaatagctgtggatgaaactgcagaccttatcatcatctcactggtgtctgtgccagagccccatctgagattcaccctggggctcctg

SEQ ID NO: 477735 - DNA, 201 bp, Homo sapiens
ttcagccttttccccccaatttggctaagaaactgtttttttcccacctttacagtgtttctcctcccaccccccccattctgtaattatttattgcttasgatacatcttgtttgaaaccccttgcataagggaacctaagctgcagcatgctgtatttatttccttatgaaaacaatttattaggcctggtggagccaa

SEQ ID NO: 477736 - DNA, 201 bp, Homo sapiens
ctctttttacatgctgaaatgggccactgaaaagataacgaggaacactttagacgtcctgacaacagaggaggcatggcagcctcttttgtctcaaccaracggtttgctgtgtgaaaggcatagagtaaaactgggaggcatttagggctggaataggtacccaatttggacatctaccaccaaatggcaaggagcggt

SEQ ID NO: 477737 - DNA, 201 bp, Homo sapiens
tggggatcagaaggcatttacctggacctgcatgatagagaggaagggacataggcaagactagtgtattggttggaagactggggcaaattttggaaaaraaaagtttggctacagtgtggcacacctgtggaggaaaacctaggacataagccagcccagataacaagctaagaaatttgtttaggcagaagggggagc

SEQ ID NO: 477738 - DNA, 201 bp, Homo sapiens
ctataacaccctgcaagaaaagtggtctctgttaaccctctcctcatcaagtcctgcatcttctgtttcactatcattccccctatggagtcccttctctscagtaatgctactgcctttgctgtggtcctctgcatctcttgagtagcacatgcagctctgcaaagttatgtactgatgagaatgaatttcagttaaagt

SEQ ID NO: 477739 - DNA, 201 bp, Homo sapiens
gggaccgggagaatcggacagaaaccagcctcagagtccggggcaggagccgttgacggctgcccctcaacgctgcgcttcgggttgggttaagtccccarggcgtcctcagaccacggcggggcttcaaacgccccagtcccgaagacaggcagggggtccctctgctgcgccgggatgacaggctggccccgacgaccc

SEQ ID NO: 477740 - DNA, 201 bp, Homo sapiens
ccacagggccctaggtatgggcagagagtagtatcccccacacagcatgctgttctccctgtacccccaggggctagttagcactctgggtgccctggacyctggggcctccctcagcaaattgtggagggtggcctggcatgaatccaggcagatctgggaagggacatggcaagacagcccctggaagctgtgtccccg

SEQ ID NO: 477741 - DNA, 201 bp, Homo sapiens
agggtggcctggcatgaatccaggcagatctgggaagggacatggcaagacagcccctggaagctgtgtccccgggtccaccgggatctggcccctgcagrtcagtgcatgtgtgcatgtgttgggggggggattgaggggaccgctaatactgtcctcaagcagctgctgaggagaagactgggtccctctagtcatgtt

SEQ ID NO: 477742 - DNA, 201 bp, Homo sapiens
ttgaggggaccgctaatactgtcctcaagcagctgctgaggagaagactgggtccctctagtcatgttcatccactcaatcactccctgcagcccgtctcyctggaaggtgcaggaggaggtgagaattgggcactctgtcaacccctcagactcccccattcctgctgagtcacccgtcctctgggacctccagcagctg

SEQ ID NO: 477743 - DNA, 201 bp, Homo sapiens; identical to SEQ ID NO: 123541

SEQ ID NO: 477744 - DNA, 201 bp, Homo sapiens
ctccctgtacccccaggggctagttagcactctgggtgccctggactctggggcctccctcagcaaattgtggagggtggcctggcatgaatccaggcagrtctgggaagggacatggcaagacagcccctggaagctgtgtccccgggtccaccgggatctggcccctgcaggtcagtgcatgtgtgcatgtgttggggg

SEQ ID NO: 477745 - DNA, 201 bp, Homo sapiens
gtatcccccacacagcatgctgttctccctgtacccccaggggctagttagcactctgggtgccctggactctggggcctccctcagcaaattgtggaggktggcctggcatgaatccaggcagatctgggaagggacatggcaagacagcccctggaagctgtgtccccgggtccaccgggatctggcccctgcaggtca

SEQ ID NO: 477746 - DNA, 201 bp, Homo sapiens
ttcccccttaaagatggcacttgcaggtacaaagatgcagagatgtctacagccttcagatgtttacttgaaatgattcttcaacagcagtttgacattgrgtttcttcatctagctgaagattcacaaattctccataatcaaactgatgtctctgatttagatgactaacgaaatttctggtaatctggctaggatctc

SEQ ID NO: 477747 - DNA, 201 bp, Homo sapiens
tctacagccttcagatgtttacttgaaatgattcttcaacagcagtttgacattgagtttcttcatctagctgaagattcacaaattctccataatcaaaytgatgtctctgatttagatgactaacgaaatttctggtaatctggctaggatctccccaaggaagagatacacaaataggacatgtcacaggaactatct

SEQ ID NO: 477748 - DNA, 201 bp, Homo sapiens
ctagaatctgcatttaaaaaatttcctttggatttttccatttagcacttcaagtttctattctgcaactctaataactggctcagatttgttagattathtcacatcgttcaaaatttgctactgtgtgtttaatgtgtacaataataaagtaaatgggaggaatgtaccaaatttcaaaagcaacataatgaaaaattc

SEQ ID NO: 477749 - DNA, 201 bp, Homo sapiens
acatacgtgtatatatacacacaaaagtatatatatatacatatacatctttagctttgaataaatttctaaactgagatgaagccaaacctctcatttayatcttctagaatacagtaataccaactgaaagtttctaataagagtttcaacttagttaatcagaaatactggctactgaaaattctgaggccaaagagc

SEQ ID NO: 477750 - DNA, 201 bp, Homo sapiens
gctgaagattcacaaattctccataatcaaactgatgtctctgatttagatgactaacgaaatttctggtaatctggctaggatctccccaaggaagagayacacaaataggacatgtcacaggaactatctgaaataagtgattactgttagagtgatccagtaaacgctctctggtaaaatttgattcttgacacaggg

SEQ ID NO: 477751 - DNA, 201 bp, Homo sapiens
aaacctctcatttatatcttctagaatacagtaataccaactgaaagtttctaataagagtttcaacttagttaatcagaaatactggctactgaaaattctgaggccaaagagctgctattcagcttagtatattctaggcttacaaatcagtcaaagactgaaattaccaaatgcccatgaaagaaataaatttttctc

SEQ ID NO: 477752 - DNA, 201 bp, Homo sapiens
gttccctactgaatcttcagagatctgaaagtttggaatgatagaagaaacatcatattcatcctgatacttcttacaagatttgcaatgaagtctcatgmgatagaatttaatctgttttgcacagcatctgcagctaccagaaaacttcctcattatattttcaaggtctaaggcccgttcagggcatgctctctcttc

SEQ ID NO: 477753 - DNA, 201 bp, Homo sapiens
tgtggatgtttcactcctattgctgttccctactgaatcttcagagatctgaaagtttggaatgatagaagaaacatcatattcatcctgatacttcttasaagatttgcaatgaagtctcatgcgatagaatttaatctgttttgcacagcatctgcagctaccagaaaacttcctcattatattttcaaggtctaaggc

SEQ ID NO: 477754 - DNA, 201 bp, Homo sapiens
tgtagtttcccccttaaagatggcacttgcaggtacaaagatgcagagatgtctacagccttcagatgtttacttgaaatgattcttcaacagcagtttgrcattgagtttcttcatctagctgaagattcacaaattctccataatcaaactgatgtctctgatttagatgactaacgaaatttctggtaatctggctag

SEQ ID NO: 477755 - DNA, 201 bp, Homo sapiens
gtagtttcccccttaaagatggcacttgcaggtacaaagatgcagagatgtctacagccttcagatgtttacttgaaatgattcttcaacagcagtttgayattgagtttcttcatctagctgaagattcacaaattctccataatcaaactgatgtctctgatttagatgactaacgaaatttctggtaatctggctagg

SEQ ID NO: 477756 - DNA, 201 bp, Homo sapiens
ttgctagctttgaagatggattaaggggatcacaagccaagaaatgtgggtggtctctggaagatggagaaagtattctctcctagagcctccaaaaaggratgcagcctgtcaacaccttgattataatccattgagacctatgtgagaattttaacttgtagaacagatttattacagataataaatttgtgttataaa

SEQ ID NO: 477757 - DNA, 201 bp, Homo sapiens
aaaaaatggaagtgggaggcagaaggagacggggtaaatttgactgggagaatggccagagaaatgtaaaattgctagctttgaagatggattaaggggaycacaagccaagaaatgtgggtggtctctggaagatggagaaagtattctctcctagagcctccaaaaagggatgcagcctgtcaacaccttgattataat

SEQ ID NO: 477758 - DNA, 201 bp, Homo sapiens
cttccctcttctctttccctttttaccctccctcctttatgtgtctactctttcctctctccttgcccattttcccttctcttttccctctactcctatgycattgtgttgggggaagtcctcaagaccatccccaggttttatgattttctagaagggctgagaactcagcatttaattatgactcaattactcatgact

SEQ ID NO: 477759 - DNA, 201 bp, Homo sapiens
atagtagtgctaatagaatgagactttggaaaagcaaatccaaaaccaaaacagctgtctcttccagtaagaccaaatcactctttcaagatgaaagaagwccagtgtagttggctgatgcctccaggctgtatatagtacaaaaacagagaatctttcacattgtgacccttagtaggaggtatgtctctacatcacaca

SEQ ID NO: 477760 - DNA, 201 bp, Homo sapiens
aaacaaagataaatagataggtcttaattaaactgcacagcaaaagaaataatcagcagagtaaacagacaacccacagagtggaagaaaatcttcacaayctatacatccaacagaggactaatatccagaatattcaaggaactcaaatcaagaaaaagataaacaatcccaacaaaaagtgggctgacatggatagac

SEQ ID NO: 477761 - DNA, 201 bp, Homo sapiens
cacctggctccatttcaaggtcatgttcatttttccactagtttaatttatcctatatcagtattatacaatttgtggactcaatgatatagttaacctakaaaaataataaaggtaagagaggaaagagaaaattagttaaaatatatgaatatttacagagaaaaaaaggaaatatgagtaggcactatagttcttgta

SEQ ID NO: 477762 - DNA, 201 bp, Homo sapiens
gtagaagtcaatattcttaggagcaaaaggaaatcaatctgcttatcttaagcgaaatttattggaagaatatttagtatctcacataactgtcaggaagrtgggagaatcagacttagaaaatgagcagaaaacaaaagaagtcaggatagagaacacagtcagggtcacaccacaggaacattagtttgggttttgcta

SEQ ID NO: 477763 - DNA, 201 bp, Homo sapiens
ccaatataatagaccagcttgagagtgagtcaataattgtttccaaaaaaagatactgctaattttttagcaccctcttttactcccaaaagtaaggcttccagtggtttggctcctgcctctcatctctcaccactctttcccttccacactgctccagcaacaaatcccttcttttggttcctagaatgggcttggatt

SEQ ID NO: 477764 - DNA, 201 bp, Homo sapiens
gctgttccttgacactttcttgaaaatagtaactgacattcaggtatagttttttaacatgtgtcttccccaaagcaacttcagtatcaattttcattagkattttatttttaaaaaacttgtgattatgtccttctttttctttacctacatagcacatctcagtaactaattagagtttttagtaccacttagtgtaag

SEQ ID NO: 477765 - DNA, 201 bp, Homo sapiens
agccaagtgaatgctagctattaataaccagtaagcaatgcttttatataaaaaagagattggaaaggtgattttaaaagacaccagggcttgctttttgkccttacccttctaccccaggctcttctgccttccctcttctctttccctttttaccctccctcctttatgtgtctactctttcctctctccttgcccatt

SEQ ID NO: 477766 - DNA, 201 bp, Homo sapiens
catctttagtacctttttgtctctgctgaaactttttaaatgagactgtgtttttttcaactgtatggtctattcctgacagctaaattagccctaaatgygggtaatatttttcctcatgttttaaaatgaggttaatatttgcataaaatcctaaaacagacttctgtatagtttatttagtcaaaatgtgttccttga

SEQ ID NO: 477767 - DNA, 201 bp, Homo sapiens
atcaactaatgtaattcatcatgttaatagaatgaagggggaaaactacatattagtcatctcaatagatacgaacattttgaaataaaagtcaatatccttttttttttttttttttttaagagacaagagtcttgccctgttccccaagctagagtgcagtggcgcaattataactcactataacctcaaactccgggc

SEQ ID NO: 477768 - DNA, 201 bp, Homo sapiens
tcaaatgaagttacattatcttatattgtatatgggttgtttcttatttttgttctgaaattaacagttatacattttcttccaaaataatgtaattgctrtttatctgatatatttcataactttattgtgagcctaaaattatgaagtagaaaaaacagaatcttcctttttctttatcttttttttttttagactaca

SEQ ID NO: 477769 - DNA, 201 bp, Homo sapiens
tagctaattctaatgttcatatggaaatgcaaaacagcagggcactcttgaaacaaaagagtgaagttggaagacttcactatcagatatcaagacttgcyataaagttatactagtgaaggcaatgtgatattggtaagtaaaaaagaaaaacaccatacagtggaactggataatcaagaaatgtacccgttgatgaca

SEQ ID NO: 477770 - DNA, 201 bp, Homo sapiens
agcctagtgttaattggtagccttctggattacataaacagtcaattaacacaactttgtatgttatatgtaatacatactgtattcttttattattattwtttttttttttttctagacggagtctcgctctgtcacccatgctggagtgcagtggccagtggcgcaatctcagctcactgcaacctccccgtcctgagt

SEQ ID NO: 477771 - DNA, 201 bp, Homo sapiens
caaggggtcagggaattccctttcttagtcacagaaaggggtgacagacggcacctggaaaatcgggtcactcccaccctaatactgcacttttccaatgstcttagcaaacagcacaccaggagattatatcctgcgcctggctcggagggtccgacgcccacagagcctcgcccattgctagcacagcagtctgagatc

SEQ ID NO: 477772 - DNA, 201 bp, Homo sapiens
tgttaagtttggttctattccttctctaaactcataactaggtcccctctaaactcatgcttcattatttctataacattgacactatctgtcagtagaaytgacaacctggtgagatatagatgaatatgttcaagcacagactgcatgtccactaggaggagatgttgcagagaaaactgaaataatagtagtgacact

SEQ ID NO: 477773 - DNA, 201 bp, Homo sapiens
agaaatatccttgtagatgttaagtttggttctattccttctctaaactcataactaggtcccctctaaactcatgcttcattatttctataacattgacrctatctgtcagtagaattgacaacctggtgagatatagatgaatatgttcaagcacagactgcatgtccactaggaggagatgttgcagagaaaactgaa

SEQ ID NO: 477774 - DNA, 201 bp, Homo sapiens
attcctgaccaaattgtatcactcaaatttaatcatgaggaaacataagacaagccaaatgtgaagggcagtctacaaagtaactgctgtatatccaaaaktatcaaagtcagaaaagccaaagagactgaagaactgttccagcttgaaaactaaagagacttgacgactaagtgcagcatgtgatttttaactggtccc

SEQ ID NO: 477775 - DNA, 201 bp, Homo sapiens
caggtaagagtgatacaggaatttaaaatgttcagctagctagcttgccagaccagttatatgtaaaagaataaattatgattttattctgaggagttatrcttttaatccacatttgtagtaggatttatttaatagagaatagcacagcctagattgttagacagcatacaatgtatgaatgaatcaatataatactgt

SEQ ID NO: 477776 - DNA, 201 bp, Homo sapiens
tacattcatgtcattggcccttgttctgtcaacgttgaatattttccttaaatttaaaagagccctttttatagcataatattttaagtatttctcctagkctttgttgtgttttaaattcagatttcagagatgagtaaccttattattttaatcctacaggtgaactatggaaaagtttgtaataacagtaaaaaagga

SEQ ID NO: 477777 - DNA, 201 bp, Homo sapiens
ttctggagaaatttaaatattagtttccaacattttatccattacgttttcaatgttgtgaaatatctctgagagttcctttaatgtgttttttttgccastgtcacttcctctgacacatcatcagcctttcatcacaatcacttttcctcatttatgtctataagttcaccttcactgatttcctcagtctgcatatct

SEQ ID NO: 477778 - DNA, 201 bp, Homo sapiens
aaatttcatcccaggtactctaaccacaaattatttctttctaccaaattggagcttctctaataggtgtgcctagaatggattaaaatcgtgacaatggytgcgcacagtggctcatgcctgtaatcccagcactttaggaggccgaaagcatcacttgagcccaggagttccaggccagcctaggtgacagaatgaggc

SEQ ID NO: 477779 - DNA, 201 bp, Homo sapiens
aaagcaactaaaagttatctaaaaataaaaaaaaagaagtattgcaaccggggaatccaaacaaaccagtctatcagaagaaatatctttgtgctaaggtycatagaaatattttacccaatttcccttcaggaaaaaaattaggaaagaacgttaatcaaaaaccaaatgtatttgaatgaaatccgaaggaacattaaa

SEQ ID NO: 477780 - DNA, 201 bp, Homo sapiens
aatggttgccttgaagtctttatcagataatctcaacacttgtgtcatctcagctttggcttgttttgtttgtcttttcccatgcaagttgaaattttcayggttctttatatgcagggaaattttggatttgcatcctggacattttgaatactctgggtcttgttttgatcctatgaagaatgttgatatttttgtttt

SEQ ID NO: 477781 - DNA, 201 bp, Homo sapiens
cttgccagtggcatgcacctatagtcccaggtacctgggagactgaggcaagatgatcacttgagcccagaaatcaagaccagcctgggcaatgtagtgaraccccatctcagaacaacaacaacaaaaaagcatttcttggtaatttccgtaaaaataatttgactattttaatacatttggaaaattcagaaaaatatc

SEQ ID NO: 477782 - DNA, 201 bp, Homo sapiens
cccaagtagttgggattacaggtacccgccaccacgcctggctaatttttgtatttttagtagagacgtggtctcaccatgtttgtcaggctggtcttcarctcctgacctcaagtgatccacctgccttggcctcccaaagtgctgggattacacgcatgagccactacccctagccgacatttttaagactttgttctc

SEQ ID NO: 477783 - DNA, 201 bp, Homo sapiens
tcctgacctcaagtgatccacctgccttggcctcccaaagtgctgggattacacgcatgagccactacccctagccgacatttttaagactttgttctcaygtcaaattttaccagtttacactcctaccagcagtctgacagtgcctttcgtagaacataaatcagtataagcatgacagtgtaaataaagaccttaaaa

SEQ ID NO: 477784 - DNA, 201 bp, Homo sapiens
tttctagtacttgtttttatgtaggttatagtcttatcagatatgcctatggtttaataattttcagaacaaactactaaaagcttataatttggtgatartaataatagctaatatttattgagagcttgtatgtcagatactgtgctaataataattagcatttaatttgccaggcagtattagacagcagttggcaaa

SEQ ID NO: 477785 - DNA, 201 bp, Homo sapiens
atctaatgaggcatatagtcaaaaatcagtgattacagggcatccagaaaaatgctttaatagaggtacatctctggtaggtgtaatataggaaaagaaarcaggatcacttaactctgagaggatcaaaagatgtggggaggtttattttttgctggagaaaaagagtattgcatatttatctgctggggaaagagtacc

SEQ ID NO: 477786 - DNA, 201 bp, Homo sapiens
gggcagaagcttctcatcctattatcttgacttttttaaagccaaaactttccaaaaattatcaaaccatctttatctggcattcaattctccagctttaratccttcaccttcctttggcttcacattgtcatataatgactatactgactttgctttttaaaagtcatattagagtctacatatagatacgcctttctg

SEQ ID NO: 477787 - DNA, 201 bp, Homo sapiens
cttggtggaggttgcagtgaactgagactgtgccaccctccagcctgggtgacagagcgagactctgtctcaaaaagcaactaaaagttatctaaaaataaaaaaaaagaagtattgcaaccggggaatccaaacaaaccagtctatcagaagaaatatctttgtgctaaggttcatagaaatattttacccaatttccct

SEQ ID NO: 477788 - DNA, 201 bp, Homo sapiens
ttggtggaggttgcagtgaactgagactgtgccaccctccagcctgggtgacagagcgagactctgtctcaaaaagcaactaaaagttatctaaaaataaaaaaaaagaagtattgcaaccggggaatccaaacaaaccagtctatcagaagaaatatctttgtgctaaggttcatagaaatattttacccaatttccctt

SEQ ID NO: 477789 - DNA, 201 bp, Homo sapiens
ttttgttctgaaattaacagttatacattttcttccaaaataatgtaattgctatttatctgatatatttcataactttattgtgagcctaaaattatgargtagaaaaaacagaatcttcctttttctttatcttttttttttttagactacaacaaaatcacaattaaatccggcctttgaagatgcctggagcagcag

SEQ ID NO: 477790 - DNA, 201 bp, Homo sapiens
tggtggaggttgcagtgaactgagactgtgccaccctccagcctgggtgacagagcgagactctgtctcaaaaagcaactaaaagttatctaaaaataaaaaaaaagaagtattgcaaccggggaatccaaacaaaccagtctatcagaagaaatatctttgtgctaaggttcatagaaatattttacccaatttcccttc

SEQ ID NO: 477791 - DNA, 201 bp, Homo sapiens
tacatttaccaaaattgttcttggccactaagcaaactttaacaaattcagccgggcgctgtggctcacgcctgtaatcccagcactttgggaggccgagrcaggtggatcacctgaggtcaggagttcgagaccagcgtggccaacatggtgaaaccccgtctctactaaaaatacaaaaattagccgggtgtggtggca

SEQ ID NO: 477792 - DNA, 201 bp, Homo sapiens
caacaaaatcacaattaaatccggcctttgaagatgcctggagcagcagtgatgaagaaggatgaatatcatctttagtacctttttgtctctgctgaaaytttttaaatgagactgtgtttttttcaactgtatggtctattcctgacagctaaattagccctaaatgcgggtaatatttttcctcatgttttaaaatga

SEQ ID NO: 477793 - DNA, 201 bp, Homo sapiens
ttaacatcaactatctattacagctcttcccaaagcattagaatatatgctatggaatatttcggaggagatttgctattgtttgttggctctggtgtttygcattagaaatacaaatttgggaaaatcagttaatctcagcttcacattattttattttagaaatcagtatacatgccctgtggttcttatacgtttcta

SEQ ID NO: 477794 - DNA, 201 bp, Homo sapiens
agaaaggtactttgaattaaggtaaaaacagtgaaaataacctgaaatatttgcacatttcaagaatatcctccattttgcagaattttctctgaacttaycatatacctcatcaactattgttatttcctaaattaaacattatggcttttagggaagtcagttaaaggtgtcaacaactccagatttaaagatgatttt

SEQ ID NO: 477795 - DNA, 201 bp, Homo sapiens
cctttcatgtggcctacaattaggccacatatagcattaactaaaggaagcagtttgtgttatggtatgtttcatgtggcctataattaggccacatatascattaactaaaggaaacagtttttggtgttatggtatgtttagcatttcccccagaatttttattttatactgaaatattattattaatacattaagtca

SEQ ID NO: 477796 - DNA, 201 bp, Homo sapiens
gtaaccaacaggttggttgaaaacttagcaagcaaatttgactacagcagctcaaactgggagaagatggcatactctaattgtagatatgtttgagtggyccatggtaagaccagaaggagctatagcagtctggactctaatatctttccaaagagctaaccagtcaaagtgcgcccccagtacagaactatatactga

SEQ ID NO: 477797 - DNA, 201 bp, Homo sapiens
tgtccttaatccaaataaagagaaaaaaataccttttgataaatctttaagtagctacccagtgccatatgcatacttccagattttatcacgtctaattkggtttattgtggcttgattaactttagcatacagctgcttttggtgtcagaatattcttctgtataaagcttaatatggtcaaataattaggtttagcca

SEQ ID NO: 477798 - DNA, 201 bp, Homo sapiens
caaatttccgtctttaaatacctttaaaagtttgcatgtaattgttactactgctgatattttaaacatttatacaagatgtctaaaaatctataaatacrttaggatgtgtggtagaagatttagacatttcttgtgatttttgtaccataagtaatcttggttaaataagaaatttttaaatgttaaattacttgttaa

SEQ ID NO: 477799 - DNA, 201 bp, Homo sapiens
gctgggattacaggcatgagccaccatgcccggcctggctttttatattagctgttattgttattgatcaaagtcagataactcattactgtttgtctggrtatttaaacctaaggctaaattgcaatgtatatagatgtattgcaataaatgtcacccaggctggagtgcagtggcgcgatctcggctcactgcaacctc

SEQ ID NO: 477800 - DNA, 201 bp, Homo sapiens
ttcaaactatactataaggccatagtcaccaaaacagcatgctagtggtaataaaaataggcatatagaccaacggaacagagtggagaacccacaagtaragccaaatacttacagctagctgatcttcagcaaagcaaacaaaaacctaaagtggggaaaggacaccctattcaacaaatagtcctgggacaattggca

SEQ ID NO: 477801 - DNA, 201 bp, Homo sapiens
aacagtttttggtgttatggtatgtttagcatttcccccagaatttttattttatactgaaatattattattaatacattaagtcaagtcagaacagattygataaacttccactttttacttccagcttccaccatggtctcatctactagtatatgagaaacatcttactttagcatgtggttaaatctaaaagatgag

SEQ ID NO: 477802 - DNA, 201 bp, Homo sapiens
gcaggtggatcacctgaggtcaggagttcgagaccagcgtggccaacatggtgaaaccccgtctctactaaaaatacaaaaattagccgggtgtggtggcrcacgcctgtaatcccagctactcggggggctgaggcaggagaatcgcttgaactctggagacagaggttgcagtgagccgacatagtgtcactgcactcc

SEQ ID NO: 477803 - DNA, 201 bp, Homo sapiens
ctacaacttaggggacccagagaaacttatattcaatgaaacttcgtaacctaaaaaaaaaaaaaaatatatatatatatatatatatatatatatatatrtatatgtatgtatgtatgtatacacacacacacacatgcatacatattaactcattgaacaaaaagaatatgtagccatcttaagacactaaaacagagg

SEQ ID NO: 477804 - DNA, 201 bp, Homo sapiens
gagttttcaactgaaattaaaatttttaataggttacacactgggcttccatagtaggattaggaagcatggccctcatgtggcttatccacctacagacrtgtgtgtgtgtgtgtgtgtgtgtgtgtgtgtgtgttttcccagggctatttttggtagttatcaaaggcaagttaaaggcttctagagacagagtaggga

SEQ ID NO: 477805 - DNA, 201 bp, Homo sapiens
aatctaagggcatacctcaaggaactggagaaacagcaaaccaaacccaaacccaacagaagaaaaaaaataaccaagatcagagcagaaataaatgaaaytgaaaggacaacaacaacaaaacacaaaagataaatgcaacaaaaagctggttctttcaaaagataaataaaattgatagaccattagctagattaacca

SEQ ID NO: 477806 - DNA, 201 bp, Homo sapiens
gatactcacacatgcatgtttataacagcacaattcgcaagtgcaaaaatatagaaccagcccaaatgcatatcaatcaacaagtggataaagaaaatgtgttgtgtgtgtgtgtgtgtgtgtgtgtatcatggaatactactcagccataaaaaggaatgaaatcatggcttttacagtgacctgggtggaattggagac

SEQ ID NO: 477807 - DNA, 201 bp, Homo sapiens
ctcacacatgcatgtttataacagcacaattcgcaagtgcaaaaatatagaaccagcccaaatgcatatcaatcaacaagtggataaagaaaatgtgttgtgtgtgtgtgtgtgtgtgtgtgtatcatggaatactactcagccataaaaaggaatgaaatcatggcttttacagtgacctgggtggaattggagaccata

SEQ ID NO: 477808 - DNA, 201 bp, Homo sapiens
acacatgcatgtttataacagcacaattcgcaagtgcaaaaatatagaaccagcccaaatgcatatcaatcaacaagtggataaagaaaatgtgttgtgtgtgtgtgtgtgtgtgtgtgtatcatggaatactactcagccataaaaaggaatgaaatcatggcttttacagtgacctgggtggaattggagaccatattg

SEQ ID NO: 477809 - DNA, 201 bp, Homo sapiens
tatagtagatagaaaatacaggggctgggcatggtggctcacacctgtaatcccagcactttgggaggccaaggaggtgaatcacctgcagtcaggagttygagaccagcctggccaacatggtgaaaccccatctctactaaaaatacaaaaattagccaggtgtggtggcagatgcctataatcccagctactcaggtg

SEQ ID NO: 477810 - DNA, 201 bp, Homo sapiens
atgaaatattgaagttcagaaatgacagaacagcatagtggtctggggaaagaatgtcaaagttcagggctgaatgtggtggctcacacctgtaatcccartactttgggaggtgaaggtgagaggattgcttgaggccaggagttccaaaccagcctgggcaacatagcaatacttcatctctgcaaaaaaataccaaaa

SEQ ID NO: 477811 - DNA, 201 bp, Homo sapiens
gaataacaggcatgagccgccgcacctagcctaatttttgtatttttagtagagacagggtttagccatgttggccaggctggtctcgaactcctcacctyaggtgatccgcccacctcagcctcccagagtgctaggattacaggcatgagccactgcgcctggcctgcttgtcattgttgtactatatgtaatgtctag

SEQ ID NO: 477812 - DNA, 201 bp, Homo sapiens
ctccaggcctaggtgcctttacgagtaagttattctaaacacttaaaaaagagataataccaatcttatacaaatgcttcaagaggaaaaaaaggaacttytgtaaactttttttatggggccagcatatccatgatttcaaaatttacaaggacattatatggaaaattacaagccagtgtctcttacaaatataaataa

SEQ ID NO: 477813 - DNA, 201 bp, Homo sapiens
aaggtttactgctgtgtaaacctgtgaattattttcttttgtccttaatccaaataaagagaaaaaaataccttttgataaatctttaagtagctacccartgccatatgcatacttccagattttatcacgtctaatttggtttattgtggcttgattaactttagcatacagctgcttttggtgtcagaatattcttct

SEQ ID NO: 477814 - DNA, 201 bp, Homo sapiens
tgctgttttgtagagatcatcctgatgttcacagatacagtgtggagactgtacagtggtatcctcatgacactggcatgttcacatcaagctcatttgayaaaactctgaaagtatgggatacaaatacattacaagtaagtacattaaaacatttgcagattgctttgtaggataaaggagaatttaatcctaaaccat

SEQ ID NO: 477815 - DNA, 201 bp, Homo sapiens
attactaatgataatgtcttgtttccttttgatgatgacttatgataaaattatcttaaaccggttctgtttttacagttggtactagaggacccaaagtrcaactttgtgacttgaagtctggatcctgttctcacattctacagggtatttttattttatttcaaacggcaactactttgagtaaacgattcaataaaa

SEQ ID NO: 477816 - DNA, 201 bp, Homo sapiens
agcgggaagatcagcttctatagaccaccaccacccactcacactctgcctgcccatctcagtgctgagaattaaggaaatgaccaagttctttgacatcraggataccgagcaagtcaatgaagacaccatggaatgcttggccactggagaatctgatgagctattgggtgacacagacccactcaaaatggagatcaa

SEQ ID NO: 477817 - DNA, 201 bp, Homo sapiens
aatagttccaatggagaaaacacacttgtaagagatttttaagtatatatttgggtataaattaagaaatggatctgtgacatacacttgatttttttatrtatttaactcatttattcccttttaatcacagctgtttttaaaaatgtgtttctactatgtggactagtaattctcaactcaggacaacccacccttacc

SEQ ID NO: 477818 - DNA, 201 bp, Homo sapiens
acattcacaatgtctaagattttataatatttaaatttggtgtaacttccaaaagagacataaagaatttgttcaaggagaattttgtcttgtaaaaaaakaagtatactaaagaaaggtactttgaattaaggtaaaaacagtgaaaataacctgaaatatttgcacatttcaagaatatcctccattttgcagaatttt

SEQ ID NO: 477819 - DNA, 201 bp, Homo sapiens
ctattgaatatttgctgaaaaggcaaaagttcaacaaccctaatgtatgaatacatatgtacctatataacgagacctctgtgtgccataaaattagaaadgtgggtgaggggtacagtcattgtcctagctacatatgtcaatgtaacatttatttcttctcagtgctgacagtagagtaaaattatgggatgtgagaag

SEQ ID NO: 477820 - DNA, 201 bp, Homo sapiens
aataataccaagtatatcagatgtcataacaaaggtgaacaggctgatttcttccattaagaagcatatattatcagattaatttttaaaacaaataaagmtaaaagctgtttctcataaatacattaagttaaaatattttaaaatactttacaaaattcttgaatagttaaaaagttaaaggataaagagagatcagac

SEQ ID NO: 477821 - DNA, 201 bp, Homo sapiens
acttcggatcatttcattgttttactgcttcatttggcatatagaaaccttatcaccctttcccctgcaccatatatatattgttgtcttatattttatayttacatacattatatactctatcagacattataattttttccaaccatcaatcatattttaaggaaaaaagtagccattatatttaaccagatagttatt

SEQ ID NO: 477822 - DNA, 201 bp, Homo sapiens
actgacagttttccaaaagcattttccagtcccaccactaataggtgagagtgctagctgctccatatttatgtttcccctttcctgctttcatttgactrtttgaacattatttagtattctattttatatactatggttttgactatatctttttgtataattctttagtggctgctctaggaattataaaatacttac

SEQ ID NO: 477823 - DNA, 201 bp, Homo sapiens
agcataattacattattttgaaatttctccatgttattgcatgtatcaattccttttttttgctgtggagtatcccactgtgcagatataccacagtttawctagtcacttgtcgatggacatctgagttgtttccagttcaggactaatacatttacagctgctctgaaaattcatgtatgagtcattgtatgaacatat

SEQ ID NO: 477824 - DNA, 201 bp, Homo sapiens
cactgatatgcagtgttcacagtttacaccctctaaaaaaacattttacaactttattgaggtataattgacatgcaataccctgcacattaaatgagaayatacaatttgatgaattttgacatatatttacttttgaaaccattaccataatcaagagaacatccataaccctaaaaaatttttgacggtcatttataa

SEQ ID NO: 477825 - DNA, 201 bp, Homo sapiens
tccatcattaagtgatgtttttgcttaaacaattatatagttccattttattcataggagatgtctactgttcttccttgtcatcatgtaagagcaaaagsatgaacactgatatgcagtgttcacagtttacaccctctaaaaaaacattttacaactttattgaggtataattgacatgcaataccctgcacattaaat

SEQ ID NO: 477826 - DNA, 201 bp, Homo sapiens
aggcagcttttttttcatttgctccatttatgtttaatgcaagtttcacttctagtattatcactcttctttagtgcactttcattcttttggccaatttyctcttttaatctgtaaaattccatgtgggtttatctcaagggcacagaaatattaataacaaacctccatgctttgcagcctgtgtgtgaactgaataac

SEQ ID NO: 477827 - DNA, 201 bp, Homo sapiens
gcctggcagagacacaacaaaaaaagagaaatttacaccaatatcccaaatgaacatcgatccgaaaatcctcaataaaatactggcagactgaatccaamagcacatcaaaaagcttatccaccatgatcaagtgggcttcatccctgggatgcaaggctggttcaatataggcaaatcaatacacgtaatccatcacat

SEQ ID NO: 477828 - DNA, 201 bp, Homo sapiens
ctagtgttaattggtagccttctggattacataaacagtcaattaacacaactttgtatgttatatgtaatacatactgtattcttttattattattattwttttttttttctagacggagtctcgctctgtcacccatgctggagtgcagtggccagtggcgcaatctcagctcactgcaacctccccgtcctgagttca

SEQ ID NO: 477829 - DNA, 201 bp, Homo sapiens
ttccactatttgctttagtttcagagcccatatcattgaagggtccatgtcataagagtcctttgtggctttttttttttttttttttttttttttttcaraatagggcatttttgtctgcatttaaaacttgttcaggcagatatcctttgtcctcgatgattttcttaatggtatctggaaactcatctgctgcctttt

SEQ ID NO: 477830 - DNA, 201 bp, Homo sapiens
acaaggttttcacacctgctggcgtagctgcagtgacagcatcacaaattttcttttttcataatggttcttatgctggactcatttatcttgaaatggtrggcaaccacagctgcacacttcagtctatggtacatgtcaagcaattcagcctttttttataatgtcatgacttttctctgcttcttggtaccacttgca

SEQ ID NO: 477831 - DNA, 201 bp, Homo sapiens
tctctgcttcttggtaccacttgcagcatcactagtgacacttcgtatgggttccaaggtgtatgataatgtgaattgtatcttgacaaagccattatttaaaaaaaaaaatatatatatatatatatatgtatttatatgaatgacccccaggttctctggcttgacaattgggtggattatattgttattttgttattt

SEQ ID NO: 477832 - DNA, 201 bp, Homo sapiens
cttggtaccacttgcagcatcactagtgacacttcgtatgggttccaaggtgtatgataatgtgaattgtatcttgacaaagccattatttaaaaaaaaawatatatatatatatatatatgtatttatatgaatgacccccaggttctctggcttgacaattgggtggattatattgttattttgttatttagtaagatg

SEQ ID NO: 477833 - DNA, 201 bp, Homo sapiens
gtactgagtgtccctaatccagaagttcaaaatttgaaattttttgagttctagatttgtaatgctcaaccttgtaagtataatgcaaaccttccaaaccaaaaaaaaaaaaatctgaactctgaaacatttctggtcccagttactttggataagggatacttaacccataacatacaagtggcatttgaaaggagtaca

SEQ ID NO: 477834 - DNA, 201 bp, Homo sapiens
agaaaatttattgctttgtttttatacttaaaccttatactttttaaatgtcttttgattaccagactgcagatgtatttaattttgaggaaacagtttayagtcatcatatgtctccagtctccaccaagcactgtttggtagcaggtttgtaagtgtattcttttgtcttttgacatactgaaaactttctcccttttt

SEQ ID NO: 477835 - DNA, 201 bp, Homo sapiens
tattcttttgtcttttgacatactgaaaactttctccctttttatatgtagttagttttgatgtagacattttaacccagaggaatatcacaattttatatatatatatatatatatatatatatatatatatatatatacacacacacacactatatatattcaacagatattgtactatttatattcaacagatatttt

SEQ ID NO: 477836 - DNA, 201 bp, Homo sapiens
attcttttgtcttttgacatactgaaaactttctccctttttatatgtagttagttttgatgtagacattttaacccagaggaatatcacaattttatatatatatatatatatatatatatatatatatatatatatacacacacacacactatatatattcaacagatattgtactatttatattcaacagatattttg

SEQ ID NO: 477837 - DNA, 201 bp, Homo sapiens
tttatagtattattgcccttttcccttcatcttaaactctccttctagttcacagacaattcagtcctgaagtcattatgttgggcagaggtaagctttcycacttagtatgggattaggtttcctagagtggaatttcagagcctgagcaggttgaggaagtagtttaattgtggggacatacaaatttaggtgataagg

SEQ ID NO: 477838 - DNA, 201 bp, Homo sapiens
aactttagggttcagttaccctgttctgccatacgcttccaagtttaggcccaagtctgggctcagaagtgagaagagaggcaataaacaacagggattgyccctaccctcttgggatcgggactctgatgaacagagaaaacaatttcccttcctcagagttctggcttctgcaggccactatgcgtagccatagccatt

SEQ ID NO: 477839 - DNA, 201 bp, Homo sapiens
tggtaccacttgcagcatcactagtgacacttcgtatgggttccaaggtgtatgataatgtgaattgtatcttgacaaagccattatttaaaaaaaaaaawatatatatatatatatatgtatttatatgaatgacccccaggttctctggcttgacaattgggtggattatattgttattttgttatttagtaagatggg

SEQ ID NO: 477840 - DNA, 201 bp, Homo sapiens
gtaccacttgcagcatcactagtgacacttcgtatgggttccaaggtgtatgataatgtgaattgtatcttgacaaagccattatttaaaaaaaaaaatawatatatatatatatatgtatttatatgaatgacccccaggttctctggcttgacaattgggtggattatattgttattttgttatttagtaagatgggga

SEQ ID NO: 477841 - DNA, 201 bp, Homo sapiens
atgtgtctttgcctcccactgttctctccactctctccaggaaaaagagtcccaagaggctggagctgacaaacccaataccctttatttaacccctactstgttttacaacagaaataaaagaagtatcagcaggaaaaaaaaaaaaagaatatgcccccccaaaaaatatcattaccccctccccaaaaaataccattc

SEQ ID NO: 477842 - DNA, 201 bp, Homo sapiens
ttttatatgtagttagttttgatgtagacattttaacccagaggaatatcacaattttatatatatatatatatatatatatatatatatatatatatatacacacacacacactatatatattcaacagatattgtactatttatattcaacagatattttgcaaggcaagcactatgctgtggccaggattcagagaat

SEQ ID NO: 477843 - DNA, 201 bp, Homo sapiens
tttatatgtagttagttttgatgtagacattttaacccagaggaatatcacaattttatatatatatatatatatatatatatatatatatatatatatacacacacacacactatatatattcaacagatattgtactatttatattcaacagatattttgcaaggcaagcactatgctgtggccaggattcagagaata

SEQ ID NO: 477844 - DNA, 201 bp, Homo sapiens
ttatatgtagttagttttgatgtagacattttaacccagaggaatatcacaattttatatatatatatatatatatatatatatatatatatatatatacacacacacacactatatatattcaacagatattgtactatttatattcaacagatattttgcaaggcaagcactatgctgtggccaggattcagagaataa

SEQ ID NO: 477845 - DNA, 201 bp, Homo sapiens
tatatgtagttagttttgatgtagacattttaacccagaggaatatcacaattttatatatatatatatatatatatatatatatatatatatatatacacacacacacactatatatattcaacagatattgtactatttatattcaacagatattttgcaaggcaagcactatgctgtggccaggattcagagaataag

SEQ ID NO: 477846 - DNA, 201 bp, Homo sapiens
tagtaacttcttttttttattttaaagttgacaggccaggcacggtcgctcacacctgtaatcccagcactttgggaggcggaggtgggtggatcacgagrtcaggagatcaagaccatcctggctaacacgatgaaaccccgtctctactaaaaatacaaaaaattagccagtggtgggcacctgtagtcccagctactc

SEQ ID NO: 477847 - DNA, 201 bp, Homo sapiens
aattagccagtggtgggcacctgtagtcccagctactcgggaggctgacacaggagaatcgcttgaacccgggaggtggaggttgcggtgagccgagatcrcgccattgcactccagcctgggcaacaagagcaaaactccgtctcaaacaaaaaagaaatattaatatgagttcgagaccagcctgaccaacatggagaa

SEQ ID NO: 477848 - DNA, 201 bp, Homo sapiens
cttatctaacctatagaaaaaaaagtgaatccctttttttttttttttttttgaggtagagtctcgctttgttgcccaggctggagggcagtggcgccatyttggctcactgcagcctccacctcccaggttcaagcaattctctctctcagcctcctgagtagctgggattacaggtacccgccaccaggcctggctaat

SEQ ID NO: 477849 - DNA, 201 bp, Homo sapiens
atacagtttactcaggagaacagataactatgcttaagggacattataaaactgttgactgctgtgtatttcagtcaaatttccaggtaagagtgatacasgaatttaaaatgttcagctagctagcttgccagaccagttatatgtaaaagaataaattatgattttattctgaggagttatacttttaatccacatttg

SEQ ID NO: 477850 - DNA, 201 bp, Homo sapiens
tccaagcaccagttccagtgggacgggagattaccagtgaaatagtttggttctccctgaagcatctgcatattaaaagaacccttccccaactatgtgtytttgcctcccactgttctctccactctctccaggaaaaagagtcccaagaggctggagctgacaaacccaataccctttatttaacccctactctgtttt

SEQ ID NO: 477851 - DNA, 201 bp, Homo sapiens
tttttttaattttttgctaaatggtctaaaatgattcttcaaggttgaagtctgtattttacttctattaagattgaaaagtaaacatttacccctgtggktttttactatttgtatttcctcttttgttaaatgtacattcatgtcattggcccttgttctgtcaacgttgaatattttccttaaatttaaaagagccct

SEQ ID NO: 477852 - DNA, 201 bp, Homo sapiens
tttgtttttatacttaaaccttatactttttaaatgtcttttgattaccagactgcagatgtatttaattttgaggaaacagtttatagtcatcatatgtstccagtctccaccaagcactgtttggtagcaggtttgtaagtgtattcttttgtcttttgacatactgaaaactttctccctttttatatgtagttagtt

SEQ ID NO: 477853 - DNA, 201 bp, Homo sapiens
actaggcattgtaattagcaccttttatatacaaactcatttaatcttaataatatgctcaccaggataatgatggtttacagttataaaatatcagaaaygtcatttgtcttagtttgtgagagtacttgttaattatttgtattgatatttaagtggctttatttaaatacacataaatgttaagttgaacatagtctc

SEQ ID NO: 477854 - DNA, 201 bp, Homo sapiens
tcttggtggaggttgcagtgaactgagactgtgccaccctccagcctgggtgacagagcgagactctgtctcaaaaagcaactaaaagttatctaaaaatwaaaaaaaagaagtattgcaaccggggaatccaaacaaaccagtctatcagaagaaatatctttgtgctaaggttcatagaaatattttacccaatttccc

SEQ ID NO: 477855 - DNA, 201 bp, Homo sapiens
aactgtaaacaaaatgtggacatcactacgaatattaggtaaggtaagatttaaggttaaaagcaccaaacattttaaagaaggacattatataaagctamatatatatggaggaaatgaagaaacaacaaactagatttagtagatacatgactttacatcccttaagtggagaacgtacatactttttgtaagtcagtg

SEQ ID NO: 477856 - DNA, 201 bp, Homo sapiens
gccaactgtggctttcaaggccaggacccagcatcaggtcagctttggagctgaaaacctcatgagggttctggggaactattgctgccttggtgaaatgygcacccacatccatatggacattgtaggccttcccaatattgggaaaagcagcctgattaaaagcctgaagcacagccatgcatgcagtgtgggagccat

SEQ ID NO: 477857 - DNA, 201 bp, Homo sapiens
ccagcactctgggaggctgaggtaggcagatcacgagatcaggagatcgagatcatcctggctaacacggtgaaaccccgtctctactaaaaatacaaaamactaggtggagccaagatggccgaataggaacagctccagtctgcagctcccagcgtgagcaatgcagaagacaggtgatttatgcatttccaactgagg

SEQ ID NO: 477858 - DNA, 201 bp, Homo sapiens
aaagatactcacacatgcatgtttataacagcacaattcgcaagtgcaaaaatatagaaccagcccaaatgcatatcaatcaacaagtggataaagaaaatgtgttgtgtgtgtgtgtgtgtgtgtgtgtatcatggaatactactcagccataaaaaggaatgaaatcatggcttttacagtgacctgggtggaattgga

SEQ ID NO: 477859 - DNA, 201 bp, Homo sapiens
ataacagtaaaaaaggattgaaattcactgtctcctgtggctgcagttcagaatttgtttttgtaccatatggtagcaccattgctgtttatacagtttamtcaggagaacagataactatgcttaagggacattataaaactgttgactgctgtgtatttcagtcaaatttccaggtaagagtgatacaggaatttaaaa

SEQ ID NO: 477860 - DNA, 201 bp, Homo sapiens
ttttttaattttttgctaaatggtctaaaatgattcttcaaggttgaagtctgtattttacttctattaagattgaaaagtaaacatttacccctgtggtkttttactatttgtatttcctcttttgttaaatgtacattcatgtcattggcccttgttctgtcaacgttgaatattttccttaaatttaaaagagccctt

SEQ ID NO: 477861 - DNA, 201 bp, Homo sapiens
aacttaggggacccagagaaacttatattcaatgaaacttcgtaacctaaaaaaaaaaaaaaatatatatatatatatatatatatatatatatatatatrtgtatgtatgtatgtatacacacacacacacatgcatacatattaactcattgaacaaaaagaatatgtagccatcttaagacactaaaacagaggagaa

SEQ ID NO: 477862 - DNA, 201 bp, Homo sapiens
gcagctcccagcgtgagcaatgcagaagacaggtgatttatgcatttccaactgaggtaccaggttcatctcactggggagtgtcggacagtgggtgcagsacagtgggtgcagcgcactgagcatgagccaaagcagggtgaggcatcgcctcacctgggaagcacaaggggtcagggaattccctttcttagtcacaga

SEQ ID NO: 477863 - DNA, 201 bp, Homo sapiens
acaacttaggggacccagagaaacttatattcaatgaaacttcgtaacctaaaaaaaaaaaaaaatatatatatatatatatatatatatatatatatatrtatgtatgtatgtatgtatacacacacacacacatgcatacatattaactcattgaacaaaaagaatatgtagccatcttaagacactaaaacagaggag

SEQ ID NO: 477864 - DNA, 201 bp, Homo sapiens
tgagcaatgcagaagacaggtgatttatgcatttccaactgaggtaccaggttcatctcactggggagtgtcggacagtgggtgcaggacagtgggtgcascgcactgagcatgagccaaagcagggtgaggcatcgcctcacctgggaagcacaaggggtcagggaattccctttcttagtcacagaaaggggtgacaga

SEQ ID NO: 477865 - DNA, 201 bp, Homo sapiens
gaaacttcgtaacctaaaaaaaaaaaaaaatatatatatatatatatatatatatatatatatatatatgtatgtatgtatgtatacacacacacacacaygcatacatattaactcattgaacaaaaagaatatgtagccatcttaagacactaaaacagaggagaatgagaggaaatggtgtataggaggcaggactaa

SEQ ID NO: 477866 - DNA, 201 bp, Homo sapiens
tgctgaggcttgagtaggtaaacaaagcggctgggaagatcaaactgggtggagcccaccacagctcaaggaggcctgccggcctctgtagacttcacctstgggggcacggcatagccaaacaaaaggcagcagaaacctctgcagacttaaatgtccctgtctgacagctttgaagagaatagtggttctcccagcacg

SEQ ID NO: 477867 - DNA, 201 bp, Homo sapiens
cccagcacgcagctggagatctgagaacagacagactgcctcctcaagtgggtccctgatgccgagtagcctaactgtgaggcaccccccagtaggggcasactgacacctcacagagccaggtgcacctctgagacaaaactcccagaggaacgatcagctagcaacatttgctattcaccaatatccactgttctgcag

SEQ ID NO: 477868 - DNA, 201 bp, Homo sapiens
actgacacctcacagagccaggtgcacctctgagacaaaactcccagaggaacgatcagctagcaacatttgctattcaccaatatccactgttctgcagyctctgagctgatagccaggcaaacggtctggaggggacctccagcaaacttcaacagacctgttgctgagggtcctgactgttagaaggaaaactaacaa

SEQ ID NO: 477869 - DNA, 201 bp, Homo sapiens
ttttgctaaatggtctaaaatgattcttcaaggttgaagtctgtattttacttctattaagattgaaaagtaaacatttacccctgtggttttttactatwtgtatttcctcttttgttaaatgtacattcatgtcattggcccttgttctgtcaacgttgaatattttccttaaatttaaaagagccctttttatagcat

SEQ ID NO: 477870 - DNA, 201 bp, Homo sapiens
taaggaagaagttttgcaggaattaaatatgtttcctcagctggatgacgaggccactatgaaggcttattacaaggagtccgtgaggtggtagaatactstgatgtgattctggaagtcctggatgccagagacccattaggctgctgctgctgcttccaaatgggggaggctatcctatgggcagaaggcaacaagaag

SEQ ID NO: 477871 - DNA, 201 bp, Homo sapiens
ggctaaaggaggaagtttgaacccatggcaaagaagttaaaaaccttgaaaaaaaattagacaaatggctaactagaataaccaatgcagacaagtccttwaacgacctgatggagctgaaaaccatggcacgagaactacgtgatgaatgttcaagcctcagtagctgatttgatcaactggaagaaagggtatcagtga

SEQ ID NO: 477872 - DNA, 201 bp, Homo sapiens
tctgattggtgtacctgaaagtgacggggagaatggaaccaagttggaaaacactctgcaggatattatccaggagaacttccccaatctagcaagtcagrccaacattcaaattcagaaaaacagagaatgccacaaagatactcctcgagaagagcaactccaagacacataattgtcagattcactaaagctgaaatg

SEQ ID NO: 477873 - DNA, 201 bp, Homo sapiens
ttatttcaaacggcaactactttgagtaaacgattcaataaaaagaaacgttactaacagtgtattctttgtaagtgacatgactaatgtactttgtgctrgttgttgagactcagcagggaaataaagatccttctgtgcattattcttataaaactgaaccattgaaaacacatttatatgaacaatgatcattgggga

SEQ ID NO: 477874 - DNA, 201 bp, Homo sapiens
accggtaccagccactgcaaaaacatgccaaattgtaaagaccatcaaggctaggaagaaactgcatcaactaacgagcaaaataaccagctaatgtcatmatgacaggatcaaattcacacataacaatattaaccttaaatgtaaatgggctaactgctccaattaaaagacacagactggcaaattggataaagagtc

SEQ ID NO: 477875 - DNA, 201 bp, Homo sapiens
ctctgcttcttggtaccacttgcagcatcactagtgacacttcgtatgggttccaaggtgtatgataatgtgaattgtatcttgacaaagccattatttaaaaaaaaaaatatatatatatatatatatgtatttatatgaatgacccccaggttctctggcttgacaattgggtggattatattgttattttgttattta

SEQ ID NO: 477876 - DNA, 201 bp, Homo sapiens
ttgaaaactgttttgtattttttcttcgtcaccccacccccatatcattgtgcaaattgttgcacatgtaggatcagaagacacaaatgagggaatgttayatttttaaacatgtataggaattaatctaggaacttactgaatacctttgtgttccaggtgctttcatatggattatttcatttgctttttcacgataca

SEQ ID NO: 477877 - DNA, 201 bp, Homo sapiens
caaaattgaccacatagttggaagtaaagctctcctcagcaaatgtaaaagaacagaaattatagcaaacggtctttcagaccccagtgcaatcaaactakaactcaggattaagaaactcactcaaaaccgctcaactacatggaaactgaacaacctcctcctgaatgactactgggtacataacgaaatgaaggcaga

SEQ ID NO: 477878 - DNA, 201 bp, Homo sapiens
aagatactcacacatgcatgtttataacagcacaattcgcaagtgcaaaaatatagaaccagcccaaatgcatatcaatcaacaagtggataaagaaaatgtgttgtgtgtgtgtgtgtgtgtgtgtgtatcatggaatactactcagccataaaaaggaatgaaatcatggcttttacagtgacctgggtggaattggag

SEQ ID NO: 477879 - DNA, 201 bp, Homo sapiens
tctcttattaaaatggcattgataagccccctgggttacaatattgttgaggtccttgtgaggacatgatagcatcagttgaactgattaggagcacgtcrgattgccaggcatttttctttagaaataatctagaagctgaaatagatgtctgatcatagatttgcctttcttctttttgcttacttgaaagaaaatgaa

SEQ ID NO: 477880 - DNA, 201 bp, Homo sapiens
gagacacattcaaagcagtgtgtagagggcaatttatagcactaaatgcccacaagagaaagcaggaaagatctaaaatggacaccctaacatcacaattraaagaactagagaagcaagagcaaacacattcaaaagctagcagaaggtaagaaataactaaggtcagagcagaactgaaggaaatagagacacaaaaaa

SEQ ID NO: 477881 - DNA, 201 bp, Homo sapiens
ttttaaaaaatttaaataaaaaataggcttataaaaatgtaatgctctctcttattaaaatggcattgataagccccctgggttacaatattgttgaggtycttgtgaggacatgatagcatcagttgaactgattaggagcacgtcggattgccaggcatttttctttagaaataatctagaagctgaaatagatgtctg

SEQ ID NO: 477882 - DNA, 201 bp, Homo sapiens
caagagcaaacacattcaaaagctagcagaaggtaagaaataactaaggtcagagcagaactgaaggaaatagagacacaaaaaacccttcaaaaaatcartgaatccaggagctggtttttgtaaaagatcaacaaaattgatagaccactagcaagagtaataaagaagaaaagagagcagaatcaaatagacgcaaaa

SEQ ID NO: 477883 - DNA, 201 bp, Homo sapiens
atactcacacatgcatgtttataacagcacaattcgcaagtgcaaaaatatagaaccagcccaaatgcatatcaatcaacaagtggataaagaaaatgtgttgtgtgtgtgtgtgtgtgtgtgtgtatcatggaatactactcagccataaaaaggaatgaaatcatggcttttacagtgacctgggtggaattggagacc

SEQ ID NO: 477884 - DNA, 201 bp, Homo sapiens
ttttgctaactattccagttggctaggtttgatggtcatctgtgaaaagaatcgaggttatagaaaccagtaaaccttgtgtgtatatttttttaaaaaawttaaataaaaaataggcttataaaaatgtaatgctctctcttattaaaatggcattgataagccccctgggttacaatattgttgaggtccttgtgagga

SEQ ID NO: 477885 - DNA, 201 bp, Homo sapiens
aaagagagcagaatcaaatagacgcaaaaaaaatgataaaggggatatcaccaccaatcccacagaaatacaaactaccatcagaatactataaacacctmtatgcaaataaactagaaaatctagaagaaatggataaattcctggacacatacaccctcccaagactaaacgaggaagaagttgaatctctgaatagac

SEQ ID NO: 477886 - DNA, 201 bp, Homo sapiens
gacttaaatcctcatactgatttcatttccttcacctggaaagaaagaaaaccaacttaagaatgggtaatgctagttttttgctaactattccagttggmtaggtttgatggtcatctgtgaaaagaatcgaggttatagaaaccagtaaaccttgtgtgtatatttttttaaaaaatttaaataaaaaataggcttata

SEQ ID NO: 477887 - DNA, 201 bp, Homo sapiens
gaggtacaaggaggagctggtaccattccttctgaaactattccaatcaatagaaaaagagggaatcctccctaactcatttgatgaggtcagcatcatcmtgataccaaagcctggcagagacacaacaaaaaaagagaattttacaccaatatctctgatgagcatcaatgcaaaaatccttaataaaatactggcaaa

SEQ ID NO: 477888 - DNA, 201 bp, Homo sapiens
cattgaaaacacatttatatgaacaatgatcattggggaagctcaaacaatatgaaaaatagttctaactcaaaaccttgtgttatttctacattaaaaaractaatgcaactcacatcagtgtacttgtctcatatgtattatttaatattctggctaatgagtaaacattgttcttaatatttaggtacattttttctc

SEQ ID NO: 477889 - DNA, 201 bp, Homo sapiens
taatagaatgaagggggaaaactacatattagtcatctcaatagatacgaacattttgaaataaaagtcaatatccttttttttttttttttttttaagaracaagagtcttgccctgttccccaagctagagtgcagtggcgcaattataactcactataacctcaaactccgggctcaagggattctcagctcaggctc

SEQ ID NO: 477890 - DNA, 201 bp, Homo sapiens
ctaaaaccataaaaaccccagaagaaaacctaggcattaccattcaggacataggcatgggcaaggacttcatgtctaaaacaccaaaagcaatggcaacmaaagccaaaattgacaaatgggatctaattaaactaaagagcttctgcacagcaaaagaaactaccatcagagtgaacaagcaacctacagaatgggaga

SEQ ID NO: 477891 - DNA, 201 bp, Homo sapiens
aagctggaaaccatcattctcaacaaactattgcaaggacaaaaacccaaacaccgccaagttctcactcataggtgggaattgaacagtaagaacacttsgacacaggaaggggaacatcacacaccgggacctgttgtggggtgggggtaggggggagggatagcattaggagatatacctaatgttaaatgggtgcag

SEQ ID NO: 477892 - DNA, 201 bp, Homo sapiens
gttaatagaatgaagggggaaaactacatattagtcatctcaatagatacgaacattttgaaataaaagtcaatatccttttttttttttttttttttaaragacaagagtcttgccctgttccccaagctagagtgcagtggcgcaattataactcactataacctcaaactccgggctcaagggattctcagctcaggc

SEQ ID NO: 477893 - DNA, 201 bp, Homo sapiens
aacggcgctcaccattggccggatatatcaccgactgaccaatgggagactctgctgttccagtcccgcccctgagctctgtcatggcgacgtccagtgckccagccggtgtgaggacacgatatgctggggtttttgtccgcacgccaaacgggtttggaggaccctcttcgccttcggagagcagagtcaacacggagg

SEQ ID NO: 477894 - DNA, 201 bp, Homo sapiens
tatttagtcaaaatgtgttccttgatcccagatgttgtggcctgggaaagccctcattgctacagtacaagtaacacaagtcgttgtacctcagttgtgascttcagcagattttatgaactataagatgcagtctcagaggatcagcaagtggaggccatcagtattgactttctcttacttgctgtactatcagcctgc

SEQ ID NO: 477895 - DNA, 201 bp, Homo sapiens
ataggtaagaaaccttgcatttatacttcgtcatcactactctagaagattatcatcatgttatgtaaaataaaatgttaattctagacataaggggaaaragaaattaaaactataggggtgaaaaaatattgcataatttattactgttgacctgatcatatgactgattaagggcactgaatttaacttgtatgtgaa

SEQ ID NO: 477896 - DNA, 201 bp, Homo sapiens
atgtaaaaataaaacaaaggcacattgtgtttgagtaggaaatctgtagacgtctagctggttttctattccaggcccaaaattctaaatataatcatggwacccgcacacaaatttatgttaaataccaacttcaatgaaattactctttctcctcattctctttgttatttatatgttgctttccttaagggaagaata

SEQ ID NO: 477897 - DNA, 201 bp, Homo sapiens
ataccaacttcaatgaaattactctttctcctcattctctttgttatttatatgttgctttccttaagggaagaatacaaatgccttgctaagaagcattytgtttggttgtaggctgcataaagggagtaaacacaaagtacatttgaccacaaaatgactttttaaaagctagaactatggtagcatgaagccaactga

SEQ ID NO: 477898 - DNA, 201 bp, Homo sapiens
ttgttatttatatgttgctttccttaagggaagaatacaaatgccttgctaagaagcattctgtttggttgtaggctgcataaagggagtaaacacaaagyacatttgaccacaaaatgactttttaaaagctagaactatggtagcatgaagccaactgaggtaatctagaataaaattttctatgtttgtttcccttct

SEQ ID NO: 477899 - DNA, 201 bp, Homo sapiens
aaaattctgaggcacataaatcaatgaacaaagataaaatataaggcagtgttgcaaagatgctgcaggcctgaggagatgttttcagaaatatttaggayacaagtatcagtggccattataagaatgaatttttattgaatgaataaatgtatatatctgggtccctggagaaatacactctgctcattactttacaaa

SEQ ID NO: 477900 - DNA, 201 bp, Homo sapiens
ttgtggcttgtctcagtcattgcttccctcccattgtattcccattctatcattaaataaatgtaaatcatctctaaatgaatacaagaaaaaagaatctrgaatctagagcttgtttctttagcaatttctttatgttgatctggttcagaaggtcacatggtatgtggctgaattagtttcccagctcatacgccactt

SEQ ID NO: 477901 - DNA, 201 bp, Homo sapiens
tgctttccttaagggaagaatacaaatgccttgctaagaagcattctgtttggttgtaggctgcataaagggagtaaacacaaagtacatttgaccacaaratgactttttaaaagctagaactatggtagcatgaagccaactgaggtaatctagaataaaattttctatgtttgtttcccttctttgctctctttctac

SEQ ID NO: 477902 - DNA, 201 bp, Homo sapiens
gaattagtttcccagctcatacgccacttggaagactgatagtgagacataggttgattaatgaacaaacattatgagaacattctccagaaccattattyagatagcagaactaatctactttgacacataattacacatttagataaccccactgtaactgtacacatgagattttcttgaatagaaaatttgactaaa

SEQ ID NO: 477903 - DNA, 201 bp, Homo sapiens
ttaaaagctagaactatggtagcatgaagccaactgaggtaatctagaataaaattttctatgtttgtttcccttctttgctctctttctactctaataastgcgattcacagaggtaatgaagagtataattccctgataaaaacacagctccaagattaatcctttctttaactatgaagttcgcgggtccaaagtctt

SEQ ID NO: 477904 - DNA, 201 bp, Homo sapiens
ctaaagagtcaaaggctaaatttttggctaagaaattatgcttcttatatgataaaaatcatacatgccaaaacttaccatactttattaaacaacataaygtaaggtctgattcaacagaaatattgcagaatggtgattttttaaaatatgtgtaagtatatgtttgttttcaaaaatattggaaataactatgatggg

SEQ ID NO: 477905 - DNA, 201 bp, Homo sapiens
caaacattatgagaacattctccagaaccattatttagatagcagaactaatctactttgacacataattacacatttagataaccccactgtaactgtayacatgagattttcttgaatagaaaatttgactaaatcaaataattgataaagaggaaaaagaagcagcaagtgaacctctgtctttttgaagttggactt

SEQ ID NO: 477906 - DNA, 201 bp, Homo sapiens
ctacacagttccactttccagtggaattattcactttagcttctgcattttgatacatctctttcatttcctgtgtttgctgctgtgtttttcttaggtcrttttgtacagtttctaaagccaatgacttttttctgagactatctcttgtcttacggaacttatcttttaaggcattgaatttaatttgtgtttcagaaa

SEQ ID NO: 477907 - DNA, 201 bp, Homo sapiens
acataattacacatttagataaccccactgtaactgtacacatgagattttcttgaatagaaaatttgactaaatcaaataattgataaagaggaaaaagmagcagcaagtgaacctctgtctttttgaagttggacttgcttttctccaaagccaggaactcaacttgtaacatgcctacctcattctttttttataatt

SEQ ID NO: 477908 - DNA, 201 bp, Homo sapiens
ttctactctaataactgcgattcacagaggtaatgaagagtataattccctgataaaaacacagctccaagattaatcctttctttaactatgaagttcgygggtccaaagtcttgtagttgctgtctgatttttgatcatggatggtgatacagatatttatcatcaactcataacttcccaaatctttgaaaagtctta

SEQ ID NO: 477909 - DNA, 201 bp, Homo sapiens
attattcactttagcttctgcattttgatacatctctttcatttcctgtgtttgctgctgtgtttttcttaggtcattttgtacagtttctaaagccaatracttttttctgagactatctcttgtcttacggaacttatcttttaaggcattgaatttaatttgtgtttcagaaagttgttcagtaagaaactcattctc

SEQ ID NO: 477910 - DNA, 201 bp, Homo sapiens
ggaactcaacttgtaacatgcctacctcattctttttttataattattattatactttaagttctggtacatgtgcacaacatgcaggtttgttacatatstattcatgtgccatgttggtgaccttggaatatattcccataagtcttctagctatatttttgatgttctctcactatgtggcaaagaataactcacatt

SEQ ID NO: 477911 - DNA, 201 bp, Homo sapiens
gtcttactattgatggttcaactagtagaaacataatctaaaatatctgacaataaagtttttattagaatgtaaatagtaatacaaattgtaataaggtktaaaagttctttcttcactgaagcaggaccatgatgtcctgtaccccacaaacacactactccctcatggtctaatgtattttaaaagtcctgtaattgc

SEQ ID NO: 477912 - DNA, 201 bp, Homo sapiens
catctctttcatttcctgtgtttgctgctgtgtttttcttaggtcattttgtacagtttctaaagccaatgacttttttctgagactatctcttgtcttamggaacttatcttttaaggcattgaatttaatttgtgtttcagaaagttgttcagtaagaaactcattctcatcttttactttggaaatagcagaactcat

SEQ ID NO: 477913 - DNA, 201 bp, Homo sapiens
tttttataattattattatactttaagttctggtacatgtgcacaacatgcaggtttgttacatatgtattcatgtgccatgttggtgaccttggaatatmttcccataagtcttctagctatatttttgatgttctctcactatgtggcaaagaataactcacattttataattcaagattcatgcttctgtagttgtta

SEQ ID NO: 477914 - DNA, 201 bp, Homo sapiens
gtttgctgctgtgtttttcttaggtcattttgtacagtttctaaagccaatgacttttttctgagactatctcttgtcttacggaacttatcttttaaggyattgaatttaatttgtgtttcagaaagttgttcagtaagaaactcattctcatcttttactttggaaatagcagaactcatttctacttgtacagaaaca

SEQ ID NO: 477915 - DNA, 201 bp, Homo sapiens
gcaggtttgttacatatgtattcatgtgccatgttggtgaccttggaatatattcccataagtcttctagctatatttttgatgttctctcactatgtggyaaagaataactcacattttataattcaagattcatgcttctgtagttgttagcactgggactgccatatagtggcttctggaataaacgctgtattggtt

SEQ ID NO: 477916 - DNA, 201 bp, Homo sapiens
tagtaatacaaattgtaataaggtgtaaaagttctttcttcactgaagcaggaccatgatgtcctgtaccccacaaacacactactccctcatggtctaaygtattttaaaagtcctgtaattgctattaactcagacaagtttacttaacttgttctaagcttctgttatttactacaatttactttatcactcaacaat

SEQ ID NO: 477917 - DNA, 201 bp, Homo sapiens
cttttttctgagactatctcttgtcttacggaacttatcttttaaggcattgaatttaatttgtgtttcagaaagttgttcagtaagaaactcattctcakcttttactttggaaatagcagaactcatttctacttgtacagaaacatcttgtgttctctctaaagcaagttttacgtttctttctgttttcacactttc

SEQ ID NO: 477918 - DNA, 201 bp, Homo sapiens
gtcttctagctatatttttgatgttctctcactatgtggcaaagaataactcacattttataattcaagattcatgcttctgtagttgttagcactgggaytgccatatagtggcttctggaataaacgctgtattggttttctgttttcattaagtatctgtagcagcagaaatactgtggctttctatctgaatcatat

SEQ ID NO: 477919 - DNA, 201 bp, Homo sapiens
gaatttaatttgtgtttcagaaagttgttcagtaagaaactcattctcatcttttactttggaaatagcagaactcatttctacttgtacagaaacatctygtgttctctctaaagcaagttttacgtttctttctgttttcacactttcactgtgtttacctatagcagcagccagtctagactgataagattcaatgtc

SEQ ID NO: 477920 - DNA, 201 bp, Homo sapiens
gtttccccacactttttataattatttcttaatactttcaattcaccttcttattacatatattttatacattcattaacctattgttcattatgtgtaayatataattaatgcccttaataagtgtgtgtatgtttacacaagttatgttttcctgtgaaatctagtcccagaagtggagttgttgagttaaagggatgt

SEQ ID NO: 477921 - DNA, 201 bp, Homo sapiens
tttgatgttctctcactatgtggcaaagaataactcacattttataattcaagattcatgcttctgtagttgttagcactgggactgccatatagtggctkctggaataaacgctgtattggttttctgttttcattaagtatctgtagcagcagaaatactgtggctttctatctgaatcatatgcttcatttctttggg

SEQ ID NO: 477922 - DNA, 201 bp, Homo sapiens
tggaaatagcagaactcatttctacttgtacagaaacatcttgtgttctctctaaagcaagttttacgtttctttctgttttcacactttcactgtgtttrcctatagcagcagccagtctagactgataagattcaatgtcagcttccagtcttttcttgctttctttttccttcaacagttcggcattgagccttgtat

SEQ ID NO: 477923 - DNA, 201 bp, Homo sapiens
tgcttactttaattttatcattatacataattattataattataagatactcttattttatcatcgaaatttttgtcaaatctgctcatttctgtttgagkgaatagaagaattttctaaaatttcaaaaagggctcttctccattttgtgcttttattcccatccactctttgctatctggtataaatttttatgctatc

SEQ ID NO: 477924 - DNA, 201 bp, Homo sapiens
gaaatagcagaactcatttctacttgtacagaaacatcttgtgttctctctaaagcaagttttacgtttctttctgttttcacactttcactgtgtttacytatagcagcagccagtctagactgataagattcaatgtcagcttccagtcttttcttgctttctttttccttcaacagttcggcattgagccttgtattc

SEQ ID NO: 477925 - DNA, 201 bp, Homo sapiens
gggcagcatttgtttctttaacaattttaatgtccttaagatatttattttctttttccaagttgtcatttttcattgtacatatttcctgtctgagtatrgcaatatctgccttcaaaatgcaattttcatccatcagacctttcgtttcttcatgattatgaaaatcctaaataaaacaaaagaaagttttagctagta

SEQ ID NO: 477926 - DNA, 201 bp, Homo sapiens
tcctgcagctggctggctaccagtgagcagcggcacggtgcttccccccagtcccccaaataaacagcgcgttagctttctgcacagtgtgtgtgtgtgcmcggtgggacctcgagttgctgtccatctgaactggcctttgggtcccctgtgaggctggctctgcctatggactcatcatcctaacagttggagatgagg

SEQ ID NO: 477927 - DNA, 201 bp, Homo sapiens
agttctcagatatttaatttctcacttcaacatcttcaaaagaatgcatatacttgaaaagtagtaaggaaagaatattctgctaaagtttttgttactaktcactctaatatatattataaaaaaggataccagagataattcagtaaagttacaggttcaaaattacctttttaaatcacacagtcataattactccct

SEQ ID NO: 477928 - DNA, 201 bp, Homo sapiens
ttataatattaggtgcagtaatcaatatgaaataggggaaagtacaaggaaaaattttacctggaacaaaatttttatcaataggttatcactaagtatawattatggcatattattgttttcaaaagctctttgtaataaaataatatcctatgtggatgccaagatttataataaatattaataattgtacctgtaagt

SEQ ID NO: 477929 - DNA, 201 bp, Homo sapiens
attttctttttccaagttgtcatttttcattgtacatatttcctgtctgagtatggcaatatctgccttcaaaatgcaattttcatccatcagacctttcrtttcttcatgattatgaaaatcctaaataaaacaaaagaaagttttagctagtactcaataaaataacatatcatgattacctctgaagttaaagaataa

SEQ ID NO: 477930 - DNA, 201 bp, Homo sapiens
gaacatgagttggagctaataaaaagcttaagaaatgttaatctaaaatctcaatgttaagattccagttgaattatactagaaaatatattgtaaccctmtttgctactgatgacctatttctattttatttcctttttaattatggcataatttctcaacataacatatcaaaacttatacacccttaaatattaaaaa

SEQ ID NO: 477931 - DNA, 201 bp, Homo sapiens
actattaaggctgaatgtcttatgcctgtaacccagcactttgagaggctgaggcaggcagaacacttgagcccaacagttaaagaccagcctgggcaacwaggcaaaaccctgtctctacaaaactcagctgagcatggtgacacaggtctatggtgacatagctctattgtttcaactactgggatggctgaggtgtga

SEQ ID NO: 477932 - DNA, 201 bp, Homo sapiens
tgtaaaagttctttcttcactgaagcaggaccatgatgtcctgtaccccacaaacacactactccctcatggtctaatgtattttaaaagtcctgtaattkctattaactcagacaagtttacttaacttgttctaagcttctgttatttactacaatttactttatcactcaacaatctctattatatatgttgttttcc

SEQ ID NO: 477933 - DNA, 201 bp, Homo sapiens
caggcagaacacttgagcccaacagttaaagaccagcctgggcaacaaggcaaaaccctgtctctacaaaactcagctgagcatggtgacacaggtctatsgtgacatagctctattgtttcaactactgggatggctgaggtgtgaggatcacctgagcccaggaaatggagatcggagtgagccaagatctcaccagtg

SEQ ID NO: 477934 - DNA, 201 bp, Homo sapiens
aatgtattttaaaagtcctgtaattgctattaactcagacaagtttacttaacttgttctaagcttctgttatttactacaatttactttatcactcaacsatctctattatatatgttgttttccatgagaaatttttttattaataattaggattcttcagggataagaaaatatttgaataactaagtttgtgcataa

SEQ ID NO: 477935 - DNA, 201 bp, Homo sapiens
acagttaaagaccagcctgggcaacaaggcaaaaccctgtctctacaaaactcagctgagcatggtgacacaggtctatggtgacatagctctattgtttmaactactgggatggctgaggtgtgaggatcacctgagcccaggaaatggagatcggagtgagccaagatctcaccagtgccctccagcctgggggacaga

SEQ ID NO: 477936 - DNA, 201 bp, Homo sapiens
cacattttataattcaagattcatgcttctgtagttgttagcactgggactgccatatagtggcttctggaataaacgctgtattggttttctgttttcartaagtatctgtagcagcagaaatactgtggctttctatctgaatcatatgcttcatttctttggggtgggtaaacaacaaatcaaaaagactttctggat

SEQ ID NO: 477937 - DNA, 201 bp, Homo sapiens
taataattaggattcttcagggataagaaaatatttgaataactaagtttgtgcataaacacattaaggtcaaatacccatgacaatattgtgtgtttctstgtactagagacaaaaacttcaaaaaaaattttaatgaatatacattaaaaactgctttcattacactgagatgatcttccctcaatgcatgaatacctt

SEQ ID NO: 477938 - DNA, 201 bp, Homo sapiens
acagaatgaaaccccatctcaaaaaacaacaagtaaaatgcttcttacatggaagaatgtattctaggtactccaggatacacacaaatatgtttactgamctccagtagcttatggtatgcaggagcttccaatgattatttaaacaactaaatagaaaaccttctgaaattcaaaatttcagaatatgatatgaggact

SEQ ID NO: 477939 - DNA, 201 bp, Homo sapiens
tagtggtatctgggtttacattttttgccatttgcatgtcaaactcttaatcatctttcatttcaatcataattactgggttccttaattttttggtttcwgtatcattacaaaaattttcatcatctgtgttagaaacaagctatgtgtctggtttgctatcacttttatagtctgatttattttcatttaaatgaagct

SEQ ID NO: 477940 - DNA, 201 bp, Homo sapiens
aatatttgaataactaagtttgtgcataaacacattaaggtcaaatacccatgacaatattgtgtgtttctgtgtactagagacaaaaacttcaaaaaaawttttaatgaatatacattaaaaactgctttcattacactgagatgatcttccctcaatgcatgaataccttcagaattcacaaagaccaaagaattgtat

SEQ ID NO: 477941 - DNA, 201 bp, Homo sapiens
atacacacaaatatgtttactgacctccagtagcttatggtatgcaggagcttccaatgattatttaaacaactaaatagaaaaccttctgaaattcaaamtttcagaatatgatatgaggactttgagtggttattttatttcttaagatgtagtcttgctctgtcacccaggctggagtgcaatggtgtgatcttggct

SEQ ID NO: 477942 - DNA, 201 bp, Homo sapiens
aatcataattactgggttccttaattttttggtttctgtatcattacaaaaattttcatcatctgtgttagaaacaagctatgtgtctggtttgctatcayttttatagtctgatttattttcatttaaatgaagcttagaagatgactggtaactgtatttcagggacctggagtatgaatggaataaaaagacatttga

SEQ ID NO: 477943 - DNA, 201 bp, Homo sapiens
aaggtcaaatacccatgacaatattgtgtgtttctgtgtactagagacaaaaacttcaaaaaaaattttaatgaatatacattaaaaactgctttcattamactgagatgatcttccctcaatgcatgaataccttcagaattcacaaagaccaaagaattgtataaaatataatagccttaaaaatcttatttgtacctg

SEQ ID NO: 477944 - DNA, 201 bp, Homo sapiens
aaatagaaaaccttctgaaattcaaaatttcagaatatgatatgaggactttgagtggttattttatttcttaagatgtagtcttgctctgtcacccaggytggagtgcaatggtgtgatcttggctcactgcaacctctgcctcccgggttcaagcgattctcccaccttggcctcctgagcagctgggattacaggtat

SEQ ID NO: 477945 - DNA, 201 bp, Homo sapiens
ataattactgggttccttaattttttggtttctgtatcattacaaaaattttcatcatctgtgttagaaacaagctatgtgtctggtttgctatcactttyatagtctgatttattttcatttaaatgaagcttagaagatgactggtaactgtatttcagggacctggagtatgaatggaataaaaagacatttgacatg

SEQ ID NO: 477946 - DNA, 201 bp, Homo sapiens
atacccatgacaatattgtgtgtttctgtgtactagagacaaaaacttcaaaaaaaattttaatgaatatacattaaaaactgctttcattacactgagaygatcttccctcaatgcatgaataccttcagaattcacaaagaccaaagaattgtataaaatataatagccttaaaaatcttatttgtacctggcacagtg

SEQ ID NO: 477947 - DNA, 201 bp, Homo sapiens
atccattggtattaagagtctctgcttctagaactggttatttgcagcaaaatacatgttattcaattagatgaagtgccttatataaactcttcatggayaactcataaaccacacaaaaattcctttgcaatacacattttgagaacataaatttaaatttctatatttccacaatttatatttttaaatcagatacga

SEQ ID NO: 477948 - DNA, 201 bp, Homo sapiens
agcttagaagatgactggtaactgtatttcagggacctggagtatgaatggaataaaaagacatttgacatgggcttcctctgttcaggcgctgcctggamtgccacagagttggaccctccagatgcatcttcctcctcacaatcagggacctgattcatcagattagagggcactccttttttgttcgtccctctttag

SEQ ID NO: 477949 - DNA, 201 bp, Homo sapiens
aaaaagttgaagcaaaactttgaaccttatagagcataaattccagaaagttcagaaatgtatttagagtcaatgaatttataaaagtaaacacacacacrcacaccagagaatttttaagaatatcggaattggaaaagcctttccctgaattacaacaaactcaaaagcataaattaaagcattaacaaatttgactaa

SEQ ID NO: 477950 - DNA, 201 bp, Homo sapiens
atgactggtaactgtatttcagggacctggagtatgaatggaataaaaagacatttgacatgggcttcctctgttcaggcgctgcctggactgccacagasttggaccctccagatgcatcttcctcctcacaatcagggacctgattcatcagattagagggcactccttttttgttcgtccctctttagagttactaca

SEQ ID NO: 477951 - DNA, 201 bp, Homo sapiens
caaaaacttcaaaaaaaattttaatgaatatacattaaaaactgctttcattacactgagatgatcttccctcaatgcatgaataccttcagaattcacawagaccaaagaattgtataaaatataatagccttaaaaatcttatttgtacctggcacagtggctcctgcctgtaatcccagcatactggcaagctgaggc

SEQ ID NO: 477952 - DNA, 201 bp, Homo sapiens
agttgaagcaaaactttgaaccttatagagcataaattccagaaagttcagaaatgtatttagagtcaatgaatttataaaagtaaacacacacacgcacmccagagaatttttaagaatatcggaattggaaaagcctttccctgaattacaacaaactcaaaagcataaattaaagcattaacaaatttgactaaatta

SEQ ID NO: 477953 - DNA, 201 bp, Homo sapiens
tccttttttgttcgtccctctttagagttactacataggagctcttcctcagggcaagcagtaattctggagttttcaaaactttcaccaatattcagctygaacttgtttgtaatgaattttaaagaaagtcgtgaatatacagacagattattccctttatcacaattcttacccagttctggttcttgagactttttt

SEQ ID NO: 477954 - DNA, 201 bp, Homo sapiens
ccagcatactggcaagctgaggcaggcagatcacctgagatcaggagtttgagagcagcctggccaacatggtgaaaccccatctctactaaaaatagagmatttagcagggtatggtagcacatgcaggtagtatcagctactcgaggggctgaggcaggagaattgcttgaacccgagaggcagaggtggtaatgagtc

SEQ ID NO: 477955 - DNA, 201 bp, Homo sapiens
tatagagcataaattccagaaagttcagaaatgtatttagagtcaatgaatttataaaagtaaacacacacacgcacaccagagaatttttaagaatatcrgaattggaaaagcctttccctgaattacaacaaactcaaaagcataaattaaagcattaacaaatttgactaaattaagatatatcaaaaaattgcattt

SEQ ID NO: 477956 - DNA, 201 bp, Homo sapiens
gaaagttcagaaatgtatttagagtcaatgaatttataaaagtaaacacacacacgcacaccagagaatttttaagaatatcggaattggaaaagcctttmcctgaattacaacaaactcaaaagcataaattaaagcattaacaaatttgactaaattaagatatatcaaaaaattgcatttacactttgatatctaacc

SEQ ID NO: 477957 - DNA, 201 bp, Homo sapiens
ttgtaatgaattttaaagaaagtcgtgaatatacagacagattattccctttatcacaattcttacccagttctggttcttgagacttttttttttttttkgcaggtgcaaaatggaaaacaaatttgcttgttttgtttctcagatgtcttttctgtcagagtgcatgttttaaaattagctttaatcaagcataaacaa

SEQ ID NO: 477958 - DNA, 201 bp, Homo sapiens
ctacctcatcttcccgggaggaagctccttcagacaaggtgagctccaggaggccacagagccagagaggccaggcagggccattccctgctgccctgagsgtgctgtccacacctctggtgggaagtatgacctacgcctgcgctacaggcatagatgtgccgtccttttgtttcccttgataacggatgcccggtggcc

SEQ ID NO: 477959 - DNA, 201 bp, Homo sapiens
acacgcacaccagagaatttttaagaatatcggaattggaaaagcctttccctgaattacaacaaactcaaaagcataaattaaagcattaacaaatttgrctaaattaagatatatcaaaaaattgcatttacactttgatatctaacccatacaccaccctatagtaagaacttttgttcacacgtatttggacagata

SEQ ID NO: 477960 - DNA, 201 bp, Homo sapiens
tgttttaaaattagctttaatcaagcataaacaaaaatactagaaaataattaaaatttaactgtgaaacttaatctatgtgttgccactcttaaattatrggattgtaactaaaaagtgaaaaataatttgccttggcttaacataggacagaaatatgaactggcaagctgaactcttagcatttgtttggattaaact

SEQ ID NO: 477961 - DNA, 201 bp, Homo sapiens
agtatcaggaatggaaagaactgagcctggtcggctgaggccagtcctgtcctgccagggtcgagattgcacacgggtcactcattcccactcaggcccaygctccctgggaggaccctcgtaatttatgctctgccctagagctgctttcctgatggggttctttcatggagtcttcccaggacctcctgccagctccca

SEQ ID NO: 477962 - DNA, 201 bp, Homo sapiens
atatcggaattggaaaagcctttccctgaattacaacaaactcaaaagcataaattaaagcattaacaaatttgactaaattaagatatatcaaaaaattrcatttacactttgatatctaacccatacaccaccctatagtaagaacttttgttcacacgtatttggacagataaaatttcccagagttattacagctct

SEQ ID NO: 477963 - DNA, 201 bp, Homo sapiens
gcctttccctgaattacaacaaactcaaaagcataaattaaagcattaacaaatttgactaaattaagatatatcaaaaaattgcatttacactttgatayctaacccatacaccaccctatagtaagaacttttgttcacacgtatttggacagataaaatttcccagagttattacagctctgtttcactgataacatt

SEQ ID NO: 477964 - DNA, 201 bp, Homo sapiens
aactcaaaagcataaattaaagcattaacaaatttgactaaattaagatatatcaaaaaattgcatttacactttgatatctaacccatacaccaccctayagtaagaacttttgttcacacgtatttggacagataaaatttcccagagttattacagctctgtttcactgataacattctatttcagtttgactctttt

SEQ ID NO: 477965 - DNA, 201 bp, Homo sapiens
tttaatttataaattaaactttagcatagatatgtatgtatagggaaaaacagtttgtgattcagtactattcatggtttcatgcatccactgggggtctyggaatgtatctcccacagttaagggggagctactgcacttattttgttataacacaacacagcctctctagctcttcagttcaaactgctcagtttagaa

SEQ ID NO: 477966 - DNA, 201 bp, Homo sapiens
agaccagcctgggcaacaaggcaaaaccctgtctctacaaaactcagctgagcatggtgacacaggtctatggtgacatagctctattgtttcaactactkggatggctgaggtgtgaggatcacctgagcccaggaaatggagatcggagtgagccaagatctcaccagtgccctccagcctgggggacagaatgaaacc

SEQ ID NO: 477967 - DNA, 201 bp, Homo sapiens
aagaaaacttttatttcaaaacaccaatagtaaataagataaaatttatagagctcttcttagaatatcatgagattatttgtgattgcaataatttctgyttcctctttataatattaggtgcagtaatcaatatgaaataggggaaagtacaaggaaaaattttacctggaacaaaatttttatcaataggttatcact

SEQ ID NO: 477968 - DNA, 201 bp, Homo sapiens
tgatataattaaaatatgtcctctgttctaaaaatagattttagttacctatttctgcctccacctgtctaaatctataaaatattcaatgaaaactaacyttgagctttataacaaatagtgacagtcaataaattggcagagcctgacaatgatttgccctcacaaattatctgtcctgaagctaaacttaaaattcaa

SEQ ID NO: 477969 - DNA, 201 bp, Homo sapiens
accaataatataagtagaaaaacaatctctcgtaaaaacaataggataccaaaataataagtttccaagatcaaaagctatatgctatgtgctgaatattyttgccactaaaaatcaccaggaggatcccatgattactgcaaataatttgatccactgaagatttatacaggcataaatattaagaaagtcacactcgta

SEQ ID NO: 477970 - DNA, 201 bp, Homo sapiens
ttccttgatacttactactccttctgctttctctctctcatactgaaagagactttcttttaaatgatcacattcattcattagcttcttacttttctctwctagtacgaggtctttctttccactctcaataaagcctctttggatattagttactatctctttatgatcctctttctgatgaacgtcatctagttgctg

SEQ ID NO: 477971 - DNA, 201 bp, Homo sapiens
cgttctacactgatgtgcttccatattggtttaccctaattgcccttttgccctagcctcaatttcttccctattatgtccctcaatttaatactacattrtaagccataatgtttctaatgaacttttaatcaggcaatacttctcaaattaatttcttctccataaatcacccaacactattcaattatgttaatttgg

SEQ ID NO: 477972 - DNA, 201 bp, Homo sapiens
gtgttgccgtagatatccttaaggtttggattggcgccatgtttcagcagaataacggcacaagcctcttcctggcaatggacagcctgtccgtgttagaycaagaaacagattgtaaattccaagaattcaaaatacacattccacaggtttcaccaactagttacatgtaaatgagatcaatttattttaattctatat

SEQ ID NO: 477973 - DNA, 201 bp, Homo sapiens
ttaagagtctctgcttctagaactggttatttgcagcaaaatacatgttattcaattagatgaagtgccttatataaactcttcatggacaactcataaamcacacaaaaattcctttgcaatacacattttgagaacataaatttaaatttctatatttccacaatttatatttttaaatcagatacgatgttgcccagg

SEQ ID NO: 477974 - DNA, 201 bp, Homo sapiens
aatttttaattttttttgtctcactacagaaccaataatataagtagaaaaacaatctctcgtaaaaacaataggataccaaaataataagtttccaagawcaaaagctatatgctatgtgctgaatatttttgccactaaaaatcaccaggaggatcccatgattactgcaaataatttgatccactgaagatttataca

SEQ ID NO: 477975 - DNA, 201 bp, Homo sapiens
catggctccttttatcccatgcatggggattatacttagaataaaatgaataacattgagatccctagggataaaggtctcaaaaatccagaaaaaatctygcactctacttctaactaatctagacttctgcttgatttctggctaaaaggcagactaactcttcgctatttcaaactatctgaaccaaactatgaactc

SEQ ID NO: 477976 - DNA, 201 bp, Homo sapiens
ttagacctaaacaatatatattaaatcaagtggacattataagtaacagtgataagataaagtttaaaatatagaatttttaccaaagattgatttacccratttggagtatttcttgcagtctttgatttcatctctagtgactgaacagttggttcaagttgttttgcttcaacttctttcttatattgtttctctttc

SEQ ID NO: 477977 - DNA, 201 bp, Homo sapiens
atcccatgattactgcaaataatttgatccactgaagatttatacaggcataaatattaagaaagtcacactcgtatgatttaaaagtcaaagtattagtrtttatccaaataaaccttaaccaaatttcacatttcctctattggagaaagcatttcctaatgtgattttcctgtcactactaattttccaattcatttt

SEQ ID NO: 477978 - DNA, 201 bp, Homo sapiens
cacatgcaggtagtatcagctactcgaggggctgaggcaggagaattgcttgaacccgagaggcagaggtggtaatgagtcaagaccgagccactgcactscagccttggtgacagagcaagactctgtctcaaaaacacaaacaaacaaacaaaaaacctaattgttcccacataagtctatgttcacacaagatctgaa

SEQ ID NO: 477979 - DNA, 201 bp, Homo sapiens
atccactgaagatttatacaggcataaatattaagaaagtcacactcgtatgatttaaaagtcaaagtattagtatttatccaaataaaccttaaccaaakttcacatttcctctattggagaaagcatttcctaatgtgattttcctgtcactactaattttccaattcattttttttcagctcccaccctgtcacagta

SEQ ID NO: 477980 - DNA, 201 bp, Homo sapiens
caacagaaaaagaaaaaaaaaaggctcagaatgctgtgtgaagtcttccttgattctagctatctttctccacacacacgggtatctgcttcattggagtyccttagtactttgtcaatttttccagtgtcactttaccacctgaactgcacatcatgtcttaacatgtcgatcccctttgctgctagactgtagaggaca

SEQ ID NO: 477981 - DNA, 201 bp, Homo sapiens
cgagaggcagaggtggtaatgagtcaagaccgagccactgcactccagccttggtgacagagcaagactctgtctcaaaaacacaaacaaacaaacaaaamacctaattgttcccacataagtctatgttcacacaagatctgaagagtacacaacaccgtgagacaggacagacataaattttaaaagttatattctggt

SEQ ID NO: 477982 - DNA, 201 bp, Homo sapiens
gaccgagccactgcactccagccttggtgacagagcaagactctgtctcaaaaacacaaacaaacaaacaaaaaacctaattgttcccacataagtctatrttcacacaagatctgaagagtacacaacaccgtgagacaggacagacataaattttaaaagttatattctggtttctgtaaaaataaaacggttgaattt

SEQ ID NO: 477983 - DNA, 201 bp, Homo sapiens
ccctgtcacagtacttatcaatctttgttagttaccaaagttaaacacattttttgaatcaactagccatatgtatgtttttctctgaccaactttccatyaccaccataaaacaatgataggtaaaccactgctaaacttgaaaagtaaatactctgcaaaagtacattcagagtgagaaaattaattttacaagagacc

SEQ ID NO: 477984 - DNA, 201 bp, Homo sapiens
ataagtctatgttcacacaagatctgaagagtacacaacaccgtgagacaggacagacataaattttaaaagttatattctggtttctgtaaaaataaaayggttgaatttaagcttttaagacaagtcaaggaaaagagcaaaaaatgcaaaagtgaaacttgaaaggtcattttcccatcaagggctcatgatccactg

SEQ ID NO: 477985 - DNA, 201 bp, Homo sapiens
ttgaaaagtaaatactctgcaaaagtacattcagagtgagaaaattaattttacaagagaccactttaccttagtagcaacactcaagtctttgtcatccratgcaggcaatgaatccacacgcagttcatggaaaatgcttgagagcgaaaatacacaacgaaaatgagcaagttgatttctttacaatttttttaactg

SEQ ID NO: 477986 - DNA, 201 bp, Homo sapiens
tttgttttttcttcattttcttgttttaaggtgcatctgcagataaagacatttatcttaaaattcattttgttaaaaaataaagagttcatcctgtgatmtacctctgcagatgtttattatcctaataaaatttctatgttctggattatttttcctttgcagttctcagatatttaatttctcacttcaacatcttca

SEQ ID NO: 477987 - DNA, 201 bp, Homo sapiens
gattaaacttaatgcattatgtgtaaaatctaccagaaatgaattcaaagctgataggtagtattataaaatcttcccctcttacaaagattttacctcakcataccagcaaaagtgagcccctacagtgcgtgtatatttctgaagattaactagagactagggaaacactgaattattaagagccaaactgaacaccaa

SEQ ID NO: 477988 - DNA, 201 bp, Homo sapiens
cccctacagtgcgtgtatatttctgaagattaactagagactagggaaacactgaattattaagagccaaactgaacaccaataagaaagggaagcaaaawtttaaattctaattcaaataatatactatgatagtgttatgtacctagatggattttctgcttgtatccacttctaatgtattttaagttccactagtga

SEQ ID NO: 477989 - DNA, 201 bp, Homo sapiens
acttgaaaggtcattttcccatcaagggctcatgatccactggacattcacaaactatattgttcaaaacattagttctgaattttgatctgagtatcccyggagttgcagtttcattcaaagatgtccaagaggtcaaataagacaatatcatttgctattttcagttttcttttttgagaacagcacaacaaacttctt

SEQ ID NO: 477990 - DNA, 201 bp, Homo sapiens
aattaattttacaagagaccactttaccttagtagcaacactcaagtctttgtcatccgatgcaggcaatgaatccacacgcagttcatggaaaatgcttsagagcgaaaatacacaacgaaaatgagcaagttgatttctttacaatttttttaactgccagtttatatccagcttccccctcaaaaaaggaaaccataa

SEQ ID NO: 477991 - DNA, 201 bp, Homo sapiens
aagttccactagtgatagtggatggattttttaaattttagtaacatttactatgtatttatgtcaaaataaagttattgtttgtaccctgacaccaaagrtcccattccacaaggtacgattctcttaataggcaactgggttgatttttatgacaccattcactccctgaacacagacacagaactcaactggtgacca

SEQ ID NO: 477992 - DNA, 201 bp, Homo sapiens
atgtcaaaataaagttattgtttgtaccctgacaccaaaggtcccattccacaaggtacgattctcttaataggcaactgggttgatttttatgacaccaytcactccctgaacacagacacagaactcaactggtgaccacaaaacagaataaatctttaaactcggcactggtgaccagcaatacaaaactgcaacatt

SEQ ID NO: 477993 - DNA, 201 bp, Homo sapiens
tctgaattttgatctgagtatccccggagttgcagtttcattcaaagatgtccaagaggtcaaataagacaatatcatttgctattttcagttttcttttytgagaacagcacaacaaacttcttcagagaaatgaatcgtcctaacttcataggctaaaggctcatgagtcacagttctaagggcatttataaaatatgg

SEQ ID NO: 477994 - DNA, 201 bp, Homo sapiens
accaaaggtcccattccacaaggtacgattctcttaataggcaactgggttgatttttatgacaccattcactccctgaacacagacacagaactcaactsgtgaccacaaaacagaataaatctttaaactcggcactggtgaccagcaatacaaaactgcaacatttgaaccactggcaatgatgactcctttaacact

SEQ ID NO: 477995 - DNA, 201 bp, Homo sapiens
tttgatctgagtatccccggagttgcagtttcattcaaagatgtccaagaggtcaaataagacaatatcatttgctattttcagttttcttttttgagaayagcacaacaaacttcttcagagaaatgaatcgtcctaacttcataggctaaaggctcatgagtcacagttctaagggcatttataaaatatggtggtgca

SEQ ID NO: 477996 - DNA, 201 bp, Homo sapiens
gcaactgggttgatttttatgacaccattcactccctgaacacagacacagaactcaactggtgaccacaaaacagaataaatctttaaactcggcactgrtgaccagcaatacaaaactgcaacatttgaaccactggcaatgatgactcctttaacactactttaactcagtggccactgttgttaaactgttcataat

SEQ ID NO: 477997 - DNA, 201 bp, Homo sapiens
cattcaaagatgtccaagaggtcaaataagacaatatcatttgctattttcagttttcttttttgagaacagcacaacaaacttcttcagagaaatgaatygtcctaacttcataggctaaaggctcatgagtcacagttctaagggcatttataaaatatggtggtgcatgcttgtattctgaacttttcaactttaaac

SEQ ID NO: 477998 - DNA, 201 bp, Homo sapiens
tgcaacatttgaaccactggcaatgatgactcctttaacactactttaactcagtggccactgttgttaaactgttcataatttctattccttaataatayaacccaatatttcatgttaccttctgtattatgagtaaggttatacaaataaaagagcaagataattctgaaaatgtcttgcctcaattccaagggtaaa

SEQ ID NO: 477999 - DNA, 201 bp, Homo sapiens
ggtaaagacagctatgagttactagagatagtaagaattaccagaataactaatagttactagagatagtaagaatatcttaagtttcataactggttaaratgttttaaaaattaaatataaaattatgatctattggattctaaaggtataatctaaaaggtcatgtcatttggactatgccttgttactaaagaaaaa

SEQ ID NO: 478000 - DNA, 201 bp, Homo sapiens
attaccagaataactaatagttactagagatagtaagaatatcttaagtttcataactggttaaaatgttttaaaaattaaatataaaattatgatctatyggattctaaaggtataatctaaaaggtcatgtcatttggactatgccttgttactaaagaaaaaaaacaaaacccaatattaaacaagaaacttaaatgt

SEQ ID NO: 478001 - DNA, 201 bp, Homo sapiens
gaatacaaatgccttgctaagaagcattctgtttggttgtaggctgcataaagggagtaaacacaaagtacatttgaccacaaaatgactttttaaaagcyagaactatggtagcatgaagccaactgaggtaatctagaataaaattttctatgtttgtttcccttctttgctctctttctactctaataactgcgattc

SEQ ID NO: 478002 - DNA, 201 bp, Homo sapiens
tgctttctggagatgccaactgccctccccatctctgggtcctgaccaaggtgctctaatggacaccccctgacccaggtctcagggagctgccagcacgmtgggtccctaaagctgagatccagcaagacacatgtggcctgagggtcccactctctggctggcagaacccagaggtgggagcacactggagtgtccttc

SEQ ID NO: 478003 - DNA, 201 bp, Homo sapiens
tgttcagtaagaaactcattctcatcttttactttggaaatagcagaactcatttctacttgtacagaaacatcttgtgttctctctaaagcaagttttasgtttctttctgttttcacactttcactgtgtttacctatagcagcagccagtctagactgataagattcaatgtcagcttccagtcttttcttgctttct

SEQ ID NO: 478004 - DNA, 201 bp, Homo sapiens
tcaagtctttgtcatccgatgcaggcaatgaatccacacgcagttcatggaaaatgcttgagagcgaaaatacacaacgaaaatgagcaagttgatttctytacaatttttttaactgccagtttatatccagcttccccctcaaaaaaggaaaccataatcttgggaaaggtcagcaatctatatattaaatagtgattc

SEQ ID NO: 478005 - DNA, 201 bp, Homo sapiens
tggaagaaaactgatgacctaaaacaaggtagaaagatccactgtctcttttccatgatctgtctctggataaaagactaatctgcatcacttcagaatgrcagtcttgattcctcagcatggaacccacttaggaaggtcctattgctttcctttgccctaaatcagtacaggaaagcccctacaatatttgaaatgtat

SEQ ID NO: 478006 - DNA, 201 bp, Homo sapiens
gaaaatgcttgagagcgaaaatacacaacgaaaatgagcaagttgatttctttacaatttttttaactgccagtttatatccagcttccccctcaaaaaargaaaccataatcttgggaaaggtcagcaatctatatattaaatagtgattcttgatataattaaaatatgtcctctgttctaaaaatagattttagttac

SEQ ID NO: 478007 - DNA, 201 bp, Homo sapiens
tttctcatttccaagacatgtactaacaacatgtaacatccccttattactcagctctgttcccatttcagagatcaccatacatcaatagtttcatagcrataatcacaatttcaatattgcgtgtcacctgttttggttttgctcacactgcttccttggagctactcaacaaatagtcaaatggccttcctgggacta

SEQ ID NO: 478008 - DNA, 201 bp, Homo sapiens
caaaattacctttttaaatcacacagtcataattactccctaattagaaaagatcatttacaatcaactaaatttttaaagttactatttattgacaagcrtataagttcactagaaataaattttcatctttatgaaatattgcggtgtttctccaaatgatttacagagtgagatgacaccttcagatgtctctcacac

SEQ ID NO: 478009 - DNA, 201 bp, Homo sapiens
gaaaggtcagcaatctatatattaaatagtgattcttgatataattaaaatatgtcctctgttctaaaaatagattttagttacctatttctgcctccacytgtctaaatctataaaatattcaatgaaaactaactttgagctttataacaaatagtgacagtcaataaattggcagagcctgacaatgatttgccctca

SEQ ID NO: 478010 - DNA, 201 bp, Homo sapiens
tgcttgtattctgaacttttcaactttaaactctcatatagtaaatattaataaatacaaactgattaaagaaaagcccacttaatctgacattatttttmtttttctttctttcttcatttatcagcaacaggagagtctaactaaatgtggtaaagtggtataagggaatacaatgaaaagtgtaaaatgaattaaacc

SEQ ID NO: 478011 - DNA, 201 bp, Homo sapiens
gtgacagtcaataaattggcagagcctgacaatgatttgccctcacaaattatctgtcctgaagctaaacttaaaattcaattaatggatgacataaattytgttacctaaactggaagaaaactgatgacctaaaacaaggtagaaagatccactgtctcttttccatgatctgtctctggataaaagactaatctgcat

SEQ ID NO: 478012 - DNA, 201 bp, Homo sapiens
gtctaactaaatgtggtaaagtggtataagggaatacaatgaaaagtgtaaaatgaattaaaccagagataatcatatcaatgtggatacatctggaaaayataatacaaaatacaccaaagaaagtggcagaaaggtatgtaaagtgtataaccactcacataccattttgggacacaaataaaaaattctgcatattat

SEQ ID NO: 478013 - DNA, 201 bp, Homo sapiens
aacttaaaattcaattaatggatgacataaattttgttacctaaactggaagaaaactgatgacctaaaacaaggtagaaagatccactgtctcttttccrtgatctgtctctggataaaagactaatctgcatcacttcagaatggcagtcttgattcctcagcatggaacccacttaggaaggtcctattgctttcctt

SEQ ID NO: 478014 - DNA, 201 bp, Homo sapiens
cataactggttaaaatgttttaaaaattaaatataaaattatgatctattggattctaaaggtataatctaaaaggtcatgtcatttggactatgccttgwtactaaagaaaaaaaacaaaacccaatattaaacaagaaacttaaatgttcatatacctgtggttgcttcttttcacttctttcatgcctttcttgctct

SEQ ID NO: 478015 - DNA, 201 bp, Homo sapiens
atcaatgtggatacatctggaaaatataatacaaaatacaccaaagaaagtggcagaaaggtatgtaaagtgtataaccactcacataccattttgggacmcaaataaaaaattctgcatattatttctgagcatcacaatatagttaaagatttcaaaagggcattgaaatgaaaaacaaccaacttatgatgtcggtag

SEQ ID NO: 478016 - DNA, 201 bp, Homo sapiens
taaaacaaggtagaaagatccactgtctcttttccatgatctgtctctggataaaagactaatctgcatcacttcagaatggcagtcttgattcctcagcmtggaacccacttaggaaggtcctattgctttcctttgccctaaatcagtacaggaaagcccctacaatatttgaaatgtatgaaagctaaatgtacagaa

SEQ ID NO: 478017 - DNA, 201 bp, Homo sapiens
tgtacagcatattaacatttgttttttcttcattttcttgttttaaggtgcatctgcagataaagacatttatcttaaaattcattttgttaaaaaataargagttcatcctgtgatatacctctgcagatgtttattatcctaataaaatttctatgttctggattatttttcctttgcagttctcagatatttaatttc

SEQ ID NO: 478018 - DNA, 201 bp, Homo sapiens
atgttttaaaaattaaatataaaattatgatctattggattctaaaggtataatctaaaaggtcatgtcatttggactatgccttgttactaaagaaaaamaacaaaacccaatattaaacaagaaacttaaatgttcatatacctgtggttgcttcttttcacttctttcatgcctttcttgctcttcctctgaagccac

SEQ ID NO: 478019 - DNA, 201 bp, Homo sapiens
acaggaaagcccctacaatatttgaaatgtatgaaagctaaatgtacagaagtcaaataacaaaggtgtatgttcttattgagaatacttttcccagaaakattgaaatattaacaattataaaatcccattattttcaccctataggtcctaccttattcaggtccacataaactagcaagcccttaaaactcttcatag

SEQ ID NO: 478020 - DNA, 201 bp, Homo sapiens
tgccttgttactaaagaaaaaaaacaaaacccaatattaaacaagaaacttaaatgttcatatacctgtggttgcttcttttcacttctttcatgcctttsttgctcttcctctgaagccactggtaaggcttgttctgttgacaaattcactggtttagttcaaatgaactaagaacagttagataaagactataatcta

SEQ ID NO: 478021 - DNA, 201 bp, Homo sapiens
ttctgcatattatttctgagcatcacaatatagttaaagatttcaaaagggcattgaaatgaaaaacaaccaacttatgatgtcggtagcctctatgcaaycatgttttaaaaaccttaacaccaaaaagtctcaaaatcaccattttaaaagactgtgtctaccagttacaaatgaatcattactttcctcatttttaat

SEQ ID NO: 478022 - DNA, 201 bp, Homo sapiens
aaataacaaaggtgtatgttcttattgagaatacttttcccagaaagattgaaatattaacaattataaaatcccattattttcaccctataggtcctacyttattcaggtccacataaactagcaagcccttaaaactcttcataggcactcagacacccaaggagagagactgccagaaaaaaacagagtcctggtagt

SEQ ID NO: 478023 - DNA, 201 bp, Homo sapiens
aaatgttcatatacctgtggttgcttcttttcacttctttcatgcctttcttgctcttcctctgaagccactggtaaggcttgttctgttgacaaattcaytggtttagttcaaatgaactaagaacagttagataaagactataatctatataaaaataaatagagaataacatttctttgtattttatattttgagagt

SEQ ID NO: 478024 - DNA, 201 bp, Homo sapiens
ccagaaagattgaaatattaacaattataaaatcccattattttcaccctataggtcctaccttattcaggtccacataaactagcaagcccttaaaactyttcataggcactcagacacccaaggagagagactgccagaaaaaaacagagtcctggtagttgcacctctatttccctaagtactctctaagtatctgtc

SEQ ID NO: 478025 - DNA, 201 bp, Homo sapiens
tctttgtattttatattttgagagtttcaatgaagcttaatgtttactgaaatatttagttctttaagaaatacttctaatcatccaaaacttcaacaaamcacttggggagacactagatatcaccaggttcaagccatatgaaatctcagggtcactcacaaattgttccacccaacataaatcaacaaaactgttaga

SEQ ID NO: 478026 - DNA, 201 bp, Homo sapiens
gggtcactcacaaattgttccacccaacataaatcaacaaaactgttagaaacaaaacaaaattttgaaatacagtcaaaatatacaatgtaacactttaytatacttcataacagtatctttttaacaagacactaattgagttggcagttactaataatttgcaaaattattgttgttcataccttaattagtgtgcac

SEQ ID NO: 478027 - DNA, 201 bp, Homo sapiens
aaaacattaaaagagaaacatctgagttaaagcttacatttttaaaatcttttttatgcttctaaatttacttttattcaaatatggataccaacaataayatttatgtcaatgccttccattcaattttaaacaaatagaattaggaataagaataatgtgagtacttccaatcattgaatgtacttatttccagtattc

SEQ ID NO: 478028 - DNA, 201 bp, Homo sapiens
cagttactaataatttgcaaaattattgttgttcataccttaattagtgtgcaccccattttttacatcgcaaatgttttcccctactattctgaaaaatytattttcatcttttaagactcagaaagtaggctgggcataatagctcacatctgtaatcccagcactttggaaggccaaaatgggagaattgctcaaggc

SEQ ID NO: 478029 - DNA, 201 bp, Homo sapiens
gagaaacatctgagttaaagcttacatttttaaaatcttttttatgcttctaaatttacttttattcaaatatggataccaacaataacatttatgtcaawgccttccattcaattttaaacaaatagaattaggaataagaataatgtgagtacttccaatcattgaatgtacttatttccagtattccattaaatgtac

SEQ ID NO: 478030 - DNA, 201 bp, Homo sapiens
tctgaaaaatctattttcatcttttaagactcagaaagtaggctgggcataatagctcacatctgtaatcccagcactttggaaggccaaaatgggagaaytgctcaaggccaggagtttaagaccagcctgggaaccatagataaccttgactctacaaaaaattggacaggtatggtgatatgtgcctgtagtcccagc

SEQ ID NO: 478031 - DNA, 201 bp, Homo sapiens
gaaaaatctattttcatcttttaagactcagaaagtaggctgggcataatagctcacatctgtaatcccagcactttggaaggccaaaatgggagaattgytcaaggccaggagtttaagaccagcctgggaaccatagataaccttgactctacaaaaaattggacaggtatggtgatatgtgcctgtagtcccagctac

SEQ ID NO: 478032 - DNA, 201 bp, Homo sapiens
ttcaagggcagcatttgtttctttaacaattttaatgtccttaagatatttattttctttttccaagttgtcatttttcattgtacatatttcctgtctgrgtatggcaatatctgccttcaaaatgcaattttcatccatcagacctttcgtttcttcatgattatgaaaatcctaaataaaacaaaagaaagttttagc

SEQ ID NO: 478033 - DNA, 201 bp, Homo sapiens
aaaatgggagaattgctcaaggccaggagtttaagaccagcctgggaaccatagataaccttgactctacaaaaaattggacaggtatggtgatatgtgcytgtagtcccagctactcaagaagcttaggtgagaagatccctcgagcccaggagtttgaggttgcagtgagtctcgatcacaccatcgcactccaccctg

SEQ ID NO: 478034 - DNA, 201 bp, Homo sapiens
acgtttgccacaacacaagaagcagagtgaaactgctgagtttctagtgccgaattctggaaaatgagatgcttcccagatttcacattcaattaccacaraagtttataggtggaaaacatatggtacagttacctactttaactgcattatctactgataatgggagtcaaaccaaccaagacatattaaatgtttcat

SEQ ID NO: 478035 - DNA, 201 bp, Homo sapiens
tcatggcaccatataacatgatacaattccatattgctgaattacataaattgccagataaatttatcaaattagtcagatatattaaaagtctaaccttragcaaagcaatttaatgcctcagagggtggaaaaaggcctcatctgcttttactttgaaagaagaaaatctctagatttttgtctatctttagaacacaa

SEQ ID NO: 478036 - DNA, 201 bp, Homo sapiens
agagactgccagaaaaaaacagagtcctggtagttgcacctctatttccctaagtactctctaagtatctgtcttcctatgggctcccacttccagattcyacttctgcagggctccacagaagtcttcaatctttaaatcttcagtctatgaaagcacagattcctgaaaggatggcctcaaatgaccaggagtaggagc

SEQ ID NO: 478037 - DNA, 201 bp, Homo sapiens
tctctaagtatctgtcttcctatgggctcccacttccagattccacttctgcagggctccacagaagtcttcaatctttaaatcttcagtctatgaaagcmcagattcctgaaaggatggcctcaaatgaccaggagtaggagctctctatatccctgctcctgaaaaacaagctaactggagtctccatcacctgccccc

SEQ ID NO: 478038 - DNA, 201 bp, Homo sapiens
acaagctaactggagtctccatcacctgcccccagctagacacactaccaactacccaactgaactccatgactgatttgccagccagtcatgcccctgamccagcccacatggacatgggaaggacatcagtgaatcgggaaaagaggcagaggtgaggagacacttgtactgggccacagatctatgtagttcagcaat

SEQ ID NO: 478039 - DNA, 201 bp, Homo sapiens
aacaataacatttatgtcaatgccttccattcaattttaaacaaatagaattaggaataagaataatgtgagtacttccaatcattgaatgtacttatttmcagtattccattaaatgtacctgctctcaatgtctgtacattctttctttgtactgctcctttcacagcaggatcttccactccagtggtaggctgaatg

SEQ ID NO: 478040 - DNA, 201 bp, Homo sapiens
aaatagaattaggaataagaataatgtgagtacttccaatcattgaatgtacttatttccagtattccattaaatgtacctgctctcaatgtctgtacathctttctttgtactgctcctttcacagcaggatcttccactccagtggtaggctgaatgggttttaaaagaaaatgattcataaatcatatatgttttata

SEQ ID NO: 478041 - DNA, 201 bp, Homo sapiens
agacacttgtactgggccacagatctatgtagttcagcaatctccagcccctcactactccaggggctctaagccacccctttgtaagtcaggatggaaayagatgacaccacatttctatctgctgcagacgctcctcccagtgtctcaaaatgttttagcatctttcagtaaaaatcttcaagtttgtcagtccttgat

SEQ ID NO: 478042 - DNA, 201 bp, Homo sapiens
aaaatgattcataaatcatatatgttttatacaacatggagttagtgattcaaaaatatacataattaattaccttcaaggaaggatgttttgcaggaggycctacaaagcaaaggggatatgtcatcaattatatgtaagtatgacagggccaaccaaacattcatgcagtggtactatcgagctgaattctcatgcctg

SEQ ID NO: 478043 - DNA, 201 bp, Homo sapiens
tcccagctactcaagaagcttaggtgagaagatccctcgagcccaggagtttgaggttgcagtgagtctcgatcacaccatcgcactccaccctgggtgayagagtaagaacttgtctccaacaacagaaaaagaaaaaaaaaaggctcagaatgctgtgtgaagtcttccttgattctagctatctttctccacacacac

SEQ ID NO: 478044 - DNA, 201 bp, Homo sapiens
tcttatagaagagtctgtactcctatccaatccagtgttgtttatcttcaaacttggacttcccctgctcattccattcttatctacttccattgggttcmccagctaattccattctcattctacccacagactcactcccgtttgtattattaaaacacacgccaataggatataaaaagaagcaagagtactgggctt

SEQ ID NO: 478045 - DNA, 201 bp, Homo sapiens
tgctgctagactgtagaggacaatcttttgaatcatctttgtataaacagtcttaattttgctaaataattacttattgagttcctgctaagtgttaggcrctggggtataaggaaggaaaataaaagctgtcagggatggctttcctaaagatcatgcatgagctgagacttagagagtaaggttagccagattaagtga

SEQ ID NO: 478046 - DNA, 201 bp, Homo sapiens
caattatatgtaagtatgacagggccaaccaaacattcatgcagtggtactatcgagctgaattctcatgcctggctataaaaataattacttaaggtttkgagggttcttcttggcttcttttcattgcctaggacagcaacatgacagaaacataatgaggaaaataggaatataggattcctaaaatgcacagtttac

SEQ ID NO: 478047 - DNA, 201 bp, Homo sapiens
tatagaagagtctgtactcctatccaatccagtgttgtttatcttcaaacttggacttcccctgctcattccattcttatctacttccattgggttcaccrgctaattccattctcattctacccacagactcactcccgtttgtattattaaaacacacgccaataggatataaaaagaagcaagagtactgggctttaa

SEQ ID NO: 478048 - DNA, 201 bp, Homo sapiens
tttccatcttctgtgctcagtagctatcttcaaaaaataatctcctatttgtatgggtgcacactggttcagttctacagttcttattgccatttatttayggtaccagaaagggattgctgagttcccggttctaaagatagttactttcttagtgacacaaatcaatatgtaatacagttcacccttgaacagcaaggg

SEQ ID NO: 478049 - DNA, 201 bp, Homo sapiens
tattgagttcctgctaagtgttaggcactggggtataaggaaggaaaataaaagctgtcagggatggctttcctaaagatcatgcatgagctgagacttaragagtaaggttagccagattaagtgaggcagagggcaagaaagggtgagcacatgccaggcagcaacaagagggggagagaagcctccaagagagtatgt

SEQ ID NO: 478050 - DNA, 201 bp, Homo sapiens
cctaaaatagaaaagcatggatatcaccgtgaacacatggactgatgaggagaaaagggaccattaaacagaggagcaaatcaaacctgagggaatcgacrtcaaagctgatggtgaatgtacagagtattttaactcaacacatcagaggcattgctgccagcatgccacaaacaaattccccttgtcttgtcactgagg

SEQ ID NO: 478051 - DNA, 201 bp, Homo sapiens
aaacacacgccaataggatataaaaagaagcaagagtactgggctttaacatgagttcaaatctcatttctgccaattcctatgtctaaaaaaaagcatcstaatctctttgagcctcacattctctatctagagaatcatttgaccagaatgttcaacacaggtaaaaatactagaaggtattttaattcattccaagat

SEQ ID NO: 478052 - DNA, 201 bp, Homo sapiens
tatacaaatcacgttttctaagtatgtaaagcatatgtcatcagaatatatcattctttacaatgataaagaagcaaaaggaaaacaaaaggacaaagaasatcttaaatgactacattcaactgccacggagctttaattttttaactattcaaaaagatatccactgtattattccaactatgtgactcttctgaaaaa

SEQ ID NO: 478053 - DNA, 201 bp, Homo sapiens
tcattatacataattattataattataagatactcttattttatcatcgaaatttttgtcaaatctgctcatttctgtttgagtgaatagaagaattttcyaaaatttcaaaaagggctcttctccattttgtgcttttattcccatccactctttgctatctggtataaatttttatgctatctggctggcagaaacaga

SEQ ID NO: 478054 - DNA, 201 bp, Homo sapiens
ggaaggaaaataaaagctgtcagggatggctttcctaaagatcatgcatgagctgagacttagagagtaaggttagccagattaagtgaggcagagggcargaaagggtgagcacatgccaggcagcaacaagagggggagagaagcctccaagagagtatgtatttctctgcaaaagaggaatggtgagggggccattac

SEQ ID NO: 478055 - DNA, 201 bp, Homo sapiens
actgaggaaatacacagttgggatgacagttcaggtgaatgtgtgattcacctctcatcaaagaaagtgttctacattgatcagctcttatacacacttakgaaatgacagctaatcaaactactcatttttcccatgatcacatgggctactgcagcacctacatttctcctgtcccctcatttggccttcaattagagc

SEQ ID NO: 478056 - DNA, 201 bp, Homo sapiens
acacgccaataggatataaaaagaagcaagagtactgggctttaacatgagttcaaatctcatttctgccaattcctatgtctaaaaaaaagcatcctaawctctttgagcctcacattctctatctagagaatcatttgaccagaatgttcaacacaggtaaaaatactagaaggtattttaattcattccaagattcct

SEQ ID NO: 478057 - DNA, 201 bp, Homo sapiens
atatcaaaaaagtaaaaaaagtaaaggttctctttgaattatgggaaccaacgtttgccacaacacaagaagcagagtgaaactgctgagtttctagtgcmgaattctggaaaatgagatgcttcccagatttcacattcaattaccacaaaagtttataggtggaaaacatatggtacagttacctactttaactgcatt

SEQ ID NO: 478058 - DNA, 201 bp, Homo sapiens
caagagggggagagaagcctccaagagagtatgtatttctctgcaaaagaggaatggtgagggggccattaccagcagctcagtaattccagagaaaaagrcagatggggaaagggctgcagatggggaaagggctacagatggagatttgggcagaaatcagtttccttttctttcctttttttgggacaaggtcttact

SEQ ID NO: 478059 - DNA, 201 bp, Homo sapiens
ctcatttggccttcaattagagctccttgatccactcatgcaaggcggtccataaaacacataaaccatgtcgaataagcttccgatatcaaaatatttakcaaaaaagaaaacactgaattaccacagacttgctggatatgaatacatatttaatttcaaaatcagtgcagtatttattgaaaaagagaattttggtat

SEQ ID NO: 478060 - DNA, 201 bp, Homo sapiens
agctcagtaattccagagaaaaaggcagatggggaaagggctgcagatggggaaagggctacagatggagatttgggcagaaatcagtttccttttctttyctttttttgggacaaggtcttactctgtctcccagactgaagtgcagtggcatgatcttggctcactgcaacccggcctcccaggttcaagcaattctcc

SEQ ID NO: 478061 - DNA, 201 bp, Homo sapiens
ttcaaaatcagtgcagtatttattgaaaaagagaattttggtattcacagaatgaattttataatatgattgcttctaaaattaactaagtttggtgtatyatcttacactgtaaaggacttttataaaacagctatcatatcaaagaactggctgtctcaaaaaaaattagccaaagcatctatatgcaacttaatcaca

SEQ ID NO: 478062 - DNA, 201 bp, Homo sapiens
ctgcagatggggaaagggctacagatggagatttgggcagaaatcagtttccttttctttcctttttttgggacaaggtcttactctgtctcccagactgragtgcagtggcatgatcttggctcactgcaacccggcctcccaggttcaagcaattctcctgcctcagcctcccaagtagctgagattacaggcatgtgc

SEQ ID NO: 478063 - DNA, 201 bp, Homo sapiens
gaattttggtattcacagaatgaattttataatatgattgcttctaaaattaactaagtttggtgtattatcttacactgtaaaggacttttataaaacarctatcatatcaaagaactggctgtctcaaaaaaaattagccaaagcatctatatgcaacttaatcacatcttattccctcatgtcagtgaaacttctctc

SEQ ID NO: 478064 - DNA, 201 bp, Homo sapiens
ttttctttcctttttttgggacaaggtcttactctgtctcccagactgaagtgcagtggcatgatcttggctcactgcaacccggcctcccaggttcaagyaattctcctgcctcagcctcccaagtagctgagattacaggcatgtgccattaccacctgctaatttttgtattctattagagatggggtttcgccttgt

SEQ ID NO: 478065 - DNA, 201 bp, Homo sapiens
ttcaagcaattctcctgcctcagcctcccaagtagctgagattacaggcatgtgccattaccacctgctaatttttgtattctattagagatggggtttcrccttgttggccaggctggtcttgaactcctgacctcaaatgatccacctgcctcagcgtcccaaagtgctgggattatagacacgagccaccatgcccaa

SEQ ID NO: 478066 - DNA, 201 bp, Homo sapiens
ctttatcacaattcttacccagttctggttcttgagacttttttttttttttggcaggtgcaaaatggaaaacaaatttgcttgttttgtttctcagatgycttttctgtcagagtgcatgttttaaaattagctttaatcaagcataaacaaaaatactagaaaataattaaaatttaactgtgaaacttaatctatgtg

SEQ ID NO: 478067 - DNA, 201 bp, Homo sapiens
tgtcaatttttccagtgtcactttaccacctgaactgcacatcatgtcttaacatgtcgatcccctttgctgctagactgtagaggacaatcttttgaatmatctttgtataaacagtcttaattttgctaaataattacttattgagttcctgctaagtgttaggcactggggtataaggaaggaaaataaaagctgtca

SEQ ID NO: 478068 - DNA, 201 bp, Homo sapiens
caaatatatgtcagatactttggggtttattgatatgacactgtgtggttaaacaacgcaagtatgtccatgtgtttcttacagggtacacttgaaactartagtgtttatgcagctcacttatgtaacttgaaaatctggtactattgcattcaggactgaaatcttggagtttaggtgtcttgtctctcattttgaaag

SEQ ID NO: 478069 - DNA, 201 bp, Homo sapiens
ttgaatcatctttgtataaacagtcttaattttgctaaataattacttattgagttcctgctaagtgttaggcactggggtataaggaaggaaaataaaasctgtcagggatggctttcctaaagatcatgcatgagctgagacttagagagtaaggttagccagattaagtgaggcagagggcaagaaagggtgagcaca

SEQ ID NO: 478070 - DNA, 201 bp, Homo sapiens
aggtcattttcccatcaagggctcatgatccactggacattcacaaactatattgttcaaaacattagttctgaattttgatctgagtatccccggagttkcagtttcattcaaagatgtccaagaggtcaaataagacaatatcatttgctattttcagttttcttttttgagaacagcacaacaaacttcttcagagaa

SEQ ID NO: 478071 - DNA, 201 bp, Homo sapiens
tatgtgttgccactcttaaattataggattgtaactaaaaagtgaaaaataatttgccttggcttaacataggacagaaatatgaactggcaagctgaackcttagcatttgtttggattaaacttaatgcattatgtgtaaaatctaccagaaatgaattcaaagctgataggtagtattataaaatcttcccctcttac

SEQ ID NO: 478072 - DNA, 201 bp, Homo sapiens
catttctgccaattcctatgtctaaaaaaaagcatcctaatctctttgagcctcacattctctatctagagaatcatttgaccagaatgttcaacacaggkaaaaatactagaaggtattttaattcattccaagattccttaaaattctgtaattctatgtcctcttgatactatctatagaaaaacttagaatacatag

SEQ ID NO: 478073 - DNA, 201 bp, Homo sapiens
aatcatttgaccagaatgttcaacacaggtaaaaatactagaaggtattttaattcattccaagattccttaaaattctgtaattctatgtcctcttgatwctatctatagaaaaacttagaatacatagctagcagagtttgaaaaaataatagaacaaaagaaataccaagaaaagcagagaagaaagttttaaaaaat

SEQ ID NO: 478074 - DNA, 201 bp, Homo sapiens
catttgaccagaatgttcaacacaggtaaaaatactagaaggtattttaattcattccaagattccttaaaattctgtaattctatgtcctcttgatactwtctatagaaaaacttagaatacatagctagcagagtttgaaaaaataatagaacaaaagaaataccaagaaaagcagagaagaaagttttaaaaaatgca

SEQ ID NO: 478075 - DNA, 201 bp, Homo sapiens
cagaatgttcaacacaggtaaaaatactagaaggtattttaattcattccaagattccttaaaattctgtaattctatgtcctcttgatactatctatagraaaacttagaatacatagctagcagagtttgaaaaaataatagaacaaaagaaataccaagaaaagcagagaagaaagttttaaaaaatgcagacaagat

SEQ ID NO: 478076 - DNA, 201 bp, Homo sapiens
agaactggctgtctcaaaaaaaattagccaaagcatctatatgcaacttaatcacatcttattccctcatgtcagtgaaacttctctctctgaggcctgamagttatcaagtgaaatgagctgctgtggtttaccccaactctagcactccctcctgcctccagtactctccacagcaataacctcttttgtgagactggg

SEQ ID NO: 478077 - DNA, 201 bp, Homo sapiens
tatctatagaaaaacttagaatacatagctagcagagtttgaaaaaataatagaacaaaagaaataccaagaaaagcagagaagaaagttttaaaaaatgmagacaagattatagaaaagtcatggaaaaagcaacaagactaaaaaatgtattatggaagtaagcagaaatacttgcctaaatggaaaaccaaactggga

SEQ ID NO: 478078 - DNA, 201 bp, Homo sapiens
ctatagaaaaacttagaatacatagctagcagagtttgaaaaaataatagaacaaaagaaataccaagaaaagcagagaagaaagttttaaaaaatgcagrcaagattatagaaaagtcatggaaaaagcaacaagactaaaaaatgtattatggaagtaagcagaaatacttgcctaaatggaaaaccaaactgggaagt

SEQ ID NO: 478079 - DNA, 201 bp, Homo sapiens
gagttgtctcaagtttacttggcttcaactcccaagaccccagcaaatgtctttctttcctccctccgtgtgctttcacaatccctcttcctttgaaaaaktgatttttagaactgtcatcctgatgcttcccttcctaactgctttttatggataattgtgaccactgaccacttttttcatctgtattcagcagtagta

SEQ ID NO: 478080 - DNA, 201 bp, Homo sapiens
catagctagcagagtttgaaaaaataatagaacaaaagaaataccaagaaaagcagagaagaaagttttaaaaaatgcagacaagattatagaaaagtcayggaaaaagcaacaagactaaaaaatgtattatggaagtaagcagaaatacttgcctaaatggaaaaccaaactgggaagtcaaataatttgtctctaaga

SEQ ID NO: 478081 - DNA, 201 bp, Homo sapiens
tttttatattcaactaagttcaacatgtatccagaaccaaatgtttaaattttctttctagaagtttgaaaatatttatcttccttgatacttactactcyttctgctttctctctctcatactgaaagagactttcttttaaatgatcacattcattcattagcttcttacttttctcttctagtacgaggtctttcttt

SEQ ID NO: 478082 - DNA, 201 bp, Homo sapiens
gctttcacaatccctcttcctttgaaaaattgatttttagaactgtcatcctgatgcttcccttcctaactgctttttatggataattgtgaccactgacmacttttttcatctgtattcagcagtagtatacacctgtaatctctctgttttcatctcattctccttcctctgtggctagaatcatgctcagaaataaaa

SEQ ID NO: 478083 - DNA, 201 bp, Homo sapiens
atggaagtaagcagaaatacttgcctaaatggaaaaccaaactgggaagtcaaataatttgtctctaagacttgcctaaacttgcttttgtaaaacttacwcccctatggccaaagctaagtaagatctgccctagagcctttgatggtaaaaataagatactggttaccactgaaattgtcaaatttattaggacaaact

SEQ ID NO: 478084 - DNA, 201 bp, Homo sapiens
atggaattatacagtatggtaaacacactttttatctagatttttatattcaactaagttcaacatgtatccagaaccaaatgtttaaattttctttctaraagtttgaaaatatttatcttccttgatacttactactccttctgctttctctctctcatactgaaagagactttcttttaaatgatcacattcattcat

SEQ ID NO: 478085 - DNA, 201 bp, Homo sapiens
tgctttttatggataattgtgaccactgaccacttttttcatctgtattcagcagtagtatacacctgtaatctctctgttttcatctcattctccttccyctgtggctagaatcatgctcagaaataaaaggaaattaatgctttccctggattctgttattttttaaattgctctccaatggttctttttccagagttc

SEQ ID NO: 478086 - DNA, 201 bp, Homo sapiens
aaatttattaggacaaactcttggactaaccacattctaatgataaatgagagttcaaggtatttaaactctcattaatttagacattaatcaaattaatsaatctgactaatctgattcagacctataccttgatccaagggctgcacagatatctgtcaatctatgctgaggagcaagagacagaatttggaaggtagg

SEQ ID NO: 478087 - DNA, 201 bp, Homo sapiens
ggcaggctgatggtcaaactgtaggccagctactttgttaactatgggatcatgaggcaattaatcagctctaatccatagttgtttatttaataaacagyaggttataggaagacagatgttgtgatggctttatgagatgataaatgcatagaacatattaggatgtctagcccacaatacaacactcaacagatattc

SEQ ID NO: 478088 - DNA, 201 bp, Homo sapiens
tgtggctagaatcatgctcagaaataaaaggaaattaatgctttccctggattctgttattttttaaattgctctccaatggttctttttccagagttctytaaaggaaggctattcccttgctattcagagctgtgtccaaggaccagcaccaaaatcacctgagtactcatgagaaatgcagactcccatacctgctga

SEQ ID NO: 478089 - DNA, 201 bp, Homo sapiens
agttggaccctccagatgcatcttcctcctcacaatcagggacctgattcatcagattagagggcactccttttttgttcgtccctctttagagttactayataggagctcttcctcagggcaagcagtaattctggagttttcaaaactttcaccaatattcagctcgaacttgtttgtaatgaattttaaagaaagtcg

SEQ ID NO: 478090 - DNA, 201 bp, Homo sapiens
aaggaaattaatgctttccctggattctgttattttttaaattgctctccaatggttctttttccagagttctttaaaggaaggctattcccttgctattyagagctgtgtccaaggaccagcaccaaaatcacctgagtactcatgagaaatgcagactcccatacctgctgaatcagaatgtgcaccttccagaagctt

SEQ ID NO: 478091 - DNA, 201 bp, Homo sapiens
agagctgtgtccaaggaccagcaccaaaatcacctgagtactcatgagaaatgcagactcccatacctgctgaatcagaatgtgcaccttccagaagcttytcaactaattcatgacaatttgaatgccccgttctacactgatgtgcttccatattggtttaccctaattgcccttttgccctagcctcaatttcttccc

SEQ ID NO: 478092 - DNA, 201 bp, Homo sapiens
ttttatagtcagttataagaattacattcactaaatcataaactagacattatactagtcattcctatatacattcattgatgaactcatctagttaccayaattttgaaaaagaaatgttaaaaatataagcaagctacaggattttccccaggacttctgactctacttctagttctccaacagatcacagttacttct

SEQ ID NO: 478093 - DNA, 201 bp, Homo sapiens
tttaaaatatgtgtaagtatatgtttgttttcaaaaatattggaaataactatgatgggactgtaagttcaaacagtttgagctaagcagataaacttgcrtgcatgaaaacacattaaacagactcatttggctgggaatattcgttgcaactctcaaggctagacgtgtttttgtggcttgtctcagtcattgcttccc

SEQ ID NO: 478094 - DNA, 201 bp, Homo sapiens
ctccaagattaatcctttctttaactatgaagttcgcgggtccaaagtcttgtagttgctgtctgatttttgatcatggatggtgatacagatatttatcrtcaactcataacttcccaaatctttgaaaagtcttactattgatggttcaactagtagaaacataatctaaaatatctgacaataaagtttttattagaa

SEQ ID NO: 478095 - DNA, 201 bp, Homo sapiens
ttaatcataaggaatattagtccaattttgaattagtttatagcacaatgacaattatctcctgtgaaatactactataggcggccaggcacggtggctcrctcctgtaaacccagcactttgagaggccgaggtgggcagaacacctgaagtcaggagttcgagaccagcttggctaacatggtgaaatcctatttttac

SEQ ID NO: 478096 - DNA, 201 bp, Homo sapiens
gaagcattctgtttggttgtaggctgcataaagggagtaaacacaaagtacatttgaccacaaaatgactttttaaaagctagaactatggtagcatgaarccaactgaggtaatctagaataaaattttctatgtttgtttcccttctttgctctctttctactctaataactgcgattcacagaggtaatgaagagtat

SEQ ID NO: 478097 - DNA, 201 bp, Homo sapiens
aaatgggagggtttccaccattccctgagaagaatggctcactgtgtctaaagtgcttatagaaacagtgtatttactctaaacagctgctttccttgtamgagtctggaatttcggtacatgtgagggagagtaacctccatagaaaaacttgggcacttagtctctaatgagactctgctactggtagacatcactgca

SEQ ID NO: 478098 - DNA, 201 bp, Homo sapiens
accatactttattaaacaacataatgtaaggtctgattcaacagaaatattgcagaatggtgattttttaaaatatgtgtaagtatatgtttgttttcaamaatattggaaataactatgatgggactgtaagttcaaacagtttgagctaagcagataaacttgcatgcatgaaaacacattaaacagactcatttggct

SEQ ID NO: 478099 - DNA, 201 bp, Homo sapiens
tctgaaatccttatataaaactttaagatgcttggacataggtattcaggagtggttcacagatctatttgcattagagataattaactctaattattgtraggagcataaaattctgaggcacataaatcaatgaacaaagataaaatataaggcagtgttgcaaagatgctgcaggcctgaggagatgttttcagaaat

SEQ ID NO: 478100 - DNA, 201 bp, Homo sapiens
ctttgtaataaaataatatcctatgtggatgccaagatttataataaatattaataattgtacctgtaagtgtcatcattcatttttaaaaatgagataamatttctggttttagacctaaacaatatatattaaatcaagtggacattataagtaacagtgataagataaagtttaaaatatagaatttttaccaaagat

SEQ ID NO: 478101 - DNA, 201 bp, Homo sapiens
gcaattaatcagctctaatccatagttgtttatttaataaacagcaggttataggaagacagatgttgtgatggctttatgagatgataaatgcatagaasatattaggatgtctagcccacaatacaacactcaacagatattcgtttcttccatctatattttcttagttaacataattttttaaatctataaaatcct

SEQ ID NO: 478102 - DNA, 201 bp, Homo sapiens
aggttataggaagacagatgttgtgatggctttatgagatgataaatgcatagaacatattaggatgtctagcccacaatacaacactcaacagatattcrtttcttccatctatattttcttagttaacataattttttaaatctataaaatcctacctgactgcagattcatcagaacttccaacatctattaaagaaa

SEQ ID NO: 478103 - DNA, 201 bp, Homo sapiens
ttcttctgcctctgcaacagagagacagcaagatccacctctcctcttcctcctcagcctaatcaacctgaagatcatgaagacctttgtcaggactactwatgctttatgaaaagtcaatatgtttttcctgatgatttcctttctaacagcttcatttctctagcttattttattgtacgaacacagtatataataatg

SEQ ID NO: 478104 - DNA, 201 bp, Homo sapiens
agatgttgtgatggctttatgagatgataaatgcatagaacatattaggatgtctagcccacaatacaacactcaacagatattcgtttcttccatctatrttttcttagttaacataattttttaaatctataaaatcctacctgactgcagattcatcagaacttccaacatctattaaagaaaaaggtaaaacgcact

SEQ ID NO: 478105 - DNA, 201 bp, Homo sapiens
atagttgtttatttaataaacagcaggttataggaagacagatgttgtgatggctttatgagatgataaatgcatagaacatattaggatgtctagcccasaatacaacactcaacagatattcgtttcttccatctatattttcttagttaacataattttttaaatctataaaatcctacctgactgcagattcatcag

SEQ ID NO: 478106 - DNA, 201 bp, Homo sapiens
taattgcccttttgccctagcctcaatttcttccctattatgtccctcaatttaatactacattgtaagccataatgtttctaatgaacttttaatcaggyaatacttctcaaattaatttcttctccataaatcacccaacactattcaattatgttaatttggcctatatgatactatcctatgaggttacattttcta

SEQ ID NO: 478107 - DNA, 201 bp, Homo sapiens
tctatattttcttagttaacataattttttaaatctataaaatcctacctgactgcagattcatcagaacttccaacatctattaaagaaaaaggtaaaaygcactttaaatcaataataaatgtacagaatattaaaagcataagtatgcacagtgatgcatccctctaatccaaactacttgggaggctgaggcaggag

SEQ ID NO: 478108 - DNA, 201 bp, Homo sapiens
aatgaatctgactaatctgattcagacctataccttgatccaagggctgcacagatatctgtcaatctatgctgaggagcaagagacagaatttggaaggyaggcaggctgatggtcaaactgtaggccagctactttgttaactatgggatcatgaggcaattaatcagctctaatccatagttgtttatttaataaaca

SEQ ID NO: 478109 - DNA, 201 bp, Homo sapiens
ttgctttccttaagggaagaatacaaatgccttgctaagaagcattctgtttggttgtaggctgcataaagggagtaaacacaaagtacatttgaccacaraatgactttttaaaagctagaactatggtagcatgaagccaactgaggtaatctagaataaaattttctatgtttgtttcccttctttgctctctttcta

SEQ ID NO: 478110 - DNA, 201 bp, Homo sapiens
tttgccctagcctcaatttcttccctattatgtccctcaatttaatactacattgtaagccataatgtttctaatgaacttttaatcaggcaatacttctyaaattaatttcttctccataaatcacccaacactattcaattatgttaatttggcctatatgatactatcctatgaggttacattttctataaaaacaaa

SEQ ID NO: 478111 - DNA, 201 bp, Homo sapiens
tattttcttagttaacataattttttaaatctataaaatcctacctgactgcagattcatcagaacttccaacatctattaaagaaaaaggtaaaacgcaytttaaatcaataataaatgtacagaatattaaaagcataagtatgcacagtgatgcatccctctaatccaaactacttgggaggctgaggcaggaggatc

SEQ ID NO: 478112 - DNA, 201 bp, Homo sapiens
aattctgaggcacataaatcaatgaacaaagataaaatataaggcagtgttgcaaagatgctgcaggcctgaggagatgttttcagaaatatttaggatayaagtatcagtggccattataagaatgaatttttattgaatgaataaatgtatatatctgggtccctggagaaatacactctgctcattactttacaaatt

SEQ ID NO: 478113 - DNA, 201 bp, Homo sapiens
ctttgaaagaagaaaatctctagatttttgtctatctttagaacacaatgtacagaactcaactttctactaaagagtcaaaggctaaatttttggctaaraaattatgcttcttatatgataaaaatcatacatgccaaaacttaccatactttattaaacaacataatgtaaggtctgattcaacagaaatattgcaga

SEQ ID NO: 478114 - DNA, 201 bp, Homo sapiens
atactacattgtaagccataatgtttctaatgaacttttaatcaggcaatacttctcaaattaatttcttctccataaatcacccaacactattcaattaygttaatttggcctatatgatactatcctatgaggttacattttctataaaaacaaattatagccatacatggctgaccatttttggtgatgttcatctat

SEQ ID NO: 478115 - DNA, 201 bp, Homo sapiens
acataattttttaaatctataaaatcctacctgactgcagattcatcagaacttccaacatctattaaagaaaaaggtaaaacgcactttaaatcaataayaaatgtacagaatattaaaagcataagtatgcacagtgatgcatccctctaatccaaactacttgggaggctgaggcaggaggatcacttgaggagccca

SEQ ID NO: 478116 - DNA, 201 bp, Homo sapiens
aattatctcctgtgaaatactactataggcggccaggcacggtggctcactcctgtaaacccagcactttgagaggccgaggtgggcagaacacctgaagycaggagttcgagaccagcttggctaacatggtgaaatcctatttttactaaaaatacaaaaaattagccaggcatggtggcacatgcctgtaatcccagc

SEQ ID NO: 478117 - DNA, 201 bp, Homo sapiens
acccaacactattcaattatgttaatttggcctatatgatactatcctatgaggttacattttctataaaaacaaattatagccatacatggctgaccatytttggtgatgttcatctatggtagacaaaacacaggtctgtgtggtgagttgcctcaatccttaatgcctccccagtattgaggatgacagcaagagaag

SEQ ID NO: 478118 - DNA, 201 bp, Homo sapiens
acctgactgcagattcatcagaacttccaacatctattaaagaaaaaggtaaaacgcactttaaatcaataataaatgtacagaatattaaaagcataagwatgcacagtgatgcatccctctaatccaaactacttgggaggctgaggcaggaggatcacttgaggagcccagaagtttgagaccagcttgggaaacata

SEQ ID NO: 478119 - DNA, 201 bp, Homo sapiens
ctatgaggttacattttctataaaaacaaattatagccatacatggctgaccatttttggtgatgttcatctatggtagacaaaacacaggtctgtgtggkgagttgcctcaatccttaatgcctccccagtattgaggatgacagcaagagaaggaaaatgttattctaattctctgacacattttcgtactggaagctc

SEQ ID NO: 478120 - DNA, 201 bp, Homo sapiens
tggtttggtttggttttttaaagcataagactgatgctttgttacaaagcattcctttgggagcatgcctgggaccttattagaattaacattcgttatamatattggtaggtagttaatgcagtaagaactcttccctttgtatttattagatgcaaagaagaataaatttattaaaatttggtatctacaagtgaactg

SEQ ID NO: 478121 - DNA, 201 bp, Homo sapiens
cattttctataaaaacaaattatagccatacatggctgaccatttttggtgatgttcatctatggtagacaaaacacaggtctgtgtggtgagttgcctcratccttaatgcctccccagtattgaggatgacagcaagagaaggaaaatgttattctaattctctgacacattttcgtactggaagctcactttatcttc

SEQ ID NO: 478122 - DNA, 201 bp, Homo sapiens
tttttaaagcataagactgatgctttgttacaaagcattcctttgggagcatgcctgggaccttattagaattaacattcgttatacatattggtaggtarttaatgcagtaagaactcttccctttgtatttattagatgcaaagaagaataaatttattaaaatttggtatctacaagtgaactgaagtatgcaagtca

SEQ ID NO: 478123 - DNA, 201 bp, Homo sapiens
agccatacatggctgaccatttttggtgatgttcatctatggtagacaaaacacaggtctgtgtggtgagttgcctcaatccttaatgcctccccagtatygaggatgacagcaagagaaggaaaatgttattctaattctctgacacattttcgtactggaagctcactttatcttctttcctgtttctaacaccatgtt

SEQ ID NO: 478124 - DNA, 201 bp, Homo sapiens
gaactcttccctttgtatttattagatgcaaagaagaataaatttattaaaatttggtatctacaagtgaactgaagtatgcaagtcatcctagccaaacmctgtgagatcgagtaaaaatggtattgttagcagaacaggtgtgatgagtcaaaagtgtcaaagagcatgatttctggaccacaatatgaggtgccatta

SEQ ID NO: 478125 - DNA, 201 bp, Homo sapiens
atcatctctaaatgaatacaagaaaaaagaatctagaatctagagcttgtttctttagcaatttctttatgttgatctggttcagaaggtcacatggtatrtggctgaattagtttcccagctcatacgccacttggaagactgatagtgagacataggttgattaatgaacaaacattatgagaacattctccagaacca

SEQ ID NO: 478126 - DNA, 201 bp, Homo sapiens
tgacccttggttagacacacaacttatcaccatttcacttctcctttacttattatacagttaataggacactttctttagctattacactctattagtgytcatattttcaaataaacattccatcaaatgacttttttttgttttgtttttttctgagacggagtctcgctctgtcgcccagggtggaatgcagtggtg

SEQ ID NO: 478127 - DNA, 201 bp, Homo sapiens
gtaaagcatatgtcatcagaatatatcattctttacaatgataaagaagcaaaaggaaaacaaaaggacaaagaacatcttaaatgactacattcaactgycacggagctttaattttttaactattcaaaaagatatccactgtattattccaactatgtgactcttctgaaaaaagtgaaactatgaagacagagtaaa

SEQ ID NO: 478128 - DNA, 201 bp, Homo sapiens
ttaaattataggattgtaactaaaaagtgaaaaataatttgccttggcttaacataggacagaaatatgaactggcaagctgaactcttagcatttgtttsgattaaacttaatgcattatgtgtaaaatctaccagaaatgaattcaaagctgataggtagtattataaaatcttcccctcttacaaagattttacctca

SEQ ID NO: 478129 - DNA, 201 bp, Homo sapiens
tgacctcaaatgatccacctgcctcagcgtcccaaagtgctgggattatagacacgagccaccatgcccaacccagaaatcagtttctgaaatccttatayaaaactttaagatgcttggacataggtattcaggagtggttcacagatctatttgcattagagataattaactctaattattgtgaggagcataaaattc

SEQ ID NO: 478130 - DNA, 201 bp, Homo sapiens
ggtctgctggcatcagggagcattgagggaagcacatggagagggggactggggtcccccatgactgtgccccagcagcctcccccactaccttccccaayaggggatgctcccagacacttctgagctgccatgggtgcccatttcacaggtagggaaaccaaggctcagatccagggagctgcatttatgtgcgcctcc

SEQ ID NO: 478131 - DNA, 201 bp, Homo sapiens
gaataacatttctttgtattttatattttgagagtttcaatgaagcttaatgtttactgaaatatttagttctttaagaaatacttctaatcatccaaaayttcaacaaaccacttggggagacactagatatcaccaggttcaagccatatgaaatctcagggtcactcacaaattgttccacccaacataaatcaacaa

SEQ ID NO: 478132 - DNA, 201 bp, Homo sapiens
ctaccttccccaacaggggatgctcccagacacttctgagctgccatgggtgcccatttcacaggtagggaaaccaaggctcagatccagggagctgcatktatgtgcgcctccacccgtctttctccacaagccccaggagctcaggggcaacaatggggactatggggagcccgtgccctgcctgccccaaccctgcca

SEQ ID NO: 478133 - DNA, 201 bp, Homo sapiens
ccccaacaggggatgctcccagacacttctgagctgccatgggtgcccatttcacaggtagggaaaccaaggctcagatccagggagctgcatttatgtgygcctccacccgtctttctccacaagccccaggagctcaggggcaacaatggggactatggggagcccgtgccctgcctgccccaaccctgccacaggccc

SEQ ID NO: 478134 - DNA, 201 bp, Homo sapiens
caacaggggatgctcccagacacttctgagctgccatgggtgcccatttcacaggtagggaaaccaaggctcagatccagggagctgcatttatgtgcgcmtccacccgtctttctccacaagccccaggagctcaggggcaacaatggggactatggggagcccgtgccctgcctgccccaaccctgccacaggcccaca

SEQ ID NO: 478135 - DNA, 201 bp, Homo sapiens
tacaccccggtaggtgcatacttctgccctccctagccccggctcacacccccccaacacccccaggctgttgagtgaggtggaggagctgaacatgtccmtcacagcactgcgagagaagcttctagaagcggagcagtccctgcgcaacctcgaggacatccacatgagcctggagaaggacattgccgccatgaccaa

SEQ ID NO: 478136 - DNA, 201 bp, Homo sapiens
gtgcccatttcacaggtagggaaaccaaggctcagatccagggagctgcatttatgtgcgcctccacccgtctttctccacaagccccaggagctcagggrcaacaatggggactatggggagcccgtgccctgcctgccccaaccctgccacaggcccacaggctccccctggggatgtggctgcccacctgcgaagctg

SEQ ID NO: 478137 - DNA, 201 bp, Homo sapiens
caacataatgtaaggtctgattcaacagaaatattgcagaatggtgattttttaaaatatgtgtaagtatatgtttgttttcaaaaatattggaaataacyatgatgggactgtaagttcaaacagtttgagctaagcagataaacttgcatgcatgaaaacacattaaacagactcatttggctgggaatattcgttgca

SEQ ID NO: 478138 - DNA, 201 bp, Homo sapiens
atccacctgcctcagcgtcccaaagtgctgggattatagacacgagccaccatgcccaacccagaaatcagtttctgaaatccttatataaaactttaagrtgcttggacataggtattcaggagtggttcacagatctatttgcattagagataattaactctaattattgtgaggagcataaaattctgaggcacataa

SEQ ID NO: 478139 - DNA, 201 bp, Homo sapiens
gtaaatacatcaatacgaaagaaaacttttatttcaaaacaccaatagtaaataagataaaatttatagagctcttcttagaatatcatgagattatttgygattgcaataatttctgtttcctctttataatattaggtgcagtaatcaatatgaaataggggaaagtacaaggaaaaattttacctggaacaaaatttt

SEQ ID NO: 478140 - DNA, 201 bp, Homo sapiens
gctatctggctggcagaaacagagaaataaaaagacacaggcataacatatgtcttctgtctttactacctggattttacatgaaatagccagattaagargatgtgacattgtaggccttcaggaacagtaaagaagttttcccttttctgtactgagctactcttttccccactgccttttatctctcttttttttttt

SEQ ID NO: 478141 - DNA, 201 bp, Homo sapiens
caataacatttatgtcaatgccttccattcaattttaaacaaatagaattaggaataagaataatgtgagtacttccaatcattgaatgtacttatttccrgtattccattaaatgtacctgctctcaatgtctgtacattctttctttgtactgctcctttcacagcaggatcttccactccagtggtaggctgaatggg

SEQ ID NO: 478142 - DNA, 201 bp, Homo sapiens
gtaaagctttcctctaggtaaagatcagaactccaagtagcacttaactcactggaaatatcttagagtctcaaaattcactgctttgaatccctgacagrtataaaaattttatactgaaaacttcatgctattcaaaacattaaaagagaaacatctgagttaaagcttacatttttaaaatcttttttatgcttctaa

SEQ ID NO: 478143 - DNA, 201 bp, Homo sapiens
ataatcacaatttcaatattgcgtgtcacctgttttggttttgctcacactgcttccttggagctactcaacaaatagtcaaatggccttcctgggactakgcaaaatatggaatgttttctgaatttgtgtgccatccctaggcagtagccatgcttatctgctctgtattgatccaattttaaaatatgtgctgttgaa

SEQ ID NO: 478144 - DNA, 201 bp, Homo sapiens
gacaatgatttgccctcacaaattatctgtcctgaagctaaacttaaaattcaattaatggatgacataaattttgttacctaaactggaagaaaactgaygacctaaaacaaggtagaaagatccactgtctcttttccatgatctgtctctggataaaagactaatctgcatcacttcagaatggcagtcttgattcct

SEQ ID NO: 478145 - DNA, 201 bp, Homo sapiens
acacatgtcttgagcgaagacatcaatattttgcttaagaaggatattgacaatacctggtgagtcatagtatacagcaagcatgagagctgacctaaaayaacaaagaaataactccactcaagaactttaataaagacttttttaaaaagctagtttgatacactttaccagtttaatatccgcctgtcagtatagatg

SEQ ID NO: 478146 - DNA, 201 bp, Homo sapiens
actcttccctttgtatttattagatgcaaagaagaataaatttattaaaatttggtatctacaagtgaactgaagtatgcaagtcatcctagccaaacccygtgagatcgagtaaaaatggtattgttagcagaacaggtgtgatgagtcaaaagtgtcaaagagcatgatttctggaccacaatatgaggtgccattaaa

SEQ ID NO: 478147 - DNA, 201 bp, Homo sapiens
ctttgtatttattagatgcaaagaagaataaatttattaaaatttggtatctacaagtgaactgaagtatgcaagtcatcctagccaaaccctgtgagatygagtaaaaatggtattgttagcagaacaggtgtgatgagtcaaaagtgtcaaagagcatgatttctggaccacaatatgaggtgccattaaaacagagta

SEQ ID NO: 478148 - DNA, 201 bp, Homo sapiens
caggtgtgatgagtcaaaagtgtcaaagagcatgatttctggaccacaatatgaggtgccattaaaacagagtatacagtagtatcccttatccactataygtgcagaaagacacacttgacacgtttttctctgctgtcacaccacagcaacaatcatcaacaaagaaggcttctgtgaccaaatatgtggagggttttt

SEQ ID NO: 478149 - DNA, 201 bp, Homo sapiens
gtggtttacttagttgtagctatttgctctgccctacatatagcaaggcccaaattcacctgccattttacctcccacagaaaaaccgctggaaatatcaytcctttaagagcttatccgctaggaaccacacctcacattcagagagaagctgaagaaacaccagggaggtgtggcaggctgctgggcagtactatatga

SEQ ID NO: 478150 - DNA, 201 bp, Homo sapiens
catgacagaatctagttgtaagtgagtcacatcatcataatacaggctgttatcaaccccatcagtcaaaggaagaggatcagtgaggaacatatgtattwacctatagcattcactgcctggtcttatttccaaccgaaggtaagtatgaaagactttgtgattccagttttataaagtacaaccccttgcacttgtccc

SEQ ID NO: 478151 - DNA, 201 bp, Homo sapiens
aaaaggaaaacaaaaggacaaagaacatcttaaatgactacattcaactgccacggagctttaattttttaactattcaaaaagatatccactgtattatyccaactatgtgactcttctgaaaaaagtgaaactatgaagacagagtaaacatcaatggttgccacgagttgctagggagaaagggagagatgaacacgc

SEQ ID NO: 478152 - DNA, 201 bp, Homo sapiens
cacacctgtaatctcagccctttgcaaggccaacgtgggtggattgcttgagttcaggagtttgagaccagcctgggcaacataatgagaacacatctctrctcaaaaaataccaaaaggagtcaggcatgatggtgtgtgcctgtagtcccagctgcttgggaagctgatgtgggaggatcacttgagcctgagaggtgg

SEQ ID NO: 478153 - DNA, 201 bp, Homo sapiens
tgaaaaaagtgaaactatgaagacagagtaaacatcaatggttgccacgagttgctagggagaaagggagagatgaacacgcatagcatagagaacttttmgggctgtgaaactgttctgtcgataatattacagtaatagatacatgtcatgtcattatacatttgtccaaattcacagaatgtacagcatcaagagtga

SEQ ID NO: 478154 - DNA, 201 bp, Homo sapiens
tggattgcttgagttcaggagtttgagaccagcctgggcaacataatgagaacacatctctgctcaaaaaataccaaaaggagtcaggcatgatggtgtgygcctgtagtcccagctgcttgggaagctgatgtgggaggatcacttgagcctgagaggtggatactgcagtgagccaagatcatgccactacactgcagc

SEQ ID NO: 478155 - DNA, 201 bp, Homo sapiens
gactccatctcaaaaaacaaaaaagatattcactgtctatgcatcccaggatctccagaacaacaattaaaataaataaataaatggctgggggcagtggytcatgcctgtaatcccagcactttgagaggccgaggtaggtggatcacctgaggtcaggagttcgagaccagcctgactaacatggtgaaaccccatctc

SEQ ID NO: 478156 - DNA, 201 bp, Homo sapiens
cctgagaggtggatactgcagtgagccaagatcatgccactacactgcagcatgggcaacagagcaagaccctgactccccaaaaatttcaatttaaaatrtgagaatgaagagagatacaaacaaaaaacaaacctaattggtcaatgaaatatgagcttaagccaagaaagaaaagaaacagcatgaagtacaataaag

SEQ ID NO: 478157 - DNA, 201 bp, Homo sapiens
atgccactacactgcagcatgggcaacagagcaagaccctgactccccaaaaatttcaatttaaaatgtgagaatgaagagagatacaaacaaaaaacaarcctaattggtcaatgaaatatgagcttaagccaagaaagaaaagaaacagcatgaagtacaataaagtacatggggaaatagatctataacagagccttt

SEQ ID NO: 478158 - DNA, 201 bp, Homo sapiens
agaaattattttgctcatttaatttaacaattttactgaaaggttaatgagataaataggacagattataattacctaacattgctatggtaacttatatrcaaatagctgttcatcaccaaaagccaaaaaagtaaccagcactgcaacttaagatggatcatacaacagaaattagtaccaagttaccttatcttataa

SEQ ID NO: 478159 - DNA, 201 bp, Homo sapiens
atataggattcctaaaatgcacagtttacatttcagtagtgagattatgtttcaaatgcctatacctaaaatagaaaagcatggatatcaccgtgaacacrtggactgatgaggagaaaagggaccattaaacagaggagcaaatcaaacctgagggaatcgacatcaaagctgatggtgaatgtacagagtattttaact

SEQ ID NO: 478160 - DNA, 201 bp, Homo sapiens
aaatttcaatttaaaatgtgagaatgaagagagatacaaacaaaaaacaaacctaattggtcaatgaaatatgagcttaagccaagaaagaaaagaaacarcatgaagtacaataaagtacatggggaaatagatctataacagagccttttgctctttcatatccctgataatactaattaatatttatgctacaattag

SEQ ID NO: 478161 - DNA, 201 bp, Homo sapiens
catgcagtggtactatcgagctgaattctcatgcctggctataaaaataattacttaaggtttggagggttcttcttggcttcttttcattgcctaggacrgcaacatgacagaaacataatgaggaaaataggaatataggattcctaaaatgcacagtttacatttcagtagtgagattatgtttcaaatgcctatacc

SEQ ID NO: 478162 - DNA, 201 bp, Homo sapiens
taaaatgtgagaatgaagagagatacaaacaaaaaacaaacctaattggtcaatgaaatatgagcttaagccaagaaagaaaagaaacagcatgaagtacrataaagtacatggggaaatagatctataacagagccttttgctctttcatatccctgataatactaattaatatttatgctacaattagttttttgtaag

SEQ ID NO: 478163 - DNA, 201 bp, Homo sapiens
gacagggccaaccaaacattcatgcagtggtactatcgagctgaattctcatgcctggctataaaaataattacttaaggtttggagggttcttcttggcwtcttttcattgcctaggacagcaacatgacagaaacataatgaggaaaataggaatataggattcctaaaatgcacagtttacatttcagtagtgagatt

SEQ ID NO: 478164 - DNA, 201 bp, Homo sapiens
ttttgagagtttcaatgaagcttaatgtttactgaaatatttagttctttaagaaatacttctaatcatccaaaacttcaacaaaccacttggggagacaytagatatcaccaggttcaagccatatgaaatctcagggtcactcacaaattgttccacccaacataaatcaacaaaactgttagaaacaaaacaaaattt

SEQ ID NO: 478165 - DNA, 201 bp, Homo sapiens
cttaatctgacattatttttatttttctttctttcttcatttatcagcaacaggagagtctaactaaatgtggtaaagtggtataagggaatacaatgaamagtgtaaaatgaattaaaccagagataatcatatcaatgtggatacatctggaaaatataatacaaaatacaccaaagaaagtggcagaaaggtatgtaa

SEQ ID NO: 478166 - DNA, 201 bp, Homo sapiens
gcacgagagccagcagctggccacagagacccaggcgctggcgcagcgcacgcagcaagactccacgcgcacagtgggcgagcgactgcaggacacgcacrgctggaagtcggagctgcagcgtgagatggaggcgctggctgcggagaccaacttgctcctggcccagaagcaacggctggagcgcgccctggacgccac

SEQ ID NO: 478167 - DNA, 201 bp, Homo sapiens
tattactctggctactactctttggggacggtgctgggtggtttacttagttgtagctatttgctctgccctacatatagcaaggcccaaattcacctgcyattttacctcccacagaaaaaccgctggaaatatcactcctttaagagcttatccgctaggaaccacacctcacattcagagagaagctgaagaaacacc

SEQ ID NO: 478168 - DNA, 201 bp, Homo sapiens
aacaattttactgaaaggttaatgagataaataggacagattataattacctaacattgctatggtaacttatatacaaatagctgttcatcaccaaaagycaaaaaagtaaccagcactgcaacttaagatggatcatacaacagaaattagtaccaagttaccttatcttataatattatgttattaaaatgaaatttt

SEQ ID NO: 478169 - DNA, 201 bp, Homo sapiens
ttaatcaaattaatgaatctgactaatctgattcagacctataccttgatccaagggctgcacagatatctgtcaatctatgctgaggagcaagagacagratttggaaggtaggcaggctgatggtcaaactgtaggccagctactttgttaactatgggatcatgaggcaattaatcagctctaatccatagttgttta

SEQ ID NO: 478170 - DNA, 201 bp, Homo sapiens
ggaaatgggagggtttccaccattccctgagaagaatggctcactgtgtctaaagtgcttatagaaacagtgtatttactctaaacagctgctttccttgyaagagtctggaatttcggtacatgtgagggagagtaacctccatagaaaaacttgggcacttagtctctaatgagactctgctactggtagacatcactg

SEQ ID NO: 478171 - DNA, 201 bp, Homo sapiens
aaaggttaatgagataaataggacagattataattacctaacattgctatggtaacttatatacaaatagctgttcatcaccaaaagccaaaaaagtaacmagcactgcaacttaagatggatcatacaacagaaattagtaccaagttaccttatcttataatattatgttattaaaatgaaattttaaaacaacaccaa

SEQ ID NO: 478172 - DNA, 201 bp, Homo sapiens
gtctcaaaaatccagaaaaaatcttgcactctacttctaactaatctagacttctgcttgatttctggctaaaaggcagactaactcttcgctatttcaawctatctgaaccaaactatgaactctcacctaatgtataagatggagtagttgcaattattttaaacttcaatttagcattaactggccttttaacataaa

SEQ ID NO: 478173 - DNA, 201 bp, Homo sapiens
caacagaaattagtaccaagttaccttatcttataatattatgttattaaaatgaaattttaaaacaacaccaaaaattaagttggggttacaagtgttgkgcagaaaagatttcatatagcaggcaagaggctgccatccatccttagaaaggcctgcatgcaaggctggcccttggctggtgtttaggaaattggaaat

SEQ ID NO: 478174 - DNA, 201 bp, Homo sapiens
ggctgccatccatccttagaaaggcctgcatgcaaggctggcccttggctggtgtttaggaaattggaaatgggagggtttccaccattccctgagaagartggctcactgtgtctaaagtgcttatagaaacagtgtatttactctaaacagctgctttccttgtaagagtctggaatttcggtacatgtgagggagagt

SEQ ID NO: 478175 - DNA, 201 bp, Homo sapiens
ccaccattccctgagaagaatggctcactgtgtctaaagtgcttatagaaacagtgtatttactctaaacagctgctttccttgtaagagtctggaatttsggtacatgtgagggagagtaacctccatagaaaaacttgggcacttagtctctaatgagactctgctactggtagacatcactgcacatatgttgtcaaa

SEQ ID NO: 478176 - DNA, 201 bp, Homo sapiens
agatgccaactgccctccccatctctgggtcctgaccaaggtgctctaatggacaccccctgacccaggtctcagggagctgccagcacgatgggtccctraagctgagatccagcaagacacatgtggcctgagggtcccactctctggctggcagaacccagaggtgggagcacactggagtgtccttcagggcatctt

SEQ ID NO: 478177 - DNA, 201 bp, Homo sapiens
ttactctaaacagctgctttccttgtaagagtctggaatttcggtacatgtgagggagagtaacctccatagaaaaacttgggcacttagtctctaatgaractctgctactggtagacatcactgcacatatgttgtcaaaatgtgagcctgggagaattaagcagatcccgggaactccacaggacagaactcctggag

SEQ ID NO: 478178 - DNA, 201 bp, Homo sapiens
ccaaggtgctctaatggacaccccctgacccaggtctcagggagctgccagcacgatgggtccctaaagctgagatccagcaagacacatgtggcctgagrgtcccactctctggctggcagaacccagaggtgggagcacactggagtgtccttcagggcatcttcaccccatgagagggctgggggctttgggagtttg

SEQ ID NO: 478179 - DNA, 201 bp, Homo sapiens
aaacagctgctttccttgtaagagtctggaatttcggtacatgtgagggagagtaacctccatagaaaaacttgggcacttagtctctaatgagactctgstactggtagacatcactgcacatatgttgtcaaaatgtgagcctgggagaattaagcagatcccgggaactccacaggacagaactcctggaggcttgtg

SEQ ID NO: 478180 - DNA, 201 bp, Homo sapiens
ctggaatttcggtacatgtgagggagagtaacctccatagaaaaacttgggcacttagtctctaatgagactctgctactggtagacatcactgcacataygttgtcaaaatgtgagcctgggagaattaagcagatcccgggaactccacaggacagaactcctggaggcttgtgccttgtttcctccagaattgaccac

SEQ ID NO: 478181 - DNA, 201 bp, Homo sapiens
taataattttgaaggccaagtgcagtggctcacacttgtaaatccaagcattttgggaggttgaggcaggaggatcacttgagcccagaagttccagaccrgcctcggcaatatagtgagacctcatctattaaacaaacaaacaaacaaacaaaaaaacccttaaaaagaaaattagccaagtgtggtagtgcatgcctg

SEQ ID NO: 478182 - DNA, 201 bp, Homo sapiens
acattattcatgggtcaactgtagttatttatttactaaatataaacaatttattataaaaatgaaatcgaagatccatttgtataacaagtccaatttgktataatgtgactatagaggaaacatacaacatactaacttaaaaatcttttttcttatttatgcaaaaatattatataggattttagggatcataattaa

SEQ ID NO: 478183 - DNA, 201 bp, Homo sapiens
caatagtaaataagataaaatttatagagctcttcttagaatatcatgagattatttgtgattgcaataatttctgtttcctctttataatattaggtgcmgtaatcaatatgaaataggggaaagtacaaggaaaaattttacctggaacaaaatttttatcaataggttatcactaagtatatattatggcatattatt

SEQ ID NO: 478184 - DNA, 201 bp, Homo sapiens
tttaactgtgaaacttaatctatgtgttgccactcttaaattataggattgtaactaaaaagtgaaaaataatttgccttggcttaacataggacagaaawatgaactggcaagctgaactcttagcatttgtttggattaaacttaatgcattatgtgtaaaatctaccagaaatgaattcaaagctgataggtagtatt

SEQ ID NO: 478185 - DNA, 201 bp, Homo sapiens
caggtctgctggcatcagggagcattgagggaagcacatggagagggggactggggtcccccatgactgtgccccagcagcctcccccactaccttccccmacaggggatgctcccagacacttctgagctgccatgggtgcccatttcacaggtagggaaaccaaggctcagatccagggagctgcatttatgtgcgcct

SEQ ID NO: 478186 - DNA, 201 bp, Homo sapiens
tacaatgataaagaagcaaaaggaaaacaaaaggacaaagaacatcttaaatgactacattcaactgccacggagctttaattttttaactattcaaaaakatatccactgtattattccaactatgtgactcttctgaaaaaagtgaaactatgaagacagagtaaacatcaatggttgccacgagttgctagggagaaa

SEQ ID NO: 478187 - DNA, 201 bp, Homo sapiens
cagattataattacctaacattgctatggtaacttatatacaaatagctgttcatcaccaaaagccaaaaaagtaaccagcactgcaacttaagatggatyatacaacagaaattagtaccaagttaccttatcttataatattatgttattaaaatgaaattttaaaacaacaccaaaaattaagttggggttacaagtg

SEQ ID NO: 478188 - DNA, 201 bp, Homo sapiens
tccagaccagcctcggcaatatagtgagacctcatctattaaacaaacaaacaaacaaacaaaaaaacccttaaaaagaaaattagccaagtgtggtagtrcatgcctgtagtcccagctacttgggaggctaaggtgaaaggatcatttaaggccagcaagcagaagttgcagtgagccaagatggcaccactgcacacc

SEQ ID NO: 478189 - DNA, 201 bp, Homo sapiens
agcctcggcaatatagtgagacctcatctattaaacaaacaaacaaacaaacaaaaaaacccttaaaaagaaaattagccaagtgtggtagtgcatgcctrtagtcccagctacttgggaggctaaggtgaaaggatcatttaaggccagcaagcagaagttgcagtgagccaagatggcaccactgcacaccagtactga

SEQ ID NO: 478190 - DNA, 201 bp, Homo sapiens
gcaatatagtgagacctcatctattaaacaaacaaacaaacaaacaaaaaaacccttaaaaagaaaattagccaagtgtggtagtgcatgcctgtagtccmagctacttgggaggctaaggtgaaaggatcatttaaggccagcaagcagaagttgcagtgagccaagatggcaccactgcacaccagtactgacaacaga

SEQ ID NO: 478191 - DNA, 201 bp, Homo sapiens
agggagaccctgtattaaaaataaataaacaaataaataattgtgtatcaggccagatgtaaccacacaaaactgtagtcccagctactcaggaggatgargtaggaggactgcttgagcccaggagttcaaggctacagtcagctatgattgcaccaatgaatagacactgtattctagcctaggcaacatagagagacc

SEQ ID NO: 478192 - DNA, 201 bp, Homo sapiens
tgtgtatcaggccagatgtaaccacacaaaactgtagtcccagctactcaggaggatgaggtaggaggactgcttgagcccaggagttcaaggctacagtsagctatgattgcaccaatgaatagacactgtattctagcctaggcaacatagagagaccccatctactatgataataataattgattaattgtgcatcat

SEQ ID NO: 478193 - DNA, 201 bp, Homo sapiens
ggactgcttgagcccaggagttcaaggctacagtcagctatgattgcaccaatgaatagacactgtattctagcctaggcaacatagagagaccccatctmctatgataataataattgattaattgtgcatcattcaagtaaattgtataactggagaaaaacatatgactattgaatatactattatagtctactacag

SEQ ID NO: 478194 - DNA, 201 bp, Homo sapiens
ccaatgaatagacactgtattctagcctaggcaacatagagagaccccatctactatgataataataattgattaattgtgcatcattcaagtaaattgtrtaactggagaaaaacatatgactattgaatatactattatagtctactacagaccatagagttcctgtttacttgcttctaatctttttcttcatttctc

SEQ ID NO: 478195 - DNA, 201 bp, Homo sapiens
tactatgataataataattgattaattgtgcatcattcaagtaaattgtataactggagaaaaacatatgactattgaatatactattatagtctactacwgaccatagagttcctgtttacttgcttctaatctttttcttcatttctcataaaactaaaaacatgatttaaacccattaaaggcagttcatcacaaaac

SEQ ID NO: 478196 - DNA, 201 bp, Homo sapiens
atgcaggcaatgaatccacacgcagttcatggaaaatgcttgagagcgaaaatacacaacgaaaatgagcaagttgatttctttacaatttttttaactgycagtttatatccagcttccccctcaaaaaaggaaaccataatcttgggaaaggtcagcaatctatatattaaatagtgattcttgatataattaaaatat

SEQ ID NO: 478197 - DNA, 201 bp, Homo sapiens
cgttttctaagtatgtaaagcatatgtcatcagaatatatcattctttacaatgataaagaagcaaaaggaaaacaaaaggacaaagaacatcttaaatgrctacattcaactgccacggagctttaattttttaactattcaaaaagatatccactgtattattccaactatgtgactcttctgaaaaaagtgaaactat

SEQ ID NO: 478198 - DNA, 201 bp, Homo sapiens
caccacactcagttatttttctacaatttttaattttttttgtctcactacagaaccaataatataagtagaaaaacaatctctcgtaaaaacaataggayaccaaaataataagtttccaagatcaaaagctatatgctatgtgctgaatatttttgccactaaaaatcaccaggaggatcccatgattactgcaaataa

SEQ ID NO: 478199 - DNA, 201 bp, Homo sapiens
ttaagattccagttgaattatactagaaaatatattgtaaccctctttgctactgatgacctatttctattttatttcctttttaattatggcataatttytcaacataacatatcaaaacttatacacccttaaatattaaaaaatacaatgtaagcaatattttaaatacaatatttaattattagatacattaggttt

SEQ ID NO: 478200 - DNA, 201 bp, Homo sapiens
attatgtgccacatatctatacaaatcacgttttctaagtatgtaaagcatatgtcatcagaatatatcattctttacaatgataaagaagcaaaaggaaracaaaaggacaaagaacatcttaaatgactacattcaactgccacggagctttaattttttaactattcaaaaagatatccactgtattattccaactat

SEQ ID NO: 478201 - DNA, 201 bp, Homo sapiens
aactcaacacatcagaggcattgctgccagcatgccacaaacaaattccccttgtcttgtcactgaggaaatacacagttgggatgacagttcaggtgaawgtgtgattcacctctcatcaaagaaagtgttctacattgatcagctcttatacacacttatgaaatgacagctaatcaaactactcatttttcccatgat

SEQ ID NO: 478202 - DNA, 201 bp, Homo sapiens
aatttatagagctcttcttagaatatcatgagattatttgtgattgcaataatttctgtttcctctttataatattaggtgcagtaatcaatatgaaatasgggaaagtacaaggaaaaattttacctggaacaaaatttttatcaataggttatcactaagtatatattatggcatattattgttttcaaaagctctttg

SEQ ID NO: 478203 - DNA, 201 bp, Homo sapiens
atctctttcatttcctgtgtttgctgctgtgtttttcttaggtcattttgtacagtttctaaagccaatgacttttttctgagactatctcttgtcttacrgaacttatcttttaaggcattgaatttaatttgtgtttcagaaagttgttcagtaagaaactcattctcatcttttactttggaaatagcagaactcatt

SEQ ID NO: 478204 - DNA, 201 bp, Homo sapiens
aagtacaaccccttgcacttgtccccttccattactagagagtctatctggacccacctcacagagcaagatgctccagtttgtgctgtgtggtacagcayggtgtccttttcctcaaccctttctattatgtgccacatatctatacaaatcacgttttctaagtatgtaaagcatatgtcatcagaatatatcattctt

SEQ ID NO: 478205 - DNA, 201 bp, Homo sapiens
gcaagatccacctctcctcttcctcctcagcctaatcaacctgaagatcatgaagacctttgtcaggactacttatgctttatgaaaagtcaatatgtttytcctgatgatttcctttctaacagcttcatttctctagcttattttattgtacgaacacagtatataataatgcagcacaaacaaaataggtgttcatca

SEQ ID NO: 478206 - DNA, 201 bp, Homo sapiens
aagacctttgtcaggactacttatgctttatgaaaagtcaatatgtttttcctgatgatttcctttctaacagcttcatttctctagcttattttattgtrcgaacacagtatataataatgcagcacaaacaaaataggtgttcatcaactgtttatgttatcaggaaggcttccagtcaattgtgggctattagtagct

SEQ ID NO: 478207 - DNA, 201 bp, Homo sapiens
agctaaggtgaaggaatcaaaagttatactcagattttcaactgcacagggatcagagtccctcacccccacattattcatgggtcaactgtagttatttrtttactaaatataaacaatttattataaaaatgaaatcgaagatccatttgtataacaagtccaatttggtataatgtgactatagaggaaacatacaac

SEQ ID NO: 478208 - DNA, 201 bp, Homo sapiens
acaatttattataaaaatgaaatcgaagatccatttgtataacaagtccaatttggtataatgtgactatagaggaaacatacaacatactaacttaaaartcttttttcttatttatgcaaaaatattatataggattttagggatcataattaaataaatgaatgttttcagacaataatgtttgagattataaattag

SEQ ID NO: 478209 - DNA, 201 bp, Homo sapiens
acttaaaaatcttttttcttatttatgcaaaaatattatataggattttagggatcataattaaataaatgaatgttttcagacaataatgtttgagattrtaaattagctacaactaccttcttaaataaatctgaatttcaaactaaacaagttaaattttaaaaattaatttacatatgtatatacatatatacactt

SEQ ID NO: 478210 - DNA, 201 bp, Homo sapiens
tcagaagtcttacctgatttctcctttttaagtatcttctgtttatgttccaaaatttgttgttgaattctacgtatacaaaagtaataaataaaattgcyatttttatactgaaataaaaaatatttaccaaacatattaaattccaaaaccctttcaggcaatatcagacctaatatcagaattttaatgtcccataca

SEQ ID NO: 478211 - DNA, 201 bp, Homo sapiens
acaaaagtaataaataaaattgctatttttatactgaaataaaaaatatttaccaaacatattaaattccaaaaccctttcaggcaatatcagacctaatmtcagaattttaatgtcccatacacttcaaatttgtaaaccttacaagcttattaagcttataattaaagaagaaaagaaagtgaagtactcataaatgga

SEQ ID NO: 478212 - DNA, 201 bp, Homo sapiens
cctgcactcagagtaagtcctcgctctgtaaccaaaatacctcgctctgtaggtattttgtcttcagacaagttgcttctcttaggcttcttctaaaaaayaaggattctgctaccttacttcactaagttgtttggaagatgtaatgagattacatgtttaaatgttcagagaaatagtaaagcaatggaataatttatt

SEQ ID NO: 478213 - DNA, 201 bp, Homo sapiens
gtaaccaaaatacctcgctctgtaggtattttgtcttcagacaagttgcttctcttaggcttcttctaaaaaataaggattctgctaccttacttcactargttgtttggaagatgtaatgagattacatgtttaaatgttcagagaaatagtaaagcaatggaataatttattcttgaactttattgctgaaaccatttt

SEQ ID NO: 478214 - DNA, 201 bp, Homo sapiens
tttattactataagacattcaattagctaaatatggtcatcgaccactacctgaaagaacattattataagagagagagaaaactagaactttcaatcagytttccacccagaaaaaaattggtcaccagaattctaaagagtaatgtatggcagacacatgaaaaaatgatcatcatcactggccatcagagaaatgcaa

SEQ ID NO: 478215 - DNA, 201 bp, Homo sapiens
cagcatgggcaacagagcaagaccctgactccccaaaaatttcaatttaaaatgtgagaatgaagagagatacaaacaaaaaacaaacctaattggtcaaygaaatatgagcttaagccaagaaagaaaagaaacagcatgaagtacaataaagtacatggggaaatagatctataacagagccttttgctctttcatatc

SEQ ID NO: 478216 - DNA, 201 bp, Homo sapiens
ttcagacaagttgcttctcttaggcttcttctaaaaaataaggattctgctaccttacttcactaagttgtttggaagatgtaatgagattacatgtttawatgttcagagaaatagtaaagcaatggaataatttattcttgaactttattgctgaaaccattttggaatcccaaataatgctcggtgtgtgtttttctg

SEQ ID NO: 478217 - DNA, 201 bp, Homo sapiens
tttagtgagctcatcactgagctcatcaatcacaccaagggcagaaaactaataggtgtcaaaacctggcttggacaactaccactccttctctacctccycaaactctgagccagcagatctgtgcttggctgctggatctccatggtcctctccaactaacagacaagacaaaaccctgctttgattgtttttcagttc

SEQ ID NO: 478218 - DNA, 201 bp, Homo sapiens
cagcagatctgtgcttggctgctggatctccatggtcctctccaactaacagacaagacaaaaccctgctttgattgtttttcagttccatgaaggaaatrcaagttgacattttctcatttccaagacatgtactaacaacatgtaacatccccttattactcagctctgttcccatttcagagatcaccatacatcaat

SEQ ID NO: 478219 - DNA, 201 bp, Homo sapiens
actgatgacctatttctattttatttcctttttaattatggcataatttctcaacataacatatcaaaacttatacacccttaaatattaaaaaatacaaygtaagcaatattttaaatacaatatttaattattagatacattaggtttattatattacttataacattccattatataaaaattcatttgtctatttat

SEQ ID NO: 478220 - DNA, 201 bp, Homo sapiens
ctaacaacatgtaacatccccttattactcagctctgttcccatttcagagatcaccatacatcaatagtttcatagcgataatcacaatttcaatattgygtgtcacctgttttggttttgctcacactgcttccttggagctactcaacaaatagtcaaatggccttcctgggactaggcaaaatatggaatgttttct

SEQ ID NO: 478221 - DNA, 201 bp, Homo sapiens
tttgtgtgccatccctaggcagtagccatgcttatctgctctgtattgatccaattttaaaatatgtgctgttgaaataagtacaaagccctgtttgatamatggatactcatgagtcatggatgaggcttagctctattaaatccaactcacttacttcagattcagagaattttattgaatggcttcctgtgaggtaga

SEQ ID NO: 478222 - DNA, 201 bp, Homo sapiens
tcatggatgaggcttagctctattaaatccaactcacttacttcagattcagagaattttattgaatggcttcctgtgaggtagaattttaaaatatattkaaaacttgaggaagagctgcaagtagcccaggagattttcatgattatagagacacattacttgaggggccaactgcaagctggttcccactactcagtg

SEQ ID NO: 478223 - DNA, 201 bp, Homo sapiens
gttaaaggaaagacaaacatggctctcaaaggataacataccatgaaggcctaggcaaagtctagctaagacgtgggctccaaataaggtttttagtgtasggtgagcatcaacttgctcaatacttgtgtggataaagctaggaggcctagctgccagagcagggtgctgggaacaatgaccgagcacaagtacataaac

SEQ ID NO: 478224 - DNA, 201 bp, Homo sapiens
gcaatccctcatgacagaatctagttgtaagtgagtcacatcatcataatacaggctgttatcaaccccatcagtcaaaggaagaggatcagtgaggaacmtatgtatttacctatagcattcactgcctggtcttatttccaaccgaaggtaagtatgaaagactttgtgattccagttttataaagtacaaccccttgc

SEQ ID NO: 478225 - DNA, 201 bp, Homo sapiens
ctcaaaggataacataccatgaaggcctaggcaaagtctagctaagacgtgggctccaaataaggtttttagtgtacggtgagcatcaacttgctcaatayttgtgtggataaagctaggaggcctagctgccagagcagggtgctgggaacaatgaccgagcacaagtacataaactaataaacaccgtagctttgacct

SEQ ID NO: 478226 - DNA, 201 bp, Homo sapiens
tgacaccttcagatgtctctcacacaaactatatctgcagatgactgtcatccaaaactaggctaaagagtctaacatctgtttccccacactttttatawttatttcttaatactttcaattcaccttcttattacatatattttatacattcattaacctattgttcattatgtgtaacatataattaatgcccttaat

SEQ ID NO: 478227 - DNA, 201 bp, Homo sapiens
cttattgatatataaaatatcggggcatcacgcaatccatgagaccttacattaagtagaatatggtatactcagcaggtctagggcagttctaggcatgyaactgaaacttaaatacattttagttcttaaaggtactatggggaaagagcactgaaataacaataatgcattttttaaacaaattaattctttgatttt

SEQ ID NO: 478228 - DNA, 201 bp, Homo sapiens
tgtacctgctctcaatgtctgtacattctttctttgtactgctcctttcacagcaggatcttccactccagtggtaggctgaatgggttttaaaagaaaaygattcataaatcatatatgttttatacaacatggagttagtgattcaaaaatatacataattaattaccttcaaggaaggatgttttgcaggaggcccta

SEQ ID NO: 478229 - DNA, 201 bp, Homo sapiens
taaagatcatgcatgagctgagacttagagagtaaggttagccagattaagtgaggcagagggcaagaaagggtgagcacatgccaggcagcaacaagagrgggagagaagcctccaagagagtatgtatttctctgcaaaagaggaatggtgagggggccattaccagcagctcagtaattccagagaaaaaggcagatg

SEQ ID NO: 478230 - DNA, 201 bp, Homo sapiens
aagcaagcaatcattcctgctgatgacacaattcaattctcacaccctatctgctggtaacatcagattcaatttaatttataaattaaactttagcatasatatgtatgtatagggaaaaacagtttgtgattcagtactattcatggtttcatgcatccactgggggtctcggaatgtatctcccacagttaaggggga

SEQ ID NO: 478231 - DNA, 201 bp, Homo sapiens
aggccttattaggtctattacatcaaaatcttcaggggaaagcctacaattgtagatttttaacaaaatgtcctcaggtcactgtaatgcacaattctgaraattagtgcagcaatcacttcagtctcacctctcacccacatggctaattcctttatcagttggagatgtggccaaaaagagaaaagagtaagagagagt

SEQ ID NO: 478232 - DNA, 201 bp, Homo sapiens
tgttatgtaaaataaaatgttaattctagacataaggggaaaaagaaattaaaactataggggtgaaaaaatattgcataatttattactgttgacctgaycatatgactgattaagggcactgaatttaacttgtatgtgaagtagaccccatattagctgcagttaatcaatagaccaggtattctagcagaattaaat

SEQ ID NO: 478233 - DNA, 201 bp, Homo sapiens
aggtaaaggctctgacactttctcggggacacactgctaaggtaatatcaagaattagtttccattttaaaattataatgagttgcatcaagagtttcttrtcaatctctttttatgaaactgggtctcactctgtcaacccagggctagaatgcaggggcctgattatggctcactgtggtctcaaactcctgacctcaa

SEQ ID NO: 478234 - DNA, 201 bp, Homo sapiens
aataaggtttttagtgtacggtgagcatcaacttgctcaatacttgtgtggataaagctaggaggcctagctgccagagcagggtgctgggaacaatgacygagcacaagtacataaactaataaacaccgtagctttgacctctatatatgaatcaccatgaaaactgaggggtctgaatcagtgaaggcatcctggtgg

SEQ ID NO: 478235 - DNA, 201 bp, Homo sapiens
ttcatgattatagagacacattacttgaggggccaactgcaagctggttcccactactcagtggaaagataacatggaacattccgctatctaaccaaagstgctgcacaggatataaaaaagcctcaaggtacagatctgatagcaaaagagacagggaactctgatctcttcctgcaacattatttgaacatccctgac

SEQ ID NO: 478236 - DNA, 201 bp, Homo sapiens
tgaaggcatcctggtggcaaaggtcaatcattatcagattgcaggaccggttataatggcaataatacagcaagtgagtccatggaaacaacagaatgatyagaatggccttttttccccttcttctgacttgtgaagaaagattgccttccttggacttaggaaaccccttagcttcttggaaaattcaaagaaggaaga

SEQ ID NO: 478237 - DNA, 201 bp, Homo sapiens
cagattgcaggaccggttataatggcaataatacagcaagtgagtccatggaaacaacagaatgatcagaatggccttttttccccttcttctgacttgtraagaaagattgccttccttggacttaggaaaccccttagcttcttggaaaattcaaagaaggaagacacaggagagagccccaggggacaagattttctg

SEQ ID NO: 478238 - DNA, 201 bp, Homo sapiens
ctgacttgtgaagaaagattgccttccttggacttaggaaaccccttagcttcttggaaaattcaaagaaggaagacacaggagagagccccaggggacawgattttctgttaaactggacattacaagactcaataactaattagaaaagtcaggccaggcatggtggctagcactttcagaggccgaggcagggggatt

SEQ ID NO: 478239 - DNA, 201 bp, Homo sapiens
acttgtgaagaaagattgccttccttggacttaggaaaccccttagcttcttggaaaattcaaagaaggaagacacaggagagagccccaggggacaagaytttctgttaaactggacattacaagactcaataactaattagaaaagtcaggccaggcatggtggctagcactttcagaggccgaggcagggggattact

SEQ ID NO: 478240 - DNA, 201 bp, Homo sapiens
cccaggggacaagattttctgttaaactggacattacaagactcaataactaattagaaaagtcaggccaggcatggtggctagcactttcagaggccgargcagggggattacttgacctcaaaagttcaagaccagccagggcaacagagtgagaccttgtctctacaaaaaaaaaaaaaaaaaaaggaaaggaaagga

SEQ ID NO: 478241 - DNA, 201 bp, Homo sapiens
aaagttcaagaccagccagggcaacagagtgagaccttgtctctacaaaaaaaaaaaaaaaaaaaggaaaggaaaggaaaagaaatcaaagacatggctcyttttatcccatgcatggggattatacttagaataaaatgaataacattgagatccctagggataaaggtctcaaaaatccagaaaaaatcttgcactcta

SEQ ID NO: 478242 - DNA, 201 bp, Homo sapiens
tgttgttagagacaagagtctcactatgttgctcaagctggattcaaactcttaggctcaagctgggactacaggaatacaccactttgcccagcttcaaraaaacatttttaaacatgttcaggccttattaggtctattacatcaaaatcttcaggggaaagcctacaattgtagatttttaacaaaatgtcctcaggt

SEQ ID NO: 478243 - DNA, 201 bp, Homo sapiens
aaaggaaaggaaaagaaatcaaagacatggctccttttatcccatgcatggggattatacttagaataaaatgaataacattgagatccctagggataaakgtctcaaaaatccagaaaaaatcttgcactctacttctaactaatctagacttctgcttgatttctggctaaaaggcagactaactcttcgctatttcaa

SEQ ID NO: 478244 - DNA, 201 bp, Homo sapiens
tttttggctattattgttgttagagacaagagtctcactatgttgctcaagctggattcaaactcttaggctcaagctgggactacaggaatacaccactktgcccagcttcaagaaaacatttttaaacatgttcaggccttattaggtctattacatcaaaatcttcaggggaaagcctacaattgtagatttttaaca

SEQ ID NO: 478245 - DNA, 201 bp, Homo sapiens
cgggcgccagcatgggctggcggggctcccctggacggccctcaggtcgctcacagcattgtcccaggacttcctccgcctgtgccaggtgggcaaggtasgggggagcttccaaggcttctatcccaactctacctatttctacctattttctcttgagttattttgcctttatctcagttttatttgcaaaaatagtat

SEQ ID NO: 478246 - DNA, 201 bp, Homo sapiens
acattgagatccctagggataaaggtctcaaaaatccagaaaaaatcttgcactctacttctaactaatctagacttctgcttgatttctggctaaaaggyagactaactcttcgctatttcaaactatctgaaccaaactatgaactctcacctaatgtataagatggagtagttgcaattattttaaacttcaatttag

SEQ ID NO: 478247 - DNA, 201 bp, Homo sapiens
aaaatcttgcactctacttctaactaatctagacttctgcttgatttctggctaaaaggcagactaactcttcgctatttcaaactatctgaaccaaactrtgaactctcacctaatgtataagatggagtagttgcaattattttaaacttcaatttagcattaactggccttttaacataaacacttactttgtcaaat

SEQ ID NO: 478248 - DNA, 201 bp, Homo sapiens
gctcatgagtcacagttctaagggcatttataaaatatggtggtgcatgcttgtattctgaacttttcaactttaaactctcatatagtaaatattaataratacaaactgattaaagaaaagcccacttaatctgacattatttttatttttctttctttcttcatttatcagcaacaggagagtctaactaaatgtggt

SEQ ID NO: 478249 - DNA, 201 bp, Homo sapiens
gctcgctaccaccaggccttcgccgaccgcgaccagtcggagcggcagcggcacgagagccagcagctggccacagagacccaggcgctggcgcagcgcaygcagcaagactccacgcgcacagtgggcgagcgactgcaggacacgcacagctggaagtcggagctgcagcgtgagatggaggcgctggctgcggagacc

SEQ ID NO: 478250 - DNA, 201 bp, Homo sapiens
ttgccccagaagacccctgacttccaagcagctgtttctcctctcctcctctaatccctttgagtcctggcacagtcatcctgaccctgggctccctgggmtaagccacaaggcacctccccagagaccctccctcgctgggacagttgctcccaaggtggaaacccaggtctgggccagcactgcaggtgtggacaggta

SEQ ID NO: 478251 - DNA, 201 bp, Homo sapiens
agtctagactgataagattcaatgtcagcttccagtcttttcttgctttctttttccttcaacagttcggcattgagccttgtattctcagccttgagatmattaagctcttgttgataccggaatgctgtttctgttatcatttcctcattgagttttatatacttttcaagggcagcatttgtttctttaacaatttta

SEQ ID NO: 478252 - DNA, 201 bp, Homo sapiens
tgaactctcacctaatgtataagatggagtagttgcaattattttaaacttcaatttagcattaactggccttttaacataaacacttactttgtcaaatratgagaaatagcataatcttctgcatctcgtccacacatgtcttgagcgaagacatcaatattttgcttaagaaggatattgacaatacctggtgagtca

SEQ ID NO: 478253 - DNA, 201 bp, Homo sapiens
ggcaaagatttagatgaagatttccccattgctttcctagtcaaatcagctaggggtcagataagagttatctgcaggctgaaaacaacaacaacaacaayaataataatgacaatgctagtagtcataaactaaaagtccacactttaaaaatgaataaaacttgtcaggtgcagtgtctcatgcctgtaatcccagcac

SEQ ID NO: 478254 - DNA, 201 bp, Homo sapiens
ataagcaaatttctgaagactctctgaatggtagtgaatgattcatggtgggaaggaaaacatgttattctgtaagctgagagatattgccaatgatattwcctttcacttcccagtcacagatgtagagaaagacagataagtcaggctaatattattgaaaaggagaactttgaaggaagtggcaactatcaaatgcca

SEQ ID NO: 478255 - DNA, 201 bp, Homo sapiens
atagaaaggaagtaaatgaaaagcagtcccttccttctcactcctctgtgctttctgatgtgctgcgctctgccttgcaaacaaccctcctctgtctcccyggattaactgtggtgattgccaaaactcactttaaacatttaccagtcccaagaatccttgctttgatcacagcacttagcatggtacattgtagtcatt

SEQ ID NO: 478256 - DNA, 201 bp, Homo sapiens
acagcaagcatgagagctgacctaaaacaacaaagaaataactccactcaagaactttaataaagacttttttaaaaagctagtttgatacactttaccartttaatatccgcctgtcagtatagatgtaataaccatttgcatgtactagcttgggtctataagcatctagggtgctcaagtgttcatctttgtaaattg

SEQ ID NO: 478257 - DNA, 201 bp, Homo sapiens
tctgtgctttctgatgtgctgcgctctgccttgcaaacaaccctcctctgtctccccggattaactgtggtgattgccaaaactcactttaaacatttacyagtcccaagaatccttgctttgatcacagcacttagcatggtacattgtagtcatttcactgtttcccactgaaaccaagagcttcttgaggcaagggcc

SEQ ID NO: 478258 - DNA, 201 bp, Homo sapiens
tttctgatgtgctgcgctctgccttgcaaacaaccctcctctgtctccccggattaactgtggtgattgccaaaactcactttaaacatttaccagtcccmagaatccttgctttgatcacagcacttagcatggtacattgtagtcatttcactgtttcccactgaaaccaagagcttcttgaggcaagggcctaaaacc

SEQ ID NO: 478259 - DNA, 201 bp, Homo sapiens
caccaccacactcagttatttttctacaatttttaattttttttgtctcactacagaaccaataatataagtagaaaaacaatctctcgtaaaaacaatakgataccaaaataataagtttccaagatcaaaagctatatgctatgtgctgaatatttttgccactaaaaatcaccaggaggatcccatgattactgcaaa

SEQ ID NO: 478260 - DNA, 201 bp, Homo sapiens
acaaccctcctctgtctccccggattaactgtggtgattgccaaaactcactttaaacatttaccagtcccaagaatccttgctttgatcacagcacttakcatggtacattgtagtcatttcactgtttcccactgaaaccaagagcttcttgaggcaagggcctaaaaccctaagacacagtagcaaatattttaagtt

SEQ ID NO: 478261 - DNA, 201 bp, Homo sapiens
actacaggtgtacaccaccacactcagttatttttctacaatttttaattttttttgtctcactacagaaccaataatataagtagaaaaacaatctctcrtaaaaacaataggataccaaaataataagtttccaagatcaaaagctatatgctatgtgctgaatatttttgccactaaaaatcaccaggaggatcccat

SEQ ID NO: 478262 - DNA, 201 bp, Homo sapiens
attgtagtcatttcactgtttcccactgaaaccaagagcttcttgaggcaagggcctaaaaccctaagacacagtagcaaatattttaagttttttacatwaattaatgatctaaattactatctctaaagcagtgtttcttaaactatattccaaagaatatttgctttatcagaagtattataccccaagagaaagact

SEQ ID NO: 478263 - DNA, 201 bp, Homo sapiens
agcgcacagcccacctggcctcaaaggtccgctcctcttggacacctttctggatcctgggccctggcgctgggcactctgtatccacacggatgaaacarcggctgctggcggggccggttgcctgattttgccgcctgggggtctggcctcaggatccacgctactggggggcgggcatggtctggagtgtccagccac

SEQ ID NO: 478264 - DNA, 201 bp, Homo sapiens
gcttcttgaggcaagggcctaaaaccctaagacacagtagcaaatattttaagttttttacataaattaatgatctaaattactatctctaaagcagtgtytcttaaactatattccaaagaatatttgctttatcagaagtattataccccaagagaaagactccatgaccatctgtatttgagaagtattacaaaactg

SEQ ID NO: 478265 - DNA, 201 bp, Homo sapiens
gctcaagtaaatcttccacttctgcctcccaaagtgttgagataagcagtgtgcaccaccacacccagccctaatcaatttctttaaatcaatctcaatgytgcccaggcatggtggctcacacctgtaatctcagccctttgcaaggccaacgtgggtggattgcttgagttcaggagtttgagaccagcctgggcaaca

SEQ ID NO: 478266 - DNA, 201 bp, Homo sapiens
aagttttttacataaattaatgatctaaattactatctctaaagcagtgtttcttaaactatattccaaagaatatttgctttatcagaagtattataccscaagagaaagactccatgaccatctgtatttgagaagtattacaaaactgtattttatgtccaataatcaagaaatctctttaattttacctaatccccc

SEQ ID NO: 478267 - DNA, 201 bp, Homo sapiens
catgatggtgtgtgcctgtagtcccagctgcttgggaagctgatgtgggaggatcacttgagcctgagaggtggatactgcagtgagccaagatcatgccmctacactgcagcatgggcaacagagcaagaccctgactccccaaaaatttcaatttaaaatgtgagaatgaagagagatacaaacaaaaaacaaacctaa

SEQ ID NO: 478268 - DNA, 201 bp, Homo sapiens
aagtattataccccaagagaaagactccatgaccatctgtatttgagaagtattacaaaactgtattttatgtccaataatcaagaaatctctttaatttyacctaatccccctttgacaatactatttgtggcaaacattaacatttgaggaattaagagtttcagagatacagttgccagagcttcccaatacaggtgg

SEQ ID NO: 478269 - DNA, 201 bp, Homo sapiens
aatacaatatttaattattagatacattaggtttattatattacttataacattccattatataaaaattcatttgtctatttattcagattaaacaactrttaaggctgaatgtcttatgcctgtaacccagcactttgagaggctgaggcaggcagaacacttgagcccaacagttaaagaccagcctgggcaacaagg

SEQ ID NO: 478270 - DNA, 201 bp, Homo sapiens
ataggtattcaggagtggttcacagatctatttgcattagagataattaactctaattattgtgaggagcataaaattctgaggcacataaatcaatgaasaaagataaaatataaggcagtgttgcaaagatgctgcaggcctgaggagatgttttcagaaatatttaggatacaagtatcagtggccattataagaatg

SEQ ID NO: 478271 - DNA, 201 bp, Homo sapiens
caccttccagaagcttctcaactaattcatgacaatttgaatgccccgttctacactgatgtgcttccatattggtttaccctaattgcccttttgccctmgcctcaatttcttccctattatgtccctcaatttaatactacattgtaagccataatgtttctaatgaacttttaatcaggcaatacttctcaaattaat

SEQ ID NO: 478272 - DNA, 201 bp, Homo sapiens
ttttttttggcaggtgcaaaatggaaaacaaatttgcttgttttgtttctcagatgtcttttctgtcagagtgcatgttttaaaattagctttaatcaagyataaacaaaaatactagaaaataattaaaatttaactgtgaaacttaatctatgtgttgccactcttaaattataggattgtaactaaaaagtgaaaaat

SEQ ID NO: 478273 - DNA, 201 bp, Homo sapiens
catgttatgtaaaataaaatgttaattctagacataaggggaaaaagaaattaaaactataggggtgaaaaaatattgcataatttattactgttgacctsatcatatgactgattaagggcactgaatttaacttgtatgtgaagtagaccccatattagctgcagttaatcaatagaccaggtattctagcagaattaa

SEQ ID NO: 478274 - DNA, 201 bp, Homo sapiens
tttggaaagaaagttgattgatctataccttgtccagtgcttcaatgtgtgcaccatgggaaagcagtttttctgccagtgaggtgctctcactatacacrgcataatggagagcagtgttgccgtagatatccttaaggtttggattggcgccatgtttcagcagaataacggcacaagcctcttcctggcaatggacag

SEQ ID NO: 478275 - DNA, 201 bp, Homo sapiens
taatgtattttaaaagtcctgtaattgctattaactcagacaagtttacttaacttgttctaagcttctgttatttactacaatttactttatcactcaayaatctctattatatatgttgttttccatgagaaatttttttattaataattaggattcttcagggataagaaaatatttgaataactaagtttgtgcata

SEQ ID NO: 478276 - DNA, 201 bp, Homo sapiens
ctgagcatggtgacacaggtctatggtgacatagctctattgtttcaactactgggatggctgaggtgtgaggatcacctgagcccaggaaatggagatcrgagtgagccaagatctcaccagtgccctccagcctgggggacagaatgaaaccccatctcaaaaaacaacaagtaaaatgcttcttacatggaagaatgt

SEQ ID NO: 478277 - DNA, 201 bp, Homo sapiens
cacaggtctatggtgacatagctctattgtttcaactactgggatggctgaggtgtgaggatcacctgagcccaggaaatggagatcggagtgagccaagrtctcaccagtgccctccagcctgggggacagaatgaaaccccatctcaaaaaacaacaagtaaaatgcttcttacatggaagaatgtattctaggtactc

SEQ ID NO: 478278 - DNA, 201 bp, Homo sapiens
tagtcattcctatatacattcattgatgaactcatctagttaccacaattttgaaaaagaaatgttaaaaatataagcaagctacaggattttccccaggwcttctgactctacttctagttctccaacagatcacagttacttctgtggtgtaaatacatcaatacgaaagaaaacttttatttcaaaacaccaatagta

SEQ ID NO: 478279 - DNA, 201 bp, Homo sapiens
atgaatacaagaaaaaagaatctagaatctagagcttgtttctttagcaatttctttatgttgatctggttcagaaggtcacatggtatgtggctgaattrgtttcccagctcatacgccacttggaagactgatagtgagacataggttgattaatgaacaaacattatgagaacattctccagaaccattatttagata

SEQ ID NO: 478280 - DNA, 201 bp, Homo sapiens
cacttaaatggctacttaaaattattttttattttagacaaaatataaatcggaaataaaaacataatggcttatcaatagaagttctcatactgatccayatggattatttctggcattatacaagccaataagtcacttgcatctttaaggaagagcactgaggagaaagatgtactgtctgcaatattcgtaaattat

SEQ ID NO: 478281 - DNA, 201 bp, Homo sapiens
gtctgtgtggctagtgtaaggtagctggagaggcatggaggcagagtcaggggctgctccttcccccacccgccctcactgctgccagtgccacacgcgcrgtttgcaactgcagatctggcactggcgcaggatggcggagcttcccttggatggcctcagggccgcagagcgcacagcccacctggcctcaaaggtccg

SEQ ID NO: 478282 - DNA, 201 bp, Homo sapiens
ggcgtcaggtttgcgggcacagagcacagcccaccagacctgaaggtctgctcaggggccatagtggttgagttctccatggaaactgggatggggtgaamggccagttcccgtcctttggccgcctggccaactgccagacttaaccgctgccgcccaggcatctgtctctagcgttgctgctacttgggtagaagtggg

SEQ ID NO: 478283 - DNA, 201 bp, Homo sapiens
cctaatccccctttgacaatactatttgtggcaaacattaacatttgaggaattaagagtttcagagatacagttgccagagcttcccaatacaggtggcrgtttcctctgggtggtacaaacttgcttgattcacttctatcaatggtgtcaggatcccagatgccaatgtcaggcactcctgctccaaatgggtcacca

SEQ ID NO: 478284 - DNA, 201 bp, Homo sapiens
aaggtgagttttgtctgttttcaccatttatgtaagtgaaactataaattatataatttttatgttcactcactaaacatgcttgtgacacatcattttgytattattcattaattttattttgtaatactcaattttatgactataccacaggtttgaggcctttgctattgatagacacaaaagcagtttctgatttga

SEQ ID NO: 478285 - DNA, 201 bp, Homo sapiens
atccccctttgacaatactatttgtggcaaacattaacatttgaggaattaagagtttcagagatacagttgccagagcttcccaatacaggtggcggttycctctgggtggtacaaacttgcttgattcacttctatcaatggtgtcaggatcccagatgccaatgtcaggcactcctgctccaaatgggtcaccatgga

SEQ ID NO: 478286 - DNA, 201 bp, Homo sapiens
cattttgctattattcattaattttattttgtaatactcaattttatgactataccacaggtttgaggcctttgctattgatagacacaaaagcagtttcygatttgaggctatcatgaataaacctgctacgaacaaatcagatatacatgtttttctgtaataatattttcacttttcttgagtttaagtacataagag

SEQ ID NO: 478287 - DNA, 201 bp, Homo sapiens
cccaggctggtctcaaactcctggcatcaagcaatcctctcacctcagcctcccaaagttctgggattacaggtgtgagccactgcacccagccagatatwataattattactattactactaaacaaaaccattttaattaggtagaatgatacaattatacctactttgcaagatgacttaacgagtaggtcacatttt

SEQ ID NO: 478288 - DNA, 201 bp, Homo sapiens
taacatttgaggaattaagagtttcagagatacagttgccagagcttcccaatacaggtggcggtttcctctgggtggtacaaacttgcttgattcacttytatcaatggtgtcaggatcccagatgccaatgtcaggcactcctgctccaaatgggtcaccatggaaatgagctttgaattaagagagattgccttcaaa

SEQ ID NO: 478289 - DNA, 201 bp, Homo sapiens
tgtgtggtggtctaataatcatagccttaaaactttctggctgggcatggtggctcatggctgtaatcccagcacttcgagaggctgaggtgggcggatcmcctgaggtcgggagttcgagaccagcctgaccaacgtggagaaacccccaactctactaaaaataaaaaattagctgggcgtggtggcacatgcctgtaa

SEQ ID NO: 478290 - DNA, 201 bp, Homo sapiens
ttcacttctatcaatggtgtcaggatcccagatgccaatgtcaggcactcctgctccaaatgggtcaccatggaaatgagctttgaattaagagagattgscttcaaatgcatttattttccttattattaaatagtccatgggtttttcccctaatacaagagaagagatttttatctttactgttagaaagctcagtat

SEQ ID NO: 478291 - DNA, 201 bp, Homo sapiens
ctgctttctggagatgccaactgccctccccatctctgggtcctgaccaaggtgctctaatggacaccccctgacccaggtctcagggagctgccagcacsatgggtccctaaagctgagatccagcaagacacatgtggcctgagggtcccactctctggctggcagaacccagaggtgggagcacactggagtgtcctt

SEQ ID NO: 478292 - DNA, 201 bp, Homo sapiens
catgggtttttcccctaatacaagagaagagatttttatctttactgttagaaagctcagtatattctgtgtaagagagataggtttaaaaaacttaagarcaaatattttaaaaaccaaaactcagtaagaaatactattctcaattataatggtaatcccgggaccctagtgcagctctactttttaaatccattttta

SEQ ID NO: 478293 - DNA, 201 bp, Homo sapiens
ttctaaacagggatttagcacaatatgaaaactagactattcatgtaatcaaaataaaagacaatttttattctaattttaactcagaaattattttgctyatttaatttaacaattttactgaaaggttaatgagataaataggacagattataattacctaacattgctatggtaacttatatacaaatagctgttcat

SEQ ID NO: 478294 - DNA, 201 bp, Homo sapiens
atgggtttttcccctaatacaagagaagagatttttatctttactgttagaaagctcagtatattctgtgtaagagagataggtttaaaaaacttaagaasaaatattttaaaaaccaaaactcagtaagaaatactattctcaattataatggtaatcccgggaccctagtgcagctctactttttaaatccatttttac

SEQ ID NO: 478295 - DNA, 201 bp, Homo sapiens
tttatctcagttttatttgcaaaaatagtatacgcaaaatacatcgagtgaatgcacatcaggcatatagaagatctggcagaaacatgttttctcctgcycatttccagtcagtatttgaacacagaggcttccacggttttgattctttccacaaaaggtgagttttgtctgttttcaccatttatgtaagtgaaacta

SEQ ID NO: 478296 - DNA, 201 bp, Homo sapiens
cccgggaccctagtgcagctctactttttaaatccatttttactggcttccacttaaatggctacttaaaattattttttattttagacaaaatataaatyggaaataaaaacataatggcttatcaatagaagttctcatactgatccatatggattatttctggcattatacaagccaataagtcacttgcatctttaa

SEQ ID NO: 478297 - DNA, 201 bp, Homo sapiens
cgggaccctagtgcagctctactttttaaatccatttttactggcttccacttaaatggctacttaaaattattttttattttagacaaaatataaatcgraaataaaaacataatggcttatcaatagaagttctcatactgatccatatggattatttctggcattatacaagccaataagtcacttgcatctttaagg

SEQ ID NO: 478298 - DNA, 201 bp, Homo sapiens
ccaccttctgctgaagtgtttctcacttcgtcaccacatattcactgccaatctagtttcctcagagtcctcctaaaattcgtctctaggcaagttgcaaytcattctttttcaaaccaaaaattattagacccaaagctaaacagcaccttgtctaaacacataaaacaaacttaaaaaaaaaaaaaaaaacctcttcct

SEQ ID NO: 478299 - DNA, 201 bp, Homo sapiens
tttccccaggacttctgactctacttctagttctccaacagatcacagttacttctgtggtgtaaatacatcaatacgaaagaaaacttttatttcaaaayaccaatagtaaataagataaaatttatagagctcttcttagaatatcatgagattatttgtgattgcaataatttctgtttcctctttataatattaggt

SEQ ID NO: 478300 - DNA, 201 bp, Homo sapiens
aactactgggatggctgaggtgtgaggatcacctgagcccaggaaatggagatcggagtgagccaagatctcaccagtgccctccagcctgggggacagartgaaaccccatctcaaaaaacaacaagtaaaatgcttcttacatggaagaatgtattctaggtactccaggatacacacaaatatgtttactgacctcca

SEQ ID NO: 478301 - DNA, 201 bp, Homo sapiens
aatccatttttactggcttccacttaaatggctacttaaaattattttttattttagacaaaatataaatcggaaataaaaacataatggcttatcaataraagttctcatactgatccatatggattatttctggcattatacaagccaataagtcacttgcatctttaaggaagagcactgaggagaaagatgtactgt

SEQ ID NO: 478302 - DNA, 201 bp, Homo sapiens
aattattttttattttagacaaaatataaatcggaaataaaaacataatggcttatcaatagaagttctcatactgatccatatggattatttctggcatwatacaagccaataagtcacttgcatctttaaggaagagcactgaggagaaagatgtactgtctgcaatattcgtaaattatccaactataaccaggaata

SEQ ID NO: 478303 - DNA, 201 bp, Homo sapiens
atttcaatattgcgtgtcacctgttttggttttgctcacactgcttccttggagctactcaacaaatagtcaaatggccttcctgggactaggcaaaatayggaatgttttctgaatttgtgtgccatccctaggcagtagccatgcttatctgctctgtattgatccaattttaaaatatgtgctgttgaaataagtaca

SEQ ID NO: 478304 - DNA, 201 bp, Homo sapiens
gaattttaatgtcccatacacttcaaatttgtaaaccttacaagcttattaagcttataattaaagaagaaaagaaagtgaagtactcataaatggaggamgcacagctcagtaaatgaactctagttagctggatatcatgcaaagtgtcctgcactcagagtaagtcctcgctctgtaaccaaaatacctcgctctgta

SEQ ID NO: 478305 - DNA, 201 bp, Homo sapiens
aaccaaagctgctgcacaggatataaaaaagcctcaaggtacagatctgatagcaaaagagacagggaactctgatctcttcctgcaacattatttgaacwtccctgactattgagaacaatcccaactaatattggttaaaggaaagacaaacatggctctcaaaggataacataccatgaaggcctaggcaaagtctag

SEQ ID NO: 478306 - DNA, 201 bp, Homo sapiens
tctaaatgaatacaagaaaaaagaatctagaatctagagcttgtttctttagcaatttctttatgttgatctggttcagaaggtcacatggtatgtggctkaattagtttcccagctcatacgccacttggaagactgatagtgagacataggttgattaatgaacaaacattatgagaacattctccagaaccattattt

SEQ ID NO: 478307 - DNA, 201 bp, Homo sapiens
taggtattcaggagtggttcacagatctatttgcattagagataattaactctaattattgtgaggagcataaaattctgaggcacataaatcaatgaacraagataaaatataaggcagtgttgcaaagatgctgcaggcctgaggagatgttttcagaaatatttaggatacaagtatcagtggccattataagaatga

SEQ ID NO: 478308 - DNA, 201 bp, Homo sapiens
atgaggagaaaagggaccattaaacagaggagcaaatcaaacctgagggaatcgacatcaaagctgatggtgaatgtacagagtattttaactcaacacakcagaggcattgctgccagcatgccacaaacaaattccccttgtcttgtcactgaggaaatacacagttgggatgacagttcaggtgaatgtgtgattcac

SEQ ID NO: 478309 - DNA, 201 bp, Homo sapiens
ccaaaactgctgggattacaggtgagtctccacacctggtgaagtaaatattttaaataaactacaatgacaaaattatgatgataaagtcttaccatccrttggtattaagagtctctgcttctagaactggttatttgcagcaaaatacatgttattcaattagatgaagtgccttatataaactcttcatggacaact

SEQ ID NO: 478310 - DNA, 201 bp, Homo sapiens
accatccattggtattaagagtctctgcttctagaactggttatttgcagcaaaatacatgttattcaattagatgaagtgccttatataaactcttcatrgacaactcataaaccacacaaaaattcctttgcaatacacattttgagaacataaatttaaatttctatatttccacaatttatatttttaaatcagata

SEQ ID NO: 478311 - DNA, 201 bp, Homo sapiens
caggacttctgactctacttctagttctccaacagatcacagttacttctgtggtgtaaatacatcaatacgaaagaaaacttttatttcaaaacaccaayagtaaataagataaaatttatagagctcttcttagaatatcatgagattatttgtgattgcaataatttctgtttcctctttataatattaggtgcagta

SEQ ID NO: 478312 - DNA, 201 bp, Homo sapiens
ttaactgtggtgattgccaaaactcactttaaacatttaccagtcccaagaatccttgctttgatcacagcacttagcatggtacattgtagtcatttcaytgtttcccactgaaaccaagagcttcttgaggcaagggcctaaaaccctaagacacagtagcaaatattttaagttttttacataaattaatgatctaaa

SEQ ID NO: 478313 - DNA, 201 bp, Homo sapiens
aaatcggaaataaaaacataatggcttatcaatagaagttctcatactgatccatatggattatttctggcattatacaagccaataagtcacttgcatcyttaaggaagagcactgaggagaaagatgtactgtctgcaatattcgtaaattatccaactataaccaggaataacctaaaaaggcttctaggcattctta

SEQ ID NO: 478314 - DNA, 201 bp, Homo sapiens
attgcggtgtttctccaaatgatttacagagtgagatgacaccttcagatgtctctcacacaaactatatctgcagatgactgtcatccaaaactaggctraagagtctaacatctgtttccccacactttttataattatttcttaatactttcaattcaccttcttattacatatattttatacattcattaacctatt

SEQ ID NO: 478315 - DNA, 201 bp, Homo sapiens
ttcaccatcccctccctgaaacagcggtacccgaggcgctccacaggcagggccgagctgggcgagggggatctcagcccctgcacgggccgccctgagcrgcggggacgcaggaagaggtcgctggctccacccgcccctaccccagacgcgggacctcgcggccagcgaggacctggagcccccgccccacggctgcca

SEQ ID NO: 478316 - DNA, 201 bp, Homo sapiens
caaggtgatggaatgtgtgaatacagctgaggagacaccacaaggcaaacgctcaatggttcccattaatattggggaaatcaacattataatacagaaarccataggcattatttaatatttggttttggaaggtatttttagtgacagtgcatacagttgtacctaataattgcaaaattagagatgtaaaaataaaac

SEQ ID NO: 478317 - DNA, 201 bp, Homo sapiens
ctgatccatatggattatttctggcattatacaagccaataagtcacttgcatctttaaggaagagcactgaggagaaagatgtactgtctgcaatattcrtaaattatccaactataaccaggaataacctaaaaaggcttctaggcattcttatgggcagagaattatttgtggtatatataaagaaaagagttaaaaa

SEQ ID NO: 478318 - DNA, 201 bp, Homo sapiens
gggatcatgaggcaattaatcagctctaatccatagttgtttatttaataaacagcaggttataggaagacagatgttgtgatggctttatgagatgatawatgcatagaacatattaggatgtctagcccacaatacaacactcaacagatattcgtttcttccatctatattttcttagttaacataattttttaaatc

SEQ ID NO: 478319 - DNA, 201 bp, Homo sapiens
taaattatccaactataaccaggaataacctaaaaaggcttctaggcattcttatgggcagagaattatttgtggtatatataaagaaaagagttaaaaamttctaaactctaaaattcaactccataactgagggatttatatactctatagactatatattataaacaaatacatgctgacttaaaaaccttgaaattt

SEQ ID NO: 478320 - DNA, 201 bp, Homo sapiens
ttggtatctacaagtgaactgaagtatgcaagtcatcctagccaaaccctgtgagatcgagtaaaaatggtattgttagcagaacaggtgtgatgagtcamaagtgtcaaagagcatgatttctggaccacaatatgaggtgccattaaaacagagtatacagtagtatcccttatccactatatgtgcagaaagacacac

SEQ ID NO: 478321 - DNA, 201 bp, Homo sapiens
atttctggaccacaatatgaggtgccattaaaacagagtatacagtagtatcccttatccactatatgtgcagaaagacacacttgacacgtttttctctrctgtcacaccacagcaacaatcatcaacaaagaaggcttctgtgaccaaatatgtggagggtttttccccaccaacaagcaagcaatcattcctgctgat

SEQ ID NO: 478322 - DNA, 201 bp, Homo sapiens
agccaagcacggaaaggcagacattgcatgttctcacttgtttgtgggatctaaaaatcaaaacaattgaactcatggacatagtaagtactagggagctggggggggggaaggcaggggatgggtaatgggtacaaaaataggcagaaggaatgaataagacatactatttaataacacaacagggggactctagtcaat

SEQ ID NO: 478323 - DNA, 201 bp, Homo sapiens
gtttcatagcgataatcacaatttcaatattgcgtgtcacctgttttggttttgctcacactgcttccttggagctactcaacaaatagtcaaatggcctwcctgggactaggcaaaatatggaatgttttctgaatttgtgtgccatccctaggcagtagccatgcttatctgctctgtattgatccaattttaaaatat

SEQ ID NO: 478324 - DNA, 201 bp, Homo sapiens
aaactggagaatacctgccttctataaaggggcaacttctgcacagcagaccaaagaatgatagaaactcaggggacaccagatttgattttttaggataygcctgaagtccacatttcttcacgagtcttctaaattttacatgttgattcaacttatagaggaaaacaaacaaatctgtgtaccacattagaatatggc

SEQ ID NO: 478325 - DNA, 201 bp, Homo sapiens
tcatggacatagtaagtactagggagctggggggggggaaggcaggggatgggtaatgggtacaaaaataggcagaaggaatgaataagacatactatttrataacacaacagggggactctagtcaataattgttcatttaaaaataactaaaagaatgtaattggattgtaacacaaaggatacatgcttgaagggatg

SEQ ID NO: 478326 - DNA, 201 bp, Homo sapiens
ataagcctgaagtccacatttcttcacgagtcttctaaattttacatgttgattcaacttatagaggaaaacaaacaaatctgtgtaccacattagaatayggcccttgtgtttttatattcgccattaatgtgttactaaatggttgtgtataatccaagtatttgcatgtaaaatattttctttctctggtatcatatg

SEQ ID NO: 478327 - DNA, 201 bp, Homo sapiens
tatttaataacacaacagggggactctagtcaataattgttcatttaaaaataactaaaagaatgtaattggattgtaacacaaaggatacatgcttgaarggatggataccccaccctccatgatgtgattagttcacactgcatgcctgtatcgaaacatctcatgcaccccataaatatatatgcctattatatactc

SEQ ID NO: 478328 - DNA, 201 bp, Homo sapiens
tatgtaataaaaattgctaaaacgactcacaatacctgcttcaagaatttttccaacatgtattcatttaaaatatgtttgtatataattttcccagattrttaaccaaatagataattggttcacaagactgctaaaactaaattattaaaagaattcctatctatattcttagtaacttcatggatttcagtgtttaaa

SEQ ID NO: 478329 - DNA, 201 bp, Homo sapiens
atgtttgtatataattttcccagattgttaaccaaatagataattggttcacaagactgctaaaactaaattattaaaagaattcctatctatattcttaktaacttcatggatttcagtgtttaaaactgacattttgggtatgctaaagttctataaacttaaacatactgagatagttcataataaaacttcaactaa

SEQ ID NO: 478330 - DNA, 201 bp, Homo sapiens
catggatttcagtgtttaaaactgacattttgggtatgctaaagttctataaacttaaacatactgagatagttcataataaaacttcaactaaaaaaaawagtttaggatttgctactattctaattgagaaagcccaacttgtaatgaacatttgttgacacataatcacctgcgtggtgacaaagggacatgaaatca

SEQ ID NO: 478331 - DNA, 201 bp, Homo sapiens
aataaaaataaaggaactactgaaggttaggtcagagtcgaaatgcaaaaatactaattagagaataatgtgaatacaacaggaatcctgttggtgttctrtttgtattgtaaacagcagcagttcaattgttttgtcaaagcaatttcaattttaatcactgagctaaagaaatgggcaacactgacttccgtaatatag

SEQ ID NO: 478332 - DNA, 201 bp, Homo sapiens
accctccctgtgctaccaggctgctgttggggccaggagggcagggagagcagccacctgtacggcatcaagtaacactatcagtcagcacacccaacacbcacacgacagccacagccctctgccctgaggtggctgcaactgagcagagtctcctgtcttgttcaccctgagcgcggagctccgcacaggacaggatca

SEQ ID NO: 478333 - DNA, 201 bp, Homo sapiens
gtcgaaatgcaaaaatactaattagagaataatgtgaatacaacaggaatcctgttggtgttctatttgtattgtaaacagcagcagttcaattgttttgwcaaagcaatttcaattttaatcactgagctaaagaaatgggcaacactgacttccgtaatataggttccacctaaccatctctaacaccgctgtcaagga

SEQ ID NO: 478334 - DNA, 201 bp, Homo sapiens
ggaatcctgttggtgttctatttgtattgtaaacagcagcagttcaattgttttgtcaaagcaatttcaattttaatcactgagctaaagaaatgggcaasactgacttccgtaatataggttccacctaaccatctctaacaccgctgtcaaggaggaccagtgttagggtacattattaacaaccacacaaatttttaa

SEQ ID NO: 478335 - DNA, 201 bp, Homo sapiens
taaccccactgtaactgtacacatgagattttcttgaatagaaaatttgactaaatcaaataattgataaagaggaaaaagaagcagcaagtgaacctctrtctttttgaagttggacttgcttttctccaaagccaggaactcaacttgtaacatgcctacctcattctttttttataattattattatactttaagttc

SEQ ID NO: 478336 - DNA, 201 bp, Homo sapiens
aaatttttaaaagaaaagaacactcttagcagcctatggtacttttaaatgaactattgcctctcattctaattctcacttgtgttgccattctaaaagtwtgaatttgctgagggttatattctgggtattatataaccattggttctacttggcataaccctactaaatggtgcttagagctgaattacctacagaaac

SEQ ID NO: 478337 - DNA, 201 bp, Homo sapiens
gctaaagttctataaacttaaacatactgagatagttcataataaaacttcaactaaaaaaaaaagtttaggatttgctactattctaattgagaaagccmaacttgtaatgaacatttgttgacacataatcacctgcgtggtgacaaagggacatgaaatcatgaaagggtcagcctctacctattgaaagattaccca

SEQ ID NO: 478338 - DNA, 201 bp, Homo sapiens
tgaactattgcctctcattctaattctcacttgtgttgccattctaaaagtttgaatttgctgagggttatattctgggtattatataaccattggttctrcttggcataaccctactaaatggtgcttagagctgaattacctacagaaactttctggtttaattagcataaatattagtgagcccatacttctgtgata

SEQ ID NO: 478339 - DNA, 201 bp, Homo sapiens
agatttcttacatttttgagatacagaaatttatatattgcacttatctattctggggtttttaatcaagagtgtatcccaaccttgaaggttttttgttwttttgtgtgtggttttttttttttttttttttttggctattattgttgttagagacaagagtctcactatgttgctcaagctggattcaaactcttaggc

SEQ ID NO: 478340 - DNA, 201 bp, Homo sapiens
cacttgtgttgccattctaaaagtttgaatttgctgagggttatattctgggtattatataaccattggttctacttggcataaccctactaaatggtgcktagagctgaattacctacagaaactttctggtttaattagcataaatattagtgagcccatacttctgtgatataattattaaaccaacttaatgattct

SEQ ID NO: 478341 - DNA, 201 bp, Homo sapiens
catttttgagatacagaaatttatatattgcacttatctattctggggtttttaatcaagagtgtatcccaaccttgaaggttttttgttattttgtgtgkggttttttttttttttttttttttggctattattgttgttagagacaagagtctcactatgttgctcaagctggattcaaactcttaggctcaagctggg

SEQ ID NO: 478342 - DNA, 201 bp, Homo sapiens
gtctcactatgttgctcaagctggattcaaactcttaggctcaagctgggactacaggaatacaccactttgcccagcttcaagaaaacatttttaaacaygttcaggccttattaggtctattacatcaaaatcttcaggggaaagcctacaattgtagatttttaacaaaatgtcctcaggtcactgtaatgcacaatt

SEQ ID NO: 478343 - DNA, 201 bp, Homo sapiens
ttctgggtattatataaccattggttctacttggcataaccctactaaatggtgcttagagctgaattacctacagaaactttctggtttaattagcataratattagtgagcccatacttctgtgatataattattaaaccaacttaatgattctcacataaggtgtgaattttactaatgcattcataatctatgcttt

SEQ ID NO: 478344 - DNA, 201 bp, Homo sapiens
aaaaggcactcaagacgagactatttctatacttaaatgctgctggcaagtgaattcctttgtatataaatgaaagataccattcattaagatgaaagacktgttttaagtgtggttcttacatttcattcatgatagagtaaatggctttataattactttaaaatttaactcactagtatgttaaatctgttcattgca

SEQ ID NO: 478345 - DNA, 201 bp, Homo sapiens
gctcaagctggattcaaactcttaggctcaagctgggactacaggaatacaccactttgcccagcttcaagaaaacatttttaaacatgttcaggccttawtaggtctattacatcaaaatcttcaggggaaagcctacaattgtagatttttaacaaaatgtcctcaggtcactgtaatgcacaattctgagaattagtg

SEQ ID NO: 478346 - DNA, 201 bp, Homo sapiens
gaaaacatttttaaacatgttcaggccttattaggtctattacatcaaaatcttcaggggaaagcctacaattgtagatttttaacaaaatgtcctcaggtcactgtaatgcacaattctgagaattagtgcagcaatcacttcagtctcacctctcacccacatggctaattcctttatcagttggagatgtggccaaaa

SEQ ID NO: 478347 - DNA, 201 bp, Homo sapiens
cacggaccacagggtgagtgaacccatgcacaaattgcaaactgcccaaagctacaacattcaggattttcagacctttagttttccaagtcatagaaatktgttacgagttcatcacatctttatctaaatggcaactgaatttctttaaagataggtttaaaaaaggcataaaactatgaactattatccatttgtgtg

SEQ ID NO: 478348 - DNA, 201 bp, Homo sapiens
cttattaggtctattacatcaaaatcttcaggggaaagcctacaattgtagatttttaacaaaatgtcctcaggtcactgtaatgcacaattctgagaatyagtgcagcaatcacttcagtctcacctctcacccacatggctaattcctttatcagttggagatgtggccaaaaagagaaaagagtaagagagagtgtca

SEQ ID NO: 478349 - DNA, 201 bp, Homo sapiens
tgagaattagtgcagcaatcacttcagtctcacctctcacccacatggctaattcctttatcagttggagatgtggccaaaaagagaaaagagtaagagakagtgtcatttattaaaactccagttaagtttcctggctatgggtagaacagggacaagtaaactcaaaatcccacttgattttgctatttacaagctcct

SEQ ID NO: 478350 - DNA, 201 bp, Homo sapiens
tggctgtttctgccaggatgagcaataagtcagttaataatttgttccaccttctgctgaagtgtttctcacttcgtcaccacatattcactgccaatctrgtttcctcagagtcctcctaaaattcgtctctaggcaagttgcaactcattctttttcaaaccaaaaattattagacccaaagctaaacagcaccttgtc

SEQ ID NO: 478351 - DNA, 201 bp, Homo sapiens
ggctccgatgccggcgtgagctggcgggcctggtacctgatgtcctcagggtcaagtgcatcgccctcccacttgaggggttgctctgacttggcctcctycaagaacgcaggggccgccggggctggctcttcgtggtaaccgggatggtactgagcagcaggttttcaccctggtgccgctgctgtgcggactgcctga

SEQ ID NO: 478352 - DNA, 201 bp, Homo sapiens
agtcagttaataatttgttccaccttctgctgaagtgtttctcacttcgtcaccacatattcactgccaatctagtttcctcagagtcctcctaaaattcrtctctaggcaagttgcaactcattctttttcaaaccaaaaattattagacccaaagctaaacagcaccttgtctaaacacataaaacaaacttaaaaaaa

SEQ ID NO: 478353 - DNA, 201 bp, Homo sapiens
gcatgcatgaaaacacattaaacagactcatttggctgggaatattcgttgcaactctcaaggctagacgtgtttttgtggcttgtctcagtcattgcttycctcccattgtattcccattctatcattaaataaatgtaaatcatctctaaatgaatacaagaaaaaagaatctagaatctagagcttgtttctttagca

SEQ ID NO: 478354 - DNA, 201 bp, Homo sapiens
gagagttcaaggtatttaaactctcattaatttagacattaatcaaattaatgaatctgactaatctgattcagacctataccttgatccaagggctgcasagatatctgtcaatctatgctgaggagcaagagacagaatttggaaggtaggcaggctgatggtcaaactgtaggccagctactttgttaactatgggat

SEQ ID NO: 478355 - DNA, 201 bp, Homo sapiens
ccaaaccctgtgagatcgagtaaaaatggtattgttagcagaacaggtgtgatgagtcaaaagtgtcaaagagcatgatttctggaccacaatatgaggtkccattaaaacagagtatacagtagtatcccttatccactatatgtgcagaaagacacacttgacacgtttttctctgctgtcacaccacagcaacaatca

SEQ ID NO: 478356 - DNA, 201 bp, Homo sapiens
ccatccctaggcagtagccatgcttatctgctctgtattgatccaattttaaaatatgtgctgttgaaataagtacaaagccctgtttgatacatggataytcatgagtcatggatgaggcttagctctattaaatccaactcacttacttcagattcagagaattttattgaatggcttcctgtgaggtagaattttaaa

SEQ ID NO: 478357 - DNA, 201 bp, Homo sapiens
ggagctgaacatgtccctcacagcactgcgagagaagcttctagaagcggagcagtccctgcgcaacctcgaggacatccacatgagcctggagaaggacrttgccgccatgaccaacagtctcttcatcgaccgccagaagtgcatggcccatcgtactcgctaccccaccatcctgcagctggctggctaccagtgagc

SEQ ID NO: 478358 - DNA, 201 bp, Homo sapiens
aacaaatggatgaaccaaggaaggggccagggcagtaggtccccacccacaccctgaaccctaagggtgggactcagaggctggagacgggctggccccargatcctctaagtgacaggaacccttggccactgttgattgccccgaggcggggacagggatggtggggctggggctgcctggccctttaagagggcagtt

SEQ ID NO: 478359 - DNA, 201 bp, Homo sapiens
cccacccacaccctgaaccctaagggtgggactcagaggctggagacgggctggccccaggatcctctaagtgacaggaacccttggccactgttgattgycccgaggcggggacagggatggtggggctggggctgcctggccctttaagagggcagttctgcccaccaccctgaatgcccctcccctagctactggaga

SEQ ID NO: 478360 - DNA, 201 bp, Homo sapiens
taacagccccttcccccaatcaaccacaaggacacccagctgggcagctctgtgagctgggtggggtcagccaggtggaagttgctgctgggggttgctgrgaggagaggcatgggctgcctttcacgtggggctaactcagacctctctccccgacctgctaggacccctccagaggccactgctgaacatgaaaaacac

SEQ ID NO: 478361 - DNA, 201 bp, Homo sapiens
gcagggagggcttcctggaggagggagcctggcttccaccgcacaggccaaggcacaggggctgggaccagggaaggaggtgtctgggctgggtctctcgytttatctcgctctggttcactgcaataggctcattgctaaccaggcccgtccctccccagctccaaacccgactatcaggcagggaggattcttctaccc

SEQ ID NO: 478362 - DNA, 201 bp, Homo sapiens
aagtaagtgaaagttgagaatgtaaaatctataaagttcatttttttaactaggaaaaaaacacaaattaatgacagaaaccaaattacaaatccaaaaakctcagagaacaccaagcaggatgaatatttttgaaatataactaggaatatcatattcaaactgtagaaaacctataacaaagataaaatattaaaataa

SEQ ID NO: 478363 - DNA, 201 bp, Homo sapiens
tgcacaaggtggggcaccctgaaccccgaagacggccccctctcatcacctggcctgggccctcaacacctttctcctctgtcccatttatcccgagggaycccagaagcaagtgtctcctctccgtaaacctatgtaaaaccaggtgacactgggtatgatcgaccggtgttgccacccctatgactcagcaggaggagc

SEQ ID NO: 478364 - DNA, 201 bp, Homo sapiens
tcatttttttaactaggaaaaaaacacaaattaatgacagaaaccaaattacaaatccaaaaagctcagagaacaccaagcaggatgaatatttttgaaayataactaggaatatcatattcaaactgtagaaaacctataacaaagataaaatattaaaataaggcagaggaagaaacatattgtctacagagaaacaga

SEQ ID NO: 478365 - DNA, 201 bp, Homo sapiens
gtgggtatttattatccaagtattcattatctaaaactgcaaagcaaaaataattgtaacaagaacatattcactagcaatctgagcactcatgatattartgactgttctggagagaattatgtccccccagaattcctaacctgaagccctatctcccagtgtgactgtatttggagaaggagcttttaagaaggtaaa

SEQ ID NO: 478366 - DNA, 201 bp, Homo sapiens
caatctgagcactcatgatattagtgactgttctggagagaattatgtccccccagaattcctaacctgaagccctatctcccagtgtgactgtatttggrgaaggagcttttaagaaggtaaaggttaaataggggcaaaaggttaaggccctaatctgttaggactggggtcgtcatccaaaaaggaagagacaccaga

SEQ ID NO: 478367 - DNA, 201 bp, Homo sapiens
agagataatacatcagtttttcagaaaattagcagcagcagcagcatgtccactttttctaagttgctttagttttgtttgagttttaagataaagcctawttccagggaatattttctttcctgtgttgttttacactaattaagaaaaaaaaaaaaaaagaataaccctgtgtagaaaaaaagttgaaaaggttttacc

SEQ ID NO: 478368 - DNA, 201 bp, Homo sapiens
tggcactgcccagccctgtcgggtcctcatcaggctcaggacctccttgtcccaccctggagggggtggctgatggagagctgagtgtggggggtgccagrggagggggcctgggagaagtgtttcatctctgatgccagatggtggcaccaggctaggaggcaccgagctaggtgccatcctgagcacatggcaggtttt

SEQ ID NO: 478369 - DNA, 201 bp, Homo sapiens
tgagcacatggcaggttttaactccttcaggcctcatgacagcctcactatcacatgcattttacagcagggaaaactgaggcctgagggtccctgcgccmactgtgctcccaccccagtaacaggttgatgcaggggaggctaatgacagcagtgatgtacgtcactcccagctagagagaggccaacgcccctggcctg

SEQ ID NO: 478370 - DNA, 201 bp, Homo sapiens
attagtgactgttctggagagaattatgtccccccagaattcctaacctgaagccctatctcccagtgtgactgtatttggagaaggagcttttaagaagktaaaggttaaataggggcaaaaggttaaggccctaatctgttaggactggggtcgtcatccaaaaaggaagagacaccagagatatctctctctctctct

SEQ ID NO: 478371 - DNA, 201 bp, Homo sapiens
ccagaattcctaacctgaagccctatctcccagtgtgactgtatttggagaaggagcttttaagaaggtaaaggttaaataggggcaaaaggttaaggccstaatctgttaggactggggtcgtcatccaaaaaggaagagacaccagagatatctctctctctctctgcctccctcctcctctctccctccctctctccc

SEQ ID NO: 478372 - DNA, 201 bp, Homo sapiens
tttattttaattctatatatgtaaatcaaatccatgtcatgctgaaatagttggctctaatatacctgtatcaaaggcgttctgttttctttgtcacagayatcaatctggcattttctgttaaccaggagagtgaccacttgcacatggccactggcacaggccaagtgtagagcagttctacgagagtaagaggatttt

SEQ ID NO: 478373 - DNA, 201 bp, Homo sapiens
acctgaagccctatctcccagtgtgactgtatttggagaaggagcttttaagaaggtaaaggttaaataggggcaaaaggttaaggccctaatctgttagkactggggtcgtcatccaaaaaggaagagacaccagagatatctctctctctctctgcctccctcctcctctctccctccctctctccctctccccacatg

SEQ ID NO: 478374 - DNA, 201 bp, Homo sapiens
ccaaaaatttcaatttaaaatgtgagaatgaagagagatacaaacaaaaaacaaacctaattggtcaatgaaatatgagcttaagccaagaaagaaaagaracagcatgaagtacaataaagtacatggggaaatagatctataacagagccttttgctctttcatatccctgataatactaattaatatttatgctacaa

SEQ ID NO: 478375 - DNA, 201 bp, Homo sapiens
tatttggagaaggagcttttaagaaggtaaaggttaaataggggcaaaaggttaaggccctaatctgttaggactggggtcgtcatccaaaaaggaagagwcaccagagatatctctctctctctctgcctccctcctcctctctccctccctctctccctctccccacatgcatttgttaatttgaggttttttgttaga

SEQ ID NO: 478376 - DNA, 201 bp, Homo sapiens
atggcacgtgtatacacatgtaacaaacccacacattgtgcacatgtaccctagaacttacagtataataataataaagagtaatgtatggcttgaaaagrtatatttaatagaacatgagttggagctaataaaaagcttaagaaatgttaatctaaaatctcaatgttaagattccagttgaattatactagaaaatat

SEQ ID NO: 478377 - DNA, 201 bp, Homo sapiens
gttttctttgtcacagatatcaatctggcattttctgttaaccaggagagtgaccacttgcacatggccactggcacaggccaagtgtagagcagttctaygagagtaagaggattttttaagaaactgtagtacaatatctcaaaacatacaatcattcatgtaactgtaaaaattgaatagcatgtttttcctctgcct

SEQ ID NO: 478378 - DNA, 201 bp, Homo sapiens
ttttttaagaaactgtagtacaatatctcaaaacatacaatcattcatgtaactgtaaaaattgaatagcatgtttttcctctgccttcaaaacaaataawttttttgaagaaagtacaatacttactagctcttattgctcactgccttaatgaaaacagcagcctatttgagtagaaagagctcagtctttggattccg

SEQ ID NO: 478379 - DNA, 201 bp, Homo sapiens
tatttgagtagaaagagctcagtctttggattccgttcaactagggcttgagtcctactttaagccttgacacttaccaactattgcttagcctttctgtrcctcaacttcctcattaataaagatgacaatagtagctatctcataggacaccatcgttatgcttaaatgagaagctatgtaaagtatgtagaacagttc

SEQ ID NO: 478380 - DNA, 201 bp, Homo sapiens
ttaagccttgacacttaccaactattgcttagcctttctgtgcctcaacttcctcattaataaagatgacaatagtagctatctcataggacaccatcgtkatgcttaaatgagaagctatgtaaagtatgtagaacagttcctacaacaactcaataattctaagatttttgttttttgagacaaagtctcactcttttg

SEQ ID NO: 478381 - DNA, 201 bp, Homo sapiens
attcaggtccacataaactagcaagcccttaaaactcttcataggcactcagacacccaaggagagagactgccagaaaaaaacagagtcctggtagttgyacctctatttccctaagtactctctaagtatctgtcttcctatgggctcccacttccagattccacttctgcagggctccacagaagtcttcaatcttta

SEQ ID NO: 478382 - DNA, 201 bp, Homo sapiens
cttattcaggtccacataaactagcaagcccttaaaactcttcataggcactcagacacccaaggagagagactgccagaaaaaaacagagtcctggtagktgcacctctatttccctaagtactctctaagtatctgtcttcctatgggctcccacttccagattccacttctgcagggctccacagaagtcttcaatct

SEQ ID NO: 478383 - DNA, 201 bp, Homo sapiens
attattttcaccctataggtcctaccttattcaggtccacataaactagcaagcccttaaaactcttcataggcactcagacacccaaggagagagactgycagaaaaaaacagagtcctggtagttgcacctctatttccctaagtactctctaagtatctgtcttcctatgggctcccacttccagattccacttctgc

SEQ ID NO: 478384 - DNA, 201 bp, Homo sapiens
acgacagccacagccctctgccctgaggtggctgcaactgagcagagtctcctgtcttgttcaccctgagcgcggagctccgcacaggacaggatcagagygcaaaccaggaacaaatggatgaaccaaggaaggggccagggcagtaggtccccacccacaccctgaaccctaagggtgggactcagaggctggagacgg

SEQ ID NO: 478385 - DNA, 201 bp, Homo sapiens
tattagatacctatagttactgaaaagctgggtaacaaatacacctagttagaaatggcactgctttataaaaggcactcaagacgagactatttctatayttaaatgctgctggcaagtgaattcctttgtatataaatgaaagataccattcattaagatgaaagacttgttttaagtgtggttcttacatttcattca

SEQ ID NO: 478386 - DNA, 201 bp, Homo sapiens
tatgtgccaccatgcccagctaattttgtgtttttagtagagatgtgtttctccatgttggtcaggctggtctcaaactcccaacctcaggttatctgccygcctcagcctcccaaagtgctgggattacaggcacgagccaccgcgcccagccatatatggggattttgttttaaaagttctgtttcctggatctaccaa

SEQ ID NO: 478387 - DNA, 201 bp, Homo sapiens
tgtgcaccttccagaagcttctcaactaattcatgacaatttgaatgccccgttctacactgatgtgcttccatattggtttaccctaattgcccttttgscctagcctcaatttcttccctattatgtccctcaatttaatactacattgtaagccataatgtttctaatgaacttttaatcaggcaatacttctcaaat

SEQ ID NO: 478388 - DNA, 201 bp, Homo sapiens
caatgaaaactaactttgagctttataacaaatagtgacagtcaataaattggcagagcctgacaatgatttgccctcacaaattatctgtcctgaagctraacttaaaattcaattaatggatgacataaattttgttacctaaactggaagaaaactgatgacctaaaacaaggtagaaagatccactgtctcttttcc

SEQ ID NO: 478389 - DNA, 201 bp, Homo sapiens
ttcatgacaatttgaatgccccgttctacactgatgtgcttccatattggtttaccctaattgcccttttgccctagcctcaatttcttccctattatgtmcctcaatttaatactacattgtaagccataatgtttctaatgaacttttaatcaggcaatacttctcaaattaatttcttctccataaatcacccaacac

SEQ ID NO: 478390 - DNA, 201 bp, Homo sapiens
cagctgcggctccgatgccggcgtgagctggcgggcctggtacctgatgtcctcagggtcaagtgcatcgccctcccacttgaggggttgctctgacttgkcctcctccaagaacgcaggggccgccggggctggctcttcgtggtaaccgggatggtactgagcagcaggttttcaccctggtgccgctgctgtgcggac

SEQ ID NO: 478391 - DNA, 201 bp, Homo sapiens
gatcccgtttcttggcaacaggaagctcttggtttacacagtgtcacccaagcgactgggagccgcgtcctgctctgggactgagccgttggagctgcccsgctgaccgcactaggctgaccgcaaccggctgaccacacacagtcctcactcccctggccctggtgggcggcaggcaccatggcgcagacagtgccgccc

SEQ ID NO: 478392 - DNA, 201 bp, Homo sapiens
gatcatgaggcaattaatcagctctaatccatagttgtttatttaataaacagcaggttataggaagacagatgttgtgatggctttatgagatgataaaygcatagaacatattaggatgtctagcccacaatacaacactcaacagatattcgtttcttccatctatattttcttagttaacataattttttaaatcta

SEQ ID NO: 478393 - DNA, 201 bp, Homo sapiens
cctccggcctggccaccgccagcttccgcacctccaagtacctgctggaggagtggttccagaactgctatgctcgctaccaccaggccttcgccgaccgygaccagtcggagcggcagcggcacgagagccagcagctggccacagagacccaggcgctggcgcagcgcacgcagcaagactccacgcgcacagtgggcg

SEQ ID NO: 478394 - DNA, 201 bp, Homo sapiens
agcaggttataggaagacagatgttgtgatggctttatgagatgataaatgcatagaacatattaggatgtctagcccacaatacaacactcaacagataytcgtttcttccatctatattttcttagttaacataattttttaaatctataaaatcctacctgactgcagattcatcagaacttccaacatctattaaag

SEQ ID NO: 478395 - DNA, 201 bp, Homo sapiens
taaattgtgccatgatccactgccattctaattgctttaattaacaagtcattaccacactactgttacatcttaattatgcatacagacaggtagacttrttttacatatgtgaactaatagttgtcaaagcaaatgcaaattgtattccgcaagtaaactctctctgaaatttctagggatgttctttaagtgaaatta

SEQ ID NO: 478396 - DNA, 201 bp, Homo sapiens
tgagcctgggagaattaagcagatcccgggaactccacaggacagaactcctggaggcttgtgccttgtttcctccagaattgaccacatgcacctttttyctctactaattttgcttgtccccttccttgttatcaattaaagatctgagtatgactatttgctgagtcctgtgagtccttctaatgaaccaccaaacct

SEQ ID NO: 478397 - DNA, 201 bp, Homo sapiens
ccagaaatactgggtttttatataaatgcttcatagatttgttttatgataaagggtacataactctcctaaacctcacaccacctcttaaatagggacartaagtccacatcaacacgcctgccttagctattattaaactcttacagtatgatgtaaagtgaaagtacaatgtaacatcattcctaggccaactttgtc

SEQ ID NO: 478398 - DNA, 201 bp, Homo sapiens
ataaagggtacataactctcctaaacctcacaccacctcttaaatagggacagtaagtccacatcaacacgcctgccttagctattattaaactcttacartatgatgtaaagtgaaagtacaatgtaacatcattcctaggccaactttgtccagttttatacagaaacgtgccaacttttctgtttgcaaggataatat

SEQ ID NO: 478399 - DNA, 201 bp, Homo sapiens
tcattcctaggccaactttgtccagttttatacagaaacgtgccaacttttctgtttgcaaggataatatcaaagcaaacaccagaaggttgtatctttgrtgcattttttccaaatcatacacataataaaccaaagacaaatgatgaatattatttcagaaaatataaagtcttcccctttcttcttttgccaaggaag

SEQ ID NO: 478400 - DNA, 201 bp, Homo sapiens
agcatgcccagctatttatttaaaaatttttgtagagtaagaatctcactttgttgcccaggctggtctcaaactcctggcatcaagcaatcctctcaccycagcctcccaaagttctgggattacaggtgtgagccactgcacccagccagatattataattattactattactactaaacaaaaccattttaattaggt

SEQ ID NO: 478401 - DNA, 201 bp, Homo sapiens
tgtgagccactgcacccagccagatattataattattactattactactaaacaaaaccattttaattaggtagaatgatacaattatacctactttgcargatgacttaacgagtaggtcacattttaacacctctgacattggaatgccacttataattcatgatttgttataactataattggtagcattttaaaaat

SEQ ID NO: 478402 - DNA, 201 bp, Homo sapiens
ttgcaaggataatatcaaagcaaacaccagaaggttgtatctttgatgcattttttccaaatcatacacataataaaccaaagacaaatgatgaatattayttcagaaaatataaagtcttcccctttcttcttttgccaaggaagtctaatattttcaccatttttatgcacacaatcaactttatttaacctggaagtt

SEQ ID NO: 478403 - DNA, 201 bp, Homo sapiens
tttcaccatttttatgcacacaatcaactttatttaacctggaagttaatgtctcattgttttcattgttctaaataaacaccttttcccttgagtattgytctaaaaattttgaagtcgtctgaaaaattttgttctgatttttcacggttgtgttgatgatatgcgaaaaggaatacagatggtatttaattatgaaca

SEQ ID NO: 478404 - DNA, 201 bp, Homo sapiens
aaacaaaaccattttaattaggtagaatgatacaattatacctactttgcaagatgacttaacgagtaggtcacattttaacacctctgacattggaatgycacttataattcatgatttgttataactataattggtagcattttaaaaattatcttattgatatataaaatatcggggcatcacgcaatccatgagacc

SEQ ID NO: 478405 - DNA, 201 bp, Homo sapiens
gaagttaatgtctcattgttttcattgttctaaataaacaccttttcccttgagtattgttctaaaaattttgaagtcgtctgaaaaattttgttctgatwtttcacggttgtgttgatgatatgcgaaaaggaatacagatggtatttaattatgaacaagaaaaggtgttaaatatcattagtcattagaaatttgcaa

SEQ ID NO: 478406 - DNA, 201 bp, Homo sapiens
attttaacacctctgacattggaatgccacttataattcatgatttgttataactataattggtagcattttaaaaattatcttattgatatataaaatakcggggcatcacgcaatccatgagaccttacattaagtagaatatggtatactcagcaggtctagggcagttctaggcatgtaactgaaacttaaatacat

SEQ ID NO: 478407 - DNA, 201 bp, Homo sapiens
atgtctcattgttttcattgttctaaataaacaccttttcccttgagtattgttctaaaaattttgaagtcgtctgaaaaattttgttctgatttttcacrgttgtgttgatgatatgcgaaaaggaatacagatggtatttaattatgaacaagaaaaggtgttaaatatcattagtcattagaaatttgcaaattaaga

SEQ ID NO: 478408 - DNA, 201 bp, Homo sapiens
aattatcttattgatatataaaatatcggggcatcacgcaatccatgagaccttacattaagtagaatatggtatactcagcaggtctagggcagttctargcatgtaactgaaacttaaatacattttagttcttaaaggtactatggggaaagagcactgaaataacaataatgcattttttaaacaaattaattcttt

SEQ ID NO: 478409 - DNA, 201 bp, Homo sapiens
gttgatgatatgcgaaaaggaatacagatggtatttaattatgaacaagaaaaggtgttaaatatcattagtcattagaaatttgcaaattaagaccacawtgactaacacatatatatcagaatagctaaaataaaaataaaacatcaaacgctgaggagcatgagtaaaaactagagctttcacacattactggtggga

SEQ ID NO: 478410 - DNA, 201 bp, Homo sapiens
atacattttagttcttaaaggtactatggggaaagagcactgaaataacaataatgcattttttaaacaaattaattctttgattttcaaacaacttgaarccaaaggaaactcatgattcaaatgaatacatatggctcattgtattcaatatttatacttagagaatatatgcaaataagactttccaatgattaatat

SEQ ID NO: 478411 - DNA, 201 bp, Homo sapiens
gaaaaggaatacagatggtatttaattatgaacaagaaaaggtgttaaatatcattagtcattagaaatttgcaaattaagaccacaatgactaacacatrtatatcagaatagctaaaataaaaataaaacatcaaacgctgaggagcatgagtaaaaactagagctttcacacattactggtgggaatgtaaaatcgta

SEQ ID NO: 478412 - DNA, 201 bp, Homo sapiens
cataaatggaatgagtatataagaaaaacatatgtacataataaaatatatagataataaaatctggaaacagataaaaatattccctttttacttctgargaggctaaaagctcaaagaagataacaacacacacaataatgataaacaatagaaagtgagaaattattttcatcagcacaagattcatattcctctctt

SEQ ID NO: 478413 - DNA, 201 bp, Homo sapiens
atattccctttttacttctgaggaggctaaaagctcaaagaagataacaacacacacaataatgataaacaatagaaagtgagaaattattttcatcagcrcaagattcatattcctctcttcccaaggattattccattaataataaacttttactagaagttttgtacatgctcactgcagcaatcacagataagaaaa

SEQ ID NO: 478414 - DNA, 201 bp, Homo sapiens
actgctttataaaaggcactcaagacgagactatttctatacttaaatgctgctggcaagtgaattcctttgtatataaatgaaagataccattcattaaratgaaagacttgttttaagtgtggttcttacatttcattcatgatagagtaaatggctttataattactttaaaatttaactcactagtatgttaaatct

SEQ ID NO: 478415 - DNA, 201 bp, Homo sapiens
tgtcagttgttttagtgttatccattcttatgggatataaatgctgagtagctgtctgccttcccccacaacacagaaaattgagggcctagaggacagtyttattttcatatttgacatcttctattattttttatagaagggtgatatgtgggtagtaaaattttctttcaattttctaggctgtctctgaatcttact

SEQ ID NO: 478416 - DNA, 201 bp, Homo sapiens
cctggggcgtgggaactgccgctgagggaccttcccagcagcccacagaaggccctggaggaaaacaccccacttacaacgcaccaaggagaatgcccaamagcccaagataaacccagtgagagagcagaacttacacagtcagagctcaggcccggcattcaactccttgtggttgctcaggtgttgaccaaggcctgc

SEQ ID NO: 478417 - DNA, 201 bp, Homo sapiens
gcgagcgactgcaggacacgcacagctggaagtcggagctgcagcgtgagatggaggcgctggctgcggagaccaacttgctcctggcccagaagcaacgsctggagcgcgccctggacgccacagaggtgcccttctccatcaccactgacaacctgcagtgccgtgagcgccgcgagcaccccaacctcgtgcgcgacc

SEQ ID NO: 478418 - DNA, 201 bp, Homo sapiens
atatcattagtcattagaaatttgcaaattaagaccacaatgactaacacatatatatcagaatagctaaaataaaaataaaacatcaaacgctgaggagyatgagtaaaaactagagctttcacacattactggtgggaatgtaaaatcgtacagctatgccaaaaaggagtatagtagtttcttaagaaactaaaggaa

SEQ ID NO: 478419 - DNA, 201 bp, Homo sapiens
taaaaataaaacatcaaacgctgaggagcatgagtaaaaactagagctttcacacattactggtgggaatgtaaaatcgtacagctatgccaaaaaggagyatagtagtttcttaagaaactaaaggaactcaagtccccaggcctgcagtctgggccaaggtcacaggccctggatcaatcaggatggggttcaagggcc

SEQ ID NO: 478420 - DNA, 201 bp, Homo sapiens
taaaaactagagctttcacacattactggtgggaatgtaaaatcgtacagctatgccaaaaaggagtatagtagtttcttaagaaactaaaggaactcaartccccaggcctgcagtctgggccaaggtcacaggccctggatcaatcaggatggggttcaagggccttcctggggccatccagtgttcaaggtgcccttt

SEQ ID NO: 478421 - DNA, 201 bp, Homo sapiens
aaacaagaccatagtatgtgtatgtataatttaactaattttttttcctcgctagctataacaaaatacatctttgcacatcaacgtacttctgtatctaytgccaccttcagtggtcacatattattccatcctatggatgcaactgaaatttatttataggatccattctatgggttctttttaaagtaagtactgtga

SEQ ID NO: 478422 - DNA, 201 bp, Homo sapiens
tgcttgattcacttctatcaatggtgtcaggatcccagatgccaatgtcaggcactcctgctccaaatgggtcaccatggaaatgagctttgaattaagasagattgccttcaaatgcatttattttccttattattaaatagtccatgggtttttcccctaatacaagagaagagatttttatctttactgttagaaagc

SEQ ID NO: 478423 - DNA, 201 bp, Homo sapiens
gcaagacacatgtggcctgagggtcccactctctggctggcagaacccagaggtgggagcacactggagtgtccttcagggcatcttcaccccatgagagkgctgggggctttgggagtttgcagctggcaggagtgagggcccagtctcctatctctgatgcgtccttggtcaaatcctgtgcctcagcctgcagggcct

SEQ ID NO: 478424 - DNA, 201 bp, Homo sapiens
cacatattattccatcctatggatgcaactgaaatttatttataggatccattctatgggttctttttaaagtaagtactgtgaaaaataaagtgcatgtmtctttatttcctaagggtattttagtataatggaattggtgggtaaagggcttacacactttttaaatgtagtacttaccattttcaaatgagtactttg

SEQ ID NO: 478425 - DNA, 201 bp, Homo sapiens
tgagggtcccactctctggctggcagaacccagaggtgggagcacactggagtgtccttcagggcatcttcaccccatgagagggctgggggctttgggaktttgcagctggcaggagtgagggcccagtctcctatctctgatgcgtccttggtcaaatcctgtgcctcagcctgcagggcctatcgtggtcaccacatg

SEQ ID NO: 478426 - DNA, 201 bp, Homo sapiens
tctatgggttctttttaaagtaagtactgtgaaaaataaagtgcatgtctctttatttcctaagggtattttagtataatggaattggtgggtaaagggcwtacacactttttaaatgtagtacttaccattttcaaatgagtactttgaaaagtaatcagcaacttaaactttaagcagcagtataaaacatcctcacaa

SEQ ID NO: 478427 - DNA, 201 bp, Homo sapiens
tggtcaaatcctgtgcctcagcctgcagggcctatcgtggtcaccacatgaatgtgttcccttagtctgggagccccaagcaggcagcaccccctgccaaygacttcagggcacctggaagtggaggctgagaagtctcccacttcgcagagctgggctctggcccagaggccttctcgttggctcaggtggtctctcggg

SEQ ID NO: 478428 - DNA, 201 bp, Homo sapiens
gttctttttaaagtaagtactgtgaaaaataaagtgcatgtctctttatttcctaagggtattttagtataatggaattggtgggtaaagggcttacacaytttttaaatgtagtacttaccattttcaaatgagtactttgaaaagtaatcagcaacttaaactttaagcagcagtataaaacatcctcacaaatattgt

SEQ ID NO: 478429 - DNA, 201 bp, Homo sapiens
tacactttgatatctaacccatacaccaccctatagtaagaacttttgttcacacgtatttggacagataaaatttcccagagttattacagctctgtttyactgataacattctatttcagtttgactcttttaacacttttatagtcagttataagaattacattcactaaatcataaactagacattatactagtcat

SEQ ID NO: 478430 - DNA, 201 bp, Homo sapiens
gcctcagcctgcagggcctatcgtggtcaccacatgaatgtgttcccttagtctgggagccccaagcaggcagcaccccctgccaacgacttcagggcacytggaagtggaggctgagaagtctcccacttcgcagagctgggctctggcccagaggccttctcgttggctcaggtggtctctcgggctcctggggccaca

SEQ ID NO: 478431 - DNA, 201 bp, Homo sapiens
tggtgggtaaagggcttacacactttttaaatgtagtacttaccattttcaaatgagtactttgaaaagtaatcagcaacttaaactttaagcagcagtawaaaacatcctcacaaatattgtggatagaaaactgtttcattcctcttttaaattcttataccagaaatgcaaaggattttttcctatgtatataaataa

SEQ ID NO: 478432 - DNA, 201 bp, Homo sapiens
caagcaggcagcaccccctgccaacgacttcagggcacctggaagtggaggctgagaagtctcccacttcgcagagctgggctctggcccagaggccttcycgttggctcaggtggtctctcgggctcctggggccacagatcaggggacaaacacgggcagctctgctctgctctgcctaaagagaggtgcccagtgaat

SEQ ID NO: 478433 - DNA, 201 bp, Homo sapiens
aaaacatcctcacaaatattgtggatagaaaactgtttcattcctcttttaaattcttataccagaaatgcaaaggattttttcctatgtatataaataayttgtagatctggaaaaaggtactttgcccacttttagagtgtttgatgatttgatttgaaagaattctctgtaaaatgaagatgtacttttcatctcatg

SEQ ID NO: 478434 - DNA, 201 bp, Homo sapiens
cccctgccaacgacttcagggcacctggaagtggaggctgagaagtctcccacttcgcagagctgggctctggcccagaggccttctcgttggctcaggtsgtctctcgggctcctggggccacagatcaggggacaaacacgggcagctctgctctgctctgcctaaagagaggtgcccagtgaatgcaggttccagaca

SEQ ID NO: 478435 - DNA, 201 bp, Homo sapiens
atgcaaaggattttttcctatgtatataaataacttgtagatctggaaaaaggtactttgcccacttttagagtgtttgatgatttgatttgaaagaattytctgtaaaatgaagatgtacttttcatctcatgtgtatatataactgatatatataacatatctgttatatatgtatacatatcagtaatatatatatat

SEQ ID NO: 478436 - DNA, 201 bp, Homo sapiens
ccctgccaacgacttcagggcacctggaagtggaggctgagaagtctcccacttcgcagagctgggctctggcccagaggccttctcgttggctcaggtgrtctctcgggctcctggggccacagatcaggggacaaacacgggcagctctgctctgctctgcctaaagagaggtgcccagtgaatgcaggttccagacaa

SEQ ID NO: 478437 - DNA, 201 bp, Homo sapiens
tgcaaaggattttttcctatgtatataaataacttgtagatctggaaaaaggtactttgcccacttttagagtgtttgatgatttgatttgaaagaattcyctgtaaaatgaagatgtacttttcatctcatgtgtatatataactgatatatataacatatctgttatatatgtatacatatcagtaatatatatatata

SEQ ID NO: 478438 - DNA, 201 bp, Homo sapiens
ttttagagtgtttgatgatttgatttgaaagaattctctgtaaaatgaagatgtacttttcatctcatgtgtatatataactgatatatataacatatctrttatatatgtatacatatcagtaatatatatatatatatatcttacgatatataataaacaacataggccaggcgcggtggctcacacctgtaatcccag

SEQ ID NO: 478439 - DNA, 201 bp, Homo sapiens
taaactcaaaatcccacttgattttgctatttacaagctccttatctcccaccttcccactaagacattctagatttgagaggaggctttaggttcttatytaagtggctgtttctgccaggatgagcaataagtcagttaataatttgttccaccttctgctgaagtgtttctcacttcgtcaccacatattcactgcca

SEQ ID NO: 478440 - DNA, 201 bp, Homo sapiens
ttgaaagaattctctgtaaaatgaagatgtacttttcatctcatgtgtatatataactgatatatataacatatctgttatatatgtatacatatcagtaatatatatatatatatatcttacgatatataataaacaacataggccaggcgcggtggctcacacctgtaatcccagcgctttgggaggcggaggcaggca

SEQ ID NO: 478441 - DNA, 201 bp, Homo sapiens
gaaaacatgttattctgtaagctgagagatattgccaatgatatttcctttcacttcccagtcacagatgtagagaaagacagataagtcaggctaatatwattgaaaaggagaactttgaaggaagtggcaactatcaaatgccaactcttctagagatttcttacatttttgagatacagaaatttatatattgcactt

SEQ ID NO: 478442 - DNA, 201 bp, Homo sapiens
atgaaatcatgaaagggtcagcctctacctattgaaagattacccataagcaaatttctgaagactctctgaatggtagtgaatgattcatggtgggaagsaaaacatgttattctgtaagctgagagatattgccaatgatatttcctttcacttcccagtcacagatgtagagaaagacagataagtcaggctaatatt

SEQ ID NO: 478443 - DNA, 201 bp, Homo sapiens
atttgaggaattaagagtttcagagatacagttgccagagcttcccaatacaggtggcggtttcctctgggtggtacaaacttgcttgattcacttctatsaatggtgtcaggatcccagatgccaatgtcaggcactcctgctccaaatgggtcaccatggaaatgagctttgaattaagagagattgccttcaaatgca

SEQ ID NO: 478444 - DNA, 201 bp, Homo sapiens
cttatcaatagaagttctcatactgatccatatggattatttctggcattatacaagccaataagtcacttgcatctttaaggaagagcactgaggagaargatgtactgtctgcaatattcgtaaattatccaactataaccaggaataacctaaaaaggcttctaggcattcttatgggcagagaattatttgtggtat

SEQ ID NO: 478445 - DNA, 201 bp, Homo sapiens
cacctgagtactcatgagaaatgcagactcccatacctgctgaatcagaatgtgcaccttccagaagcttctcaactaattcatgacaatttgaatgcccygttctacactgatgtgcttccatattggtttaccctaattgcccttttgccctagcctcaatttcttccctattatgtccctcaatttaatactacattg

SEQ ID NO: 478446 - DNA, 201 bp, Homo sapiens
atttttagtagagacagggtttcaccgtgttcaccaggatggtctcgattcctgacctcatgatccgcccatctcggcctcccaaagtgctgggattacasgcgtgagccaccgcgcccggccggatttctttttaagagattcataataccttgacctgtgccccatttccctcctccacctgtctgacctggcgtccct

SEQ ID NO: 478447 - DNA, 201 bp, Homo sapiens
tagcaaatattttaagttttttacataaattaatgatctaaattactatctctaaagcagtgtttcttaaactatattccaaagaatatttgctttatcakaagtattataccccaagagaaagactccatgaccatctgtatttgagaagtattacaaaactgtattttatgtccaataatcaagaaatctctttaattt

SEQ ID NO: 478448 - DNA, 201 bp, Homo sapiens
attaccacactactgttacatcttaattatgcatacagacaggtagacttattttacatatgtgaactaatagttgtcaaagcaaatgcaaattgtattcygcaagtaaactctctctgaaatttctagggatgttctttaagtgaaattaatattcaaactgaagattttagttaaaagaactgagtgcagattaaagtc

SEQ ID NO: 478449 - DNA, 201 bp, Homo sapiens
ggtggtacaaacttgcttgattcacttctatcaatggtgtcaggatcccagatgccaatgtcaggcactcctgctccaaatgggtcaccatggaaatgagytttgaattaagagagattgccttcaaatgcatttattttccttattattaaatagtccatgggtttttcccctaatacaagagaagagatttttatcttt

SEQ ID NO: 478450 - DNA, 201 bp, Homo sapiens
tctaatggacaccccctgacccaggtctcagggagctgccagcacgatgggtccctaaagctgagatccagcaagacacatgtggcctgagggtcccactytctggctggcagaacccagaggtgggagcacactggagtgtccttcagggcatcttcaccccatgagagggctgggggctttgggagtttgcagctggca

SEQ ID NO: 478451 - DNA, 201 bp, Homo sapiens
ttatgaaaagtcaatatgtttttcctgatgatttcctttctaacagcttcatttctctagcttattttattgtacgaacacagtatataataatgcagcamaaacaaaataggtgttcatcaactgtttatgttatcaggaaggcttccagtcaattgtgggctattagtagctaaggtgaaggaatcaaaagttatactc

SEQ ID NO: 478452 - DNA, 201 bp, Homo sapiens
agctttgacctctatatatgaatcaccatgaaaactgaggggtctgaatcagtgaaggcatcctggtggcaaaggtcaatcattatcagattgcaggaccrgttataatggcaataatacagcaagtgagtccatggaaacaacagaatgatcagaatggccttttttccccttcttctgacttgtgaagaaagattgcct

SEQ ID NO: 478453 - DNA, 201 bp, Homo sapiens
cgctcaatggttcccattaatattggggaaatcaacattataatacagaaaaccataggcattatttaatatttggttttggaaggtatttttagtgacastgcatacagttgtacctaataattgcaaaattagagatgtaaaaataaaacaaaggcacattgtgtttgagtaggaaatctgtagacgtctagctggttt

SEQ ID NO: 478454 - DNA, 201 bp, Homo sapiens
gtgttcatcaactgtttatgttatcaggaaggcttccagtcaattgtgggctattagtagctaaggtgaaggaatcaaaagttatactcagattttcaacwgcacagggatcagagtccctcacccccacattattcatgggtcaactgtagttatttatttactaaatataaacaatttattataaaaatgaaatcgaag

SEQ ID NO: 478455 - DNA, 201 bp, Homo sapiens
ccgggaccctagtgcagctctactttttaaatccatttttactggcttccacttaaatggctacttaaaattattttttattttagacaaaatataaatcrgaaataaaaacataatggcttatcaatagaagttctcatactgatccatatggattatttctggcattatacaagccaataagtcacttgcatctttaag

SEQ ID NO: 478456 - DNA, 201 bp, Homo sapiens
tcccacttcgcagagctgggctctggcccagaggccttctcgttggctcaggtggtctctcgggctcctggggccacagatcaggggacaaacacgggcagctctgctctgctctgcctaaagagaggtgcccagtgaatgcaggttccagacaaaaggtggagcctggcatcctgccctgcgtgtgggctccagcctgct

SEQ ID NO: 478457 - DNA, 201 bp, Homo sapiens
cccacttcgcagagctgggctctggcccagaggccttctcgttggctcaggtggtctctcgggctcctggggccacagatcaggggacaaacacgggcagctctgctctgctctgcctaaagagaggtgcccagtgaatgcaggttccagacaaaaggtggagcctggcatcctgccctgcgtgtgggctccagcctgctg

SEQ ID NO: 478458 - DNA, 201 bp, Homo sapiens
ccacttcgcagagctgggctctggcccagaggccttctcgttggctcaggtggtctctcgggctcctggggccacagatcaggggacaaacacgggcagctctgctctgctctgcctaaagagaggtgcccagtgaatgcaggttccagacaaaaggtggagcctggcatcctgccctgcgtgtgggctccagcctgctgc

SEQ ID NO: 478459 - DNA, 201 bp, Homo sapiens
tgaaagaattctctgtaaaatgaagatgtacttttcatctcatgtgtatatataactgatatatataacatatctgttatatatgtatacatatcagtaatatatatatatatatatcttacgatatataataaacaacataggccaggcgcggtggctcacacctgtaatcccagcgctttgggaggcggaggcaggcag

SEQ ID NO: 478460 - DNA, 201 bp, Homo sapiens
cacttcgcagagctgggctctggcccagaggccttctcgttggctcaggtggtctctcgggctcctggggccacagatcaggggacaaacacgggcagctctgctctgctctgcctaaagagaggtgcccagtgaatgcaggttccagacaaaaggtggagcctggcatcctgccctgcgtgtgggctccagcctgctgcc

SEQ ID NO: 478461 - DNA, 201 bp, Homo sapiens
gaagatgtacttttcatctcatgtgtatatataactgatatatataacatatctgttatatatgtatacatatcagtaatatatatatatatatatcttaygatatataataaacaacataggccaggcgcggtggctcacacctgtaatcccagcgctttgggaggcggaggcaggcagatgacttgaggtcaggagttc

SEQ ID NO: 478462 - DNA, 201 bp, Homo sapiens
acttcgcagagctgggctctggcccagaggccttctcgttggctcaggtggtctctcgggctcctggggccacagatcaggggacaaacacgggcagctctgctctgctctgcctaaagagaggtgcccagtgaatgcaggttccagacaaaaggtggagcctggcatcctgccctgcgtgtgggctccagcctgctgcca

SEQ ID NO: 478463 - DNA, 201 bp, Homo sapiens
gcagatgacttgaggtcaggagttcgagaccagcctggccaacgtggtgaaactaaatatacaaaaattagccaggcatgctggcacctgcctgcaatccmagctacttgggaggctgaggttggaaaattgcttgaacccggcaggcagaggttgcagtgagccaagattgtgccattggacaccagcctgggcaaagaa

SEQ ID NO: 478464 - DNA, 201 bp, Homo sapiens
agctctgctctgctctgcctaaagagaggtgcccagtgaatgcaggttccagacaaaaggtggagcctggcatcctgccctgcgtgtgggctccagcctgmtgccatctggggaaactgagtcatggcgaggctcgaggatgtttctcagaccacaccagtccctgaaggtcccctgacctcccaattttgatggacagta

SEQ ID NO: 478465 - DNA, 201 bp, Homo sapiens
aaactggaagaaaactgatgacctaaaacaaggtagaaagatccactgtctcttttccatgatctgtctctggataaaagactaatctgcatcacttcagwatggcagtcttgattcctcagcatggaacccacttaggaaggtcctattgctttcctttgccctaaatcagtacaggaaagcccctacaatatttgaaat

SEQ ID NO: 478466 - DNA, 201 bp, Homo sapiens
agaccagcctggccaacgtggtgaaactaaatatacaaaaattagccaggcatgctggcacctgcctgcaatcccagctacttgggaggctgaggttggaraattgcttgaacccggcaggcagaggttgcagtgagccaagattgtgccattggacaccagcctgggcaaagaagcgagactccgactcaaaaaaatata

SEQ ID NO: 478467 - DNA, 201 bp, Homo sapiens
tgctgccatctggggaaactgagtcatggcgaggctcgaggatgtttctcagaccacaccagtccctgaaggtcccctgacctcccaattttgatggacartaagaagaggttcccaggccgcctgccacaggttctgactcggcctgggttagggtaagtctccgggctgctgtcctcaaaagccccatcaggaggctgt

SEQ ID NO: 478468 - DNA, 201 bp, Homo sapiens
cattagagataattaactctaattattgtgaggagcataaaattctgaggcacataaatcaatgaacaaagataaaatataaggcagtgttgcaaagatgmtgcaggcctgaggagatgttttcagaaatatttaggatacaagtatcagtggccattataagaatgaatttttattgaatgaataaatgtatatatctgg

SEQ ID NO: 478469 - DNA, 201 bp, Homo sapiens
gccattggacaccagcctgggcaaagaagcgagactccgactcaaaaaaatatatatatatataatgaattccctataaaatgaaaacatacttttcatcwgaaaaaatatatatatataatatagtaaatatttttcaagtaagctctcttatctgacaacttttcgcccactgaaataactcacggtatttttgatagg

SEQ ID NO: 478470 - DNA, 201 bp, Homo sapiens
tggggaaactgagtcatggcgaggctcgaggatgtttctcagaccacaccagtccctgaaggtcccctgacctcccaattttgatggacagtaagaagagsttcccaggccgcctgccacaggttctgactcggcctgggttagggtaagtctccgggctgctgtcctcaaaagccccatcaggaggctgtgtcaggccag

SEQ ID NO: 478471 - DNA, 201 bp, Homo sapiens
ctaaaacaacaaagaaataactccactcaagaactttaataaagacttttttaaaaagctagtttgatacactttaccagtttaatatccgcctgtcagtrtagatgtaataaccatttgcatgtactagcttgggtctataagcatctagggtgctcaagtgttcatctttgtaaattgtcaccaaggctaaaagaaagg

SEQ ID NO: 478472 - DNA, 201 bp, Homo sapiens
caggttctgactcggcctgggttagggtaagtctccgggctgctgtcctcaaaagccccatcaggaggctgtgtcaggccaggcgcaccgtggtgacagcwgcatggactgagggttctggccgcgggagaggccaggacggggggaggtcaggtccaggaggagggcactggccggcacatggtggggctggagagaccc

SEQ ID NO: 478473 - DNA, 201 bp, Homo sapiens
aaatgaaaacatacttttcatctgaaaaaatatatatatataatatagtaaatatttttcaagtaagctctcttatctgacaacttttcgcccactgaaayaactcacggtatttttgataggggaacgagttctctcattaggcacctcctataatgtatataaaccatgttttaaaagcgtacgttaaaaataacaacg

SEQ ID NO: 478474 - DNA, 201 bp, Homo sapiens
atcatgttatgtaaaataaaatgttaattctagacataaggggaaaaagaaattaaaactataggggtgaaaaaatattgcataatttattactgttgacmtgatcatatgactgattaagggcactgaatttaacttgtatgtgaagtagaccccatattagctgcagttaatcaatagaccaggtattctagcagaatt

SEQ ID NO: 478475 - DNA, 201 bp, Homo sapiens
caagctcatgagaaaatagaagcaaacaagtcatttgcataggtaagaaaccttgcatttatacttcgtcatcactactctagaagattatcatcatgttktgtaaaataaaatgttaattctagacataaggggaaaaagaaattaaaactataggggtgaaaaaatattgcataatttattactgttgacctgatcata

SEQ ID NO: 478476 - DNA, 201 bp, Homo sapiens
aagaaagtgaagtactcataaatggaggaagcacagctcagtaaatgaactctagttagctggatatcatgcaaagtgtcctgcactcagagtaagtcctygctctgtaaccaaaatacctcgctctgtaggtattttgtcttcagacaagttgcttctcttaggcttcttctaaaaaataaggattctgctaccttactt

SEQ ID NO: 478477 - DNA, 201 bp, Homo sapiens
tcccagggtctgcggggaagccgggcctggggaccccctcccaccccgggctgagcccccgctacctgtgctgcttgtcccgggcgtccaggtctccgctsctgcgcgccaggcagcgctccacctccgcggcgtcgcctttgacagctgccctgtggatcttctgcaattcggagtcccggattcggtatccggaacccg

SEQ ID NO: 478478 - DNA, 201 bp, Homo sapiens
ccaccacagccttcagcagcgacactggcagcctccgacctctcagaccgagtgagcctcgcaaagccgttgggcgcgcgcctgcaccgcggttgctgccrggctcccggaagacgctccctggcggcgcgcgccggcaggtagggctgcagctctgggcaggcgccgatgggctctccggttctcctgggatcgcccggg

SEQ ID NO: 478479 - DNA, 201 bp, Homo sapiens
cagaccgagtgagcctcgcaaagccgttgggcgcgcgcctgcaccgcggttgctgccaggctcccggaagacgctccctggcggcgcgcgccggcaggtarggctgcagctctgggcaggcgccgatgggctctccggttctcctgggatcgcccgggcggccccagaatcgcaggcgcgcagccagcccggcctgaggag

SEQ ID NO: 478480 - DNA, 201 bp, Homo sapiens
gcgctggcaggattgcgtttccgcccaaggccagcagagggagcctgaccaccgcccactagagggcggcaaactcctgggagcaaaaagagggcgcgggsgctgggtactagggaaggggggctgcgggggccggaggtgctgcagagggggcctccggggcagcggtgctgggaacggggtcgcgggggcacgagggga

SEQ ID NO: 478481 - DNA, 201 bp, Homo sapiens
cctctcctcttcctcctcagcctaatcaacctgaagatcatgaagacctttgtcaggactacttatgctttatgaaaagtcaatatgtttttcctgatgayttcctttctaacagcttcatttctctagcttattttattgtacgaacacagtatataataatgcagcacaaacaaaataggtgttcatcaactgtttatg

SEQ ID NO: 478482 - DNA, 201 bp, Homo sapiens
agtgcatggcccatcgtactcgctaccccaccatcctgcagctggctggctaccagtgagcagcggcacggtgcttccccccagtcccccaaataaacagygcgttagctttctgcacagtgtgtgtgtgtgcacggtgggacctcgagttgctgtccatctgaactggcctttgggtcccctgtgaggctggctctgcct

SEQ ID NO: 478483 - DNA, 201 bp, Homo sapiens
tgtccaaggaccagcaccaaaatcacctgagtactcatgagaaatgcagactcccatacctgctgaatcagaatgtgcaccttccagaagcttctcaactmattcatgacaatttgaatgccccgttctacactgatgtgcttccatattggtttaccctaattgcccttttgccctagcctcaatttcttccctattatg

SEQ ID NO: 478484 - DNA, 201 bp, Homo sapiens
taagaacttgtctccaacaacagaaaaagaaaaaaaaaaggctcagaatgctgtgtgaagtcttccttgattctagctatctttctccacacacacgggtrtctgcttcattggagtcccttagtactttgtcaatttttccagtgtcactttaccacctgaactgcacatcatgtcttaacatgtcgatcccctttgctg

SEQ ID NO: 478485 - DNA, 201 bp, Homo sapiens
cagcacacccaacacccacacgacagccacagccctctgccctgaggtggctgcaactgagcagagtctcctgtcttgttcaccctgagcgcggagctccrcacaggacaggatcagagcgcaaaccaggaacaaatggatgaaccaaggaaggggccagggcagtaggtccccacccacaccctgaaccctaagggtggg

SEQ ID NO: 478486 - DNA, 201 bp, Homo sapiens
agagtaagaacttgtctccaacaacagaaaaagaaaaaaaaaaggctcagaatgctgtgtgaagtcttccttgattctagctatctttctccacacacacrggtatctgcttcattggagtcccttagtactttgtcaatttttccagtgtcactttaccacctgaactgcacatcatgtcttaacatgtcgatccccttt

SEQ ID NO: 478487 - DNA, 201 bp, Homo sapiens
actgagcagagtctcctgtcttgttcaccctgagcgcggagctccgcacaggacaggatcagagcgcaaaccaggaacaaatggatgaaccaaggaagggrccagggcagtaggtccccacccacaccctgaaccctaagggtgggactcagaggctggagacgggctggccccaggatcctctaagtgacaggaaccctt

SEQ ID NO: 478488 - DNA, 201 bp, Homo sapiens
ttccccaggacttctgactctacttctagttctccaacagatcacagttacttctgtggtgtaaatacatcaatacgaaagaaaacttttatttcaaaacrccaatagtaaataagataaaatttatagagctcttcttagaatatcatgagattatttgtgattgcaataatttctgtttcctctttataatattaggtg

SEQ ID NO: 478489 - DNA, 201 bp, Homo sapiens
aatgtacagaactcaactttctactaaagagtcaaaggctaaatttttggctaagaaattatgcttcttatatgataaaaatcatacatgccaaaacttaycatactttattaaacaacataatgtaaggtctgattcaacagaaatattgcagaatggtgattttttaaaatatgtgtaagtatatgtttgttttcaaaa

SEQ ID NO: 478490 - DNA, 201 bp, Homo sapiens
tggccctttaagagggcagttctgcccaccaccctgaatgcccctcccctagctactggagaagagatcccgtttcttggcaacaggaagctcttggtttacacagtgtcacccaagcgactgggagccgcgtcctgctctgggactgagccgttggagctgccccgctgaccgcactaggctgaccgcaaccggctgacc

SEQ ID NO: 478491 - DNA, 201 bp, Homo sapiens
ggccctttaagagggcagttctgcccaccaccctgaatgcccctcccctagctactggagaagagatcccgtttcttggcaacaggaagctcttggtttacacagtgtcacccaagcgactgggagccgcgtcctgctctgggactgagccgttggagctgccccgctgaccgcactaggctgaccgcaaccggctgacca

SEQ ID NO: 478492 - DNA, 201 bp, Homo sapiens
cctctgcagatgtttattatcctaataaaatttctatgttctggattatttttcctttgcagttctcagatatttaatttctcacttcaacatcttcaaawgaatgcatatacttgaaaagtagtaaggaaagaatattctgctaaagtttttgttactattcactctaatatatattataaaaaaggataccagagataa

SEQ ID NO: 478493 - DNA, 201 bp, Homo sapiens
tggaagtggaggctgagaagtctcccacttcgcagagctgggctctggcccagaggccttctcgttggctcaggtggtctctcgggctcctggggccacaratcaggggacaaacacgggcagctctgctctgctctgcctaaagagaggtgcccagtgaatgcaggttccagacaaaaggtggagcctggcatcctgccc

SEQ ID NO: 478494 - DNA, 201 bp, Homo sapiens
cgcgagcaccccaacctcgtgcgcgaccatgtggaaacggagctgctgaaggtgccagcacccttgggtggccgggatttgtgggcgcagagaggaggagcccccccccccgcagttcatgtggacaagccacgtggctgctgcaagcacgcgggagcccagccctctgcacgtgagacccctgagtcccgaaatctggcc

SEQ ID NO: 478495 - DNA, 201 bp, Homo sapiens
tctcattaatttagacattaatcaaattaatgaatctgactaatctgattcagacctataccttgatccaagggctgcacagatatctgtcaatctatgcygaggagcaagagacagaatttggaaggtaggcaggctgatggtcaaactgtaggccagctactttgttaactatgggatcatgaggcaattaatcagctc

SEQ ID NO: 478496 - DNA, 201 bp, Homo sapiens
ccacaggtcccctctcctccatgtcccctataacttcccaatccaccccagcttgtctgtggggcagccccacagggtgagagagtaactcagtcctggcmcagatgctggctctggagaattctctgacctctcagagcctggggcctccctgagaaccactacaggcctgtagacattcgtgaaagatgtggggtgggg

SEQ ID NO: 478497 - DNA, 201 bp, Homo sapiens
cttgtctgtggggcagccccacagggtgagagagtaactcagtcctggcccagatgctggctctggagaattctctgacctctcagagcctggggcctccrtgagaaccactacaggcctgtagacattcgtgaaagatgtggggtgggggcagctggtctcctgccataccccaagctcaggcaagaacccttgagtccc

SEQ ID NO: 478498 - DNA, 201 bp, Homo sapiens
ccaactgatggagacactgacagtgcacggagaggcaaacccagggatagaggggcgcaggacccgggccctggcacacaaggaagtacccagtggttgargcaaagaccccaatcacagagaaaaggcttgttcctacacacagcaaattaaactggccaggcaataagaagaaacacagggtccttctcctgttcttgg

SEQ ID NO: 478499 - DNA, 201 bp, Homo sapiens
tgaaatctagtcccagaagtggagttgttgagttaaagggatgtcaggctatttgaaattttgatacacagcactaagttaaccttcagaaataatttacyaatttcctataccaacagtgtatgagaatgcctttttcctcacatttgccaacactagtaattacttcttaaatatcagcatgactttacaaaatatatc

SEQ ID NO: 478500 - DNA, 201 bp, Homo sapiens
attgacaatacctggtgagtcatagtatacagcaagcatgagagctgacctaaaacaacaaagaaataactccactcaagaactttaataaagactttttwaaaaagctagtttgatacactttaccagtttaatatccgcctgtcagtatagatgtaataaccatttgcatgtactagcttgggtctataagcatctagg

SEQ ID NO: 478501 - DNA, 201 bp, Homo sapiens
aaaattcaattaatggatgacataaattttgttacctaaactggaagaaaactgatgacctaaaacaaggtagaaagatccactgtctcttttccatgatytgtctctggataaaagactaatctgcatcacttcagaatggcagtcttgattcctcagcatggaacccacttaggaaggtcctattgctttcctttgccc

SEQ ID NO: 478502 - DNA, 201 bp, Homo sapiens
gccagcatgggctggcggggctcccctggacggccctcaggtcgctcacagcattgtcccaggacttcctccgcctgtgccaggtgggcaaggtagggggkagcttccaaggcttctatcccaactctacctatttctacctattttctcttgagttattttgcctttatctcagttttatttgcaaaaatagtatacgca

SEQ ID NO: 478503 - DNA, 201 bp, Homo sapiens
gaactacaggtgcgtaccatcatgccatgctaatgtttttattgttatcttagtagagacaaggcctcattatactgtccaggctggtctcaaactcctgrgctcaagtaaatcttccacttctgcctcccaaagtgttgagataagcagtgtgcaccaccacacccagccctaatcaatttctttaaatcaatctcaatg

SEQ ID NO: 478504 - DNA, 201 bp, Homo sapiens
cgcctggccaactgccagacttaaccgctgccgcccaggcatctgtctctagcgttgctgctacttgggtagaagtgggggtcggggtggggcgtggagcktcaccggttgccaggccagcactgtctttgcaacatattcagatggcggcgggcagctcgggcgccagcatgggctggcggggctcccctggacggccct

SEQ ID NO: 478505 - DNA, 201 bp, Homo sapiens
cagccccttgcaaacattaatctactttttgtccctatacatttatcttttctggatgcttcatgtaaatggaattatacagtatggtaaacacacttttwatctagatttttatattcaactaagttcaacatgtatccagaaccaaatgtttaaattttctttctagaagtttgaaaatatttatcttccttgatactt

SEQ ID NO: 478506 - DNA, 201 bp, Homo sapiens
catggagagggggactggggtcccccatgactgtgccccagcagcctcccccactaccttccccaacaggggatgctcccagacacttctgagctgccatrggtgcccatttcacaggtagggaaaccaaggctcagatccagggagctgcatttatgtgcgcctccacccgtctttctccacaagccccaggagctcagg

SEQ ID NO: 478507 - DNA, 201 bp, Homo sapiens
caaggaagtacccagtggttgaggcaaagaccccaatcacagagaaaaggcttgttcctacacacagcaaattaaactggccaggcaataagaagaaacayagggtccttctcctgttcttggtgtgaagatggcctttcccagcacagagccctgaggggcagcctgggcgggcatctgggcccccagagtttgggtcct

SEQ ID NO: 478508 - DNA, 201 bp, Homo sapiens
ttcctgcaacattatttgaacatccctgactattgagaacaatcccaactaatattggttaaaggaaagacaaacatggctctcaaaggataacataccaygaaggcctaggcaaagtctagctaagacgtgggctccaaataaggtttttagtgtacggtgagcatcaacttgctcaatacttgtgtggataaagctagg

SEQ ID NO: 478509 - DNA, 201 bp, Homo sapiens
taaactggccaggcaataagaagaaacacagggtccttctcctgttcttggtgtgaagatggcctttcccagcacagagccctgaggggcagcctgggcgrgcatctgggcccccagagtttgggtcctcaggggctgtccagaggccaagggcaggccaacgttcccaggtgcactgagtgagcagcagcgatgactcct

SEQ ID NO: 478510 - DNA, 201 bp, Homo sapiens
tcctcaggggctgtccagaggccaagggcaggccaacgttcccaggtgcactgagtgagcagcagcgatgactcctgaagcctggggcgtgggaactgccrctgagggaccttcccagcagcccacagaaggccctggaggaaaacaccccacttacaacgcaccaaggagaatgcccaaaagcccaagataaacccagtg

SEQ ID NO: 478511 - DNA, 201 bp, Homo sapiens
cagcagcgatgactcctgaagcctggggcgtgggaactgccgctgagggaccttcccagcagcccacagaaggccctggaggaaaacaccccacttacaaygcaccaaggagaatgcccaaaagcccaagataaacccagtgagagagcagaacttacacagtcagagctcaggcccggcattcaactccttgtggttgct

SEQ ID NO: 478512 - DNA, 201 bp, Homo sapiens
agcagcgatgactcctgaagcctggggcgtgggaactgccgctgagggaccttcccagcagcccacagaaggccctggaggaaaacaccccacttacaacrcaccaaggagaatgcccaaaagcccaagataaacccagtgagagagcagaacttacacagtcagagctcaggcccggcattcaactccttgtggttgctc

SEQ ID NO: 478513 - DNA, 201 bp, Homo sapiens
gcccacagaaggccctggaggaaaacaccccacttacaacgcaccaaggagaatgcccaaaagcccaagataaacccagtgagagagcagaacttacacartcagagctcaggcccggcattcaactccttgtggttgctcaggtgttgaccaaggcctgcagcagctgggcctcctgggatcctcaccagggactggctc

SEQ ID NO: 478514 - DNA, 201 bp, Homo sapiens
caactgcacagggatcagagtccctcacccccacattattcatgggtcaactgtagttatttatttactaaatataaacaatttattataaaaatgaaatygaagatccatttgtataacaagtccaatttggtataatgtgactatagaggaaacatacaacatactaacttaaaaatcttttttcttatttatgcaaaa

SEQ ID NO: 478515 - DNA, 201 bp, Homo sapiens
gcaccaaggagaatgcccaaaagcccaagataaacccagtgagagagcagaacttacacagtcagagctcaggcccggcattcaactccttgtggttgctmaggtgttgaccaaggcctgcagcagctgggcctcctgggatcctcaccagggactggctctggtgctcagggcgtctcctccctcaggaagccgagctca

SEQ ID NO: 478516 - DNA, 201 bp, Homo sapiens
aatgcccaaaagcccaagataaacccagtgagagagcagaacttacacagtcagagctcaggcccggcattcaactccttgtggttgctcaggtgttgacmaaggcctgcagcagctgggcctcctgggatcctcaccagggactggctctggtgctcagggcgtctcctccctcaggaagccgagctcatccggaacatt

SEQ ID NO: 478517 - DNA, 201 bp, Homo sapiens
atgacataaattttgttacctaaactggaagaaaactgatgacctaaaacaaggtagaaagatccactgtctcttttccatgatctgtctctggataaaasactaatctgcatcacttcagaatggcagtcttgattcctcagcatggaacccacttaggaaggtcctattgctttcctttgccctaaatcagtacaggaa

SEQ ID NO: 478518 - DNA, 201 bp, Homo sapiens
tccgtactccaccaccttccaagagaggtgggccccagctctgcccctgcacttgccctggctgtggtctcgcctccctctgcctgggggccccagcggcrctgctttcaccagcctggcccggaggccctcgcccccgagggcacttgggcaactgtctgcccctggcatgagcaagcgaccaagacctcctcaaatgtc

SEQ ID NO: 478519 - DNA, 201 bp, Homo sapiens
cttttccatgatctgtctctggataaaagactaatctgcatcacttcagaatggcagtcttgattcctcagcatggaacccacttaggaaggtcctattgmtttcctttgccctaaatcagtacaggaaagcccctacaatatttgaaatgtatgaaagctaaatgtacagaagtcaaataacaaaggtgtatgttcttat

SEQ ID NO: 478520 - DNA, 201 bp, Homo sapiens
cttcaaggaaggatgttttgcaggaggccctacaaagcaaaggggatatgtcatcaattatatgtaagtatgacagggccaaccaaacattcatgcagtgktactatcgagctgaattctcatgcctggctataaaaataattacttaaggtttggagggttcttcttggcttcttttcattgcctaggacagcaacatga

SEQ ID NO: 478521 - DNA, 201 bp, Homo sapiens
ataaaactttaagatgcttggacataggtattcaggagtggttcacagatctatttgcattagagataattaactctaattattgtgaggagcataaaatyctgaggcacataaatcaatgaacaaagataaaatataaggcagtgttgcaaagatgctgcaggcctgaggagatgttttcagaaatatttaggatacaag

SEQ ID NO: 478522 - DNA, 201 bp, Homo sapiens
attttaaaacaacaccaaaaattaagttggggttacaagtgttgtgcagaaaagatttcatatagcaggcaagaggctgccatccatccttagaaaggcckgcatgcaaggctggcccttggctggtgtttaggaaattggaaatgggagggtttccaccattccctgagaagaatggctcactgtgtctaaagtgcttat

SEQ ID NO: 478523 - DNA, 201 bp, Homo sapiens
tcctccctgtcacagggacgtctgtcacagagccatgccccacctcctgctttctggagatgccaactgccctccccatctctgggtcctgaccaaggtgytctaatggacaccccctgacccaggtctcagggagctgccagcacgatgggtccctaaagctgagatccagcaagacacatgtggcctgagggtcccact

SEQ ID NO: 478524 - DNA, 201 bp, Homo sapiens
ccatgccccacctcctgctttctggagatgccaactgccctccccatctctgggtcctgaccaaggtgctctaatggacaccccctgacccaggtctcagrgagctgccagcacgatgggtccctaaagctgagatccagcaagacacatgtggcctgagggtcccactctctggctggcagaacccagaggtgggagcac

SEQ ID NO: 478525 - DNA, 201 bp, Homo sapiens
gggatcataattaaataaatgaatgttttcagacaataatgtttgagattataaattagctacaactaccttcttaaataaatctgaatttcaaactaaasaagttaaattttaaaaattaatttacatatgtatatacatatatacactttcaatttacacatatttttaaactggtcttttttgactgaaactacctta

SEQ ID NO: 478526 - DNA, 201 bp, Homo sapiens
taacttcagaaatgcttttgtttgaaaggtgggagataaagtttcaaggagattaagtcccaatattcctattttaaatctctcagcttgtgcaggcgggrcaggtaaacatgaagtgtttaaggatggacgggtcctgagagatggtagaatatgtctgctacatagcaggtactcaggttacgcttgatccataaatag

SEQ ID NO: 478527 - DNA, 201 bp, Homo sapiens
tcttgaactcctgaactcaggtgatctaccgacctcctgaactcaggtgatctaccgacctcggcctccaaaactgctgggattacaggtgagtctccacrcctggtgaagtaaatattttaaataaactacaatgacaaaattatgatgataaagtcttaccatccattggtattaagagtctctgcttctagaactggt

SEQ ID NO: 478528 - DNA, 201 bp, Homo sapiens
cttcaacaaaccacttggggagacactagatatcaccaggttcaagccatatgaaatctcagggtcactcacaaattgttccacccaacataaatcaacawaactgttagaaacaaaacaaaattttgaaatacagtcaaaatatacaatgtaacactttactatacttcataacagtatctttttaacaagacactaatt

SEQ ID NO: 478529 - DNA, 201 bp, Homo sapiens
gtcagacccaggcgctggcaggattgcgtttccgcccaaggccagcagagggagcctgaccaccgcccactagagggcggcaaactcctgggagcaaaaasagggcgcgggcgctgggtactagggaaggggggctgcgggggccggaggtgctgcagagggggcctccggggcagcggtgctgggaacggggtcgcgggg

SEQ ID NO: 478530 - DNA, 201 bp, Homo sapiens
acgaggggactaagtgcccggggtgggtagggtgtggggggactcagagaagttgtggccagggggcactcgggggcagggagcctgagggactgggcttygtggggcagcatggggtgcatcggagtccatgcacgtcctccaggagcatggggcgcggacagggcatgggggcgcagcagggctcccagccttcggcag

SEQ ID NO: 478531 - DNA, 201 bp, Homo sapiens
ggggactaagtgcccggggtgggtagggtgtggggggactcagagaagttgtggccagggggcactcgggggcagggagcctgagggactgggctttgtgrggcagcatggggtgcatcggagtccatgcacgtcctccaggagcatggggcgcggacagggcatgggggcgcagcagggctcccagccttcggcagagcc

SEQ ID NO: 478532 - DNA, 201 bp, Homo sapiens
ccgtgcacattgttcccctcatccacgcctccccagggccactggtcaggactgccctctggacacagccccaagacctgggtaggaccagcctggtctcygcgttctatatacccgggcatgggggcacaggcccaaggagaactgtcctgtctgcagacactgcgggaaatcacagatcaggaacacaacgtggcggca

SEQ ID NO: 478533 - DNA, 201 bp, Homo sapiens
cactgcgggaaatcacagatcaggaacacaacgtggcggcactgaagcaggccatcaaggacaaagaggcacctctgcacgtagcccagacccggctgtasctgcgctcgcaccggcccaacatggagctgtgccgtgacgcagcccagttcaggtgctgcctgggcctctgaggcagtcccaggtggccctgtccacctc

SEQ ID NO: 478534 - DNA, 201 bp, Homo sapiens
cgggaaatcacagatcaggaacacaacgtggcggcactgaagcaggccatcaaggacaaagaggcacctctgcacgtagcccagacccggctgtacctgcyctcgcaccggcccaacatggagctgtgccgtgacgcagcccagttcaggtgctgcctgggcctctgaggcagtcccaggtggccctgtccacctcctccc

SEQ ID NO: 478535 - DNA, 201 bp, Homo sapiens
tctctctttttttttttttttttttgaatcctgtgatatcaaaaaagtaaaaaaagtaaaggttctctttgaattatgggaaccaacgtttgccacaacamaagaagcagagtgaaactgctgagtttctagtgccgaattctggaaaatgagatgcttcccagatttcacattcaattaccacaaaagtttataggtgga

SEQ ID NO: 478536 - DNA, 201 bp, Homo sapiens
gtgccgaattctggaaaatgagatgcttcccagatttcacattcaattaccacaaaagtttataggtggaaaacatatggtacagttacctactttaactscattatctactgataatgggagtcaaaccaaccaagacatattaaatgtttcatccagagctcttgaggtggcattcactagcatttcatggcaccatat

SEQ ID NO: 478537 - DNA, 201 bp, Homo sapiens
ctgtaaaggacttttataaaacagctatcatatcaaagaactggctgtctcaaaaaaaattagccaaagcatctatatgcaacttaatcacatcttattcmctcatgtcagtgaaacttctctctctgaggcctgacagttatcaagtgaaatgagctgctgtggtttaccccaactctagcactccctcctgcctccagt

SEQ ID NO: 478538 - DNA, 201 bp, Homo sapiens
aaataactccactcaagaactttaataaagacttttttaaaaagctagtttgatacactttaccagtttaatatccgcctgtcagtatagatgtaataacyatttgcatgtactagcttgggtctataagcatctagggtgctcaagtgttcatctttgtaaattgtcaccaaggctaaaagaaagggacaacagggaagc

SEQ ID NO: 478539 - DNA, 201 bp, Homo sapiens
aggagattaagtcccaatattcctattttaaatctctcagcttgtgcaggcgggacaggtaaacatgaagtgtttaaggatggacgggtcctgagagatgrtagaatatgtctgctacatagcaggtactcaggttacgcttgatccataaatagaatgaaagaatggataaatacagttggggagttcaatatttttaaa

SEQ ID NO: 478540 - DNA, 201 bp, Homo sapiens
attagctgcagttaatcaatagaccaggtattctagcagaattaaatttgatgctcctgtgttatctttaaatgatacagctcttctgaaaacccatactyatagtgcatgattatccattaagacaaggtgatggaatgtgtgaatacagctgaggagacaccacaaggcaaacgctcaatggttcccattaatattggg

SEQ ID NO: 478541 - DNA, 201 bp, Homo sapiens
tgccaatgtcaggcactcctgctccaaatgggtcaccatggaaatgagctttgaattaagagagattgccttcaaatgcatttattttccttattattaartagtccatgggtttttcccctaatacaagagaagagatttttatctttactgttagaaagctcagtatattctgtgtaagagagataggtttaaaaaact

SEQ ID NO: 478542 - DNA, 201 bp, Homo sapiens
ttcatgtaaatggaattatacagtatggtaaacacactttttatctagatttttatattcaactaagttcaacatgtatccagaaccaaatgtttaaattktctttctagaagtttgaaaatatttatcttccttgatacttactactccttctgctttctctctctcatactgaaagagactttcttttaaatgatcaca

SEQ ID NO: 478543 - DNA, 201 bp, Homo sapiens
agcagcagaaatactgtggctttctatctgaatcatatgcttcatttctttggggtgggtaaacaacaaatcaaaaagactttctggatctctagactgargccaatgcctaatgtccaatttccaattagtggtatctgggtttacattttttgccatttgcatgtcaaactcttaatcatctttcatttcaatcataat

SEQ ID NO: 478544 - DNA, 201 bp, Homo sapiens
cgctgcctggactgccacagagttggaccctccagatgcatcttcctcctcacaatcagggacctgattcatcagattagagggcactccttttttgttcrtccctctttagagttactacataggagctcttcctcagggcaagcagtaattctggagttttcaaaactttcaccaatattcagctcgaacttgtttgta

SEQ ID NO: 478545 - DNA, 201 bp, Homo sapiens
tggacagataaaatttcccagagttattacagctctgtttcactgataacattctatttcagtttgactcttttaacacttttatagtcagttataagaaytacattcactaaatcataaactagacattatactagtcattcctatatacattcattgatgaactcatctagttaccacaattttgaaaaagaaatgtta

SEQ ID NO: 478546 - DNA, 201 bp, Homo sapiens
gttggaccctccagatgcatcttcctcctcacaatcagggacctgattcatcagattagagggcactccttttttgttcgtccctctttagagttactacrtaggagctcttcctcagggcaagcagtaattctggagttttcaaaactttcaccaatattcagctcgaacttgtttgtaatgaattttaaagaaagtcgt

SEQ ID NO: 478547 - DNA, 201 bp, Homo sapiens
taaactggaagaaaactgatgacctaaaacaaggtagaaagatccactgtctcttttccatgatctgtctctggataaaagactaatctgcatcacttcaraatggcagtcttgattcctcagcatggaacccacttaggaaggtcctattgctttcctttgccctaaatcagtacaggaaagcccctacaatatttgaaa

SEQ ID NO: 478548 - DNA, 201 bp, Homo sapiens
tataaattagctacaactaccttcttaaataaatctgaatttcaaactaaacaagttaaattttaaaaattaatttacatatgtatatacatatatacacwttcaatttacacatatttttaaactggtcttttttgactgaaactaccttaatcttacatcttactttgtactttcttatcaagagtaggaccaccaaga

SEQ ID NO: 478549 - DNA, 201 bp, Homo sapiens
tctaactaatctagacttctgcttgatttctggctaaaaggcagactaactcttcgctatttcaaactatctgaaccaaactatgaactctcacctaatgyataagatggagtagttgcaattattttaaacttcaatttagcattaactggccttttaacataaacacttactttgtcaaatgatgagaaatagcataat

SEQ ID NO: 478550 - DNA, 201 bp, Homo sapiens
aaatattaataattgtacctgtaagtgtcatcattcatttttaaaaatgagataaaatttctggttttagacctaaacaatatatattaaatcaagtggayattataagtaacagtgataagataaagtttaaaatatagaatttttaccaaagattgatttacccgatttggagtatttcttgcagtctttgatttcatc

SEQ ID NO: 478551 - DNA, 201 bp, Homo sapiens
gtgataagataaagtttaaaatatagaatttttaccaaagattgatttacccgatttggagtatttcttgcagtctttgatttcatctctagtgactgaasagttggttcaagttgttttgcttcaacttctttcttatattgtttctctttcctttctaattcttctctattttttttgtacagcatattaacatttgtt

SEQ ID NO: 478552 - DNA, 201 bp, Homo sapiens
tacaaattagctttaacaaaactcctgattcaaattatttgtgagaagggcgattctaactcaacacaccaacaaaataaaagccttatccctctgctccsccaaaatatcccattcagagcctgcgcgtgtgtgtacacacacttgtgcactcatccccacctgaccgtatcaaattattatttaaactagatattttta

SEQ ID NO: 478553 - DNA, 201 bp, Homo sapiens
tacccgatttggagtatttcttgcagtctttgatttcatctctagtgactgaacagttggttcaagttgttttgcttcaacttctttcttatattgtttcyctttcctttctaattcttctctattttttttgtacagcatattaacatttgttttttcttcattttcttgttttaaggtgcatctgcagataaagacatt

SEQ ID NO: 478554 - DNA, 201 bp, Homo sapiens
ggcgagtgactctggcggcgcagcgctggctttcccgtctgcggaggaggagagctgcggggctgggtgagctggacccagcagcacggctggctgctctyggcctccgatggggagtggacagcttagggggttgccctcgtgccagccggcctgctggccacgctgggcttcatcacctcctcacttgcctgcacaggc

SEQ ID NO: 478555 - DNA, 201 bp, Homo sapiens
tttcatctctagtgactgaacagttggttcaagttgttttgcttcaacttctttcttatattgtttctctttcctttctaattcttctctattttttttgyacagcatattaacatttgttttttcttcattttcttgttttaaggtgcatctgcagataaagacatttatcttaaaattcattttgttaaaaaataaaga

SEQ ID NO: 478556 - DNA, 201 bp, Homo sapiens
actgaacagttggttcaagttgttttgcttcaacttctttcttatattgtttctctttcctttctaattcttctctattttttttgtacagcatattaacrtttgttttttcttcattttcttgttttaaggtgcatctgcagataaagacatttatcttaaaattcattttgttaaaaaataaagagttcatcctgtgat

SEQ ID NO: 478557 - DNA, 201 bp, Homo sapiens
aatatgtttttcctgatgatttcctttctaacagcttcatttctctagcttattttattgtacgaacacagtatataataatgcagcacaaacaaaatagktgttcatcaactgtttatgttatcaggaaggcttccagtcaattgtgggctattagtagctaaggtgaaggaatcaaaagttatactcagattttcaact

SEQ ID NO: 478558 - DNA, 201 bp, Homo sapiens
attgtttctctttcctttctaattcttctctattttttttgtacagcatattaacatttgttttttcttcattttcttgttttaaggtgcatctgcagatraagacatttatcttaaaattcattttgttaaaaaataaagagttcatcctgtgatatacctctgcagatgtttattatcctaataaaatttctatgttct

SEQ ID NO: 478559 - DNA, 201 bp, Homo sapiens
gtgtataatccaagtatttgcatgtaaaatattttctttctctggtatcatatgttctaccaaaaaatcaggctctcatatgtaataaaaattgctaaaamgactcacaatacctgcttcaagaatttttccaacatgtattcatttaaaatatgtttgtatataattttcccagattgttaaccaaatagataattggtt

SEQ ID NO: 478560 - DNA, 201 bp, Homo sapiens
attattagatacattaggtttattatattacttataacattccattatataaaaattcatttgtctatttattcagattaaacaactattaaggctgaatrtcttatgcctgtaacccagcactttgagaggctgaggcaggcagaacacttgagcccaacagttaaagaccagcctgggcaacaaggcaaaaccctgtct

SEQ ID NO: 478561 - DNA, 201 bp, Homo sapiens
tgttggtcaggctggtctcaaactcccaacctcaggttatctgcccgcctcagcctcccaaagtgctgggattacaggcacgagccaccgcgcccagccayatatggggattttgttttaaaagttctgtttcctggatctaccaagctcatgagaaaatagaagcaaacaagtcatttgcataggtaagaaaccttgcat

SEQ ID NO: 478562 - DNA, 201 bp, Homo sapiens
actggtaactgtatttcagggacctggagtatgaatggaataaaaagacatttgacatgggcttcctctgttcaggcgctgcctggactgccacagagttrgaccctccagatgcatcttcctcctcacaatcagggacctgattcatcagattagagggcactccttttttgttcgtccctctttagagttactacatag

SEQ ID NO: 478563 - DNA, 201 bp, Homo sapiens
atatacaatgtaacactttactatacttcataacagtatctttttaacaagacactaattgagttggcagttactaataatttgcaaaattattgttgttyataccttaattagtgtgcaccccattttttacatcgcaaatgttttcccctactattctgaaaaatctattttcatcttttaagactcagaaagtaggct

SEQ ID NO: 478564 - DNA, 201 bp, Homo sapiens
taatacaggctgttatcaaccccatcagtcaaaggaagaggatcagtgaggaacatatgtatttacctatagcattcactgcctggtcttatttccaaccraaggtaagtatgaaagactttgtgattccagttttataaagtacaaccccttgcacttgtccccttccattactagagagtctatctggacccacctcac

SEQ ID NO: 478565 - DNA, 201 bp, Homo sapiens
tctttctccacacacacgggtatctgcttcattggagtcccttagtactttgtcaatttttccagtgtcactttaccacctgaactgcacatcatgtcttwacatgtcgatcccctttgctgctagactgtagaggacaatcttttgaatcatctttgtataaacagtcttaattttgctaaataattacttattgagttc

SEQ ID NO: 478566 - DNA, 201 bp, Homo sapiens
acatttgttttttcttcattttcttgttttaaggtgcatctgcagataaagacatttatcttaaaattcattttgttaaaaaataaagagttcatcctgtkatatacctctgcagatgtttattatcctaataaaatttctatgttctggattatttttcctttgcagttctcagatatttaatttctcacttcaacatct

SEQ ID NO: 478567 - DNA, 201 bp, Homo sapiens
ttccctttatcacaattcttacccagttctggttcttgagacttttttttttttttggcaggtgcaaaatggaaaacaaatttgcttgttttgtttctcaratgtcttttctgtcagagtgcatgttttaaaattagctttaatcaagcataaacaaaaatactagaaaataattaaaatttaactgtgaaacttaatcta

SEQ ID NO: 478568 - DNA, 201 bp, Homo sapiens
attttcttgttttaaggtgcatctgcagataaagacatttatcttaaaattcattttgttaaaaaataaagagttcatcctgtgatatacctctgcagatrtttattatcctaataaaatttctatgttctggattatttttcctttgcagttctcagatatttaatttctcacttcaacatcttcaaaagaatgcatata

SEQ ID NO: 478569 - DNA, 201 bp, Homo sapiens
agagtttcaatgaagcttaatgtttactgaaatatttagttctttaagaaatacttctaatcatccaaaacttcaacaaaccacttggggagacactagawatcaccaggttcaagccatatgaaatctcagggtcactcacaaattgttccacccaacataaatcaacaaaactgttagaaacaaaacaaaattttgaaa

SEQ ID NO: 478570 - DNA, 201 bp, Homo sapiens
ctattctgaaaaatctattttcatcttttaagactcagaaagtaggctgggcataatagctcacatctgtaatcccagcactttggaaggccaaaatgggrgaattgctcaaggccaggagtttaagaccagcctgggaaccatagataaccttgactctacaaaaaattggacaggtatggtgatatgtgcctgtagtcc

SEQ ID NO: 478571 - DNA, 201 bp, Homo sapiens
aggtgcatctgcagataaagacatttatcttaaaattcattttgttaaaaaataaagagttcatcctgtgatatacctctgcagatgtttattatcctaayaaaatttctatgttctggattatttttcctttgcagttctcagatatttaatttctcacttcaacatcttcaaaagaatgcatatacttgaaaagtagta

SEQ ID NO: 478572 - DNA, 201 bp, Homo sapiens
agataaagacatttatcttaaaattcattttgttaaaaaataaagagttcatcctgtgatatacctctgcagatgtttattatcctaataaaatttctatrttctggattatttttcctttgcagttctcagatatttaatttctcacttcaacatcttcaaaagaatgcatatacttgaaaagtagtaaggaaagaatat

SEQ ID NO: 478573 - DNA, 201 bp, Homo sapiens
gttaaaaaataaagagttcatcctgtgatatacctctgcagatgtttattatcctaataaaatttctatgttctggattatttttcctttgcagttctcaratatttaatttctcacttcaacatcttcaaaagaatgcatatacttgaaaagtagtaaggaaagaatattctgctaaagtttttgttactattcactcta

SEQ ID NO: 478574 - DNA, 201 bp, Homo sapiens
cctaataaaatttctatgttctggattatttttcctttgcagttctcagatatttaatttctcacttcaacatcttcaaaagaatgcatatacttgaaaaktagtaaggaaagaatattctgctaaagtttttgttactattcactctaatatatattataaaaaaggataccagagataattcagtaaagttacaggttc

SEQ ID NO: 478575 - DNA, 201 bp, Homo sapiens
tttttcctttgcagttctcagatatttaatttctcacttcaacatcttcaaaagaatgcatatacttgaaaagtagtaaggaaagaatattctgctaaagyttttgttactattcactctaatatatattataaaaaaggataccagagataattcagtaaagttacaggttcaaaattacctttttaaatcacacagtca

SEQ ID NO: 478576 - DNA, 201 bp, Homo sapiens
taatttctcacttcaacatcttcaaaagaatgcatatacttgaaaagtagtaaggaaagaatattctgctaaagtttttgttactattcactctaatatayattataaaaaaggataccagagataattcagtaaagttacaggttcaaaattacctttttaaatcacacagtcataattactccctaattagaaaagatc

SEQ ID NO: 478577 - DNA, 201 bp, Homo sapiens
gtatgagaatgcctttttcctcacatttgccaacactagtaattacttcttaaatatcagcatgactttacaaaatatatcttattttatgttaatttgcwtttttctgattaccaggcagggctaaatacccctggtaaaaatataaaacttgttaatcataaggaatattagtccaattttgaattagtttatagcaca

SEQ ID NO: 478578 - DNA, 201 bp, Homo sapiens
aaatactgtggctttctatctgaatcatatgcttcatttctttggggtgggtaaacaacaaatcaaaaagactttctggatctctagactgaagccaatgyctaatgtccaatttccaattagtggtatctgggtttacattttttgccatttgcatgtcaaactcttaatcatctttcatttcaatcataattactgggt

SEQ ID NO: 478579 - DNA, 201 bp, Homo sapiens
actgggcatatgctgaagcaactggaagtgagttgtctcaagtttacttggcttcaactcccaagaccccagcaaatgtctttctttcctccctccgtgtsctttcacaatccctcttcctttgaaaaattgatttttagaactgtcatcctgatgcttcccttcctaactgctttttatggataattgtgaccactgacc

SEQ ID NO: 478580 - DNA, 201 bp, Homo sapiens
tattcaactaagttcaacatgtatccagaaccaaatgtttaaattttctttctagaagtttgaaaatatttatcttccttgatacttactactccttctgytttctctctctcatactgaaagagactttcttttaaatgatcacattcattcattagcttcttacttttctcttctagtacgaggtctttctttccactc

SEQ ID NO: 478581 - DNA, 201 bp, Homo sapiens
tcttcctggcaatggacagcctgtccgtgttagaccaagaaacagattgtaaattccaagaattcaaaatacacattccacaggtttcaccaactagttayatgtaaatgagatcaatttattttaattctatatatgtaaatcaaatccatgtcatgctgaaatagttggctctaatatacctgtatcaaaggcgttctg

SEQ ID NO: 478582 - DNA, 201 bp, Homo sapiens
gcacttgtccccttccattactagagagtctatctggacccacctcacagagcaagatgctccagtttgtgctgtgtggtacagcacggtgtccttttccwcaaccctttctattatgtgccacatatctatacaaatcacgttttctaagtatgtaaagcatatgtcatcagaatatatcattctttacaatgataaaga

SEQ ID NO: 478583 - DNA, 201 bp, Homo sapiens
gcctttttcctcacatttgccaacactagtaattacttcttaaatatcagcatgactttacaaaatatatcttattttatgttaatttgcatttttctgawtaccaggcagggctaaatacccctggtaaaaatataaaacttgttaatcataaggaatattagtccaattttgaattagtttatagcacaatgacaatta

SEQ ID NO: 478584 - DNA, 201 bp, Homo sapiens
gtagtcccagctgcttgggaagctgatgtgggaggatcacttgagcctgagaggtggatactgcagtgagccaagatcatgccactacactgcagcatggrcaacagagcaagaccctgactccccaaaaatttcaatttaaaatgtgagaatgaagagagatacaaacaaaaaacaaacctaattggtcaatgaaatatg

SEQ ID NO: 478585 - DNA, 201 bp, Homo sapiens
gcacccagccagatattataattattactattactactaaacaaaaccattttaattaggtagaatgatacaattatacctactttgcaagatgacttaaygagtaggtcacattttaacacctctgacattggaatgccacttataattcatgatttgttataactataattggtagcattttaaaaattatcttattga

SEQ ID NO: 478586 - DNA, 201 bp, Homo sapiens
gcagagcctgacaatgatttgccctcacaaattatctgtcctgaagctaaacttaaaattcaattaatggatgacataaattttgttacctaaactggaasaaaactgatgacctaaaacaaggtagaaagatccactgtctcttttccatgatctgtctctggataaaagactaatctgcatcacttcagaatggcagtc

SEQ ID NO: 478587 - DNA, 201 bp, Homo sapiens
acaatgtacagaactcaactttctactaaagagtcaaaggctaaatttttggctaagaaattatgcttcttatatgataaaaatcatacatgccaaaactyaccatactttattaaacaacataatgtaaggtctgattcaacagaaatattgcagaatggtgattttttaaaatatgtgtaagtatatgtttgttttcaa

SEQ ID NO: 478588 - DNA, 201 bp, Homo sapiens
ccaggcacggtggctcactcctgtaaacccagcactttgagaggccgaggtgggcagaacacctgaagtcaggagttcgagaccagcttggctaacatggygaaatcctatttttactaaaaatacaaaaaattagccaggcatggtggcacatgcctgtaatcccagctactagggagactgagtcaggagaatcgcttg

SEQ ID NO: 478589 - DNA, 201 bp, Homo sapiens
ttaccacctgctaatttttgtattctattagagatggggtttcgccttgttggccaggctggtcttgaactcctgacctcaaatgatccacctgcctcagygtcccaaagtgctgggattatagacacgagccaccatgcccaacccagaaatcagtttctgaaatccttatataaaactttaagatgcttggacataggt

SEQ ID NO: 478590 - DNA, 201 bp, Homo sapiens
gatcacaccattgcactccagcttgggcaacaagagagaaactccatctcaaaaaaacaaaaacaaacaaaaaaaccccaaaaccaaacaaaaaaacacamactgctataggcttacttatcatgctcttccttcagcttcttgggaaattgctgaggatacgttttcccaatctttctttgttgggttaatctgccagca

SEQ ID NO: 478591 - DNA, 201 bp, Homo sapiens
ggatgctcccagacacttctgagctgccatgggtgcccatttcacaggtagggaaaccaaggctcagatccagggagctgcatttatgtgcgcctccaccygtctttctccacaagccccaggagctcaggggcaacaatggggactatggggagcccgtgccctgcctgccccaaccctgccacaggcccacaggctccc

SEQ ID NO: 478592 - DNA, 201 bp, Homo sapiens
ccagcttgggcaacaagagagaaactccatctcaaaaaaacaaaaacaaacaaaaaaaccccaaaaccaaacaaaaaaacacacactgctataggcttacytatcatgctcttccttcagcttcttgggaaattgctgaggatacgttttcccaatctttctttgttgggttaatctgccagcagcagcagaagatgtact

SEQ ID NO: 478593 - DNA, 201 bp, Homo sapiens
acacacactgctataggcttacttatcatgctcttccttcagcttcttgggaaattgctgaggatacgttttcccaatctttctttgttgggttaatctgycagcagcagcagaagatgtactatcacatatattttctgaaagttgtattttttcacttttgtttgtattatttccttttttgacctttaataaaagtaa

SEQ ID NO: 478594 - DNA, 201 bp, Homo sapiens
ggcttacttatcatgctcttccttcagcttcttgggaaattgctgaggatacgttttcccaatctttctttgttgggttaatctgccagcagcagcagaaratgtactatcacatatattttctgaaagttgtattttttcacttttgtttgtattatttccttttttgacctttaataaaagtaagatgaataataattg

SEQ ID NO: 478595 - DNA, 201 bp, Homo sapiens
tcatgctcttccttcagcttcttgggaaattgctgaggatacgttttcccaatctttctttgttgggttaatctgccagcagcagcagaagatgtactatsacatatattttctgaaagttgtattttttcacttttgtttgtattatttccttttttgacctttaataaaagtaagatgaataataattgttattatttt

SEQ ID NO: 478596 - DNA, 201 bp, Homo sapiens
tttctttgttgggttaatctgccagcagcagcagaagatgtactatcacatatattttctgaaagttgtattttttcacttttgtttgtattatttccttytttgacctttaataaaagtaagatgaataataattgttattattttattcaataaaaagaactttttccctgattttttttacttgattcaggttatcac

SEQ ID NO: 478597 - DNA, 201 bp, Homo sapiens
ttttgtttgtattatttccttttttgacctttaataaaagtaagatgaataataattgttattattttattcaataaaaagaactttttccctgatttttwttacttgattcaggttatcaccactttaatgataaaagtattttgtgcttactttaattttatcattatacataattattataattataagatactctta

SEQ ID NO: 478598 - DNA, 201 bp, Homo sapiens
ctttttccctgattttttttacttgattcaggttatcaccactttaatgataaaagtattttgtgcttactttaattttatcattatacataattattatmattataagatactcttattttatcatcgaaatttttgtcaaatctgctcatttctgtttgagtgaatagaagaattttctaaaatttcaaaaagggctct

SEQ ID NO: 478599 - DNA, 201 bp, Homo sapiens
aactgcacagggatcagagtccctcacccccacattattcatgggtcaactgtagttatttatttactaaatataaacaatttattataaaaatgaaatcraagatccatttgtataacaagtccaatttggtataatgtgactatagaggaaacatacaacatactaacttaaaaatcttttttcttatttatgcaaaaa

SEQ ID NO: 478600 - DNA, 201 bp, Homo sapiens
ccattatttagatagcagaactaatctactttgacacataattacacatttagataaccccactgtaactgtacacatgagattttcttgaatagaaaatwtgactaaatcaaataattgataaagaggaaaaagaagcagcaagtgaacctctgtctttttgaagttggacttgcttttctccaaagccaggaactcaac

SEQ ID NO: 478601 - DNA, 201 bp, Homo sapiens
gcatatagaagatctggcagaaacatgttttctcctgcccatttccagtcagtatttgaacacagaggcttccacggttttgattctttccacaaaaggtkagttttgtctgttttcaccatttatgtaagtgaaactataaattatataatttttatgttcactcactaaacatgcttgtgacacatcattttgctatta

SEQ ID NO: 478602 - DNA, 201 bp, Homo sapiens
atattcagatggcggcgggcagctcgggcgccagcatgggctggcggggctcccctggacggccctcaggtcgctcacagcattgtcccaggacttcctcsgcctgtgccaggtgggcaaggtaggggggagcttccaaggcttctatcccaactctacctatttctacctattttctcttgagttattttgcctttatct

SEQ ID NO: 478603 - DNA, 201 bp, Homo sapiens
aaatgtacagaagtcaaataacaaaggtgtatgttcttattgagaatacttttcccagaaagattgaaatattaacaattataaaatcccattattttcamcctataggtcctaccttattcaggtccacataaactagcaagcccttaaaactcttcataggcactcagacacccaaggagagagactgccagaaaaaaa

SEQ ID NO: 478604 - DNA, 201 bp, Homo sapiens
aaagcccaagataaacccagtgagagagcagaacttacacagtcagagctcaggcccggcattcaactccttgtggttgctcaggtgttgaccaaggcctkcagcagctgggcctcctgggatcctcaccagggactggctctggtgctcagggcgtctcctccctcaggaagccgagctcatccggaacattcaggagct

SEQ ID NO: 478605 - DNA, 201 bp, Homo sapiens
aatataggattcctaaaatgcacagtttacatttcagtagtgagattatgtttcaaatgcctatacctaaaatagaaaagcatggatatcaccgtgaacayatggactgatgaggagaaaagggaccattaaacagaggagcaaatcaaacctgagggaatcgacatcaaagctgatggtgaatgtacagagtattttaac

SEQ ID NO: 478606 - DNA, 201 bp, Homo sapiens
gtgctgggattatagacacgagccaccatgcccaacccagaaatcagtttctgaaatccttatataaaactttaagatgcttggacataggtattcaggamtggttcacagatctatttgcattagagataattaactctaattattgtgaggagcataaaattctgaggcacataaatcaatgaacaaagataaaatata

SEQ ID NO: 478607 - DNA, 201 bp, Homo sapiens
atagacacgagccaccatgcccaacccagaaatcagtttctgaaatccttatataaaactttaagatgcttggacataggtattcaggagtggttcacagwtctatttgcattagagataattaactctaattattgtgaggagcataaaattctgaggcacataaatcaatgaacaaagataaaatataaggcagtgttg

SEQ ID NO: 478608 - DNA, 201 bp, Homo sapiens
tttctgaaatccttatataaaactttaagatgcttggacataggtattcaggagtggttcacagatctatttgcattagagataattaactctaattattrtgaggagcataaaattctgaggcacataaatcaatgaacaaagataaaatataaggcagtgttgcaaagatgctgcaggcctgaggagatgttttcagaa

SEQ ID NO: 478609 - DNA, 201 bp, Homo sapiens
ttttttacttgattcaggttatcaccactttaatgataaaagtattttgtgcttactttaattttatcattatacataattattataattataagatactyttattttatcatcgaaatttttgtcaaatctgctcatttctgtttgagtgaatagaagaattttctaaaatttcaaaaagggctcttctccattttgtgc

SEQ ID NO: 478610 - DNA, 201 bp, Homo sapiens
taagatgcttggacataggtattcaggagtggttcacagatctatttgcattagagataattaactctaattattgtgaggagcataaaattctgaggcayataaatcaatgaacaaagataaaatataaggcagtgttgcaaagatgctgcaggcctgaggagatgttttcagaaatatttaggatacaagtatcagtgg

SEQ ID NO: 478611 - DNA, 201 bp, Homo sapiens
aattttatcattatacataattattataattataagatactcttattttatcatcgaaatttttgtcaaatctgctcatttctgtttgagtgaatagaagmattttctaaaatttcaaaaagggctcttctccattttgtgcttttattcccatccactctttgctatctggtataaatttttatgctatctggctggcag

SEQ ID NO: 478612 - DNA, 201 bp, Homo sapiens
gttacttgtatttactttacactttttctgtttcagttttactgtgccaaggaaatgcatttgggttttgtggtggttgttgctgctgctgttgttgctgytgctgctgctgttgttgttgttgttgttgttgttgttgttgtttgagatggagtttcactcttgcttcccaggctgaagtgcagtggtgcaatctcagct

SEQ ID NO: 478613 - DNA, 201 bp, Homo sapiens
aaaagggctcttctccattttgtgcttttattcccatccactctttgctatctggtataaatttttatgctatctggctggcagaaacagagaaataaaargacacaggcataacatatgtcttctgtctttactacctggattttacatgaaatagccagattaagaggatgtgacattgtaggccttcaggaacagtaa

SEQ ID NO: 478614 - DNA, 201 bp, Homo sapiens
atagtaaagcaatggaataatttattcttgaactttattgctgaaaccattttggaatcccaaataatgctcggtgtgtgtttttctgtaagttctaataytcaaatgttgcagttttcagaaaatgttattaagtgctaattttggttattacttgtattcattgtggcttgtaattcagggcattttacctaattcata

SEQ ID NO: 478615 - DNA, 201 bp, Homo sapiens
ttacaggcacgagccaccgcgcccagccatatatggggattttgttttaaaagttctgtttcctggatctaccaagctcatgagaaaatagaagcaaacamgtcatttgcataggtaagaaaccttgcatttatacttcgtcatcactactctagaagattatcatcatgttatgtaaaataaaatgttaattctagacat

SEQ ID NO: 478616 - DNA, 201 bp, Homo sapiens
ccattttgtgcttttattcccatccactctttgctatctggtataaatttttatgctatctggctggcagaaacagagaaataaaaagacacaggcataayatatgtcttctgtctttactacctggattttacatgaaatagccagattaagaggatgtgacattgtaggccttcaggaacagtaaagaagttttccctt

SEQ ID NO: 478617 - DNA, 201 bp, Homo sapiens
atttattactgttgacctgatcatatgactgattaagggcactgaatttaacttgtatgtgaagtagaccccatattagctgcagttaatcaatagaccargtattctagcagaattaaatttgatgctcctgtgttatctttaaatgatacagctcttctgaaaacccatactcatagtgcatgattatccattaagaca

SEQ ID NO: 478618 - DNA, 201 bp, Homo sapiens
tgtaagtatatgtttgttttcaaaaatattggaaataactatgatgggactgtaagttcaaacagtttgagctaagcagataaacttgcatgcatgaaaayacattaaacagactcatttggctgggaatattcgttgcaactctcaaggctagacgtgtttttgtggcttgtctcagtcattgcttccctcccattgtat

SEQ ID NO: 478619 - DNA, 201 bp, Homo sapiens
ctggcagaaacagagaaataaaaagacacaggcataacatatgtcttctgtctttactacctggattttacatgaaatagccagattaagaggatgtgacmttgtaggccttcaggaacagtaaagaagttttcccttttctgtactgagctactcttttccccactgccttttatctctctttttttttttttttttttg

SEQ ID NO: 478620 - DNA, 201 bp, Homo sapiens
agattaagaggatgtgacattgtaggccttcaggaacagtaaagaagttttcccttttctgtactgagctactcttttccccactgccttttatctctctttttttttttttttttttgaatcctgtgatatcaaaaaagtaaaaaaagtaaaggttctctttgaattatgggaaccaacgtttgccacaacacaagaagc

SEQ ID NO: 478621 - DNA, 201 bp, Homo sapiens
gctcctgtgttatctttaaatgatacagctcttctgaaaacccatactcatagtgcatgattatccattaagacaaggtgatggaatgtgtgaatacagckgaggagacaccacaaggcaaacgctcaatggttcccattaatattggggaaatcaacattataatacagaaaaccataggcattatttaatatttggttt

SEQ ID NO: 478622 - DNA, 201 bp, Homo sapiens
agtgccgaattctggaaaatgagatgcttcccagatttcacattcaattaccacaaaagtttataggtggaaaacatatggtacagttacctactttaacygcattatctactgataatgggagtcaaaccaaccaagacatattaaatgtttcatccagagctcttgaggtggcattcactagcatttcatggcaccata

SEQ ID NO: 478623 - DNA, 201 bp, Homo sapiens
caaaccaaccaagacatattaaatgtttcatccagagctcttgaggtggcattcactagcatttcatggcaccatataacatgatacaattccatattgcygaattacataaattgccagataaatttatcaaattagtcagatatattaaaagtctaaccttgagcaaagcaatttaatgcctcagagggtggaaaaagg

SEQ ID NO: 478624 - DNA, 201 bp, Homo sapiens
atttttatattcaactaagttcaacatgtatccagaaccaaatgtttaaattttctttctagaagtttgaaaatatttatcttccttgatacttactactmcttctgctttctctctctcatactgaaagagactttcttttaaatgatcacattcattcattagcttcttacttttctcttctagtacgaggtctttctt

SEQ ID NO: 478625 - DNA, 201 bp, Homo sapiens
cattaacaaatttgactaaattaagatatatcaaaaaattgcatttacactttgatatctaacccatacaccaccctatagtaagaacttttgttcacacrtatttggacagataaaatttcccagagttattacagctctgtttcactgataacattctatttcagtttgactcttttaacacttttatagtcagttata

SEQ ID NO: 478626 - DNA, 201 bp, Homo sapiens
cccaacttgtaatgaacatttgttgacacataatcacctgcgtggtgacaaagggacatgaaatcatgaaagggtcagcctctacctattgaaagattacycataagcaaatttctgaagactctctgaatggtagtgaatgattcatggtgggaaggaaaacatgttattctgtaagctgagagatattgccaatgatat

SEQ ID NO: 478627 - DNA, 201 bp, Homo sapiens
atccgtactccaccaccttccaagagaggtgggccccagctctgcccctgcacttgccctggctgtggtctcgcctccctctgcctgggggccccagcggygctgctttcaccagcctggcccggaggccctcgcccccgagggcacttgggcaactgtctgcccctggcatgagcaagcgaccaagacctcctcaaatgt

SEQ ID NO: 478628 - DNA, 201 bp, Homo sapiens
cactccgctctcctcattctttctttctctttattcatttcctcttccctctctcctgacttgcctcaggtcttagagtatcttaaaatggaactcataaytcagctcctttagtggtactcctgatagtatcaactgctgacccttggttagacacacaacttatcaccatttcacttctcctttacttattatacagtt

SEQ ID NO: 478629 - DNA, 201 bp, Homo sapiens
ctcctgtgttatctttaaatgatacagctcttctgaaaacccatactcatagtgcatgattatccattaagacaaggtgatggaatgtgtgaatacagctsaggagacaccacaaggcaaacgctcaatggttcccattaatattggggaaatcaacattataatacagaaaaccataggcattatttaatatttggtttt

SEQ ID NO: 478630 - DNA, 201 bp, Homo sapiens
cctgagggaatcgacatcaaagctgatggtgaatgtacagagtattttaactcaacacatcagaggcattgctgccagcatgccacaaacaaattcccctygtcttgtcactgaggaaatacacagttgggatgacagttcaggtgaatgtgtgattcacctctcatcaaagaaagtgttctacattgatcagctcttata

SEQ ID NO: 478631 - DNA, 201 bp, Homo sapiens
tctttaaatgatacagctcttctgaaaacccatactcatagtgcatgattatccattaagacaaggtgatggaatgtgtgaatacagctgaggagacaccmcaaggcaaacgctcaatggttcccattaatattggggaaatcaacattataatacagaaaaccataggcattatttaatatttggttttggaaggtattt

SEQ ID NO: 478632 - DNA, 201 bp, Homo sapiens
atacagctcttctgaaaacccatactcatagtgcatgattatccattaagacaaggtgatggaatgtgtgaatacagctgaggagacaccacaaggcaaaygctcaatggttcccattaatattggggaaatcaacattataatacagaaaaccataggcattatttaatatttggttttggaaggtatttttagtgacag

SEQ ID NO: 478633 - DNA, 201 bp, Homo sapiens
tgatacagctcttctgaaaacccatactcatagtgcatgattatccattaagacaaggtgatggaatgtgtgaatacagctgaggagacaccacaaggcaracgctcaatggttcccattaatattggggaaatcaacattataatacagaaaaccataggcattatttaatatttggttttggaaggtatttttagtgac

SEQ ID NO: 478634 - DNA, 201 bp, Homo sapiens
atattaaatgtttcatccagagctcttgaggtggcattcactagcatttcatggcaccatataacatgatacaattccatattgctgaattacataaattrccagataaatttatcaaattagtcagatatattaaaagtctaaccttgagcaaagcaatttaatgcctcagagggtggaaaaaggcctcatctgctttta

SEQ ID NO: 478635 - DNA, 201 bp, Homo sapiens
tgcatgattatccattaagacaaggtgatggaatgtgtgaatacagctgaggagacaccacaaggcaaacgctcaatggttcccattaatattggggaaakcaacattataatacagaaaaccataggcattatttaatatttggttttggaaggtatttttagtgacagtgcatacagttgtacctaataattgcaaaat

SEQ ID NO: 478636 - DNA, 201 bp, Homo sapiens
atatccttaaggtttggattggcgccatgtttcagcagaataacggcacaagcctcttcctggcaatggacagcctgtccgtgttagaccaagaaacagaytgtaaattccaagaattcaaaatacacattccacaggtttcaccaactagttacatgtaaatgagatcaatttattttaattctatatatgtaaatcaaa

SEQ ID NO: 478637 - DNA, 201 bp, Homo sapiens
tctactaaagagtcaaaggctaaatttttggctaagaaattatgcttcttatatgataaaaatcatacatgccaaaacttaccatactttattaaacaacrtaatgtaaggtctgattcaacagaaatattgcagaatggtgattttttaaaatatgtgtaagtatatgtttgttttcaaaaatattggaaataactatga

SEQ ID NO: 478638 - DNA, 201 bp, Homo sapiens
gattatccattaagacaaggtgatggaatgtgtgaatacagctgaggagacaccacaaggcaaacgctcaatggttcccattaatattggggaaatcaacmttataatacagaaaaccataggcattatttaatatttggttttggaaggtatttttagtgacagtgcatacagttgtacctaataattgcaaaattagag

SEQ ID NO: 478639 - DNA, 201 bp, Homo sapiens
aatcacaatttcaatattgcgtgtcacctgttttggttttgctcacactgcttccttggagctactcaacaaatagtcaaatggccttcctgggactaggyaaaatatggaatgttttctgaatttgtgtgccatccctaggcagtagccatgcttatctgctctgtattgatccaattttaaaatatgtgctgttgaaat

SEQ ID NO: 478640 - DNA, 201 bp, Homo sapiens
ggctaaatttttggctaagaaattatgcttcttatatgataaaaatcatacatgccaaaacttaccatactttattaaacaacataatgtaaggtctgatwcaacagaaatattgcagaatggtgattttttaaaatatgtgtaagtatatgtttgttttcaaaaatattggaaataactatgatgggactgtaagttcaa

SEQ ID NO: 478641 - DNA, 201 bp, Homo sapiens
gctgaggagacaccacaaggcaaacgctcaatggttcccattaatattggggaaatcaacattataatacagaaaaccataggcattatttaatatttggytttggaaggtatttttagtgacagtgcatacagttgtacctaataattgcaaaattagagatgtaaaaataaaacaaaggcacattgtgtttgagtagga

SEQ ID NO: 478642 - DNA, 201 bp, Homo sapiens
aaattatgcttcttatatgataaaaatcatacatgccaaaacttaccatactttattaaacaacataatgtaaggtctgattcaacagaaatattgcagartggtgattttttaaaatatgtgtaagtatatgtttgttttcaaaaatattggaaataactatgatgggactgtaagttcaaacagtttgagctaagcaga

SEQ ID NO: 478643 - DNA, 201 bp, Homo sapiens
agaagtttgaaaatatttatcttccttgatacttactactccttctgctttctctctctcatactgaaagagactttcttttaaatgatcacattcattcrttagcttcttacttttctcttctagtacgaggtctttctttccactctcaataaagcctctttggatattagttactatctctttatgatcctctttctg

SEQ ID NO: 478644 - DNA, 201 bp, Homo sapiens
tggttcccattaatattggggaaatcaacattataatacagaaaaccataggcattatttaatatttggttttggaaggtatttttagtgacagtgcatasagttgtacctaataattgcaaaattagagatgtaaaaataaaacaaaggcacattgtgtttgagtaggaaatctgtagacgtctagctggttttctattc

SEQ ID NO: 478645 - DNA, 201 bp, Homo sapiens
aaatattgcagaatggtgattttttaaaatatgtgtaagtatatgtttgttttcaaaaatattggaaataactatgatgggactgtaagttcaaacagttygagctaagcagataaacttgcatgcatgaaaacacattaaacagactcatttggctgggaatattcgttgcaactctcaaggctagacgtgtttttgtgg

SEQ ID NO: 478646 - DNA, 201 bp, Homo sapiens
tgatacttactactccttctgctttctctctctcatactgaaagagactttcttttaaatgatcacattcattcattagcttcttacttttctcttctagyacgaggtctttctttccactctcaataaagcctctttggatattagttactatctctttatgatcctctttctgatgaacgtcatctagttgctgtacaa

SEQ ID NO: 478647 - DNA, 201 bp, Homo sapiens
acattataatacagaaaaccataggcattatttaatatttggttttggaaggtatttttagtgacagtgcatacagttgtacctaataattgcaaaattasagatgtaaaaataaaacaaaggcacattgtgtttgagtaggaaatctgtagacgtctagctggttttctattccaggcccaaaattctaaatataatcat

SEQ ID NO: 478648 - DNA, 201 bp, Homo sapiens
ttttaaaatatgtgtaagtatatgtttgttttcaaaaatattggaaataactatgatgggactgtaagttcaaacagtttgagctaagcagataaacttgyatgcatgaaaacacattaaacagactcatttggctgggaatattcgttgcaactctcaaggctagacgtgtttttgtggcttgtctcagtcattgcttcc

SEQ ID NO: 478649 - DNA, 201 bp, Homo sapiens
cttactactccttctgctttctctctctcatactgaaagagactttcttttaaatgatcacattcattcattagcttcttacttttctcttctagtacgargtctttctttccactctcaataaagcctctttggatattagttactatctctttatgatcctctttctgatgaacgtcatctagttgctgtacaagccac

SEQ ID NO: 478650 - DNA, 201 bp, Homo sapiens
ttatttaatatttggttttggaaggtatttttagtgacagtgcatacagttgtacctaataattgcaaaattagagatgtaaaaataaaacaaaggcacaytgtgtttgagtaggaaatctgtagacgtctagctggttttctattccaggcccaaaattctaaatataatcatggtacccgcacacaaatttatgttaaa

SEQ ID NO: 478651 - DNA, 201 bp, Homo sapiens
tgatgggactgtaagttcaaacagtttgagctaagcagataaacttgcatgcatgaaaacacattaaacagactcatttggctgggaatattcgttgcaamtctcaaggctagacgtgtttttgtggcttgtctcagtcattgcttccctcccattgtattcccattctatcattaaataaatgtaaatcatctctaaatg

SEQ ID NO: 478652 - DNA, 201 bp, Homo sapiens
actttgatatctaacccatacaccaccctatagtaagaacttttgttcacacgtatttggacagataaaatttcccagagttattacagctctgtttcacygataacattctatttcagtttgactcttttaacacttttatagtcagttataagaattacattcactaaatcataaactagacattatactagtcattcc

SEQ ID NO: 478653 - DNA, 201 bp, Homo sapiens
atttaatatttggttttggaaggtatttttagtgacagtgcatacagttgtacctaataattgcaaaattagagatgtaaaaataaaacaaaggcacattktgtttgagtaggaaatctgtagacgtctagctggttttctattccaggcccaaaattctaaatataatcatggtacccgcacacaaatttatgttaaata

SEQ ID NO: 478654 - DNA, 201 bp, Homo sapiens
gttcaaacagtttgagctaagcagataaacttgcatgcatgaaaacacattaaacagactcatttggctgggaatattcgttgcaactctcaaggctagaygtgtttttgtggcttgtctcagtcattgcttccctcccattgtattcccattctatcattaaataaatgtaaatcatctctaaatgaatacaagaaaaaa

SEQ ID NO: 478655 - DNA, 201 bp, Homo sapiens
ttttaaatgatcacattcattcattagcttcttacttttctcttctagtacgaggtctttctttccactctcaataaagcctctttggatattagttactrtctctttatgatcctctttctgatgaacgtcatctagttgctgtacaagccacgcattttcacgttggaggtgacatatcctctcttctacacagttcca

SEQ ID NO: 478656 - DNA, 201 bp, Homo sapiens
caccttcagatgtctctcacacaaactatatctgcagatgactgtcatccaaaactaggctaaagagtctaacatctgtttccccacactttttataattmtttcttaatactttcaattcaccttcttattacatatattttatacattcattaacctattgttcattatgtgtaacatataattaatgcccttaataag

SEQ ID NO: 478657 - DNA, 201 bp, Homo sapiens
tagttgctgtacaagccacgcattttcacgttggaggtgacatatcctctcttctacacagttccactttccagtggaattattcactttagcttctgcaytttgatacatctctttcatttcctgtgtttgctgctgtgtttttcttaggtcattttgtacagtttctaaagccaatgacttttttctgagactatctct

SEQ ID NO: 478658 - DNA, 201 bp, Homo sapiens
attcgttgcaactctcaaggctagacgtgtttttgtggcttgtctcagtcattgcttccctcccattgtattcccattctatcattaaataaatgtaaatyatctctaaatgaatacaagaaaaaagaatctagaatctagagcttgtttctttagcaatttctttatgttgatctggttcagaaggtcacatggtatgtg

SEQ ID NO: 478659 - DNA, 201 bp, Homo sapiens
atcctctcttctacacagttccactttccagtggaattattcactttagcttctgcattttgatacatctctttcatttcctgtgtttgctgctgtgtttktcttaggtcattttgtacagtttctaaagccaatgacttttttctgagactatctcttgtcttacggaacttatcttttaaggcattgaatttaatttgt

SEQ ID NO: 478660 - DNA, 201 bp, Homo sapiens
tcctctcttctacacagttccactttccagtggaattattcactttagcttctgcattttgatacatctctttcatttcctgtgtttgctgctgtgttttkcttaggtcattttgtacagtttctaaagccaatgacttttttctgagactatctcttgtcttacggaacttatcttttaaggcattgaatttaatttgtg

SEQ ID NO: 478661 - DNA, 201 bp, Homo sapiens
gactcttttaacacttttatagtcagttataagaattacattcactaaatcataaactagacattatactagtcattcctatatacattcattgatgaacycatctagttaccacaattttgaaaaagaaatgttaaaaatataagcaagctacaggattttccccaggacttctgactctacttctagttctccaacaga

SEQ ID NO: 478662 - DNA, 201 bp, Homo sapiens
cctctcttctacacagttccactttccagtggaattattcactttagcttctgcattttgatacatctctttcatttcctgtgtttgctgctgtgtttttsttaggtcattttgtacagtttctaaagccaatgacttttttctgagactatctcttgtcttacggaacttatcttttaaggcattgaatttaatttgtgt

SEQ ID NO: 478663 - DNA, 201 bp, Homo sapiens
tctacacagttccactttccagtggaattattcactttagcttctgcattttgatacatctctttcatttcctgtgtttgctgctgtgtttttcttaggtyattttgtacagtttctaaagccaatgacttttttctgagactatctcttgtcttacggaacttatcttttaaggcattgaatttaatttgtgtttcagaa

SEQ ID NO: 478664 - DNA, 201 bp, Homo sapiens
ataactatgatgggactgtaagttcaaacagtttgagctaagcagataaacttgcatgcatgaaaacacattaaacagactcatttggctgggaatattcrttgcaactctcaaggctagacgtgtttttgtggcttgtctcagtcattgcttccctcccattgtattcccattctatcattaaataaatgtaaatcatct

SEQ ID NO: 478665 - DNA, 201 bp, Homo sapiens
acaatgatttgccctcacaaattatctgtcctgaagctaaacttaaaattcaattaatggatgacataaattttgttacctaaactggaagaaaactgatracctaaaacaaggtagaaagatccactgtctcttttccatgatctgtctctggataaaagactaatctgcatcacttcagaatggcagtcttgattcctc

SEQ ID NO: 478666 - DNA, 201 bp, Homo sapiens
ctgacaatgatttgccctcacaaattatctgtcctgaagctaaacttaaaattcaattaatggatgacataaattttgttacctaaactggaagaaaactvatgacctaaaacaaggtagaaagatccactgtctcttttccatgatctgtctctggataaaagactaatctgcatcacttcagaatggcagtcttgattc

SEQ ID NO: 478667 - DNA, 201 bp, Homo sapiens
taataaaataatatcctatgtggatgccaagatttataataaatattaataattgtacctgtaagtgtcatcattcatttttaaaaatgagataaaatttmtggttttagacctaaacaatatatattaaatcaagtggacattataagtaacagtgataagataaagtttaaaatatagaatttttaccaaagattgatt

SEQ ID NO: 478668 - DNA, 201 bp, Homo sapiens
catattgggaaagatggcaaagcttttgagaatataaacacacctgttttgtttttcttaagttcaacatacttttgtagaatttgtaaaataaatgttcrtatcataattgagaatttatagccaaggatcctcaaaacagaagtttcatcttaggatagtgtttgatatatctaagaaagtccagtaacagagaagaaa

SEQ ID NO: 478669 - DNA, 201 bp, Homo sapiens
tccttaacacatgggaaaacttacctagggatggagatattttagaggaaggtctcaccttctgtgtttgggagagaaagcagtaaaacccggatttctcrgtacctttgggctttattcccttagactttcttcacctttgtctctagaaatgatgataattgcagtgtcctcagcaactctatctctgggtagactgct

SEQ ID NO: 478670 - DNA, 201 bp, Homo sapiens
tctcgtatcagttttagtgtttttcagtattagggaaaggtaatataaaaacaggtaaaatgtataaaaatagacctgatcaacatcataggagataaatmttcattatatagcataggatattattacttgaatgttctcagggaggcagcaagtcagaaggcctaggttctagtcctagctccatcatttaccaactgt

SEQ ID NO: 478671 - DNA, 201 bp, Homo sapiens
aaatcaaatgttggaatttgctttccgtaagttaatgaaacaccaaaaacttgcctaacttgtgaacttgaaaagatatttttattgtaagaacattttcttttattttcttttttgagacagggactcgctgttgcccaggctagaaggcagtggcgcgatcttggctcactgcggcctccgcctcctgggttcaagcga

SEQ ID NO: 478672 - DNA, 201 bp, Homo sapiens
aatcaaatgttggaatttgctttccgtaagttaatgaaacaccaaaaacttgcctaacttgtgaacttgaaaagatatttttattgtaagaacattttcttttattttcttttttgagacagggactcgctgttgcccaggctagaaggcagtggcgcgatcttggctcactgcggcctccgcctcctgggttcaagcgat

SEQ ID NO: 478673 - DNA, 201 bp, Homo sapiens
atcaaatgttggaatttgctttccgtaagttaatgaaacaccaaaaacttgcctaacttgtgaacttgaaaagatatttttattgtaagaacattttcttttattttcttttttgagacagggactcgctgttgcccaggctagaaggcagtggcgcgatcttggctcactgcggcctccgcctcctgggttcaagcgatt

SEQ ID NO: 478674 - DNA, 201 bp, Homo sapiens
tcaaatgttggaatttgctttccgtaagttaatgaaacaccaaaaacttgcctaacttgtgaacttgaaaagatatttttattgtaagaacattttcttttattttcttttttgagacagggactcgctgttgcccaggctagaaggcagtggcgcgatcttggctcactgcggcctccgcctcctgggttcaagcgattc

SEQ ID NO: 478675 - DNA, 201 bp, Homo sapiens
caaatgttggaatttgctttccgtaagttaatgaaacaccaaaaacttgcctaacttgtgaacttgaaaagatatttttattgtaagaacattttcttttattttcttttttgagacagggactcgctgttgcccaggctagaaggcagtggcgcgatcttggctcactgcggcctccgcctcctgggttcaagcgattct

SEQ ID NO: 478676 - DNA, 201 bp, Homo sapiens
tgtgcctcagcctcccgagctgggactacaggcacttgccaccacgcccggctaagtgttgtattattagtagaaagggagtttcgccatattgcccaggmtggcctcgaactactgactcaagtgatccccccatctcggcctcccaaagtgttgggattacaggcgtgagccaccgcacccagccttgtaagaacattt

SEQ ID NO: 478677 - DNA, 201 bp, Homo sapiens
gaaaagcaaattcctgtagctagtatagtagattaaaggttaagataacttactagaatttttttaattttaaaaaattttcgagctagatggaactttastgttcatctaactcaacagtcatttttcacatcaggaagcagggcctgaactcatttatgaagttagtagcaaagctaggactgattccaagcctcataa

SEQ ID NO: 478678 - DNA, 201 bp, Homo sapiens
tgtttcttaatagtttcattaatgttgagtcctaatatggcaattctgtttttgagacacttttctgccttctatcactgatagtagcatttaagtttcarattctacagcctagtcagcagatttatctttgacagcataatttctgatctacatttaaatactactttattttataaggtaatatagttacttactgtc

SEQ ID NO: 478679 - DNA, 201 bp, Homo sapiens
aattaataattaaggctgatttaacattcatattataagaacaaattcaggagcagttcaggcatttacagctaaactgaattttaactacaccaaactgwaaatccagtaccacctagataactaacccatcccaaataaataatttttgactaaatggtaagttaaatggaaaaatcaccatcaatgtgtatttaaaat

SEQ ID NO: 478680 - DNA, 201 bp, Homo sapiens
ttgtttattaaatgttgtacttttagaaaatattaagtgatatacttgtacctaaattacctgcccaaagttgagtacttttcagttgattccacattatrtcttgaggttttctgatgtttttgtcattgtttctcctatagcctagacagcctgactgtcaggaatgcagaggtacagaacaagctgcagagccactgg

SEQ ID NO: 478681 - DNA, 201 bp, Homo sapiens
aggtttaagccacccttggaaggatctgaggattctgaaacagaacacactgtaaaaacaagaaataatgataatagtcgaaacactgatgacaaaagaawtggaataatttcaaaaaagttaagtcctgagaacacaaccctgaaatctattttgaaaagaaaaggcaccagtgatatcagtgatgaatctgatgacatt

SEQ ID NO: 478682 - DNA, 201 bp, Homo sapiens
caaaacatcagaaattagataacatcctaaatccaaaagaaaagcatattttttataaaagtgagaagattttagaacagaatatttcttccaagtctgaygagaaaaaaattaaaaatacagataaacattgcattttacagaatgtcacagaatcagaagatagtgatgtcatctgtcctacacaatacacaactgaga

SEQ ID NO: 478683 - DNA, 201 bp, Homo sapiens
tatatcttgaggttttctgatgtttttgtcattgtttctcctatagcctagacagcctgactgtcaggaatgcagaggtacagaacaagctgcagagccastggcaaaggaagcatgtgatctctgcagtgacttcagtgatgaagagccagtgggagccacaggaataaagactgccaaaaacaaagcacccgattcaag

SEQ ID NO: 478684 - DNA, 201 bp, Homo sapiens
tttctttccttccaatatatattgttttagctgcaatttagaaacactccacccacatactcaaatcatggctgtagagtttatgcctgtgtgtgtacacrttatagttcattgactctgtgcaactattcttcagggacctagtacttaagatactgtactcatatttttccctctttacccaccgcccacagttttccc

SEQ ID NO: 478685 - DNA, 201 bp, Homo sapiens
tcccccgcctggcctgctgttacttcagtcttttccaagatagaatgaatagattatttctttccttccaatatatattgttttagctgcaatttagaaayactccacccacatactcaaatcatggctgtagagtttatgcctgtgtgtgtacacattatagttcattgactctgtgcaactattcttcagggacctagt

SEQ ID NO: 478686 - DNA, 201 bp, Homo sapiens
gcaccactgcactccagcctgggcgacagagtgagactctgtctcaaaataaataaataaataaaagtcattatgatgtctttcctttcttgtttcattgytggagctactggatgtaccagctatgctctttcagtatctgttttctccatatcccttcctctctcagactttgacccctggtggacaaacgactgtgag

SEQ ID NO: 478687 - DNA, 201 bp, Homo sapiens
aatcagaaccgtcttctgaaacgttttagattcaaagcagagtttaaaacaaacacatctctcagagaacctagacgaaatccaaaatggaacagaaagtraacaagaaataatgaaataacattataaacagcatggtaacagagggaagctgggaaaggctgtgcagaaacaagagcccctcagagaaggagccaaacc

SEQ ID NO: 478688 - DNA, 201 bp, Homo sapiens
ccaggagcagggtgtagcggtaatcctctgactaataatcttcctgcgggttgagactggctgagaaaggtaggtggcagttgcctccaggaaacacagayactatcttcaagagatggaggatgctcagcagaccggccaagaacaaacacggtctttccctgacgaggatttcctatgccccactactactgcctcaga

SEQ ID NO: 478689 - DNA, 201 bp, Homo sapiens
actaaagggttttcagctacccccagagtactgtgggaggagaggcgccctcccaggagcagggtgtagcggtaatcctctgactaataatcttcctgcgrgttgagactggctgagaaaggtaggtggcagttgcctccaggaaacacagatactatcttcaagagatggaggatgctcagcagaccggccaagaacaaa

SEQ ID NO: 478690 - DNA, 201 bp, Homo sapiens
gaaacaaagcatcacaggccgagcagcttaaaacaacagaaatccagtacctcacagttgtggagtctagaagtcagaaatccaggttgatagggccacgycccctctcaaaggctctagggaagaatccttcctggcctcttccagtttctggtggttttcagcagtccttggcattccttggctgtgtcagcataactt

SEQ ID NO: 478691 - DNA, 201 bp, Homo sapiens
gtagactggagaagagatttgggaatcaccaatagctggtggtcaaagtgttggagggaataagaaggtcaaggataactggtggataccagcagagaacragagaattatgttaaggtttgagtacacttgagggagatagataatggggtagcaacagcagctgctgcagagaggtcagataaggtaataactgaaaaa

SEQ ID NO: 478692 - DNA, 201 bp, Homo sapiens
tttatccctattccttgccctggtcccagccccaccccagggttcacagctccttccctggcacatagcaggttgcatttaatgcctgttgctggcagtakcatgccctcagaggggcagtagttacctgtgcaggtgcatatgctgattgtctccttagttttcaaaatcagaggccagtcttagtgtcattagttttta

SEQ ID NO: 478693 - DNA, 201 bp, Homo sapiens
ctcttgcctcagattttaaagaagtttatcctgctgtcgccggctggaattccaggcccttgtatgatttcatcttcataaatataattctgggacacggctttatctttctcttggttttaccacttgaataccaaagttaatttctccagcgtgtgcaacaccaaggagcccagccaaaggagtaaatacagagttact

SEQ ID NO: 478694 - DNA, 201 bp, Homo sapiens
accctatctctattttttcaaaaaaagaaaagaaagctataaggtaatagtatgtggatgaatagaataactgctccattttgtggataaggaaactgagycccagagagattaagtgagttgcccaaggacacaccctttaccctctcacccccaggatggtttttgccagaaataaacaattaagagatttcaggtaga

SEQ ID NO: 478695 - DNA, 201 bp, Homo sapiens
tggcatgggctcggctggctgtgtgctgttggctgtttcccaggatggaattttgttcactttgtggcatgatggctccagccagttgtatagagaacacrtcagacaaaaccttttcagatggacagaggccaagctggagtctggccacatctctttctgttgtcagggactctgtggggagaggaggaggagcctgca

SEQ ID NO: 478696 - DNA, 201 bp, Homo sapiens
cacacatgcagggacctggcagaagcctccttcattgtcaaggcttcacccctgcctcatgcccggggtactagaagaggtgctatgcacaaacaagcttytggagagcagcctgattaaatattgagcacacactagtgaaagtcatgggaactttgtcatgggctttgcagggttttcttggctatatttataatgcaa

SEQ ID NO: 478697 - DNA, 201 bp, Homo sapiens
agacatctgtcactttctttgactccgccggggagagcaaaacgaggtggaccttgcttgaacttggttctcaggcatcacagcagtgtccataacttgascgttgctaatgaagtccagatttctgcccttttgacggaatttttaagaaattaagagtagattccccacccccttctgaaagatctttttctaataatc

SEQ ID NO: 478698 - DNA, 201 bp, Homo sapiens
gaatttgggttgtcaaaatttccctctagggaataacatgcctttaaaataataactaataaattcaattctgctacattgaagttttgactaaaggttcrtgtagcccaacttgcataccagaaagaggtcctgtttctgtcagaccttttctgccttggactgaggcatttttcaagacctgctttgaatacctgttcc

SEQ ID NO: 478699 - DNA, 201 bp, Homo sapiens
cctgcccttaacacctgaggcaaactacttttctatattaaaagaagtgaaatcttaaaatttgaaggacttgagggtgcaattagtctggctttcctacyttaaattagaaagtaggcaagcagccatgatcggtggtcgctcacgcctgtaatccagcacttggggaggctgaggcaagaggattgcttgagcctagga

SEQ ID NO: 478700 - DNA, 201 bp, Homo sapiens
atgccaagccctagaggtgcataggacaaaaactgaggtcagagtcttaaagagttcacttattggacaaagcactggagactaggctttttaggcagagraaattgtgtatgcaaaagcaaaaagatgtgaaatagtatgacagtgtagaatgtgaagaaggattgatgggaaatgaaactgaacaggtaggcagtgacc

SEQ ID NO: 478701 - DNA, 201 bp, Homo sapiens
gcataggacaaaaactgaggtcagagtcttaaagagttcacttattggacaaagcactggagactaggctttttaggcagaggaaattgtgtatgcaaaascaaaaagatgtgaaatagtatgacagtgtagaatgtgaagaaggattgatgggaaatgaaactgaacaggtaggcagtgaccagatcataaagggccatg

SEQ ID NO: 478702 - DNA, 201 bp, Homo sapiens
ataggacaaaaactgaggtcagagtcttaaagagttcacttattggacaaagcactggagactaggctttttaggcagaggaaattgtgtatgcaaaagcraaaagatgtgaaatagtatgacagtgtagaatgtgaagaaggattgatgggaaatgaaactgaacaggtaggcagtgaccagatcataaagggccatggt

SEQ ID NO: 478703 - DNA, 201 bp, Homo sapiens
tgtgttcttagtcaccatgctaaactgctcctgcagaggatggggagtcttggaaggtgcttagcatgagccaatttgtgtttcaaaaaaataagtggccragtgcagcggctcacgcttgtaatcctagcactttgggaggctaaggtgggtggatcacttgaggtcaggagttcaagaccagcctggccaacatggtga

SEQ ID NO: 478704 - DNA, 201 bp, Homo sapiens
taccagaaaaatacaaaaattagctgagtgtggtggcgcgtgcctgtactcccagctactccagaggctgaggcacgagaatctcttgaagccaggagacrgaggttgcagtgagctgagatcatgtcactgcactccagcctgagcgaagagtgagaccctgtctcagaaaataaaaataaaaaactggacaaggtagag

SEQ ID NO: 478705 - DNA, 201 bp, Homo sapiens
aagaaaagaaagccagtttccatcttagaactgtttcgaaagaattaaaatgactttttcaggctttttgttaatttcttaatgcttctatctttctttaratgtgctgtttgtttgcgtgctagagtgcccagttgaacaagctgagcaggcttccccctgcgtctccctgtgcctcagaagaagggtcatgctttttgt

SEQ ID NO: 478706 - DNA, 201 bp, Homo sapiens
tgctgtctagtaagaaaagaaagccagtttccatcttagaactgtttcgaaagaattaaaatgactttttcaggctttttgttaatttcttaatgcttctrtctttctttaaatgtgctgtttgtttgcgtgctagagtgcccagttgaacaagctgagcaggcttccccctgcgtctccctgtgcctcagaagaagggtc

SEQ ID NO: 478707 - DNA, 201 bp, Homo sapiens
ccactgcactccagcctgggcgacaaagtgagaccctgtttcaaaaaaaaaaaaggttgggggagggggaaagaaagaaagaaaaatgggaaacagagagrttaagtaacttgcctaaggttacccagccaggatcgaaaccccagtttgtcctgctgttccttcctgtgccctgcggaagacatggttcattccttgtgg

SEQ ID NO: 478708 - DNA, 201 bp, Homo sapiens
cttagttcaggtggatggcataggctaccccattccagtgatccttttttcttgttacttcccttccttctttgcgggccaccagcctggccacctctgctcctgtcagatacctctctggggccagccttctgagatgatttacctctacacttcagcattgaattctcagcttcagttttcatgatctccaaggacatt

SEQ ID NO: 478709 - DNA, 201 bp, Homo sapiens
gctatcactgagccactaccacaggcccaacactttacaaatccaatgctgggatcccactgataaaccagtgatgagagataaaagggatggatgaagargtgtgtcagaaggaggggtgccaccatgggggggacagcaagtttgtctaatagagtcataatttatttcgaagtatgcatttagcattttatgtagaat

SEQ ID NO: 478710 - DNA, 201 bp, Homo sapiens
agccaggagacagaggttgcagtgagctgagatcatgtcactgcactccagcctgagcgaagagtgagaccctgtctcagaaaataaaaataaaaaactgracaaggtagagaatggattggggaagaggagaactggaagtatagagattaactacatctttgtgatggtccataggagagatgttgaagaccttaactg

SEQ ID NO: 478711 - DNA, 201 bp, Homo sapiens
taaaggctaggtcaagctctaggaaatttctgacaagtaactctgtgttgttttgttttgtttcctgccttgccaagacgggaaagcccctgttggaggargagattcagcattttttgtgccagtaccctgaggcgacagaaggcttctctgaagggtttttcgccaagtggtggcgctgctttcctgagcggtggttcc

SEQ ID NO: 478712 - DNA, 201 bp, Homo sapiens
gtttttaaatttggaggattagtgtttccattaagaaaagaggtgcagtgggaggaatgagttgaaggggaaaacagtaagttgggttatagacacattayatacagggagctatgggaaacttggatcaccgtgtctggtaggcaggtagataaatgggtcttgaaccctagagagagttgtagactggagaagagattt

SEQ ID NO: 478713 - DNA, 201 bp, Homo sapiens
ttttgtacaagtgagaactcatgaaaatagactttctctgtggtttggagtggttcaaatgcattgcttcctggaggcaaggctgttggtgaaatgatttyttgggctctttccctctacggtgtgtgaaaatggctctgggcatggtgccacacatgcagggacctggcagaagcctccttcattgtcaaggcttcaccc

SEQ ID NO: 478714 - DNA, 201 bp, Homo sapiens
ggtggtcaaagtgttggagggaataagaaggtcaaggataactggtggataccagcagagaacgagagaattatgttaaggtttgagtacacttgagggaratagataatggggtagcaacagcagctgctgcagagaggtcagataaggtaataactgaaaaaaacgtccttcgaacttggcgtttagaaagccatttgt

SEQ ID NO: 478715 - DNA, 201 bp, Homo sapiens
tgctgtgtttttgataataaattttcacatttagaaacaaatttttgtacaagtgagaactcatgaaaatagactttctctgtggtttggagtggttcaartgcattgcttcctggaggcaaggctgttggtgaaatgatttcttgggctctttccctctacggtgtgtgaaaatggctctgggcatggtgccacacatgc

SEQ ID NO: 478716 - DNA, 201 bp, Homo sapiens
aaatttgatagttaaggaaacttgactatagactgaatattaggtaatattaagagattactcattttaatgggtatggcaataatgccaatggttgtgtrtagaataacgtcgttattcttaggagatgcatgttgaaatatttagaaatgattttataatgtgttgcaaataactttcaagtagttctggtaaaaacag

SEQ ID NO: 478717 - DNA, 201 bp, Homo sapiens
tcttaactccctctagcattctgtccaagatatcacacttacagcctgccatctctgccctcagtcaagccaggcgctagcatgttcagccaattattttktttactttggtcattttctggccaacttaaaaataacatattcatttctactgaggaagcctgggatagttctcacatacagtgaaaaggcacacatttg

SEQ ID NO: 478718 - DNA, 201 bp, Homo sapiens
accatgatccatgccatcaacctatccatcacctccaagtttcctcctgccttcttacttattattactattagcaataagaacacttaacataagacctrccttcttagcatatttttaaatatacaatacagtattgttaactctgggcactgtgctgtatagtaggtctctaggagttattcatcttgtataactgaa

SEQ ID NO: 478719 - DNA, 201 bp, Homo sapiens
tgccttcttacttattattactattagcaataagaacacttaacataagacctaccttcttagcatatttttaaatatacaatacagtattgttaactctrggcactgtgctgtatagtaggtctctaggagttattcatcttgtataactgaaactttgtattctttgcccagtacctccctgtttccccctgcctgcag

SEQ ID NO: 478720 - DNA, 201 bp, Homo sapiens
agttttaccctcagaaaaatgttggctgcagtcttcccttccttcacctccaccctggggaagggtcagtaaccaatgccgagggtcggggaaggaggagkcacaggcaagacagggactcagcgcagtgctcccgccatcatcggggacaggtgccagggtcagctgcagctctccttccgggagcagggtgtggtggcc

SEQ ID NO: 478721 - DNA, 201 bp, Homo sapiens
tcttttgaactgtactgtttccccttttgtgctttaactagatgaatcagttttctatcctagagttacctcgctggcatagctcttcagaaaacagaacstccagggtaatggcatatcagtgttcaggacttacttatctctatagaggaattagttctctgttaaacagggcaaaagagaagtttacatttctcttaa

SEQ ID NO: 478722 - DNA, 201 bp, Homo sapiens
ccagccgggagtgcagttgctgttcacaggcgtgatcgtaactcactgagcctctaacttctggcctcaagtgatcctcctgcctcagcctcccgagtagstggaactataggcatgtgctgctgtgcccaactcctgtccagttttgataatcaaaaatgtcttcagacattgccaaatgtcccctttggagcagaatta

SEQ ID NO: 478723 - DNA, 201 bp, Homo sapiens
aggctgaaattctctctgtatttggacctgcagatgttgtgtacagaaccgatgcatggcagggtcaggaagctaggagagtgaaggcgcttgtggagacrgctctgtagcaaatgaaacacggaagcctccgggaatgtgtttgtgtcaccagcagcaggcatttccctgtcctccccacccccagtctccacatcccca

SEQ ID NO: 478724 - DNA, 201 bp, Homo sapiens
ctttggagcagaattaccctgagaactattgttgtaaagtagtgtctcttaattgggggtgtgtgcctttaatcagcagagaagaggcttgaaagcgtacrcacctgagctccactcctaacagttctggcaacttagcatatccgaggtggtgcatgatactttgatcctaataactccactagtgatcctgcctgtgcc

SEQ ID NO: 478725 - DNA, 201 bp, Homo sapiens
aatgcttgttctatggatcagttcagctatgaagtctgtgtgagccagtccaggtaaattaggaagacaaggatttaggactggggcgaaaagagccagarcggaagaaggacgccagggggagcaagaacctacactctccagatatcgcgagaggtcccgcgctcgccacgacactgagtgttctgttttgggcggaag

SEQ ID NO: 478726 - DNA, 201 bp, Homo sapiens
gtctttctcaagagtagtagcttccagaaggaaggggctgctcttcatttacatttcccttccactcccatcccttaatgcctaacatgctgcctggcacrtagtaggggactcagtaaatgcttgttctatggatcagttcagctatgaagtctgtgtgagccagtccaggtaaattaggaagacaaggatttaggactg

SEQ ID NO: 478727 - DNA, 201 bp, Homo sapiens
atcttccattgctcaattaaactcctttatacttaattcggcttaagtttttcttttatcaacagagtaagctctcactaatgagtgggctgagtgaaaaytggagggatttgttcgtctttctcaagagtagtagcttccagaaggaaggggctgctcttcatttacatttcccttccactcccatcccttaatgcctaa

SEQ ID NO: 478728 - DNA, 201 bp, Homo sapiens
gtggaagcaccatattttcctatgtatgataattctgggaagctgtagacatgtgaaactaacagcattttgcgtagcatttggaagaaaagttaaaaacrcgtaattatatgaagagtaaacagaaacacatgagggagaattaagtgcaacttaatctgggcctgtaagagggcaggaaaagtaaaaatatatcatttt

SEQ ID NO: 478729 - DNA, 201 bp, Homo sapiens
agtgctgtttttacttgtaaatgtggatgtggaagcaccatattttcctatgtatgataattctgggaagctgtagacatgtgaaactaacagcattttgygtagcatttggaagaaaagttaaaaacacgtaattatatgaagagtaaacagaaacacatgagggagaattaagtgcaacttaatctgggcctgtaagag

SEQ ID NO: 478730 - DNA, 201 bp, Homo sapiens
ggttgaactgagaaatggggcatcgtcaatgaacactgctcgcttcttctctaaatcatagtttaaacattccagaaacattagtgtcttgtaaacaagcyggattatttggactacttcaaatcaatattttgccttgcagatggaaataaaatgagtccttggagctcagttgtagagagagcgagtgagcattggaag

SEQ ID NO: 478731 - DNA, 201 bp, Homo sapiens
taagccaatactaaaattgtttaaatatacaatttgaatgaactccatggtctaagtcaaattacctatgataacccattagctatcagtgctatgcacckaaattggagaaacaactggtattcaagaggacgtaagtcccgtgttaagcatggactcatgaagaaccaggatggccaccttgtccttcttgagtcctta

SEQ ID NO: 478732 - DNA, 201 bp, Homo sapiens
aggaaagcacaaaactggtccttctctacagatggtcaagtagctttgaagaggaagtacctaaagaaaccacctttctttttacatttattttctctccrtctctctcagggattttatattggaagacatggatcttgctgccaacgagatcagcatttatgacaaactttcagagactgttgatttggtgagacagac

SEQ ID NO: 478733 - DNA, 201 bp, Homo sapiens
tatttgggacctggactgatgtcataaccaaggccttccctgcatattggcttagagggttacagggtgaattgaggggacacccacacagtctagttctyccctcctgctgctagccaggagacttgcaggggcccaccttgtcatgaaggcaggtttccagaaaatctagttaccttgcaaatctgcctcctgccctta

SEQ ID NO: 478734 - DNA, 201 bp, Homo sapiens
gtttgcgtgctagagtgcccagttgaacaagctgagcaggcttccccctgcgtctccctgtgcctcagaagaagggtcatgctttttgtcccttcctcctyctctcttctccccttcccccgcctggcctgctgttacttcagtcttttccaagatagaatgaatagattatttctttccttccaatatatattgttttag

SEQ ID NO: 478735 - DNA, 201 bp, Homo sapiens
gagttgcagaccagcctggccaacatggcaaaaccccatctctactaaaaatacaaaaattagccaggtatggtggtgcatgcctgtaatcccagctactstggaggctgaggcatgagaatcacttgaacctgggaggtggaggttgccatgagctgagatcgcgccattgccctccagcttgggtgacagagtgagact

SEQ ID NO: 478736 - DNA, 201 bp, Homo sapiens
ttaccctcagaaaaatgttggctgcagtcttcccttccttcacctccaccctggggaagggtcagtaaccaatgccgagggtcggggaaggaggagtcacrggcaagacagggactcagcgcagtgctcccgccatcatcggggacaggtgccagggtcagctgcagctctccttccgggagcagggtgtggtggccctgg

SEQ ID NO: 478737 - DNA, 201 bp, Homo sapiens
gtttgttaaaaaggtattaagaaaaaaaagatgtgtctattcctgacttctcatctaaatgcagctatataatctgtagtttttcgtgactgtcttctttyacctagcataatgttttcaaggttcatccatattgtatcatgtatcagtactgcattcctttttatcgtccagtgattttgcattatatggctctaccac

SEQ ID NO: 478738 - DNA, 201 bp, Homo sapiens
tcaattcctccatgtccttaccaacactttttgtctgacttcttgattgtagctatcccagtggatgtgaaatgatatctcactgtgattttgatctgcakttctctgatggttaataatgttgagtatctttttgtgtgtttattggtcctttgtatatctttttttgagatggagtctcactctgtcacccaggctgga

SEQ ID NO: 478739 - DNA, 201 bp, Homo sapiens
agctatcccagtggatgtgaaatgatatctcactgtgattttgatctgcatttctctgatggttaataatgttgagtatctttttgtgtgtttattggtcmtttgtatatctttttttgagatggagtctcactctgtcacccaggctggagtgcagtggtgtaatcttggctcattgcaacctctgcctcccagattcaa

SEQ ID NO: 478740 - DNA, 201 bp, Homo sapiens
gtcctagcatcatgtattgaaaataatacattaaaaattatatagctgtcccttggtatatgtagggtattcgttccagaatctccatatacacccaaatycttgcatattcaagtttcacagttgattcttcagaacctgtttatacaaaaaatcatccctctgtatatgtatatgcagtttttgcaccctgaaaatact

SEQ ID NO: 478741 - DNA, 201 bp, Homo sapiens
agcctcttccagaagcatgtcagggagacggacaggtgctctccttctcgtgcaccacatccaagtccacccaccgtggacgcagtgtgactaaatgctgsccttgaagagaaaccctcagccagcttgtctgttgtccaggtccctcagtgtctctggtttccctgccctgcataatttaagcattagtgccaaatacat

SEQ ID NO: 478742 - DNA, 201 bp, Homo sapiens
tccttgcatattcaagtttcacagttgattcttcagaacctgtttatacaaaaaatcatccctctgtatatgtatatgcagtttttgcaccctgaaaataytgtattttcaatcctgggttggtagaaaaaaatcagcttttaagtgtatccacatagttcaaacccatgttgttcaagtctcaactgtagtttgtactgt

SEQ ID NO: 478743 - DNA, 201 bp, Homo sapiens
gttgttaggagggtttgcgcagggcgcgaggaacagaagcaaattagaggagctataatgtttggagggaggacaaaaatgaaatagagtacctaaacttaacgctgtaaatgctttgcacaccacttaataatgatggttgaatgtttaccatgtgccaggcatcaagctaagcattttattgcgtattttcacgcttaa

SEQ ID NO: 478744 - DNA, 201 bp, Homo sapiens
ttctgcctgtctgtctaattatatatgtattgtgtgtaatgtttatataaaagagctcaaattaattggcttaaacaaaaataagcacttaaatattttgaaagcaaaataaaaactgtaatgcctcttggttcatgtaactttagtaatctttgggaaataaaaacaactttaaatattattgataaagacattttgtct

SEQ ID NO: 478745 - DNA, 201 bp, Homo sapiens
gcacttaaatattttgaaagcaaaataaaaactgtaatgcctcttggttcatgtaactttagtaatctttgggaaataaaaacaactttaaatattattgwtaaagacattttgtctaaattatgcaggtcagatattagctttgctatatgcttcaaggtcataaactgctttgacttttgaaaattgttcaatttattt

SEQ ID NO: 478746 - DNA, 201 bp, Homo sapiens
tataggggccaggcacggtggcccatgcctgtaatcccagcactttgggaggctgaggtgggtggatcacctgaggtcaggagttcgagaccagcctggcyaacatggtgaaatgccgtttctactaaacatacaaaaaattagccaggcgtggtgttgcacgcctgtaatcccagctactggggaggctgaggcaggaga

SEQ ID NO: 478747 - DNA, 201 bp, Homo sapiens
cctccaggtccatccgtattgttacaaatagcaggatttctttcttttttaaggctgaataatattccattgtatgtatatactacatttaaaaaaaaaattttattcttttgacacagagtctcagtctgttgctcaggctggggtgccatgatgtgatctctgctcactgcaacctccacctcccaggttcaagtgatt

SEQ ID NO: 478748 - DNA, 201 bp, Homo sapiens
gtatctttttgtgtgtttattggtcctttgtatatctttttttgagatggagtctcactctgtcacccaggctggagtgcagtggtgtaatcttggctcaytgcaacctctgcctcccagattcaagtgattcttctgcctcagcctcccagatagctgggattacaggtgcctgccaccacacccggctaatttttgtat

SEQ ID NO: 478749 - DNA, 201 bp, Homo sapiens
tttatgcctgtgtgtgtacacattatagttcattgactctgtgcaactattcttcagggacctagtacttaagatactgtactcatatttttccctctttrcccaccgcccacagttttcccacccttacttggctctctcttagtcatgggctggcttgaccagtttaattactttttttctgtttcatacttctacagg

SEQ ID NO: 478750 - DNA, 201 bp, Homo sapiens
tctttttttgagatggagtctcactctgtcacccaggctggagtgcagtggtgtaatcttggctcattgcaacctctgcctcccagattcaagtgattctyctgcctcagcctcccagatagctgggattacaggtgcctgccaccacacccggctaatttttgtatttttagtagagacagggtttcaccatgttgacca

SEQ ID NO: 478751 - DNA, 201 bp, Homo sapiens
tggtgtaatcttggctcattgcaacctctgcctcccagattcaagtgattcttctgcctcagcctcccagatagctgggattacaggtgcctgccaccacrcccggctaatttttgtatttttagtagagacagggtttcaccatgttgaccaggctgatctcgaactcctgacctcaagtgatctgccaccttggccttc

SEQ ID NO: 478752 - DNA, 201 bp, Homo sapiens
tgaactcgggaggcggaagtggcagtgagccaagatcgcgccactgcactccagcctgggcaaccagagcaagactctgtctcaaaaaaaaaaaaaaaaaraaaagaaaagaaagaaaggtccaacttcattttctcatttgtggatatccagtggtcctagcatcatgtattgaaaataatacattaaaaattatatagc

SEQ ID NO: 478753 - DNA, 201 bp, Homo sapiens
agagggaggcaggcagctgtcacagccacagcggctctgaatggcttgagcttttagtatgtgttcaagtgcaggatactacaaactggtaaagacttccmccatgtgaagaatgtatgtaaattaaagtttattgtaatgaaggtttttactttttgcaattaaaagtgttggttgataagaactttcctcttgttggtg

SEQ ID NO: 478754 - DNA, 201 bp, Homo sapiens
aaatgctggccttgaagagaaaccctcagccagcttgtctgttgtccaggtccctcagtgtctctggtttccctgccctgcataatttaagcattagtgcyaaatacatctgtcatattcctctccctggagactgcgaaatgtccagactttttcagactagtggagggaaggaatgttacataactaagtggaggcctg

SEQ ID NO: 478755 - DNA, 201 bp, Homo sapiens
agaagcacacagtaggttgggtgcagtggctgacacctgtaatctggcactttcggaggccgaggcgggcagatcatctgaggtcaggagttcaagaccamcctgaccaacatggtgaaaccctgtctctactaaaaatacaaaataagctgggcatagtggtgcatgcctgtaatccctgctacttcggaggctgaggca

SEQ ID NO: 478756 - DNA, 201 bp, Homo sapiens
tggcaggtaggtagctggttccatagcacatcattttcctgcggcatcacggcatggtgccgaagaagacagctgtggatgtcgttgactcagatgtgccyccgttggggtgggagaacccagggatgggggtcagcaagccaggaactccgcagggtttgtttttaaaactctgctggacagaagtggaggaggaaagaa

SEQ ID NO: 478757 - DNA, 201 bp, Homo sapiens
tcttcacctgcatggccagcttccttccctggcagtggagagggcagccaacaggttctaatgtcagagccatcctttaccaggtgggcctgcttgtcccygtcttgcctgccacatcactctactttttggaaggccatggctgattaaagaagttcttgtagtttcccaagcaaagtggaatctagaaacagtgaaaaa

SEQ ID NO: 478758 - DNA, 201 bp, Homo sapiens
gcctcccgaagtgctgggattacaggcacgagctattgcgtccagccttggaactatttaatttcattttacaaatgatacagagagaactctactttgcyccattagtttttaccttttgttctctgggcatgatgaaacaatctgtctttaaaataactataggaacacaaattgaatttttaaattagttaaaaatct

SEQ ID NO: 478759 - DNA, 201 bp, Homo sapiens
tccatgttggtcaggctggtcctgaactcctgacctcaggtgatctgccctcctcggcttcccaaagtgctgggattacaggcctaagtcatcgcacctgracagattttttatttttctagtcaaggtcacactgtgttgcccaggctggagtgcagtggtgccatcatggctcactgcagcctcgaactcccagactca

SEQ ID NO: 478760 - DNA, 201 bp, Homo sapiens
ggtgatcctcccatctcagcctcccaagtacctaggaccacaggcatgtgccaccacacctggctaatttttctattttttgtagagatgggggtttttcygtgttgtccaggctggtctcgaactcctgggctcaagtgacttgagtccagtcaatcactgtcagactgagttcgagactgcccacctcagtctcccaaa

SEQ ID NO: 478761 - DNA, 201 bp, Homo sapiens
aagtaacatttattgatacctaatgagaggcaagctccctatattgtatcttttaattcagtccccactaaaactctatgagatggggtttattatccccrtttcacagattaagaaaccaagggtcagagagattaagaaactcgctagaggaacatctggtagagccaaatacacacccccaaattccagaacacacat

SEQ ID NO: 478762 - DNA, 201 bp, Homo sapiens
tgtatctcatccttttctctcctgtgattcctgtccataatgcatatttaatacataggtattggtttattgaaagcaaccgagttcagcttgcttctaarggtcctctaacagtccttggcctattgggctaggtttttgtctgggtatatcccactctttcagtttagtccttctgtctgtcacagctcatttaattta

SEQ ID NO: 478763 - DNA, 201 bp, Homo sapiens
ttgtctgggtatatcccactctttcagtttagtccttctgtctgtcacagctcatttaatttagtcctctaaagtatatcaattttgccagtaagtagaawttaaaaaacacataaatttagtaacagtgcatcggtggcataagaattcatagtctgatagactatttgaggggtttccttttgagaacagtgttaacat

SEQ ID NO: 478764 - DNA, 201 bp, Homo sapiens
cgatgacctctgtacatgagttaggttcactttcatgtggcctcccactacagagatgcgtatgcccagaagtcagctctctgaggagacaggctactttkgccccagtttgaagcattctgtccaaatgtcctgagctctccagcagtcaagtagtgaatggataccatacttattatggttgatgaaaaaaggcagagc

SEQ ID NO: 478765 - DNA, 201 bp, Homo sapiens
aagcagtcctcccacctcagcttcccaggtagctgggactacaggtgtgtgccaccaggccaagctgatttttaaaatttgtttttcttttcttttcttttctttttttttttttgagatggagtttcgctcttgttgcccaggctggagtgcaatggcgtgatctcggctcaccacaacctctgcctcccgagttcaaga

SEQ ID NO: 478766 - DNA, 201 bp, Homo sapiens
taaaatgatttctgtctgtgctgcgaaacaaagacaaggtgaggtgtttttcttttttgtaataatataaagctgtgtgtttctgattggatgattcactrtgtgcattgttttctcctaagtgcttttagtaggtagcaatcaaatggtgtaaataaggatgttcttttcctgttccttttatttttttctctctttatt

SEQ ID NO: 478767 - DNA, 201 bp, Homo sapiens
agcagtcctcccacctcagcttcccaggtagctgggactacaggtgtgtgccaccaggccaagctgatttttaaaatttgtttttcttttcttttcttttytttttttttttttgagatggagtttcgctcttgttgcccaggctggagtgcaatggcgtgatctcggctcaccacaacctctgcctcccgagttcaagag

SEQ ID NO: 478768 - DNA, 201 bp, Homo sapiens
actgctctcgtcagctgtgttgcctttaccaagtgtcttcagagggttatgagttagagtagctggcctggggagagggtgcctccctgggtttgatcttyagggtctgactttctgcagagaagatgttttacagatgtgtcaaagctgatgtaatgtggttgggggaggaaatccagacccaaagtgtttgtcagctgg

SEQ ID NO: 478769 - DNA, 201 bp, Homo sapiens
gtctgttgtccaggtccctcagtgtctctggtttccctgccctgcataatttaagcattagtgccaaatacatctgtcatattcctctccctggagactgygaaatgtccagactttttcagactagtggagggaaggaatgttacataactaagtggaggcctggaactgtcaggatttgacagggctggaccagagacc

SEQ ID NO: 478770 - DNA, 201 bp, Homo sapiens
gttaaaggtcctagatgaaagctgcatatttacagttaaattatatttgtgtaatattattatttaattttttattatttgtttgtttgttgtgtgtgtgygttttgagacggagtctcactcttgttgcctaggctggagtgcaatggcgcaatctcggctcaccgcaacctctgcctcctgggttcaagtgattctcct

SEQ ID NO: 478771 - DNA, 201 bp, Homo sapiens
tagatgaaagctgcatatttacagttaaattatatttgtgtaatattattatttaattttttattatttgtttgtttgttgtgtgtgtgtgttttgagacrgagtctcactcttgttgcctaggctggagtgcaatggcgcaatctcggctcaccgcaacctctgcctcctgggttcaagtgattctcctgcctcagcctc

SEQ ID NO: 478772 - DNA, 201 bp, Homo sapiens
tctcactcttgttgcctaggctggagtgcaatggcgcaatctcggctcaccgcaacctctgcctcctgggttcaagtgattctcctgcctcagcctcccargtagctgggattacaggcgtgcgccaccacacccagctaattttgtatttttagtagagacaggttttctccatgttggtcaggctggtcttgaactcct

SEQ ID NO: 478773 - DNA, 201 bp, Homo sapiens
gtgctggaattacaggtgtgagccactgcgcccggcccctttgtgtattattattattattattattattattattatttttttttttttttttttttttwtttttttgagatgcagtctcactctgttgcccaggctagagtgcagtggtgcgatcttggctcactgcaagctccatctcccaggttcacaccattctcc

SEQ ID NO: 478774 - DNA, 201 bp, Homo sapiens
tttttatttatttatttttattttttttttgagacggagtctctcgctctgtcgcccaggctggagtgcagtggcgcgatctcggctcactgcaagctccrcctcccgggttcccgccattctccggcctcagcctcccaagtagctgggactacaggcgcccaccatcatgcctggctaatttttttgtatttttagtag

SEQ ID NO: 478775 - DNA, 201 bp, Homo sapiens
tataatcctagcaatttgggaagctgaggcaaaaggattggttgagcccaggagttcaagaccagcctgggcaacatagcgagaccctgcctccaattttktgtgtgtgtgtgtgtgtgtaaagaaatttactttttgagaaagggggatattattttgggatttttttggtgatgtttatcttatttggcaatgtagaat

SEQ ID NO: 478776 - DNA, 201 bp, Homo sapiens
aacacgtaattatatgaagagtaaacagaaacacatgagggagaattaagtgcaacttaatctgggcctgtaagagggcaggaaaagtaaaaatatatcattttttaatgtcctggtatcaaaaaacaactaccttcaggttaggattagttggccatacatttaaagtaaatgcaaggggagaatggtgtgacagattcc

SEQ ID NO: 478777 - DNA, 201 bp, Homo sapiens
aacagtgaaatcattccaaatcatagtgaaaacttgaaatacaagttataagctttattgaacttttatatgtaggatttctcttctctgtcatacctttaaaaaatgtttaaaatatctggtatgagggatatctggagtaaagaagccttagaaattaaaagtaggaagttgctatataatttacgctgacttttctgt

SEQ ID NO: 478778 - DNA, 201 bp, Homo sapiens
tcgcgccactgcactccagcctgggcaaccagagcaagactctgtctcaaaaaaaaaaaaaaaaaaaaaagaaaagaaagaaaggtccaacttcattttckcatttgtggatatccagtggtcctagcatcatgtattgaaaataatacattaaaaattatatagctgtcccttggtatatgtagggtattcgttccagaa

SEQ ID NO: 478779 - DNA, 201 bp, Homo sapiens
ttctgatgatcaaggccctgcacagcaggatgccacaggatgcccctgccatctagctggaagcatcaaaagtccctctgtatgacccggtgtgggaaagwgggttgtcaggatgagaaagtggggctgcagggtgacgataagaccacctaaccaactccccacctccaccaccacaataagaacaaaactgtagggctc

SEQ ID NO: 478780 - DNA, 201 bp, Homo sapiens
gacccggtgtgggaaagagggttgtcaggatgagaaagtggggctgcagggtgacgataagaccacctaaccaactccccacctccaccaccacaataagracaaaactgtagggctctaaagagagggggtggtttacaagtttattgagcatttactaggaagtgacatggcgatgacctctgtacatgagttaggttc

SEQ ID NO: 478781 - DNA, 201 bp, Homo sapiens
tttaagaggttttaagtcagagggatcatctggaggccggctttgtgcaagcttttacagccttctgcagtgtccttaccctggctgtacatggggaaggrctatgtgtaaacaagtgctttagaggcctctgagagtttttaaaaatcagacccattaacaaaagagagggtttcttaggaacaaagcaactattttgat

SEQ ID NO: 478782 - DNA, 201 bp, Homo sapiens
tacagccttctgcagtgtccttaccctggctgtacatggggaagggctatgtgtaaacaagtgctttagaggcctctgagagtttttaaaaatcagacccrttaacaaaagagagggtttcttaggaacaaagcaactattttgattactgagatctctgttttgtttctgtgagttactctgtattcctttccccatttc

SEQ ID NO: 478783 - DNA, 201 bp, Homo sapiens
gagctatggcacctggccagatgtgagaattgagtcaactctgtatagtctggatacccagtgccttgcacagtgtaaacactctataagtatatgaggartgtgctagaaaatagctaacagcctttctgcctgaaattcatccaattcatctttcacactgctcccattcaacacagattgacagttactctgtgtgtg

SEQ ID NO: 478784 - DNA, 201 bp, Homo sapiens
tgagtcaactctgtatagtctggatacccagtgccttgcacagtgtaaacactctataagtatatgaggagtgtgctagaaaatagctaacagcctttctrcctgaaattcatccaattcatctttcacactgctcccattcaacacagattgacagttactctgtgtgtggtactctttccctcatgaagcttacattct

SEQ ID NO: 478785 - DNA, 201 bp, Homo sapiens
tctgactttctgcagagaagatgttttacagatgtgtcaaagctgatgtaatgtggttgggggaggaaatccagacccaaagtgtttgtcagctgggtgtrcaactgcctatgtgatcctctgtcttaaaatgatttctgtctgtgctgcgaaacaaagacaaggtgaggtgtttttcttttttgtaataatataaagctg

SEQ ID NO: 478786 - DNA, 201 bp, Homo sapiens
gctgttgaggggagaatggcaggtagacaagggccagatgaaaaaaatcaccttgaatgtcaggattaatacgtttttactttatactgttatagcagcawgacgttattaaaggttttttgagcaggatcccttccttgtcctactttgtaaagatcactttgagctttttccaaagaggcaatggaatgaatagagcta

SEQ ID NO: 478787 - DNA, 201 bp, Homo sapiens
aatacgtttttactttatactgttatagcagcaagacgttattaaaggttttttgagcaggatcccttccttgtcctactttgtaaagatcactttgagckttttccaaagaggcaatggaatgaatagagctaaaggatctagcaaggtgagacgagcacaccaggctccaaacgaggttcttccagttactagctgtgt

SEQ ID NO: 478788 - DNA, 201 bp, Homo sapiens
gaaaacataattaaaccctctctatatatttttgaggattttatattagttgattctgtgactcttctataatttaaccattttctagggttgttgtgggttttttttttttttgctattacaaaaatatgtacctgagagattcatatacacatatctttatatagatatactttttttctgtaagatatattcttggaa

SEQ ID NO: 478789 - DNA, 201 bp, Homo sapiens
cctactttgtaaagatcactttgagctttttccaaagaggcaatggaatgaatagagctaaaggatctagcaaggtgagacgagcacaccaggctccaaamgaggttcttccagttactagctgtgtggctttggtcaaggctttaagctgtaaattccggcgtttcctcctgctaatattgaaagggagaaagttaaata

SEQ ID NO: 478790 - DNA, 201 bp, Homo sapiens
gaggtgggaggatcacctgagcccggggaggtcaaggccacagtgagccgtgattgtaccactgcacttcagcctgggtgacagaatgagagcctgtctcaaaaaaaaaaaaaaaaaagttttttgttaattcaaacagaggcttatatattagaaatactgattatttgtctcgtatatgcaaatattggtcaaatctgt

SEQ ID NO: 478791 - DNA, 201 bp, Homo sapiens
gcgatggcggtcccctctcaaccctctgggggccgtctcggccgctgctccacgcccctccacgtggaggccggcctcccggaggaacgcgccaggaacgsagacccgtggtgaggcccgggctccgcgtctcctctgccagccccagacgcccgaaccccctcacctggtctccaagtaaacgttgggtggctgccagga

SEQ ID NO: 478792 - DNA, 201 bp, Homo sapiens
aggtgggaggatcacctgagcccggggaggtcaaggccacagtgagccgtgattgtaccactgcacttcagcctgggtgacagaatgagagcctgtctcaaaaaaaaaaaaaaaaaagttttttgttaattcaaacagaggcttatatattagaaatactgattatttgtctcgtatatgcaaatattggtcaaatctgtc

SEQ ID NO: 478793 - DNA, 201 bp, Homo sapiens
gggctgtagatttcatcttcactgcttctagaatccaccccttttttccattcccactgcctcattcattatatttcacttctcatcacagtgaacccccmccccccgaccttttccctaaaaaagggcaaaaccaaaatataaccagatcttccttttcccagcctctctcttctagggcaccctaatcacaatccagaa

SEQ ID NO: 478794 - DNA, 201 bp, Homo sapiens
cacaatccagaataatcttcctagaacatcgagaaattcctgctcaaaagcctccaacagttcctctttttgttctgagtagagccagacatgcttcaagccctggaagccctcaccacatcttcctctgcagcctgtttccttacccaaacccccactgcacgcccagcatctgctgtgttcttcctgccacactctggc

SEQ ID NO: 478795 - DNA, 201 bp, Homo sapiens
cgaaatgctatataattgtaacatgttgttatgattatgccccatggtgtgtccattacccagagcttttgcatattggcaagaatttatcatatttgacmctgaataagaagcatttgaaaatattggagaagaaaaaatgcaactttgcagcctcagtgtgccactgaaacaggtggtactaaagggttttcagctacc

SEQ ID NO: 478796 - DNA, 201 bp, Homo sapiens
gcttgcaaaggacaagcagagttcacagagctcaggatagaaacatcagagcctcctccacgggcttcagtgaaactccgatgaactgtacctgagggaattttttcttaatcaaccccttgtgtggatgaatacaggaacaacaaaacttgtgtacgtatgaaagtcatgttgttaagcagttatgatttaagaggtttt

SEQ ID NO: 478797 - DNA, 201 bp, Homo sapiens
ttacttatcacgtaatgtttacatgtctgtctctttcattataccgtaagctcctaaaggcagggctgtctgtgttttatctacctctgtatcctcagaaytcatattccatatgcctggcttgcggactcattacacgtttgttgaatgaatgaatgaatgaatgagcggactgggggaaggaggacaatcaggcagcta

SEQ ID NO: 478798 - DNA, 201 bp, Homo sapiens
aatgggatcgatcacagctaccttatgggatcacagtggtgattcactgagataatatttccagagtgtttagcaaggcacctggcatatagggtgggaayaggaataggagtgcaattgaacatgagtcttcagtttctaatgaattgaatttttctccttcctgaagtgttcatagattcttagaattttagagcgaga

SEQ ID NO: 478799 - DNA, 201 bp, Homo sapiens
tcagaaaataagggagttcctctgcatgggggtgatgaagacagaccctttccaggtaaaatgcaacatttattacttattagatatagttttcttgacartatatgataggaaaggaagtaacatttattgatacctaatgagaggcaagctccctatattgtatcttttaattcagtccccactaaaactctatgagat

SEQ ID NO: 478800 - DNA, 201 bp, Homo sapiens
attgacaccatcgctccccacagcagctccttggggcagggggctcacctgtgcagccacccttactcacagtagcatcccattcttcacactgcaacccsccagcactgtggacccttccagggaggtgacaggagccagcagacacatgacattcccagaaagccccatcttatccagacaggcttccctccatacttc

SEQ ID NO: 478801 - DNA, 201 bp, Homo sapiens
tatagagaacacgtcagacaaaaccttttcagatggacagaggccaagctggagtctggccacatctctttctgttgtcagggactctgtggggagaggargaggagcctgcaccctacctccacccctagttcaccgtttgcccgttcctctctctaagcttatgctttatccaccttggtgatctcaggctacagagaa

SEQ ID NO: 478802 - DNA, 201 bp, Homo sapiens
gttgtaaagataaactagacagctccttgagagaggagctgggcctccttcatctttgtgctcttcttgcacagtacagagcacagggtgctcagctttgytgaatgaataatgaacggaacactacattttaaactgataaatgctaaagtataatttttacacctcctgcagtttcaagttcatgcccaccttgtggcc

SEQ ID NO: 478803 - DNA, 201 bp, Homo sapiens
ttgacaccatcgctccccacagcagctccttggggcagggggctcacctgtgcagccacccttactcacagtagcatcccattcttcacactgcaaccccscagcactgtggacccttccagggaggtgacaggagccagcagacacatgacattcccagaaagccccatcttatccagacaggcttccctccatacttct

SEQ ID NO: 478804 - DNA, 201 bp, Homo sapiens
aatcagtaataagaaatttaaaaggactttattaaagagtgctatgcttaaaagtcaggttaattaaaaaatgaatattcaggctctaatggcctggaatycatgggaaaaacaggaggcaccagaaacccttttcctggccctgttcctccaaggactccaccataaagccaataaccaattaagaaacttaaaaactgg

SEQ ID NO: 478805 - DNA, 201 bp, Homo sapiens
tgctaggaagtgccagaagactttcagagcaatttgtctttaagccaggtgtagtggcccacacctgtaatctcagcactctgggaggctgaggcaggagratcacttgagcccaggagttcaagaccagcctgggcaatatagtgagacccctatctcttaaaaaataaaaaaggaaagaaaaagaaaaaaaaggaaact

SEQ ID NO: 478806 - DNA, 201 bp, Homo sapiens
gacagagatgagtctcacacacacagtgccctgccctaaagaaactcacattctaggagagatgggcaactaaatacgtagctgtaggagcgtggaatgargactgtaataagaagcacacagtaggttgggtgcagtggctgacacctgtaatctggcactttcggaggccgaggcgggcagatcatctgaggtcaggag

SEQ ID NO: 478807 - DNA, 201 bp, Homo sapiens
cccttccttcacctccaccctggggaagggtcagtaaccaatgccgagggtcggggaaggaggagtcacaggcaagacagggactcagcgcagtgctcccrccatcatcggggacaggtgccagggtcagctgcagctctccttccgggagcagggtgtggtggccctggatggtcccagggagcagagggaggcaggcag

SEQ ID NO: 478808 - DNA, 201 bp, Homo sapiens
tcctgcctttgtaagcctgctgaattgtgattcacagttccctgggtgaggggtggtgataaagcatttaaagaggactgataataactaggaatacttakgctaggaagtgccagaagactttcagagcaatttgtctttaagccaggtgtagtggcccacacctgtaatctcagcactctgggaggctgaggcaggagg

SEQ ID NO: 478809 - DNA, 201 bp, Homo sapiens
aaaataagctgggcatagtggtgcatgcctgtaatccctgctacttcggaggctgaggcaggagaatcacttgaacacggaaggtggaggctgcagtgagmagagattttgcctttgcactccaccctgcacaacaaaagtgaaactccatctcaaaaaaaaaaaaaaaaagaagaagaagaagaagaagaagaaacacag

SEQ ID NO: 478810 - DNA, 201 bp, Homo sapiens
tggctccatgaattgaaagtgcttagtacagtctgtcacagtgttaaagcaaactaaatatggcctgagaagggctttgtacttctatatttgagtccttrtggatgaactataacctagctttatagtcagacaaatttgaaaacttaacttaatagtatatacctgtaacaatagctgaatgttggccaatcccagcgg

SEQ ID NO: 478811 - DNA, 201 bp, Homo sapiens
cacagcagctggggatcacaggtaagctccctctcggatctctctttcctttcccttttttatcttttctattactcagggcaaccagcttgcccagagaycacgtgttgaaacccctagtcagacattggattaaagataacggggcccatctgagggcaaatataaaccttgccagtttgatattgagtgctaagcaga

SEQ ID NO: 478812 - DNA, 201 bp, Homo sapiens
gaaatgtccagactttttcagactagtggagggaaggaatgttacataactaagtggaggcctggaactgtcaggatttgacagggctggaccagagaccmttccgcctctgcctagtgtgtctgtcaggcaggcagcagccatcaatccaagaatgagccatggcggcaagcactgtgtggagaaaggaacccagccgag

SEQ ID NO: 478813 - DNA, 201 bp, Homo sapiens
tgccagacatgttgtacaatttaaggtgattaggcctcctaaatgcttcataaaatgccaccatgactcttaactgtacagcctgcctgctttatagctargtaaggcctgggacacctgtagttagatgctggaaagagtcggacctttatctgcatttctgtctgggtcctgggctccacacctagtacataattaaaa

SEQ ID NO: 478814 - DNA, 201 bp, Homo sapiens
cctgctttatagctaggtaaggcctgggacacctgtagttagatgctggaaagagtcggacctttatctgcatttctgtctgggtcctgggctccacaccyagtacataattaaaatccttacttaccaaggttttcaccaaaagtaaaagttgctaagagttaacattgtaatatgtaattgagagtactgaaaaaatag

SEQ ID NO: 478815 - DNA, 201 bp, Homo sapiens
agaaaataagggagttcctctgcatgggggtgatgaagacagaccctttccaggtaaaatgcaacatttattacttattagatatagttttcttgacagtrtatgataggaaaggaagtaacatttattgatacctaatgagaggcaagctccctatattgtatcttttaattcagtccccactaaaactctatgagatgg

SEQ ID NO: 478816 - DNA, 201 bp, Homo sapiens
gtgacttgtcctgtgccttatatcctaattaaaaatctgttccaaagaaacaggtttgaatccactgctgtcagtagcaatctgtttgacagccgagtttwcttggaagaagcaaataaatcagcgagtgtcaccattgacctccttgcttttcctgcctcacaaaacctaggcaagacctggagtctctggcagagccca

SEQ ID NO: 478817 - DNA, 201 bp, Homo sapiens
agctttacacatttaatgtgtacagcttgatgaatttggacataagtatgcccttgtgaaaccatcaccatgatccatgccatcaacctatccatcacctycaagtttcctcctgccttcttacttattattactattagcaataagaacacttaacataagacctaccttcttagcatatttttaaatatacaatacagt

SEQ ID NO: 478818 - DNA, 201 bp, Homo sapiens
tagtgtatcaaagatgttgaaaagccttggggaaacctagtgtttctcaggcttacttggccatggaacctattttctttggaatatcttacaggacactrctgtttgccaaacccaatttgggcaatgctggtttaggtttaggttaatctggatgttctgtaatgaaaccacattatagatagacacaggaaaattggc

SEQ ID NO: 478819 - DNA, 201 bp, Homo sapiens
gaccagcctggccaagagatgatgaaaccccgtctctactaaaaatagaaaaaattagccaggcatggtggtgtgcacctgtaatcccagctactcgggargctgaggcaggagaattgcttgaacctgggaggtggaggttgcagtgagccgagattgcgccattgcactccagcttgggcaacaagagtgaaactccgt

SEQ ID NO: 478820 - DNA, 201 bp, Homo sapiens
ccatcaagagattttttttgtttaaaattttattttcttatggtaaaaacacttaacatgagatctaccctctcaacgaatttttaagtgtacaagacagyattgttaggggctgagcagggtagctcacacctataatcccagcactttgggaggccaaggcaggaggattgcttgagcccaggagttcaagaccagtct

SEQ ID NO: 478821 - DNA, 201 bp, Homo sapiens
aatgccgtttctactaaacatacaaaaaattagccaggcgtggtgttgcacgcctgtaatcccagctactggggaggctgaggcaggagaatcgcttgaamctgggaggccgaggttgcagcaagccaagatcacaccattgcactccagcttgggcagcaagagtgaaactccatctcgaaaaaacaaaacaaaacaaaa

SEQ ID NO: 478822 - DNA, 201 bp, Homo sapiens
caaaacaaaacaaaacaattaattattaggattctatgtgtgaacatattggctaaagttaaaatggcattattcagtttttttttccataaatgggacaktggaataaaagcacaacagagttttcttagaagattgttctgctctgagaaaaaaaatagtaaagggttataaaaggtttataaaaatcttaccttatgg

SEQ ID NO: 478823 - DNA, 201 bp, Homo sapiens
actgtgttcccaggctagccttgaactcctgggttcaagagattatcctgcctcagcctcctgagtagctgggactaaagtgccaccatgcccagctcctktagttatttttaaaattttatgttatctatttgtatcttttaatcaatctagaatttaatttagtatatggtgaaagggtaggaatctaactttattttc

SEQ ID NO: 478824 - DNA, 201 bp, Homo sapiens
ctaggcaagacctggagtctctggcagagcccagactggttttccaattgatttcttttaattttacccattcagaagacccccaagcccctagaaacctkgcatctcatatgagggtaggaattggactgcaagctatgccaagtcttaatttaggttacataacttttatttcaattcagaaatgaaaaataaaaataa

SEQ ID NO: 478825 - DNA, 201 bp, Homo sapiens
ttatcattggcagcggtgaggccatgttgcagctcatccctcccttccagtgccgaagacattgtcagtctgtggccatgccaatagagccaggggatatyggtatgtagggccccaggagggcagggtcaatggatctttttagtttttaactcaaaagctattttaagaatcacatactgccttcacaaaagttttatt

SEQ ID NO: 478826 - DNA, 201 bp, Homo sapiens
aaatttttgttattggttctatttcctctttgcttatgctaggaaactcagagccatatgtgaaagcatttttatttactaaaccccctggttttatttcrttttctttgccttccttttcctcccctcctcattctttcctccagatgcataagatgcctgacctatttatcattggcagcggtgaggccatgttgcagc

SEQ ID NO: 478827 - DNA, 201 bp, Homo sapiens
aatagaattggctaaacagaaaagtacctgtgcagctgttgacacctgtggcctatggagaaatacagcaaatgtaaattataaacaattctggccgggcktgatggctgacacccgtaacctcagcactttgggaggcagaggtaggcggatcccctgaggtcaggagtttgagagcagcctggccaacatggcaaaacc

SEQ ID NO: 478828 - DNA, 201 bp, Homo sapiens
agcaaatgtaaattataaacaattctggccgggcgtgatggctgacacccgtaacctcagcactttgggaggcagaggtaggcggatcccctgaggtcagragtttgagagcagcctggccaacatggcaaaaccctgtctctactaaaaatatgaaaattagcctggcgtggtggcaggtgcctgtaatctcagctactc

SEQ ID NO: 478829 - DNA, 201 bp, Homo sapiens
aggccctaagttctggtcacgctgtcacctaagtaagaacctggccaaaagtgaggaatttttttttaaacaaaatcatgggaggccattattttggactragctcatgcactaggcaccaacaaaccaaaccaaactaaaatggagtcactcatgctaaatgtgacataatcaaaccaaggctttaaaaaaacacaaaat

SEQ ID NO: 478830 - DNA, 201 bp, Homo sapiens
ttgaaaacctaacttaatagtatacacctgtaacaataactgagtggtggccaatcccagcggccatacttcaaccactcacagcctgctgaatgttcaawctgcgttcaaatcaggcaaacaccgagctgtaaccaacctcactgtttctgtaccttacttccgattcctgtgcctcactttgccttttttatctataaa

SEQ ID NO: 478831 - DNA, 201 bp, Homo sapiens
ttttagctgcaatttagaaacactccacccacatactcaaatcatggctgtagagtttatgcctgtgtgtgtacacattatagttcattgactctgtgcarctattcttcagggacctagtacttaagatactgtactcatatttttccctctttacccaccgcccacagttttcccacccttacttggctctctcttagt

SEQ ID NO: 478832 - DNA, 201 bp, Homo sapiens
atggaatcgatctaagtgtctatcaagagatgactggataaagaaaatgtggtatataaacaccatggaatatattgcagccataaaaaaaaaaagaatamaatcaggtcttttgcagcaacatggatggagctggaggccattatcctaagtgaaatgactcagaaacagaaaatcaaataccacgtgttttcacttaaa

SEQ ID NO: 478833 - DNA, 201 bp, Homo sapiens
aacgttgcacaacagtgtgaacatacttaacactattaaaccgtacacttaaaaatggttaagaaggtacattttatataatatgttctttcttatcacartttaaaaagcaaaacacaacaaaaaagctccggccaaagaaaggaaaatttgaggcttgaatgaggtatagtgaaagatatatagagtcagtgttagaag

SEQ ID NO: 478834 - DNA, 201 bp, Homo sapiens
ctactaattataattgtaattcttgattctgacatgcaccctgatattggaaatcttaaaatctagaaaaatctgctgcttgttattgatggattatatcycttttcacattgtctctaaaatcaaaatggcaaattgaaattttaatcaagcttctttttttcccctacaactaccagggaagaagtttgatttttttcc

SEQ ID NO: 478835 - DNA, 201 bp, Homo sapiens
tttcttggatcctacactttatagtgagtcataaatactttaaatacaaagccaacaacatttgctgcaaataaacgtaaaaatactgttaaagtgtaaartgttttcctccgtaccatctgacgtttctggcggttcgttgaacgcgagagaacgctgagccgtctgcactgagcccgggagcatcttcagggcagcgcc

SEQ ID NO: 478836 - DNA, 201 bp, Homo sapiens
tctctaataaaaatacaaaaattagctgggcgtagtggcacatgcctgtagtcccagctactcaggaggctgaggcaggagaatcgcttgaacccgggagrtctatagaggttgcagtgagccgagtttgcgccaccgcactctaatctggcgacacagcgaaaaacactactaattataattgtaattcttgattctgac

SEQ ID NO: 478837 - DNA, 201 bp, Homo sapiens
gagcttgggaggtcaaggctgcagtgagccatggtggtgcctctatactccagactgggtgacagagtgagacccacctcaaaaaaacaaacaaaaaaaargggatcttgagatgggaagattatcctggattatttgggtgaaggtcaggggaggaagtaggagatgtgacaatggaagcaaggttggagtaacatgaga

SEQ ID NO: 478838 - DNA, 201 bp, Homo sapiens
tggcaagggcaacaaccaccacaacagtaatgctagtagctagcatttattatgcactttgcctcaggccctgggctgcactctatgtggattttttttttgagatggagtctcgctgtgtcgcccaggctggagtgcagtggtatgatcttggctcactgcaacctcacctcccaggttcaagcaattctcctgcctcag

SEQ ID NO: 478839 - DNA, 201 bp, Homo sapiens
cctcatgcagagtcttttcaaaggctctgtgtatttccaagtatatgtgtgtgcatgtgggtttgtgtgtgggggtgtgtgtttgcttttctctgtactcytactttaaagatgagtgttttaaactttttttaattttatttttttttaatttatttatttagagactgggtcccaccatattgcctgggctggcctcgg

SEQ ID NO: 478840 - DNA, 201 bp, Homo sapiens
tttccacctgcctctcagtcagcagccttctcatttcattctttccatcttatttttcaactctcatttcttagagtgcgcactttaattaaatgaattgmgtacagaacagatgtggtctgcaagttatttatgtttatgtgataaatcttttcaaaggaattacttttctctgcccttttagggccacattctcttcct

SEQ ID NO: 478841 - DNA, 201 bp, Homo sapiens
agctcagggacatctttctcctgtgattcttgcttttatttcatttgtttagtgtcttctgtaagcccggatacctatcatgttgtctctctgttttttawcctgttgtgcttttcctctgcagtctcagagaacttctcctatctgtccttcacatttacagattccattttctgtagttccaattctgttctttaccat

SEQ ID NO: 478842 - DNA, 201 bp, Homo sapiens
gagcccaggaggcagagattatagtgagccaagatcacccccattgcactccagcctgggtgacagagcaagaccttgtctcaaaaaaaagaaaagaaaaraaaaagttattttataactagccactttactaaattcttctattttgataattttgtattttctcagttttttatgggaagacaatcatatttgcaaata

SEQ ID NO: 478843 - DNA, 201 bp, Homo sapiens
tttttgcatcatgttttctaacagtttattaggaaatgaaaatttattttaggctgggtgcagtggctcacacctgtaatcccagcactttggaaggccgwggtgggtggattgcctgagctcaggagttcaagaacagcctgggcaatgtggcaaaaccctgtctctactaagaatacaaaaattagctgggcatgatgg

SEQ ID NO: 478844 - DNA, 201 bp, Homo sapiens
aggttcatgccattctcctgcctcagcctcccaagtagctgggactacaggcacctgccatcacgcacggctaatttttttgtatttttttaggtgagacrggatttcaccatgttagccaggatggtcttgatctcctgacctcatgatctgcccacctcggcctcccaaagtgctgggcttacaggcgtgagccaccgt

SEQ ID NO: 478845 - DNA, 201 bp, Homo sapiens
cgcggtggctcatgtctgtaatttccagaactttgggaggccaaggcaggaggattgcatgaagccaggagttcgagaccagcctgggcaacaaagtgagkccccatctctacaaaaaaataaaaacaattagctgggtgaggtggtgtatgcctgtggtcccagctactcaggaggctgaggtgggagaattgcttgagc

SEQ ID NO: 478846 - DNA, 201 bp, Homo sapiens
gaaggcaatgaggagggccacggcaggcaggcagctgctttctttggttaggttcttcggtgtggtaggctaaataatagtcccccaaaatatccccatcytaatttccagaacctgtgaatggcaaaagtgactttgcagatgtaattaagttagggatcttggccaggcgcggtggctcatgtctgtaatttccagaac

SEQ ID NO: 478847 - DNA, 201 bp, Homo sapiens
aaagtgctgggcttacaggcgtgagccaccgtgcccggccaaaaataacttttaaaaacatgagtatagcatacacacacacaaaagtccacaaatcctargtgtaccacttgatgaatgatcccaacgtgagcacacctctggattaccacctggatcaagaaataggacatcacagcagctggcagcttccaaggagaa

SEQ ID NO: 478848 - DNA, 201 bp, Homo sapiens
gccaagaaacagactgctgagtcggcacatccctttctcaggttgatttaagaagggagaataactcaagggagcattatgagggaatttcagaaacaatsagatcatttagcaattgaattgtctaaatattttttcctaatttaaagttgcgtgtcatgtgagtaattggacaatgcattattgaattactgagggatt

SEQ ID NO: 478849 - DNA, 201 bp, Homo sapiens
ttccaagtccctctcctggccccgcagtcactgagagactagaaaagtgatagggaggcggatctggagctggatgctcccctccattgtggccttgttgkggggggagggccagtcaccactctcatctgggcagaagtgggaatggcaggagagacaaacaggaagtcttgattaacgaaatgagacagttctagtaga

SEQ ID NO: 478850 - DNA, 201 bp, Homo sapiens
tgtctgtaagcagctgctgtggtcagtgagtggctgcatagctgggtcctccatcctggtggctttggggacagtataggctctggttctcttctccctcmattctttacctcctttcagtctcttcccttctggttttcccccttcctagacgcctggcttccctgggcctgctgcacctgctctggctaggttggagag

SEQ ID NO: 478851 - DNA, 201 bp, Homo sapiens
atttgacagccccacagtcagggtcagggcacagggacagatactgtgtctataacaatccataacactgattttgttcatctcaataaatgtgagaatgraataaaaattaatgtagaatattttgtacatctcaataaagccactttctgggggcaggcattataattctagcctctgttctactgtttgataggtaaa

SEQ ID NO: 478852 - DNA, 201 bp, Homo sapiens
ccacagatatctgagctctgccaggcctgccttcctcctccgtgtaccttgtcctctccacatgtaaccagtggggctggtccctcatccttctttccaamctgccaccaccctctccactccagattccattcactcaaagacatcagggagcaaggttgagtatactgacaatttgggtgggaagattcagaagatggt

SEQ ID NO: 478853 - DNA, 201 bp, Homo sapiens
cagactgtgctgtcttgatggggaggcacaatgatccctgggacagaggccagggaagggccctggaattcccagcttggtcctatgctgctcagttgacyctcccaaacctccaagccaactgattctgctctgcccctttagggaggctcccagctgggccctggagcaaatgctgtaaacccacaaatctgctcaggg

SEQ ID NO: 478854 - DNA, 201 bp, Homo sapiens
aagggccctggaattcccagcttggtcctatgctgctcagttgactctcccaaacctccaagccaactgattctgctctgcccctttagggaggctcccarctgggccctggagcaaatgctgtaaacccacaaatctgctcagggttttatcccacctgggggccacagattggtgggagaatgggaggtgaataaaggc

SEQ ID NO: 478855 - DNA, 201 bp, Homo sapiens
ggcaggcagaacggggctggggtgtcagcaccaccccgcccattcctctctgctttggtcacagcatccctggtctccaccttgctcactggcttctcgtktgggctggaatgggcctctgactcctgtctgccccagcctccttcccgtactcccgggttctcccttttccttgttccctaaagccagtgctaattaaga

SEQ ID NO: 478856 - DNA, 201 bp, Homo sapiens
tgtgctctctctctccttttctttttgtctgtaaatttaactttcactgggatctctctgggtttctctagctttttctttgtttgtttttgttttttttwaaaaagcatagtcttgctatgttccccaggctggagtgcagtggattcacagcagccttgaactcctgggctcaagccatcctcctgcctcagcctctgg

SEQ ID NO: 478857 - DNA, 201 bp, Homo sapiens
ttgtgctctctctctccttttctttttgtctgtaaatttaactttcactgggatctctctgggtttctctagctttttctttgtttgtttttgttttttttaaaaaagcatagtcttgctatgttccccaggctggagtgcagtggattcacagcagccttgaactcctgggctcaagccatcctcctgcctcagcctctg

SEQ ID NO: 478858 - DNA, 201 bp, Homo sapiens
ttcttcctcaactctctttcacactccctcctgtcatctctatctgctgatgcttctaccaatgaacgattccttcattcatccactcactcactcactchgcatgttccctgggtatctgtggaataccaggccctgtgctgactgcagtcatcacagagagcagccagacctgccaagtttccagtgggtgcccaggct

SEQ ID NO: 478859 - DNA, 201 bp, Homo sapiens
acctgaatctgttcaaagctttgctcaaatgtctccttcctgatgagacctccccagcccctgagctccccatgcctcactcctgatcgccttacttaacycttctttttcttttttgccagtagtacttatcaccgtctaaaatacttcataatttacttgtttattgtttgcccctctccaatagaatgtaagctcctt

SEQ ID NO: 478860 - DNA, 201 bp, Homo sapiens
cctcctaccgtcctgtgatggagtgagactgcccttgctggggaggtgtcaacaagaggatgcttggaaggcaatgaggagggccacggcaggcaggcagmtgctttctttggttaggttcttcggtgtggtaggctaaataatagtcccccaaaatatccccatcctaatttccagaacctgtgaatggcaaaagtgact

SEQ ID NO: 478861 - DNA, 201 bp, Homo sapiens
cagctcactgcaacctccacctcccaggttcaagtgattctcctgcttcagcctcttgtgtagctaggactacaggcatacaccaccacacccagctaacwttttttatttttagtagagaaggggtttcaccatgttggccaggccagtctcgaactcctcacctcaagcccctcggcctcccaaagtgctgggattaca

SEQ ID NO: 478862 - DNA, 201 bp, Homo sapiens
tagacttagaaggaagacttcctagatgaaatgcctgggctaagtcacaaagcagatgagaaattttgtgttgccagagtatatatatatatatattttttgagacggagtctcgctctgttgcccaggctggagtgcagtggcgtgatctcagctcactgcaacctccacctcccaggttcaagtgattctcctgcttca

SEQ ID NO: 478863 - DNA, 201 bp, Homo sapiens
gacctctagacttagaaggaagacttcctagatgaaatgcctgggctaagtcacaaagcagatgagaaattttgtgttgccagagtatatatatatatatattttttgagacggagtctcgctctgttgcccaggctggagtgcagtggcgtgatctcagctcactgcaacctccacctcccaggttcaagtgattctcct

SEQ ID NO: 478864 - DNA, 201 bp, Homo sapiens
ggctgatttctacgagtcaaagaataaggaactatatttagctgcttgctctgggctagttagctggtggggagtgagggctcagactgggggaaaaaaggaggaggagcaggaggaggaagaggaagaagaggaagaggaggagaaggaggaggaggaaatgagagagaaagagagatgcccagttgtctgctgtctggc

SEQ ID NO: 478865 - DNA, 201 bp, Homo sapiens
gtggctgatttctacgagtcaaagaataaggaactatatttagctgcttgctctgggctagttagctggtggggagtgagggctcagactgggggaaaaaaggaggaggagcaggaggaggaagaggaagaagaggaagaggaggagaaggaggaggaggaaatgagagagaaagagagatgcccagttgtctgctgtctg

SEQ ID NO: 478866 - DNA, 201 bp, Homo sapiens
gtataagtgatagtcctgggtggaggtgaagacgtggcactgactctctgtgacctttgggaggcatttctatttcagtctccatgtctgtctgtctgtcygcccatttacccatccatctctgtctgtcagcgactcagtccttggttcaccttcatgaggtggctttttttctgctttctcagagctcatgcagtttac

SEQ ID NO: 478867 - DNA, 201 bp, Homo sapiens
ctgtcatctcctgtcccgccacctcccacctccagacccttggccagactgttgccttcctggatctccttccttactctctcctttccactatctaaatrttaactttcctttcaggttcccctcacacagagcggaagcacagccctggcatcaagtgggagcatggcccagggcaaggagctctgggagtgcagcctg

SEQ ID NO: 478868 - DNA, 201 bp, Homo sapiens
tattcatattgatcacaggagctcctgcctgcctggatgaagaggaggtcaagactttgtcccccactccgcaagataccctctctgttccggagcggtgrgtccctcccctgttaggaccttgtctccctcaggactggacctggatcctgggcctgcagtcagattgccagtttcacttagaggtggaaatgtcaaccc

SEQ ID NO: 478869 - DNA, 201 bp, Homo sapiens
ggctggggctagagggcgtgggaggccttgtcctaagtgggccctgagcctctcttgcaagctgcctcatgcaccgtgggccccagctaggcctgggctgyaccctcctgggccccctctgctgctacggtctttgtttgtcactctccagtttgtgtttttgtcgctaaattcttctatttttgcccttggcttcctcca

SEQ ID NO: 478870 - DNA, 201 bp, Homo sapiens
agaggatggaatgagaggattatgaaaagtccccagcacagagccagacatgtggccactattttccttctttcctcttgacttgtgagagaagggagggrtttatctcttggggttgacccccactcccacttcctctgtctttcctgtttttatctgtcttcagcatctttccttgctcagggtgaaccttgtgcaggg

SEQ ID NO: 478871 - DNA, 201 bp, Homo sapiens
acaagtttcattcttttgagccagtgcaagctgacttcagcacaccactaggcaagaaggggcttcctgcatgcctgcgggggctggggagagtgcacacrtggctggctacagagcagcccactgtagccttatagagctcgactttgggccaacagcccactccaacctggttagttcttccttgtggctgactcatag

SEQ ID NO: 478872 - DNA, 201 bp, Homo sapiens
atagttctctcatgaagagatgcagaagccggaggcatgggtgccaggacaggaggcggcagcagcctgttatggtaaggactgagtggtgtcctgtggaytgggcagcacagaggtggttgtgattttcaggagggcagttttggtgggataaaggggagcgagttacagggagaataagagagaaggacacacagagac

SEQ ID NO: 478873 - DNA, 201 bp, Homo sapiens
ggtcccgaagcaggcctcggaggcacagctacgcatccccagagctgtggaaggtgcatctctctgaatcttctttctttgctctgtgggcctggtagttygacaactttctaacatcctggacttcctgatctattgaggaattctgcaatgcatccacatctctccctgggcaagaaattgggctttgagtcccagttt

SEQ ID NO: 478874 - DNA, 201 bp, Homo sapiens
aaatcctgatctcactgaattccttccctggctcagagacttctatggctccattctgtccaggctcggcatttagcgttcatacacacacccctctccamgggcgacggctgttcctcttttctctcctctgattccgcctgggctccctgtcatctcctgtcccgccacctcccacctccagacccttggccagactgt

SEQ ID NO: 478875 - DNA, 201 bp, Homo sapiens
aaacaaggtatgaaggacctgtccttaatttggctcctgtatattctttattttggaaatgcctggagcccacctagagaggaggcaactagagtggacaytctttgggaactatagacctcccaaccccatccttgccaggcagcatttgttcacccattgcactgttcttcaggactgaggcttggactccagcatgtc

SEQ ID NO: 478876 - DNA, 201 bp, Homo sapiens
gtgggattcctcccttgctttgcagagggacgtactaggaggcccatggtgggtcggaattttctgtgatagtggggatgccaagagggaaggccccagarcacccaaaccctccatcttccaggctgcgctgtagatgggtttggggcagcactgggaatccaagacccaacccaggcagctgctgcctctggaaagcgg

SEQ ID NO: 478877 - DNA, 201 bp, Homo sapiens
ttgcttgaacccgggaggcggaggttgcagtgagctgagattgcaccattgcactccagcctgggcgacagagcaagactctctcaaaaaaaaaaaaaaaagaaagaaagaaatcagaaaatcgaccacagtggtagccacctggcctaatgctgtgtttttgtacctgacaggggtcactcattttaggcacaactcctt

SEQ ID NO: 478878 - DNA, 201 bp, Homo sapiens
ggactgaaatgttaaatgtgaatgtacatttcttaattgcaacttttctactgagtgtttgcactatactttctggaatcttatttaacaaaaataaaggraaaaaattgcttgactaaactctgtggccatttcagttgaaaaataaatggttatgtggatgttttgaagacattcctgcctgtttcacataacttctgg

SEQ ID NO: 478879 - DNA, 201 bp, Homo sapiens
aactgcacatatgcaagccatttgcactctggaactgcatgccgtgaaaactcctaatggtgtggaacttagtttgaatttgaaatcacgccgcatgcacmaagggacaggcccaggcccgacctcaggtcatccgcccgctggctgcagagcatccctgggagccaaggcgaggcccgtggagcctgagctttgtgtagc

SEQ ID NO: 478880 - DNA, 201 bp, Homo sapiens
ttgtacctgacaggggtcactcattttaggcacaactccttcattctttgtgaaattagtgagtttccttctacccgtcaccagattcaatatgttctatkaatacaccgataaccacaggggaagggcacttgtcgctctcccacctggttaccacagtctccatgggtcttttgccgtgaccacaaataaaggaaacac

SEQ ID NO: 478881 - DNA, 201 bp, Homo sapiens
gaaatggtggcacctccagacaccctgaaactacacaccatttcttccctgctcagcttctgctcaggagttctgtgagctatgggaaggccattggttgkatttgctacttttactttcatcttcctctgctgtagagccatttaatgttattgtcatatgctgctggtgaggtaaaggtgggtccgggtgccttcccag

SEQ ID NO: 478882 - DNA, 201 bp, Homo sapiens
tctgtttcactaccttaaaaaatagatactccactagaggctgtgcttaattcaaatccatgtgtgtgcctgcattacatgtgtgaacacgtgtttctgtygtgtgtgtcatgcacatctgtgtgttgcatagcataagccaaatgaaaatcatttgttcatgggattcatatgaggaacaaaattaaatttgaatacagt

SEQ ID NO: 478883 - DNA, 201 bp, Homo sapiens; identical to SEQ ID NO: 201496

SEQ ID NO: 478884 - DNA, 201 bp, Homo sapiens
ggactgggaaaaacatctttgaaatcaggaaatcaggccgggcgcagtggctcatgcctgtaagcccagcactttgggaggcggaggcgggtggatccatygaggtcaggagctcaagaccagcctggtcaacatggtgaaaccccgtctctactaaaaatacaaaaaaaaaattagctgggcgtgttggcgggagcctgt

SEQ ID NO: 478885 - DNA, 201 bp, Homo sapiens
ctccccctgggccactcccgggggtgagggggttaccccttcccagtgttttttattcctgtggggctcaccccaaagtattaaaagtagctttgtaattmcttgagcgcctggtttgactggggacttggggggatggggttggaagaatgactgccctttcccaccaaaaaagggagaactctttagattcagattgtg

SEQ ID NO: 478886 - DNA, 201 bp, Homo sapiens
ccccgcctcctccccgggcggaagctgtgtcagttgccggaagtcggcgtgaggtggggcttatgcggcggcgtggtgaaatagatatggcgaccgagggrgatgtggagctggagttggagactgagaccagtggaccagagcggcctccggagaagccacggaaacatgacagcggtgcggcggacttggagcgggtca

SEQ ID NO: 478887 - DNA, 201 bp, Homo sapiens
ctcccgggttcaagcaattctggtgcctcagcctcccgagtacctgggattacaggcacatgccactgtgccccgctaatttttgtatttttagtagagayggggtttcaccatgttgtccaggctggtcttgaactcctgacctcaggtgatccgcccgccttggcctcccatagtgctaggattacaagcgtgagccac

SEQ ID NO: 478888 - DNA, 201 bp, Homo sapiens
tcaagcaattctggtgcctcagcctcccgagtacctgggattacaggcacatgccactgtgccccgctaatttttgtatttttagtagagatggggtttcrccatgttgtccaggctggtcttgaactcctgacctcaggtgatccgcccgccttggcctcccatagtgctaggattacaagcgtgagccaccatgcccga

SEQ ID NO: 478889 - DNA, 201 bp, Homo sapiens
ggcaaacgagaagaaggaggaacccaagtagctttgtggcttcgtgtccaaccctcttgcccttcgcctgtgtgcctggagccagtcccaccacgctcgcktttcctcctgtagtgctcacaggtcccagcaccgatggcattccctttgccctgagtctgcagcgggtcccttttgtgcttccttcccctcaggtagcct

SEQ ID NO: 478890 - DNA, 201 bp, Homo sapiens
caagtacacgagaagcagggacttaaacctgttttctgtctttttacagtgctattacttcatcccggaatttcctttacccagcctatgtctactttccytcctctgtcccctccccacccagaaagtacacacaaacctattatgcagctgtgcccgcgggctggtgggggagtggaggtggaccagcaacacagcctg

SEQ ID NO: 478891 - DNA, 201 bp, Homo sapiens
gtgaagagtgcctatggggaaaggcaaaagagaaaccaaaaatataggaaagaggacagacgagacaactaaggaggaaccaatcccaaatgagagggggytgggacaggcctactgcaccttattccaaattctaactcaaagatacttaatagcatctgggcaatgttttacagtttataaaggattgtgttaccaaga

SEQ ID NO: 478892 - DNA, 201 bp, Homo sapiens
gttaaatccctggacctgcacaatccccgggaaccttaacgtcctctactacaaataaaattacctatacatttgtcaaaactcataaaaaaaaaatacatttttttttttttttttgagacgaagtcttgctctgtcgcccaggctggagtgcagtggcacgatctccgctcactgcaagccccgcctcctgggttcacg

SEQ ID NO: 478893 - DNA, 201 bp, Homo sapiens
ttagtagagacggggtttcaccgtgttagccaggatggtcttgatctcctgacctcatgatcagcccgcctcggcctcccaaagtgctgggattacaggcrtgagccaccacgcccggccaggcctgggttcttaaaccaatcaatattaaaagggattagtttactttgattgacttagccattcagtaccactcttgga

SEQ ID NO: 478894 - DNA, 201 bp, Homo sapiens
atgtaacatgatttttttctgcagatgactgagatggagatatctcgagcagcagcagaacgcagtttgcgggaacacatgggcaacgtggtagaggcgcktattgccctaaccaactgatgcgtgctttctcaaatatacctactggattaatttatggcaataaaatttttttttgtctttttcagttttatcatcttg

SEQ ID NO: 478895 - DNA, 201 bp, Homo sapiens
tgtttcctgaaacaagcggagtcagtatatttggtggcacattaatgcctgggaacctatgtaacatgatttttttctgcagatgactgagatggagatayctcgagcagcagcagaacgcagtttgcgggaacacatgggcaacgtggtagaggcgcttattgccctaaccaactgatgcgtgctttctcaaatatacct

SEQ ID NO: 478896 - DNA, 201 bp, Homo sapiens
cctgaggtgggtgggtgcgtgtttatgtgttgaggggactattcctagtttatgaggtggttaaggatatcggtggggtgggctggagcggtgtcgggttrggtctgagagaaggcctcgcacaaaacactgtacaaacccgaaaggaagtctgagagacgaaccgccttcctccctgaagcttctagaactggagcagaa

SEQ ID NO: 478897 - DNA, 201 bp, Homo sapiens
gtgtgggcagagcggcccccgcgtctcacctttaattttctttccttaggcggtaaccagcgtgagctcgcccgccagaagaatatgaaaaagcagagcgwctcggttaagggaaagcgccgagatgacgggctttctgctgccgcccgcaagcagaggtagccccagggaggggagggaaagggacggtggagacctggg

SEQ ID NO: 478898 - DNA, 201 bp, Homo sapiens
gtctctactaaaactacaaaaaaattaaccaggtgtggtggcgcacacctgtagtcccagctacttgggaggctgaggcaggagaatcgcttgagccccaraggtgaatgttgcagtgagctgagatcacgccactccactccagcttaggctggagtgagactccatctcaaaaagaaacctgagttttgctgaatacgg

SEQ ID NO: 478899 - DNA, 201 bp, Homo sapiens
ggtgtaagtgtagaggttaggtagatgtggtgggagtctgaaaatttttttctgattgcttccatttttctcagtgaagtaggaagcaactgagagagagratgagggaggagtgattggggttgaggtgtgaaaatagtgtgaaacagttgcctgtaagtgtgagagagtgaataagttaggaatgtgtcaaacactaag

SEQ ID NO: 478900 - DNA, 201 bp, Homo sapiens
cccagttcataggccaccttgagttagaattttggtacctacaacatgcttgattttgagtgattaaaaaaaaataatttggctgggtgctgtggctcacrcctctaatcccagcactttgggaggtcgaggcaggtagatcacgaggtcaggaattcaagaccagcctggccaacatgtgaaaccccgtctccactgaaa

SEQ ID NO: 478901 - DNA, 201 bp, Homo sapiens
ctggcagattccatctcaaaaaaaaaaaaaaaaaaaaaaaaaaaaaaaaaagaggctgggtgcggtagctcatgcctgtaatcccagcactttgggaggcygaggcaggtggattacctgagctcaggagttcgagaccacccagggcaacatggtgaaaccctgtctctactaaaactacaaaaaaattaaccaggtgtg

SEQ ID NO: 478902 - DNA, 201 bp, Homo sapiens
tacaccaattaataattatgcattttttttgtttgcttagttacctatgtacttattaccaattcattctcataccctcttctaggagtataactctcctsttagtataaccaaatacaatcagataatttatcaattttatcagtttccattttttcttagatatatggctccagagccctccatactcctgctccaatc

SEQ ID NO: 478903 - DNA, 201 bp, Homo sapiens
cagcctcctgagtagctgggattacaggcacgcaccaccacacctggcttttttttttttttttttgagacatagtctaactctgtcaccaggctgtagtrcagtggcacaatttcagctcactgcaatctccacctcccgggttcaagccactctcctgcctcagcctcccgagtagctgggattacaggcatacgccac

SEQ ID NO: 478904 - DNA, 201 bp, Homo sapiens
ttggagtataggctggaggggaagaatttttttattttttgagacagagtttcactcttgctgcccaggctggaatgcaatggtgcgatttccgctcaccrcaacctctgcctcccgggttcaagtgattctcctgcctcagactcccgagtatctgggattgcgggcatgcgccgccatgccaggctaattttgtatttt

SEQ ID NO: 478905 - DNA, 201 bp, Homo sapiens
tagccaacatgatggaatcccatctccagaaaaacaaaaatacaaaaattagccgggcatgatggcgggtgcctgtaatcgcagctacttgggaggctgargtgggagaatagcttgaacacaggaagcagaggttgcagtgagccgagatcacgccaatgcactccagcttgggtgtctcttattaactgtttatttatt

SEQ ID NO: 478906 - DNA, 201 bp, Homo sapiens
atacctggggcaacgaaccagaacgacattagaggagaaaagaggcctgtcgtttttattggcttctgcacgtcttcctccccagcttcggccactctccycttcgcaccctctcacctgacagaagggacttttcactaggacactgctgcctccgctgtgctgctgtgccaggcccagggaggtgccggggctggggcc

SEQ ID NO: 478907 - DNA, 201 bp, Homo sapiens
ttgaggtcaggagttcgagaccagcctggccaacatggtgaaaccctgtctctactaaaaaaaaatacagtccgagcacagtggcttgcacctgttatccmagcactgtgggaggccgaggcaggtggatcacctgaggtcaggagtttgagaccagcctgaccaacatggttaaagcctgtctctactaaaaaatacaaa

SEQ ID NO: 478908 - DNA, 201 bp, Homo sapiens; identical to SEQ ID NO: 371463

SEQ ID NO: 478909 - DNA, 201 bp, Homo sapiens
ctgacaacttagtagggctttcattataagcaggcttgagatatctgacctttctctcgacctaaacacctggggctggaaacatggcgggagagatttayagattatacctggggcaacgaaccagaacgacattagaggagaaaagaggcctgtcgtttttattggcttctgcacgtcttcctccccagcttcggccac

SEQ ID NO: 478910 - DNA, 201 bp, Homo sapiens
gccagagcggggttgctctggggagtaagtataattgctttagtctacaggctggtaatttcctccatttctacccccacttgtacttctgtctccccatsctttggtggggatagggaagcagagattcttttatcaaataattgagattagggaggtaatgaaacttgctatgcttttaaggcccccaaaacctggaat

SEQ ID NO: 478911 - DNA, 201 bp, Homo sapiens
tctccccctgggccactcccgggggtgagggggttaccccttcccagtgttttttattcctgtggggctcaccccaaagtattaaaagtagctttgtaatwccttgagcgcctggtttgactggggacttggggggatggggttggaagaatgactgccctttcccaccaaaaaagggagaactctttagattcagattgt

SEQ ID NO: 478912 - DNA, 201 bp, Homo sapiens
ttcagcccaaacggagataactccctgtgtgtccttgaggtattgagctgggctggacagctccccttgagccaactctaggagtacaatgtcaggggaaycccagtttgtgaaaaggacttagactggaggatatttgttatctggggatatgatgcggtggcggcggcgcctcaagataaggggctggggtttctgggt

SEQ ID NO: 478913 - DNA, 201 bp, Homo sapiens
gcaatggtgtggtctcagctcactgcaacctccgcctcttgggttcaagtgattctcctacctcagcctcctgagtagctgggattacaggcacctaccaycatgtccagctaacttttatatttttactagagatggggtttcaccatgttggccaggctggtctcaaactcctgacctcatgatccacccacctcggcc

SEQ ID NO: 478914 - DNA, 201 bp, Homo sapiens
agacctgcctttcccataggccatgtctgtgattggagacagaaggtcccgggagcagaaagccaaacaggagcggtaagtcttcaggggcagccaacttyaacagttcttccctccccggtccccagacaaaaataaaaaccattattaagcctttataccgttcttcaaatttatcaccaattcctgcagatctaggcg

SEQ ID NO: 478915 - DNA, 201 bp, Homo sapiens
agaagctggttaggagggagaaagaaaaacagactcaggagaaaaggcaaaggacagtgaagagtgcctatggggaaaggcaaaagagaaaccaaaaatayaggaaagaggacagacgagacaactaaggaggaaccaatcccaaatgagagggggctgggacaggcctactgcaccttattccaaattctaactcaaaga

SEQ ID NO: 478916 - DNA, 201 bp, Homo sapiens
ctcggtacacagccccagagccactgagcactggacagtcagagaggccaaacaggtgggcacacaaccccgagggcatctggatctgggagtgtgtgtgwgagaaatggcaggacaagtcataatgcatggaaaggtacctacttgtcacgggtatgaccactcatttgtctcctgcccccaaccgaaaccttttctatc

SEQ ID NO: 478917 - DNA, 201 bp, Homo sapiens
gacgagacaactaaggaggaaccaatcccaaatgagagggggctgggacaggcctactgcaccttattccaaattctaactcaaagatacttaatagcatytgggcaatgttttacagtttataaaggattgtgttaccaagataaccccactgttacctccattttagatgctagaagcacaaagtctggctcaaggtta

SEQ ID NO: 478918 - DNA, 201 bp, Homo sapiens
ttgcccttttctttccgttcaccctaaacaccaccggcgaggcgccggctttgaccttccgtagcttccctagcaaggcgtttctctgggcgcgctctgtrgccaccctcacactcggtgcccggaaatcgagccctttgcccacggctacttcacgggaccaccctcccgggttaggcataggccctcccggatcttccg

SEQ ID NO: 478919 - DNA, 201 bp, Homo sapiens
aaaaaggcaaacgagaagaaggaggaacccaagtagctttgtggcttcgtgtccaaccctcttgcccttcgcctgtgtgcctggagccagtcccaccacgytcgcgtttcctcctgtagtgctcacaggtcccagcaccgatggcattccctttgccctgagtctgcagcgggtcccttttgtgcttccttcccctcaggt

SEQ ID NO: 478920 - DNA, 201 bp, Homo sapiens
cagtcagagaggccaaacaggtgggcacacaaccccgagggcatctggatctgggagtgtgtgtgtgagaaatggcaggacaagtcataatgcatggaaargtacctacttgtcacgggtatgaccactcatttgtctcctgcccccaaccgaaaccttttctatcttagggtttttccttttatctcttcccacctgaca

SEQ ID NO: 478921 - DNA, 201 bp, Homo sapiens
ctctccccctgggccactcccgggggtgagggggttaccccttcccagtgttttttattcctgtggggctcaccccaaagtattaaaagtagctttgtaawtccttgagcgcctggtttgactggggacttggggggatggggttggaagaatgactgccctttcccaccaaaaaagggagaactctttagattcagattg

SEQ ID NO: 478922 - DNA, 201 bp, Homo sapiens
attacaggtgcgtgccaccatgcccggctaatattttgtatttttagtagagatggggtttcaccatgttagccaggattgtcttgatctcttgacctcgygatccgcccgcctcagcctcccaaagtgctgggattacaggcgtgagccactgcacccggccattactcctcttcttacccacttgttatcttagaaaac

SEQ ID NO: 478923 - DNA, 201 bp, Homo sapiens
ttttgaaacaaggtcttgctgtgtggctcaggctggagtgcagtgatgggatcatagctcactgcagccccaaactgctgggcttaagtgatggttggccwcaggctcccaagtagctgggactacaggcacatgcaaccgtgcctgactaatttttttcttttgtagagatggggtttcactatgttgaccaggcaggtc

SEQ ID NO: 478924 - DNA, 201 bp, Homo sapiens
gtcttatgctgagggtagccttggatatatgtatttgttgctgttgtctttagctaataacttgaatctgaggtatatttctgctttgtttctttaaaatkctgtagtaaattgttaatggtttttactgggttaagatatccattttttggaaaaggtccctatgtatttcttttgaatatagtaacaaattagtttcat

SEQ ID NO: 478925 - DNA, 201 bp, Homo sapiens
acatagatgtttagatttaacttttaatacattgtggttaaaaaaaaaaaaaaaggaaattttggtgcaatagagaaaagtattttggatttatttattgytccttttaaatgttaaaatgaggcaggaatacagtacttgcagcctattgtctaagagtactctttgacatttataatatcaggtataagcatttccaaa

SEQ ID NO: 478926 - DNA, 201 bp, Homo sapiens
ttttttcactgagtcattctgtgaggtggccaccataacccatagttccttgaatgacccataatgatagtctgtgtgactacctctctctcccttgctcyagctcaaggattgtctctgtagtcagttttcattgctaactaaaggtaaaactccttctctgtcactgctgtctcccctcagctggaatttgtaaaccat

SEQ ID NO: 478927 - DNA, 201 bp, Homo sapiens
tgtggtggttttttttttttttttttttttttttttggtttttgagaagatatcaaacaaaaaagtaaaaaattttaaaaacacctaattgcattaatctytgcaccctccctccaaaccaaaaccaaacctgttttttttctttttctttcagtgatggactgtcattcactcagatttaagctccaaagactgagatgt

SEQ ID NO: 478928 - DNA, 201 bp, Homo sapiens
ttgagaagatatcaaacaaaaaagtaaaaaattttaaaaacacctaattgcattaatctctgcaccctccctccaaaccaaaaccaaacctgttttttttytttttctttcagtgatggactgtcattcactcagatttaagctccaaagactgagatgtttgtctgtttgttcatagctgtattctcagtgcctagactg

SEQ ID NO: 478929 - DNA, 201 bp, Homo sapiens
aaacaaaaaagtaaaaaattttaaaaacacctaattgcattaatctctgcaccctccctccaaaccaaaaccaaacctgttttttttctttttctttcagkgatggactgtcattcactcagatttaagctccaaagactgagatgtttgtctgtttgttcatagctgtattctcagtgcctagactggtgcctggcatgt

SEQ ID NO: 478930 - DNA, 201 bp, Homo sapiens
tgcctttgaagaggctgttccttctgcctggaatatgctttcttcttttcttgggaaactactacttattctttaggtccactccagcattgagtcatccytattccctctggcagttattccctgggcaggatacttgcagtcctttgttcacttctgttatgattatttgtttgccaattaatctaatctaaaatgaaa

SEQ ID NO: 478931 - DNA, 201 bp, Homo sapiens
aggcctggcctgttttgttttgttttgttttgttttgaagacagtatctcattctattgcccaggctagagtgcagtggtagtaccttggctcactgcagyctcaaccttctggttgcaatcctcccatcctctcaagcagttctttcatctcagcctcctgagcagctaggactacaggtacacaccaccatgcctggct

SEQ ID NO: 478932 - DNA, 201 bp, Homo sapiens
aggagacaaataaattgttattgcatttactgagcatgaactgaagtggacagtatgctaagtggtctacgggtctcatctcttctattcctaacagccakgtaagatagttaaatccccatcttacagatgatgacacactcatgtggaaagtttaaatcacttgaggaaggtaatagagctaatgagggtagaactaag

SEQ ID NO: 478933 - DNA, 201 bp, Homo sapiens
tcaaatctgagaaagaccttgcaggatgagacttgggtaggaaagaaagaagatgggaaagagacctgagctcacaatatcatgtgtaacaaaatcacttyttcctatttgcctcagaattactctttttcctaatttgtaatgtatatcattccacttaacatacatgtactgcatttaatacctatagctctcctgtgg

SEQ ID NO: 478934 - DNA, 201 bp, Homo sapiens
agatagtgccactgcgctccagcctgggcaacagagtgagactccatctcaggaaaaaaaaaattattaaaaaaaaaaatgtttaccaatctcatgcctcrtatagccaccgtgcctggccaagggtctgaatgtttaattttatttaatttaaatttaaatagccatatgttaactagtggcttatggtattgacagcac

SEQ ID NO: 478935 - DNA, 201 bp, Homo sapiens
ttgataatgtttgtctggctcttccttatttaattgcgagttttaagcttcttgctttaaaaatatagcattagctgattttaaaattacctctgggctgrgtacgctggctcactcctataaacccagcactttgggaggccaaagcacgtggatcacctgaggtcaggagttcaagaccagcctggtcaacatggtgaa

SEQ ID NO: 478936 - DNA, 201 bp, Homo sapiens
accaaagtatggcagttccctagacatgccatgggggttcatactttctgttgtttcatataattgtacctttgtgtatatatacttttttctctgcttaraacacctttccctgcctttttgtttgttttttgcttttttttttttttttaaacggagcctccctctgttgcccaggctgaagtgcagtggcgtgatctc

SEQ ID NO: 478937 - DNA, 201 bp, Homo sapiens
ggaagggctcttccttccttctcaaataaaaataaccaggaaaaagcagtcgttttcatatgttctacctgggacattcattatagtctgggtacagcatwgtatgtatcttgaaaactactgtactacctttgacagtgaggtgttttacccatagttcaaaattgctgttactgcctagagatgacactgctgtgaata

SEQ ID NO: 478938 - DNA, 201 bp, Homo sapiens
ccagtctgttttttgttgttgctttttttttttttttttttctaatttcatctaccattccttctttatttcagccataccaaagtatggcagttccctaracatgccatgggggttcatactttctgttgtttcatataattgtacctttgtgtatatatacttttttctctgcttagaacacctttccctgcctttttg

SEQ ID NO: 478939 - DNA, 201 bp, Homo sapiens
aaacctagtatatgtagggttcgataatatctgccatttcagacatctactgggggtttttgaatgtatgtcttgtgcttaaaaggaggctactacttttwtgtgaggaaataaaaaagacagtttttagatgttttgaggtggtcaggttttaccctaaaatgtttgttgtccattgggatgtgacaatttgactgtgca

SEQ ID NO: 478940 - DNA, 201 bp, Homo sapiens
tctagaagtttctaaccagaagctccccctcacatgtctttagctgctgcttttgatcttgcaaggtaggaacactgcactttgcttttcccgtgtttgartgtcagcttctgctgctttcagaatgctgcatatatttaccacttcccccattagtttaggatacaaagaaaaccataaagtgtgctctttgctctttca

SEQ ID NO: 478941 - DNA, 201 bp, Homo sapiens
ccacgctggtctcaaactcctgggctcaggtggtcctcccacctcagcctcccatagtgctggaattacaggcatgaaccaccatgcctggtctgtagtctttttttttttttttgagatggagtttcgcccttgttgcccaggctggaatgcaatggcaaatggcaaactctgcctccagggttcaagcaattctcctgc

SEQ ID NO: 478942 - DNA, 201 bp, Homo sapiens
gcctggggcagcgctcaatcctttgggaactaaaccggagccagaggaaggggagaatgagtgtcgcctgctaaagaaagtcaagtctgaaaaggtaagargtggccagatatggctgcccactgactgccagtcagaactgccctggactaactgccaaatactatgtgtactctgtgggaggctcattagtgtgtgggt

SEQ ID NO: 478943 - DNA, 201 bp, Homo sapiens
caggcgtgagctgccgtgcccggcactgccctgacttttcttctgagttcccatcctttgcatccagttgcctatttaaaactcatacctaaagttgaacktgctttctcgcttttattccaccaataatttgccattgttgctgttgctactgttgtgttcttgcatctcctgagataatggcgtcagaaatcttgaagt

SEQ ID NO: 478944 - DNA, 201 bp, Homo sapiens
aggtatttgatccattttgagttaatttttctatatggtgtgaagtagggatccagctttattcttttacatgtacatatgcggttttcctagcaccaatygttgaaaagactattcttaccccacattgaattttcttgacacccttgttgaaaattaattgaccataaatgtatgggtttttatctagactctcagttt

SEQ ID NO: 478945 - DNA, 201 bp, Homo sapiens
aatcctgaagagaaagggaaactaaaagctgtatttaactgctatgctgatagttgtcttaggcagttttgaattaatattttattatctctgttcttcascttgttgtgccttgttttttctcttctctgtgacttctcacctacccacttgactctgaccagattcctgacacttaaagggtatatccaagaaatgaga

SEQ ID NO: 478946 - DNA, 201 bp, Homo sapiens
ctttcaccaaccctgccccaagtaccttaattgcccttacacctctactgactgaaaatacggcacaaatcctgaagagaaagggaaactaaaagctgtayttaactgctatgctgatagttgtcttaggcagttttgaattaatattttattatctctgttcttcagcttgttgtgccttgttttttctcttctctgtga

SEQ ID NO: 478947 - DNA, 201 bp, Homo sapiens
tatacttacctcttttgcattctttatgacattactttaattacttgttcacatttgtttacctcacccaaccttgggacagggatcatattatatttctmacttagtatagtataatggttacaccatagtaagtatttaatgtcgctgaaaggaatccagaaaaagaatgcttactaggaaccaaattaagttctaaag

SEQ ID NO: 478948 - DNA, 201 bp, Homo sapiens
aattctgggcctttgttgtttgttttaattacttgggcatcccaggaagctttccagtgatctcctaccatgggcccccctcctgggatcaagcccctccyaggccctgtccccagcccctcctgccccagcccacccgcttgccttggtgctcagccctcccattgggagcaggttggggcgagctggaggcccgggctg

SEQ ID NO: 478949 - DNA, 201 bp, Homo sapiens
taaacatcagtcaatttatcccacataaataaaagttctttggggttcttaacttttttaaaatctttttgttttaatataattgtatttgtaatacagtmctctcatgtaccatgtacccttttcctaggtttccccaatgataatatcttgcagaactctagcacaatattgcaactgggatggtaatattgatgcatt

SEQ ID NO: 478950 - DNA, 201 bp, Homo sapiens
tgatttgtgatgtctcaatttagaattctcatgttttctcacaggactgacagtatgaataatgattcattagttcttgagtacagtttggtccagccacrttataggttaaatagatttctgtgggccggcctaggaatcgctgtttaagacttctgacatcgtgattattaagatttcagaaaaaggctttagctttct

SEQ ID NO: 478951 - DNA, 201 bp, Homo sapiens
atatcttaatttttccttgttttttaatggatagttttgctggatatagaattaaatactcagcagttgacaactctgttttctagtcttcaatgtcttcytttttttttttttttttttttttgagacagtctcgctctgttgcccagacaattttatttttaaatttttttagagacgggggtctcaccatattgccca

SEQ ID NO: 478952 - DNA, 201 bp, Homo sapiens
gtggagtaaagatgacacacttaagtcttgactttttaggaaatgcatatgtgaaaggaggtaaaagaagtgtattcaggaaaggaagtagttacagaagwtctttattcttaggaagcaaatcctaatgcttaccttgtaaccatacaggaataggagggattatcagccttctatggtaaacatacagtcagcttcaga

SEQ ID NO: 478953 - DNA, 201 bp, Homo sapiens
agtgataaatgaagctatctttgtttcagtgaataatagaatatgaaatcctgtaaagccacataggttattagatgaatatcacagagcttattatgcaytatggcttaatgttagattatagatgtgaccaaatggtaattaacagagctggagctgtaattaaatactattatgctgctctgtgatctctccttagat

SEQ ID NO: 478954 - DNA, 201 bp, Homo sapiens
tattgtatagcagggtataatttggcagactgcttgaatgcaacagtgatgtttccaacctacattttaggtgttgttttctggatttcttggtgcaaaaytggggacttcattttatctagaatgtattagcatatgtttctcctagcctgccaggagcactgaataacctagcaggaaattaaactacttccagaaaag

SEQ ID NO: 478955 - DNA, 201 bp, Homo sapiens
gctacacgtgatcttcctccataggcctcccaaaacattaggactacaggcatgagccattgcacctgacccatcacaacttttatgttgtctctagatgkgttgcattcttcttggaacctaactaattacattcttgtgagaggttctagtttctggttttggaagcaaattgcttctttcttttttttttttttgaga

SEQ ID NO: 478956 - DNA, 201 bp, Homo sapiens
actttttcttccctccacagatggagtcccctgtttccacaccagcagtgctgccaatacaccttttggtgccagtggtcaacaatgacatctcatctccytgtgagcagatcatggttcgtacccgatcagttggggtcaacacatgtgatgtggctctggccacagagcctgagtgcttgggcccctgtgaacctggaa

SEQ ID NO: 478957 - DNA, 201 bp, Homo sapiens
tatgatatatgtgtgtgtgttctggaatatttcatccagccaaattttcattataataattgaggaatagttctttctttacttggcaattgcaggtaagaaaaaaaaccctgttctagtgcttcttccttggacacatcactaataggcagaccttcaaatgtattgtggatattactaagtattttgtagagaagatat

SEQ ID NO: 478958 - DNA, 201 bp, Homo sapiens
cccaacactttgggaggccagggcgggcagatcacgaggtcaggagatcgagaccatcctggctaacacagtgaaaccccgtctctactaaaaatacaaamaattagccgggcctcgtggtgggcgcctgtagtcccagctactcaggaggctgaggcaggagaatggcgtgaacccgggaggcagagcttgcagtgagcc

SEQ ID NO: 478959 - DNA, 201 bp, Homo sapiens
ctgaggcaggagaatcgcttaaaccaggaggcagaggttgcagtgagccgaggtcgcaccactgcactccagcctgggtgacagagtaagactctgtctcaaaaaaaaaaaaaaaaagttttttcttattttaaattgagttgtttgttttcttattattgtgttttgagagttcttgatacgttgtgcatgtaagtcctt

SEQ ID NO: 478960 - DNA, 201 bp, Homo sapiens
agtttgaaattatgggatttggtatgtcacatattattcagaatgctaaaatatctgccactgagcaaacctgaaatgtaattcttttttcttattcttctttttttttttttgacaacttctgataccaaaaaaatgtgtaattctttacataccttctaatagtagatggtcagattttttgtacgtgcagtgatttca

SEQ ID NO: 478961 - DNA, 201 bp, Homo sapiens
taagagcatgtcaaatttaaccacctcccttcatccactagattacagtgaatgatagtaatgtcactgatacattgttatacacattgctcactaactgyttttttttttttttctttttagaaacggagtctcgctctgttgcccaggctggagtgcagtggtgcgatctccgctcactgcaagctccacctcccaggt

SEQ ID NO: 478962 - DNA, 201 bp, Homo sapiens
atctcctgacaatccctgctcttatattttaggtatatgaaaagatggcaaaatgagtccttttctgatttttttttctccttttttgagacagggtcttrctctgttgcacaggctagagtacagtggcacgatcacagctcactgcagccttcacccccgggacaaaactttcctcctgaaatgggaaaagttcccttg

SEQ ID NO: 478963 - DNA, 201 bp, Homo sapiens
tccctctggcagttattccctgggcaggatacttgcagtcctttgttcacttctgttatgattatttgtttgccaattaatctaatctaaaatgaaacttygtggccaggcacggtggctcatgcctgtggtcccaacagtttgggaggccaaggtgggcagataagtccaggagttcaagacgagcctggccaacacagc

SEQ ID NO: 478964 - DNA, 201 bp, Homo sapiens
tagtagttggcactacaggcacatgccaacaagcccagataatttaaagaattttttagagacagggtctcactacattgcccaggctagtttcgaattcstatgctcaagcaatcctcccaccttggcctcccaaaatgctgagattacaggcatgagccaccatgcttggccatgaagcatttttaaaacattgagata

SEQ ID NO: 478965 - DNA, 201 bp, Homo sapiens
gagaaattgagcagtcacccctccccgaagttgtactctgttttctccttagggtatctaaaagcagcccaaaagactgctgtcaaataattttctacccscattgaactcataatcaaatgaaacttttaaccctgaactaatttggtgaacaacctgcattctccttatttgactctgattatccctaccttttgaaaa

SEQ ID NO: 478966 - DNA, 201 bp, Homo sapiens
catcaaaactaataacttttgtttatcaaaggatactaccaagagaataaagatagaatgagagaaaatatttgcaaatcgtgtatctgataagtgattartatctagaataaagaactcctacagatcaacaatgaaaaacccaaacaacctaattcaaaaatgcgcgtaagacttgaatagacattttgccaaagaaga

SEQ ID NO: 478967 - DNA, 201 bp, Homo sapiens
ccaagataatatattcttctatgttttttctgagaaccttgttttatatatatatatatatatatataaaatatatataaaaatacatatatatatatatrtatttacatccacaatctatctggaatttatttttgtttaggatgtaagttggaagtcaagattcttatttttttatatggatatctaattggcccagca

SEQ ID NO: 478968 - DNA, 201 bp, Homo sapiens
gtcccacttctggtttttataatacagttttattgaaacacaactatgcctatttgtttacatattgtctggggctctttttctactataagagttgagamgttatgacggagactgtgtggcctgcaaagctttaaatatttactatctgtcccttactttaaaagcctgccaatccccagtctgtgtgatctggtccac

SEQ ID NO: 478969 - DNA, 201 bp, Homo sapiens
ttttttttttttgacaacttctgataccaaaaaaatgtgtaattctttacataccttctaatagtagatggtcagattttttgtacgtgcagtgatttcaragaacattgaaaaataatcaggaactggttcagtttgcacaaatttactcttctactccttcttctgcacccactaaaaattgtgaaactgtgcaggtgt

SEQ ID NO: 478970 - DNA, 201 bp, Homo sapiens
aaaaaaaaaaaaaaagaaagagagaaattatctatctcatgttcttctttgtgaaggtagatatctcaggctatggcctgggaaattttctgtcagacaargatgtggatttcccttcatgggatcccacttttgctcgaccataccttcctctgacagagtgagctctgtgctgtttcccagagttctaggagagaccag

SEQ ID NO: 478971 - DNA, 201 bp, Homo sapiens
caaagtgctgggattacaagtgtgagccaccgtgcctagccatgtttgactatttctatctatgtgtacataatcaacaacatcttcagactgctgttgaytggcttctgggtggcaacagcacctcctgtttcttatagataaatttgatgttagaattatattccaagatgccattctcattaaacaaccactgttaca

SEQ ID NO: 478972 - DNA, 201 bp, Homo sapiens
tactgcaacctctgcctcctgggttcaagcaattctcctgcctcagcctctcgagtagctgggactacaggcaggtgccaccatgcctggctaatttttgdattattattattattattattattattattattactatttttagtagagacggagtttcaccatgttggccaggctggtcttgaacacctaacctcaggt

SEQ ID NO: 478973 - DNA, 201 bp, Homo sapiens
gtattatatgaatagattaaatgggttaataaatgtagaatacatagaataatgcctggtgcatggtaaaaagttatataaacagctgctatttttattgkacttttatatttttatataatatatttttattttttaatttttattgttatccttttgggtggtgattgtaattattcttcacagcaaccgtataagtta

SEQ ID NO: 478974 - DNA, 201 bp, Homo sapiens
taagtgggctgtccatagtatcttcatgattggtagcttaataaataaattatttgtgaaatcactggataacatttggctagctgttttaatgttgcccmttccctcagcctcttgagcttctagaatcagcagacttgtttttccatggtgtgtctagtaatatgaaatgaaatatggacctcaaatatataaatatat

SEQ ID NO: 478975 - DNA, 201 bp, Homo sapiens
gggggattagcttagattatccaatggttccaatgtaatcacaagggttcttgtaagggaagaagagggcaagagagtcagagtcagagagagatttaaaratggtatactacttagtttgaagatggagggaggggatgagccaaggaatttagacagcctcctaaagcctagaaaaagcaagaaaaatggattatctcc

SEQ ID NO: 478976 - DNA, 201 bp, Homo sapiens
gtgccctgtcatttcacttaaagattccctttagtatttcttgtagggcaggtctactagcaatgaactctctcagttcttttcttttcttttcttttctttttttttttttgagacagagtctcgttctgtcgcctaggctggagtgtagtggtgcagtctgcaacctctgcctcctgggttgaagtgattctcctgcct

SEQ ID NO: 478977 - DNA, 201 bp, Homo sapiens
aactgttctgcctgttctcacattaagttcacaatcattagccttaagcaatcctacatttccctatccattcactctttctttctttctttcttttttcttttttttttttttttgagacagagtcttttttttttttttttttttttgagacagagtctcgctttgtcacccaggctggagtgcagtggcgtaatctcg

SEQ ID NO: 478978 - DNA, 201 bp, Homo sapiens
cagacaaaaactacatatgcactatgttttgttttgttttttttgtttgtttgttttaaattaaaaccagaaaaggcgaagacttggagaatgctcaaaatttttttttttttttgacacggggtctcactctgtcacccaggctggagtgcagtggtgtgatctcagctcactgcaacctccacctcctgagctcaggtg

SEQ ID NO: 478979 - DNA, 201 bp, Homo sapiens
gcgcggtggctcacgcctgtaatcccagcactttgggaggccaaggcgggtggatcatgaggtcaggagatcgagaccatcctggctaacaaggtgaaacstcgtctctactaaaaatacaaaaaattagccgggcgcagtggcgggtgcctgtagtcccagctactcgggaggctgaggcaggagaatggcgtgaacccg

SEQ ID NO: 478980 - DNA, 201 bp, Homo sapiens
tatgctatgatggacctatagattgtttctggttttgtggttattttttggtttggctattaaaaacaacattgaagaaaactgtccatcatacatctttktgtgtgtatatatatatatatatatatatatatatatatatatatatatcctgttatcttcttgatacaaatcctagaaattgaattttgggacaaaaga

SEQ ID NO: 478981 - DNA, 201 bp, Homo sapiens
tgaaaaaggtggagttggggaagtacaaggggtgtgtgtgtgagacaagcagacaaggatgttttggcagctcttcagggaccagaattaatcagaatcaktgtatgaacattctgtggactcacaatgatgatctacaaatagtgatgactttctaagccaagaagtcagagccaactgtggagaatggatccggaaccc

SEQ ID NO: 478982 - DNA, 201 bp, Homo sapiens
tgatggacctatagattgtttctggttttgtggttattttttggtttggctattaaaaacaacattgaagaaaactgtccatcatacatctttgtgtgtgwatatatatatatatatatatatatatatatatatatatatatcctgttatcttcttgatacaaatcctagaaattgaattttgggacaaaagaacatgtg

SEQ ID NO: 478983 - DNA, 201 bp, Homo sapiens
cactttgggaggctgaggccggcggatcacgaggtcaggagatcgagaccatcctggctaacacggtgaaaccccgtctctactaaaaatacaaaacattrgccgggcgtggtgtcgggcgcctgtagtccccgctactcgggaggctgaggcaggagaatggcgtgaacccgggaggcggagctcgcagtgagccgagat

SEQ ID NO: 478984 - DNA, 201 bp, Homo sapiens
actgagaattagcttaacttttgttggtgtagttattaaggcatctaatgaccttaactttttaatattcctataccttattttccctcttggccccaatytcctgacaatccctgctcttatattttaggtatatgaaaagatggcaaaatgagtccttttctgatttttttttctccttttttgagacagggtcttgct

SEQ ID NO: 478985 - DNA, 201 bp, Homo sapiens
agtagctgggattacaggcgccctgccaccatgcccggctaatttttgtattgttagtagagacggggtttcactgtattggccaggctggtcttgaactsctgaccttgagtgatccacccacctcagcctcccaaagtgctaggattacaggcgtaagccaccacgctcagcctctctgcctttttaaatcaaaaacta

SEQ ID NO: 478986 - DNA, 201 bp, Homo sapiens
ggtcccctggcttctggtctagcatctctccagtccattctctacattgctgccaggtgatctttctaaacattctggattaaattcatataacattgtarattaaattccagttccagtgagaacacatggacacagggaggggaacatcacacactggggcctgtcagcgggtggggggcaaggggagggagagcatta

SEQ ID NO: 478987 - DNA, 201 bp, Homo sapiens
tgatcctcttgccacacacctcccaaagtggtgggattacaggtgtgaaccagcttacctggccaagagttttattactagctggattatgatgttagccygttgtgtatcttctatatcttatgttaggattcttttctcccatcttcccgcatcttcatcttttcttccccacagcatattcttggagagaaaggagta

SEQ ID NO: 478988 - DNA, 201 bp, Homo sapiens
cctttgtaagataattactccaatgtgtaaatcactttaaggaggtttggggcaaagtcttaaatgggtttgaggatgccatttaagtaatggaaatcagycctgctctcatagtaagtgtcatttggaatgacagtgactgctattgacagaaaactgaccccaccatcatagctcttatttttctcagactttggataa

SEQ ID NO: 478989 - DNA, 201 bp, Homo sapiens
aggatttatgcctatttttatttggtttcattttattgaggttttaaaaaagaaaggaggggaatgtataagtagagcaactaaccctcagttgtacaggktgtgccttttaagagggttccctgctgatcagaactaggatctctgactcggcactttgggaggccgaggcaggtggattgtttgagtctaggagtttga

SEQ ID NO: 478990 - DNA, 201 bp, Homo sapiens
aatgaaatgcagccctgctgacatcttaattttagttcagagagaaccattttagacttttgaactccagaactgtatgataataaatttgcgttgttttragccactgagtttatggtaatagtttcttattgctgctgtcatttaatacagctatgggggagttagctttactaacattctttctttgtgtggattcaa

SEQ ID NO: 478991 - DNA, 201 bp, Homo sapiens
gcctccacaatgaaatgcagccctgctgacatcttaattttagttcagagagaaccattttagacttttgaactccagaactgtatgataataaatttgcrttgttttgagccactgagtttatggtaatagtttcttattgctgctgtcatttaatacagctatgggggagttagctttactaacattctttctttgtgt

SEQ ID NO: 478992 - DNA, 201 bp, Homo sapiens
gagcatggtggcgggcacctgtagtcccagctactcaggaggctgaggcaggagaatggcatgaaccctggagtcggaggttgcagtgagcagagaatgcrccactgcactccagcctgggcgacagtgcgaggctgtgtctcaaaaaaaaaaaaaaaaagaaaaaaaaaaacagaaaaattagccaggtgtggtggcagc

SEQ ID NO: 478993 - DNA, 201 bp, Homo sapiens
ttactaaataaaagtttaagatttatttatttatttttttatttttttgagacagtcttgcactgtcgcccagcctggagtgcaatggcatgatctcagcycactgcgcccagccaaggttttttttttatatcaaaaaaggttgtgaacattactgaatgatcttgcttcactgcagtcctaagtcttgtcattagtcta

SEQ ID NO: 478994 - DNA, 201 bp, Homo sapiens
gtggcaggatctcggctcactgcaaccccctcctcctggattcaagcaattctcctgcctcagcttcctgagtagctgggattacaggcatgcgccaacaygcccggctaatttttgtatttttagaagagatgggttcaccatgttggtcaggctagtctcgaactcctgacctcaggcaatccgcccgccttggcctcc

SEQ ID NO: 478995 - DNA, 201 bp, Homo sapiens
tttttatcagaattttgttctagaaaaaaaaaaagtcaacacacgtcactgctataaattatatcccagaatgggggctaaaataaacttgcaatatcttwaaaaaatctaacttccatgccctattctagaaagctactggatgtttctacgaaaaggaagatgtgatagaggaaagatgaaattcaataaacaagaaag

SEQ ID NO: 478996 - DNA, 201 bp, Homo sapiens
tggaaggcagaggttgtagtgagctgagatcacgccattgcactccagcctgggcaacaagagtgaaactccatctcaaaaaacaaacaaacaaacaaaargtattaaaagataaaggacataaagtgttgggaaactccagagatctcctctttaaattctctataagtctcttttcaagcttttgttttgttgtttacc

SEQ ID NO: 478997 - DNA, 201 bp, Homo sapiens
cagctactcagcggcccaggctcttctccaaatgccccagccaaactctgcttcgttccacggcctgctggcatttgtcatgtgctcttccgccacgtgtkctcttctgccggcatgctcctctcaacgccctctcgaggtccagccgctgtgtcttcttctgccaatgtgttcctctagaagtccagccgcttgtgtgtc

SEQ ID NO: 478998 - DNA, 201 bp, Homo sapiens
cgtgaacccaggaggcgggccttgaagtgagccaagattgcaccactgcactccagcctgggtgacagagccagactccatctcaaaaaaaaaaaaaaaawatatatatatatatatatatatagagagagagagagagagagaggatattaaaatattgcttgaacttaggaatggtgtcgaagtactttccaaaattct

SEQ ID NO: 478999 - DNA, 201 bp, Homo sapiens
tgaacccaggaggcgggccttgaagtgagccaagattgcaccactgcactccagcctgggtgacagagccagactccatctcaaaaaaaaaaaaaaaaaawatatatatatatatatatatagagagagagagagagagagaggatattaaaatattgcttgaacttaggaatggtgtcgaagtactttccaaaattctaa

SEQ ID NO: 479000 - DNA, 201 bp, Homo sapiens
aagtgagccaagattgcaccactgcactccagcctgggtgacagagccagactccatctcaaaaaaaaaaaaaaaaaatatatatatatatatatatatakagagagagagagagagagaggatattaaaatattgcttgaacttaggaatggtgtcgaagtactttccaaaattctaaatcttctctgcaactcagaata

SEQ ID NO: 479001 - DNA, 201 bp, Homo sapiens
gactataactgattctagagaaaagagattgttgtttaagtagaattccgccgggtgccgtggctcatgcctgtaatcccaacactttgggaggccagggygggcagatcacgaggtcaggagatcgagaccatcctggctaacacagtgaaaccccgtctctactaaaaatacaaaaaattagccgggcctcgtggtggg

SEQ ID NO: 479002 - DNA, 201 bp, Homo sapiens
gattacaggcatgagctgctgtgcccagctgtgtatcttctttgtagaaatatctattcaagtgttttgcccaggtttgaattggggtttgttgttgttattgttgttgttgttgttgttgttgttaaattgtgggagttctttatatattttggatattaatctcttattagatgtatgatttgcaggccaggtatggtg

SEQ ID NO: 479003 - DNA, 201 bp, Homo sapiens
cctcctatctttccatgaccctctggattgagagagagagataaagactgacagacaccagtgtaggctggaaaagggagtgtgtgaccagagtgccaaaagtgactaggagcaggaacttggctccgactcagtttggaaaatgggaaataggggacagtaagcacaatgcccagtagtagttgatttccaaggaccctg

SEQ ID NO: 479004 - DNA, 201 bp, Homo sapiens
attacaggcatgagctgctgtgcccagctgtgtatcttctttgtagaaatatctattcaagtgttttgcccaggtttgaattggggtttgttgttgttattgttgttgttgttgttgttgttgttaaattgtgggagttctttatatattttggatattaatctcttattagatgtatgatttgcaggccaggtatggtgg

SEQ ID NO: 479005 - DNA, 201 bp, Homo sapiens
acacccccgaaaaccttattgttccttgtcactttgtcatgtacctcatgcccagcagcaattggtgagatggctttttcatatggttttatatttgggawcctctagagcagtggttctcaacttgggctggacattagaataacttgaggagctcttgaaaatcccaatccccctacatcccagaccacatatatcaga

SEQ ID NO: 479006 - DNA, 201 bp, Homo sapiens
ctggctgttacccaaagactagtaaggccagatccagggtctgggagaaggtgggcaagttcaggtcctgaccacagtgcagcttggctgacttgacactrgcagcccccagggcatcttctttattcttaggtatcttgcacttttaggggtcataaggtggcaccctgggcatctcacttgtgtgtgtgtgtgtgtgtg

SEQ ID NO: 479007 - DNA, 201 bp, Homo sapiens
tcaataaaaaacaaaaagaaaaataataaaaagaatcagaggtctttaaaatataacagatgatggatccagtgttacatacctaagtatacctttaccasagcttctgccttgatatgtgagtctgagggttcaactgtaaattgcagaaaacttataaaatggtttggtgcccaaggactgttgctaagtcttgcatgt

SEQ ID NO: 479008 - DNA, 201 bp, Homo sapiens
tgtgcctcagtctcccaaagtgctgggattacaggcctgagccactacgcccagcctacctgcctaatttttgtatttttagtagtgacagggtttcgccrtgttggccaggctggtctcaaactcctgaccccagatgatcagcccgccctggcctcccaaagtgctgggattacgggcctgagccactgcgcccagcct

SEQ ID NO: 479009 - DNA, 201 bp, Homo sapiens
tgtacttccaggcttctctttcctgtagtgctggcaactgagcaaagtaaaaaaaaaagttattttgtggtggtttttttttttttttttttttttttttkggtttttgagaagatatcaaacaaaaaagtaaaaaattttaaaaacacctaattgcattaatctctgcaccctccctccaaaccaaaaccaaacctgttt

SEQ ID NO: 479010 - DNA, 201 bp, Homo sapiens
gagcagagtgagactccatcaaaaaaaagaaaaaagaaaaaaaatactagagctgtattacacagaaatgtgatagcttatctaacacagacaagtgatayaaataaaggggaaattaatggctggagcatgtggaacaggtttatagaaaaactggatgcaaaaatttacatagaaagaagaagtgtttatatactgtgg

SEQ ID NO: 479011 - DNA, 201 bp, Homo sapiens
gctcttattttccagggatgttggtggtaaatgtaacgtggaggaacaagacatatgtaggtacactccttgactgcacacgacatgattgggcacccccmaggtaagcacttacagctatttagtttatattattctgaaccacactaattggtgatcccttatacttttatcctgctagagttgtacatccagctttta

SEQ ID NO: 479012 - DNA, 201 bp, Homo sapiens
gtgcttaagcagaggactactaaataataagtaccctcttttctgtctgacatagcaccttgagttttattgagctcaaacatttaagtccaaattaatcrtatttgagaagaattttcacacagtgatcctattgtctagagtattctgctaaatgggagcataccagaagactacagataggcaaacgttcaaattttc

SEQ ID NO: 479013 - DNA, 201 bp, Homo sapiens
taattttagtagagacaggttttccccatgttggccaggctgatcttgagctcctggctgcaagtgatctgcctgccttagcctcccaaagtactgggatyacaggcgtgagccaccactcccggccaaaaaaaaatttttttaattatccaggtgtggtgacatgctcttgtgatcccagctacttgggagactgaggtg

SEQ ID NO: 479014 - DNA, 201 bp, Homo sapiens
ttcctgcagctctgtttattttctatcaaaaaagctatcatttacttcaaaggagtgttatgagatttaataagataacatgtagaactcctggcacacartaggcatacaataaattctaattatcttcccttcatctcatcatgctttcctttacccagtacagtttagcttttgggccctacttttttctgcaactag

SEQ ID NO: 479015 - DNA, 201 bp, Homo sapiens
aaaaaaaaaaaaaaaaaaaaaagattaggctgaaatgtcacctgcctctcccccaggtagacacaaatgattctgctccttttatacttacctcttttgcrttctttatgacattactttaattacttgttcacatttgtttacctcacccaaccttgggacagggatcatattatatttctcacttagtatagtataatg

SEQ ID NO: 479016 - DNA, 201 bp, Homo sapiens
gagtagctgggattatgggcatgcaccaccatgcctggctaatttttgtacttatagtagagacggggttttgccgtgttggtcaggctggtcttgaactygtgacatcaggtgatccacctgcctcggcctcttaaagtgctgggattataggcgtgagccactgtgcccagctagtgacatcttactttctacacaatc

SEQ ID NO: 479017 - DNA, 201 bp, Homo sapiens
accccgctcttgcccctgctaaaaaactaccagccttctctcatgttatgatttaggggcccctgttcactgaggggctaacagctggaattgtggcactrcattagccttttttgagcttttatttctctttcatgctggattttttttttttttttttttttttggcacccacaccccatttgagaatttactttctct

SEQ ID NO: 479018 - DNA, 201 bp, Homo sapiens
accagcctgggccccattgtgagacctcattctttacaaaaaataaattcgctgggcatggtggcatgtgcctgtagtcccaggtacttgggaggctgagrtgggaggatcacttgagccagggagattgatccctgttttattttctccataacacttattattgtcccacatagtatataatttattttggttgtctct

SEQ ID NO: 479019 - DNA, 201 bp, Homo sapiens
caccatcccaccctgtcccacccaggatgtaaactgttagcctttatctagtatatgcatgttgtatgcgctggctgctacaaagttaggcacttcgtagytgtgttggttatcagatcaaaaaaacagtttatgtaaggttaggtactattcgtggtttcaggtacccaccgggggtcttggaatgtatcctccaaggtt

SEQ ID NO: 479020 - DNA, 201 bp, Homo sapiens
ttacaggcatgagctgctgtgcccagctgtgtatcttctttgtagaaatatctattcaagtgttttgcccaggtttgaattggggtttgttgttgttattgttgttgttgttgttgttgttgttaaattgtgggagttctttatatattttggatattaatctcttattagatgtatgatttgcaggccaggtatggtggc

SEQ ID NO: 479021 - DNA, 201 bp, Homo sapiens
gtctttagtgagagattcaaaaggagcattgtgtttaattctagaaactcgagatactaatattatcacgatgagttcactcctattattttcatgttatktttttttggattagtaaaattagcttagttttggccaggcgcagtggctcacgcctgttatcccagcactttgggaagccgaggcaggtggatcacctga

SEQ ID NO: 479022 - DNA, 201 bp, Homo sapiens
aagttttgcccatcccaagataatatattcttctatgttttttctgagaaccttgttttatatatatatatatatatatataaaatatatataaaaatacwtatatatatatatatatttacatccacaatctatctggaatttatttttgtttaggatgtaagttggaagtcaagattcttatttttttatatggatatc

SEQ ID NO: 479023 - DNA, 201 bp, Homo sapiens
atgtgaataatagtttcagcttcatagggtggttgggagagttattaggtaaatatatggaatactcttaaaataatgcttggcacttaataagtactatrtaagtattgttactgttgtctggctcatatttatttttctgatcttagcttagagtttatatcttccttctgggaagtcctttctgcccaaagctgagtt

SEQ ID NO: 479024 - DNA, 201 bp, Homo sapiens
taagcataaatatgtttctcaaagcaatagataccaggaaaacagttcctggtggccttgctttgaagccatgttctaatcaatcaagattcttaaggaaragtagcatcatcaattgttcatgtatattagtagatgagtctggaaagtggaaccaaggttctggacttctttgtttctttaagccttctaattatattt

SEQ ID NO: 479025 - DNA, 201 bp, Homo sapiens
gagaaccactgacttagactgcagtctagcagcaattcagtgaggctagttaaggtaaaatctgactgatttaatcaacaccacatctgcctttggggctrtattaatttcctgggctgctgtaacaatgtaccaaaaactgagtggcttaaaacaacagaaagttattatttcacagttcctgaggccaggcatctgaga

SEQ ID NO: 479026 - DNA, 201 bp, Homo sapiens
tcatttaaatacttttataaaaggcatttgagatggttaagcataaatatgtttctcaaagcaatagataccaggaaaacagttcctggtggccttgcttwgaagccatgttctaatcaatcaagattcttaaggaagagtagcatcatcaattgttcatgtatattagtagatgagtctggaaagtggaaccaaggttct

SEQ ID NO: 479027 - DNA, 201 bp, Homo sapiens
tgtcgcccaggctggattgcagtggcgcaatctcagctcactgcaacctccgcctcctgggttcaagcgattctcttgtctcagcctcctgagtagctggractacaggtgcctgccaccacacccagctaattgttgtattttttttagtagagacagtgtttcaccatgttggccaggatggtgttgatctcctgacct

SEQ ID NO: 479028 - DNA, 201 bp, Homo sapiens
ggtggctcacacctgaaatcccagtgtcttgggaggctgaggcaggaggattgcttgagcccacgagtttaagactgtagtgagccatgatcatgtgactrcactccagctggggccacagatcgagaccttgtctctaaaatgaatgaatgaatgtatgcatgagcctcctgagaagccatggagaaagaagcaagcatg

SEQ ID NO: 479029 - DNA, 201 bp, Homo sapiens
aacatgctgggattataggcatgagccgctgcgtcaagacttgagttcctttctctgcattactatttacccttccttgggtaaatacacttgtgctttcttttttttttttactgagagtgaaagggtggttcagctctactctgttaacaaactctgaaacagtcaagtagaggttaccagaaagaaaaataggtttca

SEQ ID NO: 479030 - DNA, 201 bp, Homo sapiens
tctctaataatacttttgcctgaaattctgttgagagaaaatactatggtcatgtgaaaatggttccaggatgatgggtgttagttacacttgtgctttcttttttttttttttttttttttttttgggatggagtttcgctcttgctgcccaggctggagtgcaatggcatgatctcggctcaccacaacctctgcctcc

SEQ ID NO: 479031 - DNA, 201 bp, Homo sapiens
ctgttgagagaaaatactatggtcatgtgaaaatggttccaggatgatgggtgttagttacacttgtgctttcttttttttttttttttttttttttttgrgatggagtttcgctcttgctgcccaggctggagtgcaatggcatgatctcggctcaccacaacctctgcctcccaggttcaagcaattctcctgcttcag

SEQ ID NO: 479032 - DNA, 201 bp, Homo sapiens
agtactcccagctactcaggaggctgaggcaggtggattgcttgagctgtgatcacaccactgccatccagcctgggggacagagtgagaccctgtctccaaaaaaaaaaaaatgaagttctgattctacaatgtggatgaaccttgaaaatacatgttaagtgaaataagccagtcacgaaaggacaaatattgtatttt

SEQ ID NO: 479033 - DNA, 201 bp, Homo sapiens
gtgttttctaagatttttatggttatagctcttacatttaggtatttgatccattttgagttaatttttctatatggtgtgaagtagggatccagctttaktcttttacatgtacatatgcggttttcctagcaccaatcgttgaaaagactattcttaccccacattgaattttcttgacacccttgttgaaaattaatt

SEQ ID NO: 479034 - DNA, 201 bp, Homo sapiens
tgaggcaggagaatcgcttgaacccaggaggcggaggttgcagtgagtagggattgcgccactgcactccaccctgggcaacagagcaagacttcgtctcaaaaaaaaaaaaaaaacacacacacacaaataaaaataaaagtgattggcctagtgactactgtaatctcagcactttgggagaccaagttgggtggatcg

SEQ ID NO: 479035 - DNA, 201 bp, Homo sapiens
tcccattagagatctgaactggtttggccctgcttggctagattttattacaattgatgtgatctcaccctggagtatgaaactcatcttctttgtttagstttttataacttatctcaaaccaattttttatcttcatttgtgattgtcttcagaagtctgggtgtttgttttttttaaactgatggtggtgagtatgta

SEQ ID NO: 479036 - DNA, 201 bp, Homo sapiens
ggccaactaatgctgaggcatctggtgactcgagacaaaagcctattatgtcagagagaagattgggcaaagcacaagcattgttatctctaatgcccccrgggcaaactctgtacttggcaagtgagaatgccttgaccttgtgagtttacagcaacctgtccactcggttttctgtttctttgagattattttctacta

SEQ ID NO: 479037 - DNA, 201 bp, Homo sapiens
catagaagtgagtgcacttacccaggaagaatgtgtctgtattgaatgaaaggggctcagtatgggtcactgaggaacaccaagaaggtagctaccttagwtggcatattgggaactgcttccttgtgtcctagagagaatacaaaacccacagctgggaacatatgtctatacaaacattttaaaatccactgaaagagg

SEQ ID NO: 479038 - DNA, 201 bp, Homo sapiens
ctattgcaataatttaaggagtgcttggagcagtagaagtggaggtaatgagaaatgatcaaaatctggatatattttgaaggttgagccaaaaagatttrctgatggtcaggtgtggggacatggatagtaggagaggaaccaagtaaaactctaagggttttgacctgaacacctagaaggatgtacacatgccattac

SEQ ID NO: 479039 - DNA, 201 bp, Homo sapiens
cattatgaccttggaaaaatcccttaattttctgggccttagttacctcatctcttaagttgaactaggtgaccaattaggacctgacagttctttttagytctttttttctttcttttttttttttttttttttttttgagacagggtcaagctgtgtcacccagcctggagtatagcaacaacatcatctctcactgca

SEQ ID NO: 479040 - DNA, 201 bp, Homo sapiens
ctgcttcctttacagatcatcagttgcctctcctcaggatccagaattctcacaactttcaagaattcaaactgggcaagcaaatccctgaaaggcaaaastgactgcactggtagaagtggcttgatccccagctttctgtctcccagcatgaagatagcagcagcttagttaacttctctataaagaggcagaaggaaa

SEQ ID NO: 479041 - DNA, 201 bp, Homo sapiens
tagagatagctgtgtcaggccttagagtctgaaagatctgaccactaatagtgaacccttgagtaaatgatttatcctttctggtgtatcatttcctcctytgcaaagtagccttaacaatccttatatgacaggatttttggcacccacttatggcctgccttcctcaaaaagtgatttaagaccaggtgccgtggctca

SEQ ID NO: 479042 - DNA, 201 bp, Homo sapiens
tttgacaccagcctgggcaacatggcgaaacccagtctgtattttaatttatttatttatctacttatttttatttatttatttattttttgagacagagycttgctctgtcacctggctgacagactggagtccagtggcgtgatctctactcactgccacctcagcctcccaagaagctggaattacagttatgcgcca

SEQ ID NO: 479043 - DNA, 201 bp, Homo sapiens
aggtgtggtggtgcacacctgtaatcccagctgcttgggaggctgaggcaggagtattgcttgagcctgggaggcagaggctggagtgagccgagattgcrccactgcactccagcctgggtgacacagtgagtctctgtctcaaaaataataataataataactaggggaacctgactagtgcctcatacatgtcatcat

SEQ ID NO: 479044 - DNA, 201 bp, Homo sapiens
gctacatctcctctgttatttcagtatcaagcatgctattcttccatcactcatttctactttcacaacacccttcctctggaatctctgctccgtcaatmctttgacactgtgaatcaccactgtttgtactgagcattacactctttttcaagtacttccctactgaacttgtattcattataattactttcttcgcta

SEQ ID NO: 479045 - DNA, 201 bp, Homo sapiens
actttctcagtgttagtactgggaatacttctgcccagtcacccaaactagaaacttgtgagtcatctttgatgcctttccctcactgctcacatctggtrcatcacaaaggttctttaagagactatctcctgcttatctcttgtaacttcccctctttatacttgttgccacttcctttgttcagaccctcatcatttt

SEQ ID NO: 479046 - DNA, 201 bp, Homo sapiens
gcttgagccaccatgcctggcccaattgaggtattttattttagatgcatcttctagccaggcaaggtggctcacacctgaaatcccagtgtcttgggagrctgaggcaggaggattgcttgagcccacgagtttaagactgtagtgagccatgatcatgtgactgcactccagctggggccacagatcgagaccttgtct

SEQ ID NO: 479047 - DNA, 201 bp, Homo sapiens
aatgttggccccaaaatgattgtcaaagttctgttcacttaaattcactgtaattagtaagaatagttatcatttattttgggtgccttcaaagtagactrtgctaggcaacaatttctcttgataatctcacaatagccttggcatttgaagaaactttggcctagaaacatttatgcccccaagatcacacaactagaa

SEQ ID NO: 479048 - DNA, 201 bp, Homo sapiens
attctcctgcctcaacctcccaagtagctgagactgcaggcgcctgccaccatgccttatttatttatttatttatttatttatttatttatttatttattattttttattttgttttgagatggagtctcactctgttgcccaggctggagtgcagtggcgcgatctcggctcactgcaagctccacctcccaggttcac

SEQ ID NO: 479049 - DNA, 201 bp, Homo sapiens
aagaattttattttgcagcttcttttgtatagctttgaaactctaaaatatttcctttttttttttttagttgccatttcctttgagtcagcaggcctttyatctggaccttgacccaagaagttatgatttttctcactgtttcactctatctcccagtctgaaatagagcattgcactttttagtgtctgagagatatc

SEQ ID NO: 479050 - DNA, 201 bp, Homo sapiens
gcctaattgtttcattgccacaagttctttttctgcttccatcacatcatcacatccttcttgattggcaaatagtaactactcaataaatatttgttgtytagcacatacatacagttcaaacagaaaactaaaatagactaaagtatgaggaaatcttggtattggaacttaactattgaggtttatttcaaagaattt

SEQ ID NO: 479051 - DNA, 201 bp, Homo sapiens
gattctcctgcctcaacctcccaagtagctgagactgcaggcgcctgccaccatgccttatttatttatttatttatttatttatttatttatttatttattattttttattttgttttgagatggagtctcactctgttgcccaggctggagtgcagtggcgcgatctcggctcactgcaagctccacctcccaggttca

SEQ ID NO: 479052 - DNA, 201 bp, Homo sapiens
tgattctcctgcctcaacctcccaagtagctgagactgcaggcgcctgccaccatgccttatttatttatttatttatttatttatttatttatttatttattattttttattttgttttgagatggagtctcactctgttgcccaggctggagtgcagtggcgcgatctcggctcactgcaagctccacctcccaggttc

SEQ ID NO: 479053 - DNA, 201 bp, Homo sapiens
ttccttgcttagttgtcccaaatgtacttcaaattcacaaagttcaaagaaaaatcataatttgtccctaaagtccacctctctccattcctttctccagwactttctcagtgttagtactgggaatacttctgcccagtcacccaaactagaaacttgtgagtcatctttgatgcctttccctcactgctcacatctggt

SEQ ID NO: 479054 - DNA, 201 bp, Homo sapiens
gtgattctcctgcctcaacctcccaagtagctgagactgcaggcgcctgccaccatgccttatttatttatttatttatttatttatttatttatttatttattattttttattttgttttgagatggagtctcactctgttgcccaggctggagtgcagtggcgcgatctcggctcactgcaagctccacctcccaggtt

SEQ ID NO: 479055 - DNA, 201 bp, Homo sapiens
tcgatctcctgacctcgtgatccgcccgcctcggcctcccaaagtgctgggattacaggcgtgagccaccgcgcccggccgaaagattttcttaaaggagkagataccaggaaatcactttatagtctattggtgtatatcatacatagactattgctttttggtttgttatttactactgtaattcaaggtgtaagtagc

SEQ ID NO: 479056 - DNA, 201 bp, Homo sapiens
tcaaagaacattgaaaaataatcaggaactggttcagtttgcacaaatttactcttctactccttcttctgcacccactaaaaattgtgaaactgtgcagrtgtaataaatatattgtgtgtaggctgaagtatgatacagagtgtgaaactgaaatatttagtccaaatttttattcagcaatgaataaaaattcccagg

SEQ ID NO: 479057 - DNA, 201 bp, Homo sapiens
tgaggctggccccaaactcctagtctcaagtgatccttccgccttagcctcccaaagtgctgggattagaggtgtgagccactgcgcccaccctttttttwaaaattttttaatcctgctttaattttttgttgttgttgttatttctgaaataacattttacatttgttgttggtcttgtcttaagcaaatgggattata

SEQ ID NO: 479058 - DNA, 201 bp, Homo sapiens
tgagacagggtctagctctgtaacccaagcttggagtgcagtggcgtgaccttggctcattgcaaccttcgtctcctgggctcaagccaatctcccacctyaccctcccgagtagctggaactataggctcacgctaccatgcccagctaatgtttgtactttttgtagagatggggtttcaccgtgttgcccaggctgga

SEQ ID NO: 479059 - DNA, 201 bp, Homo sapiens
gccactgcactccagcctgggcagcagagcaagaccctcaaaaaaaaaaaaaaaaaccaccagttcaaatctcctatctctggcttcctccagagcatatrctcaataagcagaacagctgtgaggcccaaaccattcaaattggtttttgttcctttctttctttttttgccagttacatacagttgattttataatgtt

SEQ ID NO: 479060 - DNA, 201 bp, Homo sapiens
tttttttttcttttttgtttcttcagaagtcaggtacttagttctgcactgaatcaaaccttagtgaaagacaacagagtgttgtagaaaggaggtatagrggccaggctcggtggctcacacctgtaatcccagcactttggaaggccgaggcaggtggatcatctgaggtcaggagtttgaaaccagcctggccaacat

SEQ ID NO: 479061 - DNA, 201 bp, Homo sapiens
ccaaggtgggaggactgcttgagcttagaagttcaagaccagcctgagcaacatagggagggcctgtctgtacaaaaaactaaaaaattagctgggtgtgktgatacatgcctgtggtcccagctacttgagaggctgaggcggaaggatcacttgagcccgggaggtcgaggctgcagtgaaccatgatcatgccactgc

SEQ ID NO: 479062 - DNA, 201 bp, Homo sapiens
ctctgggggtcaaggctgtagtgagccatgattacatcactgcactccagcctgtcagcagagggaagaccctgcctcaaagaaaaaaaaaaaaaagatayttctctcagccttgtttatacaagtgaaaattaggacaacctaaatatccatctatagttaattggttaaatgaatcgtggttggtttgttcaaaataat

SEQ ID NO: 479063 - DNA, 201 bp, Homo sapiens
atgcattcaaagtaaacatgctgttttaggaagaggaaatatcgcatcacagaaatagaacaagcaccttatatcatagttctttgttgttgatttttttwaaaataaatacaatttatttgaaatcaaaaagagcattaatgttttggggtataaagtatttccttgctgagatttttaagtcttatgcctgaagaagag

SEQ ID NO: 479064 - DNA, 201 bp, Homo sapiens
agccttttttgagcttttatttctctttcatgctggattttttttttttttttttttttttggcacccacaccccatttgagaatttactttctctctgaraagtttttgtcagtagttttttgttttattgccttttctgtgataggttaaggatacagcttggtaaagaaggaacctgcaggggtttattgatggagtt

SEQ ID NO: 479065 - DNA, 201 bp, Homo sapiens
cttttattgttttattttacaagtttccacatagcattgatttttttttttttttggttccttcattttaaaaagtttttataaactggtacctaactcayccagctcagagttgatatttcctggcttatgtgttgctttttttttcttttttgtttcttcagaagtcaggtacttagttctgcactgaatcaaacctta

SEQ ID NO: 479066 - DNA, 201 bp, Homo sapiens
cttttttttttttttcctaaatagcagtcaactgacaagtcccatggaatactttccattaaatcataatctgtattttcaaaaagcagtgcaagtaattytgcagtagagttagtggtccaactttcttttttttttttttttttttttttttttgagacggagtcttgctctgtcgcccaggctggagtgcagtggcgc

SEQ ID NO: 479067 - DNA, 201 bp, Homo sapiens
gttgggatcttactggttgtccaggctggtctgaaactcctgggctcaagtgattccccctgcctcagcctcccaaagtgctgggattacaggtgtgagtsaccatgctcacaacctgtgtcttactgctcacacctgctcttactgtgtctaatttataaattaaactttatcataggtacgtacgtagaggaaaaaacc

SEQ ID NO: 479068 - DNA, 201 bp, Homo sapiens
agtgggccctgtatcagcagcaaatgagaattcgataaaaatttggatctcagacctcctcccagtccctaaagttagaaactctaggcttgagacccagmaaattttttttttttttttttttttgagacagggtctcactttgttgcccaggctggaatacagtggcacaatcaaggctcactgcagcctcaacctccc

SEQ ID NO: 479069 - DNA, 201 bp, Homo sapiens
tgctttctttgctgtcggtattttggtctttgcctctggcacatctgtagctcttagcaacatctgggcttctccagtagcaggtctgtgagtttcttccrctaataatacagtggctcattcccttttaccagtggcagctgccagagaggctgcctgtgtttaggtggcagatgctatagtccacttcagcagagtcag

SEQ ID NO: 479070 - DNA, 201 bp, Homo sapiens
ttcttgatgggataaatggtgctgttgggtctctggtagaacaaagggctaaatttcatggcatatctacgaagtgttctattgccggctaccaaagagcraaggggcacattttgagggcaagaggtactcattgtactttgaggtacttagatcttatgagttattgttgtggttatgacagtttggcctaggaagaga

SEQ ID NO: 479071 - DNA, 201 bp, Homo sapiens
tttaaaatttttttatagagactggagcctggcaatgttgcccaggctggtctcgaacacctggtctcaagtgatcttcccgcctcagcttccccaagtgmtaggattacaggcatgaaccactgctcctggccagcacttattttaaatgccagccattattctaaatgcttcatatatatatattagtttatttaaccc

SEQ ID NO: 479072 - DNA, 201 bp, Homo sapiens
gccagagcttagagcagcagcagcggggagtggacaagaaggcagagatgggcctgaaggagcgggaggcagcactcaaggaagagtggaagcaaaagccrtcaattccaccaactctcaccaaggcccccagcctgacagacctggtgaaatcaggacctggcaaggccaaggagccaggggctgacccagccaaatcag

SEQ ID NO: 479073 - DNA, 201 bp, Homo sapiens
ccaaagtgttgggattacaggcttgagccaccatgcctggcccaattgaggtattttattttagatgcatcttctagccaggcaaggtggctcacacctgwaatcccagtgtcttgggaggctgaggcaggaggattgcttgagcccacgagtttaagactgtagtgagccatgatcatgtgactgcactccagctggggc

SEQ ID NO: 479074 - DNA, 201 bp, Homo sapiens
aattgtggtgtatttgtgtattttcttgcatttgtggcgagactagtaaaagttaacctaattagattttcaaaagtgttcattgattatactcaaaaaayatttatggagtacttcctgtggtcaggcacagcactaacccctggtatagagtgttgaaggagacctttaggagatgtgaaagagggaataccctccttc

SEQ ID NO: 479075 - DNA, 201 bp, Homo sapiens
acatatttattgatcatctagtttgccaggtattttgaggatgcagggttaaaagactaacggctatctgagtcgttgtcgtcagatatcagctacactccatttccaacgtcttttttttttttttcttctgtaaagatggaggtgatgggcatatttgatttgtggggacatgttacggccctgcttattttcagagtt

SEQ ID NO: 479076 - DNA, 201 bp, Homo sapiens
ttttcttagcagacatggccgcttaccaacaagaagggcagatgcagcttccccgagctgatgccattcgttcacgtctcatcgatactttctctctcatygagcatttgcaaggcttgagccaagctgtgctgcgacacactatcaggagttacttggtcagcagcctatttcttcactaatttaaatttaagactccta

SEQ ID NO: 479077 - DNA, 201 bp, Homo sapiens
ttgtcagaaaataacacattgcaagtgtagacaatctctacttaaaattaaaaactgagtatattaggagggtgaggtgggaggatcacttgagcccaggrgattgaggcagcagtgagctatgatctcaccagtgcactgcagcctgggtgacagagcaagattctgtatcaaaaataaaataaaacctaagtataatat

SEQ ID NO: 479078 - DNA, 201 bp, Homo sapiens
agtcttaacaggagctctcctactatatctcctttccaattttctggtcttaattactttctttttgcttcttaatttcccctgtacttcttcttcgcttygggtaagtgtggccgtggcctctttgctcattgtaaaaagtggtttcttgctgatgcaccctttccctccttgcttcctgttacctctttccactccacc

SEQ ID NO: 479079 - DNA, 201 bp, Homo sapiens
ttaagttcaagaggagctagtcaacaaagggaaagtttggacttatcagaagtgtctgaagtagagtctaattatggtgccactgaagaggatttaataasatctgcatcaaaaacagaagagaccttgtcaaaaaagagagtaccagtcttcctcctgtgtctcatccacatcctcttcctattcttcctcttctgaatc

SEQ ID NO: 479080 - DNA, 201 bp, Homo sapiens
acctctttccactccacctttccacccacaccataggatttaccagctcttacccagcttttacaaatctagacatgcttttctgaagcattcctccctayaggtcatttggactgggaaactcttgtgcacgagaatctgcccaggctaatggaaatggatcaggatgaccgtgtttggcccagagactcactcttccga

SEQ ID NO: 479081 - DNA, 201 bp, Homo sapiens
ttttcttcactttctgatatgaactctttttttcttaccacacttttgcttgaatataactgtctttgctcttttttcttttttttttcttttttttttttgctttgcaggagaaaaaaacatgtcacgtgaggcactgaggtcaagccacagcaaaatagatgccaggttaggagtatgtatgtgaactgggatagaaac

SEQ ID NO: 479082 - DNA, 201 bp, Homo sapiens
acagcgctaggcggcggaggcgcatggcggcgaggtggggtggggacggccggaagggtcgcggctcggctgggactgcggaggtcgggcgcgcgaccacwaacccgctgcttgcgctcgcgcgtctggcccaggcggacctgcagccggaggtcccaacccccaaacccggcttgggccgctgtgtggcagccgctgatt

SEQ ID NO: 479083 - DNA, 201 bp, Homo sapiens
catctcaaaaaaaaaaaaaaaaagaaaaagaaaagaaaaatggaaataggctgggcatggtggcttacgcctgtaatcccagcactttgagaagccaaggygggtggatcacctgaggtcaggagttcgagaccagcctggccaacatggtgaaaccctgtctccactaaaaatacaaaattagctgggcatggtggtggg

SEQ ID NO: 479084 - DNA, 201 bp, Homo sapiens
ccggcgctgcgtaggcccaacagttccccgcgctctcgcccccggcccagccccgcctttcttcccccgcctcggcagaatggactcaccagggggcgaaraactcgacgagcatgaggcccgcagagcccgtgtcggagatgcgactctcgaagttgtcgtccgtgagttctagcacgtcggaggcagcggcgaggcggg

SEQ ID NO: 479085 - DNA, 201 bp, Homo sapiens
actttgaaatggcaagcagaacagaggggtgacatgaagtgacttacgtttaagaaggattactctggttgctgtgttgatagaagaacaagggaaggagyagagagatcagctgggaggctatgctgctgcccaggcaagaaatgatgacagcttaggccagagtggtggcagtgagttattgagaaaagatatatttcg

SEQ ID NO: 479086 - DNA, 201 bp, Homo sapiens
acagagtgagactctgtctcaaaacaagcataggaataagtatagtgtaaccccattggtttttagaaggggccaacctctgtaaaattctagggatgatygaagtatggttctgttctttttgtctggatccagttcagcatcaggatgaatttaaagccagagcaccacaatgttgatttctatttagctcttaagcca

SEQ ID NO: 479087 - DNA, 201 bp, Homo sapiens
gctgggtgcagtggctcatgcctataaccccagcactttgggagaccaaggccggaggatcgcttgagcccaggagtttgaggccaacctgggcagcatakggagaccccatctctacaagtaatttaaagaaaaaattagctgggcatggtgacatgtgcctgtggtcccagttacccagaggctcttgagcccggaaga

SEQ ID NO: 479088 - DNA, 201 bp, Homo sapiens
tgcctaaatttaatcctgttccttctagtcattcttagccctgccttcccacttattctctagggaggacagggtgaaaaggaggaaaatgcagcaaggtrgtttctttaatcctgataaacttgtctatggcaaagagtacacagaatcataaggcttaattaaaagattaataaagacttttgtgggaacctggaaccc

SEQ ID NO: 479089 - DNA, 201 bp, Homo sapiens
aaaccccgtctctaccaaaaataataaaattagctgggcatggtggcgcagaggcagaggttgcagtaagctgagattgcaccactgcactccagcctggmaacagagcgagattccatctcaaaaaaaaaaaaaaaaaaaaaaagcatcctaatttcatggatgttaaaatgtgaaatattgtccatcttagagaaatgt

SEQ ID NO: 479090 - DNA, 201 bp, Homo sapiens
gagactatcatggccaacatggtgaaaacccatctctaccaaaaatacaaaaattagccaggcgtggtggcttgcacctgtagtcccagctactcgggagkctgaggcaggagaattgcttgaatctgggaggcagagattgcagtgagccgagatcatgccactgtactccagcctggcaacagagcgagactccatctc

SEQ ID NO: 479091 - DNA, 201 bp, Homo sapiens
aaagagataataagcagtgaatatattaagtaatctgttaaaatatgataagcattatgggaaagttaaaagtagaacaggttaagggagattgggagtakaaggtgggattgcagatgggttgtagtttttttttcttgagacagagtctcgctctgtcaccaggctgtggagtgcagtggcacgatatatcggctcact

SEQ ID NO: 479092 - DNA, 201 bp, Homo sapiens
gaggtgggcagatcacgaggtctagagatagagaccatcctggccaacatggtgaaaccccgtctctaccaaaaataataaaattagctgggcatggtggygcagaggcagaggttgcagtaagctgagattgcaccactgcactccagcctggaaacagagcgagattccatctcaaaaaaaaaaaaaaaaaaaaaaagc

SEQ ID NO: 479093 - DNA, 201 bp, Homo sapiens
atgcctgcttcatggagcttacatattagtagtggtaaagagataataagcagtgaatatattaagtaatctgttaaaatatgataagcattatgggaaarttaaaagtagaacaggttaagggagattgggagtataaggtgggattgcagatgggttgtagtttttttttcttgagacagagtctcgctctgtcaccag

SEQ ID NO: 479094 - DNA, 201 bp, Homo sapiens
aaagaatatgaaacaaatctggatgggtcaaagaaggcaatgaaacgtcctgtgaaatgttattggatgagaaggggctggggacaggtgccatggttcaragatgactgggttcagcagtgcaagagagggtttggtgggagattgccaggtgggcttgactgggctgttggtggagatcagcctagtctggcccacatc

SEQ ID NO: 479095 - DNA, 201 bp, Homo sapiens
cagttaactgaatatgaaacatgatcactgtgtcagaggataagtagattgccagactagaaattatctggcaagctcgtggaaattttatcttattaagyttattcttgtgggagaaacggaggagggattttgcagagggaaattatttgtgattaacagatttctttgaacagactaattcatatgataaacattaag

SEQ ID NO: 479096 - DNA, 201 bp, Homo sapiens
ctggggcttgggacccctgccctagatctaatagacaaatcaaaatagaatagcactaactattctatttggtaaaacagttaactgaatatgaaacatgrtcactgtgtcagaggataagtagattgccagactagaaattatctggcaagctcgtggaaattttatcttattaagtttattcttgtgggagaaacggag

SEQ ID NO: 479097 - DNA, 201 bp, Homo sapiens
tacaatttaatatgtgttatctggggtttccccctcatatctagttgaaatcaactcagtttgaaaataagaaattagagaggaggactgtgtgtttgtgygtggtgggcacaggtgggaaatgaggaatttataatattggaacatggaatttagggcaagatgtgaaagacaggctttgcttacttcacaatgttgcct

SEQ ID NO: 479098 - DNA, 201 bp, Homo sapiens
ccactattctggcatttcagcttctcaatttctgcctacacctaaaataggcaaattcttggtttggtatgtcatattctgggaatgtgtcccagttttcyctaactgagagagaacctagaaactctgcttctgtagcaggggacacccaaatcctatgaggtatgagagcttatttcccaagaagagaaagtctaatcc

SEQ ID NO: 479099 - DNA, 201 bp, Homo sapiens
gggtgtccactattctggcatttcagcttctcaatttctgcctacacctaaaataggcaaattcttggtttggtatgtcatattctgggaatgtgtcccasttttctctaactgagagagaacctagaaactctgcttctgtagcaggggacacccaaatcctatgaggtatgagagcttatttcccaagaagagaaagtc

SEQ ID NO: 479100 - DNA, 201 bp, Homo sapiens
gctaggcggcggaggcgcatggcggcgaggtggggtggggacggccggaagggtcgcggctcggctgggactgcggaggtcgggcgcgcgaccactaaccsgctgcttgcgctcgcgcgtctggcccaggcggacctgcagccggaggtcccaacccccaaacccggcttgggccgctgtgtggcagccgctgattggctg

SEQ ID NO: 479101 - DNA, 201 bp, Homo sapiens
ccagctcctaatggccctttggggaagtcattaacttgcagaatatcaggaaagagctgcatgaggagatggcatgtcaggaggttcagctcaaagctgayatgttcaagcggcagatcatccagagatctacttctcccttttcaaccccaactttccttctcaagggtttcctgagctcatttcttgtttctgctcctt

SEQ ID NO: 479102 - DNA, 201 bp, Homo sapiens
atagctgtggagaaggaggagggtgtccactattctggcatttcagcttctcaatttctgcctacacctaaaataggcaaattcttggtttggtatgtcayattctgggaatgtgtcccagttttctctaactgagagagaacctagaaactctgcttctgtagcaggggacacccaaatcctatgaggtatgagagctta

SEQ ID NO: 479103 - DNA, 201 bp, Homo sapiens
ggcccagccccgcctttcttcccccgcctcggcagaatggactcaccagggggcgaagaactcgacgagcatgaggcccgcagagcccgtgtcggagatgmgactctcgaagttgtcgtccgtgagttctagcacgtcggaggcagcggcgaggcgggccgcggcaagaagcagcgccacacccgggaacagcgctaggcg

SEQ ID NO: 479104 - DNA, 201 bp, Homo sapiens
tttgttatggcagccacaggacactaatacaaataccttccatgaaacagatatgattctagaccccaagtgtttagcagtggacaaaaaaagcagaagcrgaagtaaactcattcactcattaacaaataattactgggtggatgtggtggcttacacttgtaatcccaacactttgagaggtgaaggcaagaggattgc

SEQ ID NO: 479105 - DNA, 201 bp, Homo sapiens
taaatcagaaagaactccactctgtatgtttccttaagagacaacaggtcctctcttcaaaaacttcatcatcttcctgatctttttgaatacgatcgtaytgatggttgaaatacgtgagaactgacattgtatgaaagaggaagtgaggccaggcgcggcggctcacacgtgtaatcctagcactgtgggaggccgagg

SEQ ID NO: 479106 - DNA, 201 bp, Homo sapiens
agggccccggcgctgcgtaggcccaacagttccccgcgctctcgcccccggcccagccccgcctttcttcccccgcctcggcagaatggactcaccagggrgcgaagaactcgacgagcatgaggcccgcagagcccgtgtcggagatgcgactctcgaagttgtcgtccgtgagttctagcacgtcggaggcagcggcga

SEQ ID NO: 479107 - DNA, 201 bp, Homo sapiens
aatccttggtgcagctccaagaatgaaatgacacttgatgcttacattttcttagcagacatggccgcttaccaacaagaagggcagatgcagcttccccragctgatgccattcgttcacgtctcatcgatactttctctctcatcgagcatttgcaaggcttgagccaagctgtgctgcgacacactatcaggagttac

SEQ ID NO: 479108 - DNA, 201 bp, Homo sapiens
ctccttgaccccacttttccctttgtgacagtagatttgcccccaaggataagaattctccagctctagaatattgcctgattcttcatccactgtggggwgtcctccatttttttcaccccgtgactacaatttgttctccccaattagttttcttcactttctgatatgaactctttttttcttaccacacttttgctt

SEQ ID NO: 479109 - DNA, 201 bp, Homo sapiens
tatgttcaagcggcagatcatccagagatctacttctcccttttcaaccccaactttccttctcaagggtttcctgagctcatttcttgtttctgctcctygaccccacttttccctttgtgacagtagatttgcccccaaggataagaattctccagctctagaatattgcctgattcttcatccactgtggggagtcct

SEQ ID NO: 479110 - DNA, 201 bp, Homo sapiens
atcagtgagctcatttgttgataatctcaaactgctcagaaatgatgaaaggacagtagaactactcacttgtttcattctcactgttgtagagaagtctyccactttattttttagtgacagagtctcactttgttacttaggttggagtatagtggtgtgatcatggctcgctgcatcctcaacctccagagctctatt

SEQ ID NO: 479111 - DNA, 201 bp, Homo sapiens
agctgatatgttcaagcggcagatcatccagagatctacttctcccttttcaaccccaactttccttctcaagggtttcctgagctcatttcttgtttctrctccttgaccccacttttccctttgtgacagtagatttgcccccaaggataagaattctccagctctagaatattgcctgattcttcatccactgtgggg

SEQ ID NO: 479112 - DNA, 201 bp, Homo sapiens
cccacccaagccctcttcccaagtctagtcattaccatctcccagctcctaatggccctttggggaagtcattaacttgcagaatatcaggaaagagctgmatgaggagatggcatgtcaggaggttcagctcaaagctgatatgttcaagcggcagatcatccagagatctacttctcccttttcaaccccaactttcct

SEQ ID NO: 479113 - DNA, 201 bp, Homo sapiens
ttttctggtcttaattactttctttttgcttcttaatttcccctgtacttcttcttcgctttgggtaagtgtggccgtggcctctttgctcattgtaaaargtggtttcttgctgatgcaccctttccctccttgcttcctgttacctctttccactccacctttccacccacaccataggatttaccagctcttacccag

SEQ ID NO: 479114 - DNA, 201 bp, Homo sapiens
ccaagctgtgctgcgacacactatcaggagttacttggtcagcagcctatttcttcactaatttaaatttaagactcctatccacatcctctacatttaaragtggaaaattctggggaggccggtttagttgctggtttaccaaacttgataaatcaagggcttgtaaataaaactaaggagatagaatccacgtctttc

SEQ ID NO: 479115 - DNA, 201 bp, Homo sapiens
tggatatttcacttggattctccccacccaagccctcttcccaagtctagtcattaccatctcccagctcctaatggccctttggggaagtcattaacttkcagaatatcaggaaagagctgcatgaggagatggcatgtcaggaggttcagctcaaagctgatatgttcaagcggcagatcatccagagatctacttctc

SEQ ID NO: 479116 - DNA, 201 bp, Homo sapiens
tctggattggatatttcacttggattctccccacccaagccctcttcccaagtctagtcattaccatctcccagctcctaatggccctttggggaagtcaytaacttgcagaatatcaggaaagagctgcatgaggagatggcatgtcaggaggttcagctcaaagctgatatgttcaagcggcagatcatccagagatct

SEQ ID NO: 479117 - DNA, 201 bp, Homo sapiens
ttccactccacctttccacccacaccataggatttaccagctcttacccagcttttacaaatctagacatgcttttctgaagcattcctccctataggtcrtttggactgggaaactcttgtgcacgagaatctgcccaggctaatggaaatggatcaggatgaccgtgtttggcccagagactcactcttccgatatttt

SEQ ID NO: 479118 - DNA, 201 bp, Homo sapiens
gtaatcccagcactttgggaggccgagggggatgggtcatgaggtcaggagttcgagaccagcctgaccaacatggtgaaaccctgtctctactaaaaatmccaaaaaaaaaaaaaaaaaaattgccgggcttggtggtgtgtgcctgtaatcccagctactcaggaggctgaggcagaagaatcacttgaacccaggagg

SEQ ID NO: 479119 - DNA, 201 bp, Homo sapiens
tcgcccccggcccagccccgcctttcttcccccgcctcggcagaatggactcaccagggggcgaagaactcgacgagcatgaggcccgcagagcccgtgtmggagatgcgactctcgaagttgtcgtccgtgagttctagcacgtcggaggcagcggcgaggcgggccgcggcaagaagcagcgccacacccgggaacagc

SEQ ID NO: 479120 - DNA, 201 bp, Homo sapiens
aatcagaacaaactacaaagaaatgctttatgtttctttgaaagtaggaatgataccatttttgaaaggtttaggtctctgcttccgtctattcacatgcytttttctttagggacctcccgaattccctggtaacagtgttcattctcttcaccttggatcattggtatgcactgcttcaggacgtctggaaggtgcctg

SEQ ID NO: 479121 - DNA, 201 bp, Homo sapiens
attattttaagtgttttccttacattatctcatttatgctccacaacaacccaattaaataaccatgaattttatccccctttttatatctgaacaagttkaagtatagtgtttaagcaacttaatatagaaaggctgaatagtaagcacttctcagagaatgctattcaagggataacgcccagggaacaatgaagagga

SEQ ID NO: 479122 - DNA, 201 bp, Homo sapiens
ccatgaaacagatatgattctagaccccaagtgtttagcagtggacaaaaaaagcagaagcagaagtaaactcattcactcattaacaaataattactggstggatgtggtggcttacacttgtaatcccaacactttgagaggtgaaggcaagaggattgcttgaagttcaagccagaagttcaaggctgcattgagaca

SEQ ID NO: 479123 - DNA, 201 bp, Homo sapiens
ctctcctactatatctcctttccaattttctggtcttaattactttctttttgcttcttaatttcccctgtacttcttcttcgctttgggtaagtgtggcygtggcctctttgctcattgtaaaaagtggtttcttgctgatgcaccctttccctccttgcttcctgttacctctttccactccacctttccacccacacc

SEQ ID NO: 479124 - DNA, 201 bp, Homo sapiens
tgccaacaagagcatctgccggttactgagcacttactaagtgccaagcattattttaagtgttttccttacattatctcatttatgctccacaacaaccyaattaaataaccatgaattttatccccctttttatatctgaacaagtttaagtatagtgtttaagcaacttaatatagaaaggctgaatagtaagcactt

SEQ ID NO: 479125 - DNA, 201 bp, Homo sapiens
gacactaatacaaataccttccatgaaacagatatgattctagaccccaagtgtttagcagtggacaaaaaaagcagaagcagaagtaaactcattcactyattaacaaataattactgggtggatgtggtggcttacacttgtaatcccaacactttgagaggtgaaggcaagaggattgcttgaagttcaagccagaag

SEQ ID NO: 479126 - DNA, 201 bp, Homo sapiens
tcttagtcttaacaggagctctcctactatatctcctttccaattttctggtcttaattactttctttttgcttcttaatttcccctgtacttcttcttcrctttgggtaagtgtggccgtggcctctttgctcattgtaaaaagtggtttcttgctgatgcaccctttccctccttgcttcctgttacctctttccactc

SEQ ID NO: 479127 - DNA, 201 bp, Homo sapiens
aaatggaacagtagtgggcaaaactgtggtttataagtgtgttcattctccatcattcggtttccagcttccttaacttttattcctcctttgctctatcytcacagaattgctggaatccacaaataccaaactatggccattgaagctgaccttggaggtggcagcttggtttatcttgcttattttcatcctggagat

SEQ ID NO: 479128 - DNA, 201 bp, Homo sapiens
gcttatttcccaagaagagaaagtctaatcccagttgttgggaattaggacaaggtaggctcttgcttgatttgggcagcccaccagtttctgcacgtttrttctctctgaagattgcatttcagacttgagcagcagggcctaagcctcaagctggagagctatgggggatcagacaatgagcaggatgcccacaagtgc

SEQ ID NO: 479129 - DNA, 201 bp, Homo sapiens
gtggcaaaaccctctgcaaataggaagtgccacaagagcaccgagataaggatgaggccctgcgtgagcgcagccttcgggttttccttgggccgatcagyaccgactcccccgctctcggcgaggcgcctccagctcccgggaatgagaaatgtgcccgccgcagcaggggcccacaggaatgaagggccccggcgctgc

SEQ ID NO: 479130 - DNA, 201 bp, Homo sapiens
tgccttgcatggctaggattatagtactaagccttggaatgaagtaaataatagtaactatacaggatttcctagatcagtggtccccagcctttttggcwtcagggactggtttcttggaagacagtttttccatggatggggtaggagggaggtttcaggatgaagctgttccacctcagatcatcaggcattagattc

SEQ ID NO: 479131 - DNA, 201 bp, Homo sapiens
cccgccaccacgcccagctaattttttgtattttttagtagagacggggtttcaccgtgttagccaggatggtctcaatctcctgacctcgtgatccaccmgcctcggcctcccagagtgctgggattacaggggtgagccactgcgcccagcctaacatttacatttttacaagtatatttagaaatattattcaagtaa

SEQ ID NO: 479132 - DNA, 201 bp, Homo sapiens
acacctaaaataggcaaattcttggtttggtatgtcatattctgggaatgtgtcccagttttctctaactgagagagaacctagaaactctgcttctgtascaggggacacccaaatcctatgaggtatgagagcttatttcccaagaagagaaagtctaatcccagttgttgggaattaggacaaggtaggctcttgctt

SEQ ID NO: 479133 - DNA, 201 bp, Homo sapiens
acccagggcacacacggttgaagaggttaatactgatgaggatcaaaaggaggagtcaaatggattaaacgaagacattctggacaatccatgtaatgatkctattgccaatactttaaatgaagaggaaacactgctggaccagtcttttaaaaatgtgcaacagcaacttgatgctacatccagaaatattactgaagc

SEQ ID NO: 479134 - DNA, 201 bp, Homo sapiens
cttaatatattttaggtactgtcatcaaactcaaagctcgctgtcagcctcaaaggtctgaaccctagtatagattcttgtagcttgcttgaagttacagygggtcatgatcaggaattgatgctttgtttttgttttgaaacggagtctcgctctttcgctcaggctggagtgcagtggcgcggtctcggctcactgcaa

SEQ ID NO: 479135 - DNA, 201 bp, Homo sapiens
gaaagagtctcgctctgttgcccaggctggagtgcagtggtgcagtctcagctcactgcaagctctgcctcccaggttcacaccattctcctgcctcagcytcccgagtagctgggactacaggcgcctgccaccacctcccgctaattttttgtatttttaacagagatgtggtttcaccatgttagccaggatggtctc

SEQ ID NO: 479136 - DNA, 201 bp, Homo sapiens
gcctcctaagtagctgggattacaggcgcctgccaccacacccagctaatttttgtattttagtagagacgaggtttcaccatgttagtcaggctagtctygaactcctggcctcaggtgatctgcctgcctcggcctcccaaagtgctgggattagaagtgtgagcctccaattacatttctacatgcctctccatactt

SEQ ID NO: 479137 - DNA, 201 bp, Homo sapiens
tctgggctcaagccattcgcctgcctgggcctcccaaagtgctgggattacaggcgagccacaccgcacctggccagtgtctatgttcagccctatttttsctctctttaccacctcttttctcagcttattattcaataaacaattcataaaactctgagttcgaagcattctgctatgaactctgaagaagcggtaatt

SEQ ID NO: 479138 - DNA, 201 bp, Homo sapiens
tttctataattagctaatatttcaaggcataatatatacatagaacaaggataatgtatataaatatttcaaatggtgacttgaattttttgaccaacttrtcagatgtgatggggtttatctttcttttaatttcataatatggatgatgtagatagaaggtaaagtgtcagctctgctgttttttttattttttgcttg

SEQ ID NO: 479139 - DNA, 201 bp, Homo sapiens
cgggtgtaatgacatgtgcctgtagtccctgctactcgggagtctgaggcaggagaactggttgagcccaggagggagaggttgcagtgagccgagattgygccactgcaatccagcactccagcctgggcaacagagcgagactccaagttaaaaaacaaaacaaacaaaaaaaaacccaggcgctgtggctcacgcctg

SEQ ID NO: 479140 - DNA, 201 bp, Homo sapiens
tacatttacttctatacggatgtgatttgtaatgtacttttttttttttgagacggagtctcactctgttgcctaggctggagtgcagtggtgcgatctcrgctcactgcaacctccacctcagttcaagtgattctcctgcctcagcctcccagtagctgggattacaggtgtgcaccaccacacctggctaatttttgt

SEQ ID NO: 479141 - DNA, 201 bp, Homo sapiens
cctatatcctgcgtatttcataccctattggatcacagtttgaaaccctctgaaaagtcaaattcatctttttatggtaggggaaactcaatagttgaggyaaaaggatttgttcaaaatgatatagttatttagtgttagggtctacattggaacttagatttctaggctagtcttttttttcataattagtatcttctc

SEQ ID NO: 479142 - DNA, 201 bp, Homo sapiens
tccgcttccttggttcttcacgtccgacattctgaatgcaatgaaaccactaggttattttgagagccacttttaatggtctcttgccctttaattaaagraaaagatgcctcaacaaggtgaaagatgatgcaatttcaattgctctctaaggatgtggcttaaaccatacaggatgtcagatccagcacctgttttttg

SEQ ID NO: 479143 - DNA, 201 bp, Homo sapiens
ggtattacaatcttttttttttttccccaagacggggtcttgctctgtcacccaggctggaatgcagtggcatgatctcagctcactgcaacctccgcctytcaggttcaagcaattctcctgcctcagcctcccaagtagctgggattacaggcccccgcccccacacctggctaatttttgtattcttagtagagacag

SEQ ID NO: 479144 - DNA, 201 bp, Homo sapiens
ggaagtcgtgacttcctttgaaatcacagtccagaatcccggatattcttattttcaagtctggtttgagagtaaacaaatctcaaatctctttcccaggrcattcattcaaatacatgtcataattggggttttttgttgttgtttgtttttccctcatgctttcttccactcaatggaaaacccctgcatcatccgttt

SEQ ID NO: 479145 - DNA, 201 bp, Homo sapiens
gcatcagttaatttacctataaaatgagaattatactgtctactactgcactaaatagttatgagcattaaatgaaactttgaaagaatagtgcctaacayacaggagctaaataaatggtgatggtgataggttttcatcatgtaaacataatctgctagaagaataatttttttttttgagacagagtttcactcatcg

SEQ ID NO: 479146 - DNA, 201 bp, Homo sapiens
gctagagtgcaatggtgcattctcagctgactgcaacctccgcctcctgggttcaagcaattctcctgccccggcctcccaaggagctgggactacaggcrcaagccaccacacctggctaattttttttttttttttttttgtatatttagtagagacaaggtttcactgtgttagccaggataatctcgatctcctgac

SEQ ID NO: 479147 - DNA, 201 bp, Homo sapiens
cccaggctcaagtctcagcctggaactccttttgtctcagcctcccaagcagctgggactacaggtgtgtgataccatacccagcgcttttttttttttttgtaaagatgaggtcttgctatgttgcctaggctcgtctcaaactcctgaactcaagtgatcctccctccttggcctcccaaagtgctgggattataggca

SEQ ID NO: 479148 - DNA, 201 bp, Homo sapiens
tggcgtgaacccgggaggcggagcttgcagtgagccaagatggcaccatccagcctgggcgacagagcgagactctgtctcaaaaaaaaaaaaaaaaaaaratattgtgaactattattattggtacattcatgcattttgtactttatttatatactcccagggagcaaggaatctcttctgtgcaatgtgccagattgc

SEQ ID NO: 479149 - DNA, 201 bp, Homo sapiens
gggggagccatctatgcagaggtgtaaattaacttggatttcaggctctatattctatggcagtaaaaaaaaaaaaaaaaaaagataaattaaggccaggygcagtggctcacgcttgtaatcccagcactttgggaggccaagacgggcggatcacttgaggccaggagttcgagaccagcctggccaacatggtgaaac

SEQ ID NO: 479150 - DNA, 201 bp, Homo sapiens
atggcgtgaacccgggaggcggagcttgcagtgagccaagatggcaccatccagcctgggcgacagagcgagactctgtctcaaaaaaaaaaaaaaaaaaagatattgtgaactattattattggtacattcatgcattttgtactttatttatatactcccagggagcaaggaatctcttctgtgcaatgtgccagattg

SEQ ID NO: 479151 - DNA, 201 bp, Homo sapiens
tcaagcaattctcctgcctcagcctcctgagtagctgggatcacaggcatgcgccaccatgcccagttaatttttgtatttttttttttttttttttttttagtagagatggggtttcaccatgttggccaggctgtttttgaactcctgacctcgtgatccgcccaccttggcctcccaaagtgctgggattataggcgt

SEQ ID NO: 479152 - DNA, 201 bp, Homo sapiens
tggtgcgatctcagctcactgcaagctccgcctcccgggttcatgccattctgctgcctcggcctcccgagtagctgggactacaggcgcccgccaccacrcctggctaattttttgtatttttagtagagacggtgtttcaccgtgttagccaggatggtctcaatctcctgacctcgtgatcctcccgcctcagcctcc

SEQ ID NO: 479153 - DNA, 201 bp, Homo sapiens
ctcccgagtagctgggactgcaggtgcatgccattgtgcctggctaattttaaaatttttgtagagatggggatctccctgcgttgccttggctgctctcrcactcctggcctcaagccatactgtgcctggccaacttttttttttttgagctggagtctcactctagcccaggctggagtgcagtggcatgatctcggc

SEQ ID NO: 479154 - DNA, 201 bp, Homo sapiens
cactttgggaggccagagtgggggggtcacttgaggtcaggagttcaagacagcctggccaacatgatgaaacctcatctctactaaaaatacaaaaaatwagccaggcttggtggtagacgcctgtaatcccatctactcaggaggctgaggcaggagaatcgcttgaacctgggaggcagaggttgcggtgagccgaga

SEQ ID NO: 479155 - DNA, 201 bp, Homo sapiens
gaatcttgctctgtcacccagtctggagtgcagtagcacaatcatagcttactgcagccttcaactcctgggcttaagggatcctcctgcctcagcctccygagtagctgggactgcaggtgcatgccattgtgcctggctaattttaaaatttttgtagagatggggatctccctgcgttgccttggctgctctcacact

SEQ ID NO: 479156 - DNA, 201 bp, Homo sapiens
tgggaggcagaggcgggacaattgcttaacgccaggagtttgagaccagcctgagcaatatgggaagactccatctctacaaaaaaaaaaactttgtgcayggcggctcatgcctgtaacctaacactttgggagaccaagacgagagaattgcctgaggccaggagtttaagaccagcctagtcaacatagtgagacccc

SEQ ID NO: 479157 - DNA, 201 bp, Homo sapiens
atgtttagggacagaatcttgctctgtcacccagtctggagtgcagtagcacaatcatagcttactgcagccttcaactcctgggcttaagggatcctccygcctcagcctcccgagtagctgggactgcaggtgcatgccattgtgcctggctaattttaaaatttttgtagagatggggatctccctgcgttgccttgg

SEQ ID NO: 479158 - DNA, 201 bp, Homo sapiens
tcagcaagccacaacagtttaaaacaaggatatcaggaaatttttgaatggtatctatgtctctgaaaaaggaactgttcagcaggatgatgaataagatytaagagttatccagctacagaaagaagacgccagatgactcctaagacctacttgtgatatttaaatgatgtaataaaagacctgttgatttggagaaaa

SEQ ID NO: 479159 - DNA, 201 bp, Homo sapiens
tccccccaacatgattggtaaagaggtaaaaataaataatctcttttcattttcagacctgtttaaaacgaattcgacttgatctccctattttacatgargattttgttagcaataatggtaagaatataggtttatctactttataacaattttgcttttagaaatagatctaggcagggtgtggtggctcaaccctgt

SEQ ID NO: 479160 - DNA, 201 bp, Homo sapiens
gtgagcctgagaggcggaggttgcagtgagcccagatagcgccactgcactccagcctgggtgacagagcgagactccgtctcaaaaaaaaaaaaaaaaaraaagaaagaaagaaaagaaatgaaggtgtatccctactttttatcctataataaattccaggtcctttgccgtgtgtactgcgagagtgaagaccattct

SEQ ID NO: 479161 - DNA, 201 bp, Homo sapiens
acggggtcagctgtgagaatgagactcctgtttagcatttttatttttatgtggcaggctgaagacttgaagatgctaatcagacacatggagcactgggsacataggctattccctaaactgcagtttgaggattttattgacagagttgaatacctgggaagtaaaaaggaagttcaggtaagtgttgagatgattata

SEQ ID NO: 479162 - DNA, 201 bp, Homo sapiens
ctcgtgatccgcccgcctcggcctcccaaagtgctgggattacaggcgtgagccactgcccggcctactatcttttaactttattaagtgtttttttttttgtttttttgagatgaagttttgcccttgtcacccaggctggagtgcaatggctcgaccttggctcactgcaacctccgccgcttgggttcaagcgattct

SEQ ID NO: 479163 - DNA, 201 bp, Homo sapiens
caagtactgctagagaagctagataagatcatgggaaatttttttttttattttggaatgagaaaaacatttgaagaaagacacaaactgtcaaaaccatwaaggcaaagattaataaaattaacctcacaaagatttaacatttctccatggagaaaaaacaccttgtacagagatataagtacacaaatggtaagctga

SEQ ID NO: 479164 - DNA, 201 bp, Homo sapiens
catttgaagccaggagttagggaccagagtggtcaacacctatagtcccagctatttagaaggctgaggcaggaggatcctttgagtccaaggagtttgargctggagtgagctatgatcataccactgtactctagcctgggtgacagagtgagtccccatctcttgaaaaaaacaaaaaaaaagtagttatttatgtat

SEQ ID NO: 479165 - DNA, 201 bp, Homo sapiens
cagtgtaagtacctaatgctactgaattgtaaacttaaaaatgatttaagctgggcacagtgtgaggggatcatacttctgtagtcccagctactctggargctaagataggaggattcctggtacccagaagttcaaggctagcctgggcaacatagcaagatcctgtctcttaaaaaaaattaaaacaatctaaatagt

SEQ ID NO: 479166 - DNA, 201 bp, Homo sapiens
ctcctgacctcatggtccgtctgcctctgcctcctgctgggattaccggcatgtcttagaagttaaggtaaacatttttcccagaaaaaaactgaccaaaagtgtcagttgttattgagaagttaagtaaggcagtactgaaaaacattctttcgagttatcaacctgaggataatttcccattcaggaaaccttacctag

SEQ ID NO: 479167 - DNA, 201 bp, Homo sapiens
catgcctgtaaactcagcactttgggaaggcgagtcaaaagggtcgcttgagcccaggagttcaagaccagcctggacaacatagggcgaccctgtctctrcaaaagatttaaaaattagccaggtgtaatggtacatgcctgtggtcccagctactcaggaggctgaggtaagaggatcagttgcacccagtagttggag

SEQ ID NO: 479168 - DNA, 201 bp, Homo sapiens
cagcattatttaaaacagaaaaaaagaaactggaatctgtctgtcaaaaggagagtaaattatgacatacaaataaatcatgacacatttatacaaagaartactatacagtacggtcattccaaagaatgaggcagacatatttatgctggtatagaaagatcttcaaaatgtatgatgtgaaacaaaataaatggagca

SEQ ID NO: 479169 - DNA, 201 bp, Homo sapiens
ccaggaggcagaggttgcagtgagctgagatcaacccattgcactccagcctgggcaacaagagcaaaactccatctcaaaaaaaaaaaaaaaaaaaaaaaggccaggcgcagtggctcacgcctgtaatcccagtactttgggaggctgaagtgggtggatcacaaggtcaggagatcgagaccatcctggccaacatgg

SEQ ID NO: 479170 - DNA, 201 bp, Homo sapiens
acggtgtttcactattttggccagactggtcttgaactcctggcctcaagtgatccacctgccttggcctcccaaagtgctgggattacagacgggagccwctgcatccggtggacaattagttattgacaatatcaatgactgacaactgtggttgtaactcagataaaacaacaaacaattagttaacaaaatctttac

SEQ ID NO: 479171 - DNA, 201 bp, Homo sapiens
accatttgagctacagtgatcaggcaactatgataataagaggatgtgggacctatacagcagagccattataaagtttatcggtgtttttataattcccycttgctcaggggcaggtcaaattatagagagctgagaatttgcatgaaaaggtttcatctccaacaatgaactatgcatggcatatagtcatgagttcgt

SEQ ID NO: 479172 - DNA, 201 bp, Homo sapiens
ggatcactctgacataaaacctaaacgcacttggtttttattagacctctttctagtagttttcagttttgtttttttagatggggcctcactgtattgcycaggctggagtgcagttgctgatctcggcccactgcaacctccgcctcctaggttcaagcgattctcctgtcccagcctcccgagtagctgggattacag

SEQ ID NO: 479173 - DNA, 201 bp, Homo sapiens
gtaaacacatttaaaaatttttttttatttttaatttttgtgggcacgtagtaggtgtatataaacagatttttttttttttttttgagacagagtgttgktctgtcgcccaggctggagtgcagtggcggcatcttggcttactgcaagctccgcctcctggattcacgccattctcctgccccagcctgccgagtggat

SEQ ID NO: 479174 - DNA, 201 bp, Homo sapiens
tcagatatgttaatgaatacacccagggcacacacggttgaagaggttaatactgatgaggatcaaaaggaggagtcaaatggattaaacgaagacattcyggacaatccatgtaatgatgctattgccaatactttaaatgaagaggaaacactgctggaccagtcttttaaaaatgtgcaacagcaacttgatgctaca

SEQ ID NO: 479175 - DNA, 201 bp, Homo sapiens
ccggcagagccaccgcgcccagcctcaatttctttctatttccttttttgagacggggtctggctctgttgcccaggctggagtgcagtggcacaatctcrgctcactgcatccccccacttccacattggagtgattctcctacaggcatgcaccaccacacccagctaacttgtattttcagtagagaaggggtttctc

SEQ ID NO: 479176 - DNA, 201 bp, Homo sapiens
ctccccaagtgctaggattacaggcatgagccactgtgcccggcagagccaccgcgcccagcctcaatttctttctatttccttttttgagacggggtctrgctctgttgcccaggctggagtgcagtggcacaatctcggctcactgcatccccccacttccacattggagtgattctcctacaggcatgcaccaccaca

SEQ ID NO: 479177 - DNA, 201 bp, Homo sapiens
cctcccgagcagctgagactactggcatgtgccaccagacctggctaatttttgtatttttagtcgagatggggtttccccatgttggccaggctggtctygaactccagacctcaagtgatctgccagcctcggcctcccaaagtgctgtgattacaggcgtgaaaccgtgcccagcctccatttctcttctttcaaacc

SEQ ID NO: 479178 - DNA, 201 bp, Homo sapiens
ttcaccatgttggccaggctggtctcgaactcctgacctcaggcaatccgcccgcctcggcctcccaaagtctgggattacaggcgtgagccaccacaccyggcctatttttacttttcagagacaaggtctcactatgttgcccaggctggtcttgaactcctggcctcaggagacccttttgcttcagattcccaaagt

SEQ ID NO: 479179 - DNA, 201 bp, Homo sapiens
taattagtatcttctctacttttcatgatgtgtgagtttgaaatgtggtctaactgattgaaacacatgaaatggctgcaggtagaacttgtctatatagyggagactattttggatgaatacaaataactttaattttttcccctagaggaaaagatgctagaaccacaggagaatggcgtgattgacctaccagattat

SEQ ID NO: 479180 - DNA, 201 bp, Homo sapiens
acacacggttgaagaggttaatactgatgaggatcaaaaggaggagtcaaatggattaaacgaagacattctggacaatccatgtaatgatgctattgccratactttaaatgaagaggaaacactgctggaccagtcttttaaaaatgtgcaacagcaacttgatgctacatccagaaatattactgaagctagataagt

SEQ ID NO: 479181 - DNA, 201 bp, Homo sapiens
tagcatctgaatccctagacccatctgatgaagaggcatcttcgagcccaaaggagtcacgctggcatatcaggaagatgtccttcctgggaagaagaagytccagccagttctgctgcaagtcaaccagcatgcagggggccttcctctaaagacaaggactccacatgcttttctttttctaataaaccagggtccatc

SEQ ID NO: 479182 - DNA, 201 bp, Homo sapiens
tccagaaaaccaacctgccctccccaaatatgtgctcaccagcagcaacaggctatctgagtctttccaagagcaattgccaagggcacaggagaggtcaytgtcacccaagcagaggccaccttctcctgagaagttgctgttgaccaaggagaggtcacattcttttcaggagaaatcactgttgcacagagaaagcca

SEQ ID NO: 479183 - DNA, 201 bp, Homo sapiens
ttgccatatttgctttaaatctatgagtgaaagtgtgtgtgtgtgtttgcttgctaaaccatatgaaagtaagttgcagacatcattatatcttatcccaragtacttcagcctgtatcttctaagaacgaagacattctaagaaagttaatttcataatatctaatatatagttcatgtcacattccacctaattccagt

SEQ ID NO: 479184 - DNA, 201 bp, Homo sapiens
atcctgacagccagtgtgcactcatgactgccttaattaacattcttctgctattatggagcctgtccagcaataaacagggtctaggaaggtacaagatkagcttccagttaaaatcccattttatattggaatgcatgagctacagatgacagcagagatcctgaggtttctagacatgttgattgtctcttttttcta

SEQ ID NO: 479185 - DNA, 201 bp, Homo sapiens
gaaggtgtcattcacaaaaactcaaggactgctattctccttcttccccttagtttactcctggtttttaccccaccctcaaccctctccagcataaaacytagtgagctaaaggctttgtctgcagaaggagatcaagaggctgggggtaaggccaagaaggtaggaggaaaatggcagacctgggctggagaagaacct

SEQ ID NO: 479186 - DNA, 201 bp, Homo sapiens
agtatggtatagtgtgtttttccttcatcatagtggaagcatttatgaagcaatctagagtgttaacattagttttctatttatctttaaaagataaatarcatattgctttgagaatggagatggaatgtgatttttaggcctttgaaaaatgtcttggtattttcatttaaacaaaaatcttaaatctttcaacaaatt

SEQ ID NO: 479187 - DNA, 201 bp, Homo sapiens
tttctaaaggaaacattaggccacattgctaaataggcaaggtagtcagttatcttcataaaatgaataccttaaaaaaaaaaaaagctgatatagttatytgtttctgtctttttacagagtactgtttagttctgaccgaggctcagggtttgctagttgaaggggctaagtttgcgcagagataatctgcctccttgt

SEQ ID NO: 479188 - DNA, 201 bp, Homo sapiens
aacttagtaactttaatttcttaagtgagagatgccacataaagtagcattgaatattattcatctttcgttttctttcctttttttttttttttttttttgaggtggagtttcgctctcgttgcccaggctggagttcaatggcgtgatctcagcccactgccccctccgcctcccaggttcaagcgattctcctgcctc

SEQ ID NO: 479189 - DNA, 201 bp, Homo sapiens
acaactagataatgtataaatcagcagtggaaatcagttttaatgtgtggatgtgtctgattattgttaaatgcctctttttttactttttttttttttaratgtataatgtttcataaaccctggcactggtcacaaagctcagctgtgaaaatgaaatttgtagtatttttaaacatgaatgtcaatttcaagtgtatt

SEQ ID NO: 479190 - DNA, 201 bp, Homo sapiens
ttttggttttgccctattatttctgttttggacagtaggatgggaagtgatgcctgaagccgaaacttgtgaccaagaaacagcaagcatgaggaccaaaagcaatgtgtggtggatgaagaagtagtagatcagaaagagcctggtttgcttttgagtttctcatacacttaccatatgatccagcagtcctatacctat

SEQ ID NO: 479191 - DNA, 201 bp, Homo sapiens
tcccccagctgagtgagatttttggcttttttttttttttttggacagggccttgctctcacccatactggagtgcagtggcacgatcatggctcactgcrtccttgaacctcccatgctcaagcaattctccaacttcagcctccccaagtcactgggaccacaggtgtgcgccaccatgcccagctatttttttttttt

SEQ ID NO: 479192 - DNA, 201 bp, Homo sapiens
tcacagaattggaactacagcccagatccaagacatcacaagtagctatttctattatatgccatgtagtcttaccggttactggttaaatgtatagttgraataccacaagccagaaaaaaatagttacaaaagacatcagaataaatgtctaattataatacaaagatgatagtcattagcatttaatataattacatg

SEQ ID NO: 479193 - DNA, 201 bp, Homo sapiens
aggcattttgcagcttgtatctttgcaggcctagccagaatggactgttttaacagtttgggttgcttaatctgctgctcactctctggtggtaactaaarggtaattgtagcccatatactggaaatagcatttcattaaaattttatcactttcaggaaggtgacagcattgagtgaggggtggaaattcactgtttag

SEQ ID NO: 479194 - DNA, 201 bp, Homo sapiens
tttctgaataagaaaaagaagaggcaaccatggcccttatgtgggtttatcctttttgagcaatgttttagccacaagtaaggaatcttgaaagtcttttrtccagcaagcagtcttaaaaatgtttttcctaactccttttgcaggtgactaagtacaaaaaaatagttttctcattgtattcaaaatagtgagtaggtt

SEQ ID NO: 479195 - DNA, 201 bp, Homo sapiens
tttggatttttttagccttgtgagatctgttcattggttgaaaaccaagattgagaactcatttatttgtgtgtgtgtgtgtgtgtgtgtgtgtgtgtgtgttttattcactaagtatttgagaacttaccatgctaggccctgcaaataaaatggtgaatgtgacaacagtttttaccttcacagagctaatacgtgagt

SEQ ID NO: 479196 - DNA, 201 bp, Homo sapiens; identical to SEQ ID NO: 356886

SEQ ID NO: 479197 - DNA, 201 bp, Homo sapiens
atctaggcaaaggaagtacacatcggtttagggttttgatctaaaatactatccttggtttaaatatacaagtaattagtaagcagagcctttccagagcygaagggtttctgaagggattacttggttttgaacctctttctgctttaataactgcaaacataatgtgtgatctgtcttcccttttagagcaaagccgga

SEQ ID NO: 479198 - DNA, 201 bp, Homo sapiens
gtagctttgttttattagttggaagccagaggagttaatggttgaaggaaattgaaggaaatctatgctattcttttcttttctttttctttctttctttmtttttttttttttggagacagggtctcacagtgttgcccaggctggagtgcagtgatgtgatcttggctcactgcaacctccgcctcctgggctcaagca

SEQ ID NO: 479199 - DNA, 201 bp, Homo sapiens
aggcaaacgtgtaagaagagatgcgaagttcagtgcagtggctgaactacatgatatgtactaagcactcaggaggaattaaagttaaggcttccaaggaytagtgaggatggggaggtgagaggagctgagtatccagcatatattacaggttcagtaagtgaatgttgttgctctggccctcatcatcattccaagttc

SEQ ID NO: 479200 - DNA, 201 bp, Homo sapiens
tgaacccgggaggcagaggttgcagtgagctgagatcgcaccactgcactccagcctgggccacagagcaagactccgtctcaaaaaaaaaaaaaaaaaaatagccatcagaaactgctacaaacacctctgtgcacacaagccagaaaacctagaagggatacataaattcctggacacatacacctgcccaagactgaa

SEQ ID NO: 479201 - DNA, 201 bp, Homo sapiens
agatcatgaggtcaggagattgagaccatcctggctaacacagtgaaatcctgtctctactaaaaatacaaaaaattagccgggctatttttatagaaccrcttgaacccaggaagctaaggttgcagtgagccaagattgcgccactgcactccagcctgggcaacagagcaagactgtctcaaaacaaaacaaaacaat

SEQ ID NO: 479202 - DNA, 201 bp, Homo sapiens
cttcctttgtgataataactttcaagattctcttgtctagctatcttgaaatatacagtgcagtaagttctcacttaacttcatcaataggttcttggacrctgtgattttaagtgaaaccatgtataaagaaactaattttacagtggggtaattgataaaaacaagagttaaggccaggcacagtggctcatgcctgta

SEQ ID NO: 479203 - DNA, 201 bp, Homo sapiens
ttcaactattttctttttcttttttttttttttttgagatggagtctcgctctgtcacccaggctggagtgcactggtgcgatcttggctcactgcaagctctgcctcccgggttcacaccattctcctgcctcagcctctcaagtagctgggactacaggtgcccgccactaccaccagctaatttttttgtatttttta

SEQ ID NO: 479204 - DNA, 201 bp, Homo sapiens
aggcagaggaaattagatttgatgtgctcataagcagggatccatagaagatttttaatttttattttttaatcatttacttattttccatgtatccaagkcacgaaccagccatgggcacagaccaagagccaagatgggataaacaagggttgctttatccctggatgacatgagatggacatcaccacattaaaggtt

SEQ ID NO: 479205 - DNA, 201 bp, Homo sapiens
caaagtaaatagttctctggaaaagatgatattataaatgtaagtttaggtcaggcgcagtagctcacgcttgttaattccagcactttgggaggctgagrcaggcggatcactttgagcccaggagttggagaccagcctgggcaacatggcaaaacattgtctctaaaaaaaagtacaaaatttagccaggtgtagtgg

SEQ ID NO: 479206 - DNA, 201 bp, Homo sapiens; identical to SEQ ID NO: 356891

SEQ ID NO: 479207 - DNA, 201 bp, Homo sapiens
gctcttctagaagagaataagctggttcctcagccacatccttgtgggccttttggtgatttactagccgtagcaacacatcaagaattagtactcacagkcttgatggcattctgggaagctggctggggcaaaaagggtaaattcagagaagtcacactacatctgcaatttgctctattttaagactttgcaccttgg

SEQ ID NO: 479208 - DNA, 201 bp, Homo sapiens
tcattagcacattatttccagagcagatgagagattataaaactattaataccttagtttccaatataccattgatcaaagaatccagcacatatcttccytgcctgagtctcccacttcctttccattccctcataattatttatagaaagtacctgtttaccgcatgtgtaccttatgttgcacttaaggatctgccct

SEQ ID NO: 479209 - DNA, 201 bp, Homo sapiens
ggcttgccaaggttgttgtccttcatagttaggtaatttagtttttaaaaaagaatgaaagactaattattaggcaataataggatcaaattaccaaaacytttgaggtggttctatttcagttctcaacctgatgtgcattttaaaatatctctacttagagtagttagggttcataatgtgttgtagattgtttttaga

SEQ ID NO: 479210 - DNA, 201 bp, Homo sapiens
aagaagtaaattttccaggaggtttaagtggacttaaattaagtatttcttataattgaaatgtgtatatttctttcaggtaccaggtgtcactggatttytatgagcaaatttgttatgtttcacgttccagatagaaatcagccaatttaaaaatagtggtgaagttattatagcctatatttaatgagcacacatttg

SEQ ID NO: 479211 - DNA, 201 bp, Homo sapiens
gaacaaattgttgacaacagctgctacacattttaccagaaaggccagcagggtgtactcctcaggaaaacttggaaaatatttgtttatcctatgtaggytaagaactcacctgaactaaaatgaaaatccaggtttaagattgcttttcaagtgtattattgaataaatgcctattcagacaatatctattcattgcaa

SEQ ID NO: 479212 - DNA, 201 bp, Homo sapiens
cctatttctgatttcttgctaagggtacatgtttaatattattttctttaatgataattgcccatgtattataataataattgcctgatccctcagaaacrttacagagcatttagtagttgtgctagaaactattactattgatggggctgagaagagaattaatttaatttgggagaaaaattattctattttctttaa

SEQ ID NO: 479213 - DNA, 201 bp, Homo sapiens
acgtgcccagcactttgggtggccaaggtgttaccagatggaaagtcttgactgtgagttgtccaagttcttggtgccttgagcaaagaattgaacaaaaygcacaaagcaatggaagacgaaggcatagatttgttgaagtgaaagtacactccacagagtgggagcgggcttgagcgggtggctcaagagccctgattg

SEQ ID NO: 479214 - DNA, 201 bp, Homo sapiens; identical to SEQ ID NO: 356897

SEQ ID NO: 479215 - DNA, 201 bp, Homo sapiens
gggtttcaactatacagattttgatcaccctctctagtgtttgctgctgcttattacacttgttgaagactatctagaagcttgagctggcaaaaactgartaggaagcgcttccatgggtactgctgtactttcctgaatattttcaattctgtctcaggctgagaatcttgattctaaaagtaatagaatgctgtcctg

SEQ ID NO: 479216 - DNA, 201 bp, Homo sapiens
gtttggatttttttagccttgtgagatctgttcattggttgaaaaccaagattgagaactcatttatttgtgtgtgtgtgtgtgtgtgtgtgtgtgtgtgtgttttattcactaagtatttgagaacttaccatgctaggccctgcaaataaaatggtgaatgtgacaacagtttttaccttcacagagctaatacgtgag

SEQ ID NO: 479217 - DNA, 201 bp, Homo sapiens
aacaaccttttgtgccaaagccacacaaagaccacagtaacataattagtgtttttactcactagtgttttgtctgtcattgttcattactgtccagtgawttataaaatatttggatttcctgacaatgaatacttaaacaaaaagcccattgtgacttaggtttgttcagtgaattaatcattgcttataaatgtatga

SEQ ID NO: 479218 - DNA, 201 bp, Homo sapiens
agaaagcattctatattaaaggcttgtgtgtttccgtagcttctatggtttgcagcctactgagcttatgatactatgtgaataactaatccagatggttraactattggaggatagaaaaccaaaacccatttcagaagctatgcattttgctcacctttggataggattcattctaattggtagtgactttctgaattt

SEQ ID NO: 479219 - DNA, 201 bp, Homo sapiens
ccttctgtcttggccttccaaagtgctgggattataggtatgagccaccgtgcccaggctaaacttttttttttttaaacagttatttaaatcttcttttyttgcagtacaagatacagtacatttcacatatgtcccttttcctgttggaaaaggtgaatcaagtggagggaagtaaattgatattgaggctgagaataa

SEQ ID NO: 479220 - DNA, 201 bp, Homo sapiens
ctctcccactatacatgggacttatgggagctatgattcaagatgagatttgggtggggacacagccaaaccatatttcctcccacacactgtgtgctccrattatattctcaatttctttttccactggtttgtttttggcattagaaatgctactaatttttgtatgttaattttgtatcctgtaactttactgaattc

SEQ ID NO: 479221 - DNA, 201 bp, Homo sapiens
taattctatgtcatattttgacctttttttggtctttactcgtatttctcttactgtatacctgtatgtttctcttccatccgtattctcacagccatttytctggcattgagtagagcttttagtggctgccgttagagaatgcttgtttaaggaggtcaaagacaagggaagtctcagtctaaaataaggactagaagt

SEQ ID NO: 479222 - DNA, 201 bp, Homo sapiens
attcaggagcatgttgttgaatttccatgtatttatacagtttctaaagttcctcttgttattgatctctggttttatttccttatggtcagaaaagatayttgttataccatttattttaaattttttgaaatttgttttgaggcctaacacatggcctgtcctggataatattccatatgctgatgaaaagtatatact

SEQ ID NO: 479223 - DNA, 201 bp, Homo sapiens
tgtatttctgttagccagtgatgaaaaacaattgtctttctttttggtcatagatacattactagaagaaagcattctatattaaaggcttgtgtgtttcygtagcttctatggtttgcagcctactgagcttatgatactatgtgaataactaatccagatggttaaactattggaggatagaaaaccaaaacccatttc

SEQ ID NO: 479224 - DNA, 201 bp, Homo sapiens
ggtcttgaactcttggccccaggtgatcctctcaccttggctgcccaaagtgctgggatcacaggcatgaaccactgtgtccagccttaacaagaccccarttgaaacttcacaaatgcagtagtcaaaacaaaatctcattgggcagagaaagccagttaacttgttaaatacctagtaggcggttcatttttaaaattg

SEQ ID NO: 479225 - DNA, 201 bp, Homo sapiens
agccacccaagtagctgggattacatgcatgcaccactgcacctgactaattttataggtgtgagctaccaaaccccgtggctttttttttttttttttttcactttttttaaaaaagactggctctcactatgttgtccaggctggaatgtagtagctattcacaggcgtggtcatcatgcatgtcagcttcgaattcgt

SEQ ID NO: 479226 - DNA, 201 bp, Homo sapiens
acttcctccttttcaatttggatgccctttatgtctttttcttgcctgtttgctctggatagtacttctagtactatgttgaattagagtggtgagagacrgcatcctgtcttgttccaattttttgaggagaaattcagcttttccctgtttaaaatgatgttagctgtatttgtcctatatgacctttgttacattgag

SEQ ID NO: 479227 - DNA, 201 bp, Homo sapiens
taaccatggttcacaaaccagttctactgtacaattttagatttgacaactagattagcaaaaattaatatgaaaaagatgactgtaagtttagaatgagrcaagaatggtcccaggcttcccaaaagtttatggtaactttgagtaacttaatatgtgaagtccagatcaacaaaagtagttaagttttagacttataag

SEQ ID NO: 479228 - DNA, 201 bp, Homo sapiens
caaattaaagttttaatcggcctgggaattggctgtttgttactgcctcatctgttcctctcttacttattactatcctttttataatttcatgaaatatrttttaaaatggctttggtgggaacattaataagaaacataaagtaacctttagaaggttaatgcaaacactatatatatgagagaaatgcctatttttga

SEQ ID NO: 479229 - DNA, 201 bp, Homo sapiens
agaatggtggttacagagcctggagggttgagaaagtggtgagaccatggttaaagggaacaaaatctcagctgagggatatgttttttttttttttttttaaattctgtggtacagtgtggtgaagatagtttttgtacattttaaaattgctgagagaataaatttcaaatattcttaccacaaaaatgttaagtattt

SEQ ID NO: 479230 - DNA, 201 bp, Homo sapiens
aggtgcgtccgtcacccctttctttgactcggaaagggaactccctgaccccttgcgcttcccaggtgaggcaatgcctcgccctgcttcggctcgcgcayggtgcgcgcacccactggcctgcgcccactgtctggcactccctagtgagatgaacccggtacctcagatggaaatgcagaaatcacccgtcttctgcgt

SEQ ID NO: 479231 - DNA, 201 bp, Homo sapiens
ggcctccttgaggtgtggtgggctccacccagttcgagcttcccggctgctttgtttacctaagcaagcctgggcaatggcgggcgcccctcccccagccycgctgcctccttgcagtttgatctcagactgctgtgctagcaatcagcgagattccgtgggcgtaggaccctccgagccaggtgtgggatatagtctcgt

SEQ ID NO: 479232 - DNA, 201 bp, Homo sapiens
attttcttcagtacccaactcttaatcattaccttggccttttggaccccagtttcacattgatgacctgatctagaaattcataccaattctctaattaygtagagatagaacaaaaatgacagcactgggtaattgtgaatgtggttctggttggaggtcttccacattgtctctgcttttccttgtgtgatctctaac

SEQ ID NO: 479233 - DNA, 201 bp, Homo sapiens
gacttccacaatggttgaactagtttacagtcccaccaacagtgtaaaagtgttcctatttctccacatcctctccagcacctgttgtttcctgacttttyaatgatattcattctaactggtgtgagatggtatctcattgtggttttgatttgcatttctctgatggccagtgatgatgagcattttttcatgtgtttt

SEQ ID NO: 479234 - DNA, 201 bp, Homo sapiens
ttttttttttttttttttttttttttgagatggtgtctcactgtgttgcccaggctggtcttgaactcctggattcaagtaatcctcccacctcagcctcscaaagtgctgggattacaggcatgagccactgtgcccagccattgtttcaagatttagacctccttttagcattcctttttttttttttttttttttttt

SEQ ID NO: 479235 - DNA, 201 bp, Homo sapiens
gctcaagtgatcctctggcctcggccccccaaagtgctgggattacaggcatgagccaacatacatgaccttaaagtggtttcacagaagttctacctagyaacttcattagccctttgctgcaaggtaattaggctgcccagaataaaactggactttactgagggagtggtgattctgggaaagccacctgcagtctct

SEQ ID NO: 479236 - DNA, 201 bp, Homo sapiens
cttctcaattggactccttccagaaaggtggccgtgcctctaagcatgtttttcccagtatgccctaggcctccccccatggtgttttcatatgaggtacyactgtgaaggatctggttcctcattcactgtttgacaagtctttcatgtgtggagttactcttctcatgcccaattttcatttgagtttagtggcttaac

SEQ ID NO: 479237 - DNA, 201 bp, Homo sapiens
ttttttttgagagacagggtcttgctctgttacccgccctggagtgcagtggcatgatcatagctcacgcagcctccaactcccaggctcaagcgatcctyctacttcagcctccttaatagctagtgcataagaacacgcccagctaatttttttatttttaaatgttttgtagagatgatgttttgcaggctggtcttg

SEQ ID NO: 479238 - DNA, 201 bp, Homo sapiens
ggagtgaatagtctaatttcttataagttttggcgaaattaaaaggaagagcttaaaattaaatcatcctcagtttctttaacttgattttagcactgctmtgtatttctgttagccagtgatgaaaaacaattgtctttctttttggtcatagatacattactagaagaaagcattctatattaaaggcttgtgtgtttc

SEQ ID NO: 479239 - DNA, 201 bp, Homo sapiens
tgccatggtgctggagctccttggccctagcttggaggacttgtttgacctctgtgaccgaacatttactttgaagacggtgttaatgatagccatccagytggtaagttggaattgctcttctagaagagaataagctggttcctcagccacatccttgtgggccttttggtgatttactagccgtagcaacacatcaag

SEQ ID NO: 479240 - DNA, 201 bp, Homo sapiens
aatgacagatgttggtacaaaaaccagtggcaacccaacagaaggggaaatttgttggggtgtttcttagaagaatttttatcgttgaccaacataatttwaaaaaaaaagacttataaggagaaagatttttggttttgccctattatttctgttttggacagtaggatgggaagtgatgcctgaagccgaaacttgtga

SEQ ID NO: 479241 - DNA, 201 bp, Homo sapiens
acaaaacaaaacaaattcaacgaactgaaataagcttataataatttaaaattcaggcaagtattgcttccataaagcaatcacctcaagaaagcacttaytctaaaagtgctactcaaagcatttttggaaaaaaaaaaaaggtatatttcctttgaatagtctcaggatgcctgatatcctttgagagtagatgcgttt

SEQ ID NO: 479242 - DNA, 201 bp, Homo sapiens
taatttctactacatttcttatttgttagtgttagaaaaaaaatcaagaccaacaaatactgcgaatttgagtgaaacaaccattgtgtccaaaaacataytgaatctcccatgtttaggccctcttttaaagtaactttctctctttactctctacaggctgacacattaaaagagagatatcaaaaaattggtgacacc

SEQ ID NO: 479243 - DNA, 201 bp, Homo sapiens
gttaaaactcctatatttgcatttaggattatctataatcttattctaaactagcctttcttttttatcacccaagaactttctcacaagaactttctacrtatatcaagtcaagttgttcactttagcatctcttacctactgaatgtcagatactatgtttgtttctagggataaaaagatgaattaaacgttactgtc

SEQ ID NO: 479244 - DNA, 201 bp, Homo sapiens
gctaatttttgtatttttggtagagacagaatttccccatgttggccaggctggtcttgaactcctgacctcaagtgatccgcctgtctcagcctcccaamgtgctgggattacaggcgtgagccactgtgcccggccccatatttttatatggcaaaattcaacaggagcagaaatagctgtacctgttaggtgggacac

SEQ ID NO: 479245 - DNA, 201 bp, Homo sapiens
gggaggattgcctgaatctgggaggcagaagttgcagtgagccgagatcatgccactgcatactctagcctgggtgacagaatgaggctccatcccccccmaaaaaaaccatgatggattggacaagactgagcaacaaagggagagctcatctctacagaaagttaaaaaattagctaggatggccaggcgtggtggctc

SEQ ID NO: 479246 - DNA, 201 bp, Homo sapiens
ccattctcttagaatgtgatagaattttttttaaaattttatttatttatttattttgagatggagtcttgctctgtcgcccagggtggtgtgcagtggcrcgatctcgcgtcactgcaacctccacctcccgggttcgagcaactctcctgcctcagcctcccgagtagctgggactgcaggcgcacgccaccacacctg

SEQ ID NO: 479247 - DNA, 201 bp, Homo sapiens
gttttattataccctgactatagcaataatcagctatagttataacccagggagcccacaatggacttgtctttcattgaacttaatatgaattcttgctmacagtagcctctcagtatatatttgttaattgattggagtgtttttggcataagatttaagactggcaactgagttcacagggtgtatacataacttgag

SEQ ID NO: 479248 - DNA, 201 bp, Homo sapiens
tgatttcactttcttgtattaacatttttacaagaaaatacaaaaacatttatttcatagatgcacatgtgcaagtatataggttaagaatagtatataaacacacacacacacacacacacacacacacacacacacacacatgtccaatggagtacacccacaaatatattttctcaccagtaagtatatactcttggc

SEQ ID NO: 479249 - DNA, 201 bp, Homo sapiens
tgttgaccaagatggtcttgatctcctgacctcgtgatccatacaccttggcctcccaaagtgctgggattacaggcgtgagccaccacacccagccgagktagtctttttggaaagggaaaggactttactcctctgcccctacccacctccaatacacaacacacttttacctgtttttattttgggccaggcacagtg

SEQ ID NO: 479250 - DNA, 201 bp, Homo sapiens
ggctgagacaggagaatcccttgaacccgggaggtggaagttacagtgagccgaggtcgcgccactgccctccagcctgggcgacagagtgagattctgtyttaaaaaaaaaaaaaaaaaaaaaaaaaaaaaaaaaaaaaaaatttacaaacatgcccaaaaatataggcttaaggatttttttttgtagtattgcatgcc

SEQ ID NO: 479251 - DNA, 201 bp, Homo sapiens
ctgtctgtgtgaaagcacttagattctccagagatacattatctccaaatcaatcaatatgaaggctcactttgtctttaatgggatccatctggttaatrctgtgtttcttgagtttcatagattatgaaatcataaagctaaaagaaaatatggagatggtctagttagaccctttcattttacagctgagactactta

SEQ ID NO: 479252 - DNA, 201 bp, Homo sapiens
tagagacagggttttgccacgttgtccaggctggtcttgaactcctggcctcaagtgatccacctgcctcagcctcccaaagtgctgggactacaggcatragccaccatgcctggccaatattttgtagttttgagcatagatttttgtacaggttttgtaatatagcttcctaagtttcttgttgctttttttagatag

SEQ ID NO: 479253 - DNA, 201 bp, Homo sapiens
gtcaaggcagcccagttttgtgaaacgaggtttgagataggaaagcaaccggataatattgaaaaaaaaatgcatacaataggactttcagtgtcttctcraaattgatcgtaggtagcatgaaattcagttatcagtagtttcttaaaattcaaaataataaagtagaatatggcccatttattgaaatgagcaaaatat

SEQ ID NO: 479254 - DNA, 201 bp, Homo sapiens
cccagcagctattgtaatctagtgactcttctgatttggctctcttataaaggagaagctaatcctcaaattaaaaaatgacaagattcctccccccccccttttttttttttttaaagagacggactcttgctctgattctgaggctagagtgtagtggtgcaatcgtagcttgctgcagcctcaaattctttggctcta

SEQ ID NO: 479255 - DNA, 201 bp, Homo sapiens
acctttgaattagaagataaattattaccattaatcatacacagtcaaggcagcccagttttgtgaaacgaggtttgagataggaaagcaaccggataatwttgaaaaaaaaatgcatacaataggactttcagtgtcttctcaaaattgatcgtaggtagcatgaaattcagttatcagtagtttcttaaaattcaaaat

SEQ ID NO: 479256 - DNA, 201 bp, Homo sapiens
gcaagctccgcctcccaggttcacaccattctcctgcctaagcctcccgactagctgggactacaggcgcctgccaccacgcctgactaatttttttttttaatatgtgtatttttagtagagacgaggtttcaccatgttagccaggatggcctcgatctcctgaccttgtgatccacctgcctcggcctcccaaagtgc

SEQ ID NO: 479257 - DNA, 201 bp, Homo sapiens
aggtgatccacccgccttggcctcccaaagtgccaggattataggcatgagccactgtgcccggccctaatttttaaattttttgtagacatggggtctcygtatgttgcccaggctcatttcaaacttctaggctcaagtagtccttctaccttggcctcccaaagtgctgggattacgtggatgagccaccatgcccag

SEQ ID NO: 479258 - DNA, 201 bp, Homo sapiens
gtggctcgatcttggctgactgcaagctccgcctcccaggttcacaccattctcctgcctaagcctcccgactagctgggactacaggcgcctgccaccaygcctgactaatttttttttttaatatgtgtatttttagtagagacgaggtttcaccatgttagccaggatggcctcgatctcctgaccttgtgatccacc

SEQ ID NO: 479259 - DNA, 201 bp, Homo sapiens
gtgtaagggtattactttgctttttagtcctcatattctaattcctttcactgtgtgtggtatgtaatgggtactcaagaaaggctgaattgtccaggtcrgaagtagcagggcctttggtcttagctctgaaaatggaagtgagatggagagaggacagggtaaattagaaattttagacatagactttaggcaggattt

SEQ ID NO: 479260 - DNA, 201 bp, Homo sapiens
tctcggctcgctgcagccttcatctcctgggttcaagtgattctcgtgccttgcctcagcctctggagtggctggggttacaggcgtgcaccaccacggcyggctaatttttgtatttttagtggagatggggtttcgccatgttggtcaggctggtctcaaactcctgagatcaggtgatctgcccaccttggcttccca

SEQ ID NO: 479261 - DNA, 201 bp, Homo sapiens
ttgaaactaggtagagtccatgactgggtatctctagataggggtgctgtttaggtaattaacatttccttttgtgatacagaccaaagtaggttttatcrcttttattttgtcagtaaagaaaacatcagtgtcaaattgtctgtataaataacccctttgtggcccaatgcttccccacaactgctatggaaagcattc

SEQ ID NO: 479262 - DNA, 201 bp, Homo sapiens
gcatatgccactcttttgattaccaaggtgatgttgcagcattgtaaataaacaaccttttgtgccaaagccacacaaagaccacagtaacataattagtrtttttactcactagtgttttgtctgtcattgttcattactgtccagtgaattataaaatatttggatttcctgacaatgaatacttaaacaaaaagccca

SEQ ID NO: 479263 - DNA, 201 bp, Homo sapiens
tcaggcaatccacccgcctcagcctcccaaagtgctaggattacaggcgtgagccaccgcgcctggctactgggtacttaatattaagtagactcattcartatttgtccgttgtaactggcttatttcactgagcatgatgtcctcaaggtttgcccgtgttgtagcatgtgtcagaatttcctttttaaggttgaataa

SEQ ID NO: 479264 - DNA, 201 bp, Homo sapiens
aggtttaagtggacttaaattaagtatttcttataattgaaatgtgtatatttctttcaggtaccaggtgtcactggatttttatgagcaaatttgttatrtttcacgttccagatagaaatcagccaatttaaaaatagtggtgaagttattatagcctatatttaatgagcacacatttggctgcattaaaatgaatct

SEQ ID NO: 479265 - DNA, 201 bp, Homo sapiens
cagcctgggtgacagaatgagactctgtgtccaaaaaaaaaaaaaaatatatatatatacacacacacacacacacacacacacacacacacacacacacacgcacatacatgcatatatacttttacccctggactgggtgtggtgactcacgcctacaatcccggcactttgggaggccgaggcgggtggattacctga

SEQ ID NO: 479266 - DNA, 201 bp, Homo sapiens
atagatctttagtaattttgtgcatgatatattatggccatttctctttatattataaaactgtcatagaaatgctttaattaggctgggtgcgatggctsgtgcctgtaatcccagccctttgggaggttgaagcaggaggatcgcttgaatccaagagtttgaaaccagcctgggcaaacatagcacaacctagtctct

SEQ ID NO: 479267 - DNA, 201 bp, Homo sapiens
ccagcctgggtgacagaatgagactctgtgtccaaaaaaaaaaaaaaatatatatatatacacacacacacacacacacacacacacacacacacacacacacgcacatacatgcatatatacttttacccctggactgggtgtggtgactcacgcctacaatcccggcactttgggaggccgaggcgggtggattacctg

SEQ ID NO: 479268 - DNA, 201 bp, Homo sapiens
tccagcctgggtgacagaatgagactctgtgtccaaaaaaaaaaaaaaatatatatatatacacacacacacacacacacacacacacacacacacacacacacgcacatacatgcatatatacttttacccctggactgggtgtggtgactcacgcctacaatcccggcactttgggaggccgaggcgggtggattacct

SEQ ID NO: 479269 - DNA, 201 bp, Homo sapiens
gttttcattttttgacaactacaaatgaagctgctgtaaacgtttaggtggtggtttttgtgtggacttaagttttcatttcatttgggtcaataccaagmaatgtgctgggtcataggtaagagtatgtttagttacataagaaactgccaaactttcttccaaaatagccgtaccattttgcattctcaccagcagtga

SEQ ID NO: 479270 - DNA, 201 bp, Homo sapiens
gtgccactgcactccagcctgggtgacagaatgagactctgtgtccaaaaaaaaaaaaaaatatatatatatacacacacacacacacacacacacacacrcacacacacacacacgcacatacatgcatatatacttttacccctggactgggtgtggtgactcacgcctacaatcccggcactttgggaggccgaggcg

SEQ ID NO: 479271 - DNA, 201 bp, Homo sapiens
ctcagaatggtggcaagaattatgatatctggagtttggatttttttagccttgtgagatctgttcattggttgaaaaccaagattgagaactcatttatktgtgtgtgtgtgtgtgtgtgtgtgtgtgtgtgtgttttattcactaagtatttgagaacttaccatgctaggccctgcaaataaaatggtgaatgtgaca

SEQ ID NO: 479272 - DNA, 201 bp, Homo sapiens
cgggcagatcatgaggtcaggaaatcgagaccatcctagctaacacagggaaaccgcgtctctactaaaaatataaaaaaattagcaacctggtggcgcgygtccgtagtcccagctactcgggaggctgaggcaggagaatgacgtgaactcgggaggcggagcttgcagtgagccgagatcgtgccactgcactccagc

SEQ ID NO: 479273 - DNA, 201 bp, Homo sapiens
tagagacagggtatcaccatgttggccaggctggttttgaactcctgacctcaggtgatctgcccacctcggcctcccaaagtactgggattataggcatsagccactgctcctggcctcatctttcataattatagattgaacaatgcttatgtcccatgcatagattagaaaattgacacagcacctttagtgtcagtt

SEQ ID NO: 479274 - DNA, 201 bp, Homo sapiens
aaaacaaacaaaacaccccagttaacctaaggtacacatctttgggatgtgggaagaaactggagtacccagaagaaacccacacagacatgaggagaacrtgcaaactctacacagatggtagttctggctgggaattgattttttttctcatcagtgttataacatgaaatgatgttatttaaggtccttttgttagct

SEQ ID NO: 479275 - DNA, 201 bp, Homo sapiens
gttgattcagcaattcccataggatgtattacatgctctaatttattatattattatttatctgtctttgatctttgcccattgtactcttaaaaagatgktgggatgttgattgcgatttttaaacaactagataatgtataaatcagcagtggaaatcagttttaatgtgtggatgtgtctgattattgttaaatgcct

SEQ ID NO: 479276 - DNA, 201 bp, Homo sapiens
ctcgaccatctggctcctcatcgtcctctggggttcttatggtgggacccaacttcagggttggcaagaagataggatgtgggaacttcggagagctcagrttaggtaagcacttggttatgtcagtgacttctactaacaacaatacctatgataagctttggtgtgtttcaagacaagccgtttatagttttacaagaa

SEQ ID NO: 479277 - DNA, 201 bp, Homo sapiens
ggatcatggaccatcctagtagggaaaaggatgaaagacaacggacaactaaacccatggcacaaaggagtgcacactgctctcgaccatctggctcctcrtcgtcctctggggttcttatggtgggacccaacttcagggttggcaagaagataggatgtgggaacttcggagagctcagattaggtaagcacttggtta

SEQ ID NO: 479278 - DNA, 201 bp, Homo sapiens
tttttacctaggttacaagatgttcacctaagattgagacctagtgactacatttcctacgggaacaaataaatggtttttcatctcccggagatacattrcaaacaaatatggtgctaaaagaactccttacctttctctgactacaatttatttggacatacttttgtattgaagagaggtatacatactgaagctact

SEQ ID NO: 479279 - DNA, 201 bp, Homo sapiens
tttttatagaatacaacttttatagctgtgaacatttgtaagatttatagtcctttctggttttcatgcagagcagcaatatcacatcctaacccctgcarctgtttatatcagcagcaattaaaatttgatttactaatccctcattgctgcctctccaactactcatttttcatttttgtagagccttaggactgttac

SEQ ID NO: 479280 - DNA, 201 bp, Homo sapiens
taaaagagagatatcaaaaaattggtgacaccaaaaggaatactcccattgaagctctctgtgagaactttccaggtgggatgctaaaaagacattccagkgtgactgagctttgaaactaggtagagtccatgactgggtatctctagataggggtgctgtttaggtaattaacatttccttttgtgatacagaccaaag

SEQ ID NO: 479281 - DNA, 201 bp, Homo sapiens
gtgctgtttaggtaattaacatttccttttgtgatacagaccaaagtaggttttatcacttttattttgtcagtaaagaaaacatcagtgtcaaattgtcygtataaataacccctttgtggcccaatgcttccccacaactgctatggaaagcattcagctaatgagcagggcctttcatctctttcctaacagaggaga

SEQ ID NO: 479282 - DNA, 201 bp, Homo sapiens
tactcagaatggtggcaagaattatgatatctggagtttggatttttttagccttgtgagatctgttcattggttgaaaaccaagattgagaactcatttrtttgtgtgtgtgtgtgtgtgtgtgtgtgtgtgtgtgttttattcactaagtatttgagaacttaccatgctaggccctgcaaataaaatggtgaatgtga

SEQ ID NO: 479283 - DNA, 201 bp, Homo sapiens
gtgctaggctctctctggatgtgccctgtaagctcattctcagtgtcgggctagtgcttagctgcagggctttatctccaccgtgctcaaagtcctcaggyagggaaagggtaaggaggccttgggtgggggcagagggagaaggtatacaggaaggaggactgtcccctcccctgctgctgaccaaaggtatgctttata

SEQ ID NO: 479284 - DNA, 201 bp, Homo sapiens
ttcctcaggcctggggatgaaccccacctcatggcacaaagagtactatgtacagtgtctgccactggggagccccagtctgaggggggacatggcctctrcctgccttgagatgtcccaatagaaccgtatcagtgaacatacagattagatggagagaattctgacattctgcaccaccaggagagtgcattctgtcgt

SEQ ID NO: 479285 - DNA, 201 bp, Homo sapiens
agtccaacatcttcgtggctgaaagtcagctgccaaaggagcatgttttatgagtgtgacgggggtcggggtctgaggctggctagggagccgtgggagtsagctgctcaccccagtcagacccctgttgggtttcataggagctggctgctgaatgtaagagtgcaggctaccccgggactttgatcccctacagatgtg

SEQ ID NO: 479286 - DNA, 201 bp, Homo sapiens
ctttgaccaaagaggacagacttaggggatgggcagtccaacatcttcgtggctgaaagtcagctgccaaaggagcatgttttatgagtgtgacgggggtyggggtctgaggctggctagggagccgtgggagtgagctgctcaccccagtcagacccctgttgggtttcataggagctggctgctgaatgtaagagtgca

SEQ ID NO: 479287 - DNA, 201 bp, Homo sapiens
gacacccgatcctgtcctttattcctggctcagcttgggaggaggaaggggctccaggccagggcagctggccaagctggccttcctctagggcaccgcaygccccttccccctcgcccacgtctacacagtcaccatcacaaggctcaagtgcccagtcactggcttccaaagaaggccacagaacgtattttcttcttg

SEQ ID NO: 479288 - DNA, 201 bp, Homo sapiens
gccccactctttcctccctttatcctattctgaggagctcaggacccagccccagccttggagcccagaggatcaggccagggattaaacaactggattcygtaattctgaagccactcttgccttctcacctactcccctaccgcaagctagccaggaagggggggcctgagccccaaggggatccccaggctgatcact

SEQ ID NO: 479289 - DNA, 201 bp, Homo sapiens
tagccaccacacccagctaatttttgtattttcagtagagatagggttccaccaagttagccaaggctggtctcaaactcctgacctcaactggtccaccygccttggccttccaaagtgttgggattacaggcatgagccaccacgcccagccaggacttgagtttatagtgaggtttctccattgataacagccttttc

SEQ ID NO: 479290 - DNA, 201 bp, Homo sapiens
caaagtgttgggattacaggcatgagccaccacgcccagccaggacttgagtttatagtgaggtttctccattgataacagccttttcccttcatcactcrgggagcactgtcatcccttagactttgaccaaagaggacagacttaggggatgggcagtccaacatcttcgtggctgaaagtcagctgccaaaggagcat

SEQ ID NO: 479291 - DNA, 201 bp, Homo sapiens
tggtggagaggcgcatattacctatgggcagaagaggtgttcctgttgaggaagaggcagaaaagagagagcactccattctctaggtccctggcccctgytccacccaggacttgagtttatttatttatttatttatttatttgagacacagtcttgctctgtcacccaggctggagtgcagtggcgtgatctcagctc

SEQ ID NO: 479292 - DNA, 201 bp, Homo sapiens
ggaggggtctgtggtgtgtgaggaagcacacagccactgctcaaatcctgcatagttgctctatggtggtgtgggcccagtgtggcctgatttgatgaaattttttttttttttgaggcgaagtcttgctctgtagttaccaggctggagtgcagtggcgtgatcttggctcactgcaacctccgccttctgggttcaagc

SEQ ID NO: 479293 - DNA, 201 bp, Homo sapiens
caggtgtgagccaccacgcccagctgatcttatgatttctttgagagaagtggggagtctgattttatgtgacacccccccactcccattcactaaaatgwcagctccatgagggcaagtattttatctgttttattctctggtatggcttgatcccataagcactgaaaagatagttattgaataaatgaaactttccag

SEQ ID NO: 479294 - DNA, 201 bp, Homo sapiens
aagctattctcctgcctcagcctcctgagtagctgggactacaggcgggcaccaccatgcccagctaattttttttgtatttagtagagatggggtttcaycatgttggccaggatggtctgtatcgcctaacctcgtgatccgcctgccttggtctcccagagtgctgggattacaggtgtgagccaccacgcccagctg

SEQ ID NO: 479295 - DNA, 201 bp, Homo sapiens
ttattttattttttagagacagaatcttgcgatgttgtccaggctggtcttgaactcttgggctaaggcagtcttcccatctcagcctcccaaagtgctgrgattacaggcatgagtcactgtgcccagccgctcaattttgtcatggccgtggctgctgctgctgctgtcgttgctgttgttattattaatcttgagtcg

SEQ ID NO: 479296 - DNA, 201 bp, Homo sapiens
cttgaccccatgttatgggaggagcaggggtctgccccgggggctggtaccttagaagcctgtagttattctggttggatatcgtgtggggtcccgagctytcactcaacccatacaactcgcctataggtatgtccaagcttagaaagaactcggcagtctcttggttgaggggcgcagtcccactgataaaagagtgac

SEQ ID NO: 479297 - DNA, 201 bp, Homo sapiens
agtctcgctctgtcgcccaggctggagtgcagtggcgcgatctcggctcactgcaggctcggcctcctgggttcacgccattctcctgcctcagcctcccrcgtagctgggactaacaggcacctgccaccacgcctggctgatttttttggtatttttagtagagatggggtttcagcatgttagccaggatggtctgga

SEQ ID NO: 479298 - DNA, 201 bp, Homo sapiens
ttaggccacgcccacttttcttgcaaggccccgccctcccctttccccagtgcccacctcccacacttacagagtacaagttgttgttcttcttcattggyagtctgtactggatgatcgcttttaggggctctaggctgctctgtggaatctgaaagaaagttccctgtgggcttcatggcaacccagccctgggaaaga

SEQ ID NO: 479299 - DNA, 201 bp, Homo sapiens
ctgcttccaccctctgtctcttgtgaataacgccgctatgaccctgagtctacaaataactcttcatgtctctggctttccttttttttttttttttttgktaaatatccaggagtgagactgctgaatcatatggcaattctctgtttacattttttctttttttagaaatcgccagacttttccacagtggcggcacca

SEQ ID NO: 479300 - DNA, 201 bp, Homo sapiens
gggtttttgtaggtggatttagtgaaggatcttgagatgacatcatggcatcatcttggatttagggtgatccctaaatccaatgactggtgtttgttttygtttttgtttttgtttttgtttttttgagacagagtctcactctgttgcccaggctggaatgcagtggtgtgatcttggctcactgcaacctcactaccc

SEQ ID NO: 479301 - DNA, 201 bp, Homo sapiens
agtgaaggatcttgagatgacatcatggcatcatcttggatttagggtgatccctaaatccaatgactggtgtttgtttttgtttttgtttttgtttttgtttttttgagacagagtctcactctgttgcccaggctggaatgcagtggtgtgatcttggctcactgcaacctcactacccacaccttcatctcagtaatc

SEQ ID NO: 479302 - DNA, 201 bp, Homo sapiens
tgtgatgctatctttcaagcacgcctgcactccctctccttgaatgtgtactttgcaatgcaagtacttttatttgccataaacctcagtactttcactattttttttttttttttgagacagagtctcgctctgtcacccaggctggagtgcagtggcatgatctcggctcactgcaagctctacctcccgggttcacgc

SEQ ID NO: 479303 - DNA, 201 bp, Homo sapiens
ctcccacacttacagagtacaagttgttgttcttcttcattggcagtctgtactggatgatcgcttttaggggctctaggctgctctgtggaatctgaaaraaagttccctgtgggcttcatggcaacccagccctgggaaagactaaagctgggttagatgtcctaagtaagctctctccagcaactctagcctcttttt

SEQ ID NO: 479304 - DNA, 201 bp, Homo sapiens
atcgcttgaggccaggagttcgagaccagcctggctggcatggtgaaaccccatctctactaaaaatacaaaaattagctgggcatggtggcgcgtgcctrtaatcccagcactttgagaggtcgaggcgggtggatcacctgaggtcagaagttcaagaccagcctggctggtatggcgaaaccccatctctactaaaaa

SEQ ID NO: 479305 - DNA, 201 bp, Homo sapiens
cagatagtgaggaccaactgtactaactcattaaaaagtaaaagcccgccaaatagttgaggagggccattgatgtggtttggatatttgtccctgcccamatctcatgttgcactgtaatcccctgtgctggaggtggggcctggtggaggtgtttgggtcatggcaggggggcggatccctcatggcttggggctgtct

SEQ ID NO: 479306 - DNA, 201 bp, Homo sapiens
atagagctatagtaaggaggttggattttatttccaagatgaggagctggggaccagttagctgaaggtggcagcctccctctcctggtccctggctggtytcatagaccctctgaccttcagaaaaggacctgtctcttcagagcccacacagtcccagatgctaacaagggaccagcctccaaatgtcatggccactca

SEQ ID NO: 479307 - DNA, 201 bp, Homo sapiens
atattgattttagcccagtgagaccattttcaaacttctgaccaccagaactataagataataaatggaccaggcgcgcttgcttatgcctgtaatcccascattttgggaggctgaggcaagcagatcacttgagttcaagagttcaggaccagccttgccaacatggtgaaatcccgtctctactaaaaatacaaaaat

SEQ ID NO: 479308 - DNA, 201 bp, Homo sapiens
acagttgttggtttgttgtgtgtttctcactaccacccagtaacgggcaagtgagagaaagtccaagagaccctcttggagaattgggtgtgtaaccttgmgtttgttcaactgaacctggtctactggggaggtggtagatggcaatggtagagtaggcagctgtgttggaaggaaattgcacatccacctatgatggga

SEQ ID NO: 479309 - DNA, 201 bp, Homo sapiens
tgtcgtggactctgaatctgtccgaggacatggtcttcaaagtatctttgttttccttgtcactgtctgggggcatctagtttgctgggcttgggcagacrgatcttcaaacgaaattacagtgggcagcaggggtgggagggtccagcagggaggcacaggattcccaccgagttatgggggtggccagggaaggcttct

SEQ ID NO: 479310 - DNA, 201 bp, Homo sapiens
ttgatgtggtttggatatttgtccctgcccaaatctcatgttgcactgtaatcccctgtgctggaggtggggcctggtggaggtgtttgggtcatggcagrggggcggatccctcatggcttggggctgtcttcacgatagtgtgttctcaaaagatctggtcatttaaaaatgtgtggcactccctctggcttgcaactg

SEQ ID NO: 479311 - DNA, 201 bp, Homo sapiens
cgcctgtaatcccggcttgggagactgagacatgagaatcgtttaacccggaggtggaggttgcagtgagttgagatcatgccactgccactgcactccakcctgggtgacagaacgagactccatttctaaataaataaataaatattgttttaagtcactaagtttctgttcatttgttgtggcattaacaggaaacta

SEQ ID NO: 479312 - DNA, 201 bp, Homo sapiens
ggattacaggcatgagccaccgcgcccggccgggatgctactttttccccttgactagacatgggcctcatagatgggcttctaaaggctcttggcttggkgccagtagtaggacccaaggactggagatgtatgttcagatagtcatcaacagacagcaggctggttcatgcctgtaatcccaacacttttgggaggccg

SEQ ID NO: 479313 - DNA, 201 bp, Homo sapiens
tgggcggatcacgaggtcaggagtttgagaccagcttgtccaatatggtgaaaccgtctctactaaaaaatgcaaaaattagccgggcgtggtggcgcgcrcttggagtcccagctactctggaggctgaagcaggagaattgcttgaacccaggaggcggaggttgcagtgagccgagatcgcggcactgtactccagcc

SEQ ID NO: 479314 - DNA, 201 bp, Homo sapiens
accagtgaaactactgatgcccactgatctgaaggaccccacgggagctgacttaccaaagaatgcagcttccacatccgatgatttcatcccctttaccycaaccaatcaatgactctaattttccagcccttcacccccaaagatccccttaaaaccccagcccagaattcctcaaagagagatttgagggttccttcc

SEQ ID NO: 479315 - DNA, 201 bp, Homo sapiens
ggccgggatgctactttttccccttgactagacatgggcctcatagatgggcttctaaaggctcttggcttggtgccagtagtaggacccaaggactggaratgtatgttcagatagtcatcaacagacagcaggctggttcatgcctgtaatcccaacacttttgggaggccgacgccggcagatcacttgaggtcagga

SEQ ID NO: 479316 - DNA, 201 bp, Homo sapiens
gaggtacccctgggtgactttggcaggcagtgctgggtaggggtttaccgaaaggattttctgtaactgttgatcattctcaaccagcaagatgttcactytggcatgagtgatgacatattgacaaacctcggcagagttggtggcataaataccaacacaaagacccctgggaaaagaaaacaaattcgtgtgtgcatc

SEQ ID NO: 479317 - DNA, 201 bp, Homo sapiens
atccaagccaagggatgtcttgactttgctgaacacgagagtcttagccatgcggtagctcacgggagtattatatttcctgtgaataagaatgccgtcargtggagaagggctgatgggacccactggagaaggctgagcctcctcaccaactaccctcccagccctctggatgctccacctaccccaacatcttttttg

SEQ ID NO: 479318 - DNA, 201 bp, Homo sapiens
cagtgctgggtaggggtttaccgaaaggattttctgtaactgttgatcattctcaaccagcaagatgttcactttggcatgagtgatgacatattgacaarcctcggcagagttggtggcataaataccaacacaaagacccctgggaaaagaaaacaaattcgtgtgtgcatccacacacaccttaaaggcagaatggtc

SEQ ID NO: 479319 - DNA, 201 bp, Homo sapiens
gagttacagaatttctttatctatcttagataccagtcctttgttagaaattcgagttttaagaatattttctccaagtatgcagtttgcctgttcaccatttttttttttttttttttgagacagggtctagctcggtcacccaggctggcctgcagtggtgcaatctcagctcactgcaacctcaacctcctggattca

SEQ ID NO: 479320 - DNA, 201 bp, Homo sapiens
cgagtcaggagaatcccttgaacctgggaggtgaaggttgtagtgagccaagatagcaccattggactccagcctgggtgacagagcaaaactgtatctcaaaaaaaaaaaaataagtttaattttaaaaataagtaaagtgaacttgaatgagcctacggagtttacacacacaaagtagatcaatcagcaggacaaagc

SEQ ID NO: 479321 - DNA, 201 bp, Homo sapiens
cccaaaatatccctcaaggctagttccacttctttccctgggctcaggatgaaggctcccataaaccttgtcatgcacagtccagggttcaaggaacctakcacacttgttgagagaaggggcttgttgtgtatagtctatgatgtacaatggtttagacactcctggttcagatctcagttcagagcttcccttgctctg

SEQ ID NO: 479322 - DNA, 201 bp, Homo sapiens
caactgaatctcaccatcagaacagctgagagcagctccatcaaagcagtcagtggtacatgtgatcaatttgttttttgtatttctgggctacaaaatgkctcttaagtttcatcattggacctatcgagaaaggagaaatcaattgagttgtggagataaaagaaaattacacacacccatgcatgaccaggcaacaga

SEQ ID NO: 479323 - DNA, 201 bp, Homo sapiens
acaactgttcatcttgttggtgtcttttaataagcagaagtttttaatgctaataaagtcctatttggcaactttttctcttatgctttttgctctctgtrtcctgtctaagaaatctttgactacccccaggttgtgaaaccattccgtgcttttctttttctagaagctttagaatttaacttgcatgatttagtctgt

SEQ ID NO: 479324 - DNA, 201 bp, Homo sapiens
ctcagacagttgaaatcacagctggtcacaatttgaacccagaactgatttcagagtccaagccctccccatcacactaaataaaggacaaagtatttctrtcaagccaaaaatcaagacatgggaccctgaagtgctttattatcaggacttattggaagggtttcccagttgcttccaggcaggtgagttgatttgggg

SEQ ID NO: 479325 - DNA, 201 bp, Homo sapiens
agaacagctgagagcagctccatcaaagcagtcagtggtacatgtgatcaatttgttttttgtatttctgggctacaaaatgtctcttaagtttcatcatyggacctatcgagaaaggagaaatcaattgagttgtggagataaaagaaaattacacacacccatgcatgaccaggcaacagagtcccatgcctggggcta

SEQ ID NO: 479326 - DNA, 201 bp, Homo sapiens
gaggccaaattgttggtcaacatttattgaaactgatttttctagtggctttcagggaggaaaattgtacgattttgttcatgataaagagcgtgcttgayacaagaatcaagcagttgttctggattctagatttgcagtaatgttttatgaactctaaaagtttccatcagtgagtgcaggaacacagcaggtgaaaac

SEQ ID NO: 479327 - DNA, 201 bp, Homo sapiens
gcagtttttagtagacttcccaataggcttccctggagtcatgacttgaaggtccttagaaagatatacagtgattttattgctttgaaacgtatggcagrttcttctagggagcacctctccaacagacgaacaatcaagaaactgaccaatgaggaatgtggcttcttaaaaacagcagggagagcttctacctagagc

SEQ ID NO: 479328 - DNA, 201 bp, Homo sapiens
catactttctataaagcctgtagaaccatgagctaattaattaaacctcttttctttataaatgaccccatctcaggtatttctttataacagtgcaatartggcctagtacagcaatcaaatatgacattagccttatcggcattgcattaattttttttttttgcaaggagaatgtcattttaaatttctggtgtattt

SEQ ID NO: 479329 - DNA, 201 bp, Homo sapiens
atcccagcactttgagaggtcgaggcgggtggatcacctgaggtcagaagttcaagaccagcctggctggtatggcgaaaccccatctctactaaaaatayaaaaattaggccgagtatggcggctcacgcctgtaatcccagcactttgggaggccaaggcgggtggatcacgaggtcaggagattgagactatcctggc

SEQ ID NO: 479330 - DNA, 201 bp, Homo sapiens
attgagactatcctggctaatgtggtgaaaccccatctctactaaaaaatacaaaaaattagccgggcatggtggcaggcacctgtagtcccagctactcrggaggctgaggcaggagaatggtgtgaacctgggaggcgaagcttgcagtgagccgagattgcgcctgggcaacagagcaagactctgtctcaaaaaaaa

SEQ ID NO: 479331 - DNA, 201 bp, Homo sapiens
gaactgagtggctgaggctcatgaatcagagggaaattttcgccaattaacctttgtatcttttggtgccttgtgaattttgtaccacatgtatgtatgtstgttacctattcagaatgaatggttgaacaaaggagaatgaatgaatgaatcttaccttgatcaaggattttgcagccttccgacaagcctcatagtact

SEQ ID NO: 479332 - DNA, 201 bp, Homo sapiens
acatgcacacacacatatggacacacatggtcacacacaccctcatacagacacacaattacacacccacactcacacattcacatacatatgcacacacwtgctcacactctcaccctcgtacagacacaattatatatatgcacacatatgcacgcactgctcacacacaccctcatatggacacatgactacatatat

SEQ ID NO: 479333 - DNA, 201 bp, Homo sapiens
acacacatggtcacacacaccctcatacagacacacaattacacacccacactcacacattcacatacatatgcacacacttgctcacactctcaccctcrtacagacacaattatatatatgcacacatatgcacgcactgctcacacacaccctcatatggacacatgactacatatattcattcccacacacgtatat

SEQ ID NO: 479334 - DNA, 201 bp, Homo sapiens
tttatttattttttcattccccgccccgccaaattttaatagtcaaaaggattgtataccaaatactttcttatccaacacctagattctacaactgctarcgttttaccatattttatcacacatctatcctgctgtctttgttatgtccattttttttttctttctttctttttttctggagacacggtcttgctctgt

SEQ ID NO: 479335 - DNA, 201 bp, Homo sapiens
cacctcagcctcccaaataactggaactacaggcaaacaccaccatgcctagctaatttattttttaatgttttgtagagatggggttctactgtgtttcygaggctgatctcaaactcctgggctcaaacaatcctcctcccttagtttctcaaagtgctgggattacaggcatgagccaccgcacctggccccatctta

SEQ ID NO: 479336 - DNA, 201 bp, Homo sapiens
atttctggtgtatttaaaaaatggaactcaaaagggtctctggcctgcctctgagtatctagaagcttaagagacactgggagttttgttgctcctgataygctgtttctgtccaggctgggagatgttccctctcccactctccctactaatatttcggagacacactatgaatatgctttatcagctctggtctgctta

SEQ ID NO: 479337 - DNA, 201 bp, Homo sapiens
agaagcttaagagacactgggagttttgttgctcctgatatgctgtttctgtccaggctgggagatgttccctctcccactctccctactaatatttcggrgacacactatgaatatgctttatcagctctggtctgcttataatatgactgttggatgggagaggaataaactatcttctttaagtttacttaacttact

SEQ ID NO: 479338 - DNA, 201 bp, Homo sapiens
cagctgagagcagctccatcaaagcagtcagtggtacatgtgatcaatttgttttttgtatttctgggctacaaaatgtctcttaagtttcatcattggacctatcgagaaaggagaaatcaattgagttgtggagataaaagaaaattacacacacccatgcatgaccaggcaacagagtcccatgcctggggctaggct

SEQ ID NO: 479339 - DNA, 201 bp, Homo sapiens
atctaggatcgggacctccagacccagggggatgatcctagctccacaccttgctatacagcactagctgagacagtgtattaagggagtggaggctgacytttgcaatcttccattgctgaccttccatgggccaggccctctgccagaattgggccctctactctccccattttacagttgggcaaactgacacacagt

SEQ ID NO: 479340 - DNA, 201 bp, Homo sapiens
acccggtattccaaaatatcatctcaacatgtaatcaaaattttaaaatactgatgagatattgtatattctatttttttttttttttttttttttttggkgctgtgcttttgaagcccagtgtgttttatgtattacagcacatcttggtttggacagaccacatagtggccagtggctgccatattggacagcactggt

SEQ ID NO: 479341 - DNA, 201 bp, Homo sapiens
gctctggtctgcttataatatgactgttggatgggagaggaataaactatcttctttaagtttacttaacttactacaacagaaaactcctccctaatgayggaattagtcaagagtcataccttgactcttgagttaaccaagagtgactgtgttgatgataaccattaactcaaaccgaggactttctggagttagata

SEQ ID NO: 479342 - DNA, 201 bp, Homo sapiens
ctggtagagtagagacagcatgagttgaagcctgctactcagaatccactgcaactaagagtgtgtgtgtgtgtgtgtgtgtgtgtgtgtgtgtgtgtgtrtgtatgtgtgtatgtgtgtgttttctgcagttccagtcacagatctgcctgccacacagtggagccctctcttggactctgaatgcatagcccagcaaag

SEQ ID NO: 479343 - DNA, 201 bp, Homo sapiens
cccgccaccacacctggctaattttttgtattttttagtagagacggggtttcaccatcttagtcaggatggtctcgatctcctgacctcgtgatccgccygtctcggcctcccacagtgctgggattacgggtgtgagccaccgcacccggcccactttcactattttctgacttgtttcttgaattcactctcgatggt

SEQ ID NO: 479344 - DNA, 201 bp, Homo sapiens
tgactttggcaagcacaagggaccagtgagcctctggggggccgcaggatccctgaagatctaacccttggcatgggtaacccctaaaggaggaggagaaygcagcccaccaaagccccccttgggacaaaggaaatgtgggtgtggcacaaaccactggagtgggcagcacccatgcctgggaaaagacatggagaaggg
